United States Patent Application Publication US 2020/0095579 A1 - sequence listing, part 6

SEQ ID NO: 65719 - DNA, 20 bp, Artificial Sequence
  Description of Artificial Sequence: Synthetic oligonucleotide
  Target: LAMA2; (-) strand; PAM type: NRG; PAM sequence: TAG
taataaggcagtcatcctca

SEQ ID NO: 65720 - DNA, 20 bp, Artificial Sequence
  Description of Artificial Sequence: Synthetic oligonucleotide
  Target: LAMA2; (-) strand; PAM type: NRG; PAM sequence: CAG
tactgaaacttgtaataagg

SEQ ID NO: 65721 - DNA, 20 bp, Artificial Sequence
  Description of Artificial Sequence: Synthetic oligonucleotide
  Target: LAMA2; (-) strand; PAM type: NRG; PAM sequence: AGG
ttgtactgaaacttgtaata

SEQ ID NO: 65722 - DNA, 20 bp, Artificial Sequence
  Description of Artificial Sequence: Synthetic oligonucleotide
  Target: LAMA2; (-) strand; PAM type: NRG; PAM sequence: AAG
attgtactgaaacttgtaat

SEQ ID NO: 65723 - DNA, 20 bp, Artificial Sequence
  Description of Artificial Sequence: Synthetic oligonucleotide
  Target: LAMA2; (-) strand; PAM type: NRG; PAM sequence: TAG
ataaccaaaaaatatatatg

SEQ ID NO: 65724 - DNA, 20 bp, Artificial Sequence
  Description of Artificial Sequence: Synthetic oligonucleotide
  Target: LAMA2; (-) strand; PAM type: NRG; PAM sequence: AAG
ggtaaatagacaaaatggcc

SEQ ID NO: 65725 - DNA, 20 bp, Artificial Sequence
  Description of Artificial Sequence: Synthetic oligonucleotide
  Target: LAMA2; (-) strand; PAM type: NRG; PAM sequence: TGG
agataggtaaatagacaaaa

SEQ ID NO: 65726 - DNA, 20 bp, Artificial Sequence
  Description of Artificial Sequence: Synthetic oligonucleotide
  Target: LAMA2; (-) strand; PAM type: NRG; PAM sequence: TAG
tttataggtagataggtaaa

SEQ ID NO: 65727 - DNA, 20 bp, Artificial Sequence
  Description of Artificial Sequence: Synthetic oligonucleotide
  Target: LAMA2; (-) strand; PAM type: NRG; PAM sequence: AGG
gctgaagtttataggtagat

SEQ ID NO: 65728 - DNA, 20 bp, Artificial Sequence
  Description of Artificial Sequence: Synthetic oligonucleotide
  Target: LAMA2; (-) strand; PAM type: NRG; PAM sequence: TAG
tgctgaagtttataggtaga

SEQ ID NO: 65729 - DNA, 20 bp, Artificial Sequence
  Description of Artificial Sequence: Synthetic oligonucleotide
  Target: LAMA2; (-) strand; PAM type: NRG; PAM sequence: TAG
aaaatgctgaagtttatagg

SEQ ID NO: 65730 - DNA, 20 bp, Artificial Sequence
  Description of Artificial Sequence: Synthetic oligonucleotide
  Target: LAMA2; (-) strand; PAM type: NRG; PAM sequence: AGG
caaaaaatgctgaagtttat

SEQ ID NO: 65731 - DNA, 20 bp, Artificial Sequence
  Description of Artificial Sequence: Synthetic oligonucleotide
  Target: LAMA2; (-) strand; PAM type: NRG; PAM sequence: TAG
acaaaaaatgctgaagttta

SEQ ID NO: 65732 - DNA, 20 bp, Artificial Sequence
  Description of Artificial Sequence: Synthetic oligonucleotide
  Target: LAMA2; (-) strand; PAM type: NRG; PAM sequence: AAG
tacccaaacaaaaaatgctg

SEQ ID NO: 65733 - DNA, 20 bp, Artificial Sequence
  Description of Artificial Sequence: Synthetic oligonucleotide
  Target: LAMA2; (-) strand; PAM type: NRG; PAM sequence: GAG
aaacaagaaggaaaacaaga

SEQ ID NO: 65734 - DNA, 20 bp, Artificial Sequence
  Description of Artificial Sequence: Synthetic oligonucleotide
  Target: LAMA2; (-) strand; PAM type: NRG; PAM sequence: GAG
ccaaacaagaaggaaaacaa

SEQ ID NO: 65735 - DNA, 20 bp, Artificial Sequence
  Description of Artificial Sequence: Synthetic oligonucleotide
  Target: LAMA2; (-) strand; PAM type: NRG; PAM sequence: AAG
ttccaaacaagaaggaaaac

SEQ ID NO: 65736 - DNA, 20 bp, Artificial Sequence
  Description of Artificial Sequence: Synthetic oligonucleotide
  Target: LAMA2; (-) strand; PAM type: NRG; PAM sequence: AGG
acagatcattccaaacaaga

SEQ ID NO: 65737 - DNA, 20 bp, Artificial Sequence
  Description of Artificial Sequence: Synthetic oligonucleotide
  Target: LAMA2; (-) strand; PAM type: NRG; PAM sequence: AAG
aacagatcattccaaacaag

SEQ ID NO: 65738 - DNA, 20 bp, Artificial Sequence
  Description of Artificial Sequence: Synthetic oligonucleotide
  Target: LAMA2; (-) strand; PAM type: NRG; PAM sequence: AAG
tcaaacagatcattccaaac

SEQ ID NO: 65739 - DNA, 20 bp, Artificial Sequence
  Description of Artificial Sequence: Synthetic oligonucleotide
  Target: LAMA2; (-) strand; PAM type: NRG; PAM sequence: CAG
gttaaaaacacagtctcaaa

SEQ ID NO: 65740 - DNA, 20 bp, Artificial Sequence
  Description of Artificial Sequence: Synthetic oligonucleotide
  Target: LAMA2; (-) strand; PAM type: NRG; PAM sequence: CAG
atatacttttgttaaaaaca

SEQ ID NO: 65741 - DNA, 20 bp, Artificial Sequence
  Description of Artificial Sequence: Synthetic oligonucleotide
  Target: LAMA2; (-) strand; PAM type: NRG; PAM sequence: AAG
gtttagcgaaaaataaggtt

SEQ ID NO: 65742 - DNA, 20 bp, Artificial Sequence
  Description of Artificial Sequence: Synthetic oligonucleotide
  Target: LAMA2; (-) strand; PAM type: NRG; PAM sequence: AGG
ttgttgtttagcgaaaaata

SEQ ID NO: 65743 - DNA, 20 bp, Artificial Sequence
  Description of Artificial Sequence: Synthetic oligonucleotide
  Target: LAMA2; (-) strand; PAM type: NRG; PAM sequence: AAG
gttgttgtttagcgaaaaat

SEQ ID NO: 65744 - DNA, 20 bp, Artificial Sequence
  Description of Artificial Sequence: Synthetic oligonucleotide
  Target: LAMA2; (-) strand; PAM type: NRG; PAM sequence: TAG
gggtctttcttgttgttgtt

SEQ ID NO: 65745 - DNA, 20 bp, Artificial Sequence
  Description of Artificial Sequence: Synthetic oligonucleotide
  Target: LAMA2; (-) strand; PAM type: NRG; PAM sequence: GGG
ggacacttttcaaaattagg

SEQ ID NO: 65746 - DNA, 20 bp, Artificial Sequence
  Description of Artificial Sequence: Synthetic oligonucleotide
  Target: LAMA2; (-) strand; PAM type: NRG; PAM sequence: GGG
tggacacttttcaaaattag

SEQ ID NO: 65747 - DNA, 20 bp, Artificial Sequence
  Description of Artificial Sequence: Synthetic oligonucleotide
  Target: LAMA2; (-) strand; PAM type: NRG; PAM sequence: GGG
atggacacttttcaaaatta

SEQ ID NO: 65748 - DNA, 20 bp, Artificial Sequence
  Description of Artificial Sequence: Synthetic oligonucleotide
  Target: LAMA2; (-) strand; PAM type: NRG; PAM sequence: AGG
gatggacacttttcaaaatt

SEQ ID NO: 65749 - DNA, 20 bp, Artificial Sequence
  Description of Artificial Sequence: Synthetic oligonucleotide
  Target: LAMA2; (-) strand; PAM type: NRG; PAM sequence: TAG
tgatggacacttttcaaaat

SEQ ID NO: 65750 - DNA, 20 bp, Artificial Sequence
  Description of Artificial Sequence: Synthetic oligonucleotide
  Target: LAMA2; (-) strand; PAM type: NRG; PAM sequence: TGG
ctgccaaacagtgatattga

SEQ ID NO: 65751 - DNA, 20 bp, Artificial Sequence
  Description of Artificial Sequence: Synthetic oligonucleotide
  Target: LAMA2; (-) strand; PAM type: NRG; PAM sequence: CAG
ctttatgataaactgccaaa

SEQ ID NO: 65752 - DNA, 20 bp, Artificial Sequence
  Description of Artificial Sequence: Synthetic oligonucleotide
  Target: LAMA2; (-) strand; PAM type: NRG; PAM sequence: TAG
taacattatttattcaatta

SEQ ID NO: 65753 - DNA, 20 bp, Artificial Sequence
  Description of Artificial Sequence: Synthetic oligonucleotide
  Target: LAMA2; (-) strand; PAM type: NRG; PAM sequence: TAG
gagatttcttaagctgatcc

SEQ ID NO: 65754 - DNA, 20 bp, Artificial Sequence
  Description of Artificial Sequence: Synthetic oligonucleotide
  Target: LAMA2; (-) strand; PAM type: NRG; PAM sequence: AAG
tcacattttggagatttctt

SEQ ID NO: 65755 - DNA, 20 bp, Artificial Sequence
  Description of Artificial Sequence: Synthetic oligonucleotide
  Target: LAMA2; (-) strand; PAM type: NRG; PAM sequence: GAG
ttatgtaggctcacattttg

SEQ ID NO: 65756 - DNA, 20 bp, Artificial Sequence
  Description of Artificial Sequence: Synthetic oligonucleotide
  Target: LAMA2; (-) strand; PAM type: NRG; PAM sequence: TGG
aattatgtaggctcacattt

SEQ ID NO: 65757 - DNA, 20 bp, Artificial Sequence
  Description of Artificial Sequence: Synthetic oligonucleotide
  Target: LAMA2; (-) strand; PAM type: NRG; PAM sequence: AGG
tcacttggtctcaattatgt

SEQ ID NO: 65758 - DNA, 20 bp, Artificial Sequence
  Description of Artificial Sequence: Synthetic oligonucleotide
  Target: LAMA2; (-) strand; PAM type: NRG; PAM sequence: TAG
gtcacttggtctcaattatg

SEQ ID NO: 65759 - DNA, 20 bp, Artificial Sequence
  Description of Artificial Sequence: Synthetic oligonucleotide
  Target: LAMA2; (-) strand; PAM type: NRG; PAM sequence: TGG
acaccaaatgaaatgtcact

SEQ ID NO: 65760 - DNA, 20 bp, Artificial Sequence
  Description of Artificial Sequence: Synthetic oligonucleotide
  Target: LAMA2; (-) strand; PAM type: NRG; PAM sequence: TAG
aatataataccatttttaca

SEQ ID NO: 65761 - DNA, 20 bp, Artificial Sequence
  Description of Artificial Sequence: Synthetic oligonucleotide
  Target: LAMA2; (-) strand; PAM type: NRG; PAM sequence: AAG
aaagatattaaactatcaga

SEQ ID NO: 65762 - DNA, 20 bp, Artificial Sequence
  Description of Artificial Sequence: Synthetic oligonucleotide
  Target: LAMA2; (-) strand; PAM type: NRG; PAM sequence: CAG
gttaaaagatattaaactat

SEQ ID NO: 65763 - DNA, 20 bp, Artificial Sequence
  Description of Artificial Sequence: Synthetic oligonucleotide
  Target: LAMA2; (-) strand; PAM type: NRG; PAM sequence: AAG
aatctattggcacaagttaa

SEQ ID NO: 65764 - DNA, 20 bp, Artificial Sequence
  Description of Artificial Sequence: Synthetic oligonucleotide
  Target: LAMA2; (-) strand; PAM type: NRG; PAM sequence: AAG
ctaaaacaatctattggcac

SEQ ID NO: 65765 - DNA, 20 bp, Artificial Sequence
  Description of Artificial Sequence: Synthetic oligonucleotide
  Target: LAMA2; (-) strand; PAM type: NRG; PAM sequence: TGG
ttcttgctaaaacaatctat

SEQ ID NO: 65766 - DNA, 20 bp, Artificial Sequence
  Description of Artificial Sequence: Synthetic oligonucleotide
  Target: LAMA2; (-) strand; PAM type: NRG; PAM sequence: AAG
gggtaaaagaaaataaaatt

SEQ ID NO: 65767 - DNA, 20 bp, Artificial Sequence
  Description of Artificial Sequence: Synthetic oligonucleotide
  Target: LAMA2; (-) strand; PAM type: NRG; PAM sequence: AAG
agaatgtttgaatcgggtaa

SEQ ID NO: 65768 - DNA, 20 bp, Artificial Sequence
  Description of Artificial Sequence: Synthetic oligonucleotide
  Target: LAMA2; (-) strand; PAM type: NRG; PAM sequence: GGG
aaggcaagaatgtttgaatc

SEQ ID NO: 65769 - DNA, 20 bp, Artificial Sequence
  Description of Artificial Sequence: Synthetic oligonucleotide
  Target: LAMA2; (-) strand; PAM type: NRG; PAM sequence: CGG
caaggcaagaatgtttgaat

SEQ ID NO: 65770 - DNA, 20 bp, Artificial Sequence
  Description of Artificial Sequence: Synthetic oligonucleotide
  Target: LAMA2; (-) strand; PAM type: NRG; PAM sequence: AAG
ccagcctctaagatcaaggc

SEQ ID NO: 65771 - DNA, 20 bp, Artificial Sequence
  Description of Artificial Sequence: Synthetic oligonucleotide
  Target: LAMA2; (-) strand; PAM type: NRG; PAM sequence: AGG
ttctccagcctctaagatca

SEQ ID NO: 65772 - DNA, 20 bp, Artificial Sequence
  Description of Artificial Sequence: Synthetic oligonucleotide
  Target: LAMA2; (-) strand; PAM type: NRG; PAM sequence: AAG
attctccagcctctaagatc

SEQ ID NO: 65773 - DNA, 20 bp, Artificial Sequence
  Description of Artificial Sequence: Synthetic oligonucleotide
  Target: LAMA2; (-) strand; PAM type: NRG; PAM sequence: AAG
ctgcctattctccagcctct

SEQ ID NO: 65774 - DNA, 20 bp, Artificial Sequence
  Description of Artificial Sequence: Synthetic oligonucleotide
  Target: LAMA2; (-) strand; PAM type: NRG; PAM sequence: CAG
aggtcatgctgcctattctc

SEQ ID NO: 65775 - DNA, 20 bp, Artificial Sequence
  Description of Artificial Sequence: Synthetic oligonucleotide
  Target: LAMA2; (-) strand; PAM type: NRG; PAM sequence: AGG
gaaagaacggaagagatgag

SEQ ID NO: 65776 - DNA, 20 bp, Artificial Sequence
  Description of Artificial Sequence: Synthetic oligonucleotide
  Target: LAMA2; (-) strand; PAM type: NRG; PAM sequence: GAG
ggaaagaacggaagagatga

SEQ ID NO: 65777 - DNA, 20 bp, Artificial Sequence
  Description of Artificial Sequence: Synthetic oligonucleotide
  Target: LAMA2; (-) strand; PAM type: NRG; PAM sequence: GAG
gaggaaagaacggaagagat

SEQ ID NO: 65778 - DNA, 20 bp, Artificial Sequence
  Description of Artificial Sequence: Synthetic oligonucleotide
  Target: LAMA2; (-) strand; PAM type: NRG; PAM sequence: GAG
aggctgaggaaagaacggaa

SEQ ID NO: 65779 - DNA, 20 bp, Artificial Sequence
  Description of Artificial Sequence: Synthetic oligonucleotide
  Target: LAMA2; (-) strand; PAM type: NRG; PAM sequence: AAG
taaggctgaggaaagaacgg

SEQ ID NO: 65780 - DNA, 20 bp, Artificial Sequence
  Description of Artificial Sequence: Synthetic oligonucleotide
  Target: LAMA2; (-) strand; PAM type: NRG; PAM sequence: CGG
cactaaggctgaggaaagaa

SEQ ID NO: 65781 - DNA, 20 bp, Artificial Sequence
  Description of Artificial Sequence: Synthetic oligonucleotide
  Target: LAMA2; (-) strand; PAM type: NRG; PAM sequence: AAG
cccttcactaaggctgagga

SEQ ID NO: 65782 - DNA, 20 bp, Artificial Sequence
  Description of Artificial Sequence: Synthetic oligonucleotide
  Target: LAMA2; (-) strand; PAM type: NRG; PAM sequence: AGG
gacacccttcactaaggctg

SEQ ID NO: 65783 - DNA, 20 bp, Artificial Sequence
  Description of Artificial Sequence: Synthetic oligonucleotide
  Target: LAMA2; (-) strand; PAM type: NRG; PAM sequence: GAG
ggacacccttcactaaggct

SEQ ID NO: 65784 - DNA, 20 bp, Artificial Sequence
  Description of Artificial Sequence: Synthetic oligonucleotide
  Target: LAMA2; (-) strand; PAM type: NRG; PAM sequence: AGG
gaatgggacacccttcacta

SEQ ID NO: 65785 - DNA, 20 bp, Artificial Sequence
  Description of Artificial Sequence: Synthetic oligonucleotide
  Target: LAMA2; (-) strand; PAM type: NRG; PAM sequence: AAG
tgaatgggacacccttcact

SEQ ID NO: 65786 - DNA, 20 bp, Artificial Sequence
  Description of Artificial Sequence: Synthetic oligonucleotide
  Target: LAMA2; (-) strand; PAM type: NRG; PAM sequence: GGG
gtgtggataaatgggtgaat

SEQ ID NO: 65787 - DNA, 20 bp, Artificial Sequence
  Description of Artificial Sequence: Synthetic oligonucleotide
  Target: LAMA2; (-) strand; PAM type: NRG; PAM sequence: TGG
ggtgtggataaatgggtgaa

SEQ ID NO: 65788 - DNA, 20 bp, Artificial Sequence
  Description of Artificial Sequence: Synthetic oligonucleotide
  Target: LAMA2; (-) strand; PAM type: NRG; PAM sequence: GGG
ggctcatggtgtggataaat

SEQ ID NO: 65789 - DNA, 20 bp, Artificial Sequence
  Description of Artificial Sequence: Synthetic oligonucleotide
  Target: LAMA2; (-) strand; PAM type: NRG; PAM sequence: TGG
tggctcatggtgtggataaa

SEQ ID NO: 65790 - DNA, 20 bp, Artificial Sequence
  Description of Artificial Sequence: Synthetic oligonucleotide
  Target: LAMA2; (-) strand; PAM type: NRG; PAM sequence: TGG
ccacagtatggctcatggtg

SEQ ID NO: 65791 - DNA, 20 bp, Artificial Sequence
  Description of Artificial Sequence: Synthetic oligonucleotide
  Target: LAMA2; (-) strand; PAM type: NRG; PAM sequence: TGG
atgatccacagtatggctca

SEQ ID NO: 65792 - DNA, 20 bp, Artificial Sequence
  Description of Artificial Sequence: Synthetic oligonucleotide
  Target: LAMA2; (-) strand; PAM type: NRG; PAM sequence: TGG
tgagtggatgatccacagta

SEQ ID NO: 65793 - DNA, 20 bp, Artificial Sequence
  Description of Artificial Sequence: Synthetic oligonucleotide
  Target: LAMA2; (-) strand; PAM type: NRG; PAM sequence: CAG
gtggctgagtggatgatcca

SEQ ID NO: 65794 - DNA, 20 bp, Artificial Sequence
  Description of Artificial Sequence: Synthetic oligonucleotide
  Target: LAMA2; (-) strand; PAM type: NRG; PAM sequence: TGG
tgcaggagttggtggctgag

SEQ ID NO: 65795 - DNA, 20 bp, Artificial Sequence
  Description of Artificial Sequence: Synthetic oligonucleotide
  Target: LAMA2; (-) strand; PAM type: NRG; PAM sequence: GAG
acctgcaggagttggtggct

SEQ ID NO: 65796 - DNA, 20 bp, Artificial Sequence
  Description of Artificial Sequence: Synthetic oligonucleotide
  Target: LAMA2; (-) strand; PAM type: NRG; PAM sequence: TGG
gcagcacctgcaggagttgg

SEQ ID NO: 65797 - DNA, 20 bp, Artificial Sequence
  Description of Artificial Sequence: Synthetic oligonucleotide
  Target: LAMA2; (-) strand; PAM type: NRG; PAM sequence: TGG
gaggcagcacctgcaggagt

SEQ ID NO: 65798 - DNA, 20 bp, Artificial Sequence
  Description of Artificial Sequence: Synthetic oligonucleotide
  Target: LAMA2; (-) strand; PAM type: NRG; PAM sequence: GAG
gaaagaggcagcacctgcag

SEQ ID NO: 65799 - DNA, 20 bp, Artificial Sequence
  Description of Artificial Sequence: Synthetic oligonucleotide
  Target: LAMA2; (-) strand; PAM type: NRG; PAM sequence: AGG
tggaaagaggcagcacctgc

SEQ ID NO: 65800 - DNA, 20 bp, Artificial Sequence
  Description of Artificial Sequence: Synthetic oligonucleotide
  Target: LAMA2; (-) strand; PAM type: NRG; PAM sequence: CAG
ttggaaagaggcagcacctg

SEQ ID NO: 65801 - DNA, 20 bp, Artificial Sequence
  Description of Artificial Sequence: Synthetic oligonucleotide
  Target: LAMA2; (-) strand; PAM type: NRG; PAM sequence: CAG
gctgtaaaattggaaagagg

SEQ ID NO: 65802 - DNA, 20 bp, Artificial Sequence
  Description of Artificial Sequence: Synthetic oligonucleotide
  Target: LAMA2; (-) strand; PAM type: NRG; PAM sequence: AGG
gtggctgtaaaattggaaag

SEQ ID NO: 65803 - DNA, 20 bp, Artificial Sequence
  Description of Artificial Sequence: Synthetic oligonucleotide
  Target: LAMA2; (-) strand; PAM type: NRG; PAM sequence: GAG
agtggctgtaaaattggaaa

SEQ ID NO: 65804 - DNA, 20 bp, Artificial Sequence
  Description of Artificial Sequence: Synthetic oligonucleotide
  Target: LAMA2; (-) strand; PAM type: NRG; PAM sequence: AAG
gcagtggctgtaaaattgga

SEQ ID NO: 65805 - DNA, 20 bp, Artificial Sequence
  Description of Artificial Sequence: Synthetic oligonucleotide
  Target: LAMA2; (-) strand; PAM type: NRG; PAM sequence: TGG
gaaggcagtggctgtaaaat

SEQ ID NO: 65806 - DNA, 20 bp, Artificial Sequence
  Description of Artificial Sequence: Synthetic oligonucleotide
  Target: LAMA2; (-) strand; PAM type: NRG; PAM sequence: TGG
tagattctgaatgaaggcag

SEQ ID NO: 65807 - DNA, 20 bp, Artificial Sequence
  Description of Artificial Sequence: Synthetic oligonucleotide
  Target: LAMA2; (-) strand; PAM type: NRG; PAM sequence: CAG
atttagattctgaatgaagg

SEQ ID NO: 65808 - DNA, 20 bp, Artificial Sequence
  Description of Artificial Sequence: Synthetic oligonucleotide
  Target: LAMA2; (-) strand; PAM type: NRG; PAM sequence: AGG
aatatttagattctgaatga

SEQ ID NO: 65809 - DNA, 20 bp, Artificial Sequence
  Description of Artificial Sequence: Synthetic oligonucleotide
  Target: LAMA2; (-) strand; PAM type: NRG; PAM sequence: AAG
aaatatttagattctgaatg

SEQ ID NO: 65810 - DNA, 20 bp, Artificial Sequence
  Description of Artificial Sequence: Synthetic oligonucleotide
  Target: LAMA2; (-) strand; PAM type: NRG; PAM sequence: TAG
aaatcaagggcagaaatatt

SEQ ID NO: 65811 - DNA, 20 bp, Artificial Sequence
  Description of Artificial Sequence: Synthetic oligonucleotide
  Target: LAMA2; (-) strand; PAM type: NRG; PAM sequence: CAG
ggcagttcagaaatcaaggg

SEQ ID NO: 65812 - DNA, 20 bp, Artificial Sequence
  Description of Artificial Sequence: Synthetic oligonucleotide
  Target: LAMA2; (-) strand; PAM type: NRG; PAM sequence: GGG
agaggcagttcagaaatcaa

SEQ ID NO: 65813 - DNA, 20 bp, Artificial Sequence
  Description of Artificial Sequence: Synthetic oligonucleotide
  Target: LAMA2; (-) strand; PAM type: NRG; PAM sequence: AGG
cagaggcagttcagaaatca

SEQ ID NO: 65814 - DNA, 20 bp, Artificial Sequence
  Description of Artificial Sequence: Synthetic oligonucleotide
  Target: LAMA2; (-) strand; PAM type: NRG; PAM sequence: AAG
gcagaggcagttcagaaatc

SEQ ID NO: 65815 - DNA, 20 bp, Artificial Sequence
  Description of Artificial Sequence: Synthetic oligonucleotide
  Target: LAMA2; (-) strand; PAM type: NRG; PAM sequence: CAG
gactaactgcagaggcagtt

SEQ ID NO: 65816 - DNA, 20 bp, Artificial Sequence
  Description of Artificial Sequence: Synthetic oligonucleotide
  Target: LAMA2; (-) strand; PAM type: NRG; PAM sequence: CAG
cagaagactaactgcagagg

SEQ ID NO: 65817 - DNA, 20 bp, Artificial Sequence
  Description of Artificial Sequence: Synthetic oligonucleotide
  Target: LAMA2; (-) strand; PAM type: NRG; PAM sequence: AGG
cagcagaagactaactgcag

SEQ ID NO: 65818 - DNA, 20 bp, Artificial Sequence
  Description of Artificial Sequence: Synthetic oligonucleotide
  Target: LAMA2; (-) strand; PAM type: NRG; PAM sequence: GAG
gcagcagaagactaactgca

SEQ ID NO: 65819 - DNA, 20 bp, Artificial Sequence
  Description of Artificial Sequence: Synthetic oligonucleotide
  Target: LAMA2; (-) strand; PAM type: NRG; PAM sequence: CAG
gggcagcagaagactaactg

SEQ ID NO: 65820 - DNA, 20 bp, Artificial Sequence
  Description of Artificial Sequence: Synthetic oligonucleotide
  Target: LAMA2; (-) strand; PAM type: NRG; PAM sequence: AAG
gaatgaggagagggcagcag

SEQ ID NO: 65821 - DNA, 20 bp, Artificial Sequence
  Description of Artificial Sequence: Synthetic oligonucleotide
  Target: LAMA2; (-) strand; PAM type: NRG; PAM sequence: CAG
aaggaatgaggagagggcag

SEQ ID NO: 65822 - DNA, 20 bp, Artificial Sequence
  Description of Artificial Sequence: Synthetic oligonucleotide
  Target: LAMA2; (-) strand; PAM type: NRG; PAM sequence: CAG
tgaaaggaatgaggagaggg

SEQ ID NO: 65823 - DNA, 20 bp, Artificial Sequence
  Description of Artificial Sequence: Synthetic oligonucleotide
  Target: LAMA2; (-) strand; PAM type: NRG; PAM sequence: GGG
agatgaaaggaatgaggaga

SEQ ID NO: 65824 - DNA, 20 bp, Artificial Sequence
  Description of Artificial Sequence: Synthetic oligonucleotide
  Target: LAMA2; (-) strand; PAM type: NRG; PAM sequence: AGG
cagatgaaaggaatgaggag

SEQ ID NO: 65825 - DNA, 20 bp, Artificial Sequence
  Description of Artificial Sequence: Synthetic oligonucleotide
  Target: LAMA2; (-) strand; PAM type: NRG; PAM sequence: GAG
acagatgaaaggaatgagga

SEQ ID NO: 65826 - DNA, 20 bp, Artificial Sequence
  Description of Artificial Sequence: Synthetic oligonucleotide
  Target: LAMA2; (-) strand; PAM type: NRG; PAM sequence: GAG
tgacagatgaaaggaatgag

SEQ ID NO: 65827 - DNA, 20 bp, Artificial Sequence
  Description of Artificial Sequence: Synthetic oligonucleotide
  Target: LAMA2; (-) strand; PAM type: NRG; PAM sequence: AGG
aatgacagatgaaaggaatg

SEQ ID NO: 65828 - DNA, 20 bp, Artificial Sequence
  Description of Artificial Sequence: Synthetic oligonucleotide
  Target: LAMA2; (-) strand; PAM type: NRG; PAM sequence: GAG
gaatgacagatgaaaggaat

SEQ ID NO: 65829 - DNA, 20 bp, Artificial Sequence
  Description of Artificial Sequence: Synthetic oligonucleotide
  Target: LAMA2; (-) strand; PAM type: NRG; PAM sequence: AGG
aagcaggaatgacagatgaa

SEQ ID NO: 65830 - DNA, 20 bp, Artificial Sequence
  Description of Artificial Sequence: Synthetic oligonucleotide
  Target: LAMA2; (-) strand; PAM type: NRG; PAM sequence: AAG
taagcaggaatgacagatga

SEQ ID NO: 65831 - DNA, 20 bp, Artificial Sequence
  Description of Artificial Sequence: Synthetic oligonucleotide
  Target: LAMA2; (-) strand; PAM type: NRG; PAM sequence: CAG
agagtattaagcaggaatga

SEQ ID NO: 65832 - DNA, 20 bp, Artificial Sequence
  Description of Artificial Sequence: Synthetic oligonucleotide
  Target: LAMA2; (-) strand; PAM type: NRG; PAM sequence: AGG
gccctaggagagtattaagc

SEQ ID NO: 65833 - DNA, 20 bp, Artificial Sequence
  Description of Artificial Sequence: Synthetic oligonucleotide
  Target: LAMA2; (-) strand; PAM type: NRG; PAM sequence: CAG
agccctaggagagtattaag

SEQ ID NO: 65834 - DNA, 20 bp, Artificial Sequence
  Description of Artificial Sequence: Synthetic oligonucleotide
  Target: LAMA2; (-) strand; PAM type: NRG; PAM sequence: AAG
gagagccctaggagagtatt

SEQ ID NO: 65835 - DNA, 20 bp, Artificial Sequence
  Description of Artificial Sequence: Synthetic oligonucleotide
  Target: LAMA2; (-) strand; PAM type: NRG; PAM sequence: GAG
cacgatggagagccctagga

SEQ ID NO: 65836 - DNA, 20 bp, Artificial Sequence
  Description of Artificial Sequence: Synthetic oligonucleotide
  Target: LAMA2; (-) strand; PAM type: NRG; PAM sequence: GAG
gacacgatggagagccctag

SEQ ID NO: 65837 - DNA, 20 bp, Artificial Sequence
  Description of Artificial Sequence: Synthetic oligonucleotide
  Target: LAMA2; (-) strand; PAM type: NRG; PAM sequence: AGG
tggacacgatggagagccct

SEQ ID NO: 65838 - DNA, 20 bp, Artificial Sequence
  Description of Artificial Sequence: Synthetic oligonucleotide
  Target: LAMA2; (-) strand; PAM type: NRG; PAM sequence: TAG
ctggacacgatggagagccc

SEQ ID NO: 65839 - DNA, 20 bp, Artificial Sequence
  Description of Artificial Sequence: Synthetic oligonucleotide
  Target: LAMA2; (-) strand; PAM type: NRG; PAM sequence: GAG
tttatactggacacgatgga

SEQ ID NO: 65840 - DNA, 20 bp, Artificial Sequence
  Description of Artificial Sequence: Synthetic oligonucleotide
  Target: LAMA2; (-) strand; PAM type: NRG; PAM sequence: GAG
attttatactggacacgatg

SEQ ID NO: 65841 - DNA, 20 bp, Artificial Sequence
  Description of Artificial Sequence: Synthetic oligonucleotide
  Target: LAMA2; (-) strand; PAM type: NRG; PAM sequence: TGG
cgattttatactggacacga

SEQ ID NO: 65842 - DNA, 20 bp, Artificial Sequence
  Description of Artificial Sequence: Synthetic oligonucleotide
  Target: LAMA2; (-) strand; PAM type: NRG; PAM sequence: TGG
gtttcagtacgattttatac

SEQ ID NO: 65843 - DNA, 20 bp, Artificial Sequence
  Description of Artificial Sequence: Synthetic oligonucleotide
  Target: LAMA2; (-) strand; PAM type: NRG; PAM sequence: CAG
gtcttcctgattacaagttt

SEQ ID NO: 65844 - DNA, 20 bp, Artificial Sequence
  Description of Artificial Sequence: Synthetic oligonucleotide
  Target: LAMA2; (-) strand; PAM type: NRG; PAM sequence: AAG
ggggatgtcttcctgattac

SEQ ID NO: 65845 - DNA, 20 bp, Artificial Sequence
  Description of Artificial Sequence: Synthetic oligonucleotide
  Target: LAMA2; (-) strand; PAM type: NRG; PAM sequence: GGG
atggagatctgattacaaag

SEQ ID NO: 65846 - DNA, 20 bp, Artificial Sequence
  Description of Artificial Sequence: Synthetic oligonucleotide
  Target: LAMA2; (-) strand; PAM type: NRG; PAM sequence: GGG
gatggagatctgattacaaa

SEQ ID NO: 65847 - DNA, 20 bp, Artificial Sequence
  Description of Artificial Sequence: Synthetic oligonucleotide
  Target: LAMA2; (-) strand; PAM type: NRG; PAM sequence: AGG
tgatggagatctgattacaa

SEQ ID NO: 65848 - DNA, 20 bp, Artificial Sequence
  Description of Artificial Sequence: Synthetic oligonucleotide
  Target: LAMA2; (-) strand; PAM type: NRG; PAM sequence: AAG
gtgatggagatctgattaca

SEQ ID NO: 65849 - DNA, 20 bp, Artificial Sequence
  Description of Artificial Sequence: Synthetic oligonucleotide
  Target: LAMA2; (-) strand; PAM type: NRG; PAM sequence: GAG
accaagttggactggtgatg

SEQ ID NO: 65850 - DNA, 20 bp, Artificial Sequence
  Description of Artificial Sequence: Synthetic oligonucleotide
  Target: LAMA2; (-) strand; PAM type: NRG; PAM sequence: TGG
agaccaagttggactggtga

SEQ ID NO: 65851 - DNA, 20 bp, Artificial Sequence
  Description of Artificial Sequence: Synthetic oligonucleotide
  Target: LAMA2; (-) strand; PAM type: NRG; PAM sequence: TGG
ggtcaaagaccaagttggac

SEQ ID NO: 65852 - DNA, 20 bp, Artificial Sequence
  Description of Artificial Sequence: Synthetic oligonucleotide
  Target: LAMA2; (-) strand; PAM type: NRG; PAM sequence: TGG
gaagaggtcaaagaccaagt

SEQ ID NO: 65853 - DNA, 20 bp, Artificial Sequence
  Description of Artificial Sequence: Synthetic oligonucleotide
  Target: LAMA2; (-) strand; PAM type: NRG; PAM sequence: AAG
gtgagaagaggtcaaagacc

SEQ ID NO: 65854 - DNA, 20 bp, Artificial Sequence
  Description of Artificial Sequence: Synthetic oligonucleotide
  Target: LAMA2; (-) strand; PAM type: NRG; PAM sequence: AAG
atgtcagtgagaagaggtca

SEQ ID NO: 65855 - DNA, 20 bp, Artificial Sequence
  Description of Artificial Sequence: Synthetic oligonucleotide
  Target: LAMA2; (-) strand; PAM type: NRG; PAM sequence: AGG
cataaaatgtcagtgagaag

SEQ ID NO: 65856 - DNA, 20 bp, Artificial Sequence
  Description of Artificial Sequence: Synthetic oligonucleotide
  Target: LAMA2; (-) strand; PAM type: NRG; PAM sequence: GAG
gcataaaatgtcagtgagaa

SEQ ID NO: 65857 - DNA, 20 bp, Artificial Sequence
  Description of Artificial Sequence: Synthetic oligonucleotide
  Target: LAMA2; (-) strand; PAM type: NRG; PAM sequence: AAG
gagcataaaatgtcagtgag

SEQ ID NO: 65858 - DNA, 20 bp, Artificial Sequence
  Description of Artificial Sequence: Synthetic oligonucleotide
  Target: LAMA2; (-) strand; PAM type: NRG; PAM sequence: GAG
caggagcataaaatgtcagt

SEQ ID NO: 65859 - DNA, 20 bp, Artificial Sequence
  Description of Artificial Sequence: Synthetic oligonucleotide
  Target: LAMA2; (-) strand; PAM type: NRG; PAM sequence: CAG
atgacaggagcataaaatgt

SEQ ID NO: 65860 - DNA, 20 bp, Artificial Sequence
  Description of Artificial Sequence: Synthetic oligonucleotide
  Target: LAMA2; (-) strand; PAM type: NRG; PAM sequence: GAG
tgcagagtccagcatgacag

SEQ ID NO: 65861 - DNA, 20 bp, Artificial Sequence
  Description of Artificial Sequence: Synthetic oligonucleotide
  Target: LAMA2; (-) strand; PAM type: NRG; PAM sequence: AGG
actgcagagtccagcatgac

SEQ ID NO: 65862 - DNA, 20 bp, Artificial Sequence
  Description of Artificial Sequence: Synthetic oligonucleotide
  Target: LAMA2; (-) strand; PAM type: NRG; PAM sequence: CAG
aactgcagagtccagcatga

SEQ ID NO: 65863 - DNA, 20 bp, Artificial Sequence
  Description of Artificial Sequence: Synthetic oligonucleotide
  Target: LAMA2; (-) strand; PAM type: NRG; PAM sequence: CAG
tgcccagcaactgcagagtc

SEQ ID NO: 65864 - DNA, 20 bp, Artificial Sequence
  Description of Artificial Sequence: Synthetic oligonucleotide
  Target: LAMA2; (-) strand; PAM type: NRG; PAM sequence: GAG
tacactgcccagcaactgca

SEQ ID NO: 65865 - DNA, 20 bp, Artificial Sequence
  Description of Artificial Sequence: Synthetic oligonucleotide
  Target: LAMA2; (-) strand; PAM type: NRG; PAM sequence: CAG
ggtacactgcccagcaactg

SEQ ID NO: 65866 - DNA, 20 bp, Artificial Sequence
  Description of Artificial Sequence: Synthetic oligonucleotide
  Target: LAMA2; (-) strand; PAM type: NRG; PAM sequence: CAG
aagcatgcgggtacactgcc

SEQ ID NO: 65867 - DNA, 20 bp, Artificial Sequence
  Description of Artificial Sequence: Synthetic oligonucleotide
  Target: LAMA2; (-) strand; PAM type: NRG; PAM sequence: GGG
tagcctgcaggaaagcatgc

SEQ ID NO: 65868 - DNA, 20 bp, Artificial Sequence
  Description of Artificial Sequence: Synthetic oligonucleotide
  Target: LAMA2; (-) strand; PAM type: NRG; PAM sequence: CGG
atagcctgcaggaaagcatg

SEQ ID NO: 65869 - DNA, 20 bp, Artificial Sequence
  Description of Artificial Sequence: Synthetic oligonucleotide
  Target: LAMA2; (-) strand; PAM type: NRG; PAM sequence: AAG
agatgggatagcctgcagga

SEQ ID NO: 65870 - DNA, 20 bp, Artificial Sequence
  Description of Artificial Sequence: Synthetic oligonucleotide
  Target: LAMA2; (-) strand; PAM type: NRG; PAM sequence: AGG
agtcagatgggatagcctgc

SEQ ID NO: 65871 - DNA, 20 bp, Artificial Sequence
  Description of Artificial Sequence: Synthetic oligonucleotide
  Target: LAMA2; (-) strand; PAM type: NRG; PAM sequence: CAG
gagtcagatgggatagcctg

SEQ ID NO: 65872 - DNA, 20 bp, Artificial Sequence
  Description of Artificial Sequence: Synthetic oligonucleotide
  Target: LAMA2; (-) strand; PAM type: NRG; PAM sequence: TAG
gagaagagagtcagatggga

SEQ ID NO: 65873 - DNA, 20 bp, Artificial Sequence
  Description of Artificial Sequence: Synthetic oligonucleotide
  Target: LAMA2; (-) strand; PAM type: NRG; PAM sequence: GGG
ttaggagaagagagtcagat

SEQ ID NO: 65874 - DNA, 20 bp, Artificial Sequence
  Description of Artificial Sequence: Synthetic oligonucleotide
  Target: LAMA2; (-) strand; PAM type: NRG; PAM sequence: TGG
tttaggagaagagagtcaga

SEQ ID NO: 65875 - DNA, 20 bp, Artificial Sequence
  Description of Artificial Sequence: Synthetic oligonucleotide
  Target: LAMA2; (-) strand; PAM type: NRG; PAM sequence: CAG
gaggtttaggagaagagagt

SEQ ID NO: 65876 - DNA, 20 bp, Artificial Sequence
  Description of Artificial Sequence: Synthetic oligonucleotide
  Target: LAMA2; (-) strand; PAM type: NRG; PAM sequence: GAG
tggtgaggtttaggagaaga

SEQ ID NO: 65877 - DNA, 20 bp, Artificial Sequence
  Description of Artificial Sequence: Synthetic oligonucleotide
  Target: LAMA2; (-) strand; PAM type: NRG; PAM sequence: GAG
tatggtgaggtttaggagaa

SEQ ID NO: 65878 - DNA, 20 bp, Artificial Sequence
  Description of Artificial Sequence: Synthetic oligonucleotide
  Target: LAMA2; (-) strand; PAM type: NRG; PAM sequence: AAG
aatatggtgaggtttaggag

SEQ ID NO: 65879 - DNA, 20 bp, Artificial Sequence
  Description of Artificial Sequence: Synthetic oligonucleotide
  Target: LAMA2; (-) strand; PAM type: NRG; PAM sequence: GAG
gcaaatatggtgaggtttag

SEQ ID NO: 65880 - DNA, 20 bp, Artificial Sequence
  Description of Artificial Sequence: Synthetic oligonucleotide
  Target: LAMA2; (-) strand; PAM type: NRG; PAM sequence: AGG
atgcaaatatggtgaggttt

SEQ ID NO: 65881 - DNA, 20 bp, Artificial Sequence
  Description of Artificial Sequence: Synthetic oligonucleotide
  Target: LAMA2; (-) strand; PAM type: NRG; PAM sequence: TAG
catgcaaatatggtgaggtt

SEQ ID NO: 65882 - DNA, 20 bp, Artificial Sequence
  Description of Artificial Sequence: Synthetic oligonucleotide
  Target: LAMA2; (-) strand; PAM type: NRG; PAM sequence: AGG
ttacccatgcaaatatggtg

SEQ ID NO: 65883 - DNA, 20 bp, Artificial Sequence
  Description of Artificial Sequence: Synthetic oligonucleotide
  Target: LAMA2; (-) strand; PAM type: NRG; PAM sequence: GAG
gttacccatgcaaatatggt

SEQ ID NO: 65884 - DNA, 20 bp, Artificial Sequence
  Description of Artificial Sequence: Synthetic oligonucleotide
  Target: LAMA2; (-) strand; PAM type: NRG; PAM sequence: TGG
acatgttacccatgcaaata

SEQ ID NO: 65885 - DNA, 20 bp, Artificial Sequence
  Description of Artificial Sequence: Synthetic oligonucleotide
  Target: LAMA2; (-) strand; PAM type: NRG; PAM sequence: AGG
caggaaattcttaaaaggtg

SEQ ID NO: 65886 - DNA, 20 bp, Artificial Sequence
  Description of Artificial Sequence: Synthetic oligonucleotide
  Target: LAMA2; (-) strand; PAM type: NRG; PAM sequence: GAG
tcaggaaattcttaaaaggt

SEQ ID NO: 65887 - DNA, 20 bp, Artificial Sequence
  Description of Artificial Sequence: Synthetic oligonucleotide
  Target: LAMA2; (-) strand; PAM type: NRG; PAM sequence: AGG
agcttcaggaaattcttaaa

SEQ ID NO: 65888 - DNA, 20 bp, Artificial Sequence
  Description of Artificial Sequence: Synthetic oligonucleotide
  Target: LAMA2; (-) strand; PAM type: NRG; PAM sequence: AAG
gagcttcaggaaattcttaa

SEQ ID NO: 65889 - DNA, 20 bp, Artificial Sequence
  Description of Artificial Sequence: Synthetic oligonucleotide
  Target: LAMA2; (-) strand; PAM type: NRG; PAM sequence: AGG
aggatgtcagggagagcttc

SEQ ID NO: 65890 - DNA, 20 bp, Artificial Sequence
  Description of Artificial Sequence: Synthetic oligonucleotide
  Target: LAMA2; (-) strand; PAM type: NRG; PAM sequence: CAG
caggatgtcagggagagctt

SEQ ID NO: 65891 - DNA, 20 bp, Artificial Sequence
  Description of Artificial Sequence: Synthetic oligonucleotide
  Target: LAMA2; (-) strand; PAM type: NRG; PAM sequence: GAG
aggaatcaggatgtcaggga

SEQ ID NO: 65892 - DNA, 20 bp, Artificial Sequence
  Description of Artificial Sequence: Synthetic oligonucleotide
  Target: LAMA2; (-) strand; PAM type: NRG; PAM sequence: GAG
tcaggaatcaggatgtcagg

SEQ ID NO: 65893 - DNA, 20 bp, Artificial Sequence
  Description of Artificial Sequence: Synthetic oligonucleotide
  Target: LAMA2; (-) strand; PAM type: NRG; PAM sequence: GGG
gttcaggaatcaggatgtca

SEQ ID NO: 65894 - DNA, 20 bp, Artificial Sequence
  Description of Artificial Sequence: Synthetic oligonucleotide
  Target: LAMA2; (-) strand; PAM type: NRG; PAM sequence: AGG
tgttcaggaatcaggatgtc

SEQ ID NO: 65895 - DNA, 20 bp, Artificial Sequence
  Description of Artificial Sequence: Synthetic oligonucleotide
  Target: LAMA2; (-) strand; PAM type: NRG; PAM sequence: CAG
ttgttcaggaatcaggatgt

SEQ ID NO: 65896 - DNA, 20 bp, Artificial Sequence
  Description of Artificial Sequence: Synthetic oligonucleotide
  Target: LAMA2; (-) strand; PAM type: NRG; PAM sequence: AGG
ggggtggttgttcaggaatc

SEQ ID NO: 65897 - DNA, 20 bp, Artificial Sequence
  Description of Artificial Sequence: Synthetic oligonucleotide
  Target: LAMA2; (-) strand; PAM type: NRG; PAM sequence: CAG
aggggtggttgttcaggaat

SEQ ID NO: 65898 - DNA, 20 bp, Artificial Sequence
  Description of Artificial Sequence: Synthetic oligonucleotide
  Target: LAMA2; (-) strand; PAM type: NRG; PAM sequence: AGG
gcacaaaggggtggttgttc

SEQ ID NO: 65899 - DNA, 20 bp, Artificial Sequence
  Description of Artificial Sequence: Synthetic oligonucleotide
  Target: LAMA2; (-) strand; PAM type: NRG; PAM sequence: CAG
agcacaaaggggtggttgtt

SEQ ID NO: 65900 - DNA, 20 bp, Artificial Sequence
  Description of Artificial Sequence: Synthetic oligonucleotide
  Target: LAMA2; (-) strand; PAM type: NRG; PAM sequence: TGG
cctttgtgagcacaaagggg

SEQ ID NO: 65901 - DNA, 20 bp, Artificial Sequence
  Description of Artificial Sequence: Synthetic oligonucleotide
  Target: LAMA2; (-) strand; PAM type: NRG; PAM sequence: GGG
agacctttgtgagcacaaag

SEQ ID NO: 65902 - DNA, 20 bp, Artificial Sequence
  Description of Artificial Sequence: Synthetic oligonucleotide
  Target: LAMA2; (-) strand; PAM type: NRG; PAM sequence: GGG
aagacctttgtgagcacaaa

SEQ ID NO: 65903 - DNA, 20 bp, Artificial Sequence
  Description of Artificial Sequence: Synthetic oligonucleotide
  Target: LAMA2; (-) strand; PAM type: NRG; PAM sequence: AGG
aaagacctttgtgagcacaa

SEQ ID NO: 65904 - DNA, 20 bp, Artificial Sequence
  Description of Artificial Sequence: Synthetic oligonucleotide
  Target: LAMA2; (-) strand; PAM type: NRG; PAM sequence: AAG
caaagacctttgtgagcaca

SEQ ID NO: 65905 - DNA, 20 bp, Artificial Sequence
  Description of Artificial Sequence: Synthetic oligonucleotide
  Target: LAMA2; (-) strand; PAM type: NRG; PAM sequence: GAG
gtaactacaaagacctttgt

SEQ ID NO: 65906 - DNA, 20 bp, Artificial Sequence
  Description of Artificial Sequence: Synthetic oligonucleotide
  Target: LAMA2; (-) strand; PAM type: NRG; PAM sequence: AAG
tgataaataatgtaactaca

SEQ ID NO: 65907 - DNA, 20 bp, Artificial Sequence
  Description of Artificial Sequence: Synthetic oligonucleotide
  Target: LAMA2; (-) strand; PAM type: NRG; PAM sequence: TGG
acaggcacttaaactttcag

SEQ ID NO: 65908 - DNA, 20 bp, Artificial Sequence
  Description of Artificial Sequence: Synthetic oligonucleotide
  Target: LAMA2; (-) strand; PAM type: NRG; PAM sequence: CAG
ggaacaggcacttaaacttt

SEQ ID NO: 65909 - DNA, 20 bp, Artificial Sequence
  Description of Artificial Sequence: Synthetic oligonucleotide
  Target: LAMA2; (-) strand; PAM type: NRG; PAM sequence: AGG
caggagccacgatggggaac

SEQ ID NO: 65910 - DNA, 20 bp, Artificial Sequence
  Description of Artificial Sequence: Synthetic oligonucleotide
  Target: LAMA2; (-) strand; PAM type: NRG; PAM sequence: CAG
tcaggagccacgatggggaa

SEQ ID NO: 65911 - DNA, 20 bp, Artificial Sequence
  Description of Artificial Sequence: Synthetic oligonucleotide
  Target: LAMA2; (-) strand; PAM type: NRG; PAM sequence: GGG
gctactcaggagccacgatg

SEQ ID NO: 65912 - DNA, 20 bp, Artificial Sequence
  Description of Artificial Sequence: Synthetic oligonucleotide
  Target: LAMA2; (-) strand; PAM type: NRG; PAM sequence: GGG
agctactcaggagccacgat

SEQ ID NO: 65913 - DNA, 20 bp, Artificial Sequence
  Description of Artificial Sequence: Synthetic oligonucleotide
  Target: LAMA2; (-) strand; PAM type: NRG; PAM sequence: TGG
tagctactcaggagccacga

SEQ ID NO: 65914 - DNA, 20 bp, Artificial Sequence
  Description of Artificial Sequence: Synthetic oligonucleotide
  Target: LAMA2; (-) strand; PAM type: NRG; PAM sequence: GAG
ccctctgcatagctactcag

SEQ ID NO: 65915 - DNA, 20 bp, Artificial Sequence
  Description of Artificial Sequence: Synthetic oligonucleotide
  Target: LAMA2; (-) strand; PAM type: NRG; PAM sequence: AGG
cgccctctgcatagctactc

SEQ ID NO: 65916 - DNA, 20 bp, Artificial Sequence
  Description of Artificial Sequence: Synthetic oligonucleotide
  Target: LAMA2; (-) strand; PAM type: NRG; PAM sequence: CAG
acgccctctgcatagctact

SEQ ID NO: 65917 - DNA, 20 bp, Artificial Sequence
  Description of Artificial Sequence: Synthetic oligonucleotide
  Target: LAMA2; (-) strand; PAM type: NRG; PAM sequence: TAG
cttcccctacgccctctgca

SEQ ID NO: 65918 - DNA, 20 bp, Artificial Sequence
  Description of Artificial Sequence: Synthetic oligonucleotide
  Target: LAMA2; (-) strand; PAM type: NRG; PAM sequence: CAG
tctccttggcccagtttcac

SEQ ID NO: 65919 - DNA, 20 bp, Artificial Sequence
  Description of Artificial Sequence: Synthetic oligonucleotide
  Target: LAMA2; (-) strand; PAM type: NRG; PAM sequence: CAG
agagacaagtctccttggcc

SEQ ID NO: 65920 - DNA, 20 bp, Artificial Sequence
  Description of Artificial Sequence: Synthetic oligonucleotide
  Target: LAMA2; (-) strand; PAM type: NRG; PAM sequence: TGG
agcttagagacaagtctcct

SEQ ID NO: 65921 - DNA, 20 bp, Artificial Sequence
  Description of Artificial Sequence: Synthetic oligonucleotide
  Target: LAMA2; (-) strand; PAM type: NRG; PAM sequence: AAG
tgccaatgtagcttagagac

SEQ ID NO: 65922 - DNA, 20 bp, Artificial Sequence
  Description of Artificial Sequence: Synthetic oligonucleotide
  Target: LAMA2; (-) strand; PAM type: NRG; PAM sequence: GAG
tgctctgccaatgtagctta

SEQ ID NO: 65923 - DNA, 20 bp, Artificial Sequence
  Description of Artificial Sequence: Synthetic oligonucleotide
  Target: LAMA2; (-) strand; PAM type: NRG; PAM sequence: TAG
attgctctgccaatgtagct

SEQ ID NO: 65924 - DNA, 20 bp, Artificial Sequence
  Description of Artificial Sequence: Synthetic oligonucleotide
  Target: LAMA2; (-) strand; PAM type: NRG; PAM sequence: TAG
aaaacattgctctgccaatg

SEQ ID NO: 65925 - DNA, 20 bp, Artificial Sequence
  Description of Artificial Sequence: Synthetic oligonucleotide
  Target: LAMA2; (-) strand; PAM type: NRG; PAM sequence: AAG
atcttaaatagatataatct

SEQ ID NO: 65926 - DNA, 20 bp, Artificial Sequence
  Description of Artificial Sequence: Synthetic oligonucleotide
  Target: LAMA2; (-) strand; PAM type: NRG; PAM sequence: TAG
ctccctaaatccatcttaaa

SEQ ID NO: 65927 - DNA, 20 bp, Artificial Sequence
  Description of Artificial Sequence: Synthetic oligonucleotide
  Target: LAMA2; (-) strand; PAM type: NRG; PAM sequence: GAG
ctctctccaataatctccct

SEQ ID NO: 65928 - DNA, 20 bp, Artificial Sequence
  Description of Artificial Sequence: Synthetic oligonucleotide
  Target: LAMA2; (-) strand; PAM type: NRG; PAM sequence: GGG
gtgctgccaagaggtgctta

SEQ ID NO: 65929 - DNA, 20 bp, Artificial Sequence
  Description of Artificial Sequence: Synthetic oligonucleotide
  Target: LAMA2; (-) strand; PAM type: NRG; PAM sequence: AGG
agtgctgccaagaggtgctt

SEQ ID NO: 65930 - DNA, 20 bp, Artificial Sequence
  Description of Artificial Sequence: Synthetic oligonucleotide
  Target: LAMA2; (-) strand; PAM type: NRG; PAM sequence: TAG
cagtgctgccaagaggtgct

SEQ ID NO: 65931 - DNA, 20 bp, Artificial Sequence
  Description of Artificial Sequence: Synthetic oligonucleotide
  Target: LAMA2; (-) strand; PAM type: NRG; PAM sequence: AGG
aacacagcagtgctgccaag

SEQ ID NO: 65932 - DNA, 20 bp, Artificial Sequence
  Description of Artificial Sequence: Synthetic oligonucleotide
  Target: LAMA2; (-) strand; PAM type: NRG; PAM sequence: GAG
aaacacagcagtgctgccaa

SEQ ID NO: 65933 - DNA, 20 bp, Artificial Sequence
  Description of Artificial Sequence: Synthetic oligonucleotide
  Target: LAMA2; (-) strand; PAM type: NRG; PAM sequence: AAG
ggaaacacagcagtgctgcc

SEQ ID NO: 65934 - DNA, 20 bp, Artificial Sequence
  Description of Artificial Sequence: Synthetic oligonucleotide
  Target: LAMA2; (-) strand; PAM type: NRG; PAM sequence: CAG
ccacagtagaggaaacacag

SEQ ID NO: 65935 - DNA, 20 bp, Artificial Sequence
  Description of Artificial Sequence: Synthetic oligonucleotide
  Target: LAMA2; (-) strand; PAM type: NRG; PAM sequence: CAG
actccacagtagaggaaaca

SEQ ID NO: 65936 - DNA, 20 bp, Artificial Sequence
  Description of Artificial Sequence: Synthetic oligonucleotide
  Target: LAMA2; (-) strand; PAM type: NRG; PAM sequence: AGG
aggagctcactccacagtag

SEQ ID NO: 65937 - DNA, 20 bp, Artificial Sequence
  Description of Artificial Sequence: Synthetic oligonucleotide
  Target: LAMA2; (-) strand; PAM type: NRG; PAM sequence: GAG
caggagctcactccacagta

SEQ ID NO: 65938 - DNA, 20 bp, Artificial Sequence
  Description of Artificial Sequence: Synthetic oligonucleotide
  Target: LAMA2; (-) strand; PAM type: NRG; PAM sequence: TAG
tccaggagctcactccacag

SEQ ID NO: 65939 - DNA, 20 bp, Artificial Sequence
  Description of Artificial Sequence: Synthetic oligonucleotide
  Target: LAMA2; (-) strand; PAM type: NRG; PAM sequence: CAG
ttttccaggagctcactcca

SEQ ID NO: 65940 - DNA, 20 bp, Artificial Sequence
  Description of Artificial Sequence: Synthetic oligonucleotide
  Target: LAMA2; (-) strand; PAM type: NRG; PAM sequence: GAG
acagagtccctgttttccag

SEQ ID NO: 65941 - DNA, 20 bp, Artificial Sequence
  Description of Artificial Sequence: Synthetic oligonucleotide
  Target: LAMA2; (-) strand; PAM type: NRG; PAM sequence: AGG
agacagagtccctgttttcc

SEQ ID NO: 65942 - DNA, 20 bp, Artificial Sequence
  Description of Artificial Sequence: Synthetic oligonucleotide
  Target: LAMA2; (-) strand; PAM type: NRG; PAM sequence: CAG
cagacagagtccctgttttc

SEQ ID NO: 65943 - DNA, 20 bp, Artificial Sequence
  Description of Artificial Sequence: Synthetic oligonucleotide
  Target: LAMA2; (-) strand; PAM type: NRG; PAM sequence: GAG
aaacacacagatgacagaca

SEQ ID NO: 65944 - DNA, 20 bp, Artificial Sequence
  Description of Artificial Sequence: Synthetic oligonucleotide
  Target: LAMA2; (-) strand; PAM type: NRG; PAM sequence: CAG
ggaaacacacagatgacaga

SEQ ID NO: 65945 - DNA, 20 bp, Artificial Sequence
  Description of Artificial Sequence: Synthetic oligonucleotide
  Target: LAMA2; (-) strand; PAM type: NRG; PAM sequence: CAG
ctcaggaaacacacagatga

SEQ ID NO: 65946 - DNA, 20 bp, Artificial Sequence
  Description of Artificial Sequence: Synthetic oligonucleotide
  Target: LAMA2; (-) strand; PAM type: NRG; PAM sequence: CAG
tgtggtgctcaggaaacaca

SEQ ID NO: 65947 - DNA, 20 bp, Artificial Sequence
  Description of Artificial Sequence: Synthetic oligonucleotide
  Target: LAMA2; (-) strand; PAM type: NRG; PAM sequence: AGG
gcacacactatgtggtgctc

SEQ ID NO: 65948 - DNA, 20 bp, Artificial Sequence
  Description of Artificial Sequence: Synthetic oligonucleotide
  Target: LAMA2; (-) strand; PAM type: NRG; PAM sequence: CAG
ggcacacactatgtggtgct

SEQ ID NO: 65949 - DNA, 20 bp, Artificial Sequence
  Description of Artificial Sequence: Synthetic oligonucleotide
  Target: LAMA2; (-) strand; PAM type: NRG; PAM sequence: TGG
tctatctggcacacactatg

SEQ ID NO: 65950 - DNA, 20 bp, Artificial Sequence
  Description of Artificial Sequence: Synthetic oligonucleotide
  Target: LAMA2; (-) strand; PAM type: NRG; PAM sequence: TGG
tagcaggcatacaatctatc

SEQ ID NO: 65951 - DNA, 20 bp, Artificial Sequence
  Description of Artificial Sequence: Synthetic oligonucleotide
  Target: LAMA2; (-) strand; PAM type: NRG; PAM sequence: AGG
ttaagagcctactatgtagc

SEQ ID NO: 65952 - DNA, 20 bp, Artificial Sequence
  Description of Artificial Sequence: Synthetic oligonucleotide
  Target: LAMA2; (-) strand; PAM type: NRG; PAM sequence: CAG
attaagagcctactatgtag

SEQ ID NO: 65953 - DNA, 20 bp, Artificial Sequence
  Description of Artificial Sequence: Synthetic oligonucleotide
  Target: LAMA2; (-) strand; PAM type: NRG; PAM sequence: TAG
tttattaagagcctactatg

SEQ ID NO: 65954 - DNA, 20 bp, Artificial Sequence
  Description of Artificial Sequence: Synthetic oligonucleotide
  Target: LAMA2; (-) strand; PAM type: NRG; PAM sequence: GAG
attcacttcttatttattaa

SEQ ID NO: 65955 - DNA, 20 bp, Artificial Sequence
  Description of Artificial Sequence: Synthetic oligonucleotide
  Target: LAMA2; (-) strand; PAM type: NRG; PAM sequence: AAG
caattcacttcttatttatt

SEQ ID NO: 65956 - DNA, 20 bp, Artificial Sequence
  Description of Artificial Sequence: Synthetic oligonucleotide
  Target: LAMA2; (-) strand; PAM type: NRG; PAM sequence: TAG
atgggaagatgaatagcatc

SEQ ID NO: 65957 - DNA, 20 bp, Artificial Sequence
  Description of Artificial Sequence: Synthetic oligonucleotide
  Target: LAMA2; (-) strand; PAM type: NRG; PAM sequence: TAG
atttaatatgggaagatgaa

SEQ ID NO: 65958 - DNA, 20 bp, Artificial Sequence
  Description of Artificial Sequence: Synthetic oligonucleotide
  Target: LAMA2; (-) strand; PAM type: NRG; PAM sequence: AAG
tgaaagcaatttaatatggg

SEQ ID NO: 65959 - DNA, 20 bp, Artificial Sequence
  Description of Artificial Sequence: Synthetic oligonucleotide
  Target: LAMA2; (-) strand; PAM type: NRG; PAM sequence: GGG
ttttgaaagcaatttaatat

SEQ ID NO: 65960 - DNA, 20 bp, Artificial Sequence
  Description of Artificial Sequence: Synthetic oligonucleotide
  Target: LAMA2; (-) strand; PAM type: NRG; PAM sequence: TGG
attttgaaagcaatttaata

SEQ ID NO: 65961 - DNA, 20 bp, Artificial Sequence
  Description of Artificial Sequence: Synthetic oligonucleotide
  Target: LAMA2; (-) strand; PAM type: NRG; PAM sequence: AAG
acagaggatttacattttga

SEQ ID NO: 65962 - DNA, 20 bp, Artificial Sequence
  Description of Artificial Sequence: Synthetic oligonucleotide
  Target: LAMA2; (-) strand; PAM type: NRG; PAM sequence: AGG
aatagacttcagtgccacag

SEQ ID NO: 65963 - DNA, 20 bp, Artificial Sequence
  Description of Artificial Sequence: Synthetic oligonucleotide
  Target: LAMA2; (-) strand; PAM type: NRG; PAM sequence: GAG
aaatagacttcagtgccaca

SEQ ID NO: 65964 - DNA, 20 bp, Artificial Sequence
  Description of Artificial Sequence: Synthetic oligonucleotide
  Target: LAMA2; (-) strand; PAM type: NRG; PAM sequence: CAG
ttaaatagacttcagtgcca

SEQ ID NO: 65965 - DNA, 20 bp, Artificial Sequence
  Description of Artificial Sequence: Synthetic oligonucleotide
  Target: LAMA2; (-) strand; PAM type: NRG; PAM sequence: CAG
agcatattttaaatagactt

SEQ ID NO: 65966 - DNA, 20 bp, Artificial Sequence
  Description of Artificial Sequence: Synthetic oligonucleotide
  Target: LAMA2; (-) strand; PAM type: NRG; PAM sequence: TAG
gcagaagagcatattttaaa

SEQ ID NO: 65967 - DNA, 20 bp, Artificial Sequence
  Description of Artificial Sequence: Synthetic oligonucleotide
  Target: LAMA2; (-) strand; PAM type: NRG; PAM sequence: GAG
agacattttatttggcagaa

SEQ ID NO: 65968 - DNA, 20 bp, Artificial Sequence
  Description of Artificial Sequence: Synthetic oligonucleotide
  Target: LAMA2; (-) strand; PAM type: NRG; PAM sequence: AAG
ggagacattttatttggcag

SEQ ID NO: 65969 - DNA, 20 bp, Artificial Sequence
  Description of Artificial Sequence: Synthetic oligonucleotide
  Target: LAMA2; (-) strand; PAM type: NRG; PAM sequence: CAG
ggaggagacattttatttgg

SEQ ID NO: 65970 - DNA, 20 bp, Artificial Sequence
  Description of Artificial Sequence: Synthetic oligonucleotide
  Target: LAMA2; (-) strand; PAM type: NRG; PAM sequence: TGG
cctggaggagacattttatt

SEQ ID NO: 65971 - DNA, 20 bp, Artificial Sequence
  Description of Artificial Sequence: Synthetic oligonucleotide
  Target: LAMA2; (-) strand; PAM type: NRG; PAM sequence: GAG
cttcctcaaatcacctggag

SEQ ID NO: 65972 - DNA, 20 bp, Artificial Sequence
  Description of Artificial Sequence: Synthetic oligonucleotide
  Target: LAMA2; (-) strand; PAM type: NRG; PAM sequence: AGG
gtcttcctcaaatcacctgg

SEQ ID NO: 65973 - DNA, 20 bp, Artificial Sequence
  Description of Artificial Sequence: Synthetic oligonucleotide
  Target: LAMA2; (-) strand; PAM type: NRG; PAM sequence: GAG
tgtcttcctcaaatcacctg

SEQ ID NO: 65974 - DNA, 20 bp, Artificial Sequence
  Description of Artificial Sequence: Synthetic oligonucleotide
  Target: LAMA2; (-) strand; PAM type: NRG; PAM sequence: TGG
catgtcttcctcaaatcacc

SEQ ID NO: 65975 - DNA, 20 bp, Artificial Sequence
  Description of Artificial Sequence: Synthetic oligonucleotide
  Target: LAMA2; (-) strand; PAM type: NRG; PAM sequence: GAG
ggtttggtttaatcttattt

SEQ ID NO: 65976 - DNA, 20 bp, Artificial Sequence
  Description of Artificial Sequence: Synthetic oligonucleotide
  Target: LAMA2; (-) strand; PAM type: NRG; PAM sequence: TGG
acatgtacatgacaatggtt

SEQ ID NO: 65977 - DNA, 20 bp, Artificial Sequence
  Description of Artificial Sequence: Synthetic oligonucleotide
  Target: LAMA2; (-) strand; PAM type: NRG; PAM sequence: TGG
tatttacatgtacatgacaa

SEQ ID NO: 65978 - DNA, 20 bp, Artificial Sequence
  Description of Artificial Sequence: Synthetic oligonucleotide
  Target: LAMA2; (-) strand; PAM type: NRG; PAM sequence: TAG
tagtgaagaaaatgtaagac

SEQ ID NO: 65979 - DNA, 20 bp, Artificial Sequence
  Description of Artificial Sequence: Synthetic oligonucleotide
  Target: LAMA2; (-) strand; PAM type: NRG; PAM sequence: AAG
cccattagtgaagaaaatgt

SEQ ID NO: 65980 - DNA, 20 bp, Artificial Sequence
  Description of Artificial Sequence: Synthetic oligonucleotide
  Target: LAMA2; (-) strand; PAM type: NRG; PAM sequence: AAG
agaataaatccccattagtg

SEQ ID NO: 65981 - DNA, 20 bp, Artificial Sequence
  Description of Artificial Sequence: Synthetic oligonucleotide
  Target: LAMA2; (-) strand; PAM type: NRG; PAM sequence: TAG
tccttagaataaatccccat

SEQ ID NO: 65982 - DNA, 20 bp, Artificial Sequence
  Description of Artificial Sequence: Synthetic oligonucleotide
  Target: LAMA2; (-) strand; PAM type: NRG; PAM sequence: TAG
tactgaacaaaaaagttcct

SEQ ID NO: 65983 - DNA, 20 bp, Artificial Sequence
  Description of Artificial Sequence: Synthetic oligonucleotide
  Target: LAMA2; (-) strand; PAM type: NRG; PAM sequence: AAG
tcagaaaatactgaacaaaa

SEQ ID NO: 65984 - DNA, 20 bp, Artificial Sequence
  Description of Artificial Sequence: Synthetic oligonucleotide
  Target: LAMA2; (-) strand; PAM type: NRG; PAM sequence: CAG
atttctgactattccttcat

SEQ ID NO: 65985 - DNA, 20 bp, Artificial Sequence
  Description of Artificial Sequence: Synthetic oligonucleotide
  Target: LAMA2; (-) strand; PAM type: NRG; PAM sequence: AGG
cagcctaaaatggagtaaga

SEQ ID NO: 65986 - DNA, 20 bp, Artificial Sequence
  Description of Artificial Sequence: Synthetic oligonucleotide
  Target: LAMA2; (-) strand; PAM type: NRG; PAM sequence: AAG
gcagcctaaaatggagtaag

SEQ ID NO: 65987 - DNA, 20 bp, Artificial Sequence
  Description of Artificial Sequence: Synthetic oligonucleotide
  Target: LAMA2; (-) strand; PAM type: NRG; PAM sequence: AAG
atggcagcctaaaatggagt

SEQ ID NO: 65988 - DNA, 20 bp, Artificial Sequence
  Description of Artificial Sequence: Synthetic oligonucleotide
  Target: LAMA2; (-) strand; PAM type: NRG; PAM sequence: GAG
aaaaatggcagcctaaaatg

SEQ ID NO: 65989 - DNA, 20 bp, Artificial Sequence
  Description of Artificial Sequence: Synthetic oligonucleotide
  Target: LAMA2; (-) strand; PAM type: NRG; PAM sequence: TGG
aaaaaaatggcagcctaaaa

SEQ ID NO: 65990 - DNA, 20 bp, Artificial Sequence
  Description of Artificial Sequence: Synthetic oligonucleotide
  Target: LAMA2; (-) strand; PAM type: NRG; PAM sequence: CAG
agctcttaggaaaaaaatgg

SEQ ID NO: 65991 - DNA, 20 bp, Artificial Sequence
  Description of Artificial Sequence: Synthetic oligonucleotide
  Target: LAMA2; (-) strand; PAM type: NRG; PAM sequence: TGG
aacagctcttaggaaaaaaa

SEQ ID NO: 65992 - DNA, 20 bp, Artificial Sequence
  Description of Artificial Sequence: Synthetic oligonucleotide
  Target: LAMA2; (-) strand; PAM type: NRG; PAM sequence: AGG
ctcaatgtataacagctctt

SEQ ID NO: 65993 - DNA, 20 bp, Artificial Sequence
  Description of Artificial Sequence: Synthetic oligonucleotide
  Target: LAMA2; (-) strand; PAM type: NRG; PAM sequence: TAG
gctcaatgtataacagctct

SEQ ID NO: 65994 - DNA, 20 bp, Artificial Sequence
  Description of Artificial Sequence: Synthetic oligonucleotide
  Target: LAMA2; (-) strand; PAM type: NRG; PAM sequence: CAG
taggtatgctcaatgtataa

SEQ ID NO: 65995 - DNA, 20 bp, Artificial Sequence
  Description of Artificial Sequence: Synthetic oligonucleotide
  Target: LAMA2; (-) strand; PAM type: NRG; PAM sequence: AGG
gtatttcagaaaggcaattt

SEQ ID NO: 65996 - DNA, 20 bp, Artificial Sequence
  Description of Artificial Sequence: Synthetic oligonucleotide
  Target: LAMA2; (-) strand; PAM type: NRG; PAM sequence: TAG
tgtatttcagaaaggcaatt

SEQ ID NO: 65997 - DNA, 20 bp, Artificial Sequence
  Description of Artificial Sequence: Synthetic oligonucleotide
  Target: LAMA2; (-) strand; PAM type: NRG; PAM sequence: AGG
tgtgttcctgtatttcagaa

SEQ ID NO: 65998 - DNA, 20 bp, Artificial Sequence
  Description of Artificial Sequence: Synthetic oligonucleotide
  Target: LAMA2; (-) strand; PAM type: NRG; PAM sequence: AAG
gtgtgttcctgtatttcaga

SEQ ID NO: 65999 - DNA, 20 bp, Artificial Sequence
  Description of Artificial Sequence: Synthetic oligonucleotide
  Target: LAMA2; (-) strand; PAM type: NRG; PAM sequence: CAG
tacagtgtgttcctgtattt

SEQ ID NO: 66000 - DNA, 20 bp, Artificial Sequence
  Description of Artificial Sequence: Synthetic oligonucleotide
  Target: LAMA2; (-) strand; PAM type: NRG; PAM sequence: CAG
agaccattttactgacaata

SEQ ID NO: 66001 - DNA, 20 bp, Artificial Sequence
  Description of Artificial Sequence: Synthetic oligonucleotide
  Target: LAMA2; (-) strand; PAM type: NRG; PAM sequence: CAG
caaagacaaactaatcaaca

SEQ ID NO: 66002 - DNA, 20 bp, Artificial Sequence
  Description of Artificial Sequence: Synthetic oligonucleotide
  Target: LAMA2; (-) strand; PAM type: NRG; PAM sequence: AAG
gatgaatcaagtacacccca

SEQ ID NO: 66003 - DNA, 20 bp, Artificial Sequence
  Description of Artificial Sequence: Synthetic oligonucleotide
  Target: LAMA2; (-) strand; PAM type: NRG; PAM sequence: AAG
tctccatcatctgatgaatc

SEQ ID NO: 66004 - DNA, 20 bp, Artificial Sequence
  Description of Artificial Sequence: Synthetic oligonucleotide
  Target: LAMA2; (-) strand; PAM type: NRG; PAM sequence: AGG
aggttgcatgaaacgccagc

SEQ ID NO: 66005 - DNA, 20 bp, Artificial Sequence
  Description of Artificial Sequence: Synthetic oligonucleotide
  Target: LAMA2; (-) strand; PAM type: NRG; PAM sequence: CAG
caggttgcatgaaacgccag

SEQ ID NO: 66006 - DNA, 20 bp, Artificial Sequence
  Description of Artificial Sequence: Synthetic oligonucleotide
  Target: LAMA2; (-) strand; PAM type: NRG; PAM sequence: CAG
tagcaggttgcatgaaacgc

SEQ ID NO: 66007 - DNA, 20 bp, Artificial Sequence
  Description of Artificial Sequence: Synthetic oligonucleotide
  Target: LAMA2; (-) strand; PAM type: NRG; PAM sequence: AGG
taaagcccacataccatagc

SEQ ID NO: 66008 - DNA, 20 bp, Artificial Sequence
  Description of Artificial Sequence: Synthetic oligonucleotide
  Target: LAMA2; (-) strand; PAM type: NRG; PAM sequence: CAG
ataaagcccacataccatag

SEQ ID NO: 66009 - DNA, 20 bp, Artificial Sequence
  Description of Artificial Sequence: Synthetic oligonucleotide
  Target: LAMA2; (-) strand; PAM type: NRG; PAM sequence: TAG
ccaataaagcccacatacca

SEQ ID NO: 66010 - DNA, 20 bp, Artificial Sequence
  Description of Artificial Sequence: Synthetic oligonucleotide
  Target: LAMA2; (-) strand; PAM type: NRG; PAM sequence: AAG
tcgctgctgggaagccaata

SEQ ID NO: 66011 - DNA, 20 bp, Artificial Sequence
  Description of Artificial Sequence: Synthetic oligonucleotide
  Target: LAMA2; (-) strand; PAM type: NRG; PAM sequence: AAG
gtgtcagtgtcgctgctggg

SEQ ID NO: 66012 - DNA, 20 bp, Artificial Sequence
  Description of Artificial Sequence: Synthetic oligonucleotide
  Target: LAMA2; (-) strand; PAM type: NRG; PAM sequence: GGG
tttgtgtcagtgtcgctgct

SEQ ID NO: 66013 - DNA, 20 bp, Artificial Sequence
  Description of Artificial Sequence: Synthetic oligonucleotide
  Target: LAMA2; (-) strand; PAM type: NRG; PAM sequence: TGG
atttgtgtcagtgtcgctgc

SEQ ID NO: 66014 - DNA, 20 bp, Artificial Sequence
  Description of Artificial Sequence: Synthetic oligonucleotide
  Target: LAMA2; (-) strand; PAM type: NRG; PAM sequence: CAG
taaaatctgacaatttgtgt

SEQ ID NO: 66015 - DNA, 20 bp, Artificial Sequence
  Description of Artificial Sequence: Synthetic oligonucleotide
  Target: LAMA2; (-) strand; PAM type: NRG; PAM sequence: AGG
tctcaaggatgtatttcatt

SEQ ID NO: 66016 - DNA, 20 bp, Artificial Sequence
  Description of Artificial Sequence: Synthetic oligonucleotide
  Target: LAMA2; (-) strand; PAM type: NRG; PAM sequence: TAG
ttctcaaggatgtatttcat

SEQ ID NO: 66017 - DNA, 20 bp, Artificial Sequence
  Description of Artificial Sequence: Synthetic oligonucleotide
  Target: LAMA2; (-) strand; PAM type: NRG; PAM sequence: AGG
atggtgaaggaagcttctca

SEQ ID NO: 66018 - DNA, 20 bp, Artificial Sequence
  Description of Artificial Sequence: Synthetic oligonucleotide
  Target: LAMA2; (-) strand; PAM type: NRG; PAM sequence: AAG
aatggtgaaggaagcttctc

SEQ ID NO: 66019 - DNA, 20 bp, Artificial Sequence
  Description of Artificial Sequence: Synthetic oligonucleotide
  Target: LAMA2; (-) strand; PAM type: NRG; PAM sequence: AAG
agctactaaaatggtgaagg

SEQ ID NO: 66020 - DNA, 20 bp, Artificial Sequence
  Description of Artificial Sequence: Synthetic oligonucleotide
  Target: LAMA2; (-) strand; PAM type: NRG; PAM sequence: AGG
tacagctactaaaatggtga

SEQ ID NO: 66021 - DNA, 20 bp, Artificial Sequence
  Description of Artificial Sequence: Synthetic oligonucleotide
  Target: LAMA2; (-) strand; PAM type: NRG; PAM sequence: AAG
gtacagctactaaaatggtg

SEQ ID NO: 66022 - DNA, 20 bp, Artificial Sequence
  Description of Artificial Sequence: Synthetic oligonucleotide
  Target: LAMA2; (-) strand; PAM type: NRG; PAM sequence: TGG
aaattgtacagctactaaaa

SEQ ID NO: 66023 - DNA, 20 bp, Artificial Sequence
  Description of Artificial Sequence: Synthetic oligonucleotide
  Target: LAMA2; (-) strand; PAM type: NRG; PAM sequence: CAG
cttttttctttcaaattgta

SEQ ID NO: 66024 - DNA, 20 bp, Artificial Sequence
  Description of Artificial Sequence: Synthetic oligonucleotide
  Target: LAMA2; (-) strand; PAM type: NRG; PAM sequence: TGG
caatagtgaactaccctgtg

SEQ ID NO: 66025 - DNA, 20 bp, Artificial Sequence
  Description of Artificial Sequence: Synthetic oligonucleotide
  Target: LAMA2; (-) strand; PAM type: NRG; PAM sequence: TAG
attgtcctccatgatttcaa

SEQ ID NO: 66026 - DNA, 20 bp, Artificial Sequence
  Description of Artificial Sequence: Synthetic oligonucleotide
  Target: LAMA2; (-) strand; PAM type: NRG; PAM sequence: AAG
agcatgttcaagagcaaaat

SEQ ID NO: 66027 - DNA, 20 bp, Artificial Sequence
  Description of Artificial Sequence: Synthetic oligonucleotide
  Target: LAMA2; (-) strand; PAM type: NRG; PAM sequence: GAG
gttaatgacagcatgttcaa

SEQ ID NO: 66028 - DNA, 20 bp, Artificial Sequence
  Description of Artificial Sequence: Synthetic oligonucleotide
  Target: LAMA2; (-) strand; PAM type: NRG; PAM sequence: AAG
cagttaatgacagcatgttc

SEQ ID NO: 66029 - DNA, 20 bp, Artificial Sequence
  Description of Artificial Sequence: Synthetic oligonucleotide
  Target: LAMA2; (-) strand; PAM type: NRG; PAM sequence: CAG
tcccattgtgcagttaatga

SEQ ID NO: 66030 - DNA, 20 bp, Artificial Sequence
  Description of Artificial Sequence: Synthetic oligonucleotide
  Target: LAMA2; (-) strand; PAM type: NRG; PAM sequence: CAG
agcatcagtatcccattgtg

SEQ ID NO: 66031 - DNA, 20 bp, Artificial Sequence
  Description of Artificial Sequence: Synthetic oligonucleotide
  Target: LAMA2; (-) strand; PAM type: NRG; PAM sequence: CAG
accagcctctgaggcagcat

SEQ ID NO: 66032 - DNA, 20 bp, Artificial Sequence
  Description of Artificial Sequence: Synthetic oligonucleotide
  Target: LAMA2; (-) strand; PAM type: NRG; PAM sequence: CAG
attaataccagcctctgagg

SEQ ID NO: 66033 - DNA, 20 bp, Artificial Sequence
  Description of Artificial Sequence: Synthetic oligonucleotide
  Target: LAMA2; (-) strand; PAM type: NRG; PAM sequence: AGG
aagattaataccagcctctg

SEQ ID NO: 66034 - DNA, 20 bp, Artificial Sequence
  Description of Artificial Sequence: Synthetic oligonucleotide
  Target: LAMA2; (-) strand; PAM type: NRG; PAM sequence: GAG
aaagattaataccagcctct

SEQ ID NO: 66035 - DNA, 20 bp, Artificial Sequence
  Description of Artificial Sequence: Synthetic oligonucleotide
  Target: LAMA2; (-) strand; PAM type: NRG; PAM sequence: CAG
tttggcacaaagattaatac

SEQ ID NO: 66036 - DNA, 20 bp, Artificial Sequence
  Description of Artificial Sequence: Synthetic oligonucleotide
  Target: LAMA2; (-) strand; PAM type: NRG; PAM sequence: AAG
tttctgcaaggtttggcaca

SEQ ID NO: 66037 - DNA, 20 bp, Artificial Sequence
  Description of Artificial Sequence: Synthetic oligonucleotide
  Target: LAMA2; (-) strand; PAM type: NRG; PAM sequence: TGG
cacagagtttctgcaaggtt

SEQ ID NO: 66038 - DNA, 20 bp, Artificial Sequence
  Description of Artificial Sequence: Synthetic oligonucleotide
  Target: LAMA2; (-) strand; PAM type: NRG; PAM sequence: AGG
atgcacacagagtttctgca

SEQ ID NO: 66039 - DNA, 20 bp, Artificial Sequence
  Description of Artificial Sequence: Synthetic oligonucleotide
  Target: LAMA2; (-) strand; PAM type: NRG; PAM sequence: AAG
aatgcacacagagtttctgc

SEQ ID NO: 66040 - DNA, 20 bp, Artificial Sequence
  Description of Artificial Sequence: Synthetic oligonucleotide
  Target: LAMA2; (-) strand; PAM type: NRG; PAM sequence: GAG
tacgtcagtaaatgcacaca

SEQ ID NO: 66041 - DNA, 20 bp, Artificial Sequence
  Description of Artificial Sequence: Synthetic oligonucleotide
  Target: LAMA2; (-) strand; PAM type: NRG; PAM sequence: CAG
cttacgtcagtaaatgcaca

SEQ ID NO: 66042 - DNA, 20 bp, Artificial Sequence
  Description of Artificial Sequence: Synthetic oligonucleotide
  Target: LAMA2; (-) strand; PAM type: NRG; PAM sequence: CAG
atggagagcaatgcttacgt

SEQ ID NO: 66043 - DNA, 20 bp, Artificial Sequence
  Description of Artificial Sequence: Synthetic oligonucleotide
  Target: LAMA2; (-) strand; PAM type: NRG; PAM sequence: GAG
cttaagatcaaagagatgga

SEQ ID NO: 66044 - DNA, 20 bp, Artificial Sequence
  Description of Artificial Sequence: Synthetic oligonucleotide
  Target: LAMA2; (-) strand; PAM type: NRG; PAM sequence: GAG
atcttaagatcaaagagatg

SEQ ID NO: 66045 - DNA, 20 bp, Artificial Sequence
  Description of Artificial Sequence: Synthetic oligonucleotide
  Target: LAMA2; (-) strand; PAM type: NRG; PAM sequence: TGG
taatcttaagatcaaagaga

SEQ ID NO: 66046 - DNA, 20 bp, Artificial Sequence
  Description of Artificial Sequence: Synthetic oligonucleotide
  Target: LAMA2; (-) strand; PAM type: NRG; PAM sequence: GAG
ggagtaatcttaagatcaaa

SEQ ID NO: 66047 - DNA, 20 bp, Artificial Sequence
  Description of Artificial Sequence: Synthetic oligonucleotide
  Target: LAMA2; (-) strand; PAM type: NRG; PAM sequence: AAG
aaggagtaatcttaagatca

SEQ ID NO: 66048 - DNA, 20 bp, Artificial Sequence
  Description of Artificial Sequence: Synthetic oligonucleotide
  Target: LAMA2; (-) strand; PAM type: NRG; PAM sequence: AAG
atccccaaaggagtaatctt

SEQ ID NO: 66049 - DNA, 20 bp, Artificial Sequence
  Description of Artificial Sequence: Synthetic oligonucleotide
  Target: LAMA2; (-) strand; PAM type: NRG; PAM sequence: GAG
attaccttctatccccaaag

SEQ ID NO: 66050 - DNA, 20 bp, Artificial Sequence
  Description of Artificial Sequence: Synthetic oligonucleotide
  Target: LAMA2; (-) strand; PAM type: NRG; PAM sequence: AGG
atattaccttctatccccaa

SEQ ID NO: 66051 - DNA, 20 bp, Artificial Sequence
  Description of Artificial Sequence: Synthetic oligonucleotide
  Target: LAMA2; (-) strand; PAM type: NRG; PAM sequence: AAG
tatattaccttctatcccca

SEQ ID NO: 66052 - DNA, 20 bp, Artificial Sequence
  Description of Artificial Sequence: Synthetic oligonucleotide
  Target: LAMA2; (-) strand; PAM type: NRG; PAM sequence: CAG
cattttttttttaagttcag

SEQ ID NO: 66053 - DNA, 20 bp, Artificial Sequence
  Description of Artificial Sequence: Synthetic oligonucleotide
  Target: LAMA2; (-) strand; PAM type: NRG; PAM sequence: CAG
gagcattttttttttaagtt

SEQ ID NO: 66054 - DNA, 20 bp, Artificial Sequence
  Description of Artificial Sequence: Synthetic oligonucleotide
  Target: LAMA2; (-) strand; PAM type: NRG; PAM sequence: AAG
actttgagcatttttttttt

SEQ ID NO: 66055 - DNA, 20 bp, Artificial Sequence
  Description of Artificial Sequence: Synthetic oligonucleotide
  Target: LAMA2; (-) strand; PAM type: NRG; PAM sequence: GAG
ctcttaccttcactcacttt

SEQ ID NO: 66056 - DNA, 20 bp, Artificial Sequence
  Description of Artificial Sequence: Synthetic oligonucleotide
  Target: LAMA2; (-) strand; PAM type: NRG; PAM sequence: AAG
ctcttaattttcagtactgg

SEQ ID NO: 66057 - DNA, 20 bp, Artificial Sequence
  Description of Artificial Sequence: Synthetic oligonucleotide
  Target: LAMA2; (-) strand; PAM type: NRG; PAM sequence: TGG
gtactcttaattttcagtac

SEQ ID NO: 66058 - DNA, 20 bp, Artificial Sequence
  Description of Artificial Sequence: Synthetic oligonucleotide
  Target: LAMA2; (-) strand; PAM type: NRG; PAM sequence: CAG
gggtctgtactcttaatttt

SEQ ID NO: 66059 - DNA, 20 bp, Artificial Sequence
  Description of Artificial Sequence: Synthetic oligonucleotide
  Target: LAMA2; (-) strand; PAM type: NRG; PAM sequence: GGG
tctcttgtataatagcatgt

SEQ ID NO: 66060 - DNA, 20 bp, Artificial Sequence
  Description of Artificial Sequence: Synthetic oligonucleotide
  Target: LAMA2; (-) strand; PAM type: NRG; PAM sequence: TGG
ttctcttgtataatagcatg

SEQ ID NO: 66061 - DNA, 20 bp, Artificial Sequence
  Description of Artificial Sequence: Synthetic oligonucleotide
  Target: LAMA2; (-) strand; PAM type: NRG; PAM sequence: TAG
gactactttctcttgtataa

SEQ ID NO: 66062 - DNA, 20 bp, Artificial Sequence
  Description of Artificial Sequence: Synthetic oligonucleotide
  Target: LAMA2; (-) strand; PAM type: NRG; PAM sequence: AGG
gtaaattatccagcagtcat

SEQ ID NO: 66063 - DNA, 20 bp, Artificial Sequence
  Description of Artificial Sequence: Synthetic oligonucleotide
  Target: LAMA2; (-) strand; PAM type: NRG; PAM sequence: TAG
tgtaaattatccagcagtca

SEQ ID NO: 66064 - DNA, 20 bp, Artificial Sequence
  Description of Artificial Sequence: Synthetic oligonucleotide
  Target: LAMA2; (-) strand; PAM type: NRG; PAM sequence: CAG
aatgtatgtaaattatccag

SEQ ID NO: 66065 - DNA, 20 bp, Artificial Sequence
  Description of Artificial Sequence: Synthetic oligonucleotide
  Target: LAMA2; (-) strand; PAM type: NRG; PAM sequence: CAG
gataatgtatgtaaattatc

SEQ ID NO: 66066 - DNA, 20 bp, Artificial Sequence
  Description of Artificial Sequence: Synthetic oligonucleotide
  Target: LAMA2; (-) strand; PAM type: NRG; PAM sequence: TAG
ctcccagggttatgataaat

SEQ ID NO: 66067 - DNA, 20 bp, Artificial Sequence
  Description of Artificial Sequence: Synthetic oligonucleotide
  Target: LAMA2; (-) strand; PAM type: NRG; PAM sequence: GGG
gcaatatttccactctccca

SEQ ID NO: 66068 - DNA, 20 bp, Artificial Sequence
  Description of Artificial Sequence: Synthetic oligonucleotide
  Target: LAMA2; (-) strand; PAM type: NRG; PAM sequence: AGG
agcaatatttccactctccc

SEQ ID NO: 66069 - DNA, 20 bp, Artificial Sequence
  Description of Artificial Sequence: Synthetic oligonucleotide
  Target: LAMA2; (-) strand; PAM type: NRG; PAM sequence: CAG
tagcaatatttccactctcc

SEQ ID NO: 66070 - DNA, 20 bp, Artificial Sequence
  Description of Artificial Sequence: Synthetic oligonucleotide
  Target: LAMA2; (-) strand; PAM type: NRG; PAM sequence: TAG
tctcactagtaaaataagaa

SEQ ID NO: 66071 - DNA, 20 bp, Artificial Sequence
  Description of Artificial Sequence: Synthetic oligonucleotide
  Target: LAMA2; (-) strand; PAM type: NRG; PAM sequence: AAG
tagtctctcactagtaaaat

SEQ ID NO: 66072 - DNA, 20 bp, Artificial Sequence
  Description of Artificial Sequence: Synthetic oligonucleotide
  Target: LAMA2; (-) strand; PAM type: NRG; PAM sequence: TAG
caaatcacttagtctctcac

SEQ ID NO: 66073 - DNA, 20 bp, Artificial Sequence
  Description of Artificial Sequence: Synthetic oligonucleotide
  Target: LAMA2; (-) strand; PAM type: NRG; PAM sequence: TAG
tcaaaaaccagcaaatcact

SEQ ID NO: 66074 - DNA, 20 bp, Artificial Sequence
  Description of Artificial Sequence: Synthetic oligonucleotide
  Target: LAMA2; (-) strand; PAM type: NRG; PAM sequence: CAG
gtagacccgggatcaaaaac

SEQ ID NO: 66075 - DNA, 20 bp, Artificial Sequence
  Description of Artificial Sequence: Synthetic oligonucleotide
  Target: LAMA2; (-) strand; PAM type: NRG; PAM sequence: GGG
ctttgtattcatgtagaccc

SEQ ID NO: 66076 - DNA, 20 bp, Artificial Sequence
  Description of Artificial Sequence: Synthetic oligonucleotide
  Target: LAMA2; (-) strand; PAM type: NRG; PAM sequence: CGG
gctttgtattcatgtagacc

SEQ ID NO: 66077 - DNA, 20 bp, Artificial Sequence
  Description of Artificial Sequence: Synthetic oligonucleotide
  Target: LAMA2; (-) strand; PAM type: NRG; PAM sequence: TAG
gatgtagctttgtattcatg

SEQ ID NO: 66078 - DNA, 20 bp, Artificial Sequence
  Description of Artificial Sequence: Synthetic oligonucleotide
  Target: LAMA2; (-) strand; PAM type: NRG; PAM sequence: TAG
tagagaactaattaaagatg

SEQ ID NO: 66079 - DNA, 20 bp, Artificial Sequence
  Description of Artificial Sequence: Synthetic oligonucleotide
  Target: LAMA2; (-) strand; PAM type: NRG; PAM sequence: AAG
accctatagagaactaatta

SEQ ID NO: 66080 - DNA, 20 bp, Artificial Sequence
  Description of Artificial Sequence: Synthetic oligonucleotide
  Target: LAMA2; (-) strand; PAM type: NRG; PAM sequence: GAG
gactgctttgagaccctata

SEQ ID NO: 66081 - DNA, 20 bp, Artificial Sequence
  Description of Artificial Sequence: Synthetic oligonucleotide
  Target: LAMA2; (-) strand; PAM type: NRG; PAM sequence: TAG
atgactgctttgagacccta

SEQ ID NO: 66082 - DNA, 20 bp, Artificial Sequence
  Description of Artificial Sequence: Synthetic oligonucleotide
  Target: LAMA2; (-) strand; PAM type: NRG; PAM sequence: GAG
tttagtaaaatgactgcttt

SEQ ID NO: 66083 - DNA, 20 bp, Artificial Sequence
  Description of Artificial Sequence: Synthetic oligonucleotide
  Target: LAMA2; (-) strand; PAM type: NRG; PAM sequence: TAG
tttaataaagatcaaaaatt

SEQ ID NO: 66084 - DNA, 20 bp, Artificial Sequence
  Description of Artificial Sequence: Synthetic oligonucleotide
  Target: LAMA2; (-) strand; PAM type: NRG; PAM sequence: AAG
ttttgcatctatgtttaata

SEQ ID NO: 66085 - DNA, 20 bp, Artificial Sequence
  Description of Artificial Sequence: Synthetic oligonucleotide
  Target: LAMA2; (-) strand; PAM type: NRG; PAM sequence: TGG
ggttaacatccctttatttg

SEQ ID NO: 66086 - DNA, 20 bp, Artificial Sequence
  Description of Artificial Sequence: Synthetic oligonucleotide
  Target: LAMA2; (-) strand; PAM type: NRG; PAM sequence: TGG
ggattcttgaacattaattt

SEQ ID NO: 66087 - DNA, 20 bp, Artificial Sequence
  Description of Artificial Sequence: Synthetic oligonucleotide
  Target: LAMA2; (-) strand; PAM type: NRG; PAM sequence: AGG
agaggtagagaaacactgaa

SEQ ID NO: 66088 - DNA, 20 bp, Artificial Sequence
  Description of Artificial Sequence: Synthetic oligonucleotide
  Target: LAMA2; (-) strand; PAM type: NRG; PAM sequence: AAG
aagaggtagagaaacactga

SEQ ID NO: 66089 - DNA, 20 bp, Artificial Sequence
  Description of Artificial Sequence: Synthetic oligonucleotide
  Target: LAMA2; (-) strand; PAM type: NRG; PAM sequence: GAG
ctggaatatttaaagaggta

SEQ ID NO: 66090 - DNA, 20 bp, Artificial Sequence
  Description of Artificial Sequence: Synthetic oligonucleotide
  Target: LAMA2; (-) strand; PAM type: NRG; PAM sequence: TAG
ttctggaatatttaaagagg

SEQ ID NO: 66091 - DNA, 20 bp, Artificial Sequence
  Description of Artificial Sequence: Synthetic oligonucleotide
  Target: LAMA2; (-) strand; PAM type: NRG; PAM sequence: AGG
catttctggaatatttaaag

SEQ ID NO: 66092 - DNA, 20 bp, Artificial Sequence
  Description of Artificial Sequence: Synthetic oligonucleotide
  Target: LAMA2; (-) strand; PAM type: NRG; PAM sequence: GAG
ccatttctggaatatttaaa

SEQ ID NO: 66093 - DNA, 20 bp, Artificial Sequence
  Description of Artificial Sequence: Synthetic oligonucleotide
  Target: LAMA2; (-) strand; PAM type: NRG; PAM sequence: AAG
caccatttctggaatattta

SEQ ID NO: 66094 - DNA, 20 bp, Artificial Sequence
  Description of Artificial Sequence: Synthetic oligonucleotide
  Target: LAMA2; (-) strand; PAM type: NRG; PAM sequence: TGG
cctgactgtatcaccatttc

SEQ ID NO: 66095 - DNA, 20 bp, Artificial Sequence
  Description of Artificial Sequence: Synthetic oligonucleotide
  Target: LAMA2; (-) strand; PAM type: NRG; PAM sequence: TGG
tctcgtcctgccaaagttcc

SEQ ID NO: 66096 - DNA, 20 bp, Artificial Sequence
  Description of Artificial Sequence: Synthetic oligonucleotide
  Target: LAMA2; (-) strand; PAM type: NRG; PAM sequence: AAG
agtaatctctcgtcctgcca

SEQ ID NO: 66097 - DNA, 20 bp, Artificial Sequence
  Description of Artificial Sequence: Synthetic oligonucleotide
  Target: LAMA2; (-) strand; PAM type: NRG; PAM sequence: AAG
tgcaactgattctatccaaa

SEQ ID NO: 66098 - DNA, 20 bp, Artificial Sequence
  Description of Artificial Sequence: Synthetic oligonucleotide
  Target: LAMA2; (-) strand; PAM type: NRG; PAM sequence: TGG
ttgatgctgtgtgaatcgtt

SEQ ID NO: 66099 - DNA, 20 bp, Artificial Sequence
  Description of Artificial Sequence: Synthetic oligonucleotide
  Target: LAMA2; (-) strand; PAM type: NRG; PAM sequence: AAG
aaaatgttttccagaagatt

SEQ ID NO: 66100 - DNA, 20 bp, Artificial Sequence
  Description of Artificial Sequence: Synthetic oligonucleotide
  Target: LAMA2; (-) strand; PAM type: NRG; PAM sequence: AAG
gtccctaaaatgttttccag

SEQ ID NO: 66101 - DNA, 20 bp, Artificial Sequence
  Description of Artificial Sequence: Synthetic oligonucleotide
  Target: LAMA2; (-) strand; PAM type: NRG; PAM sequence: CAG
gtggtccctaaaatgttttc

SEQ ID NO: 66102 - DNA, 20 bp, Artificial Sequence
  Description of Artificial Sequence: Synthetic oligonucleotide
  Target: LAMA2; (-) strand; PAM type: NRG; PAM sequence: TGG
ctgggtacaatatgtatttg

SEQ ID NO: 66103 - DNA, 20 bp, Artificial Sequence
  Description of Artificial Sequence: Synthetic oligonucleotide
  Target: LAMA2; (-) strand; PAM type: NRG; PAM sequence: GGG
cagtaagtacactacatcct

SEQ ID NO: 66104 - DNA, 20 bp, Artificial Sequence
  Description of Artificial Sequence: Synthetic oligonucleotide
  Target: LAMA2; (-) strand; PAM type: NRG; PAM sequence: TGG
gcagtaagtacactacatcc

SEQ ID NO: 66105 - DNA, 20 bp, Artificial Sequence
  Description of Artificial Sequence: Synthetic oligonucleotide
  Target: LAMA2; (-) strand; PAM type: NRG; PAM sequence: AAG
atcatagaccacactgcagt

SEQ ID NO: 66106 - DNA, 20 bp, Artificial Sequence
  Description of Artificial Sequence: Synthetic oligonucleotide
  Target: LAMA2; (-) strand; PAM type: NRG; PAM sequence: CAG
aaaaatcatagaccacactg

SEQ ID NO: 66107 - DNA, 20 bp, Artificial Sequence
  Description of Artificial Sequence: Synthetic oligonucleotide
  Target: LAMA2; (-) strand; PAM type: NRG; PAM sequence: TAG
atgcatgccaagaaaaatca

SEQ ID NO: 66108 - DNA, 20 bp, Artificial Sequence
  Description of Artificial Sequence: Synthetic oligonucleotide
  Target: LAMA2; (-) strand; PAM type: NRG; PAM sequence: AAG
gtctttgaattatgcatgcc

SEQ ID NO: 66109 - DNA, 20 bp, Artificial Sequence
  Description of Artificial Sequence: Synthetic oligonucleotide
  Target: LAMA2; (-) strand; PAM type: NRG; PAM sequence: GGG
aaaatcagtcatttctatct

SEQ ID NO: 66110 - DNA, 20 bp, Artificial Sequence
  Description of Artificial Sequence: Synthetic oligonucleotide
  Target: LAMA2; (-) strand; PAM type: NRG; PAM sequence: TGG
taaaatcagtcatttctatc

SEQ ID NO: 66111 - DNA, 20 bp, Artificial Sequence
  Description of Artificial Sequence: Synthetic oligonucleotide
  Target: LAMA2; (-) strand; PAM type: NRG; PAM sequence: CAG
attgttagaagtgctaaaat

SEQ ID NO: 66112 - DNA, 20 bp, Artificial Sequence
  Description of Artificial Sequence: Synthetic oligonucleotide
  Target: LAMA2; (-) strand; PAM type: NRG; PAM sequence: AAG
agcttttgttttattgttag

SEQ ID NO: 66113 - DNA, 20 bp, Artificial Sequence
  Description of Artificial Sequence: Synthetic oligonucleotide
  Target: LAMA2; (-) strand; PAM type: NRG; PAM sequence: TAG
aagagcttttgttttattgt

SEQ ID NO: 66114 - DNA, 20 bp, Artificial Sequence
  Description of Artificial Sequence: Synthetic oligonucleotide
  Target: LAMA2; (-) strand; PAM type: NRG; PAM sequence: GAG
gaagatattctcttgtagaa

SEQ ID NO: 66115 - DNA, 20 bp, Artificial Sequence
  Description of Artificial Sequence: Synthetic oligonucleotide
  Target: LAMA2; (-) strand; PAM type: NRG; PAM sequence: AAG
atgaagatattctcttgtag

SEQ ID NO: 66116 - DNA, 20 bp, Artificial Sequence
  Description of Artificial Sequence: Synthetic oligonucleotide
  Target: LAMA2; (-) strand; PAM type: NRG; PAM sequence: TAG
tgaatgaagatattctcttg

SEQ ID NO: 66117 - DNA, 20 bp, Artificial Sequence
  Description of Artificial Sequence: Synthetic oligonucleotide
  Target: LAMA2; (-) strand; PAM type: NRG; PAM sequence: AAG
tgatatgtttaacatgaatg

SEQ ID NO: 66118 - DNA, 20 bp, Artificial Sequence
  Description of Artificial Sequence: Synthetic oligonucleotide
  Target: LAMA2; (-) strand; PAM type: NRG; PAM sequence: GAG
aaaattcatcatacttactt

SEQ ID NO: 66119 - DNA, 20 bp, Artificial Sequence
  Description of Artificial Sequence: Synthetic oligonucleotide
  Target: LAMA2; (-) strand; PAM type: NRG; PAM sequence: TGG
accaccagatgagaccccaa

SEQ ID NO: 66120 - DNA, 20 bp, Artificial Sequence
  Description of Artificial Sequence: Synthetic oligonucleotide
  Target: LAMA2; (-) strand; PAM type: NRG; PAM sequence: GAG
tttccccatgaccaccagat

SEQ ID NO: 66121 - DNA, 20 bp, Artificial Sequence
  Description of Artificial Sequence: Synthetic oligonucleotide
  Target: LAMA2; (-) strand; PAM type: NRG; PAM sequence: CAG
gaccatttccccatgaccac

SEQ ID NO: 66122 - DNA, 20 bp, Artificial Sequence
  Description of Artificial Sequence: Synthetic oligonucleotide
  Target: LAMA2; (-) strand; PAM type: NRG; PAM sequence: AGG
tccaaagatatccaagaaag

SEQ ID NO: 66123 - DNA, 20 bp, Artificial Sequence
  Description of Artificial Sequence: Synthetic oligonucleotide
  Target: LAMA2; (-) strand; PAM type: NRG; PAM sequence: GAG
ctccaaagatatccaagaaa

SEQ ID NO: 66124 - DNA, 20 bp, Artificial Sequence
  Description of Artificial Sequence: Synthetic oligonucleotide
  Target: LAMA2; (-) strand; PAM type: NRG; PAM sequence: AAG
ctctccaaagatatccaaga

SEQ ID NO: 66125 - DNA, 20 bp, Artificial Sequence
  Description of Artificial Sequence: Synthetic oligonucleotide
  Target: LAMA2; (-) strand; PAM type: NRG; PAM sequence: AAG
tatactctccaaagatatcc

SEQ ID NO: 66126 - DNA, 20 bp, Artificial Sequence
  Description of Artificial Sequence: Synthetic oligonucleotide
  Target: LAMA2; (-) strand; PAM type: NRG; PAM sequence: AAG
gtcaaatagtatactctcca

SEQ ID NO: 66127 - DNA, 20 bp, Artificial Sequence
  Description of Artificial Sequence: Synthetic oligonucleotide
  Target: LAMA2; (-) strand; PAM type: NRG; PAM sequence: TAG
agtttgactaaagagtcaaa

SEQ ID NO: 66128 - DNA, 20 bp, Artificial Sequence
  Description of Artificial Sequence: Synthetic oligonucleotide
  Target: LAMA2; (-) strand; PAM type: NRG; PAM sequence: GAG
tgatcctcagtttgactaaa

SEQ ID NO: 66129 - DNA, 20 bp, Artificial Sequence
  Description of Artificial Sequence: Synthetic oligonucleotide
  Target: LAMA2; (-) strand; PAM type: NRG; PAM sequence: AAG
actgatcctcagtttgacta

SEQ ID NO: 66130 - DNA, 20 bp, Artificial Sequence
  Description of Artificial Sequence: Synthetic oligonucleotide
  Target: LAMA2; (-) strand; PAM type: NRG; PAM sequence: CAG
acttttaaaatactgatcct

SEQ ID NO: 66131 - DNA, 20 bp, Artificial Sequence
  Description of Artificial Sequence: Synthetic oligonucleotide
  Target: LAMA2; (-) strand; PAM type: NRG; PAM sequence: TAG
aagatggcttaagtatttta

SEQ ID NO: 66132 - DNA, 20 bp, Artificial Sequence
  Description of Artificial Sequence: Synthetic oligonucleotide
  Target: LAMA2; (-) strand; PAM type: NRG; PAM sequence: AAG
ttatttctacaagatggctt

SEQ ID NO: 66133 - DNA, 20 bp, Artificial Sequence
  Description of Artificial Sequence: Synthetic oligonucleotide
  Target: LAMA2; (-) strand; PAM type: NRG; PAM sequence: TGG
gactatttatttctacaaga

SEQ ID NO: 66134 - DNA, 20 bp, Artificial Sequence
  Description of Artificial Sequence: Synthetic oligonucleotide
  Target: LAMA2; (-) strand; PAM type: NRG; PAM sequence: AAG
ggaagactatttatttctac

SEQ ID NO: 66135 - DNA, 20 bp, Artificial Sequence
  Description of Artificial Sequence: Synthetic oligonucleotide
  Target: LAMA2; (-) strand; PAM type: NRG; PAM sequence: AAG
gagattatggtctgggtggg

SEQ ID NO: 66136 - DNA, 20 bp, Artificial Sequence
  Description of Artificial Sequence: Synthetic oligonucleotide
  Target: LAMA2; (-) strand; PAM type: NRG; PAM sequence: GGG
tcagagattatggtctgggt

SEQ ID NO: 66137 - DNA, 20 bp, Artificial Sequence
  Description of Artificial Sequence: Synthetic oligonucleotide
  Target: LAMA2; (-) strand; PAM type: NRG; PAM sequence: TGG
ttcagagattatggtctggg

SEQ ID NO: 66138 - DNA, 20 bp, Artificial Sequence
  Description of Artificial Sequence: Synthetic oligonucleotide
  Target: LAMA2; (-) strand; PAM type: NRG; PAM sequence: GGG
tatttcagagattatggtct

SEQ ID NO: 66139 - DNA, 20 bp, Artificial Sequence
  Description of Artificial Sequence: Synthetic oligonucleotide
  Target: LAMA2; (-) strand; PAM type: NRG; PAM sequence: TGG
ttatttcagagattatggtc

SEQ ID NO: 66140 - DNA, 20 bp, Artificial Sequence
  Description of Artificial Sequence: Synthetic oligonucleotide
  Target: LAMA2; (-) strand; PAM type: NRG; PAM sequence: TGG
aataattatttcagagatta

SEQ ID NO: 66141 - DNA, 20 bp, Artificial Sequence
  Description of Artificial Sequence: Synthetic oligonucleotide
  Target: LAMA2; (-) strand; PAM type: NRG; PAM sequence: GAG
aattcctaataattatttca

SEQ ID NO: 66142 - DNA, 20 bp, Artificial Sequence
  Description of Artificial Sequence: Synthetic oligonucleotide
  Target: LAMA2; (-) strand; PAM type: NRG; PAM sequence: CAG
aaaattcctaataattattt

SEQ ID NO: 66143 - DNA, 20 bp, Artificial Sequence
  Description of Artificial Sequence: Synthetic oligonucleotide
  Target: LAMA2; (-) strand; PAM type: NRG; PAM sequence: AAG
tccaaagtgtttgaaagaaa

SEQ ID NO: 66144 - DNA, 20 bp, Artificial Sequence
  Description of Artificial Sequence: Synthetic oligonucleotide
  Target: LAMA2; (-) strand; PAM type: NRG; PAM sequence: AAG
tataattccaaagtgtttga

SEQ ID NO: 66145 - DNA, 20 bp, Artificial Sequence
  Description of Artificial Sequence: Synthetic oligonucleotide
  Target: LAMA2; (-) strand; PAM type: NRG; PAM sequence: AAG
gaatctaaattataattcca

SEQ ID NO: 66146 - DNA, 20 bp, Artificial Sequence
  Description of Artificial Sequence: Synthetic oligonucleotide
  Target: LAMA2; (-) strand; PAM type: NRG; PAM sequence: AAG
gtcataaaactcagttttta

SEQ ID NO: 66147 - DNA, 20 bp, Artificial Sequence
  Description of Artificial Sequence: Synthetic oligonucleotide
  Target: LAMA2; (-) strand; PAM type: NRG; PAM sequence: CAG
gaaaaaacagtcataaaact

SEQ ID NO: 66148 - DNA, 20 bp, Artificial Sequence
  Description of Artificial Sequence: Synthetic oligonucleotide
  Target: LAMA2; (-) strand; PAM type: NRG; PAM sequence: CAG
ttgaagcttttttgaaaaaa

SEQ ID NO: 66149 - DNA, 20 bp, Artificial Sequence
  Description of Artificial Sequence: Synthetic oligonucleotide
  Target: LAMA2; (-) strand; PAM type: NRG; PAM sequence: AAG
caacatttgccaaaattttg

SEQ ID NO: 66150 - DNA, 20 bp, Artificial Sequence
  Description of Artificial Sequence: Synthetic oligonucleotide
  Target: LAMA2; (-) strand; PAM type: NRG; PAM sequence: TGG
tttgaattacttatcctaat

SEQ ID NO: 66151 - DNA, 20 bp, Artificial Sequence
  Description of Artificial Sequence: Synthetic oligonucleotide
  Target: LAMA2; (-) strand; PAM type: NRG; PAM sequence: AAG
tcacaatggatttttggctg

SEQ ID NO: 66152 - DNA, 20 bp, Artificial Sequence
  Description of Artificial Sequence: Synthetic oligonucleotide
  Target: LAMA2; (-) strand; PAM type: NRG; PAM sequence: TGG
ctattttcacaatggatttt

SEQ ID NO: 66153 - DNA, 20 bp, Artificial Sequence
  Description of Artificial Sequence: Synthetic oligonucleotide
  Target: LAMA2; (-) strand; PAM type: NRG; PAM sequence: TGG
tctaatttctattttcacaa

SEQ ID NO: 66154 - DNA, 20 bp, Artificial Sequence
  Description of Artificial Sequence: Synthetic oligonucleotide
  Target: LAMA2; (-) strand; PAM type: NRG; PAM sequence: AAG
atgatttcttaattttttga

SEQ ID NO: 66155 - DNA, 20 bp, Artificial Sequence
  Description of Artificial Sequence: Synthetic oligonucleotide
  Target: LAMA2; (-) strand; PAM type: NRG; PAM sequence: AGG
gacatttgagaaggcacaaa

SEQ ID NO: 66156 - DNA, 20 bp, Artificial Sequence
  Description of Artificial Sequence: Synthetic oligonucleotide
  Target: LAMA2; (-) strand; PAM type: NRG; PAM sequence: AAG
ggacatttgagaaggcacaa

SEQ ID NO: 66157 - DNA, 20 bp, Artificial Sequence
  Description of Artificial Sequence: Synthetic oligonucleotide
  Target: LAMA2; (-) strand; PAM type: NRG; PAM sequence: AGG
ttgaaaatggacatttgaga

SEQ ID NO: 66158 - DNA, 20 bp, Artificial Sequence
  Description of Artificial Sequence: Synthetic oligonucleotide
  Target: LAMA2; (-) strand; PAM type: NRG; PAM sequence: AAG
tttgaaaatggacatttgag

SEQ ID NO: 66159 - DNA, 20 bp, Artificial Sequence
  Description of Artificial Sequence: Synthetic oligonucleotide
  Target: LAMA2; (-) strand; PAM type: NRG; PAM sequence: GAG
ctttttgaaaatggacattt

SEQ ID NO: 66160 - DNA, 20 bp, Artificial Sequence
  Description of Artificial Sequence: Synthetic oligonucleotide
  Target: LAMA2; (-) strand; PAM type: NRG; PAM sequence: TGG
tgcatctgtctttttgaaaa

SEQ ID NO: 66161 - DNA, 20 bp, Artificial Sequence
  Description of Artificial Sequence: Synthetic oligonucleotide
  Target: LAMA2; (-) strand; PAM type: NRG; PAM sequence: TAG
tggccctgaacctacattca

SEQ ID NO: 66162 - DNA, 20 bp, Artificial Sequence
  Description of Artificial Sequence: Synthetic oligonucleotide
  Target: LAMA2; (-) strand; PAM type: NRG; PAM sequence: TGG
tttcaacagtttttgtcctc

SEQ ID NO: 66163 - DNA, 20 bp, Artificial Sequence
  Description of Artificial Sequence: Synthetic oligonucleotide
  Target: LAMA2; (-) strand; PAM type: NRG; PAM sequence: CAG
ctatatcaaggcaatttcaa

SEQ ID NO: 66164 - DNA, 20 bp, Artificial Sequence
  Description of Artificial Sequence: Synthetic oligonucleotide
  Target: LAMA2; (-) strand; PAM type: NRG; PAM sequence: AGG
caatctatgaatctatatca

SEQ ID NO: 66165 - DNA, 20 bp, Artificial Sequence
  Description of Artificial Sequence: Synthetic oligonucleotide
  Target: LAMA2; (-) strand; PAM type: NRG; PAM sequence: AAG
gcaatctatgaatctatatc

SEQ ID NO: 66166 - DNA, 20 bp, Artificial Sequence
  Description of Artificial Sequence: Synthetic oligonucleotide
  Target: LAMA2; (-) strand; PAM type: NRG; PAM sequence: AAG
tcaagggtttaaattttaaa

SEQ ID NO: 66167 - DNA, 20 bp, Artificial Sequence
  Description of Artificial Sequence: Synthetic oligonucleotide
  Target: LAMA2; (-) strand; PAM type: NRG; PAM sequence: GGG
gcctgagataccatattcaa

SEQ ID NO: 66168 - DNA, 20 bp, Artificial Sequence
  Description of Artificial Sequence: Synthetic oligonucleotide
  Target: LAMA2; (-) strand; PAM type: NRG; PAM sequence: AGG
tgcctgagataccatattca

SEQ ID NO: 66169 - DNA, 20 bp, Artificial Sequence
  Description of Artificial Sequence: Synthetic oligonucleotide
  Target: LAMA2; (-) strand; PAM type: NRG; PAM sequence: AAG
gtgcctgagataccatattc

SEQ ID NO: 66170 - DNA, 20 bp, Artificial Sequence
  Description of Artificial Sequence: Synthetic oligonucleotide
  Target: LAMA2; (-) strand; PAM type: NRG; PAM sequence: GAG
aaagaactcactctgtgcct

SEQ ID NO: 66171 - DNA, 20 bp, Artificial Sequence
  Description of Artificial Sequence: Synthetic oligonucleotide
  Target: LAMA2; (-) strand; PAM type: NRG; PAM sequence: AAG
aatcacattttgtatatata

SEQ ID NO: 66172 - DNA, 20 bp, Artificial Sequence
  Description of Artificial Sequence: Synthetic oligonucleotide
  Target: LAMA2; (-) strand; PAM type: NRG; PAM sequence: AAG
gaagacagctggtaggcggt

SEQ ID NO: 66173 - DNA, 20 bp, Artificial Sequence
  Description of Artificial Sequence: Synthetic oligonucleotide
  Target: LAMA2; (-) strand; PAM type: NRG; PAM sequence: CGG
atcggaagacagctggtagg

SEQ ID NO: 66174 - DNA, 20 bp, Artificial Sequence
  Description of Artificial Sequence: Synthetic oligonucleotide
  Target: LAMA2; (-) strand; PAM type: NRG; PAM sequence: AGG
gaaatcggaagacagctggt

SEQ ID NO: 66175 - DNA, 20 bp, Artificial Sequence
  Description of Artificial Sequence: Synthetic oligonucleotide
  Target: LAMA2; (-) strand; PAM type: NRG; PAM sequence: TAG
tgaaatcggaagacagctgg

SEQ ID NO: 66176 - DNA, 20 bp, Artificial Sequence
  Description of Artificial Sequence: Synthetic oligonucleotide
  Target: LAMA2; (-) strand; PAM type: NRG; PAM sequence: TGG
tggtgaaatcggaagacagc

SEQ ID NO: 66177 - DNA, 20 bp, Artificial Sequence
  Description of Artificial Sequence: Synthetic oligonucleotide
  Target: LAMA2; (-) strand; PAM type: NRG; PAM sequence: CAG
catctggtgaaatcggaaga

SEQ ID NO: 66178 - DNA, 20 bp, Artificial Sequence
  Description of Artificial Sequence: Synthetic oligonucleotide
  Target: LAMA2; (-) strand; PAM type: NRG; PAM sequence: AAG
aggtcatctggtgaaatcgg

SEQ ID NO: 66179 - DNA, 20 bp, Artificial Sequence
  Description of Artificial Sequence: Synthetic oligonucleotide
  Target: LAMA2; (-) strand; PAM type: NRG; PAM sequence: CGG
ggaaggtcatctggtgaaat

SEQ ID NO: 66180 - DNA, 20 bp, Artificial Sequence
  Description of Artificial Sequence: Synthetic oligonucleotide
  Target: LAMA2; (-) strand; PAM type: NRG; PAM sequence: TGG
aacttatagggaaggtcatc

SEQ ID NO: 66181 - DNA, 20 bp, Artificial Sequence
  Description of Artificial Sequence: Synthetic oligonucleotide
  Target: LAMA2; (-) strand; PAM type: NRG; PAM sequence: AGG
acgtgtcaaacttataggga

SEQ ID NO: 66182 - DNA, 20 bp, Artificial Sequence
  Description of Artificial Sequence: Synthetic oligonucleotide
  Target: LAMA2; (-) strand; PAM type: NRG; PAM sequence: AAG
tacgtgtcaaacttataggg

SEQ ID NO: 66183 - DNA, 20 bp, Artificial Sequence
  Description of Artificial Sequence: Synthetic oligonucleotide
  Target: LAMA2; (-) strand; PAM type: NRG; PAM sequence: GGG
agttacgtgtcaaacttata

SEQ ID NO: 66184 - DNA, 20 bp, Artificial Sequence
  Description of Artificial Sequence: Synthetic oligonucleotide
  Target: LAMA2; (-) strand; PAM type: NRG; PAM sequence: AGG
gagttacgtgtcaaacttat

SEQ ID NO: 66185 - DNA, 20 bp, Artificial Sequence
  Description of Artificial Sequence: Synthetic oligonucleotide
  Target: LAMA2; (-) strand; PAM type: NRG; PAM sequence: TAG
tgagttacgtgtcaaactta

SEQ ID NO: 66186 - DNA, 20 bp, Artificial Sequence
  Description of Artificial Sequence: Synthetic oligonucleotide
  Target: LAMA2; (-) strand; PAM type: NRG; PAM sequence: GAG
tccagagccatgcattttat

SEQ ID NO: 66187 - DNA, 20 bp, Artificial Sequence
  Description of Artificial Sequence: Synthetic oligonucleotide
  Target: LAMA2; (-) strand; PAM type: NRG; PAM sequence: GAG
gtcatgataattgttctcca

SEQ ID NO: 66188 - DNA, 20 bp, Artificial Sequence
  Description of Artificial Sequence: Synthetic oligonucleotide
  Target: LAMA2; (-) strand; PAM type: NRG; PAM sequence: CAG
ccgtcatgataattgttctc

SEQ ID NO: 66189 - DNA, 20 bp, Artificial Sequence
  Description of Artificial Sequence: Synthetic oligonucleotide
  Target: LAMA2; (-) strand; PAM type: NRG; PAM sequence: AAG
atcctgccatataatcaaga

SEQ ID NO: 66190 - DNA, 20 bp, Artificial Sequence
  Description of Artificial Sequence: Synthetic oligonucleotide
  Target: LAMA2; (-) strand; PAM type: NRG; PAM sequence: AAG
gaggatcctgccatataatc

SEQ ID NO: 66191 - DNA, 20 bp, Artificial Sequence
  Description of Artificial Sequence: Synthetic oligonucleotide
  Target: LAMA2; (-) strand; PAM type: NRG; PAM sequence: AGG
caaaagcagaggtgggaaag

SEQ ID NO: 66192 - DNA, 20 bp, Artificial Sequence
  Description of Artificial Sequence: Synthetic oligonucleotide
  Target: LAMA2; (-) strand; PAM type: NRG; PAM sequence: GAG
tcaaaagcagaggtgggaaa

SEQ ID NO: 66193 - DNA, 20 bp, Artificial Sequence
  Description of Artificial Sequence: Synthetic oligonucleotide
  Target: LAMA2; (-) strand; PAM type: NRG; PAM sequence: AAG
cttcaaaagcagaggtggga

SEQ ID NO: 66194 - DNA, 20 bp, Artificial Sequence
  Description of Artificial Sequence: Synthetic oligonucleotide
  Target: LAMA2; (-) strand; PAM type: NRG; PAM sequence: GGG
tatccttcaaaagcagaggt

SEQ ID NO: 66195 - DNA, 20 bp, Artificial Sequence
  Description of Artificial Sequence: Synthetic oligonucleotide
  Target: LAMA2; (-) strand; PAM type: NRG; PAM sequence: TGG
atatccttcaaaagcagagg

SEQ ID NO: 66196 - DNA, 20 bp, Artificial Sequence
  Description of Artificial Sequence: Synthetic oligonucleotide
  Target: LAMA2; (-) strand; PAM type: NRG; PAM sequence: AGG
ttaatatccttcaaaagcag

SEQ ID NO: 66197 - DNA, 20 bp, Artificial Sequence
  Description of Artificial Sequence: Synthetic oligonucleotide
  Target: LAMA2; (-) strand; PAM type: NRG; PAM sequence: GAG
tttaatatccttcaaaagca

SEQ ID NO: 66198 - DNA, 20 bp, Artificial Sequence
  Description of Artificial Sequence: Synthetic oligonucleotide
  Target: LAMA2; (-) strand; PAM type: NRG; PAM sequence: CAG
cctttaatatccttcaaaag

SEQ ID NO: 66199 - DNA, 20 bp, Artificial Sequence
  Description of Artificial Sequence: Synthetic oligonucleotide
  Target: LAMA2; (-) strand; PAM type: NRG; PAM sequence: AAG
tcacctttaatatccttcaa

SEQ ID NO: 66200 - DNA, 20 bp, Artificial Sequence
  Description of Artificial Sequence: Synthetic oligonucleotide
  Target: LAMA2; (-) strand; PAM type: NRG; PAM sequence: GAG
tcagacaagcagaacaactg

SEQ ID NO: 66201 - DNA, 20 bp, Artificial Sequence
  Description of Artificial Sequence: Synthetic oligonucleotide
  Target: LAMA2; (-) strand; PAM type: NRG; PAM sequence: TGG
aatcagacaagcagaacaac

SEQ ID NO: 66202 - DNA, 20 bp, Artificial Sequence
  Description of Artificial Sequence: Synthetic oligonucleotide
  Target: LAMA2; (-) strand; PAM type: NRG; PAM sequence: CAG
cactgttacaatcagacaag

SEQ ID NO: 66203 - DNA, 20 bp, Artificial Sequence
  Description of Artificial Sequence: Synthetic oligonucleotide
  Target: LAMA2; (-) strand; PAM type: NRG; PAM sequence: AAG
cttcactgttacaatcagac

SEQ ID NO: 66204 - DNA, 20 bp, Artificial Sequence
  Description of Artificial Sequence: Synthetic oligonucleotide
  Target: LAMA2; (-) strand; PAM type: NRG; PAM sequence: CAG
gtctccttcactgttacaat

SEQ ID NO: 66205 - DNA, 20 bp, Artificial Sequence
  Description of Artificial Sequence: Synthetic oligonucleotide
  Target: LAMA2; (-) strand; PAM type: NRG; PAM sequence: TAG
tgaaacactgagccataagc

SEQ ID NO: 66206 - DNA, 20 bp, Artificial Sequence
  Description of Artificial Sequence: Synthetic oligonucleotide
  Target: LAMA2; (-) strand; PAM type: NRG; PAM sequence: AAG
acattgaaacactgagccat

SEQ ID NO: 66207 - DNA, 20 bp, Artificial Sequence
  Description of Artificial Sequence: Synthetic oligonucleotide
  Target: LAMA2; (-) strand; PAM type: NRG; PAM sequence: GAG
cagaataacattgaaacact

SEQ ID NO: 66208 - DNA, 20 bp, Artificial Sequence
  Description of Artificial Sequence: Synthetic oligonucleotide
  Target: LAMA2; (-) strand; PAM type: NRG; PAM sequence: CAG
ctgctggcaaacaagtgctg

SEQ ID NO: 66209 - DNA, 20 bp, Artificial Sequence
  Description of Artificial Sequence: Synthetic oligonucleotide
  Target: LAMA2; (-) strand; PAM type: NRG; PAM sequence: AAG
cctaacagctgctggcaaac

SEQ ID NO: 66210 - DNA, 20 bp, Artificial Sequence
  Description of Artificial Sequence: Synthetic oligonucleotide
  Target: LAMA2; (-) strand; PAM type: NRG; PAM sequence: TGG
caataatccctaacagctgc

SEQ ID NO: 66211 - DNA, 20 bp, Artificial Sequence
  Description of Artificial Sequence: Synthetic oligonucleotide
  Target: LAMA2; (-) strand; PAM type: NRG; PAM sequence: CAG
aaacctgcaataatccctaa

SEQ ID NO: 66212 - DNA, 20 bp, Artificial Sequence
  Description of Artificial Sequence: Synthetic oligonucleotide
  Target: LAMA2; (-) strand; PAM type: NRG; PAM sequence: AAG
ttgccacactgttcctgaca

SEQ ID NO: 66213 - DNA, 20 bp, Artificial Sequence
  Description of Artificial Sequence: Synthetic oligonucleotide
  Target: LAMA2; (-) strand; PAM type: NRG; PAM sequence: CAG
aaacaaaccccttcagtagc

SEQ ID NO: 66214 - DNA, 20 bp, Artificial Sequence
  Description of Artificial Sequence: Synthetic oligonucleotide
  Target: LAMA2; (-) strand; PAM type: NRG; PAM sequence: TAG
ttttaaacaaaccccttcag

SEQ ID NO: 66215 - DNA, 20 bp, Artificial Sequence
  Description of Artificial Sequence: Synthetic oligonucleotide
  Target: LAMA2; (-) strand; PAM type: NRG; PAM sequence: CAG
atcttttaaacaaacccctt

SEQ ID NO: 66216 - DNA, 20 bp, Artificial Sequence
  Description of Artificial Sequence: Synthetic oligonucleotide
  Target: LAMA2; (-) strand; PAM type: NRG; PAM sequence: GAG
ttaacatctttgactctgaa

SEQ ID NO: 66217 - DNA, 20 bp, Artificial Sequence
  Description of Artificial Sequence: Synthetic oligonucleotide
  Target: LAMA2; (-) strand; PAM type: NRG; PAM sequence: AAG
aattaacatctttgactctg

SEQ ID NO: 66218 - DNA, 20 bp, Artificial Sequence
  Description of Artificial Sequence: Synthetic oligonucleotide
  Target: LAMA2; (-) strand; PAM type: NRG; PAM sequence: TAG
gatcattctggttcaccagg

SEQ ID NO: 66219 - DNA, 20 bp, Artificial Sequence
  Description of Artificial Sequence: Synthetic oligonucleotide
  Target: LAMA2; (-) strand; PAM type: NRG; PAM sequence: AGG
caggatcattctggttcacc

SEQ ID NO: 66220 - DNA, 20 bp, Artificial Sequence
  Description of Artificial Sequence: Synthetic oligonucleotide
  Target: LAMA2; (-) strand; PAM type: NRG; PAM sequence: CAG
gcaggatcattctggttcac

SEQ ID NO: 66221 - DNA, 20 bp, Artificial Sequence
  Description of Artificial Sequence: Synthetic oligonucleotide
  Target: LAMA2; (-) strand; PAM type: NRG; PAM sequence: TGG
agatatatgcaggatcattc

SEQ ID NO: 66222 - DNA, 20 bp, Artificial Sequence
  Description of Artificial Sequence: Synthetic oligonucleotide
  Target: LAMA2; (-) strand; PAM type: NRG; PAM sequence: AGG
gtctgtcccaagatatatgc

SEQ ID NO: 66223 - DNA, 20 bp, Artificial Sequence
  Description of Artificial Sequence: Synthetic oligonucleotide
  Target: LAMA2; (-) strand; PAM type: NRG; PAM sequence: CAG
agtctgtcccaagatatatg

SEQ ID NO: 66224 - DNA, 20 bp, Artificial Sequence
  Description of Artificial Sequence: Synthetic oligonucleotide
  Target: LAMA2; (-) strand; PAM type: NRG; PAM sequence: AAG
agaaaatataagtctgtccc

SEQ ID NO: 66225 - DNA, 20 bp, Artificial Sequence
  Description of Artificial Sequence: Synthetic oligonucleotide
  Target: LAMA2; (-) strand; PAM type: NRG; PAM sequence: AAG
tacccagatttagaaaatat

SEQ ID NO: 66226 - DNA, 20 bp, Artificial Sequence
  Description of Artificial Sequence: Synthetic oligonucleotide
  Target: LAMA2; (-) strand; PAM type: NRG; PAM sequence: TAG
gtatgatcattacccagatt

SEQ ID NO: 66227 - DNA, 20 bp, Artificial Sequence
  Description of Artificial Sequence: Synthetic oligonucleotide
  Target: LAMA2; (-) strand; PAM type: NRG; PAM sequence: CAG
gtgcatgtatgatcattacc

SEQ ID NO: 66228 - DNA, 20 bp, Artificial Sequence
  Description of Artificial Sequence: Synthetic oligonucleotide
  Target: LAMA2; (-) strand; PAM type: NRG; PAM sequence: CAG
ggagaagatggtcttctttt

SEQ ID NO: 66229 - DNA, 20 bp, Artificial Sequence
  Description of Artificial Sequence: Synthetic oligonucleotide
  Target: LAMA2; (-) strand; PAM type: NRG; PAM sequence: TGG
tgtatatttctgggagaaga

SEQ ID NO: 66230 - DNA, 20 bp, Artificial Sequence
  Description of Artificial Sequence: Synthetic oligonucleotide
  Target: LAMA2; (-) strand; PAM type: NRG; PAM sequence: AAG
gtgttgtatatttctgggag

SEQ ID NO: 66231 - DNA, 20 bp, Artificial Sequence
  Description of Artificial Sequence: Synthetic oligonucleotide
  Target: LAMA2; (-) strand; PAM type: NRG; PAM sequence: GAG
tcagtgttgtatatttctgg

SEQ ID NO: 66232 - DNA, 20 bp, Artificial Sequence
  Description of Artificial Sequence: Synthetic oligonucleotide
  Target: LAMA2; (-) strand; PAM type: NRG; PAM sequence: GGG
tttcagtgttgtatatttct

SEQ ID NO: 66233 - DNA, 20 bp, Artificial Sequence
  Description of Artificial Sequence: Synthetic oligonucleotide
  Target: LAMA2; (-) strand; PAM type: NRG; PAM sequence: TGG
ctttcagtgttgtatatttc

SEQ ID NO: 66234 - DNA, 20 bp, Artificial Sequence
  Description of Artificial Sequence: Synthetic oligonucleotide
  Target: LAMA2; (-) strand; PAM type: NRG; PAM sequence: CAG
atgtttggtagagaatcttt

SEQ ID NO: 66235 - DNA, 20 bp, Artificial Sequence
  Description of Artificial Sequence: Synthetic oligonucleotide
  Target: LAMA2; (-) strand; PAM type: NRG; PAM sequence: GAG
cttttcatgcatgtttggta

SEQ ID NO: 66236 - DNA, 20 bp, Artificial Sequence
  Description of Artificial Sequence: Synthetic oligonucleotide
  Target: LAMA2; (-) strand; PAM type: NRG; PAM sequence: TAG
atcttttcatgcatgtttgg

SEQ ID NO: 66237 - DNA, 20 bp, Artificial Sequence
  Description of Artificial Sequence: Synthetic oligonucleotide
  Target: LAMA2; (-) strand; PAM type: NRG; PAM sequence: TGG
gctatcttttcatgcatgtt

SEQ ID NO: 66238 - DNA, 20 bp, Artificial Sequence
  Description of Artificial Sequence: Synthetic oligonucleotide
  Target: LAMA2; (-) strand; PAM type: NRG; PAM sequence: AAG
aagaggaaagaaacaaatta

SEQ ID NO: 66239 - DNA, 20 bp, Artificial Sequence
  Description of Artificial Sequence: Synthetic oligonucleotide
  Target: LAMA2; (-) strand; PAM type: NRG; PAM sequence: AAG
ttcacctaaacgaaagagga

SEQ ID NO: 66240 - DNA, 20 bp, Artificial Sequence
  Description of Artificial Sequence: Synthetic oligonucleotide
  Target: LAMA2; (-) strand; PAM type: NRG; PAM sequence: AGG
ctatttcacctaaacgaaag

SEQ ID NO: 66241 - DNA, 20 bp, Artificial Sequence
  Description of Artificial Sequence: Synthetic oligonucleotide
  Target: LAMA2; (-) strand; PAM type: NRG; PAM sequence: GAG
tctatttcacctaaacgaaa

SEQ ID NO: 66242 - DNA, 20 bp, Artificial Sequence
  Description of Artificial Sequence: Synthetic oligonucleotide
  Target: LAMA2; (-) strand; PAM type: NRG; PAM sequence: AAG
cctctatttcacctaaacga

SEQ ID NO: 66243 - DNA, 20 bp, Artificial Sequence
  Description of Artificial Sequence: Synthetic oligonucleotide
  Target: LAMA2; (-) strand; PAM type: NRG; PAM sequence: GAG
atatgaaattctaatgatca

SEQ ID NO: 66244 - DNA, 20 bp, Artificial Sequence
  Description of Artificial Sequence: Synthetic oligonucleotide
  Target: LAMA2; (-) strand; PAM type: NRG; PAM sequence: CAG
ccatatgaaattctaatgat

SEQ ID NO: 66245 - DNA, 20 bp, Artificial Sequence
  Description of Artificial Sequence: Synthetic oligonucleotide
  Target: LAMA2; (-) strand; PAM type: NRG; PAM sequence: GAG
ctcaaatccactatgtgtgt

SEQ ID NO: 66246 - DNA, 20 bp, Artificial Sequence
  Description of Artificial Sequence: Synthetic oligonucleotide
  Target: LAMA2; (-) strand; PAM type: NRG; PAM sequence: TAG
gaggagagaattttctagat

SEQ ID NO: 66247 - DNA, 20 bp, Artificial Sequence
  Description of Artificial Sequence: Synthetic oligonucleotide
  Target: LAMA2; (-) strand; PAM type: NRG; PAM sequence: TAG
ctcttgaggagagaattttc

SEQ ID NO: 66248 - DNA, 20 bp, Artificial Sequence
  Description of Artificial Sequence: Synthetic oligonucleotide
  Target: LAMA2; (-) strand; PAM type: NRG; PAM sequence: GAG
aatcccttttctcttgagga

SEQ ID NO: 66249 - DNA, 20 bp, Artificial Sequence
  Description of Artificial Sequence: Synthetic oligonucleotide
  Target: LAMA2; (-) strand; PAM type: NRG; PAM sequence: GAG
taaatcccttttctcttgag

SEQ ID NO: 66250 - DNA, 20 bp, Artificial Sequence
  Description of Artificial Sequence: Synthetic oligonucleotide
  Target: LAMA2; (-) strand; PAM type: NRG; PAM sequence: AGG
tttaaatcccttttctcttg

SEQ ID NO: 66251 - DNA, 20 bp, Artificial Sequence
  Description of Artificial Sequence: Synthetic oligonucleotide
  Target: LAMA2; (-) strand; PAM type: NRG; PAM sequence: GAG
ttttaaatcccttttctctt

SEQ ID NO: 66252 - DNA, 20 bp, Artificial Sequence
  Description of Artificial Sequence: Synthetic oligonucleotide
  Target: LAMA2; (-) strand; PAM type: NRG; PAM sequence: AAG
tgaatttaaatacatcatga

SEQ ID NO: 66253 - DNA, 20 bp, Artificial Sequence
  Description of Artificial Sequence: Synthetic oligonucleotide
  Target: LAMA2; (-) strand; PAM type: NRG; PAM sequence: AAG
tccctatttaaagtaggcaa

SEQ ID NO: 66254 - DNA, 20 bp, Artificial Sequence
  Description of Artificial Sequence: Synthetic oligonucleotide
  Target: LAMA2; (-) strand; PAM type: NRG; PAM sequence: AGG
accttttccctatttaaagt

SEQ ID NO: 66255 - DNA, 20 bp, Artificial Sequence
  Description of Artificial Sequence: Synthetic oligonucleotide
  Target: LAMA2; (-) strand; PAM type: NRG; PAM sequence: TAG
caccttttccctatttaaag

SEQ ID NO: 66256 - DNA, 20 bp, Artificial Sequence
  Description of Artificial Sequence: Synthetic oligonucleotide
  Target: LAMA2; (-) strand; PAM type: NRG; PAM sequence: AAG
agtcaccttttccctattta

SEQ ID NO: 66257 - DNA, 20 bp, Artificial Sequence
  Description of Artificial Sequence: Synthetic oligonucleotide
  Target: LAMA2; (-) strand; PAM type: NRG; PAM sequence: GAG
aatttcacgttatgacctta

SEQ ID NO: 66258 - DNA, 20 bp, Artificial Sequence
  Description of Artificial Sequence: Synthetic oligonucleotide
  Target: LAMA2; (-) strand; PAM type: NRG; PAM sequence: TAG
tcaatttcacgttatgacct

SEQ ID NO: 66259 - DNA, 20 bp, Artificial Sequence
  Description of Artificial Sequence: Synthetic oligonucleotide
  Target: LAMA2; (-) strand; PAM type: NRG; PAM sequence: AAG
attctataccaggaagggta

SEQ ID NO: 66260 - DNA, 20 bp, Artificial Sequence
  Description of Artificial Sequence: Synthetic oligonucleotide
  Target: LAMA2; (-) strand; PAM type: NRG; PAM sequence: GGG
atgccattctataccaggaa

SEQ ID NO: 66261 - DNA, 20 bp, Artificial Sequence
  Description of Artificial Sequence: Synthetic oligonucleotide
  Target: LAMA2; (-) strand; PAM type: NRG; PAM sequence: AGG
aatgccattctataccagga

SEQ ID NO: 66262 - DNA, 20 bp, Artificial Sequence
  Description of Artificial Sequence: Synthetic oligonucleotide
  Target: LAMA2; (-) strand; PAM type: NRG; PAM sequence: AAG
aaatgccattctataccagg

SEQ ID NO: 66263 - DNA, 20 bp, Artificial Sequence
  Description of Artificial Sequence: Synthetic oligonucleotide
  Target: LAMA2; (-) strand; PAM type: NRG; PAM sequence: AGG
gtgaaatgccattctatacc

SEQ ID NO: 66264 - DNA, 20 bp, Artificial Sequence
  Description of Artificial Sequence: Synthetic oligonucleotide
  Target: LAMA2; (-) strand; PAM type: NRG; PAM sequence: CAG
tgtgaaatgccattctatac

SEQ ID NO: 66265 - DNA, 20 bp, Artificial Sequence
  Description of Artificial Sequence: Synthetic oligonucleotide
  Target: LAMA2; (-) strand; PAM type: NRG; PAM sequence: TAG
aattcttcagtgcttctccc

SEQ ID NO: 66266 - DNA, 20 bp, Artificial Sequence
  Description of Artificial Sequence: Synthetic oligonucleotide
  Target: LAMA2; (-) strand; PAM type: NRG; PAM sequence: CAG
cccactgcccattaattctt

SEQ ID NO: 66267 - DNA, 20 bp, Artificial Sequence
  Description of Artificial Sequence: Synthetic oligonucleotide
  Target: LAMA2; (-) strand; PAM type: NRG; PAM sequence: AAG
tgttaccacgacaaataata

SEQ ID NO: 66268 - DNA, 20 bp, Artificial Sequence
  Description of Artificial Sequence: Synthetic oligonucleotide
  Target: LAMA2; (-) strand; PAM type: NRG; PAM sequence: AAG
taggagtgatagattgtata

SEQ ID NO: 66269 - DNA, 20 bp, Artificial Sequence
  Description of Artificial Sequence: Synthetic oligonucleotide
  Target: LAMA2; (-) strand; PAM type: NRG; PAM sequence: TAG
atttggacaagtaggagtga

SEQ ID NO: 66270 - DNA, 20 bp, Artificial Sequence
  Description of Artificial Sequence: Synthetic oligonucleotide
  Target: LAMA2; (-) strand; PAM type: NRG; PAM sequence: GAG
acacatatttggacaagtag

SEQ ID NO: 66271 - DNA, 20 bp, Artificial Sequence
  Description of Artificial Sequence: Synthetic oligonucleotide
  Target: LAMA2; (-) strand; PAM type: NRG; PAM sequence: AGG
aaacacatatttggacaagt

SEQ ID NO: 66272 - DNA, 20 bp, Artificial Sequence
  Description of Artificial Sequence: Synthetic oligonucleotide
  Target: LAMA2; (-) strand; PAM type: NRG; PAM sequence: TAG
gaaacacatatttggacaag

SEQ ID NO: 66273 - DNA, 20 bp, Artificial Sequence
  Description of Artificial Sequence: Synthetic oligonucleotide
  Target: LAMA2; (-) strand; PAM type: NRG; PAM sequence: AAG
ggagaaacacatatttggac

SEQ ID NO: 66274 - DNA, 20 bp, Artificial Sequence
  Description of Artificial Sequence: Synthetic oligonucleotide
  Target: LAMA2; (-) strand; PAM type: NRG; PAM sequence: TGG
cctcaggagaaacacatatt

SEQ ID NO: 66275 - DNA, 20 bp, Artificial Sequence
  Description of Artificial Sequence: Synthetic oligonucleotide
  Target: LAMA2; (-) strand; PAM type: NRG; PAM sequence: GAG
tttttgaaattttacctcag

SEQ ID NO: 66276 - DNA, 20 bp, Artificial Sequence
  Description of Artificial Sequence: Synthetic oligonucleotide
  Target: LAMA2; (-) strand; PAM type: NRG; PAM sequence: AGG
aatttttgaaattttacctc

SEQ ID NO: 66277 - DNA, 20 bp, Artificial Sequence
  Description of Artificial Sequence: Synthetic oligonucleotide
  Target: LAMA2; (-) strand; PAM type: NRG; PAM sequence: CAG
gaatttttgaaattttacct

SEQ ID NO: 66278 - DNA, 20 bp, Artificial Sequence
  Description of Artificial Sequence: Synthetic oligonucleotide
  Target: LAMA2; (-) strand; PAM type: NRG; PAM sequence: TAG
agaacctccaaaacatcatc

SEQ ID NO: 66279 - DNA, 20 bp, Artificial Sequence
  Description of Artificial Sequence: Synthetic oligonucleotide
  Target: LAMA2; (-) strand; PAM type: NRG; PAM sequence: CAG
tataccattcaccttctcta

SEQ ID NO: 66280 - DNA, 20 bp, Artificial Sequence
  Description of Artificial Sequence: Synthetic oligonucleotide
  Target: LAMA2; (-) strand; PAM type: NRG; PAM sequence: TAG
aaatcatacaagatttgctt

SEQ ID NO: 66281 - DNA, 20 bp, Artificial Sequence
  Description of Artificial Sequence: Synthetic oligonucleotide
  Target: LAMA2; (-) strand; PAM type: NRG; PAM sequence: AAG
attaaataaaaaaatcatac

SEQ ID NO: 66282 - DNA, 20 bp, Artificial Sequence
  Description of Artificial Sequence: Synthetic oligonucleotide
  Target: LAMA2; (-) strand; PAM type: NRG; PAM sequence: AAG
agtaaagacataggtatagg

SEQ ID NO: 66283 - DNA, 20 bp, Artificial Sequence
  Description of Artificial Sequence: Synthetic oligonucleotide
  Target: LAMA2; (-) strand; PAM type: NRG; PAM sequence: AGG
cacagtaaagacataggtat

SEQ ID NO: 66284 - DNA, 20 bp, Artificial Sequence
  Description of Artificial Sequence: Synthetic oligonucleotide
  Target: LAMA2; (-) strand; PAM type: NRG; PAM sequence: TAG
acacagtaaagacataggta

SEQ ID NO: 66285 - DNA, 20 bp, Artificial Sequence
  Description of Artificial Sequence: Synthetic oligonucleotide
  Target: LAMA2; (-) strand; PAM type: NRG; PAM sequence: AGG
tgtatacacagtaaagacat

SEQ ID NO: 66286 - DNA, 20 bp, Artificial Sequence
  Description of Artificial Sequence: Synthetic oligonucleotide
  Target: LAMA2; (-) strand; PAM type: NRG; PAM sequence: TAG
atgtatacacagtaaagaca

SEQ ID NO: 66287 - DNA, 20 bp, Artificial Sequence
  Description of Artificial Sequence: Synthetic oligonucleotide
  Target: LAMA2; (-) strand; PAM type: NRG; PAM sequence: AAG
gtgtatatgtatacacagta

SEQ ID NO: 66288 - DNA, 20 bp, Artificial Sequence
  Description of Artificial Sequence: Synthetic oligonucleotide
  Target: LAMA2; (-) strand; PAM type: NRG; PAM sequence: CAG
tatgggtgtatatgtataca

SEQ ID NO: 66289 - DNA, 20 bp, Artificial Sequence
  Description of Artificial Sequence: Synthetic oligonucleotide
  Target: LAMA2; (-) strand; PAM type: NRG; PAM sequence: GGG
acgcgaatatatagggatat

SEQ ID NO: 66290 - DNA, 20 bp, Artificial Sequence
  Description of Artificial Sequence: Synthetic oligonucleotide
  Target: LAMA2; (-) strand; PAM type: NRG; PAM sequence: TGG
cacgcgaatatatagggata

SEQ ID NO: 66291 - DNA, 20 bp, Artificial Sequence
  Description of Artificial Sequence: Synthetic oligonucleotide
  Target: LAMA2; (-) strand; PAM type: NRG; PAM sequence: GGG
agtgaacacgcgaatatata

SEQ ID NO: 66292 - DNA, 20 bp, Artificial Sequence
  Description of Artificial Sequence: Synthetic oligonucleotide
  Target: LAMA2; (-) strand; PAM type: NRG; PAM sequence: AGG
aagtgaacacgcgaatatat

SEQ ID NO: 66293 - DNA, 20 bp, Artificial Sequence
  Description of Artificial Sequence: Synthetic oligonucleotide
  Target: LAMA2; (-) strand; PAM type: NRG; PAM sequence: TAG
aaagtgaacacgcgaatata

SEQ ID NO: 66294 - DNA, 20 bp, Artificial Sequence
  Description of Artificial Sequence: Synthetic oligonucleotide
  Target: LAMA2; (-) strand; PAM type: NRG; PAM sequence: AAG
caaataaaatttgaaatcaa

SEQ ID NO: 66295 - DNA, 20 bp, Artificial Sequence
  Description of Artificial Sequence: Synthetic oligonucleotide
  Target: LAMA2; (-) strand; PAM type: NRG; PAM sequence: AAG
actccatctcaaagaaaaaa

SEQ ID NO: 66296 - DNA, 20 bp, Artificial Sequence
  Description of Artificial Sequence: Synthetic oligonucleotide
  Target: LAMA2; (-) strand; PAM type: NRG; PAM sequence: AAG
cagagcgagactccatctca

SEQ ID NO: 66297 - DNA, 20 bp, Artificial Sequence
  Description of Artificial Sequence: Synthetic oligonucleotide
  Target: LAMA2; (-) strand; PAM type: NRG; PAM sequence: GAG
cagccagggggtgacagagc

SEQ ID NO: 66298 - DNA, 20 bp, Artificial Sequence
  Description of Artificial Sequence: Synthetic oligonucleotide
  Target: LAMA2; (-) strand; PAM type: NRG; PAM sequence: GAG
actccagccagggggtgaca

SEQ ID NO: 66299 - DNA, 20 bp, Artificial Sequence
  Description of Artificial Sequence: Synthetic oligonucleotide
  Target: LAMA2; (-) strand; PAM type: NRG; PAM sequence: CAG
gcactccagccagggggtga

SEQ ID NO: 66300 - DNA, 20 bp, Artificial Sequence
  Description of Artificial Sequence: Synthetic oligonucleotide
  Target: LAMA2; (-) strand; PAM type: NRG; PAM sequence: GGG
gccactgcactccagccagg

SEQ ID NO: 66301 - DNA, 20 bp, Artificial Sequence
  Description of Artificial Sequence: Synthetic oligonucleotide
  Target: LAMA2; (-) strand; PAM type: NRG; PAM sequence: GGG
agccactgcactccagccag

SEQ ID NO: 66302 - DNA, 20 bp, Artificial Sequence
  Description of Artificial Sequence: Synthetic oligonucleotide
  Target: LAMA2; (-) strand; PAM type: NRG; PAM sequence: GGG
aagccactgcactccagcca

SEQ ID NO: 66303 - DNA, 20 bp, Artificial Sequence
  Description of Artificial Sequence: Synthetic oligonucleotide
  Target: LAMA2; (-) strand; PAM type: NRG; PAM sequence: AGG
caagccactgcactccagcc

SEQ ID NO: 66304 - DNA, 20 bp, Artificial Sequence
  Description of Artificial Sequence: Synthetic oligonucleotide
  Target: LAMA2; (-) strand; PAM type: NRG; PAM sequence: CAG
tcaagccactgcactccagc

SEQ ID NO: 66305 - DNA, 20 bp, Artificial Sequence
  Description of Artificial Sequence: Synthetic oligonucleotide
  Target: LAMA2; (-) strand; PAM type: NRG; PAM sequence: CAG
aagatcaagccactgcactc

SEQ ID NO: 66306 - DNA, 20 bp, Artificial Sequence
  Description of Artificial Sequence: Synthetic oligonucleotide
  Target: LAMA2; (-) strand; PAM type: NRG; PAM sequence: AAG
ggttgcagtgagccaagatc

SEQ ID NO: 66307 - DNA, 20 bp, Artificial Sequence
  Description of Artificial Sequence: Synthetic oligonucleotide
  Target: LAMA2; (-) strand; PAM type: NRG; PAM sequence: AAG
ggctgaggttgcagtgagcc

SEQ ID NO: 66308 - DNA, 20 bp, Artificial Sequence
  Description of Artificial Sequence: Synthetic oligonucleotide
  Target: LAMA2; (-) strand; PAM type: NRG; PAM sequence: GAG
tgggaggctgaggttgcagt

SEQ ID NO: 66309 - DNA, 20 bp, Artificial Sequence
  Description of Artificial Sequence: Synthetic oligonucleotide
  Target: LAMA2; (-) strand; PAM type: NRG; PAM sequence: CAG
aacctgggaggctgaggttg

SEQ ID NO: 66310 - DNA, 20 bp, Artificial Sequence
  Description of Artificial Sequence: Synthetic oligonucleotide
  Target: LAMA2; (-) strand; PAM type: NRG; PAM sequence: AGG
tacttgaacctgggaggctg

SEQ ID NO: 66311 - DNA, 20 bp, Artificial Sequence
  Description of Artificial Sequence: Synthetic oligonucleotide
  Target: LAMA2; (-) strand; PAM type: NRG; PAM sequence: GAG
ttacttgaacctgggaggct

SEQ ID NO: 66312 - DNA, 20 bp, Artificial Sequence
  Description of Artificial Sequence: Synthetic oligonucleotide
  Target: LAMA2; (-) strand; PAM type: NRG; PAM sequence: AGG
gagaattacttgaacctggg

SEQ ID NO: 66313 - DNA, 20 bp, Artificial Sequence
  Description of Artificial Sequence: Synthetic oligonucleotide
  Target: LAMA2; (-) strand; PAM type: NRG; PAM sequence: GAG
ggagaattacttgaacctgg

SEQ ID NO: 66314 - DNA, 20 bp, Artificial Sequence
  Description of Artificial Sequence: Synthetic oligonucleotide
  Target: LAMA2; (-) strand; PAM type: NRG; PAM sequence: GGG
caggagaattacttgaacct

SEQ ID NO: 66315 - DNA, 20 bp, Artificial Sequence
  Description of Artificial Sequence: Synthetic oligonucleotide
  Target: LAMA2; (-) strand; PAM type: NRG; PAM sequence: TGG
gcaggagaattacttgaacc

SEQ ID NO: 66316 - DNA, 20 bp, Artificial Sequence
  Description of Artificial Sequence: Synthetic oligonucleotide
  Target: LAMA2; (-) strand; PAM type: NRG; PAM sequence: GAG
tactcgggaggctgaggcag

SEQ ID NO: 66317 - DNA, 20 bp, Artificial Sequence
  Description of Artificial Sequence: Synthetic oligonucleotide
  Target: LAMA2; (-) strand; PAM type: NRG; PAM sequence: AGG
gctactcgggaggctgaggc

SEQ ID NO: 66318 - DNA, 20 bp, Artificial Sequence
  Description of Artificial Sequence: Synthetic oligonucleotide
  Target: LAMA2; (-) strand; PAM type: NRG; PAM sequence: CAG
agctactcgggaggctgagg

SEQ ID NO: 66319 - DNA, 20 bp, Artificial Sequence
  Description of Artificial Sequence: Synthetic oligonucleotide
  Target: LAMA2; (-) strand; PAM type: NRG; PAM sequence: AGG
cccagctactcgggaggctg

SEQ ID NO: 66320 - DNA, 20 bp, Artificial Sequence
  Description of Artificial Sequence: Synthetic oligonucleotide
  Target: LAMA2; (-) strand; PAM type: NRG; PAM sequence: GAG
tcccagctactcgggaggct

SEQ ID NO: 66321 - DNA, 20 bp, Artificial Sequence
  Description of Artificial Sequence: Synthetic oligonucleotide
  Target: LAMA2; (-) strand; PAM type: NRG; PAM sequence: AGG
tctagtcccagctactcggg

SEQ ID NO: 66322 - DNA, 20 bp, Artificial Sequence
  Description of Artificial Sequence: Synthetic oligonucleotide
  Target: LAMA2; (-) strand; PAM type: NRG; PAM sequence: GAG
atctagtcccagctactcgg

SEQ ID NO: 66323 - DNA, 20 bp, Artificial Sequence
  Description of Artificial Sequence: Synthetic oligonucleotide
  Target: LAMA2; (-) strand; PAM type: NRG; PAM sequence: GGG
aaatctagtcccagctactc

SEQ ID NO: 66324 - DNA, 20 bp, Artificial Sequence
  Description of Artificial Sequence: Synthetic oligonucleotide
  Target: LAMA2; (-) strand; PAM type: NRG; PAM sequence: CGG
taaatctagtcccagctact

SEQ ID NO: 66325 - DNA, 20 bp, Artificial Sequence
  Description of Artificial Sequence: Synthetic oligonucleotide
  Target: LAMA2; (-) strand; PAM type: NRG; PAM sequence: CAG
attaagaataaatctagtcc

SEQ ID NO: 66326 - DNA, 20 bp, Artificial Sequence
  Description of Artificial Sequence: Synthetic oligonucleotide
  Target: LAMA2; (-) strand; PAM type: NRG; PAM sequence: TAG
aatgggattaagaataaatc

SEQ ID NO: 66327 - DNA, 20 bp, Artificial Sequence
  Description of Artificial Sequence: Synthetic oligonucleotide
  Target: LAMA2; (-) strand; PAM type: NRG; PAM sequence: AAG
ccacatggataaatgggatt

SEQ ID NO: 66328 - DNA, 20 bp, Artificial Sequence
  Description of Artificial Sequence: Synthetic oligonucleotide
  Target: LAMA2; (-) strand; PAM type: NRG; PAM sequence: GGG
tattctccacatggataaat

SEQ ID NO: 66329 - DNA, 20 bp, Artificial Sequence
  Description of Artificial Sequence: Synthetic oligonucleotide
  Target: LAMA2; (-) strand; PAM type: NRG; PAM sequence: TGG
atattctccacatggataaa

SEQ ID NO: 66330 - DNA, 20 bp, Artificial Sequence
  Description of Artificial Sequence: Synthetic oligonucleotide
  Target: LAMA2; (-) strand; PAM type: NRG; PAM sequence: TGG
agggtgacatattctccaca

SEQ ID NO: 66331 - DNA, 20 bp, Artificial Sequence
  Description of Artificial Sequence: Synthetic oligonucleotide
  Target: LAMA2; (-) strand; PAM type: NRG; PAM sequence: GGG
tttgcaaagtgaaatgagca

SEQ ID NO: 66332 - DNA, 20 bp, Artificial Sequence
  Description of Artificial Sequence: Synthetic oligonucleotide
  Target: LAMA2; (-) strand; PAM type: NRG; PAM sequence: AGG
gtttgcaaagtgaaatgagc

SEQ ID NO: 66333 - DNA, 20 bp, Artificial Sequence
  Description of Artificial Sequence: Synthetic oligonucleotide
  Target: LAMA2; (-) strand; PAM type: NRG; PAM sequence: CAG
ggtttgcaaagtgaaatgag

SEQ ID NO: 66334 - DNA, 20 bp, Artificial Sequence
  Description of Artificial Sequence: Synthetic oligonucleotide
  Target: LAMA2; (-) strand; PAM type: NRG; PAM sequence: GAG
gtcggtttgcaaagtgaaat

SEQ ID NO: 66335 - DNA, 20 bp, Artificial Sequence
  Description of Artificial Sequence: Synthetic oligonucleotide
  Target: LAMA2; (-) strand; PAM type: NRG; PAM sequence: AAG
gaatagtaagtcggtttgca

SEQ ID NO: 66336 - DNA, 20 bp, Artificial Sequence
  Description of Artificial Sequence: Synthetic oligonucleotide
  Target: LAMA2; (-) strand; PAM type: NRG; PAM sequence: CGG
aggtacaaagaatagtaagt

SEQ ID NO: 66337 - DNA, 20 bp, Artificial Sequence
  Description of Artificial Sequence: Synthetic oligonucleotide
  Target: LAMA2; (-) strand; PAM type: NRG; PAM sequence: AAG
agagaggtacaaagaatagt

SEQ ID NO: 66338 - DNA, 20 bp, Artificial Sequence
  Description of Artificial Sequence: Synthetic oligonucleotide
  Target: LAMA2; (-) strand; PAM type: NRG; PAM sequence: TAG
aaggagagaggtacaaagaa

SEQ ID NO: 66339 - DNA, 20 bp, Artificial Sequence
  Description of Artificial Sequence: Synthetic oligonucleotide
  Target: LAMA2; (-) strand; PAM type: NRG; PAM sequence: AAG
aagagaaggagagaggtaca

SEQ ID NO: 66340 - DNA, 20 bp, Artificial Sequence
  Description of Artificial Sequence: Synthetic oligonucleotide
  Target: LAMA2; (-) strand; PAM type: NRG; PAM sequence: AGG
gagcaaaaagagaaggagag

SEQ ID NO: 66341 - DNA, 20 bp, Artificial Sequence
  Description of Artificial Sequence: Synthetic oligonucleotide
  Target: LAMA2; (-) strand; PAM type: NRG; PAM sequence: GAG
agagcaaaaagagaaggaga

SEQ ID NO: 66342 - DNA, 20 bp, Artificial Sequence
  Description of Artificial Sequence: Synthetic oligonucleotide
  Target: LAMA2; (-) strand; PAM type: NRG; PAM sequence: GAG
acagagcaaaaagagaagga

SEQ ID NO: 66343 - DNA, 20 bp, Artificial Sequence
  Description of Artificial Sequence: Synthetic oligonucleotide
  Target: LAMA2; (-) strand; PAM type: NRG; PAM sequence: GAG
tgacagagcaaaaagagaag

SEQ ID NO: 66344 - DNA, 20 bp, Artificial Sequence
  Description of Artificial Sequence: Synthetic oligonucleotide
  Target: LAMA2; (-) strand; PAM type: NRG; PAM sequence: AGG
agtgacagagcaaaaagaga

SEQ ID NO: 66345 - DNA, 20 bp, Artificial Sequence
  Description of Artificial Sequence: Synthetic oligonucleotide
  Target: LAMA2; (-) strand; PAM type: NRG; PAM sequence: AAG
tagtgacagagcaaaaagag

SEQ ID NO: 66346 - DNA, 20 bp, Artificial Sequence
  Description of Artificial Sequence: Synthetic oligonucleotide
  Target: LAMA2; (-) strand; PAM type: NRG; PAM sequence: GAG
tattagtgacagagcaaaaa

SEQ ID NO: 66347 - DNA, 20 bp, Artificial Sequence
  Description of Artificial Sequence: Synthetic oligonucleotide
  Target: LAMA2; (-) strand; PAM type: NRG; PAM sequence: AAG
tctattagtgacagagcaaa

SEQ ID NO: 66348 - DNA, 20 bp, Artificial Sequence
  Description of Artificial Sequence: Synthetic oligonucleotide
  Target: LAMA2; (-) strand; PAM type: NRG; PAM sequence: GAG
tgaaagctctattagtgaca

SEQ ID NO: 66349 - DNA, 20 bp, Artificial Sequence
  Description of Artificial Sequence: Synthetic oligonucleotide
  Target: LAMA2; (-) strand; PAM type: NRG; PAM sequence: CAG
gctgaaagctctattagtga

SEQ ID NO: 66350 - DNA, 20 bp, Artificial Sequence
  Description of Artificial Sequence: Synthetic oligonucleotide
  Target: LAMA2; (-) strand; PAM type: NRG; PAM sequence: TAG
ttagtagctgaaagctctat

SEQ ID NO: 66351 - DNA, 20 bp, Artificial Sequence
  Description of Artificial Sequence: Synthetic oligonucleotide
  Target: LAMA2; (-) strand; PAM type: NRG; PAM sequence: AAG
ctgtgtgtcttagtagctga

SEQ ID NO: 66352 - DNA, 20 bp, Artificial Sequence
  Description of Artificial Sequence: Synthetic oligonucleotide
  Target: LAMA2; (-) strand; PAM type: NRG; PAM sequence: TAG
aggactcctgtgtgtcttag

SEQ ID NO: 66353 - DNA, 20 bp, Artificial Sequence
  Description of Artificial Sequence: Synthetic oligonucleotide
  Target: LAMA2; (-) strand; PAM type: NRG; PAM sequence: TAG
gaaaggactcctgtgtgtct

SEQ ID NO: 66354 - DNA, 20 bp, Artificial Sequence
  Description of Artificial Sequence: Synthetic oligonucleotide
  Target: LAMA2; (-) strand; PAM type: NRG; PAM sequence: AGG
atttcagttactctctagaa

SEQ ID NO: 66355 - DNA, 20 bp, Artificial Sequence
  Description of Artificial Sequence: Synthetic oligonucleotide
  Target: LAMA2; (-) strand; PAM type: NRG; PAM sequence: AAG
aatttcagttactctctaga

SEQ ID NO: 66356 - DNA, 20 bp, Artificial Sequence
  Description of Artificial Sequence: Synthetic oligonucleotide
  Target: LAMA2; (-) strand; PAM type: NRG; PAM sequence: TAG
ggttaatttcagttactctc

SEQ ID NO: 66357 - DNA, 20 bp, Artificial Sequence
  Description of Artificial Sequence: Synthetic oligonucleotide
  Target: LAMA2; (-) strand; PAM type: NRG; PAM sequence: CAG
atgatgtatgtggttaattt

SEQ ID NO: 66358 - DNA, 20 bp, Artificial Sequence
  Description of Artificial Sequence: Synthetic oligonucleotide
  Target: LAMA2; (-) strand; PAM type: NRG; PAM sequence: TGG
tgccaccaaaatgatgtatg

SEQ ID NO: 66359 - DNA, 20 bp, Artificial Sequence
  Description of Artificial Sequence: Synthetic oligonucleotide
  Target: LAMA2; (-) strand; PAM type: NRG; PAM sequence: AGG
ataaatgactggtggctgtg

SEQ ID NO: 66360 - DNA, 20 bp, Artificial Sequence
  Description of Artificial Sequence: Synthetic oligonucleotide
  Target: LAMA2; (-) strand; PAM type: NRG; PAM sequence: GAG
tataaatgactggtggctgt

SEQ ID NO: 66361 - DNA, 20 bp, Artificial Sequence
  Description of Artificial Sequence: Synthetic oligonucleotide
  Target: LAMA2; (-) strand; PAM type: NRG; PAM sequence: TGG
ttggtactataaatgactgg

SEQ ID NO: 66362 - DNA, 20 bp, Artificial Sequence
  Description of Artificial Sequence: Synthetic oligonucleotide
  Target: LAMA2; (-) strand; PAM type: NRG; PAM sequence: TGG
gacttggtactataaatgac

SEQ ID NO: 66363 - DNA, 20 bp, Artificial Sequence
  Description of Artificial Sequence: Synthetic oligonucleotide
  Target: LAMA2; (-) strand; PAM type: NRG; PAM sequence: TGG
ttacccaaagagcagggact

SEQ ID NO: 66364 - DNA, 20 bp, Artificial Sequence
  Description of Artificial Sequence: Synthetic oligonucleotide
  Target: LAMA2; (-) strand; PAM type: NRG; PAM sequence: GGG
ccactgttacccaaagagca

SEQ ID NO: 66365 - DNA, 20 bp, Artificial Sequence
  Description of Artificial Sequence: Synthetic oligonucleotide
  Target: LAMA2; (-) strand; PAM type: NRG; PAM sequence: AGG
tccactgttacccaaagagc

SEQ ID NO: 66366 - DNA, 20 bp, Artificial Sequence
  Description of Artificial Sequence: Synthetic oligonucleotide
  Target: LAMA2; (-) strand; PAM type: NRG; PAM sequence: CAG
atccactgttacccaaagag

SEQ ID NO: 66367 - DNA, 20 bp, Artificial Sequence
  Description of Artificial Sequence: Synthetic oligonucleotide
  Target: LAMA2; (-) strand; PAM type: NRG; PAM sequence: GAG
cttatccactgttacccaaa

SEQ ID NO: 66368 - DNA, 20 bp, Artificial Sequence
  Description of Artificial Sequence: Synthetic oligonucleotide
  Target: LAMA2; (-) strand; PAM type: NRG; PAM sequence: AAG
ttcttatccactgttaccca

SEQ ID NO: 66369 - DNA, 20 bp, Artificial Sequence
  Description of Artificial Sequence: Synthetic oligonucleotide
  Target: LAMA2; (-) strand; PAM type: NRG; PAM sequence: TAG
ctccacataaggagcttgtg

SEQ ID NO: 66370 - DNA, 20 bp, Artificial Sequence
  Description of Artificial Sequence: Synthetic oligonucleotide
  Target: LAMA2; (-) strand; PAM type: NRG; PAM sequence: GAG
cagtcttttctccacataag

SEQ ID NO: 66371 - DNA, 20 bp, Artificial Sequence
  Description of Artificial Sequence: Synthetic oligonucleotide
  Target: LAMA2; (-) strand; PAM type: NRG; PAM sequence: AGG
aacagtcttttctccacata

SEQ ID NO: 66372 - DNA, 20 bp, Artificial Sequence
  Description of Artificial Sequence: Synthetic oligonucleotide
  Target: LAMA2; (-) strand; PAM type: NRG; PAM sequence: AAG
gaacagtcttttctccacat

SEQ ID NO: 66373 - DNA, 20 bp, Artificial Sequence
  Description of Artificial Sequence: Synthetic oligonucleotide
  Target: LAMA2; (-) strand; PAM type: NRG; PAM sequence: CAG
aaggcttccaaataggagaa

SEQ ID NO: 66374 - DNA, 20 bp, Artificial Sequence
  Description of Artificial Sequence: Synthetic oligonucleotide
  Target: LAMA2; (-) strand; PAM type: NRG; PAM sequence: GAG
ggcacaaggcttccaaatag

SEQ ID NO: 66375 - DNA, 20 bp, Artificial Sequence
  Description of Artificial Sequence: Synthetic oligonucleotide
  Target: LAMA2; (-) strand; PAM type: NRG; PAM sequence: AGG
tgggcacaaggcttccaaat

SEQ ID NO: 66376 - DNA, 20 bp, Artificial Sequence
  Description of Artificial Sequence: Synthetic oligonucleotide
  Target: LAMA2; (-) strand; PAM type: NRG; PAM sequence: TAG
atgggcacaaggcttccaaa

SEQ ID NO: 66377 - DNA, 20 bp, Artificial Sequence
  Description of Artificial Sequence: Synthetic oligonucleotide
  Target: LAMA2; (-) strand; PAM type: NRG; PAM sequence: AGG
agggcatggatatgggcaca

SEQ ID NO: 66378 - DNA, 20 bp, Artificial Sequence
  Description of Artificial Sequence: Synthetic oligonucleotide
  Target: LAMA2; (-) strand; PAM type: NRG; PAM sequence: AAG
aagggcatggatatgggcac

SEQ ID NO: 66379 - DNA, 20 bp, Artificial Sequence
  Description of Artificial Sequence: Synthetic oligonucleotide
  Target: LAMA2; (-) strand; PAM type: NRG; PAM sequence: GGG
tgtgcaaagggcatggatat

SEQ ID NO: 66380 - DNA, 20 bp, Artificial Sequence
  Description of Artificial Sequence: Synthetic oligonucleotide
  Target: LAMA2; (-) strand; PAM type: NRG; PAM sequence: TGG
atgtgcaaagggcatggata

SEQ ID NO: 66381 - DNA, 20 bp, Artificial Sequence
  Description of Artificial Sequence: Synthetic oligonucleotide
  Target: LAMA2; (-) strand; PAM type: NRG; PAM sequence: TGG
tgataaatgtgcaaagggca

SEQ ID NO: 66382 - DNA, 20 bp, Artificial Sequence
  Description of Artificial Sequence: Synthetic oligonucleotide
  Target: LAMA2; (-) strand; PAM type: NRG; PAM sequence: GGG
ttatttgataaatgtgcaaa

SEQ ID NO: 66383 - DNA, 20 bp, Artificial Sequence
  Description of Artificial Sequence: Synthetic oligonucleotide
  Target: LAMA2; (-) strand; PAM type: NRG; PAM sequence: AGG
gttatttgataaatgtgcaa

SEQ ID NO: 66384 - DNA, 20 bp, Artificial Sequence
  Description of Artificial Sequence: Synthetic oligonucleotide
  Target: LAMA2; (-) strand; PAM type: NRG; PAM sequence: AAG
ggttatttgataaatgtgca

SEQ ID NO: 66385 - DNA, 20 bp, Artificial Sequence
  Description of Artificial Sequence: Synthetic oligonucleotide
  Target: LAMA2; (-) strand; PAM type: NRG; PAM sequence: CGG
aaaacataaaggacaagtca

SEQ ID NO: 66386 - DNA, 20 bp, Artificial Sequence
  Description of Artificial Sequence: Synthetic oligonucleotide
  Target: LAMA2; (-) strand; PAM type: NRG; PAM sequence: AAG
cttgaaaaaacataaaggac

SEQ ID NO: 66387 - DNA, 20 bp, Artificial Sequence
  Description of Artificial Sequence: Synthetic oligonucleotide
  Target: LAMA2; (-) strand; PAM type: NRG; PAM sequence: AGG
aaatgcttgaaaaaacataa

SEQ ID NO: 66388 - DNA, 20 bp, Artificial Sequence
  Description of Artificial Sequence: Synthetic oligonucleotide
  Target: LAMA2; (-) strand; PAM type: NRG; PAM sequence: AAG
caaatgcttgaaaaaacata

SEQ ID NO: 66389 - DNA, 20 bp, Artificial Sequence
  Description of Artificial Sequence: Synthetic oligonucleotide
  Target: LAMA2; (-) strand; PAM type: NRG; PAM sequence: GAG
taaatctcttccattaggca

SEQ ID NO: 66390 - DNA, 20 bp, Artificial Sequence
  Description of Artificial Sequence: Synthetic oligonucleotide
  Target: LAMA2; (-) strand; PAM type: NRG; PAM sequence: CAG
agtaaatctcttccattagg

SEQ ID NO: 66391 - DNA, 20 bp, Artificial Sequence
  Description of Artificial Sequence: Synthetic oligonucleotide
  Target: LAMA2; (-) strand; PAM type: NRG; PAM sequence: AGG
aagagtaaatctcttccatt

SEQ ID NO: 66392 - DNA, 20 bp, Artificial Sequence
  Description of Artificial Sequence: Synthetic oligonucleotide
  Target: LAMA2; (-) strand; PAM type: NRG; PAM sequence: TAG
taagagtaaatctcttccat

SEQ ID NO: 66393 - DNA, 20 bp, Artificial Sequence
  Description of Artificial Sequence: Synthetic oligonucleotide
  Target: LAMA2; (-) strand; PAM type: NRG; PAM sequence: GAG
gccacctgggcacagagtaa

SEQ ID NO: 66394 - DNA, 20 bp, Artificial Sequence
  Description of Artificial Sequence: Synthetic oligonucleotide
  Target: LAMA2; (-) strand; PAM type: NRG; PAM sequence: AAG
gagccacctgggcacagagt

SEQ ID NO: 66395 - DNA, 20 bp, Artificial Sequence
  Description of Artificial Sequence: Synthetic oligonucleotide
  Target: LAMA2; (-) strand; PAM type: NRG; PAM sequence: GAG
ggacgagccacctgggcaca

SEQ ID NO: 66396 - DNA, 20 bp, Artificial Sequence
  Description of Artificial Sequence: Synthetic oligonucleotide
  Target: LAMA2; (-) strand; PAM type: NRG; PAM sequence: CAG
atggacgagccacctgggca

SEQ ID NO: 66397 - DNA, 20 bp, Artificial Sequence
  Description of Artificial Sequence: Synthetic oligonucleotide
  Target: LAMA2; (-) strand; PAM type: NRG; PAM sequence: GGG
cagagatggacgagccacct

SEQ ID NO: 66398 - DNA, 20 bp, Artificial Sequence
  Description of Artificial Sequence: Synthetic oligonucleotide
  Target: LAMA2; (-) strand; PAM type: NRG; PAM sequence: TGG
ccagagatggacgagccacc

SEQ ID NO: 66399 - DNA, 20 bp, Artificial Sequence
  Description of Artificial Sequence: Synthetic oligonucleotide
  Target: LAMA2; (-) strand; PAM type: NRG; PAM sequence: GAG
gaaaatacccagagatggac

SEQ ID NO: 66400 - DNA, 20 bp, Artificial Sequence
  Description of Artificial Sequence: Synthetic oligonucleotide
  Target: LAMA2; (-) strand; PAM type: NRG; PAM sequence: TGG
tgcttgaaaatacccagaga

SEQ ID NO: 66401 - DNA, 20 bp, Artificial Sequence
  Description of Artificial Sequence: Synthetic oligonucleotide
  Target: LAMA2; (-) strand; PAM type: NRG; PAM sequence: GAG
ccaatgcttgaaaataccca

SEQ ID NO: 66402 - DNA, 20 bp, Artificial Sequence
  Description of Artificial Sequence: Synthetic oligonucleotide
  Target: LAMA2; (-) strand; PAM type: NRG; PAM sequence: CAG
ctccaatgcttgaaaatacc

SEQ ID NO: 66403 - DNA, 20 bp, Artificial Sequence
  Description of Artificial Sequence: Synthetic oligonucleotide
  Target: LAMA2; (-) strand; PAM type: NRG; PAM sequence: AAG
ctttgctcagtcttgaggct

SEQ ID NO: 66404 - DNA, 20 bp, Artificial Sequence
  Description of Artificial Sequence: Synthetic oligonucleotide
  Target: LAMA2; (-) strand; PAM type: NRG; PAM sequence: AGG
catttctttgctcagtcttg

SEQ ID NO: 66405 - DNA, 20 bp, Artificial Sequence
  Description of Artificial Sequence: Synthetic oligonucleotide
  Target: LAMA2; (-) strand; PAM type: NRG; PAM sequence: GAG
tcatttctttgctcagtctt

SEQ ID NO: 66406 - DNA, 20 bp, Artificial Sequence
  Description of Artificial Sequence: Synthetic oligonucleotide
  Target: LAMA2; (-) strand; PAM type: NRG; PAM sequence: CAG
ggaaagttcatttctttgct

SEQ ID NO: 66407 - DNA, 20 bp, Artificial Sequence
  Description of Artificial Sequence: Synthetic oligonucleotide
  Target: LAMA2; (-) strand; PAM type: NRG; PAM sequence: AAG
ttttaagagtaatctctgga

SEQ ID NO: 66408 - DNA, 20 bp, Artificial Sequence
  Description of Artificial Sequence: Synthetic oligonucleotide
  Target: LAMA2; (-) strand; PAM type: NRG; PAM sequence: TGG
gatattttaagagtaatctc

SEQ ID NO: 66409 - DNA, 20 bp, Artificial Sequence
  Description of Artificial Sequence: Synthetic oligonucleotide
  Target: LAMA2; (-) strand; PAM type: NRG; PAM sequence: GAG
ctcagaatgggatattttaa

SEQ ID NO: 66410 - DNA, 20 bp, Artificial Sequence
  Description of Artificial Sequence: Synthetic oligonucleotide
  Target: LAMA2; (-) strand; PAM type: NRG; PAM sequence: AAG
ctctcagaatgggatatttt

SEQ ID NO: 66411 - DNA, 20 bp, Artificial Sequence
  Description of Artificial Sequence: Synthetic oligonucleotide
  Target: LAMA2; (-) strand; PAM type: NRG; PAM sequence: GGG
gaaacatgtgctctcagaat

SEQ ID NO: 66412 - DNA, 20 bp, Artificial Sequence
  Description of Artificial Sequence: Synthetic oligonucleotide
  Target: LAMA2; (-) strand; PAM type: NRG; PAM sequence: TGG
agaaacatgtgctctcagaa

SEQ ID NO: 66413 - DNA, 20 bp, Artificial Sequence
  Description of Artificial Sequence: Synthetic oligonucleotide
  Target: LAMA2; (-) strand; PAM type: NRG; PAM sequence: CAG
ctaagagaaacatgtgctct

SEQ ID NO: 66414 - DNA, 20 bp, Artificial Sequence
  Description of Artificial Sequence: Synthetic oligonucleotide
  Target: LAMA2; (-) strand; PAM type: NRG; PAM sequence: GAG
tccggagtaaacagtactaa

SEQ ID NO: 66415 - DNA, 20 bp, Artificial Sequence
  Description of Artificial Sequence: Synthetic oligonucleotide
  Target: LAMA2; (-) strand; PAM type: NRG; PAM sequence: AAG
agtccggagtaaacagtact

SEQ ID NO: 66416 - DNA, 20 bp, Artificial Sequence
  Description of Artificial Sequence: Synthetic oligonucleotide
  Target: LAMA2; (-) strand; PAM type: NRG; PAM sequence: CAG
ccctgaaagtccggagtaaa

SEQ ID NO: 66417 - DNA, 20 bp, Artificial Sequence
  Description of Artificial Sequence: Synthetic oligonucleotide
  Target: LAMA2; (-) strand; PAM type: NRG; PAM sequence: GAG
ctactgaccctgaaagtccg

SEQ ID NO: 66418 - DNA, 20 bp, Artificial Sequence
  Description of Artificial Sequence: Synthetic oligonucleotide
  Target: LAMA2; (-) strand; PAM type: NRG; PAM sequence: CGG
gcctactgaccctgaaagtc

SEQ ID NO: 66419 - DNA, 20 bp, Artificial Sequence
  Description of Artificial Sequence: Synthetic oligonucleotide
  Target: LAMA2; (-) strand; PAM type: NRG; PAM sequence: AAG
agcttgcctactgaccctga

SEQ ID NO: 66420 - DNA, 20 bp, Artificial Sequence
  Description of Artificial Sequence: Synthetic oligonucleotide
  Target: LAMA2; (-) strand; PAM type: NRG; PAM sequence: AAG
aagaaaccaaatttgttgaa

SEQ ID NO: 66421 - DNA, 20 bp, Artificial Sequence
  Description of Artificial Sequence: Synthetic oligonucleotide
  Target: LAMA2; (-) strand; PAM type: NRG; PAM sequence: AAG
ctaccaaaaatagtttttaa

SEQ ID NO: 66422 - DNA, 20 bp, Artificial Sequence
  Description of Artificial Sequence: Synthetic oligonucleotide
  Target: LAMA2; (-) strand; PAM type: NRG; PAM sequence: TAG
tttaacaaaactaccaaaaa

SEQ ID NO: 66423 - DNA, 20 bp, Artificial Sequence
  Description of Artificial Sequence: Synthetic oligonucleotide
  Target: LAMA2; (-) strand; PAM type: NRG; PAM sequence: CAG
ttccacttaaaatgaattac

SEQ ID NO: 66424 - DNA, 20 bp, Artificial Sequence
  Description of Artificial Sequence: Synthetic oligonucleotide
  Target: LAMA2; (-) strand; PAM type: NRG; PAM sequence: AGG
taggatgataaaagaggctt

SEQ ID NO: 66425 - DNA, 20 bp, Artificial Sequence
  Description of Artificial Sequence: Synthetic oligonucleotide
  Target: LAMA2; (-) strand; PAM type: NRG; PAM sequence: TAG
ataggatgataaaagaggct

SEQ ID NO: 66426 - DNA, 20 bp, Artificial Sequence
  Description of Artificial Sequence: Synthetic oligonucleotide
  Target: LAMA2; (-) strand; PAM type: NRG; PAM sequence: AGG
aaaacataggatgataaaag

SEQ ID NO: 66427 - DNA, 20 bp, Artificial Sequence
  Description of Artificial Sequence: Synthetic oligonucleotide
  Target: LAMA2; (-) strand; PAM type: NRG; PAM sequence: GAG
aaaaacataggatgataaaa

SEQ ID NO: 66428 - DNA, 20 bp, Artificial Sequence
  Description of Artificial Sequence: Synthetic oligonucleotide
  Target: LAMA2; (-) strand; PAM type: NRG; PAM sequence: AAG
tcaaaaacataggatgataa

SEQ ID NO: 66429 - DNA, 20 bp, Artificial Sequence
  Description of Artificial Sequence: Synthetic oligonucleotide
  Target: LAMA2; (-) strand; PAM type: NRG; PAM sequence: AGG
ataaaacttatcaaaaacat

SEQ ID NO: 66430 - DNA, 20 bp, Artificial Sequence
  Description of Artificial Sequence: Synthetic oligonucleotide
  Target: LAMA2; (-) strand; PAM type: NRG; PAM sequence: TAG
gataaaacttatcaaaaaca

SEQ ID NO: 66431 - DNA, 20 bp, Artificial Sequence
  Description of Artificial Sequence: Synthetic oligonucleotide
  Target: LAMA2; (-) strand; PAM type: NRG; PAM sequence: CAG
ctacaatgtttgtctgttac

SEQ ID NO: 66432 - DNA, 20 bp, Artificial Sequence
  Description of Artificial Sequence: Synthetic oligonucleotide
  Target: LAMA2; (-) strand; PAM type: NRG; PAM sequence: CAG
taaacaagagtagaagagcc

SEQ ID NO: 66433 - DNA, 20 bp, Artificial Sequence
  Description of Artificial Sequence: Synthetic oligonucleotide
  Target: LAMA2; (-) strand; PAM type: NRG; PAM sequence: GAG
gaatataaacaagagtagaa

SEQ ID NO: 66434 - DNA, 20 bp, Artificial Sequence
  Description of Artificial Sequence: Synthetic oligonucleotide
  Target: LAMA2; (-) strand; PAM type: NRG; PAM sequence: AAG
aagaatataaacaagagtag

SEQ ID NO: 66435 - DNA, 20 bp, Artificial Sequence
  Description of Artificial Sequence: Synthetic oligonucleotide
  Target: LAMA2; (-) strand; PAM type: NRG; PAM sequence: TAG
gtgaagaatataaacaagag

SEQ ID NO: 66436 - DNA, 20 bp, Artificial Sequence
  Description of Artificial Sequence: Synthetic oligonucleotide
  Target: LAMA2; (-) strand; PAM type: NRG; PAM sequence: GAG
agggtgaagaatataaacaa

SEQ ID NO: 66437 - DNA, 20 bp, Artificial Sequence
  Description of Artificial Sequence: Synthetic oligonucleotide
  Target: LAMA2; (-) strand; PAM type: NRG; PAM sequence: AAG
caagggtgaagaatataaac

SEQ ID NO: 66438 - DNA, 20 bp, Artificial Sequence
  Description of Artificial Sequence: Synthetic oligonucleotide
  Target: LAMA2; (-) strand; PAM type: NRG; PAM sequence: AAG
gtagaaggaacacaagggtg

SEQ ID NO: 66439 - DNA, 20 bp, Artificial Sequence
  Description of Artificial Sequence: Synthetic oligonucleotide
  Target: LAMA2; (-) strand; PAM type: NRG; PAM sequence: GGG
cctgagtagaaggaacacaa

SEQ ID NO: 66440 - DNA, 20 bp, Artificial Sequence
  Description of Artificial Sequence: Synthetic oligonucleotide
  Target: LAMA2; (-) strand; PAM type: NRG; PAM sequence: AGG
tcctgagtagaaggaacaca

SEQ ID NO: 66441 - DNA, 20 bp, Artificial Sequence
  Description of Artificial Sequence: Synthetic oligonucleotide
  Target: LAMA2; (-) strand; PAM type: NRG; PAM sequence: AAG
gtcctgagtagaaggaacac

SEQ ID NO: 66442 - DNA, 20 bp, Artificial Sequence
  Description of Artificial Sequence: Synthetic oligonucleotide
  Target: LAMA2; (-) strand; PAM type: NRG; PAM sequence: AGG
acaatggagtcctgagtaga

SEQ ID NO: 66443 - DNA, 20 bp, Artificial Sequence
  Description of Artificial Sequence: Synthetic oligonucleotide
  Target: LAMA2; (-) strand; PAM type: NRG; PAM sequence: AAG
tacaatggagtcctgagtag

SEQ ID NO: 66444 - DNA, 20 bp, Artificial Sequence
  Description of Artificial Sequence: Synthetic oligonucleotide
  Target: LAMA2; (-) strand; PAM type: NRG; PAM sequence: TAG
atttacaatggagtcctgag

SEQ ID NO: 66445 - DNA, 20 bp, Artificial Sequence
  Description of Artificial Sequence: Synthetic oligonucleotide
  Target: LAMA2; (-) strand; PAM type: NRG; PAM sequence: GAG
agcatttacaatggagtcct

SEQ ID NO: 66446 - DNA, 20 bp, Artificial Sequence
  Description of Artificial Sequence: Synthetic oligonucleotide
  Target: LAMA2; (-) strand; PAM type: NRG; PAM sequence: GAG
aatcctgagcatttacaatg

SEQ ID NO: 66447 - DNA, 20 bp, Artificial Sequence
  Description of Artificial Sequence: Synthetic oligonucleotide
  Target: LAMA2; (-) strand; PAM type: NRG; PAM sequence: TGG
ttaatcctgagcatttacaa

SEQ ID NO: 66448 - DNA, 20 bp, Artificial Sequence
  Description of Artificial Sequence: Synthetic oligonucleotide
  Target: LAMA2; (-) strand; PAM type: NRG; PAM sequence: GAG
atgacaaaaaaattaatcct

SEQ ID NO: 66449 - DNA, 20 bp, Artificial Sequence
  Description of Artificial Sequence: Synthetic oligonucleotide
  Target: LAMA2; (-) strand; PAM type: NRG; PAM sequence: TAG
cagaaagacaaggtacagta

SEQ ID NO: 66450 - DNA, 20 bp, Artificial Sequence
  Description of Artificial Sequence: Synthetic oligonucleotide
  Target: LAMA2; (-) strand; PAM type: NRG; PAM sequence: CAG
ctttgcagaaagacaaggta

SEQ ID NO: 66451 - DNA, 20 bp, Artificial Sequence
  Description of Artificial Sequence: Synthetic oligonucleotide
  Target: LAMA2; (-) strand; PAM type: NRG; PAM sequence: AGG
ctttgctttgcagaaagaca

SEQ ID NO: 66452 - DNA, 20 bp, Artificial Sequence
  Description of Artificial Sequence: Synthetic oligonucleotide
  Target: LAMA2; (-) strand; PAM type: NRG; PAM sequence: AAG
tctttgctttgcagaaagac

SEQ ID NO: 66453 - DNA, 20 bp, Artificial Sequence
  Description of Artificial Sequence: Synthetic oligonucleotide
  Target: LAMA2; (-) strand; PAM type: NRG; PAM sequence: AAG
tattatctttgctttgcaga

SEQ ID NO: 66454 - DNA, 20 bp, Artificial Sequence
  Description of Artificial Sequence: Synthetic oligonucleotide
  Target: LAMA2; (-) strand; PAM type: NRG; PAM sequence: CAG
acaatattatctttgctttg

SEQ ID NO: 66455 - DNA, 20 bp, Artificial Sequence
  Description of Artificial Sequence: Synthetic oligonucleotide
  Target: LAMA2; (-) strand; PAM type: NRG; PAM sequence: AAG
cctcatggtggtggatagcc

SEQ ID NO: 66456 - DNA, 20 bp, Artificial Sequence
  Description of Artificial Sequence: Synthetic oligonucleotide
  Target: LAMA2; (-) strand; PAM type: NRG; PAM sequence: TAG
tattccctcatggtggtgga

SEQ ID NO: 66457 - DNA, 20 bp, Artificial Sequence
  Description of Artificial Sequence: Synthetic oligonucleotide
  Target: LAMA2; (-) strand; PAM type: NRG; PAM sequence: TGG
agcatattccctcatggtgg

SEQ ID NO: 66458 - DNA, 20 bp, Artificial Sequence
  Description of Artificial Sequence: Synthetic oligonucleotide
  Target: LAMA2; (-) strand; PAM type: NRG; PAM sequence: TGG
agaagcatattccctcatgg

SEQ ID NO: 66459 - DNA, 20 bp, Artificial Sequence
  Description of Artificial Sequence: Synthetic oligonucleotide
  Target: LAMA2; (-) strand; PAM type: NRG; PAM sequence: TGG
aagagaagcatattccctca

SEQ ID NO: 66460 - DNA, 20 bp, Artificial Sequence
  Description of Artificial Sequence: Synthetic oligonucleotide
  Target: LAMA2; (-) strand; PAM type: NRG; PAM sequence: AAG
tttctgcagaaaaataagag

SEQ ID NO: 66461 - DNA, 20 bp, Artificial Sequence
  Description of Artificial Sequence: Synthetic oligonucleotide
  Target: LAMA2; (-) strand; PAM type: NRG; PAM sequence: GAG
atgtttctgcagaaaaataa

SEQ ID NO: 66462 - DNA, 20 bp, Artificial Sequence
  Description of Artificial Sequence: Synthetic oligonucleotide
  Target: LAMA2; (-) strand; PAM type: NRG; PAM sequence: AAG
aaatgtttctgcagaaaaat

SEQ ID NO: 66463 - DNA, 20 bp, Artificial Sequence
  Description of Artificial Sequence: Synthetic oligonucleotide
  Target: LAMA2; (-) strand; PAM type: NRG; PAM sequence: CAG
agaaattttaaatgtttctg

SEQ ID NO: 66464 - DNA, 20 bp, Artificial Sequence
  Description of Artificial Sequence: Synthetic oligonucleotide
  Target: LAMA2; (-) strand; PAM type: NRG; PAM sequence: AAG
gtaagtacaaaatatagctg

SEQ ID NO: 66465 - DNA, 20 bp, Artificial Sequence
  Description of Artificial Sequence: Synthetic oligonucleotide
  Target: LAMA2; (-) strand; PAM type: NRG; PAM sequence: TAG
attcaggtaagtacaaaata

SEQ ID NO: 66466 - DNA, 20 bp, Artificial Sequence
  Description of Artificial Sequence: Synthetic oligonucleotide
  Target: LAMA2; (-) strand; PAM type: NRG; PAM sequence: AAG
tctatttttaaaattcaggt

SEQ ID NO: 66467 - DNA, 20 bp, Artificial Sequence
  Description of Artificial Sequence: Synthetic oligonucleotide
  Target: LAMA2; (-) strand; PAM type: NRG; PAM sequence: AGG
atattctatttttaaaattc

SEQ ID NO: 66468 - DNA, 20 bp, Artificial Sequence
  Description of Artificial Sequence: Synthetic oligonucleotide
  Target: LAMA2; (-) strand; PAM type: NRG; PAM sequence: CAG
tatattctatttttaaaatt

SEQ ID NO: 66469 - DNA, 20 bp, Artificial Sequence
  Description of Artificial Sequence: Synthetic oligonucleotide
  Target: LAMA2; (-) strand; PAM type: NRG; PAM sequence: GGG
gtgagtgagtcacaaaaata

SEQ ID NO: 66470 - DNA, 20 bp, Artificial Sequence
  Description of Artificial Sequence: Synthetic oligonucleotide
  Target: LAMA2; (-) strand; PAM type: NRG; PAM sequence: AGG
agtgagtgagtcacaaaaat

SEQ ID NO: 66471 - DNA, 20 bp, Artificial Sequence
  Description of Artificial Sequence: Synthetic oligonucleotide
  Target: LAMA2; (-) strand; PAM type: NRG; PAM sequence: TAG
cagtgagtgagtcacaaaaa

SEQ ID NO: 66472 - DNA, 20 bp, Artificial Sequence
  Description of Artificial Sequence: Synthetic oligonucleotide
  Target: LAMA2; (-) strand; PAM type: NRG; PAM sequence: GAG
aactattaataacagtgagt

SEQ ID NO: 66473 - DNA, 20 bp, Artificial Sequence
  Description of Artificial Sequence: Synthetic oligonucleotide
  Target: LAMA2; (-) strand; PAM type: NRG; PAM sequence: GAG
aaataactattaataacagt

SEQ ID NO: 66474 - DNA, 20 bp, Artificial Sequence
  Description of Artificial Sequence: Synthetic oligonucleotide
  Target: LAMA2; (-) strand; PAM type: NRG; PAM sequence: CAG
agaaaaataactattaataa

SEQ ID NO: 66475 - DNA, 20 bp, Artificial Sequence
  Description of Artificial Sequence: Synthetic oligonucleotide
  Target: LAMA2; (-) strand; PAM type: NRG; PAM sequence: TAG
acaaagcataatattcaaat

SEQ ID NO: 66476 - DNA, 20 bp, Artificial Sequence
  Description of Artificial Sequence: Synthetic oligonucleotide
  Target: LAMA2; (-) strand; PAM type: NRG; PAM sequence: AAG
tggttctaaataacttaaca

SEQ ID NO: 66477 - DNA, 20 bp, Artificial Sequence
  Description of Artificial Sequence: Synthetic oligonucleotide
  Target: LAMA2; (-) strand; PAM type: NRG; PAM sequence: TGG
ttatttacagatggggtaag

SEQ ID NO: 66478 - DNA, 20 bp, Artificial Sequence
  Description of Artificial Sequence: Synthetic oligonucleotide
  Target: LAMA2; (-) strand; PAM type: NRG; PAM sequence: AAG
gggttatttacagatggggt

SEQ ID NO: 66479 - DNA, 20 bp, Artificial Sequence
  Description of Artificial Sequence: Synthetic oligonucleotide
  Target: LAMA2; (-) strand; PAM type: NRG; PAM sequence: GGG
ttcggggttatttacagatg

SEQ ID NO: 66480 - DNA, 20 bp, Artificial Sequence
  Description of Artificial Sequence: Synthetic oligonucleotide
  Target: LAMA2; (-) strand; PAM type: NRG; PAM sequence: GGG
gttcggggttatttacagat

SEQ ID NO: 66481 - DNA, 20 bp, Artificial Sequence
  Description of Artificial Sequence: Synthetic oligonucleotide
  Target: LAMA2; (-) strand; PAM type: NRG; PAM sequence: TGG
agttcggggttatttacaga

SEQ ID NO: 66482 - DNA, 20 bp, Artificial Sequence
  Description of Artificial Sequence: Synthetic oligonucleotide
  Target: LAMA2; (-) strand; PAM type: NRG; PAM sequence: CAG
taggagttcggggttattta

SEQ ID NO: 66483 - DNA, 20 bp, Artificial Sequence
  Description of Artificial Sequence: Synthetic oligonucleotide
  Target: LAMA2; (-) strand; PAM type: NRG; PAM sequence: GGG
gatgacagtataggagttcg

SEQ ID NO: 66484 - DNA, 20 bp, Artificial Sequence
  Description of Artificial Sequence: Synthetic oligonucleotide
  Target: LAMA2; (-) strand; PAM type: NRG; PAM sequence: GGG
tgatgacagtataggagttc

SEQ ID NO: 66485 - DNA, 20 bp, Artificial Sequence
  Description of Artificial Sequence: Synthetic oligonucleotide
  Target: LAMA2; (-) strand; PAM type: NRG; PAM sequence: CGG
gtgatgacagtataggagtt

SEQ ID NO: 66486 - DNA, 20 bp, Artificial Sequence
  Description of Artificial Sequence: Synthetic oligonucleotide
  Target: LAMA2; (-) strand; PAM type: NRG; PAM sequence: GAG
caaaggtgatgacagtatag

SEQ ID NO: 66487 - DNA, 20 bp, Artificial Sequence
  Description of Artificial Sequence: Synthetic oligonucleotide
  Target: LAMA2; (-) strand; PAM type: NRG; PAM sequence: AGG
aacaaaggtgatgacagtat

SEQ ID NO: 66488 - DNA, 20 bp, Artificial Sequence
  Description of Artificial Sequence: Synthetic oligonucleotide
  Target: LAMA2; (-) strand; PAM type: NRG; PAM sequence: TAG
aaacaaaggtgatgacagta

SEQ ID NO: 66489 - DNA, 20 bp, Artificial Sequence
  Description of Artificial Sequence: Synthetic oligonucleotide
  Target: LAMA2; (-) strand; PAM type: NRG; PAM sequence: CAG
agaagaaacaaaggtgatga

SEQ ID NO: 66490 - DNA, 20 bp, Artificial Sequence
  Description of Artificial Sequence: Synthetic oligonucleotide
  Target: LAMA2; (-) strand; PAM type: NRG; PAM sequence: AGG
caacatgttagaagaaacaa

SEQ ID NO: 66491 - DNA, 20 bp, Artificial Sequence
  Description of Artificial Sequence: Synthetic oligonucleotide
  Target: LAMA2; (-) strand; PAM type: NRG; PAM sequence: AAG
acaacatgttagaagaaaca

SEQ ID NO: 66492 - DNA, 20 bp, Artificial Sequence
  Description of Artificial Sequence: Synthetic oligonucleotide
  Target: LAMA2; (-) strand; PAM type: NRG; PAM sequence: AAG
tttacattacaacatgttag

SEQ ID NO: 66493 - DNA, 20 bp, Artificial Sequence
  Description of Artificial Sequence: Synthetic oligonucleotide
  Target: LAMA2; (-) strand; PAM type: NRG; PAM sequence: TAG
gattttacattacaacatgt

SEQ ID NO: 66494 - DNA, 20 bp, Artificial Sequence
  Description of Artificial Sequence: Synthetic oligonucleotide
  Target: LAMA2; (-) strand; PAM type: NRG; PAM sequence: CAG
ataaatgtatactttatcca

SEQ ID NO: 66495 - DNA, 20 bp, Artificial Sequence
  Description of Artificial Sequence: Synthetic oligonucleotide
  Target: LAMA2; (-) strand; PAM type: NRG; PAM sequence: AGG
cctgtaaatagtcaagaaaa

SEQ ID NO: 66496 - DNA, 20 bp, Artificial Sequence
  Description of Artificial Sequence: Synthetic oligonucleotide
  Target: LAMA2; (-) strand; PAM type: NRG; PAM sequence: AAG
tcctgtaaatagtcaagaaa

SEQ ID NO: 66497 - DNA, 20 bp, Artificial Sequence
  Description of Artificial Sequence: Synthetic oligonucleotide
  Target: LAMA2; (-) strand; PAM type: NRG; PAM sequence: AAG
gctatttcctgtaaatagtc

SEQ ID NO: 66498 - DNA, 20 bp, Artificial Sequence
  Description of Artificial Sequence: Synthetic oligonucleotide
  Target: LAMA2; (-) strand; PAM type: NRG; PAM sequence: TAG
aactagctatttcctgtaaa

SEQ ID NO: 66499 - DNA, 20 bp, Artificial Sequence
  Description of Artificial Sequence: Synthetic oligonucleotide
  Target: LAMA2; (-) strand; PAM type: NRG; PAM sequence: TAG
acttaggtaaaacctataac

SEQ ID NO: 66500 - DNA, 20 bp, Artificial Sequence
  Description of Artificial Sequence: Synthetic oligonucleotide
  Target: LAMA2; (-) strand; PAM type: NRG; PAM sequence: AGG
cattagcttgaatgagactt

SEQ ID NO: 66501 - DNA, 20 bp, Artificial Sequence
  Description of Artificial Sequence: Synthetic oligonucleotide
  Target: LAMA2; (-) strand; PAM type: NRG; PAM sequence: TAG
ccattagcttgaatgagact

SEQ ID NO: 66502 - DNA, 20 bp, Artificial Sequence
  Description of Artificial Sequence: Synthetic oligonucleotide
  Target: LAMA2; (-) strand; PAM type: NRG; PAM sequence: GAG
cataatccattagcttgaat

SEQ ID NO: 66503 - DNA, 20 bp, Artificial Sequence
  Description of Artificial Sequence: Synthetic oligonucleotide
  Target: LAMA2; (-) strand; PAM type: NRG; PAM sequence: TAG
actttatttgcataatccat

SEQ ID NO: 66504 - DNA, 20 bp, Artificial Sequence
  Description of Artificial Sequence: Synthetic oligonucleotide
  Target: LAMA2; (-) strand; PAM type: NRG; PAM sequence: GAG
gaatattcttgtccttcagt

SEQ ID NO: 66505 - DNA, 20 bp, Artificial Sequence
  Description of Artificial Sequence: Synthetic oligonucleotide
  Target: LAMA2; (-) strand; PAM type: NRG; PAM sequence: CAG
tacagaatattcttgtcctt

SEQ ID NO: 66506 - DNA, 20 bp, Artificial Sequence
  Description of Artificial Sequence: Synthetic oligonucleotide
  Target: LAMA2; (-) strand; PAM type: NRG; PAM sequence: CAG
gaagaaccagaaaaaagata

SEQ ID NO: 66507 - DNA, 20 bp, Artificial Sequence
  Description of Artificial Sequence: Synthetic oligonucleotide
  Target: LAMA2; (-) strand; PAM type: NRG; PAM sequence: AAG
caccttgaagaaccagaaaa

SEQ ID NO: 66508 - DNA, 20 bp, Artificial Sequence
  Description of Artificial Sequence: Synthetic oligonucleotide
  Target: LAMA2; (-) strand; PAM type: NRG; PAM sequence: CAG
gaactatcaccttgaagaac

SEQ ID NO: 66509 - DNA, 20 bp, Artificial Sequence
  Description of Artificial Sequence: Synthetic oligonucleotide
  Target: LAMA2; (-) strand; PAM type: NRG; PAM sequence: AAG
ctttatgaactatcaccttg

SEQ ID NO: 66510 - DNA, 20 bp, Artificial Sequence
  Description of Artificial Sequence: Synthetic oligonucleotide
  Target: LAMA2; (-) strand; PAM type: NRG; PAM sequence: TGG
aacataactaactttgtcaa

SEQ ID NO: 66511 - DNA, 20 bp, Artificial Sequence
  Description of Artificial Sequence: Synthetic oligonucleotide
  Target: LAMA2; (-) strand; PAM type: NRG; PAM sequence: AAG
tgtccttaaattagtttaat

SEQ ID NO: 66512 - DNA, 20 bp, Artificial Sequence
  Description of Artificial Sequence: Synthetic oligonucleotide
  Target: LAMA2; (-) strand; PAM type: NRG; PAM sequence: TAG
tctcttctttgtccttaaat

SEQ ID NO: 66513 - DNA, 20 bp, Artificial Sequence
  Description of Artificial Sequence: Synthetic oligonucleotide
  Target: LAMA2; (-) strand; PAM type: NRG; PAM sequence: GGG
tagtgagggccaagcacagt

SEQ ID NO: 66514 - DNA, 20 bp, Artificial Sequence
  Description of Artificial Sequence: Synthetic oligonucleotide
  Target: LAMA2; (-) strand; PAM type: NRG; PAM sequence: TGG
ttagtgagggccaagcacag

SEQ ID NO: 66515 - DNA, 20 bp, Artificial Sequence
  Description of Artificial Sequence: Synthetic oligonucleotide
  Target: LAMA2; (-) strand; PAM type: NRG; PAM sequence: CAG
taattagtgagggccaagca

SEQ ID NO: 66516 - DNA, 20 bp, Artificial Sequence
  Description of Artificial Sequence: Synthetic oligonucleotide
  Target: LAMA2; (-) strand; PAM type: NRG; PAM sequence: AAG
aaacataattagtgagggcc

SEQ ID NO: 66517 - DNA, 20 bp, Artificial Sequence
  Description of Artificial Sequence: Synthetic oligonucleotide
  Target: LAMA2; (-) strand; PAM type: NRG; PAM sequence: GGG
ggcaaaaacataattagtga

SEQ ID NO: 66518 - DNA, 20 bp, Artificial Sequence
  Description of Artificial Sequence: Synthetic oligonucleotide
  Target: LAMA2; (-) strand; PAM type: NRG; PAM sequence: AGG
aggcaaaaacataattagtg

SEQ ID NO: 66519 - DNA, 20 bp, Artificial Sequence
  Description of Artificial Sequence: Synthetic oligonucleotide
  Target: LAMA2; (-) strand; PAM type: NRG; PAM sequence: GAG
caggcaaaaacataattagt

SEQ ID NO: 66520 - DNA, 20 bp, Artificial Sequence
  Description of Artificial Sequence: Synthetic oligonucleotide
  Target: LAMA2; (-) strand; PAM type: NRG; PAM sequence: TAG
ctcacaggcaaaaacataat

SEQ ID NO: 66521 - DNA, 20 bp, Artificial Sequence
  Description of Artificial Sequence: Synthetic oligonucleotide
  Target: LAMA2; (-) strand; PAM type: NRG; PAM sequence: AGG
ctccaaaatccgtatctcac

SEQ ID NO: 66522 - DNA, 20 bp, Artificial Sequence
  Description of Artificial Sequence: Synthetic oligonucleotide
  Target: LAMA2; (-) strand; PAM type: NRG; PAM sequence: CAG
cctccaaaatccgtatctca

SEQ ID NO: 66523 - DNA, 20 bp, Artificial Sequence
  Description of Artificial Sequence: Synthetic oligonucleotide
  Target: LAMA2; (-) strand; PAM type: NRG; PAM sequence: CAG
tgtgtcacttattgcaaata

SEQ ID NO: 66524 - DNA, 20 bp, Artificial Sequence
  Description of Artificial Sequence: Synthetic oligonucleotide
  Target: LAMA2; (-) strand; PAM type: NRG; PAM sequence: AAG
attacagcatctccctattt

SEQ ID NO: 66525 - DNA, 20 bp, Artificial Sequence
  Description of Artificial Sequence: Synthetic oligonucleotide
  Target: LAMA2; (-) strand; PAM type: NRG; PAM sequence: CAG
aagaggggaaagagacatta

SEQ ID NO: 66526 - DNA, 20 bp, Artificial Sequence
  Description of Artificial Sequence: Synthetic oligonucleotide
  Target: LAMA2; (-) strand; PAM type: NRG; PAM sequence: GAG
gatacgttgaagaggggaaa

SEQ ID NO: 66527 - DNA, 20 bp, Artificial Sequence
  Description of Artificial Sequence: Synthetic oligonucleotide
  Target: LAMA2; (-) strand; PAM type: NRG; PAM sequence: AAG
atgatacgttgaagagggga

SEQ ID NO: 66528 - DNA, 20 bp, Artificial Sequence
  Description of Artificial Sequence: Synthetic oligonucleotide
  Target: LAMA2; (-) strand; PAM type: NRG; PAM sequence: GGG
taatatgatacgttgaagag

SEQ ID NO: 66529 - DNA, 20 bp, Artificial Sequence
  Description of Artificial Sequence: Synthetic oligonucleotide
  Target: LAMA2; (-) strand; PAM type: NRG; PAM sequence: GGG
gtaatatgatacgttgaaga

SEQ ID NO: 66530 - DNA, 20 bp, Artificial Sequence
  Description of Artificial Sequence: Synthetic oligonucleotide
  Target: LAMA2; (-) strand; PAM type: NRG; PAM sequence: AGG
tgtaatatgatacgttgaag

SEQ ID NO: 66531 - DNA, 20 bp, Artificial Sequence
  Description of Artificial Sequence: Synthetic oligonucleotide
  Target: LAMA2; (-) strand; PAM type: NRG; PAM sequence: GAG
ctgtaatatgatacgttgaa

SEQ ID NO: 66532 - DNA, 20 bp, Artificial Sequence
  Description of Artificial Sequence: Synthetic oligonucleotide
  Target: LAMA2; (-) strand; PAM type: NRG; PAM sequence: AAG
cactgtaatatgatacgttg

SEQ ID NO: 66533 - DNA, 20 bp, Artificial Sequence
  Description of Artificial Sequence: Synthetic oligonucleotide
  Target: LAMA2; (-) strand; PAM type: NRG; PAM sequence: AGG
ggaaattcagctgctcattg

SEQ ID NO: 66534 - DNA, 20 bp, Artificial Sequence
  Description of Artificial Sequence: Synthetic oligonucleotide
  Target: LAMA2; (-) strand; PAM type: NRG; PAM sequence: GAG
tggaaattcagctgctcatt

SEQ ID NO: 66535 - DNA, 20 bp, Artificial Sequence
  Description of Artificial Sequence: Synthetic oligonucleotide
  Target: LAMA2; (-) strand; PAM type: NRG; PAM sequence: CAG
gtcaagaacaggtggaaatt

SEQ ID NO: 66536 - DNA, 20 bp, Artificial Sequence
  Description of Artificial Sequence: Synthetic oligonucleotide
  Target: LAMA2; (-) strand; PAM type: NRG; PAM sequence: TGG
ggtaatacgtcaagaacagg

SEQ ID NO: 66537 - DNA, 20 bp, Artificial Sequence
  Description of Artificial Sequence: Synthetic oligonucleotide
  Target: LAMA2; (-) strand; PAM type: NRG; PAM sequence: AGG
ataggtaatacgtcaagaac

SEQ ID NO: 66538 - DNA, 20 bp, Artificial Sequence
  Description of Artificial Sequence: Synthetic oligonucleotide
  Target: LAMA2; (-) strand; PAM type: NRG; PAM sequence: CAG
gataggtaatacgtcaagaa

SEQ ID NO: 66539 - DNA, 20 bp, Artificial Sequence
  Description of Artificial Sequence: Synthetic oligonucleotide
  Target: LAMA2; (-) strand; PAM type: NRG; PAM sequence: AAG
atggtgataggtaatacgtc

SEQ ID NO: 66540 - DNA, 20 bp, Artificial Sequence
  Description of Artificial Sequence: Synthetic oligonucleotide
  Target: LAMA2; (-) strand; PAM type: NRG; PAM sequence: AGG
taacatagcctgatggtgat

SEQ ID NO: 66541 - DNA, 20 bp, Artificial Sequence
  Description of Artificial Sequence: Synthetic oligonucleotide
  Target: LAMA2; (-) strand; PAM type: NRG; PAM sequence: TAG
ataacatagcctgatggtga

SEQ ID NO: 66542 - DNA, 20 bp, Artificial Sequence
  Description of Artificial Sequence: Synthetic oligonucleotide
  Target: LAMA2; (-) strand; PAM type: NRG; PAM sequence: TGG
agtttcataacatagcctga

SEQ ID NO: 66543 - DNA, 20 bp, Artificial Sequence
  Description of Artificial Sequence: Synthetic oligonucleotide
  Target: LAMA2; (-) strand; PAM type: NRG; PAM sequence: TAG
taaaagtgagtttcataaca

SEQ ID NO: 66544 - DNA, 20 bp, Artificial Sequence
  Description of Artificial Sequence: Synthetic oligonucleotide
  Target: LAMA2; (-) strand; PAM type: NRG; PAM sequence: GAG
tttgctttatctctaaaagt

SEQ ID NO: 66545 - DNA, 20 bp, Artificial Sequence
  Description of Artificial Sequence: Synthetic oligonucleotide
  Target: LAMA2; (-) strand; PAM type: NRG; PAM sequence: AAG
acaatttgctttatctctaa

SEQ ID NO: 66546 - DNA, 20 bp, Artificial Sequence
  Description of Artificial Sequence: Synthetic oligonucleotide
  Target: LAMA2; (-) strand; PAM type: NRG; PAM sequence: TGG
attcaataattggtgacatt

SEQ ID NO: 66547 - DNA, 20 bp, Artificial Sequence
  Description of Artificial Sequence: Synthetic oligonucleotide
  Target: LAMA2; (-) strand; PAM type: NRG; PAM sequence: TGG
ccacatttagattcaataat

SEQ ID NO: 66548 - DNA, 20 bp, Artificial Sequence
  Description of Artificial Sequence: Synthetic oligonucleotide
  Target: LAMA2; (-) strand; PAM type: NRG; PAM sequence: TAG
aaaacctgtatgcccacatt

SEQ ID NO: 66549 - DNA, 20 bp, Artificial Sequence
  Description of Artificial Sequence: Synthetic oligonucleotide
  Target: LAMA2; (-) strand; PAM type: NRG; PAM sequence: AAG
taatcatatagaaaagctga

SEQ ID NO: 66550 - DNA, 20 bp, Artificial Sequence
  Description of Artificial Sequence: Synthetic oligonucleotide
  Target: LAMA2; (-) strand; PAM type: NRG; PAM sequence: AAG
aaaaatgtaatcatatagaa

SEQ ID NO: 66551 - DNA, 20 bp, Artificial Sequence
  Description of Artificial Sequence: Synthetic oligonucleotide
  Target: LAMA2; (-) strand; PAM type: NRG; PAM sequence: TAG
taaataaaaatgtaatcata

SEQ ID NO: 66552 - DNA, 20 bp, Artificial Sequence
  Description of Artificial Sequence: Synthetic oligonucleotide
  Target: LAMA2; (-) strand; PAM type: NRG; PAM sequence: CAG
caggcgtgagccaccacacc

SEQ ID NO: 66553 - DNA, 20 bp, Artificial Sequence
  Description of Artificial Sequence: Synthetic oligonucleotide
  Target: LAMA2; (-) strand; PAM type: NRG; PAM sequence: GAG
agtgctgggattacaggcgt

SEQ ID NO: 66554 - DNA, 20 bp, Artificial Sequence
  Description of Artificial Sequence: Synthetic oligonucleotide
  Target: LAMA2; (-) strand; PAM type: NRG; PAM sequence: AGG
tcccaaagtgctgggattac

SEQ ID NO: 66555 - DNA, 20 bp, Artificial Sequence
  Description of Artificial Sequence: Synthetic oligonucleotide
  Target: LAMA2; (-) strand; PAM type: NRG; PAM sequence: CAG
ctcccaaagtgctgggatta

SEQ ID NO: 66556 - DNA, 20 bp, Artificial Sequence
  Description of Artificial Sequence: Synthetic oligonucleotide
  Target: LAMA2; (-) strand; PAM type: NRG; PAM sequence: GGG
cctcagcctcccaaagtgct

SEQ ID NO: 66557 - DNA, 20 bp, Artificial Sequence
  Description of Artificial Sequence: Synthetic oligonucleotide
  Target: LAMA2; (-) strand; PAM type: NRG; PAM sequence: TGG
gcctcagcctcccaaagtgc

SEQ ID NO: 66558 - DNA, 20 bp, Artificial Sequence
  Description of Artificial Sequence: Synthetic oligonucleotide
  Target: LAMA2; (-) strand; PAM type: NRG; PAM sequence: AAG
ccgcccgcctcagcctccca

SEQ ID NO: 66559 - DNA, 20 bp, Artificial Sequence
  Description of Artificial Sequence: Synthetic oligonucleotide
  Target: LAMA2; (-) strand; PAM type: NRG; PAM sequence: CAG
acctcgtgatccgcccgcct

SEQ ID NO: 66560 - DNA, 20 bp, Artificial Sequence
  Description of Artificial Sequence: Synthetic oligonucleotide
  Target: LAMA2; (-) strand; PAM type: NRG; PAM sequence: TGG
tttcaccgtggtagccagga

SEQ ID NO: 66561 - DNA, 20 bp, Artificial Sequence
  Description of Artificial Sequence: Synthetic oligonucleotide
  Target: LAMA2; (-) strand; PAM type: NRG; PAM sequence: AGG
ggggtttcaccgtggtagcc

SEQ ID NO: 66562 - DNA, 20 bp, Artificial Sequence
  Description of Artificial Sequence: Synthetic oligonucleotide
  Target: LAMA2; (-) strand; PAM type: NRG; PAM sequence: CAG
cggggtttcaccgtggtagc

SEQ ID NO: 66563 - DNA, 20 bp, Artificial Sequence
  Description of Artificial Sequence: Synthetic oligonucleotide
  Target: LAMA2; (-) strand; PAM type: NRG; PAM sequence: TAG
gagacggggtttcaccgtgg

SEQ ID NO: 66564 - DNA, 20 bp, Artificial Sequence
  Description of Artificial Sequence: Synthetic oligonucleotide
  Target: LAMA2; (-) strand; PAM type: NRG; PAM sequence: TGG
gtagagacggggtttcaccg

SEQ ID NO: 66565 - DNA, 20 bp, Artificial Sequence
  Description of Artificial Sequence: Synthetic oligonucleotide
  Target: LAMA2; (-) strand; PAM type: NRG; PAM sequence: GGG
ttggatttttagtagagacg

SEQ ID NO: 66566 - DNA, 20 bp, Artificial Sequence
  Description of Artificial Sequence: Synthetic oligonucleotide
  Target: LAMA2; (-) strand; PAM type: NRG; PAM sequence: GGG
tttggatttttagtagagac

SEQ ID NO: 66567 - DNA, 20 bp, Artificial Sequence
  Description of Artificial Sequence: Synthetic oligonucleotide
  Target: LAMA2; (-) strand; PAM type: NRG; PAM sequence: CGG
ttttggatttttagtagaga

SEQ ID NO: 66568 - DNA, 20 bp, Artificial Sequence
  Description of Artificial Sequence: Synthetic oligonucleotide
  Target: LAMA2; (-) strand; PAM type: NRG; PAM sequence: GAG
ttttttttggatttttagta

SEQ ID NO: 66569 - DNA, 20 bp, Artificial Sequence
  Description of Artificial Sequence: Synthetic oligonucleotide
  Target: LAMA2; (-) strand; PAM type: NRG; PAM sequence: TAG
aattttttttggatttttag

SEQ ID NO: 66570 - DNA, 20 bp, Artificial Sequence
  Description of Artificial Sequence: Synthetic oligonucleotide
  Target: LAMA2; (-) strand; PAM type: NRG; PAM sequence: TAG
gctaattttttttggatttt

SEQ ID NO: 66571 - DNA, 20 bp, Artificial Sequence
  Description of Artificial Sequence: Synthetic oligonucleotide
  Target: LAMA2; (-) strand; PAM type: NRG; PAM sequence: TGG
cacgccgggctaattttttt

SEQ ID NO: 66572 - DNA, 20 bp, Artificial Sequence
  Description of Artificial Sequence: Synthetic oligonucleotide
  Target: LAMA2; (-) strand; PAM type: NRG; PAM sequence: GGG
caggcgcccgccaccacgcc

SEQ ID NO: 66573 - DNA, 20 bp, Artificial Sequence
  Description of Artificial Sequence: Synthetic oligonucleotide
  Target: LAMA2; (-) strand; PAM type: NRG; PAM sequence: CGG
acaggcgcccgccaccacgc

SEQ ID NO: 66574 - DNA, 20 bp, Artificial Sequence
  Description of Artificial Sequence: Synthetic oligonucleotide
  Target: LAMA2; (-) strand; PAM type: NRG; PAM sequence: AGG
tcccgagtagctgggactac

SEQ ID NO: 66575 - DNA, 20 bp, Artificial Sequence
  Description of Artificial Sequence: Synthetic oligonucleotide
  Target: LAMA2; (-) strand; PAM type: NRG; PAM sequence: CAG
ctcccgagtagctgggacta

SEQ ID NO: 66576 - DNA, 20 bp, Artificial Sequence
  Description of Artificial Sequence: Synthetic oligonucleotide
  Target: LAMA2; (-) strand; PAM type: NRG; PAM sequence: GGG
cctcagcctcccgagtagct

SEQ ID NO: 66577 - DNA, 20 bp, Artificial Sequence
  Description of Artificial Sequence: Synthetic oligonucleotide
  Target: LAMA2; (-) strand; PAM type: NRG; PAM sequence: TGG
gcctcagcctcccgagtagc

SEQ ID NO: 66578 - DNA, 20 bp, Artificial Sequence
  Description of Artificial Sequence: Synthetic oligonucleotide
  Target: LAMA2; (-) strand; PAM type: NRG; PAM sequence: TAG
tcctgcctcagcctcccgag

SEQ ID NO: 66579 - DNA, 20 bp, Artificial Sequence
  Description of Artificial Sequence: Synthetic oligonucleotide
  Target: LAMA2; (-) strand; PAM type: NRG; PAM sequence: GAG
ttctcctgcctcagcctccc

SEQ ID NO: 66580 - DNA, 20 bp, Artificial Sequence
  Description of Artificial Sequence: Synthetic oligonucleotide
  Target: LAMA2; (-) strand; PAM type: NRG; PAM sequence: CAG
ttcccgccattctcctgcct

SEQ ID NO: 66581 - DNA, 20 bp, Artificial Sequence
  Description of Artificial Sequence: Synthetic oligonucleotide
  Target: LAMA2; (-) strand; PAM type: NRG; PAM sequence: GGG
ccctgcaggctccgcctccc

SEQ ID NO: 66582 - DNA, 20 bp, Artificial Sequence
  Description of Artificial Sequence: Synthetic oligonucleotide
  Target: LAMA2; (-) strand; PAM type: NRG; PAM sequence: CGG
tccctgcaggctccgcctcc

SEQ ID NO: 66583 - DNA, 20 bp, Artificial Sequence
  Description of Artificial Sequence: Synthetic oligonucleotide
  Target: LAMA2; (-) strand; PAM type: NRG; PAM sequence: AGG
gcgcgatctcggctccctgc

SEQ ID NO: 66584 - DNA, 20 bp, Artificial Sequence
  Description of Artificial Sequence: Synthetic oligonucleotide
  Target: LAMA2; (-) strand; PAM type: NRG; PAM sequence: CAG
ggcgcgatctcggctccctg

SEQ ID NO: 66585 - DNA, 20 bp, Artificial Sequence
  Description of Artificial Sequence: Synthetic oligonucleotide
  Target: LAMA2; (-) strand; PAM type: NRG; PAM sequence: CGG
ggactgcagtggcgcgatct

SEQ ID NO: 66586 - DNA, 20 bp, Artificial Sequence
  Description of Artificial Sequence: Synthetic oligonucleotide
  Target: LAMA2; (-) strand; PAM type: NRG; PAM sequence: TGG
tcgcccaggccggactgcag

SEQ ID NO: 66587 - DNA, 20 bp, Artificial Sequence
  Description of Artificial Sequence: Synthetic oligonucleotide
  Target: LAMA2; (-) strand; PAM type: NRG; PAM sequence: CAG
ctttcgcccaggccggactg

SEQ ID NO: 66588 - DNA, 20 bp, Artificial Sequence
  Description of Artificial Sequence: Synthetic oligonucleotide
  Target: LAMA2; (-) strand; PAM type: NRG; PAM sequence: CGG
tctctctctttcgcccaggc

SEQ ID NO: 66589 - DNA, 20 bp, Artificial Sequence
  Description of Artificial Sequence: Synthetic oligonucleotide
  Target: LAMA2; (-) strand; PAM type: NRG; PAM sequence: AGG
ggagtctctctctttcgccc

SEQ ID NO: 66590 - DNA, 20 bp, Artificial Sequence
  Description of Artificial Sequence: Synthetic oligonucleotide
  Target: LAMA2; (-) strand; PAM type: NRG; PAM sequence: CAG
tggagtctctctctttcgcc

SEQ ID NO: 66591 - DNA, 20 bp, Artificial Sequence
  Description of Artificial Sequence: Synthetic oligonucleotide
  Target: LAMA2; (-) strand; PAM type: NRG; PAM sequence: GAG
atttttttttttttgagatg

SEQ ID NO: 66592 - DNA, 20 bp, Artificial Sequence
  Description of Artificial Sequence: Synthetic oligonucleotide
  Target: LAMA2; (-) strand; PAM type: NRG; PAM sequence: TGG
aaatttttttttttttgaga

SEQ ID NO: 66593 - DNA, 20 bp, Artificial Sequence
  Description of Artificial Sequence: Synthetic oligonucleotide
  Target: LAMA2; (-) strand; PAM type: NRG; PAM sequence: GAG
aaaaaaattttttttttttt

SEQ ID NO: 66594 - DNA, 20 bp, Artificial Sequence
  Description of Artificial Sequence: Synthetic oligonucleotide
  Target: LAMA2; (-) strand; PAM type: NRG; PAM sequence: TAG
tgaccaccttaatagctgtc

SEQ ID NO: 66595 - DNA, 20 bp, Artificial Sequence
  Description of Artificial Sequence: Synthetic oligonucleotide
  Target: LAMA2; (-) strand; PAM type: NRG; PAM sequence: TAG
gttttccttgaccaccttaa

SEQ ID NO: 66596 - DNA, 20 bp, Artificial Sequence
  Description of Artificial Sequence: Synthetic oligonucleotide
  Target: LAMA2; (-) strand; PAM type: NRG; PAM sequence: GGG
ctatgctggtttcttttagt

SEQ ID NO: 66597 - DNA, 20 bp, Artificial Sequence
  Description of Artificial Sequence: Synthetic oligonucleotide
  Target: LAMA2; (-) strand; PAM type: NRG; PAM sequence: TGG
actatgctggtttcttttag

SEQ ID NO: 66598 - DNA, 20 bp, Artificial Sequence
  Description of Artificial Sequence: Synthetic oligonucleotide
  Target: LAMA2; (-) strand; PAM type: NRG; PAM sequence: TAG
aatactatgctggtttcttt

SEQ ID NO: 66599 - DNA, 20 bp, Artificial Sequence
  Description of Artificial Sequence: Synthetic oligonucleotide
  Target: LAMA2; (-) strand; PAM type: NRG; PAM sequence: TGG
gctcatacaaaatactatgc

SEQ ID NO: 66600 - DNA, 20 bp, Artificial Sequence
  Description of Artificial Sequence: Synthetic oligonucleotide
  Target: LAMA2; (-) strand; PAM type: NRG; PAM sequence: TGG
tctttctaaaatagagacat

SEQ ID NO: 66601 - DNA, 20 bp, Artificial Sequence
  Description of Artificial Sequence: Synthetic oligonucleotide
  Target: LAMA2; (-) strand; PAM type: NRG; PAM sequence: GAG
tgacatttctttctaaaata

SEQ ID NO: 66602 - DNA, 20 bp, Artificial Sequence
  Description of Artificial Sequence: Synthetic oligonucleotide
  Target: LAMA2; (-) strand; PAM type: NRG; PAM sequence: TAG
gatgacatttctttctaaaa

SEQ ID NO: 66603 - DNA, 20 bp, Artificial Sequence
  Description of Artificial Sequence: Synthetic oligonucleotide
  Target: LAMA2; (-) strand; PAM type: NRG; PAM sequence: TGG
ttacaaagtgctacatgttc

SEQ ID NO: 66604 - DNA, 20 bp, Artificial Sequence
  Description of Artificial Sequence: Synthetic oligonucleotide
  Target: LAMA2; (-) strand; PAM type: NRG; PAM sequence: AAG
aatgcctttcgtggcttaca

SEQ ID NO: 66605 - DNA, 20 bp, Artificial Sequence
  Description of Artificial Sequence: Synthetic oligonucleotide
  Target: LAMA2; (-) strand; PAM type: NRG; PAM sequence: TGG
taaaatgaaaatgcctttcg

SEQ ID NO: 66606 - DNA, 20 bp, Artificial Sequence
  Description of Artificial Sequence: Synthetic oligonucleotide
  Target: LAMA2; (-) strand; PAM type: NRG; PAM sequence: AAG
catctctacttaaaatctac

SEQ ID NO: 66607 - DNA, 20 bp, Artificial Sequence
  Description of Artificial Sequence: Synthetic oligonucleotide
  Target: LAMA2; (-) strand; PAM type: NRG; PAM sequence: AAG
ttctaaaatatgtgagaaga

SEQ ID NO: 66608 - DNA, 20 bp, Artificial Sequence
  Description of Artificial Sequence: Synthetic oligonucleotide
  Target: LAMA2; (-) strand; PAM type: NRG; PAM sequence: AAG
atatttctaaaatatgtgag

SEQ ID NO: 66609 - DNA, 20 bp, Artificial Sequence
  Description of Artificial Sequence: Synthetic oligonucleotide
  Target: LAMA2; (-) strand; PAM type: NRG; PAM sequence: GAG
taaatatttctaaaatatgt

SEQ ID NO: 66610 - DNA, 20 bp, Artificial Sequence
  Description of Artificial Sequence: Synthetic oligonucleotide
  Target: LAMA2; (-) strand; PAM type: NRG; PAM sequence: TGG
atatgagaactggctctata

SEQ ID NO: 66611 - DNA, 20 bp, Artificial Sequence
  Description of Artificial Sequence: Synthetic oligonucleotide
  Target: LAMA2; (-) strand; PAM type: NRG; PAM sequence: TGG
taaattctctatatgagaac

SEQ ID NO: 66612 - DNA, 20 bp, Artificial Sequence
  Description of Artificial Sequence: Synthetic oligonucleotide
  Target: LAMA2; (-) strand; PAM type: NRG; PAM sequence: GAG
agagaataaattctctatat

SEQ ID NO: 66613 - DNA, 20 bp, Artificial Sequence
  Description of Artificial Sequence: Synthetic oligonucleotide
  Target: LAMA2; (-) strand; PAM type: NRG; PAM sequence: GAG
ttattctctattctcatata

SEQ ID NO: 66614 - DNA, 20 bp, Artificial Sequence
  Description of Artificial Sequence: Synthetic oligonucleotide
  Target: LAMA2; (-) strand; PAM type: NRG; PAM sequence: TAG
atttattctctattctcata

SEQ ID NO: 66615 - DNA, 20 bp, Artificial Sequence
  Description of Artificial Sequence: Synthetic oligonucleotide
  Target: LAMA2; (-) strand; PAM type: NRG; PAM sequence: TAG
cataacctgtcttcctattt

SEQ ID NO: 66616 - DNA, 20 bp, Artificial Sequence
  Description of Artificial Sequence: Synthetic oligonucleotide
  Target: LAMA2; (-) strand; PAM type: NRG; PAM sequence: CAG
ccattataatggggatccaa

SEQ ID NO: 66617 - DNA, 20 bp, Artificial Sequence
  Description of Artificial Sequence: Synthetic oligonucleotide
  Target: LAMA2; (-) strand; PAM type: NRG; PAM sequence: GGG
tccaagctgccattataatg

SEQ ID NO: 66618 - DNA, 20 bp, Artificial Sequence
  Description of Artificial Sequence: Synthetic oligonucleotide
  Target: LAMA2; (-) strand; PAM type: NRG; PAM sequence: GGG
atccaagctgccattataat

SEQ ID NO: 66619 - DNA, 20 bp, Artificial Sequence
  Description of Artificial Sequence: Synthetic oligonucleotide
  Target: LAMA2; (-) strand; PAM type: NRG; PAM sequence: TGG
catccaagctgccattataa

SEQ ID NO: 66620 - DNA, 20 bp, Artificial Sequence
  Description of Artificial Sequence: Synthetic oligonucleotide
  Target: LAMA2; (-) strand; PAM type: NRG; PAM sequence: AAG
tcatgaaacctatctcatcc

SEQ ID NO: 66621 - DNA, 20 bp, Artificial Sequence
  Description of Artificial Sequence: Synthetic oligonucleotide
  Target: LAMA2; (-) strand; PAM type: NRG; PAM sequence: CAG
ttaataagtactattgattc

SEQ ID NO: 66622 - DNA, 20 bp, Artificial Sequence
  Description of Artificial Sequence: Synthetic oligonucleotide
  Target: LAMA2; (-) strand; PAM type: NRG; PAM sequence: AAG
cagacctctgggccattaat

SEQ ID NO: 66623 - DNA, 20 bp, Artificial Sequence
  Description of Artificial Sequence: Synthetic oligonucleotide
  Target: LAMA2; (-) strand; PAM type: NRG; PAM sequence: GGG
cctttactacccagacctct

SEQ ID NO: 66624 - DNA, 20 bp, Artificial Sequence
  Description of Artificial Sequence: Synthetic oligonucleotide
  Target: LAMA2; (-) strand; PAM type: NRG; PAM sequence: TGG
tcctttactacccagacctc

SEQ ID NO: 66625 - DNA, 20 bp, Artificial Sequence
  Description of Artificial Sequence: Synthetic oligonucleotide
  Target: LAMA2; (-) strand; PAM type: NRG; PAM sequence: CAG
ctcctctttcctttactacc

SEQ ID NO: 66626 - DNA, 20 bp, Artificial Sequence
  Description of Artificial Sequence: Synthetic oligonucleotide
  Target: LAMA2; (-) strand; PAM type: NRG; PAM sequence: AAG
ttctctaactgccttatcta

SEQ ID NO: 66627 - DNA, 20 bp, Artificial Sequence
  Description of Artificial Sequence: Synthetic oligonucleotide
  Target: LAMA2; (-) strand; PAM type: NRG; PAM sequence: TAG
agttgctcaagacaaaaatc

SEQ ID NO: 66628 - DNA, 20 bp, Artificial Sequence
  Description of Artificial Sequence: Synthetic oligonucleotide
  Target: LAMA2; (-) strand; PAM type: NRG; PAM sequence: AAG
caccatccatgcagttgctc

SEQ ID NO: 66629 - DNA, 20 bp, Artificial Sequence
  Description of Artificial Sequence: Synthetic oligonucleotide
  Target: LAMA2; (-) strand; PAM type: NRG; PAM sequence: CAG
caatgacatcaccatccatg

SEQ ID NO: 66630 - DNA, 20 bp, Artificial Sequence
  Description of Artificial Sequence: Synthetic oligonucleotide
  Target: LAMA2; (-) strand; PAM type: NRG; PAM sequence: TGG
tagcagaactgtttcttctc

SEQ ID NO: 66631 - DNA, 20 bp, Artificial Sequence
  Description of Artificial Sequence: Synthetic oligonucleotide
  Target: LAMA2; (-) strand; PAM type: NRG; PAM sequence: CAG
aaaattcagtatggctatag

SEQ ID NO: 66632 - DNA, 20 bp, Artificial Sequence
  Description of Artificial Sequence: Synthetic oligonucleotide
  Target: LAMA2; (-) strand; PAM type: NRG; PAM sequence: TAG
cctaaaattcagtatggcta

SEQ ID NO: 66633 - DNA, 20 bp, Artificial Sequence
  Description of Artificial Sequence: Synthetic oligonucleotide
  Target: LAMA2; (-) strand; PAM type: NRG; PAM sequence: TGG
aaggtgcctaaaattcagta

SEQ ID NO: 66634 - DNA, 20 bp, Artificial Sequence
  Description of Artificial Sequence: Synthetic oligonucleotide
  Target: LAMA2; (-) strand; PAM type: NRG; PAM sequence: CAG
tctaaaaggtgcctaaaatt

SEQ ID NO: 66635 - DNA, 20 bp, Artificial Sequence
  Description of Artificial Sequence: Synthetic oligonucleotide
  Target: LAMA2; (-) strand; PAM type: NRG; PAM sequence: AGG
gttctatttagatgtctaaa

SEQ ID NO: 66636 - DNA, 20 bp, Artificial Sequence
  Description of Artificial Sequence: Synthetic oligonucleotide
  Target: LAMA2; (-) strand; PAM type: NRG; PAM sequence: AAG
agttctatttagatgtctaa

SEQ ID NO: 66637 - DNA, 20 bp, Artificial Sequence
  Description of Artificial Sequence: Synthetic oligonucleotide
  Target: LAMA2; (-) strand; PAM type: NRG; PAM sequence: TAG
attaaatcaatagttctatt

SEQ ID NO: 66638 - DNA, 20 bp, Artificial Sequence
  Description of Artificial Sequence: Synthetic oligonucleotide
  Target: LAMA2; (-) strand; PAM type: NRG; PAM sequence: TAG
atatccaaatattaaatcaa

SEQ ID NO: 66639 - DNA, 20 bp, Artificial Sequence
  Description of Artificial Sequence: Synthetic oligonucleotide
  Target: LAMA2; (-) strand; PAM type: NRG; PAM sequence: GAG
agaacagatggcatacagat

SEQ ID NO: 66640 - DNA, 20 bp, Artificial Sequence
  Description of Artificial Sequence: Synthetic oligonucleotide
  Target: LAMA2; (-) strand; PAM type: NRG; PAM sequence: CAG
tagccagaacagatggcata

SEQ ID NO: 66641 - DNA, 20 bp, Artificial Sequence
  Description of Artificial Sequence: Synthetic oligonucleotide
  Target: LAMA2; (-) strand; PAM type: NRG; PAM sequence: TGG
tgtaagatagccagaacaga

SEQ ID NO: 66642 - DNA, 20 bp, Artificial Sequence
  Description of Artificial Sequence: Synthetic oligonucleotide
  Target: LAMA2; (-) strand; PAM type: NRG; PAM sequence: CAG
cgaatgtaagatagccagaa

SEQ ID NO: 66643 - DNA, 20 bp, Artificial Sequence
  Description of Artificial Sequence: Synthetic oligonucleotide
  Target: LAMA2; (-) strand; PAM type: NRG; PAM sequence: CAG
ggatccgaatgtaagatagc

SEQ ID NO: 66644 - DNA, 20 bp, Artificial Sequence
  Description of Artificial Sequence: Synthetic oligonucleotide
  Target: LAMA2; (-) strand; PAM type: NRG; PAM sequence: TAG
cacaggatccgaatgtaaga

SEQ ID NO: 66645 - DNA, 20 bp, Artificial Sequence
  Description of Artificial Sequence: Synthetic oligonucleotide
  Target: LAMA2; (-) strand; PAM type: NRG; PAM sequence: AAG
aatacacaggatccgaatgt

SEQ ID NO: 66646 - DNA, 20 bp, Artificial Sequence
  Description of Artificial Sequence: Synthetic oligonucleotide
  Target: LAMA2; (-) strand; PAM type: NRG; PAM sequence: AGG
ggccagtgtaaaaaatacac

SEQ ID NO: 66647 - DNA, 20 bp, Artificial Sequence
  Description of Artificial Sequence: Synthetic oligonucleotide
  Target: LAMA2; (-) strand; PAM type: NRG; PAM sequence: CAG
aggccagtgtaaaaaataca

SEQ ID NO: 66648 - DNA, 20 bp, Artificial Sequence
  Description of Artificial Sequence: Synthetic oligonucleotide
  Target: LAMA2; (-) strand; PAM type: NRG; PAM sequence: CAG
ttttgccagcttttccaggc

SEQ ID NO: 66649 - DNA, 20 bp, Artificial Sequence
  Description of Artificial Sequence: Synthetic oligonucleotide
  Target: LAMA2; (-) strand; PAM type: NRG; PAM sequence: AGG
taggttttgccagcttttcc

SEQ ID NO: 66650 - DNA, 20 bp, Artificial Sequence
  Description of Artificial Sequence: Synthetic oligonucleotide
  Target: LAMA2; (-) strand; PAM type: NRG; PAM sequence: CAG
ctaggttttgccagcttttc

SEQ ID NO: 66651 - DNA, 20 bp, Artificial Sequence
  Description of Artificial Sequence: Synthetic oligonucleotide
  Target: LAMA2; (-) strand; PAM type: NRG; PAM sequence: CAG
aatgcagttctaggttttgc

SEQ ID NO: 66652 - DNA, 20 bp, Artificial Sequence
  Description of Artificial Sequence: Synthetic oligonucleotide
  Target: LAMA2; (-) strand; PAM type: NRG; PAM sequence: AGG
gaggggacaaatgcagttct

SEQ ID NO: 66653 - DNA, 20 bp, Artificial Sequence
  Description of Artificial Sequence: Synthetic oligonucleotide
  Target: LAMA2; (-) strand; PAM type: NRG; PAM sequence: TAG
agaggggacaaatgcagttc

SEQ ID NO: 66654 - DNA, 20 bp, Artificial Sequence
  Description of Artificial Sequence: Synthetic oligonucleotide
  Target: LAMA2; (-) strand; PAM type: NRG; PAM sequence: CAG
aaacgcagaggggacaaatg

SEQ ID NO: 66655 - DNA, 20 bp, Artificial Sequence
  Description of Artificial Sequence: Synthetic oligonucleotide
  Target: LAMA2; (-) strand; PAM type: NRG; PAM sequence: GGG
gaaatggtataaacgcagag

SEQ ID NO: 66656 - DNA, 20 bp, Artificial Sequence
  Description of Artificial Sequence: Synthetic oligonucleotide
  Target: LAMA2; (-) strand; PAM type: NRG; PAM sequence: GGG
tgaaatggtataaacgcaga

SEQ ID NO: 66657 - DNA, 20 bp, Artificial Sequence
  Description of Artificial Sequence: Synthetic oligonucleotide
  Target: LAMA2; (-) strand; PAM type: NRG; PAM sequence: AGG
ctgaaatggtataaacgcag

SEQ ID NO: 66658 - DNA, 20 bp, Artificial Sequence
  Description of Artificial Sequence: Synthetic oligonucleotide
  Target: LAMA2; (-) strand; PAM type: NRG; PAM sequence: GAG
actgaaatggtataaacgca

SEQ ID NO: 66659 - DNA, 20 bp, Artificial Sequence
  Description of Artificial Sequence: Synthetic oligonucleotide
  Target: LAMA2; (-) strand; PAM type: NRG; PAM sequence: CAG
caactgaaatggtataaacg

SEQ ID NO: 66660 - DNA, 20 bp, Artificial Sequence
  Description of Artificial Sequence: Synthetic oligonucleotide
  Target: LAMA2; (-) strand; PAM type: NRG; PAM sequence: TGG
attagacctgtcaactgaaa

SEQ ID NO: 66661 - DNA, 20 bp, Artificial Sequence
  Description of Artificial Sequence: Synthetic oligonucleotide
  Target: LAMA2; (-) strand; PAM type: NRG; PAM sequence: TAG
gaaaaggtggaacttaaaat

SEQ ID NO: 66662 - DNA, 20 bp, Artificial Sequence
  Description of Artificial Sequence: Synthetic oligonucleotide
  Target: LAMA2; (-) strand; PAM type: NRG; PAM sequence: TGG
aataatcaattatgaaaagg

SEQ ID NO: 66663 - DNA, 20 bp, Artificial Sequence
  Description of Artificial Sequence: Synthetic oligonucleotide
  Target: LAMA2; (-) strand; PAM type: NRG; PAM sequence: AGG
atgaataatcaattatgaaa

SEQ ID NO: 66664 - DNA, 20 bp, Artificial Sequence
  Description of Artificial Sequence: Synthetic oligonucleotide
  Target: LAMA2; (-) strand; PAM type: NRG; PAM sequence: AAG
aatgaataatcaattatgaa

SEQ ID NO: 66665 - DNA, 20 bp, Artificial Sequence
  Description of Artificial Sequence: Synthetic oligonucleotide
  Target: LAMA2; (-) strand; PAM type: NRG; PAM sequence: TGG
aaatgactaaatgctatttc

SEQ ID NO: 66666 - DNA, 20 bp, Artificial Sequence
  Description of Artificial Sequence: Synthetic oligonucleotide
  Target: LAMA2; (-) strand; PAM type: NRG; PAM sequence: AAG
aataggatgatgaaaaacta

SEQ ID NO: 66667 - DNA, 20 bp, Artificial Sequence
  Description of Artificial Sequence: Synthetic oligonucleotide
  Target: LAMA2; (-) strand; PAM type: NRG; PAM sequence: AGG
gctgctgaaatctggagaat

SEQ ID NO: 66668 - DNA, 20 bp, Artificial Sequence
  Description of Artificial Sequence: Synthetic oligonucleotide
  Target: LAMA2; (-) strand; PAM type: NRG; PAM sequence: TAG
tgctgctgaaatctggagaa

SEQ ID NO: 66669 - DNA, 20 bp, Artificial Sequence
  Description of Artificial Sequence: Synthetic oligonucleotide
  Target: LAMA2; (-) strand; PAM type: NRG; PAM sequence: GAG
tctgatgctgctgaaatctg

SEQ ID NO: 66670 - DNA, 20 bp, Artificial Sequence
  Description of Artificial Sequence: Synthetic oligonucleotide
  Target: LAMA2; (-) strand; PAM type: NRG; PAM sequence: TGG
cttctgatgctgctgaaatc

SEQ ID NO: 66671 - DNA, 20 bp, Artificial Sequence
  Description of Artificial Sequence: Synthetic oligonucleotide
  Target: LAMA2; (-) strand; PAM type: NRG; PAM sequence: TGG
atccgaaggcagtgtttata

SEQ ID NO: 66672 - DNA, 20 bp, Artificial Sequence
  Description of Artificial Sequence: Synthetic oligonucleotide
  Target: LAMA2; (-) strand; PAM type: NRG; PAM sequence: CAG
atctaagggccatccgaagg

SEQ ID NO: 66673 - DNA, 20 bp, Artificial Sequence
  Description of Artificial Sequence: Synthetic oligonucleotide
  Target: LAMA2; (-) strand; PAM type: NRG; PAM sequence: AGG
gccatctaagggccatccga

SEQ ID NO: 66674 - DNA, 20 bp, Artificial Sequence
  Description of Artificial Sequence: Synthetic oligonucleotide
  Target: LAMA2; (-) strand; PAM type: NRG; PAM sequence: AAG
ggccatctaagggccatccg

SEQ ID NO: 66675 - DNA, 20 bp, Artificial Sequence
  Description of Artificial Sequence: Synthetic oligonucleotide
  Target: LAMA2; (-) strand; PAM type: NRG; PAM sequence: GGG
ggatcttggtggccatctaa

SEQ ID NO: 66676 - DNA, 20 bp, Artificial Sequence
  Description of Artificial Sequence: Synthetic oligonucleotide
  Target: LAMA2; (-) strand; PAM type: NRG; PAM sequence: AGG
gggatcttggtggccatcta

SEQ ID NO: 66677 - DNA, 20 bp, Artificial Sequence
  Description of Artificial Sequence: Synthetic oligonucleotide
  Target: LAMA2; (-) strand; PAM type: NRG; PAM sequence: AAG
ggggatcttggtggccatct

SEQ ID NO: 66678 - DNA, 20 bp, Artificial Sequence
  Description of Artificial Sequence: Synthetic oligonucleotide
  Target: LAMA2; (-) strand; PAM type: NRG; PAM sequence: TGG
atgtaactaggggatcttgg

SEQ ID NO: 66679 - DNA, 20 bp, Artificial Sequence
  Description of Artificial Sequence: Synthetic oligonucleotide
  Target: LAMA2; (-) strand; PAM type: NRG; PAM sequence: TGG
aaaatgtaactaggggatct

SEQ ID NO: 66680 - DNA, 20 bp, Artificial Sequence
  Description of Artificial Sequence: Synthetic oligonucleotide
  Target: LAMA2; (-) strand; PAM type: NRG; PAM sequence: GGG
tacacagaaaatgtaactag

SEQ ID NO: 66681 - DNA, 20 bp, Artificial Sequence
  Description of Artificial Sequence: Synthetic oligonucleotide
  Target: LAMA2; (-) strand; PAM type: NRG; PAM sequence: GGG
gtacacagaaaatgtaacta

SEQ ID NO: 66682 - DNA, 20 bp, Artificial Sequence
  Description of Artificial Sequence: Synthetic oligonucleotide
  Target: LAMA2; (-) strand; PAM type: NRG; PAM sequence: AGG
tgtacacagaaaatgtaact

SEQ ID NO: 66683 - DNA, 20 bp, Artificial Sequence
  Description of Artificial Sequence: Synthetic oligonucleotide
  Target: LAMA2; (-) strand; PAM type: NRG; PAM sequence: TAG
ttgtacacagaaaatgtaac

SEQ ID NO: 66684 - DNA, 20 bp, Artificial Sequence
  Description of Artificial Sequence: Synthetic oligonucleotide
  Target: LAMA2; (-) strand; PAM type: NRG; PAM sequence: CAG
tctttcttctgctttgtaca

SEQ ID NO: 66685 - DNA, 20 bp, Artificial Sequence
  Description of Artificial Sequence: Synthetic oligonucleotide
  Target: LAMA2; (-) strand; PAM type: NRG; PAM sequence: AGG
gcacactgtgtacagaatga

SEQ ID NO: 66686 - DNA, 20 bp, Artificial Sequence
  Description of Artificial Sequence: Synthetic oligonucleotide
  Target: LAMA2; (-) strand; PAM type: NRG; PAM sequence: AAG
agcacactgtgtacagaatg

SEQ ID NO: 66687 - DNA, 20 bp, Artificial Sequence
  Description of Artificial Sequence: Synthetic oligonucleotide
  Target: LAMA2; (-) strand; PAM type: NRG; PAM sequence: CAG
acagtgtagcacactgtgta

SEQ ID NO: 66688 - DNA, 20 bp, Artificial Sequence
  Description of Artificial Sequence: Synthetic oligonucleotide
  Target: LAMA2; (-) strand; PAM type: NRG; PAM sequence: TAG
taataaactaaaccacagtg

SEQ ID NO: 66689 - DNA, 20 bp, Artificial Sequence
  Description of Artificial Sequence: Synthetic oligonucleotide
  Target: LAMA2; (-) strand; PAM type: NRG; PAM sequence: CAG
tttaataataaactaaacca

SEQ ID NO: 66690 - DNA, 20 bp, Artificial Sequence
  Description of Artificial Sequence: Synthetic oligonucleotide
  Target: LAMA2; (-) strand; PAM type: NRG; PAM sequence: TAG
attagtaatccaaacctaaa

SEQ ID NO: 66691 - DNA, 20 bp, Artificial Sequence
  Description of Artificial Sequence: Synthetic oligonucleotide
  Target: LAMA2; (-) strand; PAM type: NRG; PAM sequence: TAG
aaggcatttaaacttaaaat

SEQ ID NO: 66692 - DNA, 20 bp, Artificial Sequence
  Description of Artificial Sequence: Synthetic oligonucleotide
  Target: LAMA2; (-) strand; PAM type: NRG; PAM sequence: AGG
ttcaaagaaatatgatataa

SEQ ID NO: 66693 - DNA, 20 bp, Artificial Sequence
  Description of Artificial Sequence: Synthetic oligonucleotide
  Target: LAMA2; (-) strand; PAM type: NRG; PAM sequence: AAG
cttcaaagaaatatgatata

SEQ ID NO: 66694 - DNA, 20 bp, Artificial Sequence
  Description of Artificial Sequence: Synthetic oligonucleotide
  Target: LAMA2; (-) strand; PAM type: NRG; PAM sequence: AAG
tgaatacatgtctagcttca

SEQ ID NO: 66695 - DNA, 20 bp, Artificial Sequence
  Description of Artificial Sequence: Synthetic oligonucleotide
  Target: LAMA2; (-) strand; PAM type: NRG; PAM sequence: TAG
ctgaggtttgaatacatgtc

SEQ ID NO: 66696 - DNA, 20 bp, Artificial Sequence
  Description of Artificial Sequence: Synthetic oligonucleotide
  Target: LAMA2; (-) strand; PAM type: NRG; PAM sequence: AGG
tctaattattgggggagctg

SEQ ID NO: 66697 - DNA, 20 bp, Artificial Sequence
  Description of Artificial Sequence: Synthetic oligonucleotide
  Target: LAMA2; (-) strand; PAM type: NRG; PAM sequence: GAG
atctaattattgggggagct

SEQ ID NO: 66698 - DNA, 20 bp, Artificial Sequence
  Description of Artificial Sequence: Synthetic oligonucleotide
  Target: LAMA2; (-) strand; PAM type: NRG; PAM sequence: GAG
caaatatctaattattgggg

SEQ ID NO: 66699 - DNA, 20 bp, Artificial Sequence
  Description of Artificial Sequence: Synthetic oligonucleotide
  Target: LAMA2; (-) strand; PAM type: NRG; PAM sequence: GGG
ttcaaatatctaattattgg

SEQ ID NO: 66700 - DNA, 20 bp, Artificial Sequence
  Description of Artificial Sequence: Synthetic oligonucleotide
  Target: LAMA2; (-) strand; PAM type: NRG; PAM sequence: GGG
gttcaaatatctaattattg

SEQ ID NO: 66701 - DNA, 20 bp, Artificial Sequence
  Description of Artificial Sequence: Synthetic oligonucleotide
  Target: LAMA2; (-) strand; PAM type: NRG; PAM sequence: GGG
tgttcaaatatctaattatt

SEQ ID NO: 66702 - DNA, 20 bp, Artificial Sequence
  Description of Artificial Sequence: Synthetic oligonucleotide
  Target: LAMA2; (-) strand; PAM type: NRG; PAM sequence: TGG
atgttcaaatatctaattat

SEQ ID NO: 66703 - DNA, 20 bp, Artificial Sequence
  Description of Artificial Sequence: Synthetic oligonucleotide
  Target: LAMA2; (-) strand; PAM type: NRG; PAM sequence: AGG
tcctttgttttaaagatgat

SEQ ID NO: 66704 - DNA, 20 bp, Artificial Sequence
  Description of Artificial Sequence: Synthetic oligonucleotide
  Target: LAMA2; (-) strand; PAM type: NRG; PAM sequence: TAG
atcctttgttttaaagatga

SEQ ID NO: 66705 - DNA, 20 bp, Artificial Sequence
  Description of Artificial Sequence: Synthetic oligonucleotide
  Target: LAMA2; (-) strand; PAM type: NRG; PAM sequence: AAG
attttatatcctttgtttta

SEQ ID NO: 66706 - DNA, 20 bp, Artificial Sequence
  Description of Artificial Sequence: Synthetic oligonucleotide
  Target: LAMA2; (-) strand; PAM type: NRG; PAM sequence: TAG
aatcatgttatccactctat

SEQ ID NO: 66707 - DNA, 20 bp, Artificial Sequence
  Description of Artificial Sequence: Synthetic oligonucleotide
  Target: LAMA2; (-) strand; PAM type: NRG; PAM sequence: GAG
gatatactcattattgatta

SEQ ID NO: 66708 - DNA, 20 bp, Artificial Sequence
  Description of Artificial Sequence: Synthetic oligonucleotide
  Target: LAMA2; (-) strand; PAM type: NRG; PAM sequence: TAG
gtgatatactcattattgat

SEQ ID NO: 66709 - DNA, 20 bp, Artificial Sequence
  Description of Artificial Sequence: Synthetic oligonucleotide
  Target: LAMA2; (-) strand; PAM type: NRG; PAM sequence: TAG
ttcaaagctctaaggctaaa

SEQ ID NO: 66710 - DNA, 20 bp, Artificial Sequence
  Description of Artificial Sequence: Synthetic oligonucleotide
  Target: LAMA2; (-) strand; PAM type: NRG; PAM sequence: AGG
agttatatttcaaagctcta

SEQ ID NO: 66711 - DNA, 20 bp, Artificial Sequence
  Description of Artificial Sequence: Synthetic oligonucleotide
  Target: LAMA2; (-) strand; PAM type: NRG; PAM sequence: AAG
tagttatatttcaaagctct

SEQ ID NO: 66712 - DNA, 20 bp, Artificial Sequence
  Description of Artificial Sequence: Synthetic oligonucleotide
  Target: LAMA2; (-) strand; PAM type: NRG; PAM sequence: AAG
gatttcttagttatatttca

SEQ ID NO: 66713 - DNA, 20 bp, Artificial Sequence
  Description of Artificial Sequence: Synthetic oligonucleotide
  Target: LAMA2; (-) strand; PAM type: NRG; PAM sequence: TAG
atttattttaatagatttct

SEQ ID NO: 66714 - DNA, 20 bp, Artificial Sequence
  Description of Artificial Sequence: Synthetic oligonucleotide
  Target: LAMA2; (-) strand; PAM type: NRG; PAM sequence: TAG
ttctatttaatttattttaa

SEQ ID NO: 66715 - DNA, 20 bp, Artificial Sequence
  Description of Artificial Sequence: Synthetic oligonucleotide
  Target: LAMA2; (-) strand; PAM type: NRG; PAM sequence: TGG
tgggaaaacattagttactt

SEQ ID NO: 66716 - DNA, 20 bp, Artificial Sequence
  Description of Artificial Sequence: Synthetic oligonucleotide
  Target: LAMA2; (-) strand; PAM type: NRG; PAM sequence: TAG
gagttaatatgggaaaacat

SEQ ID NO: 66717 - DNA, 20 bp, Artificial Sequence
  Description of Artificial Sequence: Synthetic oligonucleotide
  Target: LAMA2; (-) strand; PAM type: NRG; PAM sequence: GGG
aagttattctgagttaatat

SEQ ID NO: 66718 - DNA, 20 bp, Artificial Sequence
  Description of Artificial Sequence: Synthetic oligonucleotide
  Target: LAMA2; (-) strand; PAM type: NRG; PAM sequence: TGG
aaagttattctgagttaata

SEQ ID NO: 66719 - DNA, 20 bp, Artificial Sequence
  Description of Artificial Sequence: Synthetic oligonucleotide
  Target: LAMA2; (-) strand; PAM type: NRG; PAM sequence: GAG
atttcagacaaagttattct

SEQ ID NO: 66720 - DNA, 20 bp, Artificial Sequence
  Description of Artificial Sequence: Synthetic oligonucleotide
  Target: LAMA2; (-) strand; PAM type: NRG; PAM sequence: AAG
attcagtttaatttcagaca

SEQ ID NO: 66721 - DNA, 20 bp, Artificial Sequence
  Description of Artificial Sequence: Synthetic oligonucleotide
  Target: LAMA2; (-) strand; PAM type: NRG; PAM sequence: CAG
atatatattcagtttaattt

SEQ ID NO: 66722 - DNA, 20 bp, Artificial Sequence
  Description of Artificial Sequence: Synthetic oligonucleotide
  Target: LAMA2; (-) strand; PAM type: NRG; PAM sequence: CAG
atctataaatgatatatatt

SEQ ID NO: 66723 - DNA, 20 bp, Artificial Sequence
  Description of Artificial Sequence: Synthetic oligonucleotide
  Target: LAMA2; (-) strand; PAM type: NRG; PAM sequence: AAG
cacggtttgtacatccaaat

SEQ ID NO: 66724 - DNA, 20 bp, Artificial Sequence
  Description of Artificial Sequence: Synthetic oligonucleotide
  Target: LAMA2; (-) strand; PAM type: NRG; PAM sequence: CGG
ttccttaatgtctctattca

SEQ ID NO: 66725 - DNA, 20 bp, Artificial Sequence
  Description of Artificial Sequence: Synthetic oligonucleotide
  Target: LAMA2; (-) strand; PAM type: NRG; PAM sequence: AAG
gaggaatggtgtgaactctg

SEQ ID NO: 66726 - DNA, 20 bp, Artificial Sequence
  Description of Artificial Sequence: Synthetic oligonucleotide
  Target: LAMA2; (-) strand; PAM type: NRG; PAM sequence: TGG
tgtgtttttaggaagaggaa

SEQ ID NO: 66727 - DNA, 20 bp, Artificial Sequence
  Description of Artificial Sequence: Synthetic oligonucleotide
  Target: LAMA2; (-) strand; PAM type: NRG; PAM sequence: AGG
ctgtatgtgtttttaggaag

SEQ ID NO: 66728 - DNA, 20 bp, Artificial Sequence
  Description of Artificial Sequence: Synthetic oligonucleotide
  Target: LAMA2; (-) strand; PAM type: NRG; PAM sequence: GAG
cctgtatgtgtttttaggaa

SEQ ID NO: 66729 - DNA, 20 bp, Artificial Sequence
  Description of Artificial Sequence: Synthetic oligonucleotide
  Target: LAMA2; (-) strand; PAM type: NRG; PAM sequence: AAG
aacctgtatgtgtttttagg

SEQ ID NO: 66730 - DNA, 20 bp, Artificial Sequence
  Description of Artificial Sequence: Synthetic oligonucleotide
  Target: LAMA2; (-) strand; PAM type: NRG; PAM sequence: AGG
ctaaacctgtatgtgttttt

SEQ ID NO: 66731 - DNA, 20 bp, Artificial Sequence
  Description of Artificial Sequence: Synthetic oligonucleotide
  Target: LAMA2; (-) strand; PAM type: NRG; PAM sequence: TAG
cctaaacctgtatgtgtttt

SEQ ID NO: 66732 - DNA, 20 bp, Artificial Sequence
  Description of Artificial Sequence: Synthetic oligonucleotide
  Target: LAMA2; (-) strand; PAM type: NRG; PAM sequence: CAG
gcagacattgatatcttgat

SEQ ID NO: 66733 - DNA, 20 bp, Artificial Sequence
  Description of Artificial Sequence: Synthetic oligonucleotide
  Target: LAMA2; (-) strand; PAM type: NRG; PAM sequence: CAG
ttactttgatgatctcagag

SEQ ID NO: 66734 - DNA, 20 bp, Artificial Sequence
  Description of Artificial Sequence: Synthetic oligonucleotide
  Target: LAMA2; (-) strand; PAM type: NRG; PAM sequence: GAG
gcattactttgatgatctca

SEQ ID NO: 66735 - DNA, 20 bp, Artificial Sequence
  Description of Artificial Sequence: Synthetic oligonucleotide
  Target: LAMA2; (-) strand; PAM type: NRG; PAM sequence: CAG
acgcattactttgatgatct

SEQ ID NO: 66736 - DNA, 20 bp, Artificial Sequence
  Description of Artificial Sequence: Synthetic oligonucleotide
  Target: LAMA2; (-) strand; PAM type: NRG; PAM sequence: TGG
gccactagtgcttcttagaa

SEQ ID NO: 66737 - DNA, 20 bp, Artificial Sequence
  Description of Artificial Sequence: Synthetic oligonucleotide
  Target: LAMA2; (-) strand; PAM type: NRG; PAM sequence: TAG
tatatgccactagtgcttct

SEQ ID NO: 66738 - DNA, 20 bp, Artificial Sequence
  Description of Artificial Sequence: Synthetic oligonucleotide
  Target: LAMA2; (-) strand; PAM type: NRG; PAM sequence: TAG
accgtgatcatatatgccac

SEQ ID NO: 66739 - DNA, 20 bp, Artificial Sequence
  Description of Artificial Sequence: Synthetic oligonucleotide
  Target: LAMA2; (-) strand; PAM type: NRG; PAM sequence: GGG
tcttatggggttctaagtga

SEQ ID NO: 66740 - DNA, 20 bp, Artificial Sequence
  Description of Artificial Sequence: Synthetic oligonucleotide
  Target: LAMA2; (-) strand; PAM type: NRG; PAM sequence: AGG
gtcttatggggttctaagtg

SEQ ID NO: 66741 - DNA, 20 bp, Artificial Sequence
  Description of Artificial Sequence: Synthetic oligonucleotide
  Target: LAMA2; (-) strand; PAM type: NRG; PAM sequence: GAG
tgtcttatggggttctaagt

SEQ ID NO: 66742 - DNA, 20 bp, Artificial Sequence
  Description of Artificial Sequence: Synthetic oligonucleotide
  Target: LAMA2; (-) strand; PAM type: NRG; PAM sequence: AAG
ttcctgtcttatggggttct

SEQ ID NO: 66743 - DNA, 20 bp, Artificial Sequence
  Description of Artificial Sequence: Synthetic oligonucleotide
  Target: LAMA2; (-) strand; PAM type: NRG; PAM sequence: GGG
tgtatctttcctgtcttatg

SEQ ID NO: 66744 - DNA, 20 bp, Artificial Sequence
  Description of Artificial Sequence: Synthetic oligonucleotide
  Target: LAMA2; (-) strand; PAM type: NRG; PAM sequence: GGG
ctgtatctttcctgtcttat

SEQ ID NO: 66745 - DNA, 20 bp, Artificial Sequence
  Description of Artificial Sequence: Synthetic oligonucleotide
  Target: LAMA2; (-) strand; PAM type: NRG; PAM sequence: TGG
gctgtatctttcctgtctta

SEQ ID NO: 66746 - DNA, 20 bp, Artificial Sequence
  Description of Artificial Sequence: Synthetic oligonucleotide
  Target: LAMA2; (-) strand; PAM type: NRG; PAM sequence: AGG
acagataaactggagaggag

SEQ ID NO: 66747 - DNA, 20 bp, Artificial Sequence
  Description of Artificial Sequence: Synthetic oligonucleotide
  Target: LAMA2; (-) strand; PAM type: NRG; PAM sequence: GAG
cacagataaactggagagga

SEQ ID NO: 66748 - DNA, 20 bp, Artificial Sequence
  Description of Artificial Sequence: Synthetic oligonucleotide
  Target: LAMA2; (-) strand; PAM type: NRG; PAM sequence: GAG
aacacagataaactggagag

SEQ ID NO: 66749 - DNA, 20 bp, Artificial Sequence
  Description of Artificial Sequence: Synthetic oligonucleotide
  Target: LAMA2; (-) strand; PAM type: NRG; PAM sequence: AGG
ataacacagataaactggag

SEQ ID NO: 66750 - DNA, 20 bp, Artificial Sequence
  Description of Artificial Sequence: Synthetic oligonucleotide
  Target: LAMA2; (-) strand; PAM type: NRG; PAM sequence: GAG
cataacacagataaactgga

SEQ ID NO: 66751 - DNA, 20 bp, Artificial Sequence
  Description of Artificial Sequence: Synthetic oligonucleotide
  Target: LAMA2; (-) strand; PAM type: NRG; PAM sequence: GAG
tccataacacagataaactg

SEQ ID NO: 66752 - DNA, 20 bp, Artificial Sequence
  Description of Artificial Sequence: Synthetic oligonucleotide
  Target: LAMA2; (-) strand; PAM type: NRG; PAM sequence: TGG
aatccataacacagataaac

SEQ ID NO: 66753 - DNA, 20 bp, Artificial Sequence
  Description of Artificial Sequence: Synthetic oligonucleotide
  Target: LAMA2; (-) strand; PAM type: NRG; PAM sequence: CAG
cactcttacaatccataaca

SEQ ID NO: 66754 - DNA, 20 bp, Artificial Sequence
  Description of Artificial Sequence: Synthetic oligonucleotide
  Target: LAMA2; (-) strand; PAM type: NRG; PAM sequence: AAG
cttgtggatattactttact

SEQ ID NO: 66755 - DNA, 20 bp, Artificial Sequence
  Description of Artificial Sequence: Synthetic oligonucleotide
  Target: LAMA2; (-) strand; PAM type: NRG; PAM sequence: TGG
ttttcatggtgaaatgcttg

SEQ ID NO: 66756 - DNA, 20 bp, Artificial Sequence
  Description of Artificial Sequence: Synthetic oligonucleotide
  Target: LAMA2; (-) strand; PAM type: NRG; PAM sequence: TGG
aaaatgtttaatgtttttca

SEQ ID NO: 66757 - DNA, 20 bp, Artificial Sequence
  Description of Artificial Sequence: Synthetic oligonucleotide
  Target: LAMA2; (-) strand; PAM type: NRG; PAM sequence: TGG
ataaaaataatcatcagaga

SEQ ID NO: 66758 - DNA, 20 bp, Artificial Sequence
  Description of Artificial Sequence: Synthetic oligonucleotide
  Target: LAMA2; (-) strand; PAM type: NRG; PAM sequence: GAG
gtcaataaaaataatcatca

SEQ ID NO: 66759 - DNA, 20 bp, Artificial Sequence
  Description of Artificial Sequence: Synthetic oligonucleotide
  Target: LAMA2; (-) strand; PAM type: NRG; PAM sequence: CAG
tggtcaataaaaataatcat

SEQ ID NO: 66760 - DNA, 20 bp, Artificial Sequence
  Description of Artificial Sequence: Synthetic oligonucleotide
  Target: LAMA2; (-) strand; PAM type: NRG; PAM sequence: TGG
ccttagagttggcaagaata

SEQ ID NO: 66761 - DNA, 20 bp, Artificial Sequence
  Description of Artificial Sequence: Synthetic oligonucleotide
  Target: LAMA2; (-) strand; PAM type: NRG; PAM sequence: AAG
tagagtaccttagagttggc

SEQ ID NO: 66762 - DNA, 20 bp, Artificial Sequence
  Description of Artificial Sequence: Synthetic oligonucleotide
  Target: LAMA2; (-) strand; PAM type: NRG; PAM sequence: TGG
gtgttagagtaccttagagt

SEQ ID NO: 66763 - DNA, 20 bp, Artificial Sequence
  Description of Artificial Sequence: Synthetic oligonucleotide
  Target: LAMA2; (-) strand; PAM type: NRG; PAM sequence: GAG
tctagtgttagagtacctta

SEQ ID NO: 66764 - DNA, 20 bp, Artificial Sequence
  Description of Artificial Sequence: Synthetic oligonucleotide
  Target: LAMA2; (-) strand; PAM type: NRG; PAM sequence: TAG
attctagtgttagagtacct

SEQ ID NO: 66765 - DNA, 20 bp, Artificial Sequence
  Description of Artificial Sequence: Synthetic oligonucleotide
  Target: LAMA2; (-) strand; PAM type: NRG; PAM sequence: GAG
agtttaaaattctagtgtta

SEQ ID NO: 66766 - DNA, 20 bp, Artificial Sequence
  Description of Artificial Sequence: Synthetic oligonucleotide
  Target: LAMA2; (-) strand; PAM type: NRG; PAM sequence: TAG
caagtttaaaattctagtgt

SEQ ID NO: 66767 - DNA, 20 bp, Artificial Sequence
  Description of Artificial Sequence: Synthetic oligonucleotide
  Target: LAMA2; (-) strand; PAM type: NRG; PAM sequence: TAG
atataacaagtttaaaattc

SEQ ID NO: 66768 - DNA, 20 bp, Artificial Sequence
  Description of Artificial Sequence: Synthetic oligonucleotide
  Target: LAMA2; (-) strand; PAM type: NRG; PAM sequence: AAG
accaaagtaacaaatataac

SEQ ID NO: 66769 - DNA, 20 bp, Artificial Sequence
  Description of Artificial Sequence: Synthetic oligonucleotide
  Target: LAMA2; (-) strand; PAM type: NRG; PAM sequence: AAG
tttctttgacattcgtacca

SEQ ID NO: 66770 - DNA, 20 bp, Artificial Sequence
  Description of Artificial Sequence: Synthetic oligonucleotide
  Target: LAMA2; (-) strand; PAM type: NRG; PAM sequence: AGG
aggaatgctctaatacttac

SEQ ID NO: 66771 - DNA, 20 bp, Artificial Sequence
  Description of Artificial Sequence: Synthetic oligonucleotide
  Target: LAMA2; (-) strand; PAM type: NRG; PAM sequence: CAG
gaggaatgctctaatactta

SEQ ID NO: 66772 - DNA, 20 bp, Artificial Sequence
  Description of Artificial Sequence: Synthetic oligonucleotide
  Target: LAMA2; (-) strand; PAM type: NRG; PAM sequence: AGG
ttctttgtttaggaacaatg

SEQ ID NO: 66773 - DNA, 20 bp, Artificial Sequence
  Description of Artificial Sequence: Synthetic oligonucleotide
  Target: LAMA2; (-) strand; PAM type: NRG; PAM sequence: GAG
attctttgtttaggaacaat

SEQ ID NO: 66774 - DNA, 20 bp, Artificial Sequence
  Description of Artificial Sequence: Synthetic oligonucleotide
  Target: LAMA2; (-) strand; PAM type: NRG; PAM sequence: AGG
taaaaagaaattctttgttt

SEQ ID NO: 66775 - DNA, 20 bp, Artificial Sequence
  Description of Artificial Sequence: Synthetic oligonucleotide
  Target: LAMA2; (-) strand; PAM type: NRG; PAM sequence: TAG
ataaaaagaaattctttgtt

SEQ ID NO: 66776 - DNA, 20 bp, Artificial Sequence
  Description of Artificial Sequence: Synthetic oligonucleotide
  Target: LAMA2; (-) strand; PAM type: NRG; PAM sequence: AAG
cctagtgcagactacataaa

SEQ ID NO: 66777 - DNA, 20 bp, Artificial Sequence
  Description of Artificial Sequence: Synthetic oligonucleotide
  Target: LAMA2; (-) strand; PAM type: NRG; PAM sequence: CAG
atcatttccaattcctagtg

SEQ ID NO: 66778 - DNA, 20 bp, Artificial Sequence
  Description of Artificial Sequence: Synthetic oligonucleotide
  Target: LAMA2; (-) strand; PAM type: NRG; PAM sequence: TAG
tgtgcatcatttccaattcc

SEQ ID NO: 66779 - DNA, 20 bp, Artificial Sequence
  Description of Artificial Sequence: Synthetic oligonucleotide
  Target: LAMA2; (-) strand; PAM type: NRG; PAM sequence: AAG
aaacaatctcacagattaaa

SEQ ID NO: 66780 - DNA, 20 bp, Artificial Sequence
  Description of Artificial Sequence: Synthetic oligonucleotide
  Target: LAMA2; (-) strand; PAM type: NRG; PAM sequence: CAG
aagatgcataaacaatctca

SEQ ID NO: 66781 - DNA, 20 bp, Artificial Sequence
  Description of Artificial Sequence: Synthetic oligonucleotide
  Target: LAMA2; (-) strand; PAM type: NRG; PAM sequence: AAG
ttgcaaaactaagcaaacct

SEQ ID NO: 66782 - DNA, 20 bp, Artificial Sequence
  Description of Artificial Sequence: Synthetic oligonucleotide
  Target: LAMA2; (-) strand; PAM type: NRG; PAM sequence: AAG
atgcacgcatttgcaaaact

SEQ ID NO: 66783 - DNA, 20 bp, Artificial Sequence
  Description of Artificial Sequence: Synthetic oligonucleotide
  Target: LAMA2; (-) strand; PAM type: NRG; PAM sequence: TGG
agaagagttcaaaatacaaa

SEQ ID NO: 66784 - DNA, 20 bp, Artificial Sequence
  Description of Artificial Sequence: Synthetic oligonucleotide
  Target: LAMA2; (-) strand; PAM type: NRG; PAM sequence: GAG
actacagttaaaagccagaa

SEQ ID NO: 66785 - DNA, 20 bp, Artificial Sequence
  Description of Artificial Sequence: Synthetic oligonucleotide
  Target: LAMA2; (-) strand; PAM type: NRG; PAM sequence: AAG
ccactacagttaaaagccag

SEQ ID NO: 66786 - DNA, 20 bp, Artificial Sequence
  Description of Artificial Sequence: Synthetic oligonucleotide
  Target: LAMA2; (-) strand; PAM type: NRG; PAM sequence: CAG
tttccactacagttaaaagc

SEQ ID NO: 66787 - DNA, 20 bp, Artificial Sequence
  Description of Artificial Sequence: Synthetic oligonucleotide
  Target: LAMA2; (-) strand; PAM type: NRG; PAM sequence: AAG
caaatttccactacagttaa

SEQ ID NO: 66788 - DNA, 20 bp, Artificial Sequence
  Description of Artificial Sequence: Synthetic oligonucleotide
  Target: LAMA2; (-) strand; PAM type: NRG; PAM sequence: CAG
ttcaatccaaatttccacta

SEQ ID NO: 66789 - DNA, 20 bp, Artificial Sequence
  Description of Artificial Sequence: Synthetic oligonucleotide
  Target: LAMA2; (-) strand; PAM type: NRG; PAM sequence: CGG
agtttatatattgtacctca

SEQ ID NO: 66790 - DNA, 20 bp, Artificial Sequence
  Description of Artificial Sequence: Synthetic oligonucleotide
  Target: LAMA2; (-) strand; PAM type: NRG; PAM sequence: AAG
ggtttttctcggttggatgc

SEQ ID NO: 66791 - DNA, 20 bp, Artificial Sequence
  Description of Artificial Sequence: Synthetic oligonucleotide
  Target: LAMA2; (-) strand; PAM type: NRG; PAM sequence: TGG
gagtagtggtttttctcggt

SEQ ID NO: 66792 - DNA, 20 bp, Artificial Sequence
  Description of Artificial Sequence: Synthetic oligonucleotide
  Target: LAMA2; (-) strand; PAM type: NRG; PAM sequence: CGG
ataagagtagtggtttttct

SEQ ID NO: 66793 - DNA, 20 bp, Artificial Sequence
  Description of Artificial Sequence: Synthetic oligonucleotide
  Target: LAMA2; (-) strand; PAM type: NRG; PAM sequence: TGG
tgaagtgcagataagagtag

SEQ ID NO: 66794 - DNA, 20 bp, Artificial Sequence
  Description of Artificial Sequence: Synthetic oligonucleotide
  Target: LAMA2; (-) strand; PAM type: NRG; PAM sequence: TAG
gattgaagtgcagataagag

SEQ ID NO: 66795 - DNA, 20 bp, Artificial Sequence
  Description of Artificial Sequence: Synthetic oligonucleotide
  Target: LAMA2; (-) strand; PAM type: NRG; PAM sequence: GAG
gctgattgaagtgcagataa

SEQ ID NO: 66796 - DNA, 20 bp, Artificial Sequence
  Description of Artificial Sequence: Synthetic oligonucleotide
  Target: LAMA2; (-) strand; PAM type: NRG; PAM sequence: AAG
ctgctgattgaagtgcagat

SEQ ID NO: 66797 - DNA, 20 bp, Artificial Sequence
  Description of Artificial Sequence: Synthetic oligonucleotide
  Target: LAMA2; (-) strand; PAM type: NRG; PAM sequence: CAG
acctcctgctgattgaagtg

SEQ ID NO: 66798 - DNA, 20 bp, Artificial Sequence
  Description of Artificial Sequence: Synthetic oligonucleotide
  Target: LAMA2; (-) strand; PAM type: NRG; PAM sequence: AAG
aaagaacctcctgctgattg

SEQ ID NO: 66799 - DNA, 20 bp, Artificial Sequence
  Description of Artificial Sequence: Synthetic oligonucleotide
  Target: LAMA2; (-) strand; PAM type: NRG; PAM sequence: AAG
tttttctaaacaaactgaaa

SEQ ID NO: 66800 - DNA, 20 bp, Artificial Sequence
  Description of Artificial Sequence: Synthetic oligonucleotide
  Target: LAMA2; (-) strand; PAM type: NRG; PAM sequence: AGG
ttgtatgccatgcagatgac

SEQ ID NO: 66801 - DNA, 20 bp, Artificial Sequence
  Description of Artificial Sequence: Synthetic oligonucleotide
  Target: LAMA2; (-) strand; PAM type: NRG; PAM sequence: CAG
attgtatgccatgcagatga

SEQ ID NO: 66802 - DNA, 20 bp, Artificial Sequence
  Description of Artificial Sequence: Synthetic oligonucleotide
  Target: LAMA2; (-) strand; PAM type: NRG; PAM sequence: CAG
tgtaaagattgtatgccatg

SEQ ID NO: 66803 - DNA, 20 bp, Artificial Sequence
  Description of Artificial Sequence: Synthetic oligonucleotide
  Target: LAMA2; (-) strand; PAM type: NRG; PAM sequence: AAG
caaaagaaaatttctttgta

SEQ ID NO: 66804 - DNA, 20 bp, Artificial Sequence
  Description of Artificial Sequence: Synthetic oligonucleotide
  Target: LAMA2; (-) strand; PAM type: NRG; PAM sequence: AAG
agttaaaacacaaagggcaa

SEQ ID NO: 66805 - DNA, 20 bp, Artificial Sequence
  Description of Artificial Sequence: Synthetic oligonucleotide
  Target: LAMA2; (-) strand; PAM type: NRG; PAM sequence: GGG
ctcagtagttaaaacacaaa

SEQ ID NO: 66806 - DNA, 20 bp, Artificial Sequence
  Description of Artificial Sequence: Synthetic oligonucleotide
  Target: LAMA2; (-) strand; PAM type: NRG; PAM sequence: AGG
actcagtagttaaaacacaa

SEQ ID NO: 66807 - DNA, 20 bp, Artificial Sequence
  Description of Artificial Sequence: Synthetic oligonucleotide
  Target: LAMA2; (-) strand; PAM type: NRG; PAM sequence: AAG
cactcagtagttaaaacaca

SEQ ID NO: 66808 - DNA, 20 bp, Artificial Sequence
  Description of Artificial Sequence: Synthetic oligonucleotide
  Target: LAMA2; (-) strand; PAM type: NRG; PAM sequence: TAG
gaagtttctgcagcactcag

SEQ ID NO: 66809 - DNA, 20 bp, Artificial Sequence
  Description of Artificial Sequence: Synthetic oligonucleotide
  Target: LAMA2; (-) strand; PAM type: NRG; PAM sequence: CAG
acagaagtttctgcagcact

SEQ ID NO: 66810 - DNA, 20 bp, Artificial Sequence
  Description of Artificial Sequence: Synthetic oligonucleotide
  Target: LAMA2; (-) strand; PAM type: NRG; PAM sequence: CAG
cagttagacagaagtttctg

SEQ ID NO: 66811 - DNA, 20 bp, Artificial Sequence
  Description of Artificial Sequence: Synthetic oligonucleotide
  Target: LAMA2; (-) strand; PAM type: NRG; PAM sequence: AAG
actgttttgcagttagacag

SEQ ID NO: 66812 - DNA, 20 bp, Artificial Sequence
  Description of Artificial Sequence: Synthetic oligonucleotide
  Target: LAMA2; (-) strand; PAM type: NRG; PAM sequence: CAG
taaactgttttgcagttaga

SEQ ID NO: 66813 - DNA, 20 bp, Artificial Sequence
  Description of Artificial Sequence: Synthetic oligonucleotide
  Target: LAMA2; (-) strand; PAM type: NRG; PAM sequence: TAG
accttaaactgttttgcagt

SEQ ID NO: 66814 - DNA, 20 bp, Artificial Sequence
  Description of Artificial Sequence: Synthetic oligonucleotide
  Target: LAMA2; (-) strand; PAM type: NRG; PAM sequence: CAG
tgataccttaaactgttttg

SEQ ID NO: 66815 - DNA, 20 bp, Artificial Sequence
  Description of Artificial Sequence: Synthetic oligonucleotide
  Target: LAMA2; (-) strand; PAM type: NRG; PAM sequence: TAG
ttttacttttaacattgtca

SEQ ID NO: 66816 - DNA, 20 bp, Artificial Sequence
  Description of Artificial Sequence: Synthetic oligonucleotide
  Target: LAMA2; (-) strand; PAM type: NRG; PAM sequence: GGG
tgataatataaactttgatt

SEQ ID NO: 66817 - DNA, 20 bp, Artificial Sequence
  Description of Artificial Sequence: Synthetic oligonucleotide
  Target: LAMA2; (-) strand; PAM type: NRG; PAM sequence: TGG
atgataatataaactttgat

SEQ ID NO: 66818 - DNA, 20 bp, Artificial Sequence
  Description of Artificial Sequence: Synthetic oligonucleotide
  Target: LAMA2; (-) strand; PAM type: NRG; PAM sequence: TGG
ggtattcagataatggtgct

SEQ ID NO: 66819 - DNA, 20 bp, Artificial Sequence
  Description of Artificial Sequence: Synthetic oligonucleotide
  Target: LAMA2; (-) strand; PAM type: NRG; PAM sequence: TGG
cccgtttggtattcagataa

SEQ ID NO: 66820 - DNA, 20 bp, Artificial Sequence
  Description of Artificial Sequence: Synthetic oligonucleotide
  Target: LAMA2; (-) strand; PAM type: NRG; PAM sequence: CAG
atttggccccgtttggtatt

SEQ ID NO: 66821 - DNA, 20 bp, Artificial Sequence
  Description of Artificial Sequence: Synthetic oligonucleotide
  Target: LAMA2; (-) strand; PAM type: NRG; PAM sequence: TGG
gagaattatttggccccgtt

SEQ ID NO: 66822 - DNA, 20 bp, Artificial Sequence
  Description of Artificial Sequence: Synthetic oligonucleotide
  Target: LAMA2; (-) strand; PAM type: NRG; PAM sequence: TGG
ctgaatcatagagaattatt

SEQ ID NO: 66823 - DNA, 20 bp, Artificial Sequence
  Description of Artificial Sequence: Synthetic oligonucleotide
  Target: LAMA2; (-) strand; PAM type: NRG; PAM sequence: GAG
tatgtctcatctgaatcata

SEQ ID NO: 66824 - DNA, 20 bp, Artificial Sequence
  Description of Artificial Sequence: Synthetic oligonucleotide
  Target: LAMA2; (-) strand; PAM type: NRG; PAM sequence: TAG
tttatgtctcatctgaatca

SEQ ID NO: 66825 - DNA, 20 bp, Artificial Sequence
  Description of Artificial Sequence: Synthetic oligonucleotide
  Target: LAMA2; (-) strand; PAM type: NRG; PAM sequence: AAG
ttaccacatacttgttttta

SEQ ID NO: 66826 - DNA, 20 bp, Artificial Sequence
  Description of Artificial Sequence: Synthetic oligonucleotide
  Target: LAMA2; (-) strand; PAM type: NRG; PAM sequence: AAG
ataatgccaaaggttttcca

SEQ ID NO: 66827 - DNA, 20 bp, Artificial Sequence
  Description of Artificial Sequence: Synthetic oligonucleotide
  Target: LAMA2; (-) strand; PAM type: NRG; PAM sequence: AGG
atttcattagataatgccaa

SEQ ID NO: 66828 - DNA, 20 bp, Artificial Sequence
  Description of Artificial Sequence: Synthetic oligonucleotide
  Target: LAMA2; (-) strand; PAM type: NRG; PAM sequence: AAG
aatttcattagataatgcca

SEQ ID NO: 66829 - DNA, 20 bp, Artificial Sequence
  Description of Artificial Sequence: Synthetic oligonucleotide
  Target: LAMA2; (-) strand; PAM type: NRG; PAM sequence: TAG
taggcacatattaatttcat

SEQ ID NO: 66830 - DNA, 20 bp, Artificial Sequence
  Description of Artificial Sequence: Synthetic oligonucleotide
  Target: LAMA2; (-) strand; PAM type: NRG; PAM sequence: AGG
gaattgcaacatcatagagt

SEQ ID NO: 66831 - DNA, 20 bp, Artificial Sequence
  Description of Artificial Sequence: Synthetic oligonucleotide
  Target: LAMA2; (-) strand; PAM type: NRG; PAM sequence: TAG
tgaattgcaacatcatagag

SEQ ID NO: 66832 - DNA, 20 bp, Artificial Sequence
  Description of Artificial Sequence: Synthetic oligonucleotide
  Target: LAMA2; (-) strand; PAM type: NRG; PAM sequence: GAG
agttgaattgcaacatcata

SEQ ID NO: 66833 - DNA, 20 bp, Artificial Sequence
  Description of Artificial Sequence: Synthetic oligonucleotide
  Target: LAMA2; (-) strand; PAM type: NRG; PAM sequence: TAG
caagttgaattgcaacatca

SEQ ID NO: 66834 - DNA, 20 bp, Artificial Sequence
  Description of Artificial Sequence: Synthetic oligonucleotide
  Target: LAMA2; (-) strand; PAM type: NRG; PAM sequence: AAG
tctcttgagtatatgcttac

SEQ ID NO: 66835 - DNA, 20 bp, Artificial Sequence
  Description of Artificial Sequence: Synthetic oligonucleotide
  Target: LAMA2; (-) strand; PAM type: NRG; PAM sequence: GAG
catgtgcacctatttctctt

SEQ ID NO: 66836 - DNA, 20 bp, Artificial Sequence
  Description of Artificial Sequence: Synthetic oligonucleotide
  Target: LAMA2; (-) strand; PAM type: NRG; PAM sequence: GAG
attattaatagtgctgttat

SEQ ID NO: 66837 - DNA, 20 bp, Artificial Sequence
  Description of Artificial Sequence: Synthetic oligonucleotide
  Target: LAMA2; (-) strand; PAM type: NRG; PAM sequence: TAG
ccagctttagatattattaa

SEQ ID NO: 66838 - DNA, 20 bp, Artificial Sequence
  Description of Artificial Sequence: Synthetic oligonucleotide
  Target: LAMA2; (-) strand; PAM type: NRG; PAM sequence: TAG
catttggttatttccagctt

SEQ ID NO: 66839 - DNA, 20 bp, Artificial Sequence
  Description of Artificial Sequence: Synthetic oligonucleotide
  Target: LAMA2; (-) strand; PAM type: NRG; PAM sequence: CAG
cgatgtcatttggttatttc

SEQ ID NO: 66840 - DNA, 20 bp, Artificial Sequence
  Description of Artificial Sequence: Synthetic oligonucleotide
  Target: LAMA2; (-) strand; PAM type: NRG; PAM sequence: TGG
atgccaatagcgatgtcatt

SEQ ID NO: 66841 - DNA, 20 bp, Artificial Sequence
  Description of Artificial Sequence: Synthetic oligonucleotide
  Target: LAMA2; (-) strand; PAM type: NRG; PAM sequence: TAG
gaaatatttattcatgccaa

SEQ ID NO: 66842 - DNA, 20 bp, Artificial Sequence
  Description of Artificial Sequence: Synthetic oligonucleotide
  Target: LAMA2; (-) strand; PAM type: NRG; PAM sequence: TAG
tgttcatttttactgcttta

SEQ ID NO: 66843 - DNA, 20 bp, Artificial Sequence
  Description of Artificial Sequence: Synthetic oligonucleotide
  Target: LAMA2; (-) strand; PAM type: NRG; PAM sequence: CAG
acccgtgctgttgggtataa

SEQ ID NO: 66844 - DNA, 20 bp, Artificial Sequence
  Description of Artificial Sequence: Synthetic oligonucleotide
  Target: LAMA2; (-) strand; PAM type: NRG; PAM sequence: GGG
aagggttcacccgtgctgtt

SEQ ID NO: 66845 - DNA, 20 bp, Artificial Sequence
  Description of Artificial Sequence: Synthetic oligonucleotide
  Target: LAMA2; (-) strand; PAM type: NRG; PAM sequence: TGG
taagggttcacccgtgctgt

SEQ ID NO: 66846 - DNA, 20 bp, Artificial Sequence
  Description of Artificial Sequence: Synthetic oligonucleotide
  Target: LAMA2; (-) strand; PAM type: NRG; PAM sequence: GGG
ttccttaagattatgtttaa

SEQ ID NO: 66847 - DNA, 20 bp, Artificial Sequence
  Description of Artificial Sequence: Synthetic oligonucleotide
  Target: LAMA2; (-) strand; PAM type: NRG; PAM sequence: AGG
tttccttaagattatgttta

SEQ ID NO: 66848 - DNA, 20 bp, Artificial Sequence
  Description of Artificial Sequence: Synthetic oligonucleotide
  Target: LAMA2; (-) strand; PAM type: NRG; PAM sequence: AAG
ttttccttaagattatgttt

SEQ ID NO: 66849 - DNA, 20 bp, Artificial Sequence
  Description of Artificial Sequence: Synthetic oligonucleotide
  Target: LAMA2; (-) strand; PAM type: NRG; PAM sequence: AAG
atgtctaatttcttttcctt

SEQ ID NO: 66850 - DNA, 20 bp, Artificial Sequence
  Description of Artificial Sequence: Synthetic oligonucleotide
  Target: LAMA2; (-) strand; PAM type: NRG; PAM sequence: AGG
aatgttatatgaatggaatc

SEQ ID NO: 66851 - DNA, 20 bp, Artificial Sequence
  Description of Artificial Sequence: Synthetic oligonucleotide
  Target: LAMA2; (-) strand; PAM type: NRG; PAM sequence: CAG
gaatgttatatgaatggaat

SEQ ID NO: 66852 - DNA, 20 bp, Artificial Sequence
  Description of Artificial Sequence: Synthetic oligonucleotide
  Target: LAMA2; (-) strand; PAM type: NRG; PAM sequence: TGG
atttttgaatgttatatgaa

SEQ ID NO: 66853 - DNA, 20 bp, Artificial Sequence
  Description of Artificial Sequence: Synthetic oligonucleotide
  Target: LAMA2; (-) strand; PAM type: NRG; PAM sequence: AAG
ctgacttctatctagcatga

SEQ ID NO: 66854 - DNA, 20 bp, Artificial Sequence
  Description of Artificial Sequence: Synthetic oligonucleotide
  Target: LAMA2; (-) strand; PAM type: NRG; PAM sequence: TAG
ctagtatcctgacttctatc

SEQ ID NO: 66855 - DNA, 20 bp, Artificial Sequence
  Description of Artificial Sequence: Synthetic oligonucleotide
  Target: LAMA2; (-) strand; PAM type: NRG; PAM sequence: TAG
ctaccctttccaaagataac

SEQ ID NO: 66856 - DNA, 20 bp, Artificial Sequence
  Description of Artificial Sequence: Synthetic oligonucleotide
  Target: LAMA2; (-) strand; PAM type: NRG; PAM sequence: AAG
ccctatctctaccctttcca

SEQ ID NO: 66857 - DNA, 20 bp, Artificial Sequence
  Description of Artificial Sequence: Synthetic oligonucleotide
  Target: LAMA2; (-) strand; PAM type: NRG; PAM sequence: AAG
aagagaatattgcccatact

SEQ ID NO: 66858 - DNA, 20 bp, Artificial Sequence
  Description of Artificial Sequence: Synthetic oligonucleotide
  Target: LAMA2; (-) strand; PAM type: NRG; PAM sequence: GAG
aaccatcatatagatcaaaa

SEQ ID NO: 66859 - DNA, 20 bp, Artificial Sequence
  Description of Artificial Sequence: Synthetic oligonucleotide
  Target: LAMA2; (-) strand; PAM type: NRG; PAM sequence: AAG
gtaaccatcatatagatcaa

SEQ ID NO: 66860 - DNA, 20 bp, Artificial Sequence
  Description of Artificial Sequence: Synthetic oligonucleotide
  Target: LAMA2; (-) strand; PAM type: NRG; PAM sequence: TAG
aaacctatgtaaccatcata

SEQ ID NO: 66861 - DNA, 20 bp, Artificial Sequence
  Description of Artificial Sequence: Synthetic oligonucleotide
  Target: LAMA2; (-) strand; PAM type: NRG; PAM sequence: CAG
tcaatgtatgatcatattat

SEQ ID NO: 66862 - DNA, 20 bp, Artificial Sequence
  Description of Artificial Sequence: Synthetic oligonucleotide
  Target: LAMA2; (-) strand; PAM type: NRG; PAM sequence: TAG
atatataatgtatatatgta

SEQ ID NO: 66863 - DNA, 20 bp, Artificial Sequence
  Description of Artificial Sequence: Synthetic oligonucleotide
  Target: LAMA2; (-) strand; PAM type: NRG; PAM sequence: TGG
tcttagaacattttaaaaat

SEQ ID NO: 66864 - DNA, 20 bp, Artificial Sequence
  Description of Artificial Sequence: Synthetic oligonucleotide
  Target: LAMA2; (-) strand; PAM type: NRG; PAM sequence: TAG
tattgagcttttctttctct

SEQ ID NO: 66865 - DNA, 20 bp, Artificial Sequence
  Description of Artificial Sequence: Synthetic oligonucleotide
  Target: LAMA2; (-) strand; PAM type: NRG; PAM sequence: GAG
atggggtgtttttatttatt

SEQ ID NO: 66866 - DNA, 20 bp, Artificial Sequence
  Description of Artificial Sequence: Synthetic oligonucleotide
  Target: LAMA2; (-) strand; PAM type: NRG; PAM sequence: GGG
tctctagtgacaaggaaatg

SEQ ID NO: 66867 - DNA, 20 bp, Artificial Sequence
  Description of Artificial Sequence: Synthetic oligonucleotide
  Target: LAMA2; (-) strand; PAM type: NRG; PAM sequence: GGG
atctctagtgacaaggaaat

SEQ ID NO: 66868 - DNA, 20 bp, Artificial Sequence
  Description of Artificial Sequence: Synthetic oligonucleotide
  Target: LAMA2; (-) strand; PAM type: NRG; PAM sequence: TGG
catctctagtgacaaggaaa

SEQ ID NO: 66869 - DNA, 20 bp, Artificial Sequence
  Description of Artificial Sequence: Synthetic oligonucleotide
  Target: LAMA2; (-) strand; PAM type: NRG; PAM sequence: AGG
gtaattcatctctagtgaca

SEQ ID NO: 66870 - DNA, 20 bp, Artificial Sequence
  Description of Artificial Sequence: Synthetic oligonucleotide
  Target: LAMA2; (-) strand; PAM type: NRG; PAM sequence: AAG
agtaattcatctctagtgac

SEQ ID NO: 66871 - DNA, 20 bp, Artificial Sequence
  Description of Artificial Sequence: Synthetic oligonucleotide
  Target: LAMA2; (-) strand; PAM type: NRG; PAM sequence: TAG
acataatagtaattcatctc

SEQ ID NO: 66872 - DNA, 20 bp, Artificial Sequence
  Description of Artificial Sequence: Synthetic oligonucleotide
  Target: LAMA2; (-) strand; PAM type: NRG; PAM sequence: TAG
tatatacgatttgaacataa

SEQ ID NO: 66873 - DNA, 20 bp, Artificial Sequence
  Description of Artificial Sequence: Synthetic oligonucleotide
  Target: LAMA2; (-) strand; PAM type: NRG; PAM sequence: TAG
tttgcttattcagcatattt

SEQ ID NO: 66874 - DNA, 20 bp, Artificial Sequence
  Description of Artificial Sequence: Synthetic oligonucleotide
  Target: LAMA2; (-) strand; PAM type: NRG; PAM sequence: CAG
tagttgttgatttgcttatt

SEQ ID NO: 66875 - DNA, 20 bp, Artificial Sequence
  Description of Artificial Sequence: Synthetic oligonucleotide
  Target: LAMA2; (-) strand; PAM type: NRG; PAM sequence: TAG
gcgatgcagaagtctagatg

SEQ ID NO: 66876 - DNA, 20 bp, Artificial Sequence
  Description of Artificial Sequence: Synthetic oligonucleotide
  Target: LAMA2; (-) strand; PAM type: NRG; PAM sequence: TAG
tggtttgcgatgcagaagtc

SEQ ID NO: 66877 - DNA, 20 bp, Artificial Sequence
  Description of Artificial Sequence: Synthetic oligonucleotide
  Target: LAMA2; (-) strand; PAM type: NRG; PAM sequence: AAG
agttctggtttgcgatgcag

SEQ ID NO: 66878 - DNA, 20 bp, Artificial Sequence
  Description of Artificial Sequence: Synthetic oligonucleotide
  Target: LAMA2; (-) strand; PAM type: NRG; PAM sequence: CAG
tgtagttctggtttgcgatg

SEQ ID NO: 66879 - DNA, 20 bp, Artificial Sequence
  Description of Artificial Sequence: Synthetic oligonucleotide
  Target: LAMA2; (-) strand; PAM type: NRG; PAM sequence: TGG
aatgcatttaaatgtagttc

SEQ ID NO: 66880 - DNA, 20 bp, Artificial Sequence
  Description of Artificial Sequence: Synthetic oligonucleotide
  Target: LAMA2; (-) strand; PAM type: NRG; PAM sequence: TAG
agataaaatgcatttaaatg

SEQ ID NO: 66881 - DNA, 20 bp, Artificial Sequence
  Description of Artificial Sequence: Synthetic oligonucleotide
  Target: LAMA2; (-) strand; PAM type: NRG; PAM sequence: GAG
tattttaattctttaagtgt

SEQ ID NO: 66882 - DNA, 20 bp, Artificial Sequence
  Description of Artificial Sequence: Synthetic oligonucleotide
  Target: LAMA2; (-) strand; PAM type: NRG; PAM sequence: AAG
gagttttattttaattcttt

SEQ ID NO: 66883 - DNA, 20 bp, Artificial Sequence
  Description of Artificial Sequence: Synthetic oligonucleotide
  Target: LAMA2; (-) strand; PAM type: NRG; PAM sequence: GAG
ttggaagattgttcagaaaa

SEQ ID NO: 66884 - DNA, 20 bp, Artificial Sequence
  Description of Artificial Sequence: Synthetic oligonucleotide
  Target: LAMA2; (-) strand; PAM type: NRG; PAM sequence: AAG
tattggaagattgttcagaa

SEQ ID NO: 66885 - DNA, 20 bp, Artificial Sequence
  Description of Artificial Sequence: Synthetic oligonucleotide
  Target: LAMA2; (-) strand; PAM type: NRG; PAM sequence: CAG
caatatattggaagattgtt

SEQ ID NO: 66886 - DNA, 20 bp, Artificial Sequence
  Description of Artificial Sequence: Synthetic oligonucleotide
  Target: LAMA2; (-) strand; PAM type: NRG; PAM sequence: AAG
acttatggtcaatatattgg

SEQ ID NO: 66887 - DNA, 20 bp, Artificial Sequence
  Description of Artificial Sequence: Synthetic oligonucleotide
  Target: LAMA2; (-) strand; PAM type: NRG; PAM sequence: TGG
tttacttatggtcaatatat

SEQ ID NO: 66888 - DNA, 20 bp, Artificial Sequence
  Description of Artificial Sequence: Synthetic oligonucleotide
  Target: LAMA2; (-) strand; PAM type: NRG; PAM sequence: TGG
actcatattacatttactta

SEQ ID NO: 66889 - DNA, 20 bp, Artificial Sequence
  Description of Artificial Sequence: Synthetic oligonucleotide
  Target: LAMA2; (-) strand; PAM type: NRG; PAM sequence: CGG
acagacattgagttacaaaa

SEQ ID NO: 66890 - DNA, 20 bp, Artificial Sequence
  Description of Artificial Sequence: Synthetic oligonucleotide
  Target: LAMA2; (-) strand; PAM type: NRG; PAM sequence: GAG
agataaatccaacagacatt

SEQ ID NO: 66891 - DNA, 20 bp, Artificial Sequence
  Description of Artificial Sequence: Synthetic oligonucleotide
  Target: LAMA2; (-) strand; PAM type: NRG; PAM sequence: CAG
aaaaatcaagataaatccaa

SEQ ID NO: 66892 - DNA, 20 bp, Artificial Sequence
  Description of Artificial Sequence: Synthetic oligonucleotide
  Target: LAMA2; (-) strand; PAM type: NRG; PAM sequence: AAG
tgctgaactttataaaaatc

SEQ ID NO: 66893 - DNA, 20 bp, Artificial Sequence
  Description of Artificial Sequence: Synthetic oligonucleotide
  Target: LAMA2; (-) strand; PAM type: NRG; PAM sequence: TGG
aatagaaacaaaagaaaatg

SEQ ID NO: 66894 - DNA, 20 bp, Artificial Sequence
  Description of Artificial Sequence: Synthetic oligonucleotide
  Target: LAMA2; (-) strand; PAM type: NRG; PAM sequence: AAG
cctcacaaaaatagaaacaa

SEQ ID NO: 66895 - DNA, 20 bp, Artificial Sequence
  Description of Artificial Sequence: Synthetic oligonucleotide
  Target: LAMA2; (-) strand; PAM type: NRG; PAM sequence: TAG
actatagtgcctcacaaaaa

SEQ ID NO: 66896 - DNA, 20 bp, Artificial Sequence
  Description of Artificial Sequence: Synthetic oligonucleotide
  Target: LAMA2; (-) strand; PAM type: NRG; PAM sequence: TAG
catttattacataaaaacta

SEQ ID NO: 66897 - DNA, 20 bp, Artificial Sequence
  Description of Artificial Sequence: Synthetic oligonucleotide
  Target: LAMA2; (-) strand; PAM type: NRG; PAM sequence: CAG
ttctaagtaggaggccatat

SEQ ID NO: 66898 - DNA, 20 bp, Artificial Sequence
  Description of Artificial Sequence: Synthetic oligonucleotide
  Target: LAMA2; (-) strand; PAM type: NRG; PAM sequence: AGG
aataacattttctaagtagg

SEQ ID NO: 66899 - DNA, 20 bp, Artificial Sequence
  Description of Artificial Sequence: Synthetic oligonucleotide
  Target: LAMA2; (-) strand; PAM type: NRG; PAM sequence: GAG
gaataacattttctaagtag

SEQ ID NO: 66900 - DNA, 20 bp, Artificial Sequence
  Description of Artificial Sequence: Synthetic oligonucleotide
  Target: LAMA2; (-) strand; PAM type: NRG; PAM sequence: AGG
atgaataacattttctaagt

SEQ ID NO: 66901 - DNA, 20 bp, Artificial Sequence
  Description of Artificial Sequence: Synthetic oligonucleotide
  Target: LAMA2; (-) strand; PAM type: NRG; PAM sequence: TAG
catgaataacattttctaag

SEQ ID NO: 66902 - DNA, 20 bp, Artificial Sequence
  Description of Artificial Sequence: Synthetic oligonucleotide
  Target: LAMA2; (-) strand; PAM type: NRG; PAM sequence: AAG
tctcatgaataacattttct

SEQ ID NO: 66903 - DNA, 20 bp, Artificial Sequence
  Description of Artificial Sequence: Synthetic oligonucleotide
  Target: LAMA2; (-) strand; PAM type: NRG; PAM sequence: TGG
tttttacatatgcaaacctg

SEQ ID NO: 66904 - DNA, 20 bp, Artificial Sequence
  Description of Artificial Sequence: Synthetic oligonucleotide
  Target: LAMA2; (-) strand; PAM type: NRG; PAM sequence: AAG
taatacactttttcaatagt

SEQ ID NO: 66905 - DNA, 20 bp, Artificial Sequence
  Description of Artificial Sequence: Synthetic oligonucleotide
  Target: LAMA2; (-) strand; PAM type: NRG; PAM sequence: TAG
tccataatacactttttcaa

SEQ ID NO: 66906 - DNA, 20 bp, Artificial Sequence
  Description of Artificial Sequence: Synthetic oligonucleotide
  Target: LAMA2; (-) strand; PAM type: NRG; PAM sequence: GAG
ttcacctgtcgtatctgaca

SEQ ID NO: 66907 - DNA, 20 bp, Artificial Sequence
  Description of Artificial Sequence: Synthetic oligonucleotide
  Target: LAMA2; (-) strand; PAM type: NRG; PAM sequence: CAG
agttcacctgtcgtatctga

SEQ ID NO: 66908 - DNA, 20 bp, Artificial Sequence
  Description of Artificial Sequence: Synthetic oligonucleotide
  Target: LAMA2; (-) strand; PAM type: NRG; PAM sequence: AAG
tgctaggccttatgttacca

SEQ ID NO: 66909 - DNA, 20 bp, Artificial Sequence
  Description of Artificial Sequence: Synthetic oligonucleotide
  Target: LAMA2; (-) strand; PAM type: NRG; PAM sequence: AGG
aagatcaataaaactttgct

SEQ ID NO: 66910 - DNA, 20 bp, Artificial Sequence
  Description of Artificial Sequence: Synthetic oligonucleotide
  Target: LAMA2; (-) strand; PAM type: NRG; PAM sequence: TAG
taagatcaataaaactttgc

SEQ ID NO: 66911 - DNA, 20 bp, Artificial Sequence
  Description of Artificial Sequence: Synthetic oligonucleotide
  Target: LAMA2; (-) strand; PAM type: NRG; PAM sequence: AAG
ttttatatatatatatatgt

SEQ ID NO: 66912 - DNA, 20 bp, Artificial Sequence
  Description of Artificial Sequence: Synthetic oligonucleotide
  Target: LAMA2; (-) strand; PAM type: NRG; PAM sequence: TGG
tatcactgtgatcattctct

SEQ ID NO: 66913 - DNA, 20 bp, Artificial Sequence
  Description of Artificial Sequence: Synthetic oligonucleotide
  Target: LAMA2; (-) strand; PAM type: NRG; PAM sequence: TAG
ggctagtcaatggcagtaat

SEQ ID NO: 66914 - DNA, 20 bp, Artificial Sequence
  Description of Artificial Sequence: Synthetic oligonucleotide
  Target: LAMA2; (-) strand; PAM type: NRG; PAM sequence: CAG
ggcaggtggctagtcaatgg

SEQ ID NO: 66915 - DNA, 20 bp, Artificial Sequence
  Description of Artificial Sequence: Synthetic oligonucleotide
  Target: LAMA2; (-) strand; PAM type: NRG; PAM sequence: TGG
tgtggcaggtggctagtcaa

SEQ ID NO: 66916 - DNA, 20 bp, Artificial Sequence
  Description of Artificial Sequence: Synthetic oligonucleotide
  Target: LAMA2; (-) strand; PAM type: NRG; PAM sequence: TAG
tctggcatgtggcaggtggc

SEQ ID NO: 66917 - DNA, 20 bp, Artificial Sequence
  Description of Artificial Sequence: Synthetic oligonucleotide
  Target: LAMA2; (-) strand; PAM type: NRG; PAM sequence: TGG
tgtgtctggcatgtggcagg

SEQ ID NO: 66918 - DNA, 20 bp, Artificial Sequence
  Description of Artificial Sequence: Synthetic oligonucleotide
  Target: LAMA2; (-) strand; PAM type: NRG; PAM sequence: AGG
ccatgtgtctggcatgtggc

SEQ ID NO: 66919 - DNA, 20 bp, Artificial Sequence
  Description of Artificial Sequence: Synthetic oligonucleotide
  Target: LAMA2; (-) strand; PAM type: NRG; PAM sequence: CAG
accatgtgtctggcatgtgg

SEQ ID NO: 66920 - DNA, 20 bp, Artificial Sequence
  Description of Artificial Sequence: Synthetic oligonucleotide
  Target: LAMA2; (-) strand; PAM type: NRG; PAM sequence: TGG
gtcaccatgtgtctggcatg

SEQ ID NO: 66921 - DNA, 20 bp, Artificial Sequence
  Description of Artificial Sequence: Synthetic oligonucleotide
  Target: LAMA2; (-) strand; PAM type: NRG; PAM sequence: TGG
cagccatgtcaccatgtgtc

SEQ ID NO: 66922 - DNA, 20 bp, Artificial Sequence
  Description of Artificial Sequence: Synthetic oligonucleotide
  Target: LAMA2; (-) strand; PAM type: NRG; PAM sequence: CAG
cacctatcacatgttatcat

SEQ ID NO: 66923 - DNA, 20 bp, Artificial Sequence
  Description of Artificial Sequence: Synthetic oligonucleotide
  Target: LAMA2; (-) strand; PAM type: NRG; PAM sequence: GGG
ttgtttaaagggactctctt

SEQ ID NO: 66924 - DNA, 20 bp, Artificial Sequence
  Description of Artificial Sequence: Synthetic oligonucleotide
  Target: LAMA2; (-) strand; PAM type: NRG; PAM sequence: TGG
cttgtttaaagggactctct

SEQ ID NO: 66925 - DNA, 20 bp, Artificial Sequence
  Description of Artificial Sequence: Synthetic oligonucleotide
  Target: LAMA2; (-) strand; PAM type: NRG; PAM sequence: GGG
ggaaaaaaaccttgtttaaa

SEQ ID NO: 66926 - DNA, 20 bp, Artificial Sequence
  Description of Artificial Sequence: Synthetic oligonucleotide
  Target: LAMA2; (-) strand; PAM type: NRG; PAM sequence: AGG
aggaaaaaaaccttgtttaa

SEQ ID NO: 66927 - DNA, 20 bp, Artificial Sequence
  Description of Artificial Sequence: Synthetic oligonucleotide
  Target: LAMA2; (-) strand; PAM type: NRG; PAM sequence: AAG
caggaaaaaaaccttgttta

SEQ ID NO: 66928 - DNA, 20 bp, Artificial Sequence
  Description of Artificial Sequence: Synthetic oligonucleotide
  Target: LAMA2; (-) strand; PAM type: NRG; PAM sequence: AGG
cacttcatcaatatgaagac

SEQ ID NO: 66929 - DNA, 20 bp, Artificial Sequence
  Description of Artificial Sequence: Synthetic oligonucleotide
  Target: LAMA2; (-) strand; PAM type: NRG; PAM sequence: CAG
acacttcatcaatatgaaga

SEQ ID NO: 66930 - DNA, 20 bp, Artificial Sequence
  Description of Artificial Sequence: Synthetic oligonucleotide
  Target: LAMA2; (-) strand; PAM type: NRG; PAM sequence: AAG
aaaaacacttcatcaatatg

SEQ ID NO: 66931 - DNA, 20 bp, Artificial Sequence
  Description of Artificial Sequence: Synthetic oligonucleotide
  Target: LAMA2; (-) strand; PAM type: NRG; PAM sequence: TAG
aataaatgaaataatggcgt

SEQ ID NO: 66932 - DNA, 20 bp, Artificial Sequence
  Description of Artificial Sequence: Synthetic oligonucleotide
  Target: LAMA2; (-) strand; PAM type: NRG; PAM sequence: TGG
tcatagaataaatgaaataa

SEQ ID NO: 66933 - DNA, 20 bp, Artificial Sequence
  Description of Artificial Sequence: Synthetic oligonucleotide
  Target: LAMA2; (-) strand; PAM type: NRG; PAM sequence: TAG
aatgccaattttgtctttca

SEQ ID NO: 66934 - DNA, 20 bp, Artificial Sequence
  Description of Artificial Sequence: Synthetic oligonucleotide
  Target: LAMA2; (-) strand; PAM type: NRG; PAM sequence: AAG
tctcagatgacaggtatcaa

SEQ ID NO: 66935 - DNA, 20 bp, Artificial Sequence
  Description of Artificial Sequence: Synthetic oligonucleotide
  Target: LAMA2; (-) strand; PAM type: NRG; PAM sequence: AGG
ctttgggtatctcagatgac

SEQ ID NO: 66936 - DNA, 20 bp, Artificial Sequence
  Description of Artificial Sequence: Synthetic oligonucleotide
  Target: LAMA2; (-) strand; PAM type: NRG; PAM sequence: CAG
cctttgggtatctcagatga

SEQ ID NO: 66937 - DNA, 20 bp, Artificial Sequence
  Description of Artificial Sequence: Synthetic oligonucleotide
  Target: LAMA2; (-) strand; PAM type: NRG; PAM sequence: CAG
aaaaaatcctttgggtatct

SEQ ID NO: 66938 - DNA, 20 bp, Artificial Sequence
  Description of Artificial Sequence: Synthetic oligonucleotide
  Target: LAMA2; (-) strand; PAM type: NRG; PAM sequence: GGG
acttaaaaaaaaaatccttt

SEQ ID NO: 66939 - DNA, 20 bp, Artificial Sequence
  Description of Artificial Sequence: Synthetic oligonucleotide
  Target: LAMA2; (-) strand; PAM type: NRG; PAM sequence: TGG
aacttaaaaaaaaaatcctt

SEQ ID NO: 66940 - DNA, 20 bp, Artificial Sequence
  Description of Artificial Sequence: Synthetic oligonucleotide
  Target: LAMA2; (-) strand; PAM type: NRG; PAM sequence: AAG
gtgcatatatttagacctac

SEQ ID NO: 66941 - DNA, 20 bp, Artificial Sequence
  Description of Artificial Sequence: Synthetic oligonucleotide
  Target: LAMA2; (-) strand; PAM type: NRG; PAM sequence: TAG
aatattgctgtgcatatatt

SEQ ID NO: 66942 - DNA, 20 bp, Artificial Sequence
  Description of Artificial Sequence: Synthetic oligonucleotide
  Target: LAMA2; (-) strand; PAM type: NRG; PAM sequence: AGG
gaaacaaaatttctgatttc

SEQ ID NO: 66943 - DNA, 20 bp, Artificial Sequence
  Description of Artificial Sequence: Synthetic oligonucleotide
  Target: LAMA2; (-) strand; PAM type: NRG; PAM sequence: CAG
agaaacaaaatttctgattt

SEQ ID NO: 66944 - DNA, 20 bp, Artificial Sequence
  Description of Artificial Sequence: Synthetic oligonucleotide
  Target: LAMA2; (-) strand; PAM type: NRG; PAM sequence: CAG
ataatggaaagagatgccat

SEQ ID NO: 66945 - DNA, 20 bp, Artificial Sequence
  Description of Artificial Sequence: Synthetic oligonucleotide
  Target: LAMA2; (-) strand; PAM type: NRG; PAM sequence: GAG
ttcaaatcacataatggaaa

SEQ ID NO: 66946 - DNA, 20 bp, Artificial Sequence
  Description of Artificial Sequence: Synthetic oligonucleotide
  Target: LAMA2; (-) strand; PAM type: NRG; PAM sequence: AAG
gtttcaaatcacataatgga

SEQ ID NO: 66947 - DNA, 20 bp, Artificial Sequence
  Description of Artificial Sequence: Synthetic oligonucleotide
  Target: LAMA2; (-) strand; PAM type: NRG; PAM sequence: TGG
aaatgtttcaaatcacataa

SEQ ID NO: 66948 - DNA, 20 bp, Artificial Sequence
  Description of Artificial Sequence: Synthetic oligonucleotide
  Target: LAMA2; (-) strand; PAM type: NRG; PAM sequence: AGG
tttttccatgcaaagtagac

SEQ ID NO: 66949 - DNA, 20 bp, Artificial Sequence
  Description of Artificial Sequence: Synthetic oligonucleotide
  Target: LAMA2; (-) strand; PAM type: NRG; PAM sequence: CAG
ttttttccatgcaaagtaga

SEQ ID NO: 66950 - DNA, 20 bp, Artificial Sequence
  Description of Artificial Sequence: Synthetic oligonucleotide
  Target: LAMA2; (-) strand; PAM type: NRG; PAM sequence: TAG
gtagttttttccatgcaaag

SEQ ID NO: 66951 - DNA, 20 bp, Artificial Sequence
  Description of Artificial Sequence: Synthetic oligonucleotide
  Target: LAMA2; (-) strand; PAM type: NRG; PAM sequence: AAG
tctgtagttttttccatgca

SEQ ID NO: 66952 - DNA, 20 bp, Artificial Sequence
  Description of Artificial Sequence: Synthetic oligonucleotide
  Target: LAMA2; (-) strand; PAM type: NRG; PAM sequence: TAG
actagatttgacaaagtctg

SEQ ID NO: 66953 - DNA, 20 bp, Artificial Sequence
  Description of Artificial Sequence: Synthetic oligonucleotide
  Target: LAMA2; (-) strand; PAM type: NRG; PAM sequence: AAG
caaggcaactagatttgaca

SEQ ID NO: 66954 - DNA, 20 bp, Artificial Sequence
  Description of Artificial Sequence: Synthetic oligonucleotide
  Target: LAMA2; (-) strand; PAM type: NRG; PAM sequence: TAG
cattcttcttccaaggcaac

SEQ ID NO: 66955 - DNA, 20 bp, Artificial Sequence
  Description of Artificial Sequence: Synthetic oligonucleotide
  Target: LAMA2; (-) strand; PAM type: NRG; PAM sequence: AGG
tcttattcattcttcttcca

SEQ ID NO: 66956 - DNA, 20 bp, Artificial Sequence
  Description of Artificial Sequence: Synthetic oligonucleotide
  Target: LAMA2; (-) strand; PAM type: NRG; PAM sequence: AAG
ctcttattcattcttcttcc

SEQ ID NO: 66957 - DNA, 20 bp, Artificial Sequence
  Description of Artificial Sequence: Synthetic oligonucleotide
  Target: LAMA2; (-) strand; PAM type: NRG; PAM sequence: TAG
aaatcaattcaaacttgaaa

SEQ ID NO: 66958 - DNA, 20 bp, Artificial Sequence
  Description of Artificial Sequence: Synthetic oligonucleotide
  Target: LAMA2; (-) strand; PAM type: NRG; PAM sequence: TAG
taaaaagacagtttattatt

SEQ ID NO: 66959 - DNA, 20 bp, Artificial Sequence
  Description of Artificial Sequence: Synthetic oligonucleotide
  Target: LAMA2; (-) strand; PAM type: NRG; PAM sequence: CAG
tcttttgtttcctaaaaaga

SEQ ID NO: 66960 - DNA, 20 bp, Artificial Sequence
  Description of Artificial Sequence: Synthetic oligonucleotide
  Target: LAMA2; (-) strand; PAM type: NRG; PAM sequence: AAG
tacttcttttgtttcctaaa

SEQ ID NO: 66961 - DNA, 20 bp, Artificial Sequence
  Description of Artificial Sequence: Synthetic oligonucleotide
  Target: LAMA2; (-) strand; PAM type: NRG; PAM sequence: AAG
tcatgtcctctattttaata

SEQ ID NO: 66962 - DNA, 20 bp, Artificial Sequence
  Description of Artificial Sequence: Synthetic oligonucleotide
  Target: LAMA2; (-) strand; PAM type: NRG; PAM sequence: AAG
aactgcttaaagcaacaaac

SEQ ID NO: 66963 - DNA, 20 bp, Artificial Sequence
  Description of Artificial Sequence: Synthetic oligonucleotide
  Target: LAMA2; (-) strand; PAM type: NRG; PAM sequence: AAG
gttactacataaactgctta

SEQ ID NO: 66964 - DNA, 20 bp, Artificial Sequence
  Description of Artificial Sequence: Synthetic oligonucleotide
  Target: LAMA2; (-) strand; PAM type: NRG; PAM sequence: AAG
tgacactttctaccacctta

SEQ ID NO: 66965 - DNA, 20 bp, Artificial Sequence
  Description of Artificial Sequence: Synthetic oligonucleotide
  Target: LAMA2; (-) strand; PAM type: NRG; PAM sequence: AAG
tctgattcttttcatatgtg

SEQ ID NO: 66966 - DNA, 20 bp, Artificial Sequence
  Description of Artificial Sequence: Synthetic oligonucleotide
  Target: LAMA2; (-) strand; PAM type: NRG; PAM sequence: GAG
ttcctttttatttaagacct

SEQ ID NO: 66967 - DNA, 20 bp, Artificial Sequence
  Description of Artificial Sequence: Synthetic oligonucleotide
  Target: LAMA2; (-) strand; PAM type: NRG; PAM sequence: AAG
ttaattcttcctttttattt

SEQ ID NO: 66968 - DNA, 20 bp, Artificial Sequence
  Description of Artificial Sequence: Synthetic oligonucleotide
  Target: LAMA2; (-) strand; PAM type: NRG; PAM sequence: AAG
aaacctcatttcatattaat

SEQ ID NO: 66969 - DNA, 20 bp, Artificial Sequence
  Description of Artificial Sequence: Synthetic oligonucleotide
  Target: LAMA2; (-) strand; PAM type: NRG; PAM sequence: AAG
ttgtacttacatatttattg

SEQ ID NO: 66970 - DNA, 20 bp, Artificial Sequence
  Description of Artificial Sequence: Synthetic oligonucleotide
  Target: LAMA2; (-) strand; PAM type: NRG; PAM sequence: AAG
tttttttttttttaaatctc

SEQ ID NO: 66971 - DNA, 20 bp, Artificial Sequence
  Description of Artificial Sequence: Synthetic oligonucleotide
  Target: LAMA2; (-) strand; PAM type: NRG; PAM sequence: TAG
ggctgggagctcaagagggg

SEQ ID NO: 66972 - DNA, 20 bp, Artificial Sequence
  Description of Artificial Sequence: Synthetic oligonucleotide
  Target: LAMA2; (-) strand; PAM type: NRG; PAM sequence: GGG
tgtggctgggagctcaagag

SEQ ID NO: 66973 - DNA, 20 bp, Artificial Sequence
  Description of Artificial Sequence: Synthetic oligonucleotide
  Target: LAMA2; (-) strand; PAM type: NRG; PAM sequence: GGG
atgtggctgggagctcaaga

SEQ ID NO: 66974 - DNA, 20 bp, Artificial Sequence
  Description of Artificial Sequence: Synthetic oligonucleotide
  Target: LAMA2; (-) strand; PAM type: NRG; PAM sequence: AGG
aatgtggctgggagctcaag

SEQ ID NO: 66975 - DNA, 20 bp, Artificial Sequence
  Description of Artificial Sequence: Synthetic oligonucleotide
  Target: LAMA2; (-) strand; PAM type: NRG; PAM sequence: GAG
gaatgtggctgggagctcaa

SEQ ID NO: 66976 - DNA, 20 bp, Artificial Sequence
  Description of Artificial Sequence: Synthetic oligonucleotide
  Target: LAMA2; (-) strand; PAM type: NRG; PAM sequence: AAG
aggaatgtggctgggagctc

SEQ ID NO: 66977 - DNA, 20 bp, Artificial Sequence
  Description of Artificial Sequence: Synthetic oligonucleotide
  Target: LAMA2; (-) strand; PAM type: NRG; PAM sequence: GAG
actaagaggaatgtggctgg

SEQ ID NO: 66978 - DNA, 20 bp, Artificial Sequence
  Description of Artificial Sequence: Synthetic oligonucleotide
  Target: LAMA2; (-) strand; PAM type: NRG; PAM sequence: GGG
caactaagaggaatgtggct

SEQ ID NO: 66979 - DNA, 20 bp, Artificial Sequence
  Description of Artificial Sequence: Synthetic oligonucleotide
  Target: LAMA2; (-) strand; PAM type: NRG; PAM sequence: TGG
acaactaagaggaatgtggc

SEQ ID NO: 66980 - DNA, 20 bp, Artificial Sequence
  Description of Artificial Sequence: Synthetic oligonucleotide
  Target: LAMA2; (-) strand; PAM type: NRG; PAM sequence: TGG
ttagacaactaagaggaatg

SEQ ID NO: 66981 - DNA, 20 bp, Artificial Sequence
  Description of Artificial Sequence: Synthetic oligonucleotide
  Target: LAMA2; (-) strand; PAM type: NRG; PAM sequence: AGG
gttattattagacaactaag

SEQ ID NO: 66982 - DNA, 20 bp, Artificial Sequence
  Description of Artificial Sequence: Synthetic oligonucleotide
  Target: LAMA2; (-) strand; PAM type: NRG; PAM sequence: GAG
tgttattattagacaactaa

SEQ ID NO: 66983 - DNA, 20 bp, Artificial Sequence
  Description of Artificial Sequence: Synthetic oligonucleotide
  Target: LAMA2; (-) strand; PAM type: NRG; PAM sequence: AAG
agtgttattattagacaact

SEQ ID NO: 66984 - DNA, 20 bp, Artificial Sequence
  Description of Artificial Sequence: Synthetic oligonucleotide
  Target: LAMA2; (-) strand; PAM type: NRG; PAM sequence: TAG
tagccaagaagtgttattat

SEQ ID NO: 66985 - DNA, 20 bp, Artificial Sequence
  Description of Artificial Sequence: Synthetic oligonucleotide
  Target: LAMA2; (-) strand; PAM type: NRG; PAM sequence: AAG
tatccagtgaaatagccaag

SEQ ID NO: 66986 - DNA, 20 bp, Artificial Sequence
  Description of Artificial Sequence: Synthetic oligonucleotide
  Target: LAMA2; (-) strand; PAM type: NRG; PAM sequence: AAG
aaatatccagtgaaatagcc

SEQ ID NO: 66987 - DNA, 20 bp, Artificial Sequence
  Description of Artificial Sequence: Synthetic oligonucleotide
  Target: LAMA2; (-) strand; PAM type: NRG; PAM sequence: TAG
tttagaaatatccagtgaaa

SEQ ID NO: 66988 - DNA, 20 bp, Artificial Sequence
  Description of Artificial Sequence: Synthetic oligonucleotide
  Target: LAMA2; (-) strand; PAM type: NRG; PAM sequence: CAG
ccctatcatttagaaatatc

SEQ ID NO: 66989 - DNA, 20 bp, Artificial Sequence
  Description of Artificial Sequence: Synthetic oligonucleotide
  Target: LAMA2; (-) strand; PAM type: NRG; PAM sequence: TAG
atgaataggaccctatcatt

SEQ ID NO: 66990 - DNA, 20 bp, Artificial Sequence
  Description of Artificial Sequence: Synthetic oligonucleotide
  Target: LAMA2; (-) strand; PAM type: NRG; PAM sequence: AGG
acaagttgagatatatgaat

SEQ ID NO: 66991 - DNA, 20 bp, Artificial Sequence
  Description of Artificial Sequence: Synthetic oligonucleotide
  Target: LAMA2; (-) strand; PAM type: NRG; PAM sequence: TAG
gacaagttgagatatatgaa

SEQ ID NO: 66992 - DNA, 20 bp, Artificial Sequence
  Description of Artificial Sequence: Synthetic oligonucleotide
  Target: LAMA2; (-) strand; PAM type: NRG; PAM sequence: GAG
atattaaaaattgacaagtt

SEQ ID NO: 66993 - DNA, 20 bp, Artificial Sequence
  Description of Artificial Sequence: Synthetic oligonucleotide
  Target: LAMA2; (-) strand; PAM type: NRG; PAM sequence: AAG
tgatgatattaaaaattgac

SEQ ID NO: 66994 - DNA, 20 bp, Artificial Sequence
  Description of Artificial Sequence: Synthetic oligonucleotide
  Target: LAMA2; (-) strand; PAM type: NRG; PAM sequence: AGG
taagtcatgatttctaaaaa

SEQ ID NO: 66995 - DNA, 20 bp, Artificial Sequence
  Description of Artificial Sequence: Synthetic oligonucleotide
  Target: LAMA2; (-) strand; PAM type: NRG; PAM sequence: AAG
ctaagtcatgatttctaaaa

SEQ ID NO: 66996 - DNA, 20 bp, Artificial Sequence
  Description of Artificial Sequence: Synthetic oligonucleotide
  Target: LAMA2; (-) strand; PAM type: NRG; PAM sequence: AAG
aagatggagtataagtagct

SEQ ID NO: 66997 - DNA, 20 bp, Artificial Sequence
  Description of Artificial Sequence: Synthetic oligonucleotide
  Target: LAMA2; (-) strand; PAM type: NRG; PAM sequence: TAG
cactgaagatggagtataag

SEQ ID NO: 66998 - DNA, 20 bp, Artificial Sequence
  Description of Artificial Sequence: Synthetic oligonucleotide
  Target: LAMA2; (-) strand; PAM type: NRG; PAM sequence: AAG
aagcactgaagatggagtat

SEQ ID NO: 66999 - DNA, 20 bp, Artificial Sequence
  Description of Artificial Sequence: Synthetic oligonucleotide
  Target: LAMA2; (-) strand; PAM type: NRG; PAM sequence: GAG
aaggataagcactgaagatg

SEQ ID NO: 67000 - DNA, 20 bp, Artificial Sequence
  Description of Artificial Sequence: Synthetic oligonucleotide
  Target: LAMA2; (-) strand; PAM type: NRG; PAM sequence: TGG
agaaggataagcactgaaga

SEQ ID NO: 67001 - DNA, 20 bp, Artificial Sequence
  Description of Artificial Sequence: Synthetic oligonucleotide
  Target: LAMA2; (-) strand; PAM type: NRG; PAM sequence: AAG
cattagaaggataagcactg

SEQ ID NO: 67002 - DNA, 20 bp, Artificial Sequence
  Description of Artificial Sequence: Synthetic oligonucleotide
  Target: LAMA2; (-) strand; PAM type: NRG; PAM sequence: AAG
tagtattacattagaaggat

SEQ ID NO: 67003 - DNA, 20 bp, Artificial Sequence
  Description of Artificial Sequence: Synthetic oligonucleotide
  Target: LAMA2; (-) strand; PAM type: NRG; PAM sequence: AGG
tatgatagtattacattaga

SEQ ID NO: 67004 - DNA, 20 bp, Artificial Sequence
  Description of Artificial Sequence: Synthetic oligonucleotide
  Target: LAMA2; (-) strand; PAM type: NRG; PAM sequence: AAG
ttatgatagtattacattag

SEQ ID NO: 67005 - DNA, 20 bp, Artificial Sequence
  Description of Artificial Sequence: Synthetic oligonucleotide
  Target: LAMA2; (-) strand; PAM type: NRG; PAM sequence: TAG
aaattatgatagtattacat

SEQ ID NO: 67006 - DNA, 20 bp, Artificial Sequence
  Description of Artificial Sequence: Synthetic oligonucleotide
  Target: LAMA2; (-) strand; PAM type: NRG; PAM sequence: TAG
gtatttaaataaaattatga

SEQ ID NO: 67007 - DNA, 20 bp, Artificial Sequence
  Description of Artificial Sequence: Synthetic oligonucleotide
  Target: LAMA2; (-) strand; PAM type: NRG; PAM sequence: TAG
tttacgtcataaaagacata

SEQ ID NO: 67008 - DNA, 20 bp, Artificial Sequence
  Description of Artificial Sequence: Synthetic oligonucleotide
  Target: LAMA2; (-) strand; PAM type: NRG; PAM sequence: AAG
agacaatatttacgtcataa

SEQ ID NO: 67009 - DNA, 20 bp, Artificial Sequence
  Description of Artificial Sequence: Synthetic oligonucleotide
  Target: LAMA2; (-) strand; PAM type: NRG; PAM sequence: TAG
aatagtagatgttttagtat

SEQ ID NO: 67010 - DNA, 20 bp, Artificial Sequence
  Description of Artificial Sequence: Synthetic oligonucleotide
  Target: LAMA2; (-) strand; PAM type: NRG; PAM sequence: TAG
acatggaatagtagatgttt

SEQ ID NO: 67011 - DNA, 20 bp, Artificial Sequence
  Description of Artificial Sequence: Synthetic oligonucleotide
  Target: LAMA2; (-) strand; PAM type: NRG; PAM sequence: TAG
aacacagaaacatggaatag

SEQ ID NO: 67012 - DNA, 20 bp, Artificial Sequence
  Description of Artificial Sequence: Synthetic oligonucleotide
  Target: LAMA2; (-) strand; PAM type: NRG; PAM sequence: TAG
taaaacacagaaacatggaa

SEQ ID NO: 67013 - DNA, 20 bp, Artificial Sequence
  Description of Artificial Sequence: Synthetic oligonucleotide
  Target: LAMA2; (-) strand; PAM type: NRG; PAM sequence: TGG
taagataaaacacagaaaca

SEQ ID NO: 67014 - DNA, 20 bp, Artificial Sequence
  Description of Artificial Sequence: Synthetic oligonucleotide
  Target: LAMA2; (-) strand; PAM type: NRG; PAM sequence: CAG
taacctcttaagataaaaca

SEQ ID NO: 67015 - DNA, 20 bp, Artificial Sequence
  Description of Artificial Sequence: Synthetic oligonucleotide
  Target: LAMA2; (-) strand; PAM type: NRG; PAM sequence: AAG
acaaataaaattaacctctt

SEQ ID NO: 67016 - DNA, 20 bp, Artificial Sequence
  Description of Artificial Sequence: Synthetic oligonucleotide
  Target: LAMA2; (-) strand; PAM type: NRG; PAM sequence: AGG
acaagaaaagctaaagaccc

SEQ ID NO: 67017 - DNA, 20 bp, Artificial Sequence
  Description of Artificial Sequence: Synthetic oligonucleotide
  Target: LAMA2; (-) strand; PAM type: NRG; PAM sequence: CAG
tacaagaaaagctaaagacc

SEQ ID NO: 67018 - DNA, 20 bp, Artificial Sequence
  Description of Artificial Sequence: Synthetic oligonucleotide
  Target: LAMA2; (-) strand; PAM type: NRG; PAM sequence: AAG
caagaatacaagaaaagcta

SEQ ID NO: 67019 - DNA, 20 bp, Artificial Sequence
  Description of Artificial Sequence: Synthetic oligonucleotide
  Target: LAMA2; (-) strand; PAM type: NRG; PAM sequence: AAG
ataggacaagaatacaagaa

SEQ ID NO: 67020 - DNA, 20 bp, Artificial Sequence
  Description of Artificial Sequence: Synthetic oligonucleotide
  Target: LAMA2; (-) strand; PAM type: NRG; PAM sequence: AAG
ggcaaataggacaagaatac

SEQ ID NO: 67021 - DNA, 20 bp, Artificial Sequence
  Description of Artificial Sequence: Synthetic oligonucleotide
  Target: LAMA2; (-) strand; PAM type: NRG; PAM sequence: AAG
ataataatggcaaataggac

SEQ ID NO: 67022 - DNA, 20 bp, Artificial Sequence
  Description of Artificial Sequence: Synthetic oligonucleotide
  Target: LAMA2; (-) strand; PAM type: NRG; PAM sequence: AGG
ataatataataatggcaaat

SEQ ID NO: 67023 - DNA, 20 bp, Artificial Sequence
  Description of Artificial Sequence: Synthetic oligonucleotide
  Target: LAMA2; (-) strand; PAM type: NRG; PAM sequence: TAG
aataatataataatggcaaa

SEQ ID NO: 67024 - DNA, 20 bp, Artificial Sequence
  Description of Artificial Sequence: Synthetic oligonucleotide
  Target: LAMA2; (-) strand; PAM type: NRG; PAM sequence: TGG
gtgggaaaataatataataa

SEQ ID NO: 67025 - DNA, 20 bp, Artificial Sequence
  Description of Artificial Sequence: Synthetic oligonucleotide
  Target: LAMA2; (-) strand; PAM type: NRG; PAM sequence: GGG
taatattttgaaatgttagt

SEQ ID NO: 67026 - DNA, 20 bp, Artificial Sequence
  Description of Artificial Sequence: Synthetic oligonucleotide
  Target: LAMA2; (-) strand; PAM type: NRG; PAM sequence: TGG
ctaatattttgaaatgttag

SEQ ID NO: 67027 - DNA, 20 bp, Artificial Sequence
  Description of Artificial Sequence: Synthetic oligonucleotide
  Target: LAMA2; (-) strand; PAM type: NRG; PAM sequence: TAG
taactaatattttgaaatgt

SEQ ID NO: 67028 - DNA, 20 bp, Artificial Sequence
  Description of Artificial Sequence: Synthetic oligonucleotide
  Target: LAMA2; (-) strand; PAM type: NRG; PAM sequence: TAG
taaagaaaagtcagactatt

SEQ ID NO: 67029 - DNA, 20 bp, Artificial Sequence
  Description of Artificial Sequence: Synthetic oligonucleotide
  Target: LAMA2; (-) strand; PAM type: NRG; PAM sequence: CAG
gaagaactctaaagaaaagt

SEQ ID NO: 67030 - DNA, 20 bp, Artificial Sequence
  Description of Artificial Sequence: Synthetic oligonucleotide
  Target: LAMA2; (-) strand; PAM type: NRG; PAM sequence: AAG
gagtgaagaactctaaagaa

SEQ ID NO: 67031 - DNA, 20 bp, Artificial Sequence
  Description of Artificial Sequence: Synthetic oligonucleotide
  Target: LAMA2; (-) strand; PAM type: NRG; PAM sequence: AAG
actttgagtgaagaactcta

SEQ ID NO: 67032 - DNA, 20 bp, Artificial Sequence
  Description of Artificial Sequence: Synthetic oligonucleotide
  Target: LAMA2; (-) strand; PAM type: NRG; PAM sequence: AAG
aacatagaggactttgagtg

SEQ ID NO: 67033 - DNA, 20 bp, Artificial Sequence
  Description of Artificial Sequence: Synthetic oligonucleotide
  Target: LAMA2; (-) strand; PAM type: NRG; PAM sequence: GAG
ggcagaacatagaggacttt

SEQ ID NO: 67034 - DNA, 20 bp, Artificial Sequence
  Description of Artificial Sequence: Synthetic oligonucleotide
  Target: LAMA2; (-) strand; PAM type: NRG; PAM sequence: AGG
ctaattcaggcagaacatag

SEQ ID NO: 67035 - DNA, 20 bp, Artificial Sequence
  Description of Artificial Sequence: Synthetic oligonucleotide
  Target: LAMA2; (-) strand; PAM type: NRG; PAM sequence: GAG
cctaattcaggcagaacata

SEQ ID NO: 67036 - DNA, 20 bp, Artificial Sequence
  Description of Artificial Sequence: Synthetic oligonucleotide
  Target: LAMA2; (-) strand; PAM type: NRG; PAM sequence: TAG
atcctaattcaggcagaaca

SEQ ID NO: 67037 - DNA, 20 bp, Artificial Sequence
  Description of Artificial Sequence: Synthetic oligonucleotide
  Target: LAMA2; (-) strand; PAM type: NRG; PAM sequence: CAG
ataatcaatcctaattcagg

SEQ ID NO: 67038 - DNA, 20 bp, Artificial Sequence
  Description of Artificial Sequence: Synthetic oligonucleotide
  Target: LAMA2; (-) strand; PAM type: NRG; PAM sequence: AGG
ggaataatcaatcctaattc

SEQ ID NO: 67039 - DNA, 20 bp, Artificial Sequence
  Description of Artificial Sequence: Synthetic oligonucleotide
  Target: LAMA2; (-) strand; PAM type: NRG; PAM sequence: CAG
gggaataatcaatcctaatt

SEQ ID NO: 67040 - DNA, 20 bp, Artificial Sequence
  Description of Artificial Sequence: Synthetic oligonucleotide
  Target: LAMA2; (-) strand; PAM type: NRG; PAM sequence: GGG
aaaacagtacagtgggcata

SEQ ID NO: 67041 - DNA, 20 bp, Artificial Sequence
  Description of Artificial Sequence: Synthetic oligonucleotide
  Target: LAMA2; (-) strand; PAM type: NRG; PAM sequence: AGG
aaaaacagtacagtgggcat

SEQ ID NO: 67042 - DNA, 20 bp, Artificial Sequence
  Description of Artificial Sequence: Synthetic oligonucleotide
  Target: LAMA2; (-) strand; PAM type: NRG; PAM sequence: TAG
gaaaaacagtacagtgggca

SEQ ID NO: 67043 - DNA, 20 bp, Artificial Sequence
  Description of Artificial Sequence: Synthetic oligonucleotide
  Target: LAMA2; (-) strand; PAM type: NRG; PAM sequence: GGG
atgtagaaaaacagtacagt

SEQ ID NO: 67044 - DNA, 20 bp, Artificial Sequence
  Description of Artificial Sequence: Synthetic oligonucleotide
  Target: LAMA2; (-) strand; PAM type: NRG; PAM sequence: TGG
aatgtagaaaaacagtacag

SEQ ID NO: 67045 - DNA, 20 bp, Artificial Sequence
  Description of Artificial Sequence: Synthetic oligonucleotide
  Target: LAMA2; (-) strand; PAM type: NRG; PAM sequence: CAG
tccaatgtagaaaaacagta

SEQ ID NO: 67046 - DNA, 20 bp, Artificial Sequence
  Description of Artificial Sequence: Synthetic oligonucleotide
  Target: LAMA2; (-) strand; PAM type: NRG; PAM sequence: CAG
gtagatccaatgtagaaaaa

SEQ ID NO: 67047 - DNA, 20 bp, Artificial Sequence
  Description of Artificial Sequence: Synthetic oligonucleotide
  Target: LAMA2; (-) strand; PAM type: NRG; PAM sequence: TAG
ctgacaaggtagatccaatg

SEQ ID NO: 67048 - DNA, 20 bp, Artificial Sequence
  Description of Artificial Sequence: Synthetic oligonucleotide
  Target: LAMA2; (-) strand; PAM type: NRG; PAM sequence: TAG
ggtgtggatccctgacaagg

SEQ ID NO: 67049 - DNA, 20 bp, Artificial Sequence
  Description of Artificial Sequence: Synthetic oligonucleotide
  Target: LAMA2; (-) strand; PAM type: NRG; PAM sequence: AGG
gaaggtgtggatccctgaca

SEQ ID NO: 67050 - DNA, 20 bp, Artificial Sequence
  Description of Artificial Sequence: Synthetic oligonucleotide
  Target: LAMA2; (-) strand; PAM type: NRG; PAM sequence: AAG
ggaaggtgtggatccctgac

SEQ ID NO: 67051 - DNA, 20 bp, Artificial Sequence
  Description of Artificial Sequence: Synthetic oligonucleotide
  Target: LAMA2; (-) strand; PAM type: NRG; PAM sequence: TGG
aaccaagaaagaggaaggtg

SEQ ID NO: 67052 - DNA, 20 bp, Artificial Sequence
  Description of Artificial Sequence: Synthetic oligonucleotide
  Target: LAMA2; (-) strand; PAM type: NRG; PAM sequence: AGG
aagtaaaccaagaaagagga

SEQ ID NO: 67053 - DNA, 20 bp, Artificial Sequence
  Description of Artificial Sequence: Synthetic oligonucleotide
  Target: LAMA2; (-) strand; PAM type: NRG; PAM sequence: AAG
aaagtaaaccaagaaagagg

SEQ ID NO: 67054 - DNA, 20 bp, Artificial Sequence
  Description of Artificial Sequence: Synthetic oligonucleotide
  Target: LAMA2; (-) strand; PAM type: NRG; PAM sequence: AGG
gagaaagtaaaccaagaaag

SEQ ID NO: 67055 - DNA, 20 bp, Artificial Sequence
  Description of Artificial Sequence: Synthetic oligonucleotide
  Target: LAMA2; (-) strand; PAM type: NRG; PAM sequence: GAG
tgagaaagtaaaccaagaaa

SEQ ID NO: 67056 - DNA, 20 bp, Artificial Sequence
  Description of Artificial Sequence: Synthetic oligonucleotide
  Target: LAMA2; (-) strand; PAM type: NRG; PAM sequence: AAG
aatgagaaagtaaaccaaga

SEQ ID NO: 67057 - DNA, 20 bp, Artificial Sequence
  Description of Artificial Sequence: Synthetic oligonucleotide
  Target: LAMA2; (-) strand; PAM type: NRG; PAM sequence: AAG
gcaaaatgagaaagtaaacc

SEQ ID NO: 67058 - DNA, 20 bp, Artificial Sequence
  Description of Artificial Sequence: Synthetic oligonucleotide
  Target: LAMA2; (-) strand; PAM type: NRG; PAM sequence: AAG
tgtgctccagcaaaatgaga

SEQ ID NO: 67059 - DNA, 20 bp, Artificial Sequence
  Description of Artificial Sequence: Synthetic oligonucleotide
  Target: LAMA2; (-) strand; PAM type: NRG; PAM sequence: GAG
aggatgtgctccagcaaaat

SEQ ID NO: 67060 - DNA, 20 bp, Artificial Sequence
  Description of Artificial Sequence: Synthetic oligonucleotide
  Target: LAMA2; (-) strand; PAM type: NRG; PAM sequence: CAG
agccatttgaggatgtgctc

SEQ ID NO: 67061 - DNA, 20 bp, Artificial Sequence
  Description of Artificial Sequence: Synthetic oligonucleotide
  Target: LAMA2; (-) strand; PAM type: NRG; PAM sequence: AGG
atttcttaagaagccatttg

SEQ ID NO: 67062 - DNA, 20 bp, Artificial Sequence
  Description of Artificial Sequence: Synthetic oligonucleotide
  Target: LAMA2; (-) strand; PAM type: NRG; PAM sequence: GAG
tatttcttaagaagccattt

SEQ ID NO: 67063 - DNA, 20 bp, Artificial Sequence
  Description of Artificial Sequence: Synthetic oligonucleotide
  Target: LAMA2; (-) strand; PAM type: NRG; PAM sequence: AAG
cccatgtaatatttcttaag

SEQ ID NO: 67064 - DNA, 20 bp, Artificial Sequence
  Description of Artificial Sequence: Synthetic oligonucleotide
  Target: LAMA2; (-) strand; PAM type: NRG; PAM sequence: AAG
ctgcccatgtaatatttctt

SEQ ID NO: 67065 - DNA, 20 bp, Artificial Sequence
  Description of Artificial Sequence: Synthetic oligonucleotide
  Target: LAMA2; (-) strand; PAM type: NRG; PAM sequence: CAG
tgagttaaactggaaggact

SEQ ID NO: 67066 - DNA, 20 bp, Artificial Sequence
  Description of Artificial Sequence: Synthetic oligonucleotide
  Target: LAMA2; (-) strand; PAM type: NRG; PAM sequence: AGG
ttgcaatgagttaaactgga

SEQ ID NO: 67067 - DNA, 20 bp, Artificial Sequence
  Description of Artificial Sequence: Synthetic oligonucleotide
  Target: LAMA2; (-) strand; PAM type: NRG; PAM sequence: AAG
attgcaatgagttaaactgg

SEQ ID NO: 67068 - DNA, 20 bp, Artificial Sequence
  Description of Artificial Sequence: Synthetic oligonucleotide
  Target: LAMA2; (-) strand; PAM type: NRG; PAM sequence: TGG
tatattgcaatgagttaaac

SEQ ID NO: 67069 - DNA, 20 bp, Artificial Sequence
  Description of Artificial Sequence: Synthetic oligonucleotide
  Target: LAMA2; (-) strand; PAM type: NRG; PAM sequence: GAG
gccattttgtatattgcaat

SEQ ID NO: 67070 - DNA, 20 bp, Artificial Sequence
  Description of Artificial Sequence: Synthetic oligonucleotide
  Target: LAMA2; (-) strand; PAM type: NRG; PAM sequence: GGG
aataagtatataaattgaat

SEQ ID NO: 67071 - DNA, 20 bp, Artificial Sequence
  Description of Artificial Sequence: Synthetic oligonucleotide
  Target: LAMA2; (-) strand; PAM type: NRG; PAM sequence: TGG
gaataagtatataaattgaa

SEQ ID NO: 67072 - DNA, 20 bp, Artificial Sequence
  Description of Artificial Sequence: Synthetic oligonucleotide
  Target: LAMA2; (-) strand; PAM type: NRG; PAM sequence: AAG
ttaccaaaacttgaaggaat

SEQ ID NO: 67073 - DNA, 20 bp, Artificial Sequence
  Description of Artificial Sequence: Synthetic oligonucleotide
  Target: LAMA2; (-) strand; PAM type: NRG; PAM sequence: AGG
gataaattaccaaaacttga

SEQ ID NO: 67074 - DNA, 20 bp, Artificial Sequence
  Description of Artificial Sequence: Synthetic oligonucleotide
  Target: LAMA2; (-) strand; PAM type: NRG; PAM sequence: AAG
agataaattaccaaaacttg

SEQ ID NO: 67075 - DNA, 20 bp, Artificial Sequence
  Description of Artificial Sequence: Synthetic oligonucleotide
  Target: LAMA2; (-) strand; PAM type: NRG; PAM sequence: CAG
tatattatttaataataatg

SEQ ID NO: 67076 - DNA, 20 bp, Artificial Sequence
  Description of Artificial Sequence: Synthetic oligonucleotide
  Target: LAMA2; (-) strand; PAM type: NRG; PAM sequence: AAG
tatgttttaatttatatttt

SEQ ID NO: 67077 - DNA, 20 bp, Artificial Sequence
  Description of Artificial Sequence: Synthetic oligonucleotide
  Target: LAMA2; (-) strand; PAM type: NRG; PAM sequence: AGG
agtagactggagaaattaga

SEQ ID NO: 67078 - DNA, 20 bp, Artificial Sequence
  Description of Artificial Sequence: Synthetic oligonucleotide
  Target: LAMA2; (-) strand; PAM type: NRG; PAM sequence: AAG
aagtagactggagaaattag

SEQ ID NO: 67079 - DNA, 20 bp, Artificial Sequence
  Description of Artificial Sequence: Synthetic oligonucleotide
  Target: LAMA2; (-) strand; PAM type: NRG; PAM sequence: TAG
aaaaagtagactggagaaat

SEQ ID NO: 67080 - DNA, 20 bp, Artificial Sequence
  Description of Artificial Sequence: Synthetic oligonucleotide
  Target: LAMA2; (-) strand; PAM type: NRG; PAM sequence: GAG
agtttcaaaaaagtagactg

SEQ ID NO: 67081 - DNA, 20 bp, Artificial Sequence
  Description of Artificial Sequence: Synthetic oligonucleotide
  Target: LAMA2; (-) strand; PAM type: NRG; PAM sequence: TGG
ggagtttcaaaaaagtagac

SEQ ID NO: 67082 - DNA, 20 bp, Artificial Sequence
  Description of Artificial Sequence: Synthetic oligonucleotide
  Target: LAMA2; (-) strand; PAM type: NRG; PAM sequence: TAG
tcatgggagtttcaaaaaag

SEQ ID NO: 67083 - DNA, 20 bp, Artificial Sequence
  Description of Artificial Sequence: Synthetic oligonucleotide
  Target: LAMA2; (-) strand; PAM type: NRG; PAM sequence: AAG
gactcatgggagtttcaaaa

SEQ ID NO: 67084 - DNA, 20 bp, Artificial Sequence
  Description of Artificial Sequence: Synthetic oligonucleotide
  Target: LAMA2; (-) strand; PAM type: NRG; PAM sequence: GAG
ggtaaaaatttgactcatgg

SEQ ID NO: 67085 - DNA, 20 bp, Artificial Sequence
  Description of Artificial Sequence: Synthetic oligonucleotide
  Target: LAMA2; (-) strand; PAM type: NRG; PAM sequence: GGG
aaggtaaaaatttgactcat

SEQ ID NO: 67086 - DNA, 20 bp, Artificial Sequence
  Description of Artificial Sequence: Synthetic oligonucleotide
  Target: LAMA2; (-) strand; PAM type: NRG; PAM sequence: TGG
caaggtaaaaatttgactca

SEQ ID NO: 67087 - DNA, 20 bp, Artificial Sequence
  Description of Artificial Sequence: Synthetic oligonucleotide
  Target: LAMA2; (-) strand; PAM type: NRG; PAM sequence: AGG
tatcaatcaccaatacaaca

SEQ ID NO: 67088 - DNA, 20 bp, Artificial Sequence
  Description of Artificial Sequence: Synthetic oligonucleotide
  Target: LAMA2; (-) strand; PAM type: NRG; PAM sequence: AAG
atatcaatcaccaatacaac

SEQ ID NO: 67089 - DNA, 20 bp, Artificial Sequence
  Description of Artificial Sequence: Synthetic oligonucleotide
  Target: LAMA2; (-) strand; PAM type: NRG; PAM sequence: GAG
aaaaaatactgaaaatatga

SEQ ID NO: 67090 - DNA, 20 bp, Artificial Sequence
  Description of Artificial Sequence: Synthetic oligonucleotide
  Target: LAMA2; (-) strand; PAM type: NRG; PAM sequence: GAG
caaaaaaatactgaaaatat

SEQ ID NO: 67091 - DNA, 20 bp, Artificial Sequence
  Description of Artificial Sequence: Synthetic oligonucleotide
  Target: LAMA2; (-) strand; PAM type: NRG; PAM sequence: GAG
tgaaggcatcacccacaaaa

SEQ ID NO: 67092 - DNA, 20 bp, Artificial Sequence
  Description of Artificial Sequence: Synthetic oligonucleotide
  Target: LAMA2; (-) strand; PAM type: NRG; PAM sequence: AAG
gttgaaggcatcacccacaa

SEQ ID NO: 67093 - DNA, 20 bp, Artificial Sequence
  Description of Artificial Sequence: Synthetic oligonucleotide
  Target: LAMA2; (-) strand; PAM type: NRG; PAM sequence: AGG
ctcttggacaaaaaagttga

SEQ ID NO: 67094 - DNA, 20 bp, Artificial Sequence
  Description of Artificial Sequence: Synthetic oligonucleotide
  Target: LAMA2; (-) strand; PAM type: NRG; PAM sequence: AAG
actcttggacaaaaaagttg

SEQ ID NO: 67095 - DNA, 20 bp, Artificial Sequence
  Description of Artificial Sequence: Synthetic oligonucleotide
  Target: LAMA2; (-) strand; PAM type: NRG; PAM sequence: AAG
aatatgactcttggacaaaa

SEQ ID NO: 67096 - DNA, 20 bp, Artificial Sequence
  Description of Artificial Sequence: Synthetic oligonucleotide
  Target: LAMA2; (-) strand; PAM type: NRG; PAM sequence: TGG
taaagttttaatatgactct

SEQ ID NO: 67097 - DNA, 20 bp, Artificial Sequence
  Description of Artificial Sequence: Synthetic oligonucleotide
  Target: LAMA2; (-) strand; PAM type: NRG; PAM sequence: AAG
aatacaaatcttttaaaata

SEQ ID NO: 67098 - DNA, 20 bp, Artificial Sequence
  Description of Artificial Sequence: Synthetic oligonucleotide
  Target: LAMA2; (-) strand; PAM type: NRG; PAM sequence: GGG
aaatagaataatattaaaaa

SEQ ID NO: 67099 - DNA, 20 bp, Artificial Sequence
  Description of Artificial Sequence: Synthetic oligonucleotide
  Target: LAMA2; (-) strand; PAM type: NRG; PAM sequence: AGG
aaaatagaataatattaaaa

SEQ ID NO: 67100 - DNA, 20 bp, Artificial Sequence
  Description of Artificial Sequence: Synthetic oligonucleotide
  Target: LAMA2; (-) strand; PAM type: NRG; PAM sequence: AAG
aaaaatagaataatattaaa

SEQ ID NO: 67101 - DNA, 20 bp, Artificial Sequence
  Description of Artificial Sequence: Synthetic oligonucleotide
  Target: LAMA2; (-) strand; PAM type: NRG; PAM sequence: TAG
aagagattcaagaagaaaaa

SEQ ID NO: 67102 - DNA, 20 bp, Artificial Sequence
  Description of Artificial Sequence: Synthetic oligonucleotide
  Target: LAMA2; (-) strand; PAM type: NRG; PAM sequence: AAG
tatttttgaagagattcaag

SEQ ID NO: 67103 - DNA, 20 bp, Artificial Sequence
  Description of Artificial Sequence: Synthetic oligonucleotide
  Target: LAMA2; (-) strand; PAM type: NRG; PAM sequence: AAG
taatatttttgaagagattc

SEQ ID NO: 67104 - DNA, 20 bp, Artificial Sequence
  Description of Artificial Sequence: Synthetic oligonucleotide
  Target: LAMA2; (-) strand; PAM type: NRG; PAM sequence: GAG
tgctaattaatatttttgaa

SEQ ID NO: 67105 - DNA, 20 bp, Artificial Sequence
  Description of Artificial Sequence: Synthetic oligonucleotide
  Target: LAMA2; (-) strand; PAM type: NRG; PAM sequence: AAG
actgctaattaatatttttg

SEQ ID NO: 67106 - DNA, 20 bp, Artificial Sequence
  Description of Artificial Sequence: Synthetic oligonucleotide
  Target: LAMA2; (-) strand; PAM type: NRG; PAM sequence: AAG
aaaactgataatatttttaa

SEQ ID NO: 67107 - DNA, 20 bp, Artificial Sequence
  Description of Artificial Sequence: Synthetic oligonucleotide
  Target: LAMA2; (-) strand; PAM type: NRG; PAM sequence: AGG
aaacaggggaaaaaatctgg

SEQ ID NO: 67108 - DNA, 20 bp, Artificial Sequence
  Description of Artificial Sequence: Synthetic oligonucleotide
  Target: LAMA2; (-) strand; PAM type: NRG; PAM sequence: GAG
taaacaggggaaaaaatctg

SEQ ID NO: 67109 - DNA, 20 bp, Artificial Sequence
  Description of Artificial Sequence: Synthetic oligonucleotide
  Target: LAMA2; (-) strand; PAM type: NRG; PAM sequence: TGG
attaaacaggggaaaaaatc

SEQ ID NO: 67110 - DNA, 20 bp, Artificial Sequence
  Description of Artificial Sequence: Synthetic oligonucleotide
  Target: LAMA2; (-) strand; PAM type: NRG; PAM sequence: GGG
gaagaatcaacattaaacag

SEQ ID NO: 67111 - DNA, 20 bp, Artificial Sequence
  Description of Artificial Sequence: Synthetic oligonucleotide
  Target: LAMA2; (-) strand; PAM type: NRG; PAM sequence: GGG
agaagaatcaacattaaaca

SEQ ID NO: 67112 - DNA, 20 bp, Artificial Sequence
  Description of Artificial Sequence: Synthetic oligonucleotide
  Target: LAMA2; (-) strand; PAM type: NRG; PAM sequence: AGG
aagaagaatcaacattaaac

SEQ ID NO: 67113 - DNA, 20 bp, Artificial Sequence
  Description of Artificial Sequence: Synthetic oligonucleotide
  Target: LAMA2; (-) strand; PAM type: NRG; PAM sequence: CAG
aaagaagaatcaacattaaa

SEQ ID NO: 67114 - DNA, 20 bp, Artificial Sequence
  Description of Artificial Sequence: Synthetic oligonucleotide
  Target: LAMA2; (-) strand; PAM type: NRG; PAM sequence: AAG
aatagtccctcatggaaaag

SEQ ID NO: 67115 - DNA, 20 bp, Artificial Sequence
  Description of Artificial Sequence: Synthetic oligonucleotide
  Target: LAMA2; (-) strand; PAM type: NRG; PAM sequence: AAG
gtaaatagtccctcatggaa

SEQ ID NO: 67116 - DNA, 20 bp, Artificial Sequence
  Description of Artificial Sequence: Synthetic oligonucleotide
  Target: LAMA2; (-) strand; PAM type: NRG; PAM sequence: TGG
gttgcgtaaatagtccctca

SEQ ID NO: 67117 - DNA, 20 bp, Artificial Sequence
  Description of Artificial Sequence: Synthetic oligonucleotide
  Target: LAMA2; (-) strand; PAM type: NRG; PAM sequence: TAG
tatgtagattgttgcgtaaa

SEQ ID NO: 67118 - DNA, 20 bp, Artificial Sequence
  Description of Artificial Sequence: Synthetic oligonucleotide
  Target: LAMA2; (-) strand; PAM type: NRG; PAM sequence: TAG
agtagggaataaagattatg

SEQ ID NO: 67119 - DNA, 20 bp, Artificial Sequence
  Description of Artificial Sequence: Synthetic oligonucleotide
  Target: LAMA2; (-) strand; PAM type: NRG; PAM sequence: AAG
ttaaatgttagtagggaata

SEQ ID NO: 67120 - DNA, 20 bp, Artificial Sequence
  Description of Artificial Sequence: Synthetic oligonucleotide
  Target: LAMA2; (-) strand; PAM type: NRG; PAM sequence: GGG
atcacagttaaatgttagta

SEQ ID NO: 67121 - DNA, 20 bp, Artificial Sequence
  Description of Artificial Sequence: Synthetic oligonucleotide
  Target: LAMA2; (-) strand; PAM type: NRG; PAM sequence: AGG
tatcacagttaaatgttagt

SEQ ID NO: 67122 - DNA, 20 bp, Artificial Sequence
  Description of Artificial Sequence: Synthetic oligonucleotide
  Target: LAMA2; (-) strand; PAM type: NRG; PAM sequence: TAG
atatcacagttaaatgttag

SEQ ID NO: 67123 - DNA, 20 bp, Artificial Sequence
  Description of Artificial Sequence: Synthetic oligonucleotide
  Target: LAMA2; (-) strand; PAM type: NRG; PAM sequence: TAG
aggatatcacagttaaatgt

SEQ ID NO: 67124 - DNA, 20 bp, Artificial Sequence
  Description of Artificial Sequence: Synthetic oligonucleotide
  Target: LAMA2; (-) strand; PAM type: NRG; PAM sequence: CAG
caggccattttaggatatca

SEQ ID NO: 67125 - DNA, 20 bp, Artificial Sequence
  Description of Artificial Sequence: Synthetic oligonucleotide
  Target: LAMA2; (-) strand; PAM type: NRG; PAM sequence: AGG
ttcctcaatcaggccatttt

SEQ ID NO: 67126 - DNA, 20 bp, Artificial Sequence
  Description of Artificial Sequence: Synthetic oligonucleotide
  Target: LAMA2; (-) strand; PAM type: NRG; PAM sequence: TAG
gttcctcaatcaggccattt

SEQ ID NO: 67127 - DNA, 20 bp, Artificial Sequence
  Description of Artificial Sequence: Synthetic oligonucleotide
  Target: LAMA2; (-) strand; PAM type: NRG; PAM sequence: AGG
tctcaatcagttcctcaatc

SEQ ID NO: 67128 - DNA, 20 bp, Artificial Sequence
  Description of Artificial Sequence: Synthetic oligonucleotide
  Target: LAMA2; (-) strand; PAM type: NRG; PAM sequence: CAG
atctcaatcagttcctcaat

SEQ ID NO: 67129 - DNA, 20 bp, Artificial Sequence
  Description of Artificial Sequence: Synthetic oligonucleotide
  Target: LAMA2; (-) strand; PAM type: NRG; PAM sequence: CAG
gagctcttaatcatctcaat

SEQ ID NO: 67130 - DNA, 20 bp, Artificial Sequence
  Description of Artificial Sequence: Synthetic oligonucleotide
  Target: LAMA2; (-) strand; PAM type: NRG; PAM sequence: GAG
agccactgcgccctgctaca

SEQ ID NO: 67131 - DNA, 20 bp, Artificial Sequence
  Description of Artificial Sequence: Synthetic oligonucleotide
  Target: LAMA2; (-) strand; PAM type: NRG; PAM sequence: CAG
tgagccactgcgccctgcta

SEQ ID NO: 67132 - DNA, 20 bp, Artificial Sequence
  Description of Artificial Sequence: Synthetic oligonucleotide
  Target: LAMA2; (-) strand; PAM type: NRG; PAM sequence: GAG
agtgctaggattacaggcgt

SEQ ID NO: 67133 - DNA, 20 bp, Artificial Sequence
  Description of Artificial Sequence: Synthetic oligonucleotide
  Target: LAMA2; (-) strand; PAM type: NRG; PAM sequence: AGG
cacagaagtgctaggattac

SEQ ID NO: 67134 - DNA, 20 bp, Artificial Sequence
  Description of Artificial Sequence: Synthetic oligonucleotide
  Target: LAMA2; (-) strand; PAM type: NRG; PAM sequence: CAG
tcacagaagtgctaggatta

SEQ ID NO: 67135 - DNA, 20 bp, Artificial Sequence
  Description of Artificial Sequence: Synthetic oligonucleotide
  Target: LAMA2; (-) strand; PAM type: NRG; PAM sequence: AGG
ctcagcctcacagaagtgct

SEQ ID NO: 67136 - DNA, 20 bp, Artificial Sequence
  Description of Artificial Sequence: Synthetic oligonucleotide
  Target: LAMA2; (-) strand; PAM type: NRG; PAM sequence: TAG
cctcagcctcacagaagtgc

SEQ ID NO: 67137 - DNA, 20 bp, Artificial Sequence
  Description of Artificial Sequence: Synthetic oligonucleotide
  Target: LAMA2; (-) strand; PAM type: NRG; PAM sequence: AAG
tgcctgcctcagcctcacag

SEQ ID NO: 67138 - DNA, 20 bp, Artificial Sequence
  Description of Artificial Sequence: Synthetic oligonucleotide
  Target: LAMA2; (-) strand; PAM type: NRG; PAM sequence: CAG
atctgcctgcctcagcctca

SEQ ID NO: 67139 - DNA, 20 bp, Artificial Sequence
  Description of Artificial Sequence: Synthetic oligonucleotide
  Target: LAMA2; (-) strand; PAM type: NRG; PAM sequence: CAG
ctcaggtgatctgcctgcct

SEQ ID NO: 67140 - DNA, 20 bp, Artificial Sequence
  Description of Artificial Sequence: Synthetic oligonucleotide
  Target: LAMA2; (-) strand; PAM type: NRG; PAM sequence: AGG
ggtctcgaactcctgacctc

SEQ ID NO: 67141 - DNA, 20 bp, Artificial Sequence
  Description of Artificial Sequence: Synthetic oligonucleotide
  Target: LAMA2; (-) strand; PAM type: NRG; PAM sequence: CAG
tggtctcgaactcctgacct

SEQ ID NO: 67142 - DNA, 20 bp, Artificial Sequence
  Description of Artificial Sequence: Synthetic oligonucleotide
  Target: LAMA2; (-) strand; PAM type: NRG; PAM sequence: TGG
tttcgccatgttggccaggc

SEQ ID NO: 67143 - DNA, 20 bp, Artificial Sequence
  Description of Artificial Sequence: Synthetic oligonucleotide
  Target: LAMA2; (-) strand; PAM type: NRG; PAM sequence: AGG
agggtttcgccatgttggcc

SEQ ID NO: 67144 - DNA, 20 bp, Artificial Sequence
  Description of Artificial Sequence: Synthetic oligonucleotide
  Target: LAMA2; (-) strand; PAM type: NRG; PAM sequence: CAG
cagggtttcgccatgttggc

SEQ ID NO: 67145 - DNA, 20 bp, Artificial Sequence
  Description of Artificial Sequence: Synthetic oligonucleotide
  Target: LAMA2; (-) strand; PAM type: NRG; PAM sequence: TGG
agaccagggtttcgccatgt

SEQ ID NO: 67146 - DNA, 20 bp, Artificial Sequence
  Description of Artificial Sequence: Synthetic oligonucleotide
  Target: LAMA2; (-) strand; PAM type: NRG; PAM sequence: GGG
ggtacttttagtagagacca

SEQ ID NO: 67147 - DNA, 20 bp, Artificial Sequence
  Description of Artificial Sequence: Synthetic oligonucleotide
  Target: LAMA2; (-) strand; PAM type: NRG; PAM sequence: AGG
tggtacttttagtagagacc

SEQ ID NO: 67148 - DNA, 20 bp, Artificial Sequence
  Description of Artificial Sequence: Synthetic oligonucleotide
  Target: LAMA2; (-) strand; PAM type: NRG; PAM sequence: CAG
ttggtacttttagtagagac

SEQ ID NO: 67149 - DNA, 20 bp, Artificial Sequence
  Description of Artificial Sequence: Synthetic oligonucleotide
  Target: LAMA2; (-) strand; PAM type: NRG; PAM sequence: GAG
tgattttggtacttttagta

SEQ ID NO: 67150 - DNA, 20 bp, Artificial Sequence
  Description of Artificial Sequence: Synthetic oligonucleotide
  Target: LAMA2; (-) strand; PAM type: NRG; PAM sequence: TAG
gctgattttggtacttttag

SEQ ID NO: 67151 - DNA, 20 bp, Artificial Sequence
  Description of Artificial Sequence: Synthetic oligonucleotide
  Target: LAMA2; (-) strand; PAM type: NRG; PAM sequence: TAG
ctggctgattttggtacttt

SEQ ID NO: 67152 - DNA, 20 bp, Artificial Sequence
  Description of Artificial Sequence: Synthetic oligonucleotide
  Target: LAMA2; (-) strand; PAM type: NRG; PAM sequence: TGG
ccaccacacctggctgattt

SEQ ID NO: 67153 - DNA, 20 bp, Artificial Sequence
  Description of Artificial Sequence: Synthetic oligonucleotide
  Target: LAMA2; (-) strand; PAM type: NRG; PAM sequence: TGG
caggtgcctgccaccacacc

SEQ ID NO: 67154 - DNA, 20 bp, Artificial Sequence
  Description of Artificial Sequence: Synthetic oligonucleotide
  Target: LAMA2; (-) strand; PAM type: NRG; PAM sequence: AGG
tcctgagtagctgggattac

SEQ ID NO: 67155 - DNA, 20 bp, Artificial Sequence
  Description of Artificial Sequence: Synthetic oligonucleotide
  Target: LAMA2; (-) strand; PAM type: NRG; PAM sequence: CAG
ctcctgagtagctgggatta

SEQ ID NO: 67156 - DNA, 20 bp, Artificial Sequence
  Description of Artificial Sequence: Synthetic oligonucleotide
  Target: LAMA2; (-) strand; PAM type: NRG; PAM sequence: GGG
cctcagcctcctgagtagct

SEQ ID NO: 67157 - DNA, 20 bp, Artificial Sequence
  Description of Artificial Sequence: Synthetic oligonucleotide
  Target: LAMA2; (-) strand; PAM type: NRG; PAM sequence: TGG
gcctcagcctcctgagtagc

SEQ ID NO: 67158 - DNA, 20 bp, Artificial Sequence
  Description of Artificial Sequence: Synthetic oligonucleotide
  Target: LAMA2; (-) strand; PAM type: NRG; PAM sequence: TAG
tcctgcctcagcctcctgag

SEQ ID NO: 67159 - DNA, 20 bp, Artificial Sequence
  Description of Artificial Sequence: Synthetic oligonucleotide
  Target: LAMA2; (-) strand; PAM type: NRG; PAM sequence: GAG
ttctcctgcctcagcctcct

SEQ ID NO: 67160 - DNA, 20 bp, Artificial Sequence
  Description of Artificial Sequence: Synthetic oligonucleotide
  Target: LAMA2; (-) strand; PAM type: NRG; PAM sequence: CAG
ttttagcaattctcctgcct

SEQ ID NO: 67161 - DNA, 20 bp, Artificial Sequence
  Description of Artificial Sequence: Synthetic oligonucleotide
  Target: LAMA2; (-) strand; PAM type: NRG; PAM sequence: TAG
actcttgcctcccaagtttt

SEQ ID NO: 67162 - DNA, 20 bp, Artificial Sequence
  Description of Artificial Sequence: Synthetic oligonucleotide
  Target: LAMA2; (-) strand; PAM type: NRG; PAM sequence: AAG
cactgcaactcttgcctccc

SEQ ID NO: 67163 - DNA, 20 bp, Artificial Sequence
  Description of Artificial Sequence: Synthetic oligonucleotide
  Target: LAMA2; (-) strand; PAM type: NRG; PAM sequence: CAG
ggagtgcagtggtgcgatct

SEQ ID NO: 67164 - DNA, 20 bp, Artificial Sequence
  Description of Artificial Sequence: Synthetic oligonucleotide
  Target: LAMA2; (-) strand; PAM type: NRG; PAM sequence: TGG
tcgcccaggctggagtgcag

SEQ ID NO: 67165 - DNA, 20 bp, Artificial Sequence
  Description of Artificial Sequence: Synthetic oligonucleotide
  Target: LAMA2; (-) strand; PAM type: NRG; PAM sequence: CAG
ttgtcgcccaggctggagtg

SEQ ID NO: 67166 - DNA, 20 bp, Artificial Sequence
  Description of Artificial Sequence: Synthetic oligonucleotide
  Target: LAMA2; (-) strand; PAM type: NRG; PAM sequence: GAG
tgctcttgtcgcccaggctg

SEQ ID NO: 67167 - DNA, 20 bp, Artificial Sequence
  Description of Artificial Sequence: Synthetic oligonucleotide
  Target: LAMA2; (-) strand; PAM type: NRG; PAM sequence: TGG
cttgctcttgtcgcccaggc

SEQ ID NO: 67168 - DNA, 20 bp, Artificial Sequence
  Description of Artificial Sequence: Synthetic oligonucleotide
  Target: LAMA2; (-) strand; PAM type: NRG; PAM sequence: AGG
gagtcttgctcttgtcgccc

SEQ ID NO: 67169 - DNA, 20 bp, Artificial Sequence
  Description of Artificial Sequence: Synthetic oligonucleotide
  Target: LAMA2; (-) strand; PAM type: NRG; PAM sequence: CAG
ggagtcttgctcttgtcgcc

SEQ ID NO: 67170 - DNA, 20 bp, Artificial Sequence
  Description of Artificial Sequence: Synthetic oligonucleotide
  Target: LAMA2; (-) strand; PAM type: NRG; PAM sequence: GAG
ttttttttctttttgagatg

SEQ ID NO: 67171 - DNA, 20 bp, Artificial Sequence
  Description of Artificial Sequence: Synthetic oligonucleotide
  Target: LAMA2; (-) strand; PAM type: NRG; PAM sequence: TGG
ctttttttttctttttgaga

SEQ ID NO: 67172 - DNA, 20 bp, Artificial Sequence
  Description of Artificial Sequence: Synthetic oligonucleotide
  Target: LAMA2; (-) strand; PAM type: NRG; PAM sequence: GAG
ttttctttttttttcttttt

SEQ ID NO: 67173 - DNA, 20 bp, Artificial Sequence
  Description of Artificial Sequence: Synthetic oligonucleotide
  Target: LAMA2; (-) strand; PAM type: NRG; PAM sequence: CAG
ctttcgtcctgccctataca

SEQ ID NO: 67174 - DNA, 20 bp, Artificial Sequence
  Description of Artificial Sequence: Synthetic oligonucleotide
  Target: LAMA2; (-) strand; PAM type: NRG; PAM sequence: TAG
atgctgcctggcaaaacagc

SEQ ID NO: 67175 - DNA, 20 bp, Artificial Sequence
  Description of Artificial Sequence: Synthetic oligonucleotide
  Target: LAMA2; (-) strand; PAM type: NRG; PAM sequence: CAG
tttaatgctgcctggcaaaa

SEQ ID NO: 67176 - DNA, 20 bp, Artificial Sequence
  Description of Artificial Sequence: Synthetic oligonucleotide
  Target: LAMA2; (-) strand; PAM type: NRG; PAM sequence: TGG
ttcttacatttaatgctgcc

SEQ ID NO: 67177 - DNA, 20 bp, Artificial Sequence
  Description of Artificial Sequence: Synthetic oligonucleotide
  Target: LAMA2; (-) strand; PAM type: NRG; PAM sequence: AGG
gagaaatgacaggatcccag

SEQ ID NO: 67178 - DNA, 20 bp, Artificial Sequence
  Description of Artificial Sequence: Synthetic oligonucleotide
  Target: LAMA2; (-) strand; PAM type: NRG; PAM sequence: GAG
ggagaaatgacaggatccca

SEQ ID NO: 67179 - DNA, 20 bp, Artificial Sequence
  Description of Artificial Sequence: Synthetic oligonucleotide
  Target: LAMA2; (-) strand; PAM type: NRG; PAM sequence: CAG
ctggagaaatgacaggatcc

SEQ ID NO: 67180 - DNA, 20 bp, Artificial Sequence
  Description of Artificial Sequence: Synthetic oligonucleotide
  Target: LAMA2; (-) strand; PAM type: NRG; PAM sequence: AGG
taccattctggagaaatgac

SEQ ID NO: 67181 - DNA, 20 bp, Artificial Sequence
  Description of Artificial Sequence: Synthetic oligonucleotide
  Target: LAMA2; (-) strand; PAM type: NRG; PAM sequence: CAG
ttaccattctggagaaatga

SEQ ID NO: 67182 - DNA, 20 bp, Artificial Sequence
  Description of Artificial Sequence: Synthetic oligonucleotide
  Target: LAMA2; (-) strand; PAM type: NRG; PAM sequence: GAG
gtatggagattaccattctg

SEQ ID NO: 67183 - DNA, 20 bp, Artificial Sequence
  Description of Artificial Sequence: Synthetic oligonucleotide
  Target: LAMA2; (-) strand; PAM type: NRG; PAM sequence: TGG
aagtatggagattaccattc

SEQ ID NO: 67184 - DNA, 20 bp, Artificial Sequence
  Description of Artificial Sequence: Synthetic oligonucleotide
  Target: LAMA2; (-) strand; PAM type: NRG; PAM sequence: GAG
ctcctccaggaataagtatg

SEQ ID NO: 67185 - DNA, 20 bp, Artificial Sequence
  Description of Artificial Sequence: Synthetic oligonucleotide
  Target: LAMA2; (-) strand; PAM type: NRG; PAM sequence: TGG
ctctcctccaggaataagta

SEQ ID NO: 67186 - DNA, 20 bp, Artificial Sequence
  Description of Artificial Sequence: Synthetic oligonucleotide
  Target: LAMA2; (-) strand; PAM type: NRG; PAM sequence: AAG
accacctctcctccaggaat

SEQ ID NO: 67187 - DNA, 20 bp, Artificial Sequence
  Description of Artificial Sequence: Synthetic oligonucleotide
  Target: LAMA2; (-) strand; PAM type: NRG; PAM sequence: AGG
cttgtaaccacctctcctcc

SEQ ID NO: 67188 - DNA, 20 bp, Artificial Sequence
  Description of Artificial Sequence: Synthetic oligonucleotide
  Target: LAMA2; (-) strand; PAM type: NRG; PAM sequence: CAG
acttgtaaccacctctcctc

SEQ ID NO: 67189 - DNA, 20 bp, Artificial Sequence
  Description of Artificial Sequence: Synthetic oligonucleotide
  Target: LAMA2; (-) strand; PAM type: NRG; PAM sequence: CAG
gccaagaatagttgtggccc

SEQ ID NO: 67190 - DNA, 20 bp, Artificial Sequence
  Description of Artificial Sequence: Synthetic oligonucleotide
  Target: LAMA2; (-) strand; PAM type: NRG; PAM sequence: TGG
caaaaggccaagaatagttg

SEQ ID NO: 67191 - DNA, 20 bp, Artificial Sequence
  Description of Artificial Sequence: Synthetic oligonucleotide
  Target: LAMA2; (-) strand; PAM type: NRG; PAM sequence: TAG
ggtagacaaaaggccaagaa

SEQ ID NO: 67192 - DNA, 20 bp, Artificial Sequence
  Description of Artificial Sequence: Synthetic oligonucleotide
  Target: LAMA2; (-) strand; PAM type: NRG; PAM sequence: AAG
tcaggggtagacaaaaggcc

SEQ ID NO: 67193 - DNA, 20 bp, Artificial Sequence
  Description of Artificial Sequence: Synthetic oligonucleotide
  Target: LAMA2; (-) strand; PAM type: NRG; PAM sequence: AGG
aaacttcaggggtagacaaa

SEQ ID NO: 67194 - DNA, 20 bp, Artificial Sequence
  Description of Artificial Sequence: Synthetic oligonucleotide
  Target: LAMA2; (-) strand; PAM type: NRG; PAM sequence: AAG
gaaacttcaggggtagacaa

SEQ ID NO: 67195 - DNA, 20 bp, Artificial Sequence
  Description of Artificial Sequence: Synthetic oligonucleotide
  Target: LAMA2; (-) strand; PAM type: NRG; PAM sequence: TAG
agtgatggaaacttcagggg

SEQ ID NO: 67196 - DNA, 20 bp, Artificial Sequence
  Description of Artificial Sequence: Synthetic oligonucleotide
  Target: LAMA2; (-) strand; PAM type: NRG; PAM sequence: GGG
tccagtgatggaaacttcag

SEQ ID NO: 67197 - DNA, 20 bp, Artificial Sequence
  Description of Artificial Sequence: Synthetic oligonucleotide
  Target: LAMA2; (-) strand; PAM type: NRG; PAM sequence: GGG
ttccagtgatggaaacttca

SEQ ID NO: 67198 - DNA, 20 bp, Artificial Sequence
  Description of Artificial Sequence: Synthetic oligonucleotide
  Target: LAMA2; (-) strand; PAM type: NRG; PAM sequence: AGG
attccagtgatggaaacttc

SEQ ID NO: 67199 - DNA, 20 bp, Artificial Sequence
  Description of Artificial Sequence: Synthetic oligonucleotide
  Target: LAMA2; (-) strand; PAM type: NRG; PAM sequence: CAG
tattccagtgatggaaactt

SEQ ID NO: 67200 - DNA, 20 bp, Artificial Sequence
  Description of Artificial Sequence: Synthetic oligonucleotide
  Target: LAMA2; (-) strand; PAM type: NRG; PAM sequence: TGG
tgtccagtttattccagtga

SEQ ID NO: 67201 - DNA, 20 bp, Artificial Sequence
  Description of Artificial Sequence: Synthetic oligonucleotide
  Target: LAMA2; (-) strand; PAM type: NRG; PAM sequence: CAG
tctaactgtccagtttattc

SEQ ID NO: 67202 - DNA, 20 bp, Artificial Sequence
  Description of Artificial Sequence: Synthetic oligonucleotide
  Target: LAMA2; (-) strand; PAM type: NRG; PAM sequence: CAG
tgttaatctgtctaactgtc

SEQ ID NO: 67203 - DNA, 20 bp, Artificial Sequence
  Description of Artificial Sequence: Synthetic oligonucleotide
  Target: LAMA2; (-) strand; PAM type: NRG; PAM sequence: AGG
ctcatactttgttgccttcc

SEQ ID NO: 67204 - DNA, 20 bp, Artificial Sequence
  Description of Artificial Sequence: Synthetic oligonucleotide
  Target: LAMA2; (-) strand; PAM type: NRG; PAM sequence: CAG
tctcatactttgttgccttc

SEQ ID NO: 67205 - DNA, 20 bp, Artificial Sequence
  Description of Artificial Sequence: Synthetic oligonucleotide
  Target: LAMA2; (-) strand; PAM type: NRG; PAM sequence: AAG
caaccatctggcccctcttt

SEQ ID NO: 67206 - DNA, 20 bp, Artificial Sequence
  Description of Artificial Sequence: Synthetic oligonucleotide
  Target: LAMA2; (-) strand; PAM type: NRG; PAM sequence: TGG
ctatctaaatttcaaccatc

SEQ ID NO: 67207 - DNA, 20 bp, Artificial Sequence
  Description of Artificial Sequence: Synthetic oligonucleotide
  Target: LAMA2; (-) strand; PAM type: NRG; PAM sequence: CAG
tttccttccttccgtatctc

SEQ ID NO: 67208 - DNA, 20 bp, Artificial Sequence
  Description of Artificial Sequence: Synthetic oligonucleotide
  Target: LAMA2; (-) strand; PAM type: NRG; PAM sequence: AAG
accacctactaagagacttt

SEQ ID NO: 67209 - DNA, 20 bp, Artificial Sequence
  Description of Artificial Sequence: Synthetic oligonucleotide
  Target: LAMA2; (-) strand; PAM type: NRG; PAM sequence: GAG
ttgttgccaccacctactaa

SEQ ID NO: 67210 - DNA, 20 bp, Artificial Sequence
  Description of Artificial Sequence: Synthetic oligonucleotide
  Target: LAMA2; (-) strand; PAM type: NRG; PAM sequence: AAG
gcttgttgccaccacctact

SEQ ID NO: 67211 - DNA, 20 bp, Artificial Sequence
  Description of Artificial Sequence: Synthetic oligonucleotide
  Target: LAMA2; (-) strand; PAM type: NRG; PAM sequence: CAG
ttcctctcctcacactccca

SEQ ID NO: 67212 - DNA, 20 bp, Artificial Sequence
  Description of Artificial Sequence: Synthetic oligonucleotide
  Target: LAMA2; (-) strand; PAM type: NRG; PAM sequence: CAG
gacaacctttgcttgccatg

SEQ ID NO: 67213 - DNA, 20 bp, Artificial Sequence
  Description of Artificial Sequence: Synthetic oligonucleotide
  Target: LAMA2; (-) strand; PAM type: NRG; PAM sequence: GAG
ttctgaggattgctacctta

SEQ ID NO: 67214 - DNA, 20 bp, Artificial Sequence
  Description of Artificial Sequence: Synthetic oligonucleotide
  Target: LAMA2; (-) strand; PAM type: NRG; PAM sequence: TAG
tcttctgaggattgctacct

SEQ ID NO: 67215 - DNA, 20 bp, Artificial Sequence
  Description of Artificial Sequence: Synthetic oligonucleotide
  Target: LAMA2; (-) strand; PAM type: NRG; PAM sequence: AGG
ccttttcacgtgttcttctg

SEQ ID NO: 67216 - DNA, 20 bp, Artificial Sequence
  Description of Artificial Sequence: Synthetic oligonucleotide
  Target: LAMA2; (-) strand; PAM type: NRG; PAM sequence: GAG
accttttcacgtgttcttct

SEQ ID NO: 67217 - DNA, 20 bp, Artificial Sequence
  Description of Artificial Sequence: Synthetic oligonucleotide
  Target: LAMA2; (-) strand; PAM type: NRG; PAM sequence: GGG
actcccgggacaccacgcct

SEQ ID NO: 67218 - DNA, 20 bp, Artificial Sequence
  Description of Artificial Sequence: Synthetic oligonucleotide
  Target: LAMA2; (-) strand; PAM type: NRG; PAM sequence: TGG
aactcccgggacaccacgcc

SEQ ID NO: 67219 - DNA, 20 bp, Artificial Sequence
  Description of Artificial Sequence: Synthetic oligonucleotide
  Target: LAMA2; (-) strand; PAM type: NRG; PAM sequence: GGG
tctcaggagaggaaactccc

SEQ ID NO: 67220 - DNA, 20 bp, Artificial Sequence
  Description of Artificial Sequence: Synthetic oligonucleotide
  Target: LAMA2; (-) strand; PAM type: NRG; PAM sequence: CGG
atctcaggagaggaaactcc

SEQ ID NO: 67221 - DNA, 20 bp, Artificial Sequence
  Description of Artificial Sequence: Synthetic oligonucleotide
  Target: LAMA2; (-) strand; PAM type: NRG; PAM sequence: AGG
attaaatcctatctcaggag

SEQ ID NO: 67222 - DNA, 20 bp, Artificial Sequence
  Description of Artificial Sequence: Synthetic oligonucleotide
  Target: LAMA2; (-) strand; PAM type: NRG; PAM sequence: GAG
gattaaatcctatctcagga

SEQ ID NO: 67223 - DNA, 20 bp, Artificial Sequence
  Description of Artificial Sequence: Synthetic oligonucleotide
  Target: LAMA2; (-) strand; PAM type: NRG; PAM sequence: GAG
aagattaaatcctatctcag

SEQ ID NO: 67224 - DNA, 20 bp, Artificial Sequence
  Description of Artificial Sequence: Synthetic oligonucleotide
  Target: LAMA2; (-) strand; PAM type: NRG; PAM sequence: AGG
agaagattaaatcctatctc

SEQ ID NO: 67225 - DNA, 20 bp, Artificial Sequence
  Description of Artificial Sequence: Synthetic oligonucleotide
  Target: LAMA2; (-) strand; PAM type: NRG; PAM sequence: CAG
gagaagattaaatcctatct

SEQ ID NO: 67226 - DNA, 20 bp, Artificial Sequence
  Description of Artificial Sequence: Synthetic oligonucleotide
  Target: LAMA2; (-) strand; PAM type: NRG; PAM sequence: AAG
ggaatctacatgaactagag

SEQ ID NO: 67227 - DNA, 20 bp, Artificial Sequence
  Description of Artificial Sequence: Synthetic oligonucleotide
  Target: LAMA2; (-) strand; PAM type: NRG; PAM sequence: GAG
cctggaatctacatgaacta

SEQ ID NO: 67228 - DNA, 20 bp, Artificial Sequence
  Description of Artificial Sequence: Synthetic oligonucleotide
  Target: LAMA2; (-) strand; PAM type: NRG; PAM sequence: TAG
tccctggaatctacatgaac

SEQ ID NO: 67229 - DNA, 20 bp, Artificial Sequence
  Description of Artificial Sequence: Synthetic oligonucleotide
  Target: LAMA2; (-) strand; PAM type: NRG; PAM sequence: TGG
attgtcatgaaccccttccc

SEQ ID NO: 67230 - DNA, 20 bp, Artificial Sequence
  Description of Artificial Sequence: Synthetic oligonucleotide
  Target: LAMA2; (-) strand; PAM type: NRG; PAM sequence: AGG
ctaagggaagttcctccaga

SEQ ID NO: 67231 - DNA, 20 bp, Artificial Sequence
  Description of Artificial Sequence: Synthetic oligonucleotide
  Target: LAMA2; (-) strand; PAM type: NRG; PAM sequence: AAG
tctaagggaagttcctccag

SEQ ID NO: 67232 - DNA, 20 bp, Artificial Sequence
  Description of Artificial Sequence: Synthetic oligonucleotide
  Target: LAMA2; (-) strand; PAM type: NRG; PAM sequence: CAG
ttatctaagggaagttcctc

SEQ ID NO: 67233 - DNA, 20 bp, Artificial Sequence
  Description of Artificial Sequence: Synthetic oligonucleotide
  Target: LAMA2; (-) strand; PAM type: NRG; PAM sequence: AAG
agttcccccttatctaaggg

SEQ ID NO: 67234 - DNA, 20 bp, Artificial Sequence
  Description of Artificial Sequence: Synthetic oligonucleotide
  Target: LAMA2; (-) strand; PAM type: NRG; PAM sequence: GGG
tgaagttcccccttatctaa

SEQ ID NO: 67235 - DNA, 20 bp, Artificial Sequence
  Description of Artificial Sequence: Synthetic oligonucleotide
  Target: LAMA2; (-) strand; PAM type: NRG; PAM sequence: AGG
ctgaagttcccccttatcta

SEQ ID NO: 67236 - DNA, 20 bp, Artificial Sequence
  Description of Artificial Sequence: Synthetic oligonucleotide
  Target: LAMA2; (-) strand; PAM type: NRG; PAM sequence: AAG
tctgaagttcccccttatct

SEQ ID NO: 67237 - DNA, 20 bp, Artificial Sequence
  Description of Artificial Sequence: Synthetic oligonucleotide
  Target: LAMA2; (-) strand; PAM type: NRG; PAM sequence: AAG
acagggagaggctttctctg

SEQ ID NO: 67238 - DNA, 20 bp, Artificial Sequence
  Description of Artificial Sequence: Synthetic oligonucleotide
  Target: LAMA2; (-) strand; PAM type: NRG; PAM sequence: AGG
ctctcctcaagcacagggag

SEQ ID NO: 67239 - DNA, 20 bp, Artificial Sequence
  Description of Artificial Sequence: Synthetic oligonucleotide
  Target: LAMA2; (-) strand; PAM type: NRG; PAM sequence: GAG
cctctcctcaagcacaggga

SEQ ID NO: 67240 - DNA, 20 bp, Artificial Sequence
  Description of Artificial Sequence: Synthetic oligonucleotide
  Target: LAMA2; (-) strand; PAM type: NRG; PAM sequence: GAG
tgcctctcctcaagcacagg

SEQ ID NO: 67241 - DNA, 20 bp, Artificial Sequence
  Description of Artificial Sequence: Synthetic oligonucleotide
  Target: LAMA2; (-) strand; PAM type: NRG; PAM sequence: GGG
tctgcctctcctcaagcaca

SEQ ID NO: 67242 - DNA, 20 bp, Artificial Sequence
  Description of Artificial Sequence: Synthetic oligonucleotide
  Target: LAMA2; (-) strand; PAM type: NRG; PAM sequence: AGG
ctctgcctctcctcaagcac

SEQ ID NO: 67243 - DNA, 20 bp, Artificial Sequence
  Description of Artificial Sequence: Synthetic oligonucleotide
  Target: LAMA2; (-) strand; PAM type: NRG; PAM sequence: CAG
cctctgcctctcctcaagca

SEQ ID NO: 67244 - DNA, 20 bp, Artificial Sequence
  Description of Artificial Sequence: Synthetic oligonucleotide
  Target: LAMA2; (-) strand; PAM type: NRG; PAM sequence: AAG
tcgcccctctgcctctcctc

SEQ ID NO: 67245 - DNA, 20 bp, Artificial Sequence
  Description of Artificial Sequence: Synthetic oligonucleotide
  Target: LAMA2; (-) strand; PAM type: NRG; PAM sequence: AAG
aaagaagccaccttagaacc

SEQ ID NO: 67246 - DNA, 20 bp, Artificial Sequence
  Description of Artificial Sequence: Synthetic oligonucleotide
  Target: LAMA2; (-) strand; PAM type: NRG; PAM sequence: TAG
ttggactaaagaagccacct

SEQ ID NO: 67247 - DNA, 20 bp, Artificial Sequence
  Description of Artificial Sequence: Synthetic oligonucleotide
  Target: LAMA2; (-) strand; PAM type: NRG; PAM sequence: AAG
ctgagcactttggactaaag

SEQ ID NO: 67248 - DNA, 20 bp, Artificial Sequence
  Description of Artificial Sequence: Synthetic oligonucleotide
  Target: LAMA2; (-) strand; PAM type: NRG; PAM sequence: AAG
gagctgagcactttggacta

SEQ ID NO: 67249 - DNA, 20 bp, Artificial Sequence
  Description of Artificial Sequence: Synthetic oligonucleotide
  Target: LAMA2; (-) strand; PAM type: NRG; PAM sequence: TGG
ctttgaggagctgagcactt

SEQ ID NO: 67250 - DNA, 20 bp, Artificial Sequence
  Description of Artificial Sequence: Synthetic oligonucleotide
  Target: LAMA2; (-) strand; PAM type: NRG; PAM sequence: GAG
gtatggcgctttgaggagct

SEQ ID NO: 67251 - DNA, 20 bp, Artificial Sequence
  Description of Artificial Sequence: Synthetic oligonucleotide
  Target: LAMA2; (-) strand; PAM type: NRG; PAM sequence: GAG
ccaaagtatggcgctttgag

SEQ ID NO: 67252 - DNA, 20 bp, Artificial Sequence
  Description of Artificial Sequence: Synthetic oligonucleotide
  Target: LAMA2; (-) strand; PAM type: NRG; PAM sequence: AGG
ctccaaagtatggcgctttg

SEQ ID NO: 67253 - DNA, 20 bp, Artificial Sequence
  Description of Artificial Sequence: Synthetic oligonucleotide
  Target: LAMA2; (-) strand; PAM type: NRG; PAM sequence: GAG
actccaaagtatggcgcttt

SEQ ID NO: 67254 - DNA, 20 bp, Artificial Sequence
  Description of Artificial Sequence: Synthetic oligonucleotide
  Target: LAMA2; (-) strand; PAM type: NRG; PAM sequence: TGG
gaaaatagtactccaaagta

SEQ ID NO: 67255 - DNA, 20 bp, Artificial Sequence
  Description of Artificial Sequence: Synthetic oligonucleotide
  Target: LAMA2; (-) strand; PAM type: NRG; PAM sequence: AAG
gctcagaaaatagtactcca

SEQ ID NO: 67256 - DNA, 20 bp, Artificial Sequence
  Description of Artificial Sequence: Synthetic oligonucleotide
  Target: LAMA2; (-) strand; PAM type: NRG; PAM sequence: TAG
ggctgttagggctcagaaaa

SEQ ID NO: 67257 - DNA, 20 bp, Artificial Sequence
  Description of Artificial Sequence: Synthetic oligonucleotide
  Target: LAMA2; (-) strand; PAM type: NRG; PAM sequence: CAG
catttgtggctgttagggct

SEQ ID NO: 67258 - DNA, 20 bp, Artificial Sequence
  Description of Artificial Sequence: Synthetic oligonucleotide
  Target: LAMA2; (-) strand; PAM type: NRG; PAM sequence: GGG
tcttccatttgtggctgtta

SEQ ID NO: 67259 - DNA, 20 bp, Artificial Sequence
  Description of Artificial Sequence: Synthetic oligonucleotide
  Target: LAMA2; (-) strand; PAM type: NRG; PAM sequence: AGG
ttcttccatttgtggctgtt

SEQ ID NO: 67260 - DNA, 20 bp, Artificial Sequence
  Description of Artificial Sequence: Synthetic oligonucleotide
  Target: LAMA2; (-) strand; PAM type: NRG; PAM sequence: TAG
cttcttccatttgtggctgt

SEQ ID NO: 67261 - DNA, 20 bp, Artificial Sequence
  Description of Artificial Sequence: Synthetic oligonucleotide
  Target: LAMA2; (-) strand; PAM type: NRG; PAM sequence: TGG
gggaatacttcttccatttg

SEQ ID NO: 67262 - DNA, 20 bp, Artificial Sequence
  Description of Artificial Sequence: Synthetic oligonucleotide
  Target: LAMA2; (-) strand; PAM type: NRG; PAM sequence: GGG
atgcaaacttttctgtacag

SEQ ID NO: 67263 - DNA, 20 bp, Artificial Sequence
  Description of Artificial Sequence: Synthetic oligonucleotide
  Target: LAMA2; (-) strand; PAM type: NRG; PAM sequence: GGG
aatgcaaacttttctgtaca

SEQ ID NO: 67264 - DNA, 20 bp, Artificial Sequence
  Description of Artificial Sequence: Synthetic oligonucleotide
  Target: LAMA2; (-) strand; PAM type: NRG; PAM sequence: AGG
taatgcaaacttttctgtac

SEQ ID NO: 67265 - DNA, 20 bp, Artificial Sequence
  Description of Artificial Sequence: Synthetic oligonucleotide
  Target: LAMA2; (-) strand; PAM type: NRG; PAM sequence: CAG
gtaatgcaaacttttctgta

SEQ ID NO: 67266 - DNA, 20 bp, Artificial Sequence
  Description of Artificial Sequence: Synthetic oligonucleotide
  Target: LAMA2; (-) strand; PAM type: NRG; PAM sequence: AAG
taagagacataatctgacaa

SEQ ID NO: 67267 - DNA, 20 bp, Artificial Sequence
  Description of Artificial Sequence: Synthetic oligonucleotide
  Target: LAMA2; (-) strand; PAM type: NRG; PAM sequence: GAG
ataaaatgtgattatattaa

SEQ ID NO: 67268 - DNA, 20 bp, Artificial Sequence
  Description of Artificial Sequence: Synthetic oligonucleotide
  Target: LAMA2; (-) strand; PAM type: NRG; PAM sequence: AAG
tcataaaatgtgattatatt

SEQ ID NO: 67269 - DNA, 20 bp, Artificial Sequence
  Description of Artificial Sequence: Synthetic oligonucleotide
  Target: LAMA2; (-) strand; PAM type: NRG; PAM sequence: AAG
aaaaaataaataaatctgtt

SEQ ID NO: 67270 - DNA, 20 bp, Artificial Sequence
  Description of Artificial Sequence: Synthetic oligonucleotide
  Target: LAMA2; (-) strand; PAM type: NRG; PAM sequence: TGG
ttacttgggaattaaagttg

SEQ ID NO: 67271 - DNA, 20 bp, Artificial Sequence
  Description of Artificial Sequence: Synthetic oligonucleotide
  Target: LAMA2; (-) strand; PAM type: NRG; PAM sequence: AAG
taagagttacttgggaatta

SEQ ID NO: 67272 - DNA, 20 bp, Artificial Sequence
  Description of Artificial Sequence: Synthetic oligonucleotide
  Target: LAMA2; (-) strand; PAM type: NRG; PAM sequence: GGG
gaaacttctaagagttactt

SEQ ID NO: 67273 - DNA, 20 bp, Artificial Sequence
  Description of Artificial Sequence: Synthetic oligonucleotide
  Target: LAMA2; (-) strand; PAM type: NRG; PAM sequence: TGG
agaaacttctaagagttact

SEQ ID NO: 67274 - DNA, 20 bp, Artificial Sequence
  Description of Artificial Sequence: Synthetic oligonucleotide
  Target: LAMA2; (-) strand; PAM type: NRG; PAM sequence: GAG
caaaaaggagaaacttctaa

SEQ ID NO: 67275 - DNA, 20 bp, Artificial Sequence
  Description of Artificial Sequence: Synthetic oligonucleotide
  Target: LAMA2; (-) strand; PAM type: NRG; PAM sequence: AAG
tccaaaaaggagaaacttct

SEQ ID NO: 67276 - DNA, 20 bp, Artificial Sequence
  Description of Artificial Sequence: Synthetic oligonucleotide
  Target: LAMA2; (-) strand; PAM type: NRG; PAM sequence: GAG
caaaatgaaaatccaaaaag

SEQ ID NO: 67277 - DNA, 20 bp, Artificial Sequence
  Description of Artificial Sequence: Synthetic oligonucleotide
  Target: LAMA2; (-) strand; PAM type: NRG; PAM sequence: AGG
atcaaaatgaaaatccaaaa

SEQ ID NO: 67278 - DNA, 20 bp, Artificial Sequence
  Description of Artificial Sequence: Synthetic oligonucleotide
  Target: LAMA2; (-) strand; PAM type: NRG; PAM sequence: AAG
catcaaaatgaaaatccaaa

SEQ ID NO: 67279 - DNA, 20 bp, Artificial Sequence
  Description of Artificial Sequence: Synthetic oligonucleotide
  Target: LAMA2; (-) strand; PAM type: NRG; PAM sequence: AAG
tgtgttaaacactggaattt

SEQ ID NO: 67280 - DNA, 20 bp, Artificial Sequence
  Description of Artificial Sequence: Synthetic oligonucleotide
  Target: LAMA2; (-) strand; PAM type: NRG; PAM sequence: TGG
ctgggggttgtgttaaacac

SEQ ID NO: 67281 - DNA, 20 bp, Artificial Sequence
  Description of Artificial Sequence: Synthetic oligonucleotide
  Target: LAMA2; (-) strand; PAM type: NRG; PAM sequence: GGG
aactgtgactcaaaagctgg

SEQ ID NO: 67282 - DNA, 20 bp, Artificial Sequence
  Description of Artificial Sequence: Synthetic oligonucleotide
  Target: LAMA2; (-) strand; PAM type: NRG; PAM sequence: GGG
aaactgtgactcaaaagctg

SEQ ID NO: 67283 - DNA, 20 bp, Artificial Sequence
  Description of Artificial Sequence: Synthetic oligonucleotide
  Target: LAMA2; (-) strand; PAM type: NRG; PAM sequence: GGG
taaactgtgactcaaaagct

SEQ ID NO: 67284 - DNA, 20 bp, Artificial Sequence
  Description of Artificial Sequence: Synthetic oligonucleotide
  Target: LAMA2; (-) strand; PAM type: NRG; PAM sequence: TGG
ataaactgtgactcaaaagc

SEQ ID NO: 67285 - DNA, 20 bp, Artificial Sequence
  Description of Artificial Sequence: Synthetic oligonucleotide
  Target: LAMA2; (-) strand; PAM type: NRG; PAM sequence: AAG
tgaaataaactgtgactcaa

SEQ ID NO: 67286 - DNA, 20 bp, Artificial Sequence
  Description of Artificial Sequence: Synthetic oligonucleotide
  Target: LAMA2; (-) strand; PAM type: NRG; PAM sequence: GGG
tattgtaatttggcaatcag

SEQ ID NO: 67287 - DNA, 20 bp, Artificial Sequence
  Description of Artificial Sequence: Synthetic oligonucleotide
  Target: LAMA2; (-) strand; PAM type: NRG; PAM sequence: GGG
atattgtaatttggcaatca

SEQ ID NO: 67288 - DNA, 20 bp, Artificial Sequence
  Description of Artificial Sequence: Synthetic oligonucleotide
  Target: LAMA2; (-) strand; PAM type: NRG; PAM sequence: AGG
gatattgtaatttggcaatc

SEQ ID NO: 67289 - DNA, 20 bp, Artificial Sequence
  Description of Artificial Sequence: Synthetic oligonucleotide
  Target: LAMA2; (-) strand; PAM type: NRG; PAM sequence: CAG
agatattgtaatttggcaat

SEQ ID NO: 67290 - DNA, 20 bp, Artificial Sequence
  Description of Artificial Sequence: Synthetic oligonucleotide
  Target: LAMA2; (-) strand; PAM type: NRG; PAM sequence: TGG
gttcataagatattgtaatt

SEQ ID NO: 67291 - DNA, 20 bp, Artificial Sequence
  Description of Artificial Sequence: Synthetic oligonucleotide
  Target: LAMA2; (-) strand; PAM type: NRG; PAM sequence: AAG
caacattttgcccggttcat

SEQ ID NO: 67292 - DNA, 20 bp, Artificial Sequence
  Description of Artificial Sequence: Synthetic oligonucleotide
  Target: LAMA2; (-) strand; PAM type: NRG; PAM sequence: CGG
aaataagtcaacattttgcc

SEQ ID NO: 67293 - DNA, 20 bp, Artificial Sequence
  Description of Artificial Sequence: Synthetic oligonucleotide
  Target: LAMA2; (-) strand; PAM type: NRG; PAM sequence: AAG
ggtaacataatgtcctaaat

SEQ ID NO: 67294 - DNA, 20 bp, Artificial Sequence
  Description of Artificial Sequence: Synthetic oligonucleotide
  Target: LAMA2; (-) strand; PAM type: NRG; PAM sequence: AGG
tgaaatattttggaataaat

SEQ ID NO: 67295 - DNA, 20 bp, Artificial Sequence
  Description of Artificial Sequence: Synthetic oligonucleotide
  Target: LAMA2; (-) strand; PAM type: NRG; PAM sequence: TAG
atgaaatattttggaataaa

SEQ ID NO: 67296 - DNA, 20 bp, Artificial Sequence
  Description of Artificial Sequence: Synthetic oligonucleotide
  Target: LAMA2; (-) strand; PAM type: NRG; PAM sequence: TGG
gattttcaaatgaaatattt

SEQ ID NO: 67297 - DNA, 20 bp, Artificial Sequence
  Description of Artificial Sequence: Synthetic oligonucleotide
  Target: LAMA2; (-) strand; PAM type: NRG; PAM sequence: TAG
gaaaagtctacatgggaatg

SEQ ID NO: 67298 - DNA, 20 bp, Artificial Sequence
  Description of Artificial Sequence: Synthetic oligonucleotide
  Target: LAMA2; (-) strand; PAM type: NRG; PAM sequence: GGG
gtataaagaaaagtctacat

SEQ ID NO: 67299 - DNA, 20 bp, Artificial Sequence
  Description of Artificial Sequence: Synthetic oligonucleotide
  Target: LAMA2; (-) strand; PAM type: NRG; PAM sequence: TGG
tgtataaagaaaagtctaca

SEQ ID NO: 67300 - DNA, 20 bp, Artificial Sequence
  Description of Artificial Sequence: Synthetic oligonucleotide
  Target: LAMA2; (-) strand; PAM type: NRG; PAM sequence: AAG
tttaacttttgtataaagaa

SEQ ID NO: 67301 - DNA, 20 bp, Artificial Sequence
  Description of Artificial Sequence: Synthetic oligonucleotide
  Target: LAMA2; (-) strand; PAM type: NRG; PAM sequence: AAG
attattttaacttttgtata

SEQ ID NO: 67302 - DNA, 20 bp, Artificial Sequence
  Description of Artificial Sequence: Synthetic oligonucleotide
  Target: LAMA2; (-) strand; PAM type: NRG; PAM sequence: CAG
tgaaaggctaattttagcat

SEQ ID NO: 67303 - DNA, 20 bp, Artificial Sequence
  Description of Artificial Sequence: Synthetic oligonucleotide
  Target: LAMA2; (-) strand; PAM type: NRG; PAM sequence: TAG
aatcaatgaaaggctaattt

SEQ ID NO: 67304 - DNA, 20 bp, Artificial Sequence
  Description of Artificial Sequence: Synthetic oligonucleotide
  Target: LAMA2; (-) strand; PAM type: NRG; PAM sequence: AGG
atctacttgaaatcaatgaa

SEQ ID NO: 67305 - DNA, 20 bp, Artificial Sequence
  Description of Artificial Sequence: Synthetic oligonucleotide
  Target: LAMA2; (-) strand; PAM type: NRG; PAM sequence: AAG
aatctacttgaaatcaatga

SEQ ID NO: 67306 - DNA, 20 bp, Artificial Sequence
  Description of Artificial Sequence: Synthetic oligonucleotide
  Target: LAMA2; (-) strand; PAM type: NRG; PAM sequence: TAG
ataaagcatgtatttgatcc

SEQ ID NO: 67307 - DNA, 20 bp, Artificial Sequence
  Description of Artificial Sequence: Synthetic oligonucleotide
  Target: LAMA2; (-) strand; PAM type: NRG; PAM sequence: AAG
gaaataaactgtattacata

SEQ ID NO: 67308 - DNA, 20 bp, Artificial Sequence
  Description of Artificial Sequence: Synthetic oligonucleotide
  Target: LAMA2; (-) strand; PAM type: NRG; PAM sequence: AAG
tgcactttctgtatcagttt

SEQ ID NO: 67309 - DNA, 20 bp, Artificial Sequence
  Description of Artificial Sequence: Synthetic oligonucleotide
  Target: LAMA2; (-) strand; PAM type: NRG; PAM sequence: CAG
attatgtgcactttctgtat

SEQ ID NO: 67310 - DNA, 20 bp, Artificial Sequence
  Description of Artificial Sequence: Synthetic oligonucleotide
  Target: LAMA2; (-) strand; PAM type: NRG; PAM sequence: CAG
cttttgaacatttttacttc

SEQ ID NO: 67311 - DNA, 20 bp, Artificial Sequence
  Description of Artificial Sequence: Synthetic oligonucleotide
  Target: LAMA2; (-) strand; PAM type: NRG; PAM sequence: TAG
aaaataacatgagagcttct

SEQ ID NO: 67312 - DNA, 20 bp, Artificial Sequence
  Description of Artificial Sequence: Synthetic oligonucleotide
  Target: LAMA2; (-) strand; PAM type: NRG; PAM sequence: GAG
attgaagaaaaataacatga

SEQ ID NO: 67313 - DNA, 20 bp, Artificial Sequence
  Description of Artificial Sequence: Synthetic oligonucleotide
  Target: LAMA2; (-) strand; PAM type: NRG; PAM sequence: GAG
aaattgaagaaaaataacat

SEQ ID NO: 67314 - DNA, 20 bp, Artificial Sequence
  Description of Artificial Sequence: Synthetic oligonucleotide
  Target: LAMA2; (-) strand; PAM type: NRG; PAM sequence: AAG
tatatgtttgtagcaaattg

SEQ ID NO: 67315 - DNA, 20 bp, Artificial Sequence
  Description of Artificial Sequence: Synthetic oligonucleotide
  Target: LAMA2; (-) strand; PAM type: NRG; PAM sequence: TAG
ctacactctatatatgtttg

SEQ ID NO: 67316 - DNA, 20 bp, Artificial Sequence
  Description of Artificial Sequence: Synthetic oligonucleotide
  Target: LAMA2; (-) strand; PAM type: NRG; PAM sequence: TAG
cttctgctaattcttatggc

SEQ ID NO: 67317 - DNA, 20 bp, Artificial Sequence
  Description of Artificial Sequence: Synthetic oligonucleotide
  Target: LAMA2; (-) strand; PAM type: NRG; PAM sequence: TGG
aaagcttctgctaattctta

SEQ ID NO: 67318 - DNA, 20 bp, Artificial Sequence
  Description of Artificial Sequence: Synthetic oligonucleotide
  Target: LAMA2; (-) strand; PAM type: NRG; PAM sequence: AAG
tctcctaccttttctctcca

SEQ ID NO: 67319 - DNA, 20 bp, Artificial Sequence
  Description of Artificial Sequence: Synthetic oligonucleotide
  Target: LAMA2; (-) strand; PAM type: NRG; PAM sequence: CAG
aaagggatgctcagggcatt

SEQ ID NO: 67320 - DNA, 20 bp, Artificial Sequence
  Description of Artificial Sequence: Synthetic oligonucleotide
  Target: LAMA2; (-) strand; PAM type: NRG; PAM sequence: GGG
gctattcaaagggatgctca

SEQ ID NO: 67321 - DNA, 20 bp, Artificial Sequence
  Description of Artificial Sequence: Synthetic oligonucleotide
  Target: LAMA2; (-) strand; PAM type: NRG; PAM sequence: AGG
agctattcaaagggatgctc

SEQ ID NO: 67322 - DNA, 20 bp, Artificial Sequence
  Description of Artificial Sequence: Synthetic oligonucleotide
  Target: LAMA2; (-) strand; PAM type: NRG; PAM sequence: CAG
gagctattcaaagggatgct

SEQ ID NO: 67323 - DNA, 20 bp, Artificial Sequence
  Description of Artificial Sequence: Synthetic oligonucleotide
  Target: LAMA2; (-) strand; PAM type: NRG; PAM sequence: GGG
tcttgcctgagctattcaaa

SEQ ID NO: 67324 - DNA, 20 bp, Artificial Sequence
  Description of Artificial Sequence: Synthetic oligonucleotide
  Target: LAMA2; (-) strand; PAM type: NRG; PAM sequence: AGG
ttcttgcctgagctattcaa

SEQ ID NO: 67325 - DNA, 20 bp, Artificial Sequence
  Description of Artificial Sequence: Synthetic oligonucleotide
  Target: LAMA2; (-) strand; PAM type: NRG; PAM sequence: AAG
cttcttgcctgagctattca

SEQ ID NO: 67326 - DNA, 20 bp, Artificial Sequence
  Description of Artificial Sequence: Synthetic oligonucleotide
  Target: LAMA2; (-) strand; PAM type: NRG; PAM sequence: GAG
aatagcacctcttcttgcct

SEQ ID NO: 67327 - DNA, 20 bp, Artificial Sequence
  Description of Artificial Sequence: Synthetic oligonucleotide
  Target: LAMA2; (-) strand; PAM type: NRG; PAM sequence: TAG
acagtctcctcctgggataa

SEQ ID NO: 67328 - DNA, 20 bp, Artificial Sequence
  Description of Artificial Sequence: Synthetic oligonucleotide
  Target: LAMA2; (-) strand; PAM type: NRG; PAM sequence: GGG
gtcacttacagtctcctcct

SEQ ID NO: 67329 - DNA, 20 bp, Artificial Sequence
  Description of Artificial Sequence: Synthetic oligonucleotide
  Target: LAMA2; (-) strand; PAM type: NRG; PAM sequence: TGG
cgtcacttacagtctcctcc

SEQ ID NO: 67330 - DNA, 20 bp, Artificial Sequence
  Description of Artificial Sequence: Synthetic oligonucleotide
  Target: LAMA2; (-) strand; PAM type: NRG; PAM sequence: CAG
aattacacaaacgtcactta

SEQ ID NO: 67331 - DNA, 20 bp, Artificial Sequence
  Description of Artificial Sequence: Synthetic oligonucleotide
  Target: LAMA2; (-) strand; PAM type: NRG; PAM sequence: AGG
ccacaagtccttatccaggc

SEQ ID NO: 67332 - DNA, 20 bp, Artificial Sequence
  Description of Artificial Sequence: Synthetic oligonucleotide
  Target: LAMA2; (-) strand; PAM type: NRG; PAM sequence: CAG
cccacaagtccttatccagg

SEQ ID NO: 67333 - DNA, 20 bp, Artificial Sequence
  Description of Artificial Sequence: Synthetic oligonucleotide
  Target: LAMA2; (-) strand; PAM type: NRG; PAM sequence: AGG
ttacccacaagtccttatcc

SEQ ID NO: 67334 - DNA, 20 bp, Artificial Sequence
  Description of Artificial Sequence: Synthetic oligonucleotide
  Target: LAMA2; (-) strand; PAM type: NRG; PAM sequence: CAG
cttacccacaagtccttatc

SEQ ID NO: 67335 - DNA, 20 bp, Artificial Sequence
  Description of Artificial Sequence: Synthetic oligonucleotide
  Target: LAMA2; (-) strand; PAM type: NRG; PAM sequence: AAG
tactctgtttccttacccac

SEQ ID NO: 67336 - DNA, 20 bp, Artificial Sequence
  Description of Artificial Sequence: Synthetic oligonucleotide
  Target: LAMA2; (-) strand; PAM type: NRG; PAM sequence: TGG
ttttctgactttcttccctt

SEQ ID NO: 67337 - DNA, 20 bp, Artificial Sequence
  Description of Artificial Sequence: Synthetic oligonucleotide
  Target: LAMA2; (-) strand; PAM type: NRG; PAM sequence: AAG
tttaagtggaggaacacagc

SEQ ID NO: 67338 - DNA, 20 bp, Artificial Sequence
  Description of Artificial Sequence: Synthetic oligonucleotide
  Target: LAMA2; (-) strand; PAM type: NRG; PAM sequence: CAG
tatatttaagtggaggaaca

SEQ ID NO: 67339 - DNA, 20 bp, Artificial Sequence
  Description of Artificial Sequence: Synthetic oligonucleotide
  Target: LAMA2; (-) strand; PAM type: NRG; PAM sequence: AGG
aataacatatatttaagtgg

SEQ ID NO: 67340 - DNA, 20 bp, Artificial Sequence
  Description of Artificial Sequence: Synthetic oligonucleotide
  Target: LAMA2; (-) strand; PAM type: NRG; PAM sequence: GAG
aaataacatatatttaagtg

SEQ ID NO: 67341 - DNA, 20 bp, Artificial Sequence
  Description of Artificial Sequence: Synthetic oligonucleotide
  Target: LAMA2; (-) strand; PAM type: NRG; PAM sequence: TGG
agaaataacatatatttaag

SEQ ID NO: 67342 - DNA, 20 bp, Artificial Sequence
  Description of Artificial Sequence: Synthetic oligonucleotide
  Target: LAMA2; (-) strand; PAM type: NRG; PAM sequence: AAG
taaagaaataacatatattt

SEQ ID NO: 67343 - DNA, 20 bp, Artificial Sequence
  Description of Artificial Sequence: Synthetic oligonucleotide
  Target: LAMA2; (-) strand; PAM type: NRG; PAM sequence: AAG
tgtaaaacctgcagtcccta

SEQ ID NO: 67344 - DNA, 20 bp, Artificial Sequence
  Description of Artificial Sequence: Synthetic oligonucleotide
  Target: LAMA2; (-) strand; PAM type: NRG; PAM sequence: CAG
tcatctctttgtaaaacctg

SEQ ID NO: 67345 - DNA, 20 bp, Artificial Sequence
  Description of Artificial Sequence: Synthetic oligonucleotide
  Target: LAMA2; (-) strand; PAM type: NRG; PAM sequence: TAG
aggtaagtagcattccgaat

SEQ ID NO: 67346 - DNA, 20 bp, Artificial Sequence
  Description of Artificial Sequence: Synthetic oligonucleotide
  Target: LAMA2; (-) strand; PAM type: NRG; PAM sequence: TAG
cttttggaaacagaggtaag

SEQ ID NO: 67347 - DNA, 20 bp, Artificial Sequence
  Description of Artificial Sequence: Synthetic oligonucleotide
  Target: LAMA2; (-) strand; PAM type: NRG; PAM sequence: AAG
tttcttttggaaacagaggt

SEQ ID NO: 67348 - DNA, 20 bp, Artificial Sequence
  Description of Artificial Sequence: Synthetic oligonucleotide
  Target: LAMA2; (-) strand; PAM type: NRG; PAM sequence: AGG
tctttttcttttggaaacag

SEQ ID NO: 67349 - DNA, 20 bp, Artificial Sequence
  Description of Artificial Sequence: Synthetic oligonucleotide
  Target: LAMA2; (-) strand; PAM type: NRG; PAM sequence: GAG
gtctttttcttttggaaaca

SEQ ID NO: 67350 - DNA, 20 bp, Artificial Sequence
  Description of Artificial Sequence: Synthetic oligonucleotide
  Target: LAMA2; (-) strand; PAM type: NRG; PAM sequence: CAG
gagtctttttcttttggaaa

SEQ ID NO: 67351 - DNA, 20 bp, Artificial Sequence
  Description of Artificial Sequence: Synthetic oligonucleotide
  Target: LAMA2; (-) strand; PAM type: NRG; PAM sequence: TGG
ctggaggagtctttttcttt

SEQ ID NO: 67352 - DNA, 20 bp, Artificial Sequence
  Description of Artificial Sequence: Synthetic oligonucleotide
  Target: LAMA2; (-) strand; PAM type: NRG; PAM sequence: GAG
cttaaaaccacattctggag

SEQ ID NO: 67353 - DNA, 20 bp, Artificial Sequence
  Description of Artificial Sequence: Synthetic oligonucleotide
  Target: LAMA2; (-) strand; PAM type: NRG; PAM sequence: AGG
tacttaaaaccacattctgg

SEQ ID NO: 67354 - DNA, 20 bp, Artificial Sequence
  Description of Artificial Sequence: Synthetic oligonucleotide
  Target: LAMA2; (-) strand; PAM type: NRG; PAM sequence: GAG
ctacttaaaaccacattctg

SEQ ID NO: 67355 - DNA, 20 bp, Artificial Sequence
  Description of Artificial Sequence: Synthetic oligonucleotide
  Target: LAMA2; (-) strand; PAM type: NRG; PAM sequence: TGG
gcctacttaaaaccacattc

SEQ ID NO: 67356 - DNA, 20 bp, Artificial Sequence
  Description of Artificial Sequence: Synthetic oligonucleotide
  Target: LAMA2; (-) strand; PAM type: NRG; PAM sequence: TGG
tgtggcctacttttggtcca

SEQ ID NO: 67357 - DNA, 20 bp, Artificial Sequence
  Description of Artificial Sequence: Synthetic oligonucleotide
  Target: LAMA2; (-) strand; PAM type: NRG; PAM sequence: TGG
catgccttgtggcctacttt

SEQ ID NO: 67358 - DNA, 20 bp, Artificial Sequence
  Description of Artificial Sequence: Synthetic oligonucleotide
  Target: LAMA2; (-) strand; PAM type: NRG; PAM sequence: TGG
aagctgcctgccatgccttg

SEQ ID NO: 67359 - DNA, 20 bp, Artificial Sequence
  Description of Artificial Sequence: Synthetic oligonucleotide
  Target: LAMA2; (-) strand; PAM type: NRG; PAM sequence: AAG
ctagaaccttgaagttcata

SEQ ID NO: 67360 - DNA, 20 bp, Artificial Sequence
  Description of Artificial Sequence: Synthetic oligonucleotide
  Target: LAMA2; (-) strand; PAM type: NRG; PAM sequence: AAG
tgaaatttcctagaaccttg

SEQ ID NO: 67361 - DNA, 20 bp, Artificial Sequence
  Description of Artificial Sequence: Synthetic oligonucleotide
  Target: LAMA2; (-) strand; PAM type: NRG; PAM sequence: TAG
ctccaatggatgaaatttcc

SEQ ID NO: 67362 - DNA, 20 bp, Artificial Sequence
  Description of Artificial Sequence: Synthetic oligonucleotide
  Target: LAMA2; (-) strand; PAM type: NRG; PAM sequence: TGG
agcactggagaactctccaa

SEQ ID NO: 67363 - DNA, 20 bp, Artificial Sequence
  Description of Artificial Sequence: Synthetic oligonucleotide
  Target: LAMA2; (-) strand; PAM type: NRG; PAM sequence: GAG
taatattgtttaaagcactg

SEQ ID NO: 67364 - DNA, 20 bp, Artificial Sequence
  Description of Artificial Sequence: Synthetic oligonucleotide
  Target: LAMA2; (-) strand; PAM type: NRG; PAM sequence: TGG
tctaatattgtttaaagcac

SEQ ID NO: 67365 - DNA, 20 bp, Artificial Sequence
  Description of Artificial Sequence: Synthetic oligonucleotide
  Target: LAMA2; (-) strand; PAM type: NRG; PAM sequence: AAG
tttctttctaatattgttta

SEQ ID NO: 67366 - DNA, 20 bp, Artificial Sequence
  Description of Artificial Sequence: Synthetic oligonucleotide
  Target: LAMA2; (-) strand; PAM type: NRG; PAM sequence: TGG
aggagagatttttactagca

SEQ ID NO: 67367 - DNA, 20 bp, Artificial Sequence
  Description of Artificial Sequence: Synthetic oligonucleotide
  Target: LAMA2; (-) strand; PAM type: NRG; PAM sequence: TAG
cttgcaggagagatttttac

SEQ ID NO: 67368 - DNA, 20 bp, Artificial Sequence
  Description of Artificial Sequence: Synthetic oligonucleotide
  Target: LAMA2; (-) strand; PAM type: NRG; PAM sequence: GAG
ctcagtaatgtcttgcagga

SEQ ID NO: 67369 - DNA, 20 bp, Artificial Sequence
  Description of Artificial Sequence: Synthetic oligonucleotide
  Target: LAMA2; (-) strand; PAM type: NRG; PAM sequence: GAG
cactcagtaatgtcttgcag

SEQ ID NO: 67370 - DNA, 20 bp, Artificial Sequence
  Description of Artificial Sequence: Synthetic oligonucleotide
  Target: LAMA2; (-) strand; PAM type: NRG; PAM sequence: AGG
accactcagtaatgtcttgc

SEQ ID NO: 67371 - DNA, 20 bp, Artificial Sequence
  Description of Artificial Sequence: Synthetic oligonucleotide
  Target: LAMA2; (-) strand; PAM type: NRG; PAM sequence: CAG
caccactcagtaatgtcttg

SEQ ID NO: 67372 - DNA, 20 bp, Artificial Sequence
  Description of Artificial Sequence: Synthetic oligonucleotide
  Target: LAMA2; (-) strand; PAM type: NRG; PAM sequence: CAG
accacttagtcttcaccact

SEQ ID NO: 67373 - DNA, 20 bp, Artificial Sequence
  Description of Artificial Sequence: Synthetic oligonucleotide
  Target: LAMA2; (-) strand; PAM type: NRG; PAM sequence: TAG
acaacaatggcaaaaccact

SEQ ID NO: 67374 - DNA, 20 bp, Artificial Sequence
  Description of Artificial Sequence: Synthetic oligonucleotide
  Target: LAMA2; (-) strand; PAM type: NRG; PAM sequence: TGG
aaccaacaatacaacaacaa

SEQ ID NO: 67375 - DNA, 20 bp, Artificial Sequence
  Description of Artificial Sequence: Synthetic oligonucleotide
  Target: LAMA2; (-) strand; PAM type: NRG; PAM sequence: AGG
aagaagcaagcaaatatcca

SEQ ID NO: 67376 - DNA, 20 bp, Artificial Sequence
  Description of Artificial Sequence: Synthetic oligonucleotide
  Target: LAMA2; (-) strand; PAM type: NRG; PAM sequence: AAG
aaagaagcaagcaaatatcc

SEQ ID NO: 67377 - DNA, 20 bp, Artificial Sequence
  Description of Artificial Sequence: Synthetic oligonucleotide
  Target: LAMA2; (-) strand; PAM type: NRG; PAM sequence: AAG
aaaatcaacaaaaaagaagc

SEQ ID NO: 67378 - DNA, 20 bp, Artificial Sequence
  Description of Artificial Sequence: Synthetic oligonucleotide
  Target: LAMA2; (-) strand; PAM type: NRG; PAM sequence: AAG
gctaaaaatcaacaaaaaag

SEQ ID NO: 67379 - DNA, 20 bp, Artificial Sequence
  Description of Artificial Sequence: Synthetic oligonucleotide
  Target: LAMA2; (-) strand; PAM type: NRG; PAM sequence: AAG
tatgctaaaaatcaacaaaa

SEQ ID NO: 67380 - DNA, 20 bp, Artificial Sequence
  Description of Artificial Sequence: Synthetic oligonucleotide
  Target: LAMA2; (-) strand; PAM type: NRG; PAM sequence: GGG
ttgctttcttttcttttgtt

SEQ ID NO: 67381 - DNA, 20 bp, Artificial Sequence
  Description of Artificial Sequence: Synthetic oligonucleotide
  Target: LAMA2; (-) strand; PAM type: NRG; PAM sequence: TGG
attgctttcttttcttttgt

SEQ ID NO: 67382 - DNA, 20 bp, Artificial Sequence
  Description of Artificial Sequence: Synthetic oligonucleotide
  Target: LAMA2; (-) strand; PAM type: NRG; PAM sequence: AAG
gttatcttaaagcctcttga

SEQ ID NO: 67383 - DNA, 20 bp, Artificial Sequence
  Description of Artificial Sequence: Synthetic oligonucleotide
  Target: LAMA2; (-) strand; PAM type: NRG; PAM sequence: AAG
aaatgtatgatgttatctta

SEQ ID NO: 67384 - DNA, 20 bp, Artificial Sequence
  Description of Artificial Sequence: Synthetic oligonucleotide
  Target: LAMA2; (-) strand; PAM type: NRG; PAM sequence: CAG
agtaaaacaaaatagaatct

SEQ ID NO: 67385 - DNA, 20 bp, Artificial Sequence
  Description of Artificial Sequence: Synthetic oligonucleotide
  Target: LAMA2; (-) strand; PAM type: NRG; PAM sequence: TAG
tccttttaagtaaaacaaaa

SEQ ID NO: 67386 - DNA, 20 bp, Artificial Sequence
  Description of Artificial Sequence: Synthetic oligonucleotide
  Target: LAMA2; (-) strand; PAM type: NRG; PAM sequence: AAG
agcattgtaacattcctttt

SEQ ID NO: 67387 - DNA, 20 bp, Artificial Sequence
  Description of Artificial Sequence: Synthetic oligonucleotide
  Target: LAMA2; (-) strand; PAM type: NRG; PAM sequence: CAG
agaataagcaaaaacgttaa

SEQ ID NO: 67388 - DNA, 20 bp, Artificial Sequence
  Description of Artificial Sequence: Synthetic oligonucleotide
  Target: LAMA2; (-) strand; PAM type: NRG; PAM sequence: AAG
aataagcaaaaatgtagaat

SEQ ID NO: 67389 - DNA, 20 bp, Artificial Sequence
  Description of Artificial Sequence: Synthetic oligonucleotide
  Target: LAMA2; (-) strand; PAM type: NRG; PAM sequence: TAG
ttcatgaataagcaaaaatg

SEQ ID NO: 67390 - DNA, 20 bp, Artificial Sequence
  Description of Artificial Sequence: Synthetic oligonucleotide
  Target: LAMA2; (-) strand; PAM type: NRG; PAM sequence: AAG
ttctcccgagtttcatgaat

SEQ ID NO: 67391 - DNA, 20 bp, Artificial Sequence
  Description of Artificial Sequence: Synthetic oligonucleotide
  Target: LAMA2; (-) strand; PAM type: NRG; PAM sequence: GAG
caatagacagaatttctccc

SEQ ID NO: 67392 - DNA, 20 bp, Artificial Sequence
  Description of Artificial Sequence: Synthetic oligonucleotide
  Target: LAMA2; (-) strand; PAM type: NRG; PAM sequence: CAG
aatgagagcctgccaataga

SEQ ID NO: 67393 - DNA, 20 bp, Artificial Sequence
  Description of Artificial Sequence: Synthetic oligonucleotide
  Target: LAMA2; (-) strand; PAM type: NRG; PAM sequence: TAG
acacaatgagagcctgccaa

SEQ ID NO: 67394 - DNA, 20 bp, Artificial Sequence
  Description of Artificial Sequence: Synthetic oligonucleotide
  Target: LAMA2; (-) strand; PAM type: NRG; PAM sequence: GAG
tggtgatgaatacacaatga

SEQ ID NO: 67395 - DNA, 20 bp, Artificial Sequence
  Description of Artificial Sequence: Synthetic oligonucleotide
  Target: LAMA2; (-) strand; PAM type: NRG; PAM sequence: GAG
tgtggtgatgaatacacaat

SEQ ID NO: 67396 - DNA, 20 bp, Artificial Sequence
  Description of Artificial Sequence: Synthetic oligonucleotide
  Target: LAMA2; (-) strand; PAM type: NRG; PAM sequence: TGG
gagtaaatgagtggttagtg

SEQ ID NO: 67397 - DNA, 20 bp, Artificial Sequence
  Description of Artificial Sequence: Synthetic oligonucleotide
  Target: LAMA2; (-) strand; PAM type: NRG; PAM sequence: TAG
tttcggagtaaatgagtggt

SEQ ID NO: 67398 - DNA, 20 bp, Artificial Sequence
  Description of Artificial Sequence: Synthetic oligonucleotide
  Target: LAMA2; (-) strand; PAM type: NRG; PAM sequence: TGG
ttaatttcggagtaaatgag

SEQ ID NO: 67399 - DNA, 20 bp, Artificial Sequence
  Description of Artificial Sequence: Synthetic oligonucleotide
  Target: LAMA2; (-) strand; PAM type: NRG; PAM sequence: GAG
cacttaatttcggagtaaat

SEQ ID NO: 67400 - DNA, 20 bp, Artificial Sequence
  Description of Artificial Sequence: Synthetic oligonucleotide
  Target: LAMA2; (-) strand; PAM type: NRG; PAM sequence: GAG
tcactgagcacttaatttcg

SEQ ID NO: 67401 - DNA, 20 bp, Artificial Sequence
  Description of Artificial Sequence: Synthetic oligonucleotide
  Target: LAMA2; (-) strand; PAM type: NRG; PAM sequence: CGG
tatcactgagcacttaattt

SEQ ID NO: 67402 - DNA, 20 bp, Artificial Sequence
  Description of Artificial Sequence: Synthetic oligonucleotide
  Target: LAMA2; (-) strand; PAM type: NRG; PAM sequence: GAG
tttataacatgcatatcact

SEQ ID NO: 67403 - DNA, 20 bp, Artificial Sequence
  Description of Artificial Sequence: Synthetic oligonucleotide
  Target: LAMA2; (-) strand; PAM type: NRG; PAM sequence: GAG
accaagaaaattttgcaact

SEQ ID NO: 67404 - DNA, 20 bp, Artificial Sequence
  Description of Artificial Sequence: Synthetic oligonucleotide
  Target: LAMA2; (-) strand; PAM type: NRG; PAM sequence: AAG
agtacaatttcttaagcacc

SEQ ID NO: 67405 - DNA, 20 bp, Artificial Sequence
  Description of Artificial Sequence: Synthetic oligonucleotide
  Target: LAMA2; (-) strand; PAM type: NRG; PAM sequence: AAG
cgattaaagtacaatttctt

SEQ ID NO: 67406 - DNA, 20 bp, Artificial Sequence
  Description of Artificial Sequence: Synthetic oligonucleotide
  Target: LAMA2; (-) strand; PAM type: NRG; PAM sequence: AAG
tttttggctaaaagcgatta

SEQ ID NO: 67407 - DNA, 20 bp, Artificial Sequence
  Description of Artificial Sequence: Synthetic oligonucleotide
  Target: LAMA2; (-) strand; PAM type: NRG; PAM sequence: AAG
ttgctaaactttttggctaa

SEQ ID NO: 67408 - DNA, 20 bp, Artificial Sequence
  Description of Artificial Sequence: Synthetic oligonucleotide
  Target: LAMA2; (-) strand; PAM type: NRG; PAM sequence: TGG
actatttttgctaaactttt

SEQ ID NO: 67409 - DNA, 20 bp, Artificial Sequence
  Description of Artificial Sequence: Synthetic oligonucleotide
  Target: LAMA2; (-) strand; PAM type: NRG; PAM sequence: AAG
aggctgtcagtactatgtca

SEQ ID NO: 67410 - DNA, 20 bp, Artificial Sequence
  Description of Artificial Sequence: Synthetic oligonucleotide
  Target: LAMA2; (-) strand; PAM type: NRG; PAM sequence: CAG
aaaatctaagcacaggctgt

SEQ ID NO: 67411 - DNA, 20 bp, Artificial Sequence
  Description of Artificial Sequence: Synthetic oligonucleotide
  Target: LAMA2; (-) strand; PAM type: NRG; PAM sequence: AGG
atttatcaaaatctaagcac

SEQ ID NO: 67412 - DNA, 20 bp, Artificial Sequence
  Description of Artificial Sequence: Synthetic oligonucleotide
  Target: LAMA2; (-) strand; PAM type: NRG; PAM sequence: CAG
catttatcaaaatctaagca

SEQ ID NO: 67413 - DNA, 20 bp, Artificial Sequence
  Description of Artificial Sequence: Synthetic oligonucleotide
  Target: LAMA2; (-) strand; PAM type: NRG; PAM sequence: AAG
gtccacatttatcaaaatct

SEQ ID NO: 67414 - DNA, 20 bp, Artificial Sequence
  Description of Artificial Sequence: Synthetic oligonucleotide
  Target: LAMA2; (-) strand; PAM type: NRG; PAM sequence: GGG
gaagtatgatgattttatct

SEQ ID NO: 67415 - DNA, 20 bp, Artificial Sequence
  Description of Artificial Sequence: Synthetic oligonucleotide
  Target: LAMA2; (-) strand; PAM type: NRG; PAM sequence: TGG
tgaagtatgatgattttatc

SEQ ID NO: 67416 - DNA, 20 bp, Artificial Sequence
  Description of Artificial Sequence: Synthetic oligonucleotide
  Target: LAMA2; (-) strand; PAM type: NRG; PAM sequence: AAG
tatgttagaaaaagcttttg

SEQ ID NO: 67417 - DNA, 20 bp, Artificial Sequence
  Description of Artificial Sequence: Synthetic oligonucleotide
  Target: LAMA2; (-) strand; PAM type: NRG; PAM sequence: AAG
gctgtgagttatgttagaaa

SEQ ID NO: 67418 - DNA, 20 bp, Artificial Sequence
  Description of Artificial Sequence: Synthetic oligonucleotide
  Target: LAMA2; (-) strand; PAM type: NRG; PAM sequence: TAG
tctacagctgtgagttatgt

SEQ ID NO: 67419 - DNA, 20 bp, Artificial Sequence
  Description of Artificial Sequence: Synthetic oligonucleotide
  Target: LAMA2; (-) strand; PAM type: NRG; PAM sequence: GAG
aaggaaaagtctacagctgt

SEQ ID NO: 67420 - DNA, 20 bp, Artificial Sequence
  Description of Artificial Sequence: Synthetic oligonucleotide
  Target: LAMA2; (-) strand; PAM type: NRG; PAM sequence: CAG
ttattgaaaggaaaagtcta

SEQ ID NO: 67421 - DNA, 20 bp, Artificial Sequence
  Description of Artificial Sequence: Synthetic oligonucleotide
  Target: LAMA2; (-) strand; PAM type: NRG; PAM sequence: AAG
ttgcttattattgaaaggaa

SEQ ID NO: 67422 - DNA, 20 bp, Artificial Sequence
  Description of Artificial Sequence: Synthetic oligonucleotide
  Target: LAMA2; (-) strand; PAM type: NRG; PAM sequence: AGG
tgtttttgcttattattgaa

SEQ ID NO: 67423 - DNA, 20 bp, Artificial Sequence
  Description of Artificial Sequence: Synthetic oligonucleotide
  Target: LAMA2; (-) strand; PAM type: NRG; PAM sequence: AAG
ttgtttttgcttattattga

SEQ ID NO: 67424 - DNA, 20 bp, Artificial Sequence
  Description of Artificial Sequence: Synthetic oligonucleotide
  Target: LAMA2; (-) strand; PAM type: NRG; PAM sequence: TAG
aaagttgtgtcggcggtttg

SEQ ID NO: 67425 - DNA, 20 bp, Artificial Sequence
  Description of Artificial Sequence: Synthetic oligonucleotide
  Target: LAMA2; (-) strand; PAM type: NRG; PAM sequence: CGG
taaatagaaagttgtgtcgg

SEQ ID NO: 67426 - DNA, 20 bp, Artificial Sequence
  Description of Artificial Sequence: Synthetic oligonucleotide
  Target: LAMA2; (-) strand; PAM type: NRG; PAM sequence: CGG
ctttaaatagaaagttgtgt

SEQ ID NO: 67427 - DNA, 20 bp, Artificial Sequence
  Description of Artificial Sequence: Synthetic oligonucleotide
  Target: LAMA2; (-) strand; PAM type: NRG; PAM sequence: AAG
agaagtcctctttaaataga

SEQ ID NO: 67428 - DNA, 20 bp, Artificial Sequence
  Description of Artificial Sequence: Synthetic oligonucleotide
  Target: LAMA2; (-) strand; PAM type: NRG; PAM sequence: TAG
gcaaagaagtcctctttaaa

SEQ ID NO: 67429 - DNA, 20 bp, Artificial Sequence
  Description of Artificial Sequence: Synthetic oligonucleotide
  Target: LAMA2; (-) strand; PAM type: NRG; PAM sequence: AAG
ttattctgcctcctgcaaag

SEQ ID NO: 67430 - DNA, 20 bp, Artificial Sequence
  Description of Artificial Sequence: Synthetic oligonucleotide
  Target: LAMA2; (-) strand; PAM type: NRG; PAM sequence: AAG
ttattattctgcctcctgca

SEQ ID NO: 67431 - DNA, 20 bp, Artificial Sequence
  Description of Artificial Sequence: Synthetic oligonucleotide
  Target: LAMA2; (-) strand; PAM type: NRG; PAM sequence: GAG
gagattctatttattttgtt

SEQ ID NO: 67432 - DNA, 20 bp, Artificial Sequence
  Description of Artificial Sequence: Synthetic oligonucleotide
  Target: LAMA2; (-) strand; PAM type: NRG; PAM sequence: GAG
ataatagtattttgaaatta

SEQ ID NO: 67433 - DNA, 20 bp, Artificial Sequence
  Description of Artificial Sequence: Synthetic oligonucleotide
  Target: LAMA2; (-) strand; PAM type: NRG; PAM sequence: TAG
ggataatagtattttgaaat

SEQ ID NO: 67434 - DNA, 20 bp, Artificial Sequence
  Description of Artificial Sequence: Synthetic oligonucleotide
  Target: LAMA2; (-) strand; PAM type: NRG; PAM sequence: TAG
cccattacttttggggataa

SEQ ID NO: 67435 - DNA, 20 bp, Artificial Sequence
  Description of Artificial Sequence: Synthetic oligonucleotide
  Target: LAMA2; (-) strand; PAM type: NRG; PAM sequence: GGG
taaaattcccattacttttg

SEQ ID NO: 67436 - DNA, 20 bp, Artificial Sequence
  Description of Artificial Sequence: Synthetic oligonucleotide
  Target: LAMA2; (-) strand; PAM type: NRG; PAM sequence: GGG
ttaaaattcccattactttt

SEQ ID NO: 67437 - DNA, 20 bp, Artificial Sequence
  Description of Artificial Sequence: Synthetic oligonucleotide
  Target: LAMA2; (-) strand; PAM type: NRG; PAM sequence: TGG
tttaaaattcccattacttt

SEQ ID NO: 67438 - DNA, 20 bp, Artificial Sequence
  Description of Artificial Sequence: Synthetic oligonucleotide
  Target: LAMA2; (-) strand; PAM type: NRG; PAM sequence: TGG
gtgttcttaaatatctaaac

SEQ ID NO: 67439 - DNA, 20 bp, Artificial Sequence
  Description of Artificial Sequence: Synthetic oligonucleotide
  Target: LAMA2; (-) strand; PAM type: NRG; PAM sequence: TGG
atttggcatgtagatgtgag

SEQ ID NO: 67440 - DNA, 20 bp, Artificial Sequence
  Description of Artificial Sequence: Synthetic oligonucleotide
  Target: LAMA2; (-) strand; PAM type: NRG; PAM sequence: GAG
tttatttggcatgtagatgt

SEQ ID NO: 67441 - DNA, 20 bp, Artificial Sequence
  Description of Artificial Sequence: Synthetic oligonucleotide
  Target: LAMA2; (-) strand; PAM type: NRG; PAM sequence: TAG
gagtcaatttatttggcatg

SEQ ID NO: 67442 - DNA, 20 bp, Artificial Sequence
  Description of Artificial Sequence: Synthetic oligonucleotide
  Target: LAMA2; (-) strand; PAM type: NRG; PAM sequence: TGG
gagggtggagtcaatttatt

SEQ ID NO: 67443 - DNA, 20 bp, Artificial Sequence
  Description of Artificial Sequence: Synthetic oligonucleotide
  Target: LAMA2; (-) strand; PAM type: NRG; PAM sequence: GAG
gatataacgggtggagggtg

SEQ ID NO: 67444 - DNA, 20 bp, Artificial Sequence
  Description of Artificial Sequence: Synthetic oligonucleotide
  Target: LAMA2; (-) strand; PAM type: NRG; PAM sequence: TGG
ctgatataacgggtggaggg

SEQ ID NO: 67445 - DNA, 20 bp, Artificial Sequence
  Description of Artificial Sequence: Synthetic oligonucleotide
  Target: LAMA2; (-) strand; PAM type: NRG; PAM sequence: GGG
gccctgatataacgggtgga

SEQ ID NO: 67446 - DNA, 20 bp, Artificial Sequence
  Description of Artificial Sequence: Synthetic oligonucleotide
  Target: LAMA2; (-) strand; PAM type: NRG; PAM sequence: AGG
ggccctgatataacgggtgg

SEQ ID NO: 67447 - DNA, 20 bp, Artificial Sequence
  Description of Artificial Sequence: Synthetic oligonucleotide
  Target: LAMA2; (-) strand; PAM type: NRG; PAM sequence: GAG
gggccctgatataacgggtg

SEQ ID NO: 67448 - DNA, 20 bp, Artificial Sequence
  Description of Artificial Sequence: Synthetic oligonucleotide
  Target: LAMA2; (-) strand; PAM type: NRG; PAM sequence: TGG
tggggccctgatataacggg

SEQ ID NO: 67449 - DNA, 20 bp, Artificial Sequence
  Description of Artificial Sequence: Synthetic oligonucleotide
  Target: LAMA2; (-) strand; PAM type: NRG; PAM sequence: GGG
gagtggggccctgatataac

SEQ ID NO: 67450 - DNA, 20 bp, Artificial Sequence
  Description of Artificial Sequence: Synthetic oligonucleotide
  Target: LAMA2; (-) strand; PAM type: NRG; PAM sequence: CGG
ggagtggggccctgatataa

SEQ ID NO: 67451 - DNA, 20 bp, Artificial Sequence
  Description of Artificial Sequence: Synthetic oligonucleotide
  Target: LAMA2; (-) strand; PAM type: NRG; PAM sequence: GGG
aaaagacaatggatggagtg

SEQ ID NO: 67452 - DNA, 20 bp, Artificial Sequence
  Description of Artificial Sequence: Synthetic oligonucleotide
  Target: LAMA2; (-) strand; PAM type: NRG; PAM sequence: GGG
aaaaagacaatggatggagt

SEQ ID NO: 67453 - DNA, 20 bp, Artificial Sequence
  Description of Artificial Sequence: Synthetic oligonucleotide
  Target: LAMA2; (-) strand; PAM type: NRG; PAM sequence: TGG
aaaaaagacaatggatggag

SEQ ID NO: 67454 - DNA, 20 bp, Artificial Sequence
  Description of Artificial Sequence: Synthetic oligonucleotide
  Target: LAMA2; (-) strand; PAM type: NRG; PAM sequence: GAG
aagaaaaaagacaatggatg

SEQ ID NO: 67455 - DNA, 20 bp, Artificial Sequence
  Description of Artificial Sequence: Synthetic oligonucleotide
  Target: LAMA2; (-) strand; PAM type: NRG; PAM sequence: TGG
ctaagaaaaaagacaatgga

SEQ ID NO: 67456 - DNA, 20 bp, Artificial Sequence
  Description of Artificial Sequence: Synthetic oligonucleotide
  Target: LAMA2; (-) strand; PAM type: NRG; PAM sequence: TGG
ataactaagaaaaaagacaa

SEQ ID NO: 67457 - DNA, 20 bp, Artificial Sequence
  Description of Artificial Sequence: Synthetic oligonucleotide
  Target: LAMA2; (-) strand; PAM type: NRG; PAM sequence: AAG
tcaagatataactaagaaaa

SEQ ID NO: 67458 - DNA, 20 bp, Artificial Sequence
  Description of Artificial Sequence: Synthetic oligonucleotide
  Target: LAMA2; (-) strand; PAM type: NRG; PAM sequence: AAG
tgacatatcaagatataact

SEQ ID NO: 67459 - DNA, 20 bp, Artificial Sequence
  Description of Artificial Sequence: Synthetic oligonucleotide
  Target: LAMA2; (-) strand; PAM type: NRG; PAM sequence: AAG
aactaatagggtgacatatc

SEQ ID NO: 67460 - DNA, 20 bp, Artificial Sequence
  Description of Artificial Sequence: Synthetic oligonucleotide
  Target: LAMA2; (-) strand; PAM type: NRG; PAM sequence: GGG
ctgcaaggaaaaaactaata

SEQ ID NO: 67461 - DNA, 20 bp, Artificial Sequence
  Description of Artificial Sequence: Synthetic oligonucleotide
  Target: LAMA2; (-) strand; PAM type: NRG; PAM sequence: AGG
gctgcaaggaaaaaactaat

SEQ ID NO: 67462 - DNA, 20 bp, Artificial Sequence
  Description of Artificial Sequence: Synthetic oligonucleotide
  Target: LAMA2; (-) strand; PAM type: NRG; PAM sequence: TAG
tgctgcaaggaaaaaactaa

SEQ ID NO: 67463 - DNA, 20 bp, Artificial Sequence
  Description of Artificial Sequence: Synthetic oligonucleotide
  Target: LAMA2; (-) strand; PAM type: NRG; PAM sequence: AGG
gaagcaagtgaaatgctgca

SEQ ID NO: 67464 - DNA, 20 bp, Artificial Sequence
  Description of Artificial Sequence: Synthetic oligonucleotide
  Target: LAMA2; (-) strand; PAM type: NRG; PAM sequence: AAG
agaagcaagtgaaatgctgc

SEQ ID NO: 67465 - DNA, 20 bp, Artificial Sequence
  Description of Artificial Sequence: Synthetic oligonucleotide
  Target: LAMA2; (-) strand; PAM type: NRG; PAM sequence: AAG
gtttaaaaaaagcaagaagc

SEQ ID NO: 67466 - DNA, 20 bp, Artificial Sequence
  Description of Artificial Sequence: Synthetic oligonucleotide
  Target: LAMA2; (-) strand; PAM type: NRG; PAM sequence: AAG
ttttgtttaaaaaaagcaag

SEQ ID NO: 67467 - DNA, 20 bp, Artificial Sequence
  Description of Artificial Sequence: Synthetic oligonucleotide
  Target: LAMA2; (-) strand; PAM type: NRG; PAM sequence: AAG
aatttttgtttaaaaaaagc

SEQ ID NO: 67468 - DNA, 20 bp, Artificial Sequence
  Description of Artificial Sequence: Synthetic oligonucleotide
  Target: LAMA2; (-) strand; PAM type: NRG; PAM sequence: AAG
cataaatttttgtttaaaaa

SEQ ID NO: 67469 - DNA, 20 bp, Artificial Sequence
  Description of Artificial Sequence: Synthetic oligonucleotide
  Target: LAMA2; (-) strand; PAM type: NRG; PAM sequence: TAG
gaacatggatgcagggaggg

SEQ ID NO: 67470 - DNA, 20 bp, Artificial Sequence
  Description of Artificial Sequence: Synthetic oligonucleotide
  Target: LAMA2; (-) strand; PAM type: NRG; PAM sequence: GGG
caggaacatggatgcaggga

SEQ ID NO: 67471 - DNA, 20 bp, Artificial Sequence
  Description of Artificial Sequence: Synthetic oligonucleotide
  Target: LAMA2; (-) strand; PAM type: NRG; PAM sequence: AGG
gcaggaacatggatgcaggg

SEQ ID NO: 67472 - DNA, 20 bp, Artificial Sequence
  Description of Artificial Sequence: Synthetic oligonucleotide
  Target: LAMA2; (-) strand; PAM type: NRG; PAM sequence: GAG
agcaggaacatggatgcagg

SEQ ID NO: 67473 - DNA, 20 bp, Artificial Sequence
  Description of Artificial Sequence: Synthetic oligonucleotide
  Target: LAMA2; (-) strand; PAM type: NRG; PAM sequence: GGG
gcagcaggaacatggatgca

SEQ ID NO: 67474 - DNA, 20 bp, Artificial Sequence
  Description of Artificial Sequence: Synthetic oligonucleotide
  Target: LAMA2; (-) strand; PAM type: NRG; PAM sequence: AGG
ggcagcaggaacatggatgc

SEQ ID NO: 67475 - DNA, 20 bp, Artificial Sequence
  Description of Artificial Sequence: Synthetic oligonucleotide
  Target: LAMA2; (-) strand; PAM type: NRG; PAM sequence: CAG
aggcagcaggaacatggatg

SEQ ID NO: 67476 - DNA, 20 bp, Artificial Sequence
  Description of Artificial Sequence: Synthetic oligonucleotide
  Target: LAMA2; (-) strand; PAM type: NRG; PAM sequence: TGG
aatatgaggcagcaggaaca

SEQ ID NO: 67477 - DNA, 20 bp, Artificial Sequence
  Description of Artificial Sequence: Synthetic oligonucleotide
  Target: LAMA2; (-) strand; PAM type: NRG; PAM sequence: AGG
atgaatgaatatgaggcagc

SEQ ID NO: 67478 - DNA, 20 bp, Artificial Sequence
  Description of Artificial Sequence: Synthetic oligonucleotide
  Target: LAMA2; (-) strand; PAM type: NRG; PAM sequence: CAG
aatgaatgaatatgaggcag

SEQ ID NO: 67479 - DNA, 20 bp, Artificial Sequence
  Description of Artificial Sequence: Synthetic oligonucleotide
  Target: LAMA2; (-) strand; PAM type: NRG; PAM sequence: CAG
aagaatgaatgaatatgagg

SEQ ID NO: 67480 - DNA, 20 bp, Artificial Sequence
  Description of Artificial Sequence: Synthetic oligonucleotide
  Target: LAMA2; (-) strand; PAM type: NRG; PAM sequence: AGG
ctgaagaatgaatgaatatg

SEQ ID NO: 67481 - DNA, 20 bp, Artificial Sequence
  Description of Artificial Sequence: Synthetic oligonucleotide
  Target: LAMA2; (-) strand; PAM type: NRG; PAM sequence: GAG
gctgaagaatgaatgaatat

SEQ ID NO: 67482 - DNA, 20 bp, Artificial Sequence
  Description of Artificial Sequence: Synthetic oligonucleotide
  Target: LAMA2; (-) strand; PAM type: NRG; PAM sequence: AAG
atgctgattgccaccagctg

SEQ ID NO: 67483 - DNA, 20 bp, Artificial Sequence
  Description of Artificial Sequence: Synthetic oligonucleotide
  Target: LAMA2; (-) strand; PAM type: NRG; PAM sequence: CAG
aactgaatgctgattgccac

SEQ ID NO: 67484 - DNA, 20 bp, Artificial Sequence
  Description of Artificial Sequence: Synthetic oligonucleotide
  Target: LAMA2; (-) strand; PAM type: NRG; PAM sequence: GAG
tttaataacagttttatgga

SEQ ID NO: 67485 - DNA, 20 bp, Artificial Sequence
  Description of Artificial Sequence: Synthetic oligonucleotide
  Target: LAMA2; (-) strand; PAM type: NRG; PAM sequence: GAG
gatttaataacagttttatg

SEQ ID NO: 67486 - DNA, 20 bp, Artificial Sequence
  Description of Artificial Sequence: Synthetic oligonucleotide
  Target: LAMA2; (-) strand; PAM type: NRG; PAM sequence: TGG
tggatttaataacagtttta

SEQ ID NO: 67487 - DNA, 20 bp, Artificial Sequence
  Description of Artificial Sequence: Synthetic oligonucleotide
  Target: LAMA2; (-) strand; PAM type: NRG; PAM sequence: CAG
aggcttattggatttaataa

SEQ ID NO: 67488 - DNA, 20 bp, Artificial Sequence
  Description of Artificial Sequence: Synthetic oligonucleotide
  Target: LAMA2; (-) strand; PAM type: NRG; PAM sequence: TGG
ttcagaaatgaaaggcttat

SEQ ID NO: 67489 - DNA, 20 bp, Artificial Sequence
  Description of Artificial Sequence: Synthetic oligonucleotide
  Target: LAMA2; (-) strand; PAM type: NRG; PAM sequence: AGG
tcacttgattcagaaatgaa

SEQ ID NO: 67490 - DNA, 20 bp, Artificial Sequence
  Description of Artificial Sequence: Synthetic oligonucleotide
  Target: LAMA2; (-) strand; PAM type: NRG; PAM sequence: AAG
ttcacttgattcagaaatga

SEQ ID NO: 67491 - DNA, 20 bp, Artificial Sequence
  Description of Artificial Sequence: Synthetic oligonucleotide
  Target: LAMA2; (-) strand; PAM type: NRG; PAM sequence: CAG
agaaaaatcttcacttgatt

SEQ ID NO: 67492 - DNA, 20 bp, Artificial Sequence
  Description of Artificial Sequence: Synthetic oligonucleotide
  Target: LAMA2; (-) strand; PAM type: NRG; PAM sequence: GAG
taaagaattcagcaaagata

SEQ ID NO: 67493 - DNA, 20 bp, Artificial Sequence
  Description of Artificial Sequence: Synthetic oligonucleotide
  Target: LAMA2; (-) strand; PAM type: NRG; PAM sequence: TAG
cataaagaattcagcaaaga

SEQ ID NO: 67494 - DNA, 20 bp, Artificial Sequence
  Description of Artificial Sequence: Synthetic oligonucleotide
  Target: LAMA2; (-) strand; PAM type: NRG; PAM sequence: AAG
atgccataaagaattcagca

SEQ ID NO: 67495 - DNA, 20 bp, Artificial Sequence
  Description of Artificial Sequence: Synthetic oligonucleotide
  Target: LAMA2; (-) strand; PAM type: NRG; PAM sequence: CAG
gttaaatgccataaagaatt

SEQ ID NO: 67496 - DNA, 20 bp, Artificial Sequence
  Description of Artificial Sequence: Synthetic oligonucleotide
  Target: LAMA2; (-) strand; PAM type: NRG; PAM sequence: AAG
aagacatgttaaatgccata

SEQ ID NO: 67497 - DNA, 20 bp, Artificial Sequence
  Description of Artificial Sequence: Synthetic oligonucleotide
  Target: LAMA2; (-) strand; PAM type: NRG; PAM sequence: AAG
ccaaagaaagatggagtgaa

SEQ ID NO: 67498 - DNA, 20 bp, Artificial Sequence
  Description of Artificial Sequence: Synthetic oligonucleotide
  Target: LAMA2; (-) strand; PAM type: NRG; PAM sequence: GAG
agagtccccaaagaaagatg

SEQ ID NO: 67499 - DNA, 20 bp, Artificial Sequence
  Description of Artificial Sequence: Synthetic oligonucleotide
  Target: LAMA2; (-) strand; PAM type: NRG; PAM sequence: TGG
agagagtccccaaagaaaga

SEQ ID NO: 67500 - DNA, 20 bp, Artificial Sequence
  Description of Artificial Sequence: Synthetic oligonucleotide
  Target: LAMA2; (-) strand; PAM type: NRG; PAM sequence: AAG
tggaagagagtccccaaaga

SEQ ID NO: 67501 - DNA, 20 bp, Artificial Sequence
  Description of Artificial Sequence: Synthetic oligonucleotide
  Target: LAMA2; (-) strand; PAM type: NRG; PAM sequence: AAG
gtcatggaagagagtcccca

SEQ ID NO: 67502 - DNA, 20 bp, Artificial Sequence
  Description of Artificial Sequence: Synthetic oligonucleotide
  Target: LAMA2; (-) strand; PAM type: NRG; PAM sequence: GAG
gtcttagaagtcatggaaga

SEQ ID NO: 67503 - DNA, 20 bp, Artificial Sequence
  Description of Artificial Sequence: Synthetic oligonucleotide
  Target: LAMA2; (-) strand; PAM type: NRG; PAM sequence: GAG
ttgtcttagaagtcatggaa

SEQ ID NO: 67504 - DNA, 20 bp, Artificial Sequence
  Description of Artificial Sequence: Synthetic oligonucleotide
  Target: LAMA2; (-) strand; PAM type: NRG; PAM sequence: AAG
tgttgtcttagaagtcatgg

SEQ ID NO: 67505 - DNA, 20 bp, Artificial Sequence
  Description of Artificial Sequence: Synthetic oligonucleotide
  Target: LAMA2; (-) strand; PAM type: NRG; PAM sequence: TGG
aagtgttgtcttagaagtca

SEQ ID NO: 67506 - DNA, 20 bp, Artificial Sequence
  Description of Artificial Sequence: Synthetic oligonucleotide
  Target: LAMA2; (-) strand; PAM type: NRG; PAM sequence: AAG
attaaaaagtgttgtcttag

SEQ ID NO: 67507 - DNA, 20 bp, Artificial Sequence
  Description of Artificial Sequence: Synthetic oligonucleotide
  Target: LAMA2; (-) strand; PAM type: NRG; PAM sequence: TAG
agaattaaaaagtgttgtct

SEQ ID NO: 67508 - DNA, 20 bp, Artificial Sequence
  Description of Artificial Sequence: Synthetic oligonucleotide
  Target: LAMA2; (-) strand; PAM type: NRG; PAM sequence: AAG
aatggtggaagagaattaaa

SEQ ID NO: 67509 - DNA, 20 bp, Artificial Sequence
  Description of Artificial Sequence: Synthetic oligonucleotide
  Target: LAMA2; (-) strand; PAM type: NRG; PAM sequence: GAG
acaaacctaaaatggtggaa

SEQ ID NO: 67510 - DNA, 20 bp, Artificial Sequence
  Description of Artificial Sequence: Synthetic oligonucleotide
  Target: LAMA2; (-) strand; PAM type: NRG; PAM sequence: AAG
agacaaacctaaaatggtgg

SEQ ID NO: 67511 - DNA, 20 bp, Artificial Sequence
  Description of Artificial Sequence: Synthetic oligonucleotide
  Target: LAMA2; (-) strand; PAM type: NRG; PAM sequence: TGG
caaagacaaacctaaaatgg

SEQ ID NO: 67512 - DNA, 20 bp, Artificial Sequence
  Description of Artificial Sequence: Synthetic oligonucleotide
  Target: LAMA2; (-) strand; PAM type: NRG; PAM sequence: TGG
ctacaaagacaaacctaaaa

SEQ ID NO: 67513 - DNA, 20 bp, Artificial Sequence
  Description of Artificial Sequence: Synthetic oligonucleotide
  Target: LAMA2; (-) strand; PAM type: NRG; PAM sequence: AAG
atctataaaggttacctaca

SEQ ID NO: 67514 - DNA, 20 bp, Artificial Sequence
  Description of Artificial Sequence: Synthetic oligonucleotide
  Target: LAMA2; (-) strand; PAM type: NRG; PAM sequence: AGG
ttacacagaagaatctataa

SEQ ID NO: 67515 - DNA, 20 bp, Artificial Sequence
  Description of Artificial Sequence: Synthetic oligonucleotide
  Target: LAMA2; (-) strand; PAM type: NRG; PAM sequence: AAG
attacacagaagaatctata

SEQ ID NO: 67516 - DNA, 20 bp, Artificial Sequence
  Description of Artificial Sequence: Synthetic oligonucleotide
  Target: LAMA2; (-) strand; PAM type: NRG; PAM sequence: AAG
ggtatgtaaggattacacag

SEQ ID NO: 67517 - DNA, 20 bp, Artificial Sequence
  Description of Artificial Sequence: Synthetic oligonucleotide
  Target: LAMA2; (-) strand; PAM type: NRG; PAM sequence: CAG
attggtatgtaaggattaca

SEQ ID NO: 67518 - DNA, 20 bp, Artificial Sequence
  Description of Artificial Sequence: Synthetic oligonucleotide
  Target: LAMA2; (-) strand; PAM type: NRG; PAM sequence: AGG
attcagaacattggtatgta

SEQ ID NO: 67519 - DNA, 20 bp, Artificial Sequence
  Description of Artificial Sequence: Synthetic oligonucleotide
  Target: LAMA2; (-) strand; PAM type: NRG; PAM sequence: AAG
aattcagaacattggtatgt

SEQ ID NO: 67520 - DNA, 20 bp, Artificial Sequence
  Description of Artificial Sequence: Synthetic oligonucleotide
  Target: LAMA2; (-) strand; PAM type: NRG; PAM sequence: TGG
cagaatggaattcagaacat

SEQ ID NO: 67521 - DNA, 20 bp, Artificial Sequence
  Description of Artificial Sequence: Synthetic oligonucleotide
  Target: LAMA2; (-) strand; PAM type: NRG; PAM sequence: CAG
aagaggagcagaatggaatt

SEQ ID NO: 67522 - DNA, 20 bp, Artificial Sequence
  Description of Artificial Sequence: Synthetic oligonucleotide
  Target: LAMA2; (-) strand; PAM type: NRG; PAM sequence: TGG
atggaaaaagaggagcagaa

SEQ ID NO: 67523 - DNA, 20 bp, Artificial Sequence
  Description of Artificial Sequence: Synthetic oligonucleotide
  Target: LAMA2; (-) strand; PAM type: NRG; PAM sequence: CAG
atggaatggaaaaagaggag

SEQ ID NO: 67524 - DNA, 20 bp, Artificial Sequence
  Description of Artificial Sequence: Synthetic oligonucleotide
  Target: LAMA2; (-) strand; PAM type: NRG; PAM sequence: GAG
tctatggaatggaaaaagag

SEQ ID NO: 67525 - DNA, 20 bp, Artificial Sequence
  Description of Artificial Sequence: Synthetic oligonucleotide
  Target: LAMA2; (-) strand; PAM type: NRG; PAM sequence: AGG
actctatggaatggaaaaag

SEQ ID NO: 67526 - DNA, 20 bp, Artificial Sequence
  Description of Artificial Sequence: Synthetic oligonucleotide
  Target: LAMA2; (-) strand; PAM type: NRG; PAM sequence: GAG
gactctatggaatggaaaaa

SEQ ID NO: 67527 - DNA, 20 bp, Artificial Sequence
  Description of Artificial Sequence: Synthetic oligonucleotide
  Target: LAMA2; (-) strand; PAM type: NRG; PAM sequence: AAG
cagactctatggaatggaaa

SEQ ID NO: 67528 - DNA, 20 bp, Artificial Sequence
  Description of Artificial Sequence: Synthetic oligonucleotide
  Target: LAMA2; (-) strand; PAM type: NRG; PAM sequence: TGG
cacaatcagactctatggaa

SEQ ID NO: 67529 - DNA, 20 bp, Artificial Sequence
  Description of Artificial Sequence: Synthetic oligonucleotide
  Target: LAMA2; (-) strand; PAM type: NRG; PAM sequence: TGG
aagtacacaatcagactcta

SEQ ID NO: 67530 - DNA, 20 bp, Artificial Sequence
  Description of Artificial Sequence: Synthetic oligonucleotide
  Target: LAMA2; (-) strand; PAM type: NRG; PAM sequence: CAG
agtgtttgcaagtacacaat

SEQ ID NO: 67531 - DNA, 20 bp, Artificial Sequence
  Description of Artificial Sequence: Synthetic oligonucleotide
  Target: LAMA2; (-) strand; PAM type: NRG; PAM sequence: AAG
gataccatggaagtgtttgc

SEQ ID NO: 67532 - DNA, 20 bp, Artificial Sequence
  Description of Artificial Sequence: Synthetic oligonucleotide
  Target: LAMA2; (-) strand; PAM type: NRG; PAM sequence: AAG
acttgaaatagataccatgg

SEQ ID NO: 67533 - DNA, 20 bp, Artificial Sequence
  Description of Artificial Sequence: Synthetic oligonucleotide
  Target: LAMA2; (-) strand; PAM type: NRG; PAM sequence: TGG
tacacttgaaatagatacca

SEQ ID NO: 67534 - DNA, 20 bp, Artificial Sequence
  Description of Artificial Sequence: Synthetic oligonucleotide
  Target: LAMA2; (-) strand; PAM type: NRG; PAM sequence: TAG
ttttcaaaatacacttgaaa

SEQ ID NO: 67535 - DNA, 20 bp, Artificial Sequence
  Description of Artificial Sequence: Synthetic oligonucleotide
  Target: LAMA2; (-) strand; PAM type: NRG; PAM sequence: TAG
caagttgaaagcctagatgt

SEQ ID NO: 67536 - DNA, 20 bp, Artificial Sequence
  Description of Artificial Sequence: Synthetic oligonucleotide
  Target: LAMA2; (-) strand; PAM type: NRG; PAM sequence: TAG
aacagatcaagttgaaagcc

SEQ ID NO: 67537 - DNA, 20 bp, Artificial Sequence
  Description of Artificial Sequence: Synthetic oligonucleotide
  Target: LAMA2; (-) strand; PAM type: NRG; PAM sequence: AAG
agtacaacagatcaagttga

SEQ ID NO: 67538 - DNA, 20 bp, Artificial Sequence
  Description of Artificial Sequence: Synthetic oligonucleotide
  Target: LAMA2; (-) strand; PAM type: NRG; PAM sequence: AAG
tacagaaagtacaacagatc

SEQ ID NO: 67539 - DNA, 20 bp, Artificial Sequence
  Description of Artificial Sequence: Synthetic oligonucleotide
  Target: LAMA2; (-) strand; PAM type: NRG; PAM sequence: CAG
atagaatacagaaagtacaa

SEQ ID NO: 67540 - DNA, 20 bp, Artificial Sequence
  Description of Artificial Sequence: Synthetic oligonucleotide
  Target: LAMA2; (-) strand; PAM type: NRG; PAM sequence: AAG
actcaggtatagaatacaga

SEQ ID NO: 67541 - DNA, 20 bp, Artificial Sequence
  Description of Artificial Sequence: Synthetic oligonucleotide
  Target: LAMA2; (-) strand; PAM type: NRG; PAM sequence: CAG
tgacactcaggtatagaata

SEQ ID NO: 67542 - DNA, 20 bp, Artificial Sequence
  Description of Artificial Sequence: Synthetic oligonucleotide
  Target: LAMA2; (-) strand; PAM type: NRG; PAM sequence: TAG
tctttgctgacactcaggta

SEQ ID NO: 67543 - DNA, 20 bp, Artificial Sequence
  Description of Artificial Sequence: Synthetic oligonucleotide
  Target: LAMA2; (-) strand; PAM type: NRG; PAM sequence: AGG
aggcgtctttgctgacactc

SEQ ID NO: 67544 - DNA, 20 bp, Artificial Sequence
  Description of Artificial Sequence: Synthetic oligonucleotide
  Target: LAMA2; (-) strand; PAM type: NRG; PAM sequence: CAG
caggcgtctttgctgacact

SEQ ID NO: 67545 - DNA, 20 bp, Artificial Sequence
  Description of Artificial Sequence: Synthetic oligonucleotide
  Target: LAMA2; (-) strand; PAM type: NRG; PAM sequence: AGG
aagactcaaagacagctccc

SEQ ID NO: 67546 - DNA, 20 bp, Artificial Sequence
  Description of Artificial Sequence: Synthetic oligonucleotide
  Target: LAMA2; (-) strand; PAM type: NRG; PAM sequence: CAG
gaagactcaaagacagctcc

SEQ ID NO: 67547 - DNA, 20 bp, Artificial Sequence
  Description of Artificial Sequence: Synthetic oligonucleotide
  Target: LAMA2; (-) strand; PAM type: NRG; PAM sequence: CAG
agagaaggaagactcaaaga

SEQ ID NO: 67548 - DNA, 20 bp, Artificial Sequence
  Description of Artificial Sequence: Synthetic oligonucleotide
  Target: LAMA2; (-) strand; PAM type: NRG; PAM sequence: AAG
taagagagaaggaagactca

SEQ ID NO: 67549 - DNA, 20 bp, Artificial Sequence
  Description of Artificial Sequence: Synthetic oligonucleotide
  Target: LAMA2; (-) strand; PAM type: NRG; PAM sequence: AAG
tatggaggtaagagagaagg

SEQ ID NO: 67550 - DNA, 20 bp, Artificial Sequence
  Description of Artificial Sequence: Synthetic oligonucleotide
  Target: LAMA2; (-) strand; PAM type: NRG; PAM sequence: AGG
aaatatggaggtaagagaga

SEQ ID NO: 67551 - DNA, 20 bp, Artificial Sequence
  Description of Artificial Sequence: Synthetic oligonucleotide
  Target: LAMA2; (-) strand; PAM type: NRG; PAM sequence: AAG
taaatatggaggtaagagag

SEQ ID NO: 67552 - DNA, 20 bp, Artificial Sequence
  Description of Artificial Sequence: Synthetic oligonucleotide
  Target: LAMA2; (-) strand; PAM type: NRG; PAM sequence: GAG
cattaaatatggaggtaaga

SEQ ID NO: 67553 - DNA, 20 bp, Artificial Sequence
  Description of Artificial Sequence: Synthetic oligonucleotide
  Target: LAMA2; (-) strand; PAM type: NRG; PAM sequence: GAG
tccattaaatatggaggtaa

SEQ ID NO: 67554 - DNA, 20 bp, Artificial Sequence
  Description of Artificial Sequence: Synthetic oligonucleotide
  Target: LAMA2; (-) strand; PAM type: NRG; PAM sequence: AAG
aatccattaaatatggaggt

SEQ ID NO: 67555 - DNA, 20 bp, Artificial Sequence
  Description of Artificial Sequence: Synthetic oligonucleotide
  Target: LAMA2; (-) strand; PAM type: NRG; PAM sequence: AGG
tggtaatccattaaatatgg

SEQ ID NO: 67556 - DNA, 20 bp, Artificial Sequence
  Description of Artificial Sequence: Synthetic oligonucleotide
  Target: LAMA2; (-) strand; PAM type: NRG; PAM sequence: GAG
atggtaatccattaaatatg

SEQ ID NO: 67557 - DNA, 20 bp, Artificial Sequence
  Description of Artificial Sequence: Synthetic oligonucleotide
  Target: LAMA2; (-) strand; PAM type: NRG; PAM sequence: TGG
gaatggtaatccattaaata

SEQ ID NO: 67558 - DNA, 20 bp, Artificial Sequence
  Description of Artificial Sequence: Synthetic oligonucleotide
  Target: LAMA2; (-) strand; PAM type: NRG; PAM sequence: TGG
gaaggtaaaatcaatgagaa

SEQ ID NO: 67559 - DNA, 20 bp, Artificial Sequence
  Description of Artificial Sequence: Synthetic oligonucleotide
  Target: LAMA2; (-) strand; PAM type: NRG; PAM sequence: GAG
attaagaaggtaaaatcaat

SEQ ID NO: 67560 - DNA, 20 bp, Artificial Sequence
  Description of Artificial Sequence: Synthetic oligonucleotide
  Target: LAMA2; (-) strand; PAM type: NRG; PAM sequence: AGG
caatttaagagaaattaaga

SEQ ID NO: 67561 - DNA, 20 bp, Artificial Sequence
  Description of Artificial Sequence: Synthetic oligonucleotide
  Target: LAMA2; (-) strand; PAM type: NRG; PAM sequence: AAG
tcaatttaagagaaattaag

SEQ ID NO: 67562 - DNA, 20 bp, Artificial Sequence
  Description of Artificial Sequence: Synthetic oligonucleotide
  Target: LAMA2; (-) strand; PAM type: NRG; PAM sequence: AAG
aaatcaatttaagagaaatt

SEQ ID NO: 67563 - DNA, 20 bp, Artificial Sequence
  Description of Artificial Sequence: Synthetic oligonucleotide
  Target: LAMA2; (-) strand; PAM type: NRG; PAM sequence: GAG
gagaaagaaaatcaatttaa

SEQ ID NO: 67564 - DNA, 20 bp, Artificial Sequence
  Description of Artificial Sequence: Synthetic oligonucleotide
  Target: LAMA2; (-) strand; PAM type: NRG; PAM sequence: AAG
tagagaaagaaaatcaattt

SEQ ID NO: 67565 - DNA, 20 bp, Artificial Sequence
  Description of Artificial Sequence: Synthetic oligonucleotide
  Target: LAMA2; (-) strand; PAM type: NRG; PAM sequence: AAG
actaacattaggtatagaga

SEQ ID NO: 67566 - DNA, 20 bp, Artificial Sequence
  Description of Artificial Sequence: Synthetic oligonucleotide
  Target: LAMA2; (-) strand; PAM type: NRG; PAM sequence: GAG
aggtactaacattaggtata

SEQ ID NO: 67567 - DNA, 20 bp, Artificial Sequence
  Description of Artificial Sequence: Synthetic oligonucleotide
  Target: LAMA2; (-) strand; PAM type: NRG; PAM sequence: TAG
aaaggtactaacattaggta

SEQ ID NO: 67568 - DNA, 20 bp, Artificial Sequence
  Description of Artificial Sequence: Synthetic oligonucleotide
  Target: LAMA2; (-) strand; PAM type: NRG; PAM sequence: AGG
ggcggaaaggtactaacatt

SEQ ID NO: 67569 - DNA, 20 bp, Artificial Sequence
  Description of Artificial Sequence: Synthetic oligonucleotide
  Target: LAMA2; (-) strand; PAM type: NRG; PAM sequence: TAG
tggcggaaaggtactaacat

SEQ ID NO: 67570 - DNA, 20 bp, Artificial Sequence
  Description of Artificial Sequence: Synthetic oligonucleotide
  Target: LAMA2; (-) strand; PAM type: NRG; PAM sequence: AGG
cagatagaaacatggcggaa

SEQ ID NO: 67571 - DNA, 20 bp, Artificial Sequence
  Description of Artificial Sequence: Synthetic oligonucleotide
  Target: LAMA2; (-) strand; PAM type: NRG; PAM sequence: AAG
ccagatagaaacatggcgga

SEQ ID NO: 67572 - DNA, 20 bp, Artificial Sequence
  Description of Artificial Sequence: Synthetic oligonucleotide
  Target: LAMA2; (-) strand; PAM type: NRG; PAM sequence: CGG
taaaccagatagaaacatgg

SEQ ID NO: 67573 - DNA, 20 bp, Artificial Sequence
  Description of Artificial Sequence: Synthetic oligonucleotide
  Target: LAMA2; (-) strand; PAM type: NRG; PAM sequence: TGG
atgtaaaccagatagaaaca

SEQ ID NO: 67574 - DNA, 20 bp, Artificial Sequence
  Description of Artificial Sequence: Synthetic oligonucleotide
  Target: LAMA2; (-) strand; PAM type: NRG; PAM sequence: TAG
ttccagcaatgtaaaccaga

SEQ ID NO: 67575 - DNA, 20 bp, Artificial Sequence
  Description of Artificial Sequence: Synthetic oligonucleotide
  Target: LAMA2; (-) strand; PAM type: NRG; PAM sequence: CAG
gctgttccagcaatgtaaac

SEQ ID NO: 67576 - DNA, 20 bp, Artificial Sequence
  Description of Artificial Sequence: Synthetic oligonucleotide
  Target: LAMA2; (-) strand; PAM type: NRG; PAM sequence: CAG
tagcaaatcaggtgctgttc

SEQ ID NO: 67577 - DNA, 20 bp, Artificial Sequence
  Description of Artificial Sequence: Synthetic oligonucleotide
  Target: LAMA2; (-) strand; PAM type: NRG; PAM sequence: AGG
taagaacaagatagcaaatc

SEQ ID NO: 67578 - DNA, 20 bp, Artificial Sequence
  Description of Artificial Sequence: Synthetic oligonucleotide
  Target: LAMA2; (-) strand; PAM type: NRG; PAM sequence: CAG
ctaagaacaagatagcaaat

SEQ ID NO: 67579 - DNA, 20 bp, Artificial Sequence
  Description of Artificial Sequence: Synthetic oligonucleotide
  Target: LAMA2; (-) strand; PAM type: NRG; PAM sequence: TAG
tggcaagactaagaacaaga

SEQ ID NO: 67580 - DNA, 20 bp, Artificial Sequence
  Description of Artificial Sequence: Synthetic oligonucleotide
  Target: LAMA2; (-) strand; PAM type: NRG; PAM sequence: AAG
gggatggcaagactaagaac

SEQ ID NO: 67581 - DNA, 20 bp, Artificial Sequence
  Description of Artificial Sequence: Synthetic oligonucleotide
  Target: LAMA2; (-) strand; PAM type: NRG; PAM sequence: AAG
taagttgggatggcaagact

SEQ ID NO: 67582 - DNA, 20 bp, Artificial Sequence
  Description of Artificial Sequence: Synthetic oligonucleotide
  Target: LAMA2; (-) strand; PAM type: NRG; PAM sequence: AAG
atggactaagttgggatggc

SEQ ID NO: 67583 - DNA, 20 bp, Artificial Sequence
  Description of Artificial Sequence: Synthetic oligonucleotide
  Target: LAMA2; (-) strand; PAM type: NRG; PAM sequence: TGG
aggaatggactaagttggga

SEQ ID NO: 67584 - DNA, 20 bp, Artificial Sequence
  Description of Artificial Sequence: Synthetic oligonucleotide
  Target: LAMA2; (-) strand; PAM type: NRG; PAM sequence: GGG
tcagaggaatggactaagtt

SEQ ID NO: 67585 - DNA, 20 bp, Artificial Sequence
  Description of Artificial Sequence: Synthetic oligonucleotide
  Target: LAMA2; (-) strand; PAM type: NRG; PAM sequence: TGG
atcagaggaatggactaagt

SEQ ID NO: 67586 - DNA, 20 bp, Artificial Sequence
  Description of Artificial Sequence: Synthetic oligonucleotide
  Target: LAMA2; (-) strand; PAM type: NRG; PAM sequence: AAG
agacatcagaggaatggact

SEQ ID NO: 67587 - DNA, 20 bp, Artificial Sequence
  Description of Artificial Sequence: Synthetic oligonucleotide
  Target: LAMA2; (-) strand; PAM type: NRG; PAM sequence: TGG
aggaaaagacatcagaggaa

SEQ ID NO: 67588 - DNA, 20 bp, Artificial Sequence
  Description of Artificial Sequence: Synthetic oligonucleotide
  Target: LAMA2; (-) strand; PAM type: NRG; PAM sequence: AGG
tataaaggaaaagacatcag

SEQ ID NO: 67589 - DNA, 20 bp, Artificial Sequence
  Description of Artificial Sequence: Synthetic oligonucleotide
  Target: LAMA2; (-) strand; PAM type: NRG; PAM sequence: GAG
gtataaaggaaaagacatca

SEQ ID NO: 67590 - DNA, 20 bp, Artificial Sequence
  Description of Artificial Sequence: Synthetic oligonucleotide
  Target: LAMA2; (-) strand; PAM type: NRG; PAM sequence: CAG
ctgtataaaggaaaagacat

SEQ ID NO: 67591 - DNA, 20 bp, Artificial Sequence
  Description of Artificial Sequence: Synthetic oligonucleotide
  Target: LAMA2; (-) strand; PAM type: NRG; PAM sequence: AAG
atgataactgtataaaggaa

SEQ ID NO: 67592 - DNA, 20 bp, Artificial Sequence
  Description of Artificial Sequence: Synthetic oligonucleotide
  Target: LAMA2; (-) strand; PAM type: NRG; PAM sequence: AGG
atggtatgataactgtataa

SEQ ID NO: 67593 - DNA, 20 bp, Artificial Sequence
  Description of Artificial Sequence: Synthetic oligonucleotide
  Target: LAMA2; (-) strand; PAM type: NRG; PAM sequence: AAG
aatggtatgataactgtata

SEQ ID NO: 67594 - DNA, 20 bp, Artificial Sequence
  Description of Artificial Sequence: Synthetic oligonucleotide
  Target: LAMA2; (-) strand; PAM type: NRG; PAM sequence: TGG
atataatgcaaattgataaa

SEQ ID NO: 67595 - DNA, 20 bp, Artificial Sequence
  Description of Artificial Sequence: Synthetic oligonucleotide
  Target: LAMA2; (-) strand; PAM type: NRG; PAM sequence: CAG
gacttataagtaaataaaat

SEQ ID NO: 67596 - DNA, 20 bp, Artificial Sequence
  Description of Artificial Sequence: Synthetic oligonucleotide
  Target: LAMA2; (-) strand; PAM type: NRG; PAM sequence: AAG
taacaaagaacatgacttat

SEQ ID NO: 67597 - DNA, 20 bp, Artificial Sequence
  Description of Artificial Sequence: Synthetic oligonucleotide
  Target: LAMA2; (-) strand; PAM type: NRG; PAM sequence: AAG
tggtacctaatgagctaaca

SEQ ID NO: 67598 - DNA, 20 bp, Artificial Sequence
  Description of Artificial Sequence: Synthetic oligonucleotide
  Target: LAMA2; (-) strand; PAM type: NRG; PAM sequence: GAG
atataaaattggtacctaat

SEQ ID NO: 67599 - DNA, 20 bp, Artificial Sequence
  Description of Artificial Sequence: Synthetic oligonucleotide
  Target: LAMA2; (-) strand; PAM type: NRG; PAM sequence: TGG
aaataatattgatataaaat

SEQ ID NO: 67600 - DNA, 20 bp, Artificial Sequence
  Description of Artificial Sequence: Synthetic oligonucleotide
  Target: LAMA2; (-) strand; PAM type: NRG; PAM sequence: CAG
aaaatggactgaatgacaaa

SEQ ID NO: 67601 - DNA, 20 bp, Artificial Sequence
  Description of Artificial Sequence: Synthetic oligonucleotide
  Target: LAMA2; (-) strand; PAM type: NRG; PAM sequence: TGG
caaaacaacaacaacaaaaa

SEQ ID NO: 67602 - DNA, 20 bp, Artificial Sequence
  Description of Artificial Sequence: Synthetic oligonucleotide
  Target: LAMA2; (-) strand; PAM type: NRG; PAM sequence: CAG
tcatctagcttaggagcatt

SEQ ID NO: 67603 - DNA, 20 bp, Artificial Sequence
  Description of Artificial Sequence: Synthetic oligonucleotide
  Target: LAMA2; (-) strand; PAM type: NRG; PAM sequence: GAG
gtcattatcatctagcttag

SEQ ID NO: 67604 - DNA, 20 bp, Artificial Sequence
  Description of Artificial Sequence: Synthetic oligonucleotide
  Target: LAMA2; (-) strand; PAM type: NRG; PAM sequence: AGG
tggtcattatcatctagctt

SEQ ID NO: 67605 - DNA, 20 bp, Artificial Sequence
  Description of Artificial Sequence: Synthetic oligonucleotide
  Target: LAMA2; (-) strand; PAM type: NRG; PAM sequence: TAG
ttggtcattatcatctagct

SEQ ID NO: 67606 - DNA, 20 bp, Artificial Sequence
  Description of Artificial Sequence: Synthetic oligonucleotide
  Target: LAMA2; (-) strand; PAM type: NRG; PAM sequence: TAG
atcatttggtcattatcatc

SEQ ID NO: 67607 - DNA, 20 bp, Artificial Sequence
  Description of Artificial Sequence: Synthetic oligonucleotide
  Target: LAMA2; (-) strand; PAM type: NRG; PAM sequence: TGG
tccctgtctcagtaatcatt

SEQ ID NO: 67608 - DNA, 20 bp, Artificial Sequence
  Description of Artificial Sequence: Synthetic oligonucleotide
  Target: LAMA2; (-) strand; PAM type: NRG; PAM sequence: CAG
accatcgctcatccctgtct

SEQ ID NO: 67609 - DNA, 20 bp, Artificial Sequence
  Description of Artificial Sequence: Synthetic oligonucleotide
  Target: LAMA2; (-) strand; PAM type: NRG; PAM sequence: CAG
ttcccagatacttgttaaag

SEQ ID NO: 67610 - DNA, 20 bp, Artificial Sequence
  Description of Artificial Sequence: Synthetic oligonucleotide
  Target: LAMA2; (-) strand; PAM type: NRG; PAM sequence: AAG
cttttcccagatacttgtta

SEQ ID NO: 67611 - DNA, 20 bp, Artificial Sequence
  Description of Artificial Sequence: Synthetic oligonucleotide
  Target: LAMA2; (-) strand; PAM type: NRG; PAM sequence: CAG
ggaagagaccggacttttcc

SEQ ID NO: 67612 - DNA, 20 bp, Artificial Sequence
  Description of Artificial Sequence: Synthetic oligonucleotide
  Target: LAMA2; (-) strand; PAM type: NRG; PAM sequence: CGG
cagaaatgcaaggaagagac

SEQ ID NO: 67613 - DNA, 20 bp, Artificial Sequence
  Description of Artificial Sequence: Synthetic oligonucleotide
  Target: LAMA2; (-) strand; PAM type: NRG; PAM sequence: GAG
acgttcagaaatgcaaggaa

SEQ ID NO: 67614 - DNA, 20 bp, Artificial Sequence
  Description of Artificial Sequence: Synthetic oligonucleotide
  Target: LAMA2; (-) strand; PAM type: NRG; PAM sequence: AAG
taacgttcagaaatgcaagg

SEQ ID NO: 67615 - DNA, 20 bp, Artificial Sequence
  Description of Artificial Sequence: Synthetic oligonucleotide
  Target: LAMA2; (-) strand; PAM type: NRG; PAM sequence: AGG
aattaacgttcagaaatgca

SEQ ID NO: 67616 - DNA, 20 bp, Artificial Sequence
  Description of Artificial Sequence: Synthetic oligonucleotide
  Target: LAMA2; (-) strand; PAM type: NRG; PAM sequence: AAG
aaattaacgttcagaaatgc

SEQ ID NO: 67617 - DNA, 20 bp, Artificial Sequence
  Description of Artificial Sequence: Synthetic oligonucleotide
  Target: LAMA2; (-) strand; PAM type: NRG; PAM sequence: CAG
ttttaatacaaattaacgtt

SEQ ID NO: 67618 - DNA, 20 bp, Artificial Sequence
  Description of Artificial Sequence: Synthetic oligonucleotide
  Target: LAMA2; (-) strand; PAM type: NRG; PAM sequence: GAG
gagttttatataaaatttct

SEQ ID NO: 67619 - DNA, 20 bp, Artificial Sequence
  Description of Artificial Sequence: Synthetic oligonucleotide
  Target: LAMA2; (-) strand; PAM type: NRG; PAM sequence: GAG
tccaattctaaggtttattt

SEQ ID NO: 67620 - DNA, 20 bp, Artificial Sequence
  Description of Artificial Sequence: Synthetic oligonucleotide
  Target: LAMA2; (-) strand; PAM type: NRG; PAM sequence: AGG
ctcgataagatccaattcta

SEQ ID NO: 67621 - DNA, 20 bp, Artificial Sequence
  Description of Artificial Sequence: Synthetic oligonucleotide
  Target: LAMA2; (-) strand; PAM type: NRG; PAM sequence: AAG
actcgataagatccaattct

SEQ ID NO: 67622 - DNA, 20 bp, Artificial Sequence
  Description of Artificial Sequence: Synthetic oligonucleotide
  Target: LAMA2; (-) strand; PAM type: NRG; PAM sequence: AAG
tgtataacacaatactcgat

SEQ ID NO: 67623 - DNA, 20 bp, Artificial Sequence
  Description of Artificial Sequence: Synthetic oligonucleotide
  Target: LAMA2; (-) strand; PAM type: NRG; PAM sequence: GAG
tcctctaggaattaagaatt

SEQ ID NO: 67624 - DNA, 20 bp, Artificial Sequence
  Description of Artificial Sequence: Synthetic oligonucleotide
  Target: LAMA2; (-) strand; PAM type: NRG; PAM sequence: AAG
ctctgtttcctctaggaatt

SEQ ID NO: 67625 - DNA, 20 bp, Artificial Sequence
  Description of Artificial Sequence: Synthetic oligonucleotide
  Target: LAMA2; (-) strand; PAM type: NRG; PAM sequence: AGG
gacataactctgtttcctct

SEQ ID NO: 67626 - DNA, 20 bp, Artificial Sequence
  Description of Artificial Sequence: Synthetic oligonucleotide
  Target: LAMA2; (-) strand; PAM type: NRG; PAM sequence: TAG
ggacataactctgtttcctc

SEQ ID NO: 67627 - DNA, 20 bp, Artificial Sequence
  Description of Artificial Sequence: Synthetic oligonucleotide
  Target: LAMA2; (-) strand; PAM type: NRG; PAM sequence: TGG
attgggttgaatatgttcct

SEQ ID NO: 67628 - DNA, 20 bp, Artificial Sequence
  Description of Artificial Sequence: Synthetic oligonucleotide
  Target: LAMA2; (-) strand; PAM type: NRG; PAM sequence: GGG
gctacagctgtacagtgatt

SEQ ID NO: 67629 - DNA, 20 bp, Artificial Sequence
  Description of Artificial Sequence: Synthetic oligonucleotide
  Target: LAMA2; (-) strand; PAM type: NRG; PAM sequence: TGG
agctacagctgtacagtgat

SEQ ID NO: 67630 - DNA, 20 bp, Artificial Sequence
  Description of Artificial Sequence: Synthetic oligonucleotide
  Target: LAMA2; (-) strand; PAM type: NRG; PAM sequence: CAG
aagaaaaagctacagctgta

SEQ ID NO: 67631 - DNA, 20 bp, Artificial Sequence
  Description of Artificial Sequence: Synthetic oligonucleotide
  Target: LAMA2; (-) strand; PAM type: NRG; PAM sequence: CAG
agaaagaaaagaaaaagcta

SEQ ID NO: 67632 - DNA, 20 bp, Artificial Sequence
  Description of Artificial Sequence: Synthetic oligonucleotide
  Target: LAMA2; (-) strand; PAM type: NRG; PAM sequence: AAG
aaaaaaagaaagaaaagaaa

SEQ ID NO: 67633 - DNA, 20 bp, Artificial Sequence
  Description of Artificial Sequence: Synthetic oligonucleotide
  Target: LAMA2; (-) strand; PAM type: NRG; PAM sequence: AAG
aaaaaaaaaaaaagaaagaa

SEQ ID NO: 67634 - DNA, 20 bp, Artificial Sequence
  Description of Artificial Sequence: Synthetic oligonucleotide
  Target: LAMA2; (-) strand; PAM type: NRG; PAM sequence: AAG
aaaaaaaaaaaaaaaaaaga

SEQ ID NO: 67635 - DNA, 20 bp, Artificial Sequence
  Description of Artificial Sequence: Synthetic oligonucleotide
  Target: LAMA2; (-) strand; PAM type: NRG; PAM sequence: AAG
caaaaaaaaaaaaaaaaaaa

SEQ ID NO: 67636 - DNA, 20 bp, Artificial Sequence
  Description of Artificial Sequence: Synthetic oligonucleotide
  Target: LAMA2; (-) strand; PAM type: NRG; PAM sequence: GAG
accagcctgggcaatggact

SEQ ID NO: 67637 - DNA, 20 bp, Artificial Sequence
  Description of Artificial Sequence: Synthetic oligonucleotide
  Target: LAMA2; (-) strand; PAM type: NRG; PAM sequence: TGG
ttgcacaccagcctgggcaa

SEQ ID NO: 67638 - DNA, 20 bp, Artificial Sequence
  Description of Artificial Sequence: Synthetic oligonucleotide
  Target: LAMA2; (-) strand; PAM type: NRG; PAM sequence: GGG
atgccattgcacaccagcct

SEQ ID NO: 67639 - DNA, 20 bp, Artificial Sequence
  Description of Artificial Sequence: Synthetic oligonucleotide
  Target: LAMA2; (-) strand; PAM type: NRG; PAM sequence: TGG
catgccattgcacaccagcc

SEQ ID NO: 67640 - DNA, 20 bp, Artificial Sequence
  Description of Artificial Sequence: Synthetic oligonucleotide
  Target: LAMA2; (-) strand; PAM type: NRG; PAM sequence: CAG
gagatcatgccattgcacac

SEQ ID NO: 67641 - DNA, 20 bp, Artificial Sequence
  Description of Artificial Sequence: Synthetic oligonucleotide
  Target: LAMA2; (-) strand; PAM type: NRG; PAM sequence: GAG
ggcagaggttgcagtgagct

SEQ ID NO: 67642 - DNA, 20 bp, Artificial Sequence
  Description of Artificial Sequence: Synthetic oligonucleotide
  Target: LAMA2; (-) strand; PAM type: NRG; PAM sequence: GAG
tgggaggcagaggttgcagt

SEQ ID NO: 67643 - DNA, 20 bp, Artificial Sequence
  Description of Artificial Sequence: Synthetic oligonucleotide
  Target: LAMA2; (-) strand; PAM type: NRG; PAM sequence: CAG
aacctgggaggcagaggttg

SEQ ID NO: 67644 - DNA, 20 bp, Artificial Sequence
  Description of Artificial Sequence: Synthetic oligonucleotide
  Target: LAMA2; (-) strand; PAM type: NRG; PAM sequence: AGG
tgttttaacctgggaggcag

SEQ ID NO: 67645 - DNA, 20 bp, Artificial Sequence
  Description of Artificial Sequence: Synthetic oligonucleotide
  Target: LAMA2; (-) strand; PAM type: NRG; PAM sequence: GAG
ttgttttaacctgggaggca

SEQ ID NO: 67646 - DNA, 20 bp, Artificial Sequence
  Description of Artificial Sequence: Synthetic oligonucleotide
  Target: LAMA2; (-) strand; PAM type: NRG; PAM sequence: CAG
aattgttttaacctgggagg

SEQ ID NO: 67647 - DNA, 20 bp, Artificial Sequence
  Description of Artificial Sequence: Synthetic oligonucleotide
  Target: LAMA2; (-) strand; PAM type: NRG; PAM sequence: AGG
gagaattgttttaacctggg

SEQ ID NO: 67648 - DNA, 20 bp, Artificial Sequence
  Description of Artificial Sequence: Synthetic oligonucleotide
  Target: LAMA2; (-) strand; PAM type: NRG; PAM sequence: GAG
ggagaattgttttaacctgg

SEQ ID NO: 67649 - DNA, 20 bp, Artificial Sequence
  Description of Artificial Sequence: Synthetic oligonucleotide
  Target: LAMA2; (-) strand; PAM type: NRG; PAM sequence: GGG
caggagaattgttttaacct

SEQ ID NO: 67650 - DNA, 20 bp, Artificial Sequence
  Description of Artificial Sequence: Synthetic oligonucleotide
  Target: LAMA2; (-) strand; PAM type: NRG; PAM sequence: TGG
gcaggagaattgttttaacc

SEQ ID NO: 67651 - DNA, 20 bp, Artificial Sequence
  Description of Artificial Sequence: Synthetic oligonucleotide
  Target: LAMA2; (-) strand; PAM type: NRG; PAM sequence: GAG
tacttgggaggctgaggcag

SEQ ID NO: 67652 - DNA, 20 bp, Artificial Sequence
  Description of Artificial Sequence: Synthetic oligonucleotide
  Target: LAMA2; (-) strand; PAM type: NRG; PAM sequence: AGG
gctacttgggaggctgaggc

SEQ ID NO: 67653 - DNA, 20 bp, Artificial Sequence
  Description of Artificial Sequence: Synthetic oligonucleotide
  Target: LAMA2; (-) strand; PAM type: NRG; PAM sequence: CAG
agctacttgggaggctgagg

SEQ ID NO: 67654 - DNA, 20 bp, Artificial Sequence
  Description of Artificial Sequence: Synthetic oligonucleotide
  Target: LAMA2; (-) strand; PAM type: NRG; PAM sequence: AGG
cccagctacttgggaggctg

SEQ ID NO: 67655 - DNA, 20 bp, Artificial Sequence
  Description of Artificial Sequence: Synthetic oligonucleotide
  Target: LAMA2; (-) strand; PAM type: NRG; PAM sequence: GAG
tcccagctacttgggaggct

SEQ ID NO: 67656 - DNA, 20 bp, Artificial Sequence
  Description of Artificial Sequence: Synthetic oligonucleotide
  Target: LAMA2; (-) strand; PAM type: NRG; PAM sequence: AGG
tgtaatcccagctacttggg

SEQ ID NO: 67657 - DNA, 20 bp, Artificial Sequence
  Description of Artificial Sequence: Synthetic oligonucleotide
  Target: LAMA2; (-) strand; PAM type: NRG; PAM sequence: GAG
ctgtaatcccagctacttgg

SEQ ID NO: 67658 - DNA, 20 bp, Artificial Sequence
  Description of Artificial Sequence: Synthetic oligonucleotide
  Target: LAMA2; (-) strand; PAM type: NRG; PAM sequence: GGG
gcctgtaatcccagctactt

SEQ ID NO: 67659 - DNA, 20 bp, Artificial Sequence
  Description of Artificial Sequence: Synthetic oligonucleotide
  Target: LAMA2; (-) strand; PAM type: NRG; PAM sequence: TGG
tgcctgtaatcccagctact

SEQ ID NO: 67660 - DNA, 20 bp, Artificial Sequence
  Description of Artificial Sequence: Synthetic oligonucleotide
  Target: LAMA2; (-) strand; PAM type: NRG; PAM sequence: CAG
gtggcaggtgcctgtaatcc

SEQ ID NO: 67661 - DNA, 20 bp, Artificial Sequence
  Description of Artificial Sequence: Synthetic oligonucleotide
  Target: LAMA2; (-) strand; PAM type: NRG; PAM sequence: AGG
aaattagctggcatggtggc

SEQ ID NO: 67662 - DNA, 20 bp, Artificial Sequence
  Description of Artificial Sequence: Synthetic oligonucleotide
  Target: LAMA2; (-) strand; PAM type: NRG; PAM sequence: CAG
aaaattagctggcatggtgg

SEQ ID NO: 67663 - DNA, 20 bp, Artificial Sequence
  Description of Artificial Sequence: Synthetic oligonucleotide
  Target: LAMA2; (-) strand; PAM type: NRG; PAM sequence: TGG
ataaaaattagctggcatgg

SEQ ID NO: 67664 - DNA, 20 bp, Artificial Sequence
  Description of Artificial Sequence: Synthetic oligonucleotide
  Target: LAMA2; (-) strand; PAM type: NRG; PAM sequence: TGG
aaaataaaaattagctggca

SEQ ID NO: 67665 - DNA, 20 bp, Artificial Sequence
  Description of Artificial Sequence: Synthetic oligonucleotide
  Target: LAMA2; (-) strand; PAM type: NRG; PAM sequence: TGG
aaaataaaataaaaattagc

SEQ ID NO: 67666 - DNA, 20 bp, Artificial Sequence
  Description of Artificial Sequence: Synthetic oligonucleotide
  Target: LAMA2; (-) strand; PAM type: NRG; PAM sequence: TAG
caaaaaaataaaataaaaat

SEQ ID NO: 67667 - DNA, 20 bp, Artificial Sequence
  Description of Artificial Sequence: Synthetic oligonucleotide
  Target: LAMA2; (-) strand; PAM type: NRG; PAM sequence: AAG
ccaggctggccaacatggtg

SEQ ID NO: 67668 - DNA, 20 bp, Artificial Sequence
  Description of Artificial Sequence: Synthetic oligonucleotide
  Target: LAMA2; (-) strand; PAM type: NRG; PAM sequence: TGG
tgagaccaggctggccaaca

SEQ ID NO: 67669 - DNA, 20 bp, Artificial Sequence
  Description of Artificial Sequence: Synthetic oligonucleotide
  Target: LAMA2; (-) strand; PAM type: NRG; PAM sequence: TGG
tcaggggtttgagaccaggc

SEQ ID NO: 67670 - DNA, 20 bp, Artificial Sequence
  Description of Artificial Sequence: Synthetic oligonucleotide
  Target: LAMA2; (-) strand; PAM type: NRG; PAM sequence: AGG
gaggtcaggggtttgagacc

SEQ ID NO: 67671 - DNA, 20 bp, Artificial Sequence
  Description of Artificial Sequence: Synthetic oligonucleotide
  Target: LAMA2; (-) strand; PAM type: NRG; PAM sequence: CAG
tgaggtcaggggtttgagac

SEQ ID NO: 67672 - DNA, 20 bp, Artificial Sequence
  Description of Artificial Sequence: Synthetic oligonucleotide
  Target: LAMA2; (-) strand; PAM type: NRG; PAM sequence: GAG
tcacctgaggtcaggggttt

SEQ ID NO: 67673 - DNA, 20 bp, Artificial Sequence
  Description of Artificial Sequence: Synthetic oligonucleotide
  Target: LAMA2; (-) strand; PAM type: NRG; PAM sequence: GGG
ggaggatcacctgaggtcag

SEQ ID NO: 67674 - DNA, 20 bp, Artificial Sequence
  Description of Artificial Sequence: Synthetic oligonucleotide
  Target: LAMA2; (-) strand; PAM type: NRG; PAM sequence: GGG
gggaggatcacctgaggtca

SEQ ID NO: 67675 - DNA, 20 bp, Artificial Sequence
  Description of Artificial Sequence: Synthetic oligonucleotide
  Target: LAMA2; (-) strand; PAM type: NRG; PAM sequence: AGG
tgggaggatcacctgaggtc

SEQ ID NO: 67676 - DNA, 20 bp, Artificial Sequence
  Description of Artificial Sequence: Synthetic oligonucleotide
  Target: LAMA2; (-) strand; PAM type: NRG; PAM sequence: CAG
gtgggaggatcacctgaggt

SEQ ID NO: 67677 - DNA, 20 bp, Artificial Sequence
  Description of Artificial Sequence: Synthetic oligonucleotide
  Target: LAMA2; (-) strand; PAM type: NRG; PAM sequence: AGG
caaggtgggaggatcacctg

SEQ ID NO: 67678 - DNA, 20 bp, Artificial Sequence
  Description of Artificial Sequence: Synthetic oligonucleotide
  Target: LAMA2; (-) strand; PAM type: NRG; PAM sequence: GAG
ccaaggtgggaggatcacct

SEQ ID NO: 67679 - DNA, 20 bp, Artificial Sequence
  Description of Artificial Sequence: Synthetic oligonucleotide
  Target: LAMA2; (-) strand; PAM type: NRG; PAM sequence: AGG
ctttgggaggccaaggtggg

SEQ ID NO: 67680 - DNA, 20 bp, Artificial Sequence
  Description of Artificial Sequence: Synthetic oligonucleotide
  Target: LAMA2; (-) strand; PAM type: NRG; PAM sequence: GAG
actttgggaggccaaggtgg

SEQ ID NO: 67681 - DNA, 20 bp, Artificial Sequence
  Description of Artificial Sequence: Synthetic oligonucleotide
  Target: LAMA2; (-) strand; PAM type: NRG; PAM sequence: GGG
gcactttgggaggccaaggt

SEQ ID NO: 67682 - DNA, 20 bp, Artificial Sequence
  Description of Artificial Sequence: Synthetic oligonucleotide
  Target: LAMA2; (-) strand; PAM type: NRG; PAM sequence: TGG
agcactttgggaggccaagg

SEQ ID NO: 67683 - DNA, 20 bp, Artificial Sequence
  Description of Artificial Sequence: Synthetic oligonucleotide
  Target: LAMA2; (-) strand; PAM type: NRG; PAM sequence: AGG
cccagcactttgggaggcca

SEQ ID NO: 67684 - DNA, 20 bp, Artificial Sequence
  Description of Artificial Sequence: Synthetic oligonucleotide
  Target: LAMA2; (-) strand; PAM type: NRG; PAM sequence: AAG
tcccagcactttgggaggcc

SEQ ID NO: 67685 - DNA, 20 bp, Artificial Sequence
  Description of Artificial Sequence: Synthetic oligonucleotide
  Target: LAMA2; (-) strand; PAM type: NRG; PAM sequence: AGG
tgtaatcccagcactttggg

SEQ ID NO: 67686 - DNA, 20 bp, Artificial Sequence
  Description of Artificial Sequence: Synthetic oligonucleotide
  Target: LAMA2; (-) strand; PAM type: NRG; PAM sequence: GAG
ctgtaatcccagcactttgg

SEQ ID NO: 67687 - DNA, 20 bp, Artificial Sequence
  Description of Artificial Sequence: Synthetic oligonucleotide
  Target: LAMA2; (-) strand; PAM type: NRG; PAM sequence: GGG
gcctgtaatcccagcacttt

SEQ ID NO: 67688 - DNA, 20 bp, Artificial Sequence
  Description of Artificial Sequence: Synthetic oligonucleotide
  Target: LAMA2; (-) strand; PAM type: NRG; PAM sequence: TGG
tgcctgtaatcccagcactt

SEQ ID NO: 67689 - DNA, 20 bp, Artificial Sequence
  Description of Artificial Sequence: Synthetic oligonucleotide
  Target: LAMA2; (-) strand; PAM type: NRG; PAM sequence: CAG
gtggctcatgcctgtaatcc

SEQ ID NO: 67690 - DNA, 20 bp, Artificial Sequence
  Description of Artificial Sequence: Synthetic oligonucleotide
  Target: LAMA2; (-) strand; PAM type: NRG; PAM sequence: TGG
gaaaaattggccaggcacgg

SEQ ID NO: 67691 - DNA, 20 bp, Artificial Sequence
  Description of Artificial Sequence: Synthetic oligonucleotide
  Target: LAMA2; (-) strand; PAM type: NRG; PAM sequence: CGG
ttagaaaaattggccaggca

SEQ ID NO: 67692 - DNA, 20 bp, Artificial Sequence
  Description of Artificial Sequence: Synthetic oligonucleotide
  Target: LAMA2; (-) strand; PAM type: NRG; PAM sequence: AGG
tttatttagaaaaattggcc

SEQ ID NO: 67693 - DNA, 20 bp, Artificial Sequence
  Description of Artificial Sequence: Synthetic oligonucleotide
  Target: LAMA2; (-) strand; PAM type: NRG; PAM sequence: CAG
atttatttagaaaaattggc

SEQ ID NO: 67694 - DNA, 20 bp, Artificial Sequence
  Description of Artificial Sequence: Synthetic oligonucleotide
  Target: LAMA2; (-) strand; PAM type: NRG; PAM sequence: TGG
attaatttatttagaaaaat

SEQ ID NO: 67695 - DNA, 20 bp, Artificial Sequence
  Description of Artificial Sequence: Synthetic oligonucleotide
  Target: LAMA2; (-) strand; PAM type: NRG; PAM sequence: TAG
catcatcatattaatttatt

SEQ ID NO: 67696 - DNA, 20 bp, Artificial Sequence
  Description of Artificial Sequence: Synthetic oligonucleotide
  Target: LAMA2; (-) strand; PAM type: NRG; PAM sequence: TGG
tcaaaaactgggtagctatt

SEQ ID NO: 67697 - DNA, 20 bp, Artificial Sequence
  Description of Artificial Sequence: Synthetic oligonucleotide
  Target: LAMA2; (-) strand; PAM type: NRG; PAM sequence: TAG
ctgcctaatcaaaaactggg

SEQ ID NO: 67698 - DNA, 20 bp, Artificial Sequence
  Description of Artificial Sequence: Synthetic oligonucleotide
  Target: LAMA2; (-) strand; PAM type: NRG; PAM sequence: GGG
cttctgcctaatcaaaaact

SEQ ID NO: 67699 - DNA, 20 bp, Artificial Sequence
  Description of Artificial Sequence: Synthetic oligonucleotide
  Target: LAMA2; (-) strand; PAM type: NRG; PAM sequence: TGG
acttctgcctaatcaaaaac

SEQ ID NO: 67700 - DNA, 20 bp, Artificial Sequence
  Description of Artificial Sequence: Synthetic oligonucleotide
  Target: LAMA2; (-) strand; PAM type: NRG; PAM sequence: AAG
tttttactctgactgaccat

SEQ ID NO: 67701 - DNA, 20 bp, Artificial Sequence
  Description of Artificial Sequence: Synthetic oligonucleotide
  Target: LAMA2; (-) strand; PAM type: NRG; PAM sequence: TGG
acatgtgcatgccaccatgc

SEQ ID NO: 67702 - DNA, 20 bp, Artificial Sequence
  Description of Artificial Sequence: Synthetic oligonucleotide
  Target: LAMA2; (-) strand; PAM type: NRG; PAM sequence: GGG
tctccgcctcccaagtagct

SEQ ID NO: 67703 - DNA, 20 bp, Artificial Sequence
  Description of Artificial Sequence: Synthetic oligonucleotide
  Target: LAMA2; (-) strand; PAM type: NRG; PAM sequence: TGG
gtctccgcctcccaagtagc

SEQ ID NO: 67704 - DNA, 20 bp, Artificial Sequence
  Description of Artificial Sequence: Synthetic oligonucleotide
  Target: LAMA2; (-) strand; PAM type: NRG; PAM sequence: TAG
tcctgtctccgcctcccaag

SEQ ID NO: 67705 - DNA, 20 bp, Artificial Sequence
  Description of Artificial Sequence: Synthetic oligonucleotide
  Target: LAMA2; (-) strand; PAM type: NRG; PAM sequence: AAG
tcctcctgtctccgcctccc

SEQ ID NO: 67706 - DNA, 20 bp, Artificial Sequence
  Description of Artificial Sequence: Synthetic oligonucleotide
  Target: LAMA2; (-) strand; PAM type: NRG; PAM sequence: GGG
ctcagactcctaagctcaaa

SEQ ID NO: 67707 - DNA, 20 bp, Artificial Sequence
  Description of Artificial Sequence: Synthetic oligonucleotide
  Target: LAMA2; (-) strand; PAM type: NRG; PAM sequence: AGG
cctcagactcctaagctcaa

SEQ ID NO: 67708 - DNA, 20 bp, Artificial Sequence
  Description of Artificial Sequence: Synthetic oligonucleotide
  Target: LAMA2; (-) strand; PAM type: NRG; PAM sequence: AAG
acctcagactcctaagctca

SEQ ID NO: 67709 - DNA, 20 bp, Artificial Sequence
  Description of Artificial Sequence: Synthetic oligonucleotide
  Target: LAMA2; (-) strand; PAM type: NRG; PAM sequence: AAG
tgctataacctcagactcct

SEQ ID NO: 67710 - DNA, 20 bp, Artificial Sequence
  Description of Artificial Sequence: Synthetic oligonucleotide
  Target: LAMA2; (-) strand; PAM type: NRG; PAM sequence: CAG
atcatagtgtgctataacct

SEQ ID NO: 67711 - DNA, 20 bp, Artificial Sequence
  Description of Artificial Sequence: Synthetic oligonucleotide
  Target: LAMA2; (-) strand; PAM type: NRG; PAM sequence: TAG
gctattcataggcataatca

SEQ ID NO: 67712 - DNA, 20 bp, Artificial Sequence
  Description of Artificial Sequence: Synthetic oligonucleotide
  Target: LAMA2; (-) strand; PAM type: NRG; PAM sequence: AGG
ggagtgcagtggctattcat

SEQ ID NO: 67713 - DNA, 20 bp, Artificial Sequence
  Description of Artificial Sequence: Synthetic oligonucleotide
  Target: LAMA2; (-) strand; PAM type: NRG; PAM sequence: TAG
tggagtgcagtggctattca

SEQ ID NO: 67714 - DNA, 20 bp, Artificial Sequence
  Description of Artificial Sequence: Synthetic oligonucleotide
  Target: LAMA2; (-) strand; PAM type: NRG; PAM sequence: TGG
ctgcccaggctggagtgcag

SEQ ID NO: 67715 - DNA, 20 bp, Artificial Sequence
  Description of Artificial Sequence: Synthetic oligonucleotide
  Target: LAMA2; (-) strand; PAM type: NRG; PAM sequence: CAG
acactgcccaggctggagtg

SEQ ID NO: 67716 - DNA, 20 bp, Artificial Sequence
  Description of Artificial Sequence: Synthetic oligonucleotide
  Target: LAMA2; (-) strand; PAM type: NRG; PAM sequence: GAG
ttgctacactgcccaggctg

SEQ ID NO: 67717 - DNA, 20 bp, Artificial Sequence
  Description of Artificial Sequence: Synthetic oligonucleotide
  Target: LAMA2; (-) strand; PAM type: NRG; PAM sequence: TGG
tcttgctacactgcccaggc

SEQ ID NO: 67718 - DNA, 20 bp, Artificial Sequence
  Description of Artificial Sequence: Synthetic oligonucleotide
  Target: LAMA2; (-) strand; PAM type: NRG; PAM sequence: AGG
agggtcttgctacactgccc

SEQ ID NO: 67719 - DNA, 20 bp, Artificial Sequence
  Description of Artificial Sequence: Synthetic oligonucleotide
  Target: LAMA2; (-) strand; PAM type: NRG; PAM sequence: CAG
tagggtcttgctacactgcc

SEQ ID NO: 67720 - DNA, 20 bp, Artificial Sequence
  Description of Artificial Sequence: Synthetic oligonucleotide
  Target: LAMA2; (-) strand; PAM type: NRG; PAM sequence: GGG
tgattcttttttcagagata

SEQ ID NO: 67721 - DNA, 20 bp, Artificial Sequence
  Description of Artificial Sequence: Synthetic oligonucleotide
  Target: LAMA2; (-) strand; PAM type: NRG; PAM sequence: AGG
ttgattcttttttcagagat

SEQ ID NO: 67722 - DNA, 20 bp, Artificial Sequence
  Description of Artificial Sequence: Synthetic oligonucleotide
  Target: LAMA2; (-) strand; PAM type: NRG; PAM sequence: TAG
tttgattcttttttcagaga

SEQ ID NO: 67723 - DNA, 20 bp, Artificial Sequence
  Description of Artificial Sequence: Synthetic oligonucleotide
  Target: LAMA2; (-) strand; PAM type: NRG; PAM sequence: GAG
ggcctttgattcttttttca

SEQ ID NO: 67724 - DNA, 20 bp, Artificial Sequence
  Description of Artificial Sequence: Synthetic oligonucleotide
  Target: LAMA2; (-) strand; PAM type: NRG; PAM sequence: CAG
aaggcctttgattctttttt

SEQ ID NO: 67725 - DNA, 20 bp, Artificial Sequence
  Description of Artificial Sequence: Synthetic oligonucleotide
  Target: LAMA2; (-) strand; PAM type: NRG; PAM sequence: AGG
taaaaataaaatatttctta

SEQ ID NO: 67726 - DNA, 20 bp, Artificial Sequence
  Description of Artificial Sequence: Synthetic oligonucleotide
  Target: LAMA2; (-) strand; PAM type: NRG; PAM sequence: AAG
gtaaaaataaaatatttctt

SEQ ID NO: 67727 - DNA, 20 bp, Artificial Sequence
  Description of Artificial Sequence: Synthetic oligonucleotide
  Target: LAMA2; (-) strand; PAM type: NRG; PAM sequence: AGG
gttaatttttaaattttctg

SEQ ID NO: 67728 - DNA, 20 bp, Artificial Sequence
  Description of Artificial Sequence: Synthetic oligonucleotide
  Target: LAMA2; (-) strand; PAM type: NRG; PAM sequence: GAG
agttaatttttaaattttct

SEQ ID NO: 67729 - DNA, 20 bp, Artificial Sequence
  Description of Artificial Sequence: Synthetic oligonucleotide
  Target: LAMA2; (-) strand; PAM type: NRG; PAM sequence: AAG
aacccaaactatttagctct

SEQ ID NO: 67730 - DNA, 20 bp, Artificial Sequence
  Description of Artificial Sequence: Synthetic oligonucleotide
  Target: LAMA2; (-) strand; PAM type: NRG; PAM sequence: TAG
ataatgaaacccaaactatt

SEQ ID NO: 67731 - DNA, 20 bp, Artificial Sequence
  Description of Artificial Sequence: Synthetic oligonucleotide
  Target: LAMA2; (-) strand; PAM type: NRG; PAM sequence: AAG
tgggaaactgttactgttgc

SEQ ID NO: 67732 - DNA, 20 bp, Artificial Sequence
  Description of Artificial Sequence: Synthetic oligonucleotide
  Target: LAMA2; (-) strand; PAM type: NRG; PAM sequence: GGG
agacacttataatgtgtaat

SEQ ID NO: 67733 - DNA, 20 bp, Artificial Sequence
  Description of Artificial Sequence: Synthetic oligonucleotide
  Target: LAMA2; (-) strand; PAM type: NRG; PAM sequence: TGG
cagacacttataatgtgtaa

SEQ ID NO: 67734 - DNA, 20 bp, Artificial Sequence
  Description of Artificial Sequence: Synthetic oligonucleotide
  Target: LAMA2; (-) strand; PAM type: NRG; PAM sequence: CAG
ctcaacaaatttactcaaaa

SEQ ID NO: 67735 - DNA, 20 bp, Artificial Sequence
  Description of Artificial Sequence: Synthetic oligonucleotide
  Target: LAMA2; (-) strand; PAM type: NRG; PAM sequence: TAG
cccagtgattcaaactaaat

SEQ ID NO: 67736 - DNA, 20 bp, Artificial Sequence
  Description of Artificial Sequence: Synthetic oligonucleotide
  Target: LAMA2; (-) strand; PAM type: NRG; PAM sequence: CAG
acctcaattgtgtcttttcc

SEQ ID NO: 67737 - DNA, 20 bp, Artificial Sequence
  Description of Artificial Sequence: Synthetic oligonucleotide
  Target: LAMA2; (-) strand; PAM type: NRG; PAM sequence: GAG
tgtaaaaaagtggaagtaca

SEQ ID NO: 67738 - DNA, 20 bp, Artificial Sequence
  Description of Artificial Sequence: Synthetic oligonucleotide
  Target: LAMA2; (-) strand; PAM type: NRG; PAM sequence: CAG
tatgtaaaaaagtggaagta

SEQ ID NO: 67739 - DNA, 20 bp, Artificial Sequence
  Description of Artificial Sequence: Synthetic oligonucleotide
  Target: LAMA2; (-) strand; PAM type: NRG; PAM sequence: AAG
tactttatgtaaaaaagtgg

SEQ ID NO: 67740 - DNA, 20 bp, Artificial Sequence
  Description of Artificial Sequence: Synthetic oligonucleotide
  Target: LAMA2; (-) strand; PAM type: NRG; PAM sequence: TGG
atgtactttatgtaaaaaag

SEQ ID NO: 67741 - DNA, 20 bp, Artificial Sequence
  Description of Artificial Sequence: Synthetic oligonucleotide
  Target: LAMA2; (-) strand; PAM type: NRG; PAM sequence: AAG
aagatgtactttatgtaaaa

SEQ ID NO: 67742 - DNA, 20 bp, Artificial Sequence
  Description of Artificial Sequence: Synthetic oligonucleotide
  Target: LAMA2; (-) strand; PAM type: NRG; PAM sequence: AAG
ttttttgtaactagaagtgg

SEQ ID NO: 67743 - DNA, 20 bp, Artificial Sequence
  Description of Artificial Sequence: Synthetic oligonucleotide
  Target: LAMA2; (-) strand; PAM type: NRG; PAM sequence: TGG
aaattttttgtaactagaag

SEQ ID NO: 67744 - DNA, 20 bp, Artificial Sequence
  Description of Artificial Sequence: Synthetic oligonucleotide
  Target: LAMA2; (-) strand; PAM type: NRG; PAM sequence: AAG
aaaaaattttttgtaactag

SEQ ID NO: 67745 - DNA, 20 bp, Artificial Sequence
  Description of Artificial Sequence: Synthetic oligonucleotide
  Target: LAMA2; (-) strand; PAM type: NRG; PAM sequence: TAG
aaaaaaaaattttttgtaac

SEQ ID NO: 67746 - DNA, 20 bp, Artificial Sequence
  Description of Artificial Sequence: Synthetic oligonucleotide
  Target: LAMA2; (-) strand; PAM type: NRG; PAM sequence: GAG
tacagataaacgactcaagt

SEQ ID NO: 67747 - DNA, 20 bp, Artificial Sequence
  Description of Artificial Sequence: Synthetic oligonucleotide
  Target: LAMA2; (-) strand; PAM type: NRG; PAM sequence: AAG
ttactacagataaacgactc

SEQ ID NO: 67748 - DNA, 20 bp, Artificial Sequence
  Description of Artificial Sequence: Synthetic oligonucleotide
  Target: LAMA2; (-) strand; PAM type: NRG; PAM sequence: CAG
tttcccaaatttacttacta

SEQ ID NO: 67749 - DNA, 20 bp, Artificial Sequence
  Description of Artificial Sequence: Synthetic oligonucleotide
  Target: LAMA2; (-) strand; PAM type: NRG; PAM sequence: GGG
ttgatttttgtaaatagcat

SEQ ID NO: 67750 - DNA, 20 bp, Artificial Sequence
  Description of Artificial Sequence: Synthetic oligonucleotide
  Target: LAMA2; (-) strand; PAM type: NRG; PAM sequence: TGG
tttgatttttgtaaatagca

SEQ ID NO: 67751 - DNA, 20 bp, Artificial Sequence
  Description of Artificial Sequence: Synthetic oligonucleotide
  Target: LAMA2; (-) strand; PAM type: NRG; PAM sequence: TAG
gagcttttgatttttgtaaa

SEQ ID NO: 67752 - DNA, 20 bp, Artificial Sequence
  Description of Artificial Sequence: Synthetic oligonucleotide
  Target: LAMA2; (-) strand; PAM type: NRG; PAM sequence: GAG
acaaacagaattcatgattt

SEQ ID NO: 67753 - DNA, 20 bp, Artificial Sequence
  Description of Artificial Sequence: Synthetic oligonucleotide
  Target: LAMA2; (-) strand; PAM type: NRG; PAM sequence: CAG
ttttaaatccttaacacaaa

SEQ ID NO: 67754 - DNA, 20 bp, Artificial Sequence
  Description of Artificial Sequence: Synthetic oligonucleotide
  Target: LAMA2; (-) strand; PAM type: NRG; PAM sequence: GAG
gtatctctatctttattgaa

SEQ ID NO: 67755 - DNA, 20 bp, Artificial Sequence
  Description of Artificial Sequence: Synthetic oligonucleotide
  Target: LAMA2; (-) strand; PAM type: NRG; PAM sequence: AAG
tggtatctctatctttattg

SEQ ID NO: 67756 - DNA, 20 bp, Artificial Sequence
  Description of Artificial Sequence: Synthetic oligonucleotide
  Target: LAMA2; (-) strand; PAM type: NRG; PAM sequence: TGG
agatatgttaaagcaaaacg

SEQ ID NO: 67757 - DNA, 20 bp, Artificial Sequence
  Description of Artificial Sequence: Synthetic oligonucleotide
  Target: LAMA2; (-) strand; PAM type: NRG; PAM sequence: AAG
agttgcctctagatatgtta

SEQ ID NO: 67758 - DNA, 20 bp, Artificial Sequence
  Description of Artificial Sequence: Synthetic oligonucleotide
  Target: LAMA2; (-) strand; PAM type: NRG; PAM sequence: TAG
atcgatgaaaaagttgcctc

SEQ ID NO: 67759 - DNA, 20 bp, Artificial Sequence
  Description of Artificial Sequence: Synthetic oligonucleotide
  Target: LAMA2; (-) strand; PAM type: NRG; PAM sequence: AAG
taataaagctatcgatgaaa

SEQ ID NO: 67760 - DNA, 20 bp, Artificial Sequence
  Description of Artificial Sequence: Synthetic oligonucleotide
  Target: LAMA2; (-) strand; PAM type: NRG; PAM sequence: AAG
ttctccttgacctactaata

SEQ ID NO: 67761 - DNA, 20 bp, Artificial Sequence
  Description of Artificial Sequence: Synthetic oligonucleotide
  Target: LAMA2; (-) strand; PAM type: NRG; PAM sequence: AGG
ctccacggacctttctactt

SEQ ID NO: 67762 - DNA, 20 bp, Artificial Sequence
  Description of Artificial Sequence: Synthetic oligonucleotide
  Target: LAMA2; (-) strand; PAM type: NRG; PAM sequence: TAG
tctccacggacctttctact

SEQ ID NO: 67763 - DNA, 20 bp, Artificial Sequence
  Description of Artificial Sequence: Synthetic oligonucleotide
  Target: LAMA2; (-) strand; PAM type: NRG; PAM sequence: CGG
tggtttgtctcttttctcca

SEQ ID NO: 67764 - DNA, 20 bp, Artificial Sequence
  Description of Artificial Sequence: Synthetic oligonucleotide
  Target: LAMA2; (-) strand; PAM type: NRG; PAM sequence: TGG
atttaattttaactctgata

SEQ ID NO: 67765 - DNA, 20 bp, Artificial Sequence
  Description of Artificial Sequence: Synthetic oligonucleotide
  Target: LAMA2; (-) strand; PAM type: NRG; PAM sequence: TGG
catatcgaaagaagtgaaaa

SEQ ID NO: 67766 - DNA, 20 bp, Artificial Sequence
  Description of Artificial Sequence: Synthetic oligonucleotide
  Target: LAMA2; (-) strand; PAM type: NRG; PAM sequence: AAG
tttgcacatcatatcgaaag

SEQ ID NO: 67767 - DNA, 20 bp, Artificial Sequence
  Description of Artificial Sequence: Synthetic oligonucleotide
  Target: LAMA2; (-) strand; PAM type: NRG; PAM sequence: AAG
gattttgcacatcatatcga

SEQ ID NO: 67768 - DNA, 20 bp, Artificial Sequence
  Description of Artificial Sequence: Synthetic oligonucleotide
  Target: LAMA2; (-) strand; PAM type: NRG; PAM sequence: AAG
gagctcacatcattgctaag

SEQ ID NO: 67769 - DNA, 20 bp, Artificial Sequence
  Description of Artificial Sequence: Synthetic oligonucleotide
  Target: LAMA2; (-) strand; PAM type: NRG; PAM sequence: AAG
acagagctcacatcattgct

SEQ ID NO: 67770 - DNA, 20 bp, Artificial Sequence
  Description of Artificial Sequence: Synthetic oligonucleotide
  Target: LAMA2; (-) strand; PAM type: NRG; PAM sequence: GAG
ctgcatccacccagaccaca

SEQ ID NO: 67771 - DNA, 20 bp, Artificial Sequence
  Description of Artificial Sequence: Synthetic oligonucleotide
  Target: LAMA2; (-) strand; PAM type: NRG; PAM sequence: CAG
ccctgcatccacccagacca

SEQ ID NO: 67772 - DNA, 20 bp, Artificial Sequence
  Description of Artificial Sequence: Synthetic oligonucleotide
  Target: LAMA2; (-) strand; PAM type: NRG; PAM sequence: CAG
ccacatgccctgcatccacc

SEQ ID NO: 67773 - DNA, 20 bp, Artificial Sequence
  Description of Artificial Sequence: Synthetic oligonucleotide
  Target: LAMA2; (-) strand; PAM type: NRG; PAM sequence: AAG
caatttccttaaatgagcaa

SEQ ID NO: 67774 - DNA, 20 bp, Artificial Sequence
  Description of Artificial Sequence: Synthetic oligonucleotide
  Target: LAMA2; (-) strand; PAM type: NRG; PAM sequence: GAG
caaatgcaatttccttaaat

SEQ ID NO: 67775 - DNA, 20 bp, Artificial Sequence
  Description of Artificial Sequence: Synthetic oligonucleotide
  Target: LAMA2; (-) strand; PAM type: NRG; PAM sequence: GAG
ttgtggctacataatgtatt

SEQ ID NO: 67776 - DNA, 20 bp, Artificial Sequence
  Description of Artificial Sequence: Synthetic oligonucleotide
  Target: LAMA2; (-) strand; PAM type: NRG; PAM sequence: TGG
aatcactataaattttcttg

SEQ ID NO: 67777 - DNA, 20 bp, Artificial Sequence
  Description of Artificial Sequence: Synthetic oligonucleotide
  Target: LAMA2; (-) strand; PAM type: NRG; PAM sequence: AAG
atatactttgttccaccaaa

SEQ ID NO: 67778 - DNA, 20 bp, Artificial Sequence
  Description of Artificial Sequence: Synthetic oligonucleotide
  Target: LAMA2; (-) strand; PAM type: NRG; PAM sequence: GAG
aaggatcctgagctggaaaa

SEQ ID NO: 67779 - DNA, 20 bp, Artificial Sequence
  Description of Artificial Sequence: Synthetic oligonucleotide
  Target: LAMA2; (-) strand; PAM type: NRG; PAM sequence: AAG
aaaaggatcctgagctggaa

SEQ ID NO: 67780 - DNA, 20 bp, Artificial Sequence
  Description of Artificial Sequence: Synthetic oligonucleotide
  Target: LAMA2; (-) strand; PAM type: NRG; PAM sequence: TGG
actggaaaaggatcctgagc

SEQ ID NO: 67781 - DNA, 20 bp, Artificial Sequence
  Description of Artificial Sequence: Synthetic oligonucleotide
  Target: LAMA2; (-) strand; PAM type: NRG; PAM sequence: GAG
gaagactggaaaaggatcct

SEQ ID NO: 67782 - DNA, 20 bp, Artificial Sequence
  Description of Artificial Sequence: Synthetic oligonucleotide
  Target: LAMA2; (-) strand; PAM type: NRG; PAM sequence: AGG
aagtgtaggaagactggaaa

SEQ ID NO: 67783 - DNA, 20 bp, Artificial Sequence
  Description of Artificial Sequence: Synthetic oligonucleotide
  Target: LAMA2; (-) strand; PAM type: NRG; PAM sequence: AAG
taagtgtaggaagactggaa

SEQ ID NO: 67784 - DNA, 20 bp, Artificial Sequence
  Description of Artificial Sequence: Synthetic oligonucleotide
  Target: LAMA2; (-) strand; PAM type: NRG; PAM sequence: TGG
gctgttaagtgtaggaagac

SEQ ID NO: 67785 - DNA, 20 bp, Artificial Sequence
  Description of Artificial Sequence: Synthetic oligonucleotide
  Target: LAMA2; (-) strand; PAM type: NRG; PAM sequence: AAG
tactggctgttaagtgtagg

SEQ ID NO: 67786 - DNA, 20 bp, Artificial Sequence
  Description of Artificial Sequence: Synthetic oligonucleotide
  Target: LAMA2; (-) strand; PAM type: NRG; PAM sequence: AGG
ttgtactggctgttaagtgt

SEQ ID NO: 67787 - DNA, 20 bp, Artificial Sequence
  Description of Artificial Sequence: Synthetic oligonucleotide
  Target: LAMA2; (-) strand; PAM type: NRG; PAM sequence: TAG
tttgtactggctgttaagtg

SEQ ID NO: 67788 - DNA, 20 bp, Artificial Sequence
  Description of Artificial Sequence: Synthetic oligonucleotide
  Target: LAMA2; (-) strand; PAM type: NRG; PAM sequence: AAG
ctaagtttgtactggctgtt

SEQ ID NO: 67789 - DNA, 20 bp, Artificial Sequence
  Description of Artificial Sequence: Synthetic oligonucleotide
  Target: LAMA2; (-) strand; PAM type: NRG; PAM sequence: TGG
tctatggactaagtttgtac

SEQ ID NO: 67790 - DNA, 20 bp, Artificial Sequence
  Description of Artificial Sequence: Synthetic oligonucleotide
  Target: LAMA2; (-) strand; PAM type: NRG; PAM sequence: AAG
acaaatacgttctatggact

SEQ ID NO: 67791 - DNA, 20 bp, Artificial Sequence
  Description of Artificial Sequence: Synthetic oligonucleotide
  Target: LAMA2; (-) strand; PAM type: NRG; PAM sequence: TGG
tgcacaacaaatacgttcta

SEQ ID NO: 67792 - DNA, 20 bp, Artificial Sequence
  Description of Artificial Sequence: Synthetic oligonucleotide
  Target: LAMA2; (-) strand; PAM type: NRG; PAM sequence: AGG
gcatgtgtgtgtgtttgtgc

SEQ ID NO: 67793 - DNA, 20 bp, Artificial Sequence
  Description of Artificial Sequence: Synthetic oligonucleotide
  Target: LAMA2; (-) strand; PAM type: NRG; PAM sequence: CAG
tgcatgtgtgtgtgtttgtg

SEQ ID NO: 67794 - DNA, 20 bp, Artificial Sequence
  Description of Artificial Sequence: Synthetic oligonucleotide
  Target: LAMA2; (-) strand; PAM type: NRG; PAM sequence: AAG
acaaattccagttgatggct

SEQ ID NO: 67795 - DNA, 20 bp, Artificial Sequence
  Description of Artificial Sequence: Synthetic oligonucleotide
  Target: LAMA2; (-) strand; PAM type: NRG; PAM sequence: TGG
aaaacacaaattccagttga

SEQ ID NO: 67796 - DNA, 20 bp, Artificial Sequence
  Description of Artificial Sequence: Synthetic oligonucleotide
  Target: LAMA2; (-) strand; PAM type: NRG; PAM sequence: CAG
ccaaactaaaacacaaattc

SEQ ID NO: 67797 - DNA, 20 bp, Artificial Sequence
  Description of Artificial Sequence: Synthetic oligonucleotide
  Target: LAMA2; (-) strand; PAM type: NRG; PAM sequence: CAG
attttactgatgaggtaaat

SEQ ID NO: 67798 - DNA, 20 bp, Artificial Sequence
  Description of Artificial Sequence: Synthetic oligonucleotide
  Target: LAMA2; (-) strand; PAM type: NRG; PAM sequence: AGG
tgaagggcattttactgatg

SEQ ID NO: 67799 - DNA, 20 bp, Artificial Sequence
  Description of Artificial Sequence: Synthetic oligonucleotide
  Target: LAMA2; (-) strand; PAM type: NRG; PAM sequence: GAG
gtgaagggcattttactgat

SEQ ID NO: 67800 - DNA, 20 bp, Artificial Sequence
  Description of Artificial Sequence: Synthetic oligonucleotide
  Target: LAMA2; (-) strand; PAM type: NRG; PAM sequence: GGG
gtctagggagagtaagtgaa

SEQ ID NO: 67801 - DNA, 20 bp, Artificial Sequence
  Description of Artificial Sequence: Synthetic oligonucleotide
  Target: LAMA2; (-) strand; PAM type: NRG; PAM sequence: AGG
tgtctagggagagtaagtga

SEQ ID NO: 67802 - DNA, 20 bp, Artificial Sequence
  Description of Artificial Sequence: Synthetic oligonucleotide
  Target: LAMA2; (-) strand; PAM type: NRG; PAM sequence: AAG
atgtctagggagagtaagtg

SEQ ID NO: 67803 - DNA, 20 bp, Artificial Sequence
  Description of Artificial Sequence: Synthetic oligonucleotide
  Target: LAMA2; (-) strand; PAM type: NRG; PAM sequence: AAG
agtctatgtctagggagagt

SEQ ID NO: 67804 - DNA, 20 bp, Artificial Sequence
  Description of Artificial Sequence: Synthetic oligonucleotide
  Target: LAMA2; (-) strand; PAM type: NRG; PAM sequence: GAG
aaatagtctatgtctaggga

SEQ ID NO: 67805 - DNA, 20 bp, Artificial Sequence
  Description of Artificial Sequence: Synthetic oligonucleotide
  Target: LAMA2; (-) strand; PAM type: NRG; PAM sequence: GAG
gaaaatagtctatgtctagg

SEQ ID NO: 67806 - DNA, 20 bp, Artificial Sequence
  Description of Artificial Sequence: Synthetic oligonucleotide
  Target: LAMA2; (-) strand; PAM type: NRG; PAM sequence: GGG
cggaaaatagtctatgtcta

SEQ ID NO: 67807 - DNA, 20 bp, Artificial Sequence
  Description of Artificial Sequence: Synthetic oligonucleotide
  Target: LAMA2; (-) strand; PAM type: NRG; PAM sequence: AGG
acggaaaatagtctatgtct

SEQ ID NO: 67808 - DNA, 20 bp, Artificial Sequence
  Description of Artificial Sequence: Synthetic oligonucleotide
  Target: LAMA2; (-) strand; PAM type: NRG; PAM sequence: TAG
tacggaaaatagtctatgtc

SEQ ID NO: 67809 - DNA, 20 bp, Artificial Sequence
  Description of Artificial Sequence: Synthetic oligonucleotide
  Target: LAMA2; (-) strand; PAM type: NRG; PAM sequence: TAG
ctaacatattttacggaaaa

SEQ ID NO: 67810 - DNA, 20 bp, Artificial Sequence
  Description of Artificial Sequence: Synthetic oligonucleotide
  Target: LAMA2; (-) strand; PAM type: NRG; PAM sequence: CGG
gaaatcactaacatatttta

SEQ ID NO: 67811 - DNA, 20 bp, Artificial Sequence
  Description of Artificial Sequence: Synthetic oligonucleotide
  Target: LAMA2; (-) strand; PAM type: NRG; PAM sequence: AAG
attttattctgcatgacaga

SEQ ID NO: 67812 - DNA, 20 bp, Artificial Sequence
  Description of Artificial Sequence: Synthetic oligonucleotide
  Target: LAMA2; (-) strand; PAM type: NRG; PAM sequence: CAG
acttattttattctgcatga

SEQ ID NO: 67813 - DNA, 20 bp, Artificial Sequence
  Description of Artificial Sequence: Synthetic oligonucleotide
  Target: LAMA2; (-) strand; PAM type: NRG; PAM sequence: CAG
ttctacaaatttagctgata

SEQ ID NO: 67814 - DNA, 20 bp, Artificial Sequence
  Description of Artificial Sequence: Synthetic oligonucleotide
  Target: LAMA2; (-) strand; PAM type: NRG; PAM sequence: TAG
aaatcaatattctacaaatt

SEQ ID NO: 67815 - DNA, 20 bp, Artificial Sequence
  Description of Artificial Sequence: Synthetic oligonucleotide
  Target: LAMA2; (-) strand; PAM type: NRG; PAM sequence: CAG
aaatgttacataatttaata

SEQ ID NO: 67816 - DNA, 20 bp, Artificial Sequence
  Description of Artificial Sequence: Synthetic oligonucleotide
  Target: LAMA2; (-) strand; PAM type: NRG; PAM sequence: TAG
tttgcagttagactcaattt

SEQ ID NO: 67817 - DNA, 20 bp, Artificial Sequence
  Description of Artificial Sequence: Synthetic oligonucleotide
  Target: LAMA2; (-) strand; PAM type: NRG; PAM sequence: TAG
tgcattcatttttttgcagt

SEQ ID NO: 67818 - DNA, 20 bp, Artificial Sequence
  Description of Artificial Sequence: Synthetic oligonucleotide
  Target: LAMA2; (-) strand; PAM type: NRG; PAM sequence: CAG
ctactgcattcatttttttg

SEQ ID NO: 67819 - DNA, 20 bp, Artificial Sequence
  Description of Artificial Sequence: Synthetic oligonucleotide
  Target: LAMA2; (-) strand; PAM type: NRG; PAM sequence: TAG
agaacttctttctaaatgtg

SEQ ID NO: 67820 - DNA, 20 bp, Artificial Sequence
  Description of Artificial Sequence: Synthetic oligonucleotide
  Target: LAMA2; (-) strand; PAM type: NRG; PAM sequence: TAG
tttgtaaactgctttattct

SEQ ID NO: 67821 - DNA, 20 bp, Artificial Sequence
  Description of Artificial Sequence: Synthetic oligonucleotide
  Target: LAMA2; (-) strand; PAM type: NRG; PAM sequence: AAG
aaattctctttcttctaaca

SEQ ID NO: 67822 - DNA, 20 bp, Artificial Sequence
  Description of Artificial Sequence: Synthetic oligonucleotide
  Target: LAMA2; (-) strand; PAM type: NRG; PAM sequence: AAG
cttaacatctgaaagagtta

SEQ ID NO: 67823 - DNA, 20 bp, Artificial Sequence
  Description of Artificial Sequence: Synthetic oligonucleotide
  Target: LAMA2; (-) strand; PAM type: NRG; PAM sequence: GAG
agaatccttaacatctgaaa

SEQ ID NO: 67824 - DNA, 20 bp, Artificial Sequence
  Description of Artificial Sequence: Synthetic oligonucleotide
  Target: LAMA2; (-) strand; PAM type: NRG; PAM sequence: AAG
atagaatccttaacatctga

SEQ ID NO: 67825 - DNA, 20 bp, Artificial Sequence
  Description of Artificial Sequence: Synthetic oligonucleotide
  Target: LAMA2; (-) strand; PAM type: NRG; PAM sequence: TAG
gaatgaagttatttgggaaa

SEQ ID NO: 67826 - DNA, 20 bp, Artificial Sequence
  Description of Artificial Sequence: Synthetic oligonucleotide
  Target: LAMA2; (-) strand; PAM type: NRG; PAM sequence: GGG
ttacatgaatgaagttattt

SEQ ID NO: 67827 - DNA, 20 bp, Artificial Sequence
  Description of Artificial Sequence: Synthetic oligonucleotide
  Target: LAMA2; (-) strand; PAM type: NRG; PAM sequence: TGG
cttacatgaatgaagttatt

SEQ ID NO: 67828 - DNA, 20 bp, Artificial Sequence
  Description of Artificial Sequence: Synthetic oligonucleotide
  Target: LAMA2; (-) strand; PAM type: NRG; PAM sequence: AAG
atatacttcttacatgaatg

SEQ ID NO: 67829 - DNA, 20 bp, Artificial Sequence
  Description of Artificial Sequence: Synthetic oligonucleotide
  Target: LAMA2; (-) strand; PAM type: NRG; PAM sequence: GAG
cccacattagaaaacaccta

SEQ ID NO: 67830 - DNA, 20 bp, Artificial Sequence
  Description of Artificial Sequence: Synthetic oligonucleotide
  Target: LAMA2; (-) strand; PAM type: NRG; PAM sequence: TAG
ttcccacattagaaaacacc

SEQ ID NO: 67831 - DNA, 20 bp, Artificial Sequence
  Description of Artificial Sequence: Synthetic oligonucleotide
  Target: LAMA2; (-) strand; PAM type: NRG; PAM sequence: TAG
tgtatttcactttcccacat

SEQ ID NO: 67832 - DNA, 20 bp, Artificial Sequence
  Description of Artificial Sequence: Synthetic oligonucleotide
  Target: LAMA2; (-) strand; PAM type: NRG; PAM sequence: CAG
gacaggaaagactgcatccc

SEQ ID NO: 67833 - DNA, 20 bp, Artificial Sequence
  Description of Artificial Sequence: Synthetic oligonucleotide
  Target: LAMA2; (-) strand; PAM type: NRG; PAM sequence: AAG
tctgctggaatctgacagga

SEQ ID NO: 67834 - DNA, 20 bp, Artificial Sequence
  Description of Artificial Sequence: Synthetic oligonucleotide
  Target: LAMA2; (-) strand; PAM type: NRG; PAM sequence: AGG
agcatctgctggaatctgac

SEQ ID NO: 67835 - DNA, 20 bp, Artificial Sequence
  Description of Artificial Sequence: Synthetic oligonucleotide
  Target: LAMA2; (-) strand; PAM type: NRG; PAM sequence: CAG
cagcatctgctggaatctga

SEQ ID NO: 67836 - DNA, 20 bp, Artificial Sequence
  Description of Artificial Sequence: Synthetic oligonucleotide
  Target: LAMA2; (-) strand; PAM type: NRG; PAM sequence: TGG
taaattatatcagcatctgc

SEQ ID NO: 67837 - DNA, 20 bp, Artificial Sequence
  Description of Artificial Sequence: Synthetic oligonucleotide
  Target: LAMA2; (-) strand; PAM type: NRG; PAM sequence: CAG
ccacgaatattaaattatat

SEQ ID NO: 67838 - DNA, 20 bp, Artificial Sequence
  Description of Artificial Sequence: Synthetic oligonucleotide
  Target: LAMA2; (-) strand; PAM type: NRG; PAM sequence: TGG
tgtaaatgccaagggacatc

SEQ ID NO: 67839 - DNA, 20 bp, Artificial Sequence
  Description of Artificial Sequence: Synthetic oligonucleotide
  Target: LAMA2; (-) strand; PAM type: NRG; PAM sequence: GGG
ttcttccatgtaaatgccaa

SEQ ID NO: 67840 - DNA, 20 bp, Artificial Sequence
  Description of Artificial Sequence: Synthetic oligonucleotide
  Target: LAMA2; (-) strand; PAM type: NRG; PAM sequence: AGG
cttcttccatgtaaatgcca

SEQ ID NO: 67841 - DNA, 20 bp, Artificial Sequence
  Description of Artificial Sequence: Synthetic oligonucleotide
  Target: LAMA2; (-) strand; PAM type: NRG; PAM sequence: AAG
acttcttccatgtaaatgcc

SEQ ID NO: 67842 - DNA, 20 bp, Artificial Sequence
  Description of Artificial Sequence: Synthetic oligonucleotide
  Target: LAMA2; (-) strand; PAM type: NRG; PAM sequence: TAG
atatgcaacttggtacacag

SEQ ID NO: 67843 - DNA, 20 bp, Artificial Sequence
  Description of Artificial Sequence: Synthetic oligonucleotide
  Target: LAMA2; (-) strand; PAM type: NRG; PAM sequence: CAG
aaaatatgcaacttggtaca

SEQ ID NO: 67844 - DNA, 20 bp, Artificial Sequence
  Description of Artificial Sequence: Synthetic oligonucleotide
  Target: LAMA2; (-) strand; PAM type: NRG; PAM sequence: TGG
acacacaaaaatatgcaact

SEQ ID NO: 67845 - DNA, 20 bp, Artificial Sequence
  Description of Artificial Sequence: Synthetic oligonucleotide
  Target: LAMA2; (-) strand; PAM type: NRG; PAM sequence: GAG
aatgactacataccatggct

SEQ ID NO: 67846 - DNA, 20 bp, Artificial Sequence
  Description of Artificial Sequence: Synthetic oligonucleotide
  Target: LAMA2; (-) strand; PAM type: NRG; PAM sequence: TGG
acaccaatgactacatacca

SEQ ID NO: 67847 - DNA, 20 bp, Artificial Sequence
  Description of Artificial Sequence: Synthetic oligonucleotide
  Target: LAMA2; (-) strand; PAM type: NRG; PAM sequence: TGG
gaaataaaggtctgagcaga

SEQ ID NO: 67848 - DNA, 20 bp, Artificial Sequence
  Description of Artificial Sequence: Synthetic oligonucleotide
  Target: LAMA2; (-) strand; PAM type: NRG; PAM sequence: CAG
cagagaaataaaggtctgag

SEQ ID NO: 67849 - DNA, 20 bp, Artificial Sequence
  Description of Artificial Sequence: Synthetic oligonucleotide
  Target: LAMA2; (-) strand; PAM type: NRG; PAM sequence: GAG
gaacagagaaataaaggtct

SEQ ID NO: 67850 - DNA, 20 bp, Artificial Sequence
  Description of Artificial Sequence: Synthetic oligonucleotide
  Target: LAMA2; (-) strand; PAM type: NRG; PAM sequence: AGG
atggctgaacagagaaataa

SEQ ID NO: 67851 - DNA, 20 bp, Artificial Sequence
  Description of Artificial Sequence: Synthetic oligonucleotide
  Target: LAMA2; (-) strand; PAM type: NRG; PAM sequence: AAG
tatggctgaacagagaaata

SEQ ID NO: 67852 - DNA, 20 bp, Artificial Sequence
  Description of Artificial Sequence: Synthetic oligonucleotide
  Target: LAMA2; (-) strand; PAM type: NRG; PAM sequence: GAG
attttagttatggctgaaca

SEQ ID NO: 67853 - DNA, 20 bp, Artificial Sequence
  Description of Artificial Sequence: Synthetic oligonucleotide
  Target: LAMA2; (-) strand; PAM type: NRG; PAM sequence: CAG
caattttagttatggctgaa

SEQ ID NO: 67854 - DNA, 20 bp, Artificial Sequence
  Description of Artificial Sequence: Synthetic oligonucleotide
  Target: LAMA2; (-) strand; PAM type: NRG; PAM sequence: TGG
aaaatgttcaattttagtta

SEQ ID NO: 67855 - DNA, 20 bp, Artificial Sequence
  Description of Artificial Sequence: Synthetic oligonucleotide
  Target: LAMA2; (-) strand; PAM type: NRG; PAM sequence: TAG
atttgaaaaatgttcaattt

SEQ ID NO: 67856 - DNA, 20 bp, Artificial Sequence
  Description of Artificial Sequence: Synthetic oligonucleotide
  Target: LAMA2; (-) strand; PAM type: NRG; PAM sequence: TGG
atcttaaaattgaaactacc

SEQ ID NO: 67857 - DNA, 20 bp, Artificial Sequence
  Description of Artificial Sequence: Synthetic oligonucleotide
  Target: LAMA2; (-) strand; PAM type: NRG; PAM sequence: TAG
tctttttaaccattgaatac

SEQ ID NO: 67858 - DNA, 20 bp, Artificial Sequence
  Description of Artificial Sequence: Synthetic oligonucleotide
  Target: LAMA2; (-) strand; PAM type: NRG; PAM sequence: AGG
gttattactaagccaaagat

SEQ ID NO: 67859 - DNA, 20 bp, Artificial Sequence
  Description of Artificial Sequence: Synthetic oligonucleotide
  Target: LAMA2; (-) strand; PAM type: NRG; PAM sequence: TAG
ggttattactaagccaaaga

SEQ ID NO: 67860 - DNA, 20 bp, Artificial Sequence
  Description of Artificial Sequence: Synthetic oligonucleotide
  Target: LAMA2; (-) strand; PAM type: NRG; PAM sequence: AAG
taggggttattactaagcca

SEQ ID NO: 67861 - DNA, 20 bp, Artificial Sequence
  Description of Artificial Sequence: Synthetic oligonucleotide
  Target: LAMA2; (-) strand; PAM type: NRG; PAM sequence: AAG
tcaatttaggggttattact

SEQ ID NO: 67862 - DNA, 20 bp, Artificial Sequence
  Description of Artificial Sequence: Synthetic oligonucleotide
  Target: LAMA2; (-) strand; PAM type: NRG; PAM sequence: GGG
gaaattaactttcaatttag

SEQ ID NO: 67863 - DNA, 20 bp, Artificial Sequence
  Description of Artificial Sequence: Synthetic oligonucleotide
  Target: LAMA2; (-) strand; PAM type: NRG; PAM sequence: GGG
agaaattaactttcaattta

SEQ ID NO: 67864 - DNA, 20 bp, Artificial Sequence
  Description of Artificial Sequence: Synthetic oligonucleotide
  Target: LAMA2; (-) strand; PAM type: NRG; PAM sequence: AGG
aagaaattaactttcaattt

SEQ ID NO: 67865 - DNA, 20 bp, Artificial Sequence
  Description of Artificial Sequence: Synthetic oligonucleotide
  Target: LAMA2; (-) strand; PAM type: NRG; PAM sequence: TAG
taagaaattaactttcaatt

SEQ ID NO: 67866 - DNA, 20 bp, Artificial Sequence
  Description of Artificial Sequence: Synthetic oligonucleotide
  Target: LAMA2; (-) strand; PAM type: NRG; PAM sequence: AAG
cattttgcactgctatttat

SEQ ID NO: 67867 - DNA, 20 bp, Artificial Sequence
  Description of Artificial Sequence: Synthetic oligonucleotide
  Target: LAMA2; (-) strand; PAM type: NRG; PAM sequence: AAG
aggtgaggcctctgttctca

SEQ ID NO: 67868 - DNA, 20 bp, Artificial Sequence
  Description of Artificial Sequence: Synthetic oligonucleotide
  Target: LAMA2; (-) strand; PAM type: NRG; PAM sequence: AGG
actcatttgataataaggtg

SEQ ID NO: 67869 - DNA, 20 bp, Artificial Sequence
  Description of Artificial Sequence: Synthetic oligonucleotide
  Target: LAMA2; (-) strand; PAM type: NRG; PAM sequence: GAG
aactcatttgataataaggt

SEQ ID NO: 67870 - DNA, 20 bp, Artificial Sequence
  Description of Artificial Sequence: Synthetic oligonucleotide
  Target: LAMA2; (-) strand; PAM type: NRG; PAM sequence: AGG
aacaaactcatttgataata

SEQ ID NO: 67871 - DNA, 20 bp, Artificial Sequence
  Description of Artificial Sequence: Synthetic oligonucleotide
  Target: LAMA2; (-) strand; PAM type: NRG; PAM sequence: AAG
aaacaaactcatttgataat

SEQ ID NO: 67872 - DNA, 20 bp, Artificial Sequence
  Description of Artificial Sequence: Synthetic oligonucleotide
  Target: LAMA2; (-) strand; PAM type: NRG; PAM sequence: GAG
cttcctcagtgtctagctga

SEQ ID NO: 67873 - DNA, 20 bp, Artificial Sequence
  Description of Artificial Sequence: Synthetic oligonucleotide
  Target: LAMA2; (-) strand; PAM type: NRG; PAM sequence: GAG
aacttcctcagtgtctagct

SEQ ID NO: 67874 - DNA, 20 bp, Artificial Sequence
  Description of Artificial Sequence: Synthetic oligonucleotide
  Target: LAMA2; (-) strand; PAM type: NRG; PAM sequence: TAG
tctataacttcctcagtgtc

SEQ ID NO: 67875 - DNA, 20 bp, Artificial Sequence
  Description of Artificial Sequence: Synthetic oligonucleotide
  Target: LAMA2; (-) strand; PAM type: NRG; PAM sequence: CAG
acccatttctataacttcct

SEQ ID NO: 67876 - DNA, 20 bp, Artificial Sequence
  Description of Artificial Sequence: Synthetic oligonucleotide
  Target: LAMA2; (-) strand; PAM type: NRG; PAM sequence: TGG
tatccttggaacattcacct

SEQ ID NO: 67877 - DNA, 20 bp, Artificial Sequence
  Description of Artificial Sequence: Synthetic oligonucleotide
  Target: LAMA2; (-) strand; PAM type: NRG; PAM sequence: TGG
gtataagacatagctatcct

SEQ ID NO: 67878 - DNA, 20 bp, Artificial Sequence
  Description of Artificial Sequence: Synthetic oligonucleotide
  Target: LAMA2; (-) strand; PAM type: NRG; PAM sequence: TAG
tgcttgttatgtataagaca

SEQ ID NO: 67879 - DNA, 20 bp, Artificial Sequence
  Description of Artificial Sequence: Synthetic oligonucleotide
  Target: LAMA2; (-) strand; PAM type: NRG; PAM sequence: AAG
atgaagtgcttgttatgtat

SEQ ID NO: 67880 - DNA, 20 bp, Artificial Sequence
  Description of Artificial Sequence: Synthetic oligonucleotide
  Target: LAMA2; (-) strand; PAM type: NRG; PAM sequence: AAG
tcattcagcaaataatgatg

SEQ ID NO: 67881 - DNA, 20 bp, Artificial Sequence
  Description of Artificial Sequence: Synthetic oligonucleotide
  Target: LAMA2; (-) strand; PAM type: NRG; PAM sequence: CAG
ttctaacatacgcattcatt

SEQ ID NO: 67882 - DNA, 20 bp, Artificial Sequence
  Description of Artificial Sequence: Synthetic oligonucleotide
  Target: LAMA2; (-) strand; PAM type: NRG; PAM sequence: TGG
aatggacaagctattacata

SEQ ID NO: 67883 - DNA, 20 bp, Artificial Sequence
  Description of Artificial Sequence: Synthetic oligonucleotide
  Target: LAMA2; (-) strand; PAM type: NRG; PAM sequence: AAG
gaaaatatgtgcaaatggac

SEQ ID NO: 67884 - DNA, 20 bp, Artificial Sequence
  Description of Artificial Sequence: Synthetic oligonucleotide
  Target: LAMA2; (-) strand; PAM type: NRG; PAM sequence: TGG
ggggtgaaaatatgtgcaaa

SEQ ID NO: 67885 - DNA, 20 bp, Artificial Sequence
  Description of Artificial Sequence: Synthetic oligonucleotide
  Target: LAMA2; (-) strand; PAM type: NRG; PAM sequence: GGG
catattaaaaactatcagtg

SEQ ID NO: 67886 - DNA, 20 bp, Artificial Sequence
  Description of Artificial Sequence: Synthetic oligonucleotide
  Target: LAMA2; (-) strand; PAM type: NRG; PAM sequence: GGG
acatattaaaaactatcagt

SEQ ID NO: 67887 - DNA, 20 bp, Artificial Sequence
  Description of Artificial Sequence: Synthetic oligonucleotide
  Target: LAMA2; (-) strand; PAM type: NRG; PAM sequence: TGG
cacatattaaaaactatcag

SEQ ID NO: 67888 - DNA, 20 bp, Artificial Sequence
  Description of Artificial Sequence: Synthetic oligonucleotide
  Target: LAMA2; (-) strand; PAM type: NRG; PAM sequence: CAG
ctccacatattaaaaactat

SEQ ID NO: 67889 - DNA, 20 bp, Artificial Sequence
  Description of Artificial Sequence: Synthetic oligonucleotide
  Target: LAMA2; (-) strand; PAM type: NRG; PAM sequence: GAG
tctcacccacaaaaaacaca

SEQ ID NO: 67890 - DNA, 20 bp, Artificial Sequence
  Description of Artificial Sequence: Synthetic oligonucleotide
  Target: LAMA2; (-) strand; PAM type: NRG; PAM sequence: CAG
tatctcacccacaaaaaaca

SEQ ID NO: 67891 - DNA, 20 bp, Artificial Sequence
  Description of Artificial Sequence: Synthetic oligonucleotide
  Target: LAMA2; (-) strand; PAM type: NRG; PAM sequence: TAG
ttcattcacttacgacatgt

SEQ ID NO: 67892 - DNA, 20 bp, Artificial Sequence
  Description of Artificial Sequence: Synthetic oligonucleotide
  Target: LAMA2; (-) strand; PAM type: NRG; PAM sequence: CAG
ttgacagttcttatcaaaca

SEQ ID NO: 67893 - DNA, 20 bp, Artificial Sequence
  Description of Artificial Sequence: Synthetic oligonucleotide
  Target: LAMA2; (-) strand; PAM type: NRG; PAM sequence: CAG
ggtgcatagtcaacacttga

SEQ ID NO: 67894 - DNA, 20 bp, Artificial Sequence
  Description of Artificial Sequence: Synthetic oligonucleotide
  Target: LAMA2; (-) strand; PAM type: NRG; PAM sequence: TAG
ctagcacaccaataggtgca

SEQ ID NO: 67895 - DNA, 20 bp, Artificial Sequence
  Description of Artificial Sequence: Synthetic oligonucleotide
  Target: LAMA2; (-) strand; PAM type: NRG; PAM sequence: AGG
agaatgtctagcacaccaat

SEQ ID NO: 67896 - DNA, 20 bp, Artificial Sequence
  Description of Artificial Sequence: Synthetic oligonucleotide
  Target: LAMA2; (-) strand; PAM type: NRG; PAM sequence: TAG
cagaatgtctagcacaccaa

SEQ ID NO: 67897 - DNA, 20 bp, Artificial Sequence
  Description of Artificial Sequence: Synthetic oligonucleotide
  Target: LAMA2; (-) strand; PAM type: NRG; PAM sequence: TAG
ttctgaatcttcagaatgtc

SEQ ID NO: 67898 - DNA, 20 bp, Artificial Sequence
  Description of Artificial Sequence: Synthetic oligonucleotide
  Target: LAMA2; (-) strand; PAM type: NRG; PAM sequence: CAG
gtatacttcttctgaatctt

SEQ ID NO: 67899 - DNA, 20 bp, Artificial Sequence
  Description of Artificial Sequence: Synthetic oligonucleotide
  Target: LAMA2; (-) strand; PAM type: NRG; PAM sequence: TAG
tgtagatgtaatcataacat

SEQ ID NO: 67900 - DNA, 20 bp, Artificial Sequence
  Description of Artificial Sequence: Synthetic oligonucleotide
  Target: LAMA2; (-) strand; PAM type: NRG; PAM sequence: TAG
attgtttgattctttgtctg

SEQ ID NO: 67901 - DNA, 20 bp, Artificial Sequence
  Description of Artificial Sequence: Synthetic oligonucleotide
  Target: LAMA2; (-) strand; PAM type: NRG; PAM sequence: AAG
aaacacaagttaccattaaa

SEQ ID NO: 67902 - DNA, 20 bp, Artificial Sequence
  Description of Artificial Sequence: Synthetic oligonucleotide
  Target: LAMA2; (-) strand; PAM type: NRG; PAM sequence: AAG
tctttaacattaaaaaacac

SEQ ID NO: 67903 - DNA, 20 bp, Artificial Sequence
  Description of Artificial Sequence: Synthetic oligonucleotide
  Target: LAMA2; (-) strand; PAM type: NRG; PAM sequence: TGG
ttttcctgttctttatcatt

SEQ ID NO: 67904 - DNA, 20 bp, Artificial Sequence
  Description of Artificial Sequence: Synthetic oligonucleotide
  Target: LAMA2; (-) strand; PAM type: NRG; PAM sequence: GAG
caaaatctatccttctgata

SEQ ID NO: 67905 - DNA, 20 bp, Artificial Sequence
  Description of Artificial Sequence: Synthetic oligonucleotide
  Target: LAMA2; (-) strand; PAM type: NRG; PAM sequence: TAG
ctcaaaatctatccttctga

SEQ ID NO: 67906 - DNA, 20 bp, Artificial Sequence
  Description of Artificial Sequence: Synthetic oligonucleotide
  Target: LAMA2; (-) strand; PAM type: NRG; PAM sequence: TAG
tttagtatttctttcaagat

SEQ ID NO: 67907 - DNA, 20 bp, Artificial Sequence
  Description of Artificial Sequence: Synthetic oligonucleotide
  Target: LAMA2; (-) strand; PAM type: NRG; PAM sequence: AAG
ctaaatttagtatttctttc

SEQ ID NO: 67908 - DNA, 20 bp, Artificial Sequence
  Description of Artificial Sequence: Synthetic oligonucleotide
  Target: LAMA2; (-) strand; PAM type: NRG; PAM sequence: TAG
attctccataagtctaaatt

SEQ ID NO: 67909 - DNA, 20 bp, Artificial Sequence
  Description of Artificial Sequence: Synthetic oligonucleotide
  Target: LAMA2; (-) strand; PAM type: NRG; PAM sequence: AAG
tttcctaaattattctccat

SEQ ID NO: 67910 - DNA, 20 bp, Artificial Sequence
  Description of Artificial Sequence: Synthetic oligonucleotide
  Target: LAMA2; (-) strand; PAM type: NRG; PAM sequence: TAG
cacttcccacctcccctggg

SEQ ID NO: 67911 - DNA, 20 bp, Artificial Sequence
  Description of Artificial Sequence: Synthetic oligonucleotide
  Target: LAMA2; (-) strand; PAM type: NRG; PAM sequence: GGG
tctcacttcccacctcccct

SEQ ID NO: 67912 - DNA, 20 bp, Artificial Sequence
  Description of Artificial Sequence: Synthetic oligonucleotide
  Target: LAMA2; (-) strand; PAM type: NRG; PAM sequence: TGG
atctcacttcccacctcccc

SEQ ID NO: 67913 - DNA, 20 bp, Artificial Sequence
  Description of Artificial Sequence: Synthetic oligonucleotide
  Target: LAMA2; (-) strand; PAM type: NRG; PAM sequence: CAG
tccttatctcactctgaaca

SEQ ID NO: 67914 - DNA, 20 bp, Artificial Sequence
  Description of Artificial Sequence: Synthetic oligonucleotide
  Target: LAMA2; (-) strand; PAM type: NRG; PAM sequence: TGG
tcaattaaaatcccatgctc

SEQ ID NO: 67915 - DNA, 20 bp, Artificial Sequence
  Description of Artificial Sequence: Synthetic oligonucleotide
  Target: LAMA2; (-) strand; PAM type: NRG; PAM sequence: TAG
tcatttagatatttcaagta

SEQ ID NO: 67916 - DNA, 20 bp, Artificial Sequence
  Description of Artificial Sequence: Synthetic oligonucleotide
  Target: LAMA2; (-) strand; PAM type: NRG; PAM sequence: AAG
atacttcatttagatatttc

SEQ ID NO: 67917 - DNA, 20 bp, Artificial Sequence
  Description of Artificial Sequence: Synthetic oligonucleotide
  Target: LAMA2; (-) strand; PAM type: NRG; PAM sequence: TAG
gtaaacataaatacttcatt

SEQ ID NO: 67918 - DNA, 20 bp, Artificial Sequence
  Description of Artificial Sequence: Synthetic oligonucleotide
  Target: LAMA2; (-) strand; PAM type: NRG; PAM sequence: GAG
tctctctcacttgactttta

SEQ ID NO: 67919 - DNA, 20 bp, Artificial Sequence
  Description of Artificial Sequence: Synthetic oligonucleotide
  Target: LAMA2; (-) strand; PAM type: NRG; PAM sequence: TAG
aatctctctcacttgacttt

SEQ ID NO: 67920 - DNA, 20 bp, Artificial Sequence
  Description of Artificial Sequence: Synthetic oligonucleotide
  Target: LAMA2; (-) strand; PAM type: NRG; PAM sequence: CAG
ctcacattcttgtctcactc

SEQ ID NO: 67921 - DNA, 20 bp, Artificial Sequence
  Description of Artificial Sequence: Synthetic oligonucleotide
  Target: LAMA2; (-) strand; PAM type: NRG; PAM sequence: AAG
ctatagattaaactccacag

SEQ ID NO: 67922 - DNA, 20 bp, Artificial Sequence
  Description of Artificial Sequence: Synthetic oligonucleotide
  Target: LAMA2; (-) strand; PAM type: NRG; PAM sequence: CAG
ttactatagattaaactcca

SEQ ID NO: 67923 - DNA, 20 bp, Artificial Sequence
  Description of Artificial Sequence: Synthetic oligonucleotide
  Target: LAMA2; (-) strand; PAM type: NRG; PAM sequence: TAG
cagattcatgtgcattacta

SEQ ID NO: 67924 - DNA, 20 bp, Artificial Sequence
  Description of Artificial Sequence: Synthetic oligonucleotide
  Target: LAMA2; (-) strand; PAM type: NRG; PAM sequence: CAG
caaagattataataatttat

SEQ ID NO: 67925 - DNA, 20 bp, Artificial Sequence
  Description of Artificial Sequence: Synthetic oligonucleotide
  Target: LAMA2; (-) strand; PAM type: NRG; PAM sequence: AAG
ccccatttctactaaaagca

SEQ ID NO: 67926 - DNA, 20 bp, Artificial Sequence
  Description of Artificial Sequence: Synthetic oligonucleotide
  Target: LAMA2; (-) strand; PAM type: NRG; PAM sequence: AAG
taaatccccatttctactaa

SEQ ID NO: 67927 - DNA, 20 bp, Artificial Sequence
  Description of Artificial Sequence: Synthetic oligonucleotide
  Target: LAMA2; (-) strand; PAM type: NRG; PAM sequence: TAG
tgacacaaattcttctcttt

SEQ ID NO: 67928 - DNA, 20 bp, Artificial Sequence
  Description of Artificial Sequence: Synthetic oligonucleotide
  Target: LAMA2; (-) strand; PAM type: NRG; PAM sequence: CAG
tgtgtatttactttattttg

SEQ ID NO: 67929 - DNA, 20 bp, Artificial Sequence
  Description of Artificial Sequence: Synthetic oligonucleotide
  Target: LAMA2; (-) strand; PAM type: NRG; PAM sequence: TAG
ttaaattatgagcatgtatg

SEQ ID NO: 67930 - DNA, 20 bp, Artificial Sequence
  Description of Artificial Sequence: Synthetic oligonucleotide
  Target: LAMA2; (-) strand; PAM type: NRG; PAM sequence: GAG
tagttcataatttaaattat

SEQ ID NO: 67931 - DNA, 20 bp, Artificial Sequence
  Description of Artificial Sequence: Synthetic oligonucleotide
  Target: LAMA2; (-) strand; PAM type: NRG; PAM sequence: TAG
cacagcagagtgtgataaaa

SEQ ID NO: 67932 - DNA, 20 bp, Artificial Sequence
  Description of Artificial Sequence: Synthetic oligonucleotide
  Target: LAMA2; (-) strand; PAM type: NRG; PAM sequence: GAG
ttagaaaaacttacacagca

SEQ ID NO: 67933 - DNA, 20 bp, Artificial Sequence
  Description of Artificial Sequence: Synthetic oligonucleotide
  Target: LAMA2; (-) strand; PAM type: NRG; PAM sequence: CAG
agttagaaaaacttacacag

SEQ ID NO: 67934 - DNA, 20 bp, Artificial Sequence
  Description of Artificial Sequence: Synthetic oligonucleotide
  Target: LAMA2; (-) strand; PAM type: NRG; PAM sequence: CAG
atgagttagaaaaacttaca

SEQ ID NO: 67935 - DNA, 20 bp, Artificial Sequence
  Description of Artificial Sequence: Synthetic oligonucleotide
  Target: LAMA2; (-) strand; PAM type: NRG; PAM sequence: TAG
ggctgatatacaatatgagt

SEQ ID NO: 67936 - DNA, 20 bp, Artificial Sequence
  Description of Artificial Sequence: Synthetic oligonucleotide
  Target: LAMA2; (-) strand; PAM type: NRG; PAM sequence: GAG
acatggctgatatacaatat

SEQ ID NO: 67937 - DNA, 20 bp, Artificial Sequence
  Description of Artificial Sequence: Synthetic oligonucleotide
  Target: LAMA2; (-) strand; PAM type: NRG; PAM sequence: TGG
attaatgcaagaatacaaca

SEQ ID NO: 67938 - DNA, 20 bp, Artificial Sequence
  Description of Artificial Sequence: Synthetic oligonucleotide
  Target: LAMA2; (-) strand; PAM type: NRG; PAM sequence: AAG
atgaatacattaattaatgc

SEQ ID NO: 67939 - DNA, 20 bp, Artificial Sequence
  Description of Artificial Sequence: Synthetic oligonucleotide
  Target: LAMA2; (-) strand; PAM type: NRG; PAM sequence: AAG
ctggacccaaaaaagtactg

SEQ ID NO: 67940 - DNA, 20 bp, Artificial Sequence
  Description of Artificial Sequence: Synthetic oligonucleotide
  Target: LAMA2; (-) strand; PAM type: NRG; PAM sequence: AAG
atgtaatgctggacccaaaa

SEQ ID NO: 67941 - DNA, 20 bp, Artificial Sequence
  Description of Artificial Sequence: Synthetic oligonucleotide
  Target: LAMA2; (-) strand; PAM type: NRG; PAM sequence: TGG
atatctgcctaatgtaatgc

SEQ ID NO: 67942 - DNA, 20 bp, Artificial Sequence
  Description of Artificial Sequence: Synthetic oligonucleotide
  Target: LAMA2; (-) strand; PAM type: NRG; PAM sequence: GGG
tgaaactgataaatggattc

SEQ ID NO: 67943 - DNA, 20 bp, Artificial Sequence
  Description of Artificial Sequence: Synthetic oligonucleotide
  Target: LAMA2; (-) strand; PAM type: NRG; PAM sequence: CGG
atgaaactgataaatggatt

SEQ ID NO: 67944 - DNA, 20 bp, Artificial Sequence
  Description of Artificial Sequence: Synthetic oligonucleotide
  Target: LAMA2; (-) strand; PAM type: NRG; PAM sequence: TGG
attgttatgaaactgataaa

SEQ ID NO: 67945 - DNA, 20 bp, Artificial Sequence
  Description of Artificial Sequence: Synthetic oligonucleotide
  Target: LAMA2; (-) strand; PAM type: NRG; PAM sequence: AAG
taccctgtgagaaatgaaac

SEQ ID NO: 67946 - DNA, 20 bp, Artificial Sequence
  Description of Artificial Sequence: Synthetic oligonucleotide
  Target: LAMA2; (-) strand; PAM type: NRG; PAM sequence: GAG
tttgtctttgtctaccctgt

SEQ ID NO: 67947 - DNA, 20 bp, Artificial Sequence
  Description of Artificial Sequence: Synthetic oligonucleotide
  Target: LAMA2; (-) strand; PAM type: NRG; PAM sequence: GAG
tggtagattattacttttat

SEQ ID NO: 67948 - DNA, 20 bp, Artificial Sequence
  Description of Artificial Sequence: Synthetic oligonucleotide
  Target: LAMA2; (-) strand; PAM type: NRG; PAM sequence: TAG
gctacaacaaacatgcctgg

SEQ ID NO: 67949 - DNA, 20 bp, Artificial Sequence
  Description of Artificial Sequence: Synthetic oligonucleotide
  Target: LAMA2; (-) strand; PAM type: NRG; PAM sequence: TGG
ttggctacaacaaacatgcc

SEQ ID NO: 67950 - DNA, 20 bp, Artificial Sequence
  Description of Artificial Sequence: Synthetic oligonucleotide
  Target: LAMA2; (-) strand; PAM type: NRG; PAM sequence: TGG
tagaattctatatatttgct

SEQ ID NO: 67951 - DNA, 20 bp, Artificial Sequence
  Description of Artificial Sequence: Synthetic oligonucleotide
  Target: LAMA2; (-) strand; PAM type: NRG; PAM sequence: TAG
agagctataaacaatatttt

SEQ ID NO: 67952 - DNA, 20 bp, Artificial Sequence
  Description of Artificial Sequence: Synthetic oligonucleotide
  Target: LAMA2; (-) strand; PAM type: NRG; PAM sequence: GAG
tcccaagcatgttgaaacaa

SEQ ID NO: 67953 - DNA, 20 bp, Artificial Sequence
  Description of Artificial Sequence: Synthetic oligonucleotide
  Target: LAMA2; (-) strand; PAM type: NRG; PAM sequence: AAG
tgtcccaagcatgttgaaac

SEQ ID NO: 67954 - DNA, 20 bp, Artificial Sequence
  Description of Artificial Sequence: Synthetic oligonucleotide
  Target: LAMA2; (-) strand; PAM type: NRG; PAM sequence: AAG
tgtaaacattaacttgtccc

SEQ ID NO: 67955 - DNA, 20 bp, Artificial Sequence
  Description of Artificial Sequence: Synthetic oligonucleotide
  Target: LAMA2; (-) strand; PAM type: NRG; PAM sequence: TAG
aatgaaatgttttcagtata

SEQ ID NO: 67956 - DNA, 20 bp, Artificial Sequence
  Description of Artificial Sequence: Synthetic oligonucleotide
  Target: LAMA2; (-) strand; PAM type: NRG; PAM sequence: CAG
cttattgaatgaaatgtttt

SEQ ID NO: 67957 - DNA, 20 bp, Artificial Sequence
  Description of Artificial Sequence: Synthetic oligonucleotide
  Target: LAMA2; (-) strand; PAM type: NRG; PAM sequence: AGG
aatttattcaaacctcaaga

SEQ ID NO: 67958 - DNA, 20 bp, Artificial Sequence
  Description of Artificial Sequence: Synthetic oligonucleotide
  Target: LAMA2; (-) strand; PAM type: NRG; PAM sequence: AAG
aaatttattcaaacctcaag

SEQ ID NO: 67959 - DNA, 20 bp, Artificial Sequence
  Description of Artificial Sequence: Synthetic oligonucleotide
  Target: LAMA2; (-) strand; PAM type: NRG; PAM sequence: AAG
ccaaaatttattcaaacctc

SEQ ID NO: 67960 - DNA, 20 bp, Artificial Sequence
  Description of Artificial Sequence: Synthetic oligonucleotide
  Target: LAMA2; (-) strand; PAM type: NRG; PAM sequence: AGG
aaaaccatattgattccctc

SEQ ID NO: 67961 - DNA, 20 bp, Artificial Sequence
  Description of Artificial Sequence: Synthetic oligonucleotide
  Target: LAMA2; (-) strand; PAM type: NRG; PAM sequence: CAG
aaaaaccatattgattccct

SEQ ID NO: 67962 - DNA, 20 bp, Artificial Sequence
  Description of Artificial Sequence: Synthetic oligonucleotide
  Target: LAMA2; (-) strand; PAM type: NRG; PAM sequence: GAG
ttaaacttagacatacctag

SEQ ID NO: 67963 - DNA, 20 bp, Artificial Sequence
  Description of Artificial Sequence: Synthetic oligonucleotide
  Target: LAMA2; (-) strand; PAM type: NRG; PAM sequence: AGG
acttaaacttagacatacct

SEQ ID NO: 67964 - DNA, 20 bp, Artificial Sequence
  Description of Artificial Sequence: Synthetic oligonucleotide
  Target: LAMA2; (-) strand; PAM type: NRG; PAM sequence: TAG
aacttaaacttagacatacc

SEQ ID NO: 67965 - DNA, 20 bp, Artificial Sequence
  Description of Artificial Sequence: Synthetic oligonucleotide
  Target: LAMA2; (-) strand; PAM type: NRG; PAM sequence: TAG
ttatattaagaacttaaact

SEQ ID NO: 67966 - DNA, 20 bp, Artificial Sequence
  Description of Artificial Sequence: Synthetic oligonucleotide
  Target: LAMA2; (-) strand; PAM type: NRG; PAM sequence: AAG
aaagggttgataattatatt

SEQ ID NO: 67967 - DNA, 20 bp, Artificial Sequence
  Description of Artificial Sequence: Synthetic oligonucleotide
  Target: LAMA2; (-) strand; PAM type: NRG; PAM sequence: GGG
tgaaatattaaaataataaa

SEQ ID NO: 67968 - DNA, 20 bp, Artificial Sequence
  Description of Artificial Sequence: Synthetic oligonucleotide
  Target: LAMA2; (-) strand; PAM type: NRG; PAM sequence: AGG
atgaaatattaaaataataa

SEQ ID NO: 67969 - DNA, 20 bp, Artificial Sequence
  Description of Artificial Sequence: Synthetic oligonucleotide
  Target: LAMA2; (-) strand; PAM type: NRG; PAM sequence: AAG
aatgaaatattaaaataata

SEQ ID NO: 67970 - DNA, 20 bp, Artificial Sequence
  Description of Artificial Sequence: Synthetic oligonucleotide
  Target: LAMA2; (-) strand; PAM type: NRG; PAM sequence: AAG
gatcagtgaaaatattccaa

SEQ ID NO: 67971 - DNA, 20 bp, Artificial Sequence
  Description of Artificial Sequence: Synthetic oligonucleotide
  Target: LAMA2; (-) strand; PAM type: NRG; PAM sequence: CAG
tatgactagaagttactgat

SEQ ID NO: 67972 - DNA, 20 bp, Artificial Sequence
  Description of Artificial Sequence: Synthetic oligonucleotide
  Target: LAMA2; (-) strand; PAM type: NRG; PAM sequence: AAG
ccagaacggcttatgactag

SEQ ID NO: 67973 - DNA, 20 bp, Artificial Sequence
  Description of Artificial Sequence: Synthetic oligonucleotide
  Target: LAMA2; (-) strand; PAM type: NRG; PAM sequence: TAG
gtaccagaacggcttatgac

SEQ ID NO: 67974 - DNA, 20 bp, Artificial Sequence
  Description of Artificial Sequence: Synthetic oligonucleotide
  Target: LAMA2; (-) strand; PAM type: NRG; PAM sequence: CGG
tttgatgattggtaccagaa

SEQ ID NO: 67975 - DNA, 20 bp, Artificial Sequence
  Description of Artificial Sequence: Synthetic oligonucleotide
  Target: LAMA2; (-) strand; PAM type: NRG; PAM sequence: CAG
tgaaatttgatgattggtac

SEQ ID NO: 67976 - DNA, 20 bp, Artificial Sequence
  Description of Artificial Sequence: Synthetic oligonucleotide
  Target: LAMA2; (-) strand; PAM type: NRG; PAM sequence: TGG
caaatatgaaatttgatgat

SEQ ID NO: 67977 - DNA, 20 bp, Artificial Sequence
  Description of Artificial Sequence: Synthetic oligonucleotide
  Target: LAMA2; (-) strand; PAM type: NRG; PAM sequence: TAG
atgtcaagacagccaaaggc

SEQ ID NO: 67978 - DNA, 20 bp, Artificial Sequence
  Description of Artificial Sequence: Synthetic oligonucleotide
  Target: LAMA2; (-) strand; PAM type: NRG; PAM sequence: AGG
gggcatgtcaagacagccaa

SEQ ID NO: 67979 - DNA, 20 bp, Artificial Sequence
  Description of Artificial Sequence: Synthetic oligonucleotide
  Target: LAMA2; (-) strand; PAM type: NRG; PAM sequence: AAG
tgggcatgtcaagacagcca

SEQ ID NO: 67980 - DNA, 20 bp, Artificial Sequence
  Description of Artificial Sequence: Synthetic oligonucleotide
  Target: LAMA2; (-) strand; PAM type: NRG; PAM sequence: CAG
tggatttgggcatgtcaaga

SEQ ID NO: 67981 - DNA, 20 bp, Artificial Sequence
  Description of Artificial Sequence: Synthetic oligonucleotide
  Target: LAMA2; (-) strand; PAM type: NRG; PAM sequence: AAG
ttggtggatttgggcatgtc

SEQ ID NO: 67982 - DNA, 20 bp, Artificial Sequence
  Description of Artificial Sequence: Synthetic oligonucleotide
  Target: LAMA2; (-) strand; PAM type: NRG; PAM sequence: GGG
gatatatacttggtggattt

SEQ ID NO: 67983 - DNA, 20 bp, Artificial Sequence
  Description of Artificial Sequence: Synthetic oligonucleotide
  Target: LAMA2; (-) strand; PAM type: NRG; PAM sequence: TGG
agatatatacttggtggatt

SEQ ID NO: 67984 - DNA, 20 bp, Artificial Sequence
  Description of Artificial Sequence: Synthetic oligonucleotide
  Target: LAMA2; (-) strand; PAM type: NRG; PAM sequence: TGG
gaagtgagatatatacttgg

SEQ ID NO: 67985 - DNA, 20 bp, Artificial Sequence
  Description of Artificial Sequence: Synthetic oligonucleotide
  Target: LAMA2; (-) strand; PAM type: NRG; PAM sequence: TGG
ttggaagtgagatatatact

SEQ ID NO: 67986 - DNA, 20 bp, Artificial Sequence
  Description of Artificial Sequence: Synthetic oligonucleotide
  Target: LAMA2; (-) strand; PAM type: NRG; PAM sequence: GAG
cctgagactattttggaagt

SEQ ID NO: 67987 - DNA, 20 bp, Artificial Sequence
  Description of Artificial Sequence: Synthetic oligonucleotide
  Target: LAMA2; (-) strand; PAM type: NRG; PAM sequence: AAG
atatcctgagactattttgg

SEQ ID NO: 67988 - DNA, 20 bp, Artificial Sequence
  Description of Artificial Sequence: Synthetic oligonucleotide
  Target: LAMA2; (-) strand; PAM type: NRG; PAM sequence: TGG
aacatatcctgagactattt

SEQ ID NO: 67989 - DNA, 20 bp, Artificial Sequence
  Description of Artificial Sequence: Synthetic oligonucleotide
  Target: LAMA2; (-) strand; PAM type: NRG; PAM sequence: GAG
atatctagaaaacatatcct

SEQ ID NO: 67990 - DNA, 20 bp, Artificial Sequence
  Description of Artificial Sequence: Synthetic oligonucleotide
  Target: LAMA2; (-) strand; PAM type: NRG; PAM sequence: TAG
ccatcatctaagatcatatc

SEQ ID NO: 67991 - DNA, 20 bp, Artificial Sequence
  Description of Artificial Sequence: Synthetic oligonucleotide
  Target: LAMA2; (-) strand; PAM type: NRG; PAM sequence: AAG
aacaatacactccatcatct

SEQ ID NO: 67992 - DNA, 20 bp, Artificial Sequence
  Description of Artificial Sequence: Synthetic oligonucleotide
  Target: LAMA2; (-) strand; PAM type: NRG; PAM sequence: TGG
ttgcttatcagttttccata

SEQ ID NO: 67993 - DNA, 20 bp, Artificial Sequence
  Description of Artificial Sequence: Synthetic oligonucleotide
  Target: LAMA2; (-) strand; PAM type: NRG; PAM sequence: CAG
gcttctaaaaaattgcttat

SEQ ID NO: 67994 - DNA, 20 bp, Artificial Sequence
  Description of Artificial Sequence: Synthetic oligonucleotide
  Target: LAMA2; (-) strand; PAM type: NRG; PAM sequence: GAG
tcatcttgttttagcgtcat

SEQ ID NO: 67995 - DNA, 20 bp, Artificial Sequence
  Description of Artificial Sequence: Synthetic oligonucleotide
  Target: LAMA2; (-) strand; PAM type: NRG; PAM sequence: TAG
atttcttcatcatcttgttt

SEQ ID NO: 67996 - DNA, 20 bp, Artificial Sequence
  Description of Artificial Sequence: Synthetic oligonucleotide
  Target: LAMA2; (-) strand; PAM type: NRG; PAM sequence: GAG
tttctccacacttgcacaca

SEQ ID NO: 67997 - DNA, 20 bp, Artificial Sequence
  Description of Artificial Sequence: Synthetic oligonucleotide
  Target: LAMA2; (-) strand; PAM type: NRG; PAM sequence: CAG
tttttctccacacttgcaca

SEQ ID NO: 67998 - DNA, 20 bp, Artificial Sequence
  Description of Artificial Sequence: Synthetic oligonucleotide
  Target: LAMA2; (-) strand; PAM type: NRG; PAM sequence: AAG
taagatcactatggtatcac

SEQ ID NO: 67999 - DNA, 20 bp, Artificial Sequence
  Description of Artificial Sequence: Synthetic oligonucleotide
  Target: LAMA2; (-) strand; PAM type: NRG; PAM sequence: TGG
aatgagctctaagatcacta

SEQ ID NO: 68000 - DNA, 20 bp, Artificial Sequence
  Description of Artificial Sequence: Synthetic oligonucleotide
  Target: LAMA2; (-) strand; PAM type: NRG; PAM sequence: AAG
gctgatgtataatgagctct

SEQ ID NO: 68001 - DNA, 20 bp, Artificial Sequence
  Description of Artificial Sequence: Synthetic oligonucleotide
  Target: LAMA2; (-) strand; PAM type: NRG; PAM sequence: GAG
cttcattgctgatgtataat

SEQ ID NO: 68002 - DNA, 20 bp, Artificial Sequence
  Description of Artificial Sequence: Synthetic oligonucleotide
  Target: LAMA2; (-) strand; PAM type: NRG; PAM sequence: AAG
ttttaattgcatggtagtta

SEQ ID NO: 68003 - DNA, 20 bp, Artificial Sequence
  Description of Artificial Sequence: Synthetic oligonucleotide
  Target: LAMA2; (-) strand; PAM type: NRG; PAM sequence: TAG
ctagtattttaattgcatgg

SEQ ID NO: 68004 - DNA, 20 bp, Artificial Sequence
  Description of Artificial Sequence: Synthetic oligonucleotide
  Target: LAMA2; (-) strand; PAM type: NRG; PAM sequence: TGG
tctctagtattttaattgca

SEQ ID NO: 68005 - DNA, 20 bp, Artificial Sequence
  Description of Artificial Sequence: Synthetic oligonucleotide
  Target: LAMA2; (-) strand; PAM type: NRG; PAM sequence: TAG
acaatcttatttatactctc

SEQ ID NO: 68006 - DNA, 20 bp, Artificial Sequence
  Description of Artificial Sequence: Synthetic oligonucleotide
  Target: LAMA2; (-) strand; PAM type: NRG; PAM sequence: TGG
tatatgctgccacatacaca

SEQ ID NO: 68007 - DNA, 20 bp, Artificial Sequence
  Description of Artificial Sequence: Synthetic oligonucleotide
  Target: LAMA2; (-) strand; PAM type: NRG; PAM sequence: GAG
ctaaaattccttccacttct

SEQ ID NO: 68008 - DNA, 20 bp, Artificial Sequence
  Description of Artificial Sequence: Synthetic oligonucleotide
  Target: LAMA2; (-) strand; PAM type: NRG; PAM sequence: GAG
taatccgtttgctttttcaa

SEQ ID NO: 68009 - DNA, 20 bp, Artificial Sequence
  Description of Artificial Sequence: Synthetic oligonucleotide
  Target: LAMA2; (-) strand; PAM type: NRG; PAM sequence: AAG
cctaatccgtttgctttttc

SEQ ID NO: 68010 - DNA, 20 bp, Artificial Sequence
  Description of Artificial Sequence: Synthetic oligonucleotide
  Target: LAMA2; (-) strand; PAM type: NRG; PAM sequence: AGG
tacttgaataatattacaga

SEQ ID NO: 68011 - DNA, 20 bp, Artificial Sequence
  Description of Artificial Sequence: Synthetic oligonucleotide
  Target: LAMA2; (-) strand; PAM type: NRG; PAM sequence: AAG
ttacttgaataatattacag

SEQ ID NO: 68012 - DNA, 20 bp, Artificial Sequence
  Description of Artificial Sequence: Synthetic oligonucleotide
  Target: LAMA2; (-) strand; PAM type: NRG; PAM sequence: CAG
ttcttacttgaataatatta

SEQ ID NO: 68013 - DNA, 20 bp, Artificial Sequence
  Description of Artificial Sequence: Synthetic oligonucleotide
  Target: LAMA2; (-) strand; PAM type: NRG; PAM sequence: GAG
ataagtaagatgtccaaaat

SEQ ID NO: 68014 - DNA, 20 bp, Artificial Sequence
  Description of Artificial Sequence: Synthetic oligonucleotide
  Target: LAMA2; (-) strand; PAM type: NRG; PAM sequence: AAG
gaatcaatctgactataagt

SEQ ID NO: 68015 - DNA, 20 bp, Artificial Sequence
  Description of Artificial Sequence: Synthetic oligonucleotide
  Target: LAMA2; (-) strand; PAM type: NRG; PAM sequence: AAG
ttgagaatcaatctgactat

SEQ ID NO: 68016 - DNA, 20 bp, Artificial Sequence
  Description of Artificial Sequence: Synthetic oligonucleotide
  Target: LAMA2; (-) strand; PAM type: NRG; PAM sequence: GAG
agacatttaaaaagtgtttt

SEQ ID NO: 68017 - DNA, 20 bp, Artificial Sequence
  Description of Artificial Sequence: Synthetic oligonucleotide
  Target: LAMA2; (-) strand; PAM type: NRG; PAM sequence: AAG
aatatttctagacatttaaa

SEQ ID NO: 68018 - DNA, 20 bp, Artificial Sequence
  Description of Artificial Sequence: Synthetic oligonucleotide
  Target: LAMA2; (-) strand; PAM type: NRG; PAM sequence: TAG
aataccattgtaaatatttc

SEQ ID NO: 68019 - DNA, 20 bp, Artificial Sequence
  Description of Artificial Sequence: Synthetic oligonucleotide
  Target: LAMA2; (-) strand; PAM type: NRG; PAM sequence: AGG
aattttttttagcatttctc

SEQ ID NO: 68020 - DNA, 20 bp, Artificial Sequence
  Description of Artificial Sequence: Synthetic oligonucleotide
  Target: LAMA2; (-) strand; PAM type: NRG; PAM sequence: CAG
taattttttttagcatttct

SEQ ID NO: 68021 - DNA, 20 bp, Artificial Sequence
  Description of Artificial Sequence: Synthetic oligonucleotide
  Target: LAMA2; (-) strand; PAM type: NRG; PAM sequence: TAG
ttacattttctaattttttt

SEQ ID NO: 68022 - DNA, 20 bp, Artificial Sequence
  Description of Artificial Sequence: Synthetic oligonucleotide
  Target: LAMA2; (-) strand; PAM type: NRG; PAM sequence: CAG
tttatgttatttcctaactt

SEQ ID NO: 68023 - DNA, 20 bp, Artificial Sequence
  Description of Artificial Sequence: Synthetic oligonucleotide
  Target: LAMA2; (-) strand; PAM type: NRG; PAM sequence: AAG
tccagttatgaacagccatt

SEQ ID NO: 68024 - DNA, 20 bp, Artificial Sequence
  Description of Artificial Sequence: Synthetic oligonucleotide
  Target: LAMA2; (-) strand; PAM type: NRG; PAM sequence: CAG
tgtttttttccagttatgaa

SEQ ID NO: 68025 - DNA, 20 bp, Artificial Sequence
  Description of Artificial Sequence: Synthetic oligonucleotide
  Target: LAMA2; (-) strand; PAM type: NRG; PAM sequence: CAG
ggagcatatctgtttttttc

SEQ ID NO: 68026 - DNA, 20 bp, Artificial Sequence
  Description of Artificial Sequence: Synthetic oligonucleotide
  Target: LAMA2; (-) strand; PAM type: NRG; PAM sequence: GAG
ctcacaattcatatatttcg

SEQ ID NO: 68027 - DNA, 20 bp, Artificial Sequence
  Description of Artificial Sequence: Synthetic oligonucleotide
  Target: LAMA2; (-) strand; PAM type: NRG; PAM sequence: CGG
atctcacaattcatatattt

SEQ ID NO: 68028 - DNA, 20 bp, Artificial Sequence
  Description of Artificial Sequence: Synthetic oligonucleotide
  Target: LAMA2; (-) strand; PAM type: NRG; PAM sequence: CAG
tttcttggggtcttttactg

SEQ ID NO: 68029 - DNA, 20 bp, Artificial Sequence
  Description of Artificial Sequence: Synthetic oligonucleotide
  Target: LAMA2; (-) strand; PAM type: NRG; PAM sequence: GGG
tagtttccctcaatttcttg

SEQ ID NO: 68030 - DNA, 20 bp, Artificial Sequence
  Description of Artificial Sequence: Synthetic oligonucleotide
  Target: LAMA2; (-) strand; PAM type: NRG; PAM sequence: GGG
atagtttccctcaatttctt

SEQ ID NO: 68031 - DNA, 20 bp, Artificial Sequence
  Description of Artificial Sequence: Synthetic oligonucleotide
  Target: LAMA2; (-) strand; PAM type: NRG; PAM sequence: TGG
catagtttccctcaatttct

SEQ ID NO: 68032 - DNA, 20 bp, Artificial Sequence
  Description of Artificial Sequence: Synthetic oligonucleotide
  Target: LAMA2; (-) strand; PAM type: NRG; PAM sequence: TAG
acttgctacaatcatttcca

SEQ ID NO: 68033 - DNA, 20 bp, Artificial Sequence
  Description of Artificial Sequence: Synthetic oligonucleotide
  Target: LAMA2; (-) strand; PAM type: NRG; PAM sequence: TAG
tttcaaaatgcaaacaaaaa

SEQ ID NO: 68034 - DNA, 20 bp, Artificial Sequence
  Description of Artificial Sequence: Synthetic oligonucleotide
  Target: LAMA2; (-) strand; PAM type: NRG; PAM sequence: TAG
caatttaagattttcaaaat

SEQ ID NO: 68035 - DNA, 20 bp, Artificial Sequence
  Description of Artificial Sequence: Synthetic oligonucleotide
  Target: LAMA2; (-) strand; PAM type: NRG; PAM sequence: AAG
gaattcctaaaaatcaattt

SEQ ID NO: 68036 - DNA, 20 bp, Artificial Sequence
  Description of Artificial Sequence: Synthetic oligonucleotide
  Target: LAMA2; (-) strand; PAM type: NRG; PAM sequence: CAG
gtctgagaaaaaagtagccc

SEQ ID NO: 68037 - DNA, 20 bp, Artificial Sequence
  Description of Artificial Sequence: Synthetic oligonucleotide
  Target: LAMA2; (-) strand; PAM type: NRG; PAM sequence: TAG
ctagaggtctgagaaaaaag

SEQ ID NO: 68038 - DNA, 20 bp, Artificial Sequence
  Description of Artificial Sequence: Synthetic oligonucleotide
  Target: LAMA2; (-) strand; PAM type: NRG; PAM sequence: AAG
gccctagaggtctgagaaaa

SEQ ID NO: 68039 - DNA, 20 bp, Artificial Sequence
  Description of Artificial Sequence: Synthetic oligonucleotide
  Target: LAMA2; (-) strand; PAM type: NRG; PAM sequence: GAG
attggttgccctagaggtct

SEQ ID NO: 68040 - DNA, 20 bp, Artificial Sequence
  Description of Artificial Sequence: Synthetic oligonucleotide
  Target: LAMA2; (-) strand; PAM type: NRG; PAM sequence: AGG
tctacaattggttgccctag

SEQ ID NO: 68041 - DNA, 20 bp, Artificial Sequence
  Description of Artificial Sequence: Synthetic oligonucleotide
  Target: LAMA2; (-) strand; PAM type: NRG; PAM sequence: GAG
ctctacaattggttgcccta

SEQ ID NO: 68042 - DNA, 20 bp, Artificial Sequence
  Description of Artificial Sequence: Synthetic oligonucleotide
  Target: LAMA2; (-) strand; PAM type: NRG; PAM sequence: TAG
gtctctacaattggttgccc

SEQ ID NO: 68043 - DNA, 20 bp, Artificial Sequence
  Description of Artificial Sequence: Synthetic oligonucleotide
  Target: LAMA2; (-) strand; PAM type: NRG; PAM sequence: TGG
aagggggaagtctctacaat

SEQ ID NO: 68044 - DNA, 20 bp, Artificial Sequence
  Description of Artificial Sequence: Synthetic oligonucleotide
  Target: LAMA2; (-) strand; PAM type: NRG; PAM sequence: AAG
agtcaattaacagaaggggg

SEQ ID NO: 68045 - DNA, 20 bp, Artificial Sequence
  Description of Artificial Sequence: Synthetic oligonucleotide
  Target: LAMA2; (-) strand; PAM type: NRG; PAM sequence: GGG
ctgagtcaattaacagaagg

SEQ ID NO: 68046 - DNA, 20 bp, Artificial Sequence
  Description of Artificial Sequence: Synthetic oligonucleotide
  Target: LAMA2; (-) strand; PAM type: NRG; PAM sequence: GGG
tctgagtcaattaacagaag

SEQ ID NO: 68047 - DNA, 20 bp, Artificial Sequence
  Description of Artificial Sequence: Synthetic oligonucleotide
  Target: LAMA2; (-) strand; PAM type: NRG; PAM sequence: GGG
atctgagtcaattaacagaa

SEQ ID NO: 68048 - DNA, 20 bp, Artificial Sequence
  Description of Artificial Sequence: Synthetic oligonucleotide
  Target: LAMA2; (-) strand; PAM type: NRG; PAM sequence: AGG
gatctgagtcaattaacaga

SEQ ID NO: 68049 - DNA, 20 bp, Artificial Sequence
  Description of Artificial Sequence: Synthetic oligonucleotide
  Target: LAMA2; (-) strand; PAM type: NRG; PAM sequence: AAG
agatctgagtcaattaacag

SEQ ID NO: 68050 - DNA, 20 bp, Artificial Sequence
  Description of Artificial Sequence: Synthetic oligonucleotide
  Target: LAMA2; (-) strand; PAM type: NRG; PAM sequence: CAG
agcagatctgagtcaattaa

SEQ ID NO: 68051 - DNA, 20 bp, Artificial Sequence
  Description of Artificial Sequence: Synthetic oligonucleotide
  Target: LAMA2; (-) strand; PAM type: NRG; PAM sequence: GAG
tttaatatgtaagcagatct

SEQ ID NO: 68052 - DNA, 20 bp, Artificial Sequence
  Description of Artificial Sequence: Synthetic oligonucleotide
  Target: LAMA2; (-) strand; PAM type: NRG; PAM sequence: CAG
ggtggcctttaatatgtaag

SEQ ID NO: 68053 - DNA, 20 bp, Artificial Sequence
  Description of Artificial Sequence: Synthetic oligonucleotide
  Target: LAMA2; (-) strand; PAM type: NRG; PAM sequence: AAG
agaggtggcctttaatatgt

SEQ ID NO: 68054 - DNA, 20 bp, Artificial Sequence
  Description of Artificial Sequence: Synthetic oligonucleotide
  Target: LAMA2; (-) strand; PAM type: NRG; PAM sequence: TGG
ttccagctgagaaccagagg

SEQ ID NO: 68055 - DNA, 20 bp, Artificial Sequence
  Description of Artificial Sequence: Synthetic oligonucleotide
  Target: LAMA2; (-) strand; PAM type: NRG; PAM sequence: AGG
tttttccagctgagaaccag

SEQ ID NO: 68056 - DNA, 20 bp, Artificial Sequence
  Description of Artificial Sequence: Synthetic oligonucleotide
  Target: LAMA2; (-) strand; PAM type: NRG; PAM sequence: GAG
ttttttccagctgagaacca

SEQ ID NO: 68057 - DNA, 20 bp, Artificial Sequence
  Description of Artificial Sequence: Synthetic oligonucleotide
  Target: LAMA2; (-) strand; PAM type: NRG; PAM sequence: CAG
tcttttttccagctgagaac

SEQ ID NO: 68058 - DNA, 20 bp, Artificial Sequence
  Description of Artificial Sequence: Synthetic oligonucleotide
  Target: LAMA2; (-) strand; PAM type: NRG; PAM sequence: GAG
aggaactcttttttccagct

SEQ ID NO: 68059 - DNA, 20 bp, Artificial Sequence
  Description of Artificial Sequence: Synthetic oligonucleotide
  Target: LAMA2; (-) strand; PAM type: NRG; PAM sequence: CAG
aagggaggaactcttttttc

SEQ ID NO: 68060 - DNA, 20 bp, Artificial Sequence
  Description of Artificial Sequence: Synthetic oligonucleotide
  Target: LAMA2; (-) strand; PAM type: NRG; PAM sequence: AGG
agtcaactgtttcaaaaggg

SEQ ID NO: 68061 - DNA, 20 bp, Artificial Sequence
  Description of Artificial Sequence: Synthetic oligonucleotide
  Target: LAMA2; (-) strand; PAM type: NRG; PAM sequence: GAG
gagtcaactgtttcaaaagg

SEQ ID NO: 68062 - DNA, 20 bp, Artificial Sequence
  Description of Artificial Sequence: Synthetic oligonucleotide
  Target: LAMA2; (-) strand; PAM type: NRG; PAM sequence: GGG
ctgagtcaactgtttcaaaa

SEQ ID NO: 68063 - DNA, 20 bp, Artificial Sequence
  Description of Artificial Sequence: Synthetic oligonucleotide
  Target: LAMA2; (-) strand; PAM type: NRG; PAM sequence: AGG
tctgagtcaactgtttcaaa

SEQ ID NO: 68064 - DNA, 20 bp, Artificial Sequence
  Description of Artificial Sequence: Synthetic oligonucleotide
  Target: LAMA2; (-) strand; PAM type: NRG; PAM sequence: AAG
ttctgagtcaactgtttcaa

SEQ ID NO: 68065 - DNA, 20 bp, Artificial Sequence
  Description of Artificial Sequence: Synthetic oligonucleotide
  Target: LAMA2; (-) strand; PAM type: NRG; PAM sequence: GAG
gaaaggaaggaactgattct

SEQ ID NO: 68066 - DNA, 20 bp, Artificial Sequence
  Description of Artificial Sequence: Synthetic oligonucleotide
  Target: LAMA2; (-) strand; PAM type: NRG; PAM sequence: AGG
aagataaggatctgaaagga

SEQ ID NO: 68067 - DNA, 20 bp, Artificial Sequence
  Description of Artificial Sequence: Synthetic oligonucleotide
  Target: LAMA2; (-) strand; PAM type: NRG; PAM sequence: AAG
aaagataaggatctgaaagg

SEQ ID NO: 68068 - DNA, 20 bp, Artificial Sequence
  Description of Artificial Sequence: Synthetic oligonucleotide
  Target: LAMA2; (-) strand; PAM type: NRG; PAM sequence: AGG
attaaagataaggatctgaa

SEQ ID NO: 68069 - DNA, 20 bp, Artificial Sequence
  Description of Artificial Sequence: Synthetic oligonucleotide
  Target: LAMA2; (-) strand; PAM type: NRG; PAM sequence: AAG
aattaaagataaggatctga

SEQ ID NO: 68070 - DNA, 20 bp, Artificial Sequence
  Description of Artificial Sequence: Synthetic oligonucleotide
  Target: LAMA2; (-) strand; PAM type: NRG; PAM sequence: AGG
agacaaagtaattaaagata

SEQ ID NO: 68071 - DNA, 20 bp, Artificial Sequence
  Description of Artificial Sequence: Synthetic oligonucleotide
  Target: LAMA2; (-) strand; PAM type: NRG; PAM sequence: AAG
aagacaaagtaattaaagat

SEQ ID NO: 68072 - DNA, 20 bp, Artificial Sequence
  Description of Artificial Sequence: Synthetic oligonucleotide
  Target: LAMA2; (-) strand; PAM type: NRG; PAM sequence: AAG
gttagaagacaaagtaatta

SEQ ID NO: 68073 - DNA, 20 bp, Artificial Sequence
  Description of Artificial Sequence: Synthetic oligonucleotide
  Target: LAMA2; (-) strand; PAM type: NRG; PAM sequence: AAG
ggaccccaggttagaagaca

SEQ ID NO: 68074 - DNA, 20 bp, Artificial Sequence
  Description of Artificial Sequence: Synthetic oligonucleotide
  Target: LAMA2; (-) strand; PAM type: NRG; PAM sequence: AAG
agattaggaccccaggttag

SEQ ID NO: 68075 - DNA, 20 bp, Artificial Sequence
  Description of Artificial Sequence: Synthetic oligonucleotide
  Target: LAMA2; (-) strand; PAM type: NRG; PAM sequence: TAG
caaagattaggaccccaggt

SEQ ID NO: 68076 - DNA, 20 bp, Artificial Sequence
  Description of Artificial Sequence: Synthetic oligonucleotide
  Target: LAMA2; (-) strand; PAM type: NRG; PAM sequence: AGG
taggcaaagattaggacccc

SEQ ID NO: 68077 - DNA, 20 bp, Artificial Sequence
  Description of Artificial Sequence: Synthetic oligonucleotide
  Target: LAMA2; (-) strand; PAM type: NRG; PAM sequence: CAG
ctaggcaaagattaggaccc

SEQ ID NO: 68078 - DNA, 20 bp, Artificial Sequence
  Description of Artificial Sequence: Synthetic oligonucleotide
  Target: LAMA2; (-) strand; PAM type: NRG; PAM sequence: AGG
taaattcctaggcaaagatt

SEQ ID NO: 68079 - DNA, 20 bp, Artificial Sequence
  Description of Artificial Sequence: Synthetic oligonucleotide
  Target: LAMA2; (-) strand; PAM type: NRG; PAM sequence: TAG
ttaaattcctaggcaaagat

SEQ ID NO: 68080 - DNA, 20 bp, Artificial Sequence
  Description of Artificial Sequence: Synthetic oligonucleotide
  Target: LAMA2; (-) strand; PAM type: NRG; PAM sequence: AAG
ttactttaaattcctaggca

SEQ ID NO: 68081 - DNA, 20 bp, Artificial Sequence
  Description of Artificial Sequence: Synthetic oligonucleotide
  Target: LAMA2; (-) strand; PAM type: NRG; PAM sequence: AGG
aatctttactttaaattcct

SEQ ID NO: 68082 - DNA, 20 bp, Artificial Sequence
  Description of Artificial Sequence: Synthetic oligonucleotide
  Target: LAMA2; (-) strand; PAM type: NRG; PAM sequence: TAG
caatctttactttaaattcc

SEQ ID NO: 68083 - DNA, 20 bp, Artificial Sequence
  Description of Artificial Sequence: Synthetic oligonucleotide
  Target: LAMA2; (-) strand; PAM type: NRG; PAM sequence: CGG
aagtcaagagaaataagatt

SEQ ID NO: 68084 - DNA, 20 bp, Artificial Sequence
  Description of Artificial Sequence: Synthetic oligonucleotide
  Target: LAMA2; (-) strand; PAM type: NRG; PAM sequence: AAG
agatacaagtcaagagaaat

SEQ ID NO: 68085 - DNA, 20 bp, Artificial Sequence
  Description of Artificial Sequence: Synthetic oligonucleotide
  Target: LAMA2; (-) strand; PAM type: NRG; PAM sequence: GAG
taaaggtagatacaagtcaa

SEQ ID NO: 68086 - DNA, 20 bp, Artificial Sequence
  Description of Artificial Sequence: Synthetic oligonucleotide
  Target: LAMA2; (-) strand; PAM type: NRG; PAM sequence: AAG
agtaaaggtagatacaagtc

SEQ ID NO: 68087 - DNA, 20 bp, Artificial Sequence
  Description of Artificial Sequence: Synthetic oligonucleotide
  Target: LAMA2; (-) strand; PAM type: NRG; PAM sequence: AAG
gctaaagtaaaggtagatac

SEQ ID NO: 68088 - DNA, 20 bp, Artificial Sequence
  Description of Artificial Sequence: Synthetic oligonucleotide
  Target: LAMA2; (-) strand; PAM type: NRG; PAM sequence: TAG
agggtgagctaaagtaaagg

SEQ ID NO: 68089 - DNA, 20 bp, Artificial Sequence
  Description of Artificial Sequence: Synthetic oligonucleotide
  Target: LAMA2; (-) strand; PAM type: NRG; PAM sequence: AGG
cagagggtgagctaaagtaa

SEQ ID NO: 68090 - DNA, 20 bp, Artificial Sequence
  Description of Artificial Sequence: Synthetic oligonucleotide
  Target: LAMA2; (-) strand; PAM type: NRG; PAM sequence: AAG
ccagagggtgagctaaagta

SEQ ID NO: 68091 - DNA, 20 bp, Artificial Sequence
  Description of Artificial Sequence: Synthetic oligonucleotide
  Target: LAMA2; (-) strand; PAM type: NRG; PAM sequence: AAG
cacgcccagagggtgagcta

SEQ ID NO: 68092 - DNA, 20 bp, Artificial Sequence
  Description of Artificial Sequence: Synthetic oligonucleotide
  Target: LAMA2; (-) strand; PAM type: NRG; PAM sequence: GAG
agaggccacgcccagagggt

SEQ ID NO: 68093 - DNA, 20 bp, Artificial Sequence
  Description of Artificial Sequence: Synthetic oligonucleotide
  Target: LAMA2; (-) strand; PAM type: NRG; PAM sequence: GGG
ggctagaggccacgcccaga

SEQ ID NO: 68094 - DNA, 20 bp, Artificial Sequence
  Description of Artificial Sequence: Synthetic oligonucleotide
  Target: LAMA2; (-) strand; PAM type: NRG; PAM sequence: AGG
tggctagaggccacgcccag

SEQ ID NO: 68095 - DNA, 20 bp, Artificial Sequence
  Description of Artificial Sequence: Synthetic oligonucleotide
  Target: LAMA2; (-) strand; PAM type: NRG; PAM sequence: GAG
ctggctagaggccacgccca

SEQ ID NO: 68096 - DNA, 20 bp, Artificial Sequence
  Description of Artificial Sequence: Synthetic oligonucleotide
  Target: LAMA2; (-) strand; PAM type: NRG; PAM sequence: CAG
gactggctagaggccacgcc

SEQ ID NO: 68097 - DNA, 20 bp, Artificial Sequence
  Description of Artificial Sequence: Synthetic oligonucleotide
  Target: LAMA2; (-) strand; PAM type: NRG; PAM sequence: AGG
ctcaaagtgagactggctag

SEQ ID NO: 68098 - DNA, 20 bp, Artificial Sequence
  Description of Artificial Sequence: Synthetic oligonucleotide
  Target: LAMA2; (-) strand; PAM type: NRG; PAM sequence: GAG
actcaaagtgagactggcta

SEQ ID NO: 68099 - DNA, 20 bp, Artificial Sequence
  Description of Artificial Sequence: Synthetic oligonucleotide
  Target: LAMA2; (-) strand; PAM type: NRG; PAM sequence: TAG
atactcaaagtgagactggc

SEQ ID NO: 68100 - DNA, 20 bp, Artificial Sequence
  Description of Artificial Sequence: Synthetic oligonucleotide
  Target: LAMA2; (-) strand; PAM type: NRG; PAM sequence: TGG
aaagatactcaaagtgagac

SEQ ID NO: 68101 - DNA, 20 bp, Artificial Sequence
  Description of Artificial Sequence: Synthetic oligonucleotide
  Target: LAMA2; (-) strand; PAM type: NRG; PAM sequence: GAG
gtttcaaagatactcaaagt

SEQ ID NO: 68102 - DNA, 20 bp, Artificial Sequence
  Description of Artificial Sequence: Synthetic oligonucleotide
  Target: LAMA2; (-) strand; PAM type: NRG; PAM sequence: AAG
gagagtttcaaagatactca

SEQ ID NO: 68103 - DNA, 20 bp, Artificial Sequence
  Description of Artificial Sequence: Synthetic oligonucleotide
  Target: LAMA2; (-) strand; PAM type: NRG; PAM sequence: AAG
acaataaggagagagtttca

SEQ ID NO: 68104 - DNA, 20 bp, Artificial Sequence
  Description of Artificial Sequence: Synthetic oligonucleotide
  Target: LAMA2; (-) strand; PAM type: NRG; PAM sequence: GAG
aggggttgacaataaggaga

SEQ ID NO: 68105 - DNA, 20 bp, Artificial Sequence
  Description of Artificial Sequence: Synthetic oligonucleotide
  Target: LAMA2; (-) strand; PAM type: NRG; PAM sequence: GAG
taaggggttgacaataagga

SEQ ID NO: 68106 - DNA, 20 bp, Artificial Sequence
  Description of Artificial Sequence: Synthetic oligonucleotide
  Target: LAMA2; (-) strand; PAM type: NRG; PAM sequence: GAG
agtaaggggttgacaataag

SEQ ID NO: 68107 - DNA, 20 bp, Artificial Sequence
  Description of Artificial Sequence: Synthetic oligonucleotide
  Target: LAMA2; (-) strand; PAM type: NRG; PAM sequence: AGG
aaagtaaggggttgacaata

SEQ ID NO: 68108 - DNA, 20 bp, Artificial Sequence
  Description of Artificial Sequence: Synthetic oligonucleotide
  Target: LAMA2; (-) strand; PAM type: NRG; PAM sequence: AAG
caaagtaaggggttgacaat

SEQ ID NO: 68109 - DNA, 20 bp, Artificial Sequence
  Description of Artificial Sequence: Synthetic oligonucleotide
  Target: LAMA2; (-) strand; PAM type: NRG; PAM sequence: GGG
aaaaaaataatcaaagtaag

SEQ ID NO: 68110 - DNA, 20 bp, Artificial Sequence
  Description of Artificial Sequence: Synthetic oligonucleotide
  Target: LAMA2; (-) strand; PAM type: NRG; PAM sequence: GGG
aaaaaaaataatcaaagtaa

SEQ ID NO: 68111 - DNA, 20 bp, Artificial Sequence
  Description of Artificial Sequence: Synthetic oligonucleotide
  Target: LAMA2; (-) strand; PAM type: NRG; PAM sequence: AGG
taaaaaaaataatcaaagta

SEQ ID NO: 68112 - DNA, 20 bp, Artificial Sequence
  Description of Artificial Sequence: Synthetic oligonucleotide
  Target: LAMA2; (-) strand; PAM type: NRG; PAM sequence: AAG
ttaaaaaaaataatcaaagt

SEQ ID NO: 68113 - DNA, 20 bp, Artificial Sequence
  Description of Artificial Sequence: Synthetic oligonucleotide
  Target: LAMA2; (-) strand; PAM type: NRG; PAM sequence: AAG
taaattaaaaaaaataatca

SEQ ID NO: 68114 - DNA, 20 bp, Artificial Sequence
  Description of Artificial Sequence: Synthetic oligonucleotide
  Target: LAMA2; (-) strand; PAM type: NRG; PAM sequence: TGG
tttgagatgtatttctacat

SEQ ID NO: 68115 - DNA, 20 bp, Artificial Sequence
  Description of Artificial Sequence: Synthetic oligonucleotide
  Target: LAMA2; (-) strand; PAM type: NRG; PAM sequence: GAG
agaacttctgcataattttt

SEQ ID NO: 68116 - DNA, 20 bp, Artificial Sequence
  Description of Artificial Sequence: Synthetic oligonucleotide
  Target: LAMA2; (-) strand; PAM type: NRG; PAM sequence: TAG
catgcaagaacattatatga

SEQ ID NO: 68117 - DNA, 20 bp, Artificial Sequence
  Description of Artificial Sequence: Synthetic oligonucleotide
  Target: LAMA2; (-) strand; PAM type: NRG; PAM sequence: AAG
aaagagcttcagacccatgc

SEQ ID NO: 68118 - DNA, 20 bp, Artificial Sequence
  Description of Artificial Sequence: Synthetic oligonucleotide
  Target: LAMA2; (-) strand; PAM type: NRG; PAM sequence: CAG
cccttgccttcaaagagctt

SEQ ID NO: 68119 - DNA, 20 bp, Artificial Sequence
  Description of Artificial Sequence: Synthetic oligonucleotide
  Target: LAMA2; (-) strand; PAM type: NRG; PAM sequence: GAG
caaggacccttgccttcaaa

SEQ ID NO: 68120 - DNA, 20 bp, Artificial Sequence
  Description of Artificial Sequence: Synthetic oligonucleotide
  Target: LAMA2; (-) strand; PAM type: NRG; PAM sequence: AAG
gtcaaggacccttgccttca

SEQ ID NO: 68121 - DNA, 20 bp, Artificial Sequence
  Description of Artificial Sequence: Synthetic oligonucleotide
  Target: LAMA2; (-) strand; PAM type: NRG; PAM sequence: AGG
aacaatgaacaacatagtca

SEQ ID NO: 68122 - DNA, 20 bp, Artificial Sequence
  Description of Artificial Sequence: Synthetic oligonucleotide
  Target: LAMA2; (-) strand; PAM type: NRG; PAM sequence: AAG
caacaatgaacaacatagtc

SEQ ID NO: 68123 - DNA, 20 bp, Artificial Sequence
  Description of Artificial Sequence: Synthetic oligonucleotide
  Target: LAMA2; (-) strand; PAM type: NRG; PAM sequence: TAG
ttacacaacaatgaacaaca

SEQ ID NO: 68124 - DNA, 20 bp, Artificial Sequence
  Description of Artificial Sequence: Synthetic oligonucleotide
  Target: LAMA2; (-) strand; PAM type: NRG; PAM sequence: CAG
tttccaagtactcatctagg

SEQ ID NO: 68125 - DNA, 20 bp, Artificial Sequence
  Description of Artificial Sequence: Synthetic oligonucleotide
  Target: LAMA2; (-) strand; PAM type: NRG; PAM sequence: AGG
acctttccaagtactcatct

SEQ ID NO: 68126 - DNA, 20 bp, Artificial Sequence
  Description of Artificial Sequence: Synthetic oligonucleotide
  Target: LAMA2; (-) strand; PAM type: NRG; PAM sequence: TAG
cacctttccaagtactcatc

SEQ ID NO: 68127 - DNA, 20 bp, Artificial Sequence
  Description of Artificial Sequence: Synthetic oligonucleotide
  Target: LAMA2; (-) strand; PAM type: NRG; PAM sequence: AAG
ttgaatcactccacctttcc

SEQ ID NO: 68128 - DNA, 20 bp, Artificial Sequence
  Description of Artificial Sequence: Synthetic oligonucleotide
  Target: LAMA2; (-) strand; PAM type: NRG; PAM sequence: CAG
tgtgtttctaattccagtcc

SEQ ID NO: 68129 - DNA, 20 bp, Artificial Sequence
  Description of Artificial Sequence: Synthetic oligonucleotide
  Target: LAMA2; (-) strand; PAM type: NRG; PAM sequence: CAG
ggaacatgtgtttctaattc

SEQ ID NO: 68130 - DNA, 20 bp, Artificial Sequence
  Description of Artificial Sequence: Synthetic oligonucleotide
  Target: LAMA2; (-) strand; PAM type: NRG; PAM sequence: CGG
gatgggtgatttgctaaaga

SEQ ID NO: 68131 - DNA, 20 bp, Artificial Sequence
  Description of Artificial Sequence: Synthetic oligonucleotide
  Target: LAMA2; (-) strand; PAM type: NRG; PAM sequence: AAG
taatgatgggtgatttgcta

SEQ ID NO: 68132 - DNA, 20 bp, Artificial Sequence
  Description of Artificial Sequence: Synthetic oligonucleotide
  Target: LAMA2; (-) strand; PAM type: NRG; PAM sequence: GGG
aatggaagattagtaatgat

SEQ ID NO: 68133 - DNA, 20 bp, Artificial Sequence
  Description of Artificial Sequence: Synthetic oligonucleotide
  Target: LAMA2; (-) strand; PAM type: NRG; PAM sequence: TGG
taatggaagattagtaatga

SEQ ID NO: 68134 - DNA, 20 bp, Artificial Sequence
  Description of Artificial Sequence: Synthetic oligonucleotide
  Target: LAMA2; (-) strand; PAM type: NRG; PAM sequence: TAG
tagataaaataatggaagat

SEQ ID NO: 68135 - DNA, 20 bp, Artificial Sequence
  Description of Artificial Sequence: Synthetic oligonucleotide
  Target: LAMA2; (-) strand; PAM type: NRG; PAM sequence: AAG
tatcatagataaaataatgg

SEQ ID NO: 68136 - DNA, 20 bp, Artificial Sequence
  Description of Artificial Sequence: Synthetic oligonucleotide
  Target: LAMA2; (-) strand; PAM type: NRG; PAM sequence: TGG
caatatcatagataaaataa

SEQ ID NO: 68137 - DNA, 20 bp, Artificial Sequence
  Description of Artificial Sequence: Synthetic oligonucleotide
  Target: LAMA2; (-) strand; PAM type: NRG; PAM sequence: TAG
gcattacttgctcaatatca

SEQ ID NO: 68138 - DNA, 20 bp, Artificial Sequence
  Description of Artificial Sequence: Synthetic oligonucleotide
  Target: LAMA2; (-) strand; PAM type: NRG; PAM sequence: AGG
agctataatatagatgggat

SEQ ID NO: 68139 - DNA, 20 bp, Artificial Sequence
  Description of Artificial Sequence: Synthetic oligonucleotide
  Target: LAMA2; (-) strand; PAM type: NRG; PAM sequence: TAG
aagctataatatagatggga

SEQ ID NO: 68140 - DNA, 20 bp, Artificial Sequence
  Description of Artificial Sequence: Synthetic oligonucleotide
  Target: LAMA2; (-) strand; PAM type: NRG; PAM sequence: GGG
aacaaagctataatatagat

SEQ ID NO: 68141 - DNA, 20 bp, Artificial Sequence
  Description of Artificial Sequence: Synthetic oligonucleotide
  Target: LAMA2; (-) strand; PAM type: NRG; PAM sequence: TGG
caacaaagctataatataga

SEQ ID NO: 68142 - DNA, 20 bp, Artificial Sequence
  Description of Artificial Sequence: Synthetic oligonucleotide
  Target: LAMA2; (-) strand; PAM type: NRG; PAM sequence: TAG
cttccaacaaagctataata

SEQ ID NO: 68143 - DNA, 20 bp, Artificial Sequence
  Description of Artificial Sequence: Synthetic oligonucleotide
  Target: LAMA2; (-) strand; PAM type: NRG; PAM sequence: AAG
atcccttgagtcttccaaca

SEQ ID NO: 68144 - DNA, 20 bp, Artificial Sequence
  Description of Artificial Sequence: Synthetic oligonucleotide
  Target: LAMA2; (-) strand; PAM type: NRG; PAM sequence: GAG
gcattttcactttatccctt

SEQ ID NO: 68145 - DNA, 20 bp, Artificial Sequence
  Description of Artificial Sequence: Synthetic oligonucleotide
  Target: LAMA2; (-) strand; PAM type: NRG; PAM sequence: AAG
gtgtagcactgaactctaca

SEQ ID NO: 68146 - DNA, 20 bp, Artificial Sequence
  Description of Artificial Sequence: Synthetic oligonucleotide
  Target: LAMA2; (-) strand; PAM type: NRG; PAM sequence: TAG
cattgaccataataaatgtg

SEQ ID NO: 68147 - DNA, 20 bp, Artificial Sequence
  Description of Artificial Sequence: Synthetic oligonucleotide
  Target: LAMA2; (-) strand; PAM type: NRG; PAM sequence: CAG
taatgttggtttgggtaatg

SEQ ID NO: 68148 - DNA, 20 bp, Artificial Sequence
  Description of Artificial Sequence: Synthetic oligonucleotide
  Target: LAMA2; (-) strand; PAM type: NRG; PAM sequence: GGG
tgtacaattaatgttggttt

SEQ ID NO: 68149 - DNA, 20 bp, Artificial Sequence
  Description of Artificial Sequence: Synthetic oligonucleotide
  Target: LAMA2; (-) strand; PAM type: NRG; PAM sequence: TGG
atgtacaattaatgttggtt

SEQ ID NO: 68150 - DNA, 20 bp, Artificial Sequence
  Description of Artificial Sequence: Synthetic oligonucleotide
  Target: LAMA2; (-) strand; PAM type: NRG; PAM sequence: TGG
atgttatgtacaattaatgt

SEQ ID NO: 68151 - DNA, 20 bp, Artificial Sequence
  Description of Artificial Sequence: Synthetic oligonucleotide
  Target: LAMA2; (-) strand; PAM type: NRG; PAM sequence: AAG
taaacaaactccaaaaccat

SEQ ID NO: 68152 - DNA, 20 bp, Artificial Sequence
  Description of Artificial Sequence: Synthetic oligonucleotide
  Target: LAMA2; (-) strand; PAM type: NRG; PAM sequence: TGG
aatatttgttctagtttatc

SEQ ID NO: 68153 - DNA, 20 bp, Artificial Sequence
  Description of Artificial Sequence: Synthetic oligonucleotide
  Target: LAMA2; (-) strand; PAM type: NRG; PAM sequence: TAG
ttcatggaaaatatttgttc

SEQ ID NO: 68154 - DNA, 20 bp, Artificial Sequence
  Description of Artificial Sequence: Synthetic oligonucleotide
  Target: LAMA2; (-) strand; PAM type: NRG; PAM sequence: TGG
cacgaaaaaaaacttcttca

SEQ ID NO: 68155 - DNA, 20 bp, Artificial Sequence
  Description of Artificial Sequence: Synthetic oligonucleotide
  Target: LAMA2; (-) strand; PAM type: NRG; PAM sequence: GAG
gtgaatcaatttaatcacat

SEQ ID NO: 68156 - DNA, 20 bp, Artificial Sequence
  Description of Artificial Sequence: Synthetic oligonucleotide
  Target: LAMA2; (-) strand; PAM type: NRG; PAM sequence: CAG
actgacatcatataggtgct

SEQ ID NO: 68157 - DNA, 20 bp, Artificial Sequence
  Description of Artificial Sequence: Synthetic oligonucleotide
  Target: LAMA2; (-) strand; PAM type: NRG; PAM sequence: AGG
tagagtcactgacatcatat

SEQ ID NO: 68158 - DNA, 20 bp, Artificial Sequence
  Description of Artificial Sequence: Synthetic oligonucleotide
  Target: LAMA2; (-) strand; PAM type: NRG; PAM sequence: TAG
ttagagtcactgacatcata

SEQ ID NO: 68159 - DNA, 20 bp, Artificial Sequence
  Description of Artificial Sequence: Synthetic oligonucleotide
  Target: LAMA2; (-) strand; PAM type: NRG; PAM sequence: GAG
tttattttcagagacaatta

SEQ ID NO: 68160 - DNA, 20 bp, Artificial Sequence
  Description of Artificial Sequence: Synthetic oligonucleotide
  Target: LAMA2; (-) strand; PAM type: NRG; PAM sequence: TAG
tttttattttcagagacaat

SEQ ID NO: 68161 - DNA, 20 bp, Artificial Sequence
  Description of Artificial Sequence: Synthetic oligonucleotide
  Target: LAMA2; (-) strand; PAM type: NRG; PAM sequence: GAG
tattaatctttttattttca

SEQ ID NO: 68162 - DNA, 20 bp, Artificial Sequence
  Description of Artificial Sequence: Synthetic oligonucleotide
  Target: LAMA2; (-) strand; PAM type: NRG; PAM sequence: CAG
tttattaatctttttatttt

SEQ ID NO: 68163 - DNA, 20 bp, Artificial Sequence
  Description of Artificial Sequence: Synthetic oligonucleotide
  Target: LAMA2; (-) strand; PAM type: NRG; PAM sequence: AAG
tctaagttccttgaaggcag

SEQ ID NO: 68164 - DNA, 20 bp, Artificial Sequence
  Description of Artificial Sequence: Synthetic oligonucleotide
  Target: LAMA2; (-) strand; PAM type: NRG; PAM sequence: CAG
aactctaagttccttgaagg

SEQ ID NO: 68165 - DNA, 20 bp, Artificial Sequence
  Description of Artificial Sequence: Synthetic oligonucleotide
  Target: LAMA2; (-) strand; PAM type: NRG; PAM sequence: AGG
ctaaactctaagttccttga

SEQ ID NO: 68166 - DNA, 20 bp, Artificial Sequence
  Description of Artificial Sequence: Synthetic oligonucleotide
  Target: LAMA2; (-) strand; PAM type: NRG; PAM sequence: AAG
actaaactctaagttccttg

SEQ ID NO: 68167 - DNA, 20 bp, Artificial Sequence
  Description of Artificial Sequence: Synthetic oligonucleotide
  Target: LAMA2; (-) strand; PAM type: NRG; PAM sequence: AAG
ttctataaccactaaactct

SEQ ID NO: 68168 - DNA, 20 bp, Artificial Sequence
  Description of Artificial Sequence: Synthetic oligonucleotide
  Target: LAMA2; (-) strand; PAM type: NRG; PAM sequence: CAG
cagatattatgagtttttgt

SEQ ID NO: 68169 - DNA, 20 bp, Artificial Sequence
  Description of Artificial Sequence: Synthetic oligonucleotide
  Target: LAMA2; (-) strand; PAM type: NRG; PAM sequence: GAG
tataaactctcagatattat

SEQ ID NO: 68170 - DNA, 20 bp, Artificial Sequence
  Description of Artificial Sequence: Synthetic oligonucleotide
  Target: LAMA2; (-) strand; PAM type: NRG; PAM sequence: CAG
agcaagcacatataaactct

SEQ ID NO: 68171 - DNA, 20 bp, Artificial Sequence
  Description of Artificial Sequence: Synthetic oligonucleotide
  Target: LAMA2; (-) strand; PAM type: NRG; PAM sequence: AAG
aataattcttttcatttagc

SEQ ID NO: 68172 - DNA, 20 bp, Artificial Sequence
  Description of Artificial Sequence: Synthetic oligonucleotide
  Target: LAMA2; (-) strand; PAM type: NRG; PAM sequence: TAG
tgctaataattcttttcatt

SEQ ID NO: 68173 - DNA, 20 bp, Artificial Sequence
  Description of Artificial Sequence: Synthetic oligonucleotide
  Target: LAMA2; (-) strand; PAM type: NRG; PAM sequence: TAG
cattttacagtcattcagca

SEQ ID NO: 68174 - DNA, 20 bp, Artificial Sequence
  Description of Artificial Sequence: Synthetic oligonucleotide
  Target: LAMA2; (-) strand; PAM type: NRG; PAM sequence: CAG
gtcagcattttacagtcatt

SEQ ID NO: 68175 - DNA, 20 bp, Artificial Sequence
  Description of Artificial Sequence: Synthetic oligonucleotide
  Target: LAMA2; (-) strand; PAM type: NRG; PAM sequence: CAG
agtaaaaagtcagcatttta

SEQ ID NO: 68176 - DNA, 20 bp, Artificial Sequence
  Description of Artificial Sequence: Synthetic oligonucleotide
  Target: LAMA2; (-) strand; PAM type: NRG; PAM sequence: CAG
aaatatttcaagtaaaaagt

SEQ ID NO: 68177 - DNA, 20 bp, Artificial Sequence
  Description of Artificial Sequence: Synthetic oligonucleotide
  Target: LAMA2; (-) strand; PAM type: NRG; PAM sequence: AAG
ttgtaaatatttcaagtaaa

SEQ ID NO: 68178 - DNA, 20 bp, Artificial Sequence
  Description of Artificial Sequence: Synthetic oligonucleotide
  Target: LAMA2; (-) strand; PAM type: NRG; PAM sequence: AAG
tttcctcttgtaaatatttc

SEQ ID NO: 68179 - DNA, 20 bp, Artificial Sequence
  Description of Artificial Sequence: Synthetic oligonucleotide
  Target: LAMA2; (-) strand; PAM type: NRG; PAM sequence: GGG
aacacacacataaatatgca

SEQ ID NO: 68180 - DNA, 20 bp, Artificial Sequence
  Description of Artificial Sequence: Synthetic oligonucleotide
  Target: LAMA2; (-) strand; PAM type: NRG; PAM sequence: AGG
gaacacacacataaatatgc

SEQ ID NO: 68181 - DNA, 20 bp, Artificial Sequence
  Description of Artificial Sequence: Synthetic oligonucleotide
  Target: LAMA2; (-) strand; PAM type: NRG; PAM sequence: CAG
tgaacacacacataaatatg

SEQ ID NO: 68182 - DNA, 20 bp, Artificial Sequence
  Description of Artificial Sequence: Synthetic oligonucleotide
  Target: LAMA2; (-) strand; PAM type: NRG; PAM sequence: CAG
caaaacactttgttctctag

SEQ ID NO: 68183 - DNA, 20 bp, Artificial Sequence
  Description of Artificial Sequence: Synthetic oligonucleotide
  Target: LAMA2; (-) strand; PAM type: NRG; PAM sequence: TAG
tagcaaaacactttgttctc

SEQ ID NO: 68184 - DNA, 20 bp, Artificial Sequence
  Description of Artificial Sequence: Synthetic oligonucleotide
  Target: LAMA2; (-) strand; PAM type: NRG; PAM sequence: TAG
gtgagatttgacagtgttta

SEQ ID NO: 68185 - DNA, 20 bp, Artificial Sequence
  Description of Artificial Sequence: Synthetic oligonucleotide
  Target: LAMA2; (-) strand; PAM type: NRG; PAM sequence: CAG
tttttcacagtgagatttga

SEQ ID NO: 68186 - DNA, 20 bp, Artificial Sequence
  Description of Artificial Sequence: Synthetic oligonucleotide
  Target: LAMA2; (-) strand; PAM type: NRG; PAM sequence: GAG
agacaaatttttttcacagt

SEQ ID NO: 68187 - DNA, 20 bp, Artificial Sequence
  Description of Artificial Sequence: Synthetic oligonucleotide
  Target: LAMA2; (-) strand; PAM type: NRG; PAM sequence: CAG
ttatagacaaatttttttca

SEQ ID NO: 68188 - DNA, 20 bp, Artificial Sequence
  Description of Artificial Sequence: Synthetic oligonucleotide
  Target: LAMA2; (-) strand; PAM type: NRG; PAM sequence: TAG
ctatgaaaatacttgtttta

SEQ ID NO: 68189 - DNA, 20 bp, Artificial Sequence
  Description of Artificial Sequence: Synthetic oligonucleotide
  Target: LAMA2; (-) strand; PAM type: NRG; PAM sequence: TAG
aagcaaattctatgcagctt

SEQ ID NO: 68190 - DNA, 20 bp, Artificial Sequence
  Description of Artificial Sequence: Synthetic oligonucleotide
  Target: LAMA2; (-) strand; PAM type: NRG; PAM sequence: CAG
ctataaaagcaaattctatg

SEQ ID NO: 68191 - DNA, 20 bp, Artificial Sequence
  Description of Artificial Sequence: Synthetic oligonucleotide
  Target: LAMA2; (-) strand; PAM type: NRG; PAM sequence: AAG
aattctgttttatgctataa

SEQ ID NO: 68192 - DNA, 20 bp, Artificial Sequence
  Description of Artificial Sequence: Synthetic oligonucleotide
  Target: LAMA2; (-) strand; PAM type: NRG; PAM sequence: AAG
aagtatttcatagctgactc

SEQ ID NO: 68193 - DNA, 20 bp, Artificial Sequence
  Description of Artificial Sequence: Synthetic oligonucleotide
  Target: LAMA2; (-) strand; PAM type: NRG; PAM sequence: TAG
ttgcatgaaaaagtatttca

SEQ ID NO: 68194 - DNA, 20 bp, Artificial Sequence
  Description of Artificial Sequence: Synthetic oligonucleotide
  Target: LAMA2; (-) strand; PAM type: NRG; PAM sequence: AAG
agaatgagtgttgcatgaaa

SEQ ID NO: 68195 - DNA, 20 bp, Artificial Sequence
  Description of Artificial Sequence: Synthetic oligonucleotide
  Target: LAMA2; (-) strand; PAM type: NRG; PAM sequence: GAG
atagtgtaaagaattagaat

SEQ ID NO: 68196 - DNA, 20 bp, Artificial Sequence
  Description of Artificial Sequence: Synthetic oligonucleotide
  Target: LAMA2; (-) strand; PAM type: NRG; PAM sequence: TAG
taatgcatagtgtaaagaat

SEQ ID NO: 68197 - DNA, 20 bp, Artificial Sequence
  Description of Artificial Sequence: Synthetic oligonucleotide
  Target: LAMA2; (-) strand; PAM type: NRG; PAM sequence: AAG
tcagcctaatgcatagtgta

SEQ ID NO: 68198 - DNA, 20 bp, Artificial Sequence
  Description of Artificial Sequence: Synthetic oligonucleotide
  Target: LAMA2; (-) strand; PAM type: NRG; PAM sequence: TAG
ccaggcctcagcctaatgca

SEQ ID NO: 68199 - DNA, 20 bp, Artificial Sequence
  Description of Artificial Sequence: Synthetic oligonucleotide
  Target: LAMA2; (-) strand; PAM type: NRG; PAM sequence: CAG
tttcaaattacaccaggcct

SEQ ID NO: 68200 - DNA, 20 bp, Artificial Sequence
  Description of Artificial Sequence: Synthetic oligonucleotide
  Target: LAMA2; (-) strand; PAM type: NRG; PAM sequence: AGG
tatcactttcaaattacacc

SEQ ID NO: 68201 - DNA, 20 bp, Artificial Sequence
  Description of Artificial Sequence: Synthetic oligonucleotide
  Target: LAMA2; (-) strand; PAM type: NRG; PAM sequence: CAG
ttatcactttcaaattacac

SEQ ID NO: 68202 - DNA, 20 bp, Artificial Sequence
  Description of Artificial Sequence: Synthetic oligonucleotide
  Target: LAMA2; (-) strand; PAM type: NRG; PAM sequence: TGG
ttccccccacccccagcttc

SEQ ID NO: 68203 - DNA, 20 bp, Artificial Sequence
  Description of Artificial Sequence: Synthetic oligonucleotide
  Target: LAMA2; (-) strand; PAM type: NRG; PAM sequence: CAG
cagtctattccccccacccc

SEQ ID NO: 68204 - DNA, 20 bp, Artificial Sequence
  Description of Artificial Sequence: Synthetic oligonucleotide
  Target: LAMA2; (-) strand; PAM type: NRG; PAM sequence: CAG
ctgatgcattttgcaatatc

SEQ ID NO: 68205 - DNA, 20 bp, Artificial Sequence
  Description of Artificial Sequence: Synthetic oligonucleotide
  Target: LAMA2; (-) strand; PAM type: NRG; PAM sequence: GAG
tggtttggttgataaattag

SEQ ID NO: 68206 - DNA, 20 bp, Artificial Sequence
  Description of Artificial Sequence: Synthetic oligonucleotide
  Target: LAMA2; (-) strand; PAM type: NRG; PAM sequence: AGG
gttggtttggttgataaatt

SEQ ID NO: 68207 - DNA, 20 bp, Artificial Sequence
  Description of Artificial Sequence: Synthetic oligonucleotide
  Target: LAMA2; (-) strand; PAM type: NRG; PAM sequence: TAG
ggttggtttggttgataaat

SEQ ID NO: 68208 - DNA, 20 bp, Artificial Sequence
  Description of Artificial Sequence: Synthetic oligonucleotide
  Target: LAMA2; (-) strand; PAM type: NRG; PAM sequence: TGG
tctatgggattaggttggtt

SEQ ID NO: 68209 - DNA, 20 bp, Artificial Sequence
  Description of Artificial Sequence: Synthetic oligonucleotide
  Target: LAMA2; (-) strand; PAM type: NRG; PAM sequence: TGG
aattctctatgggattaggt

SEQ ID NO: 68210 - DNA, 20 bp, Artificial Sequence
  Description of Artificial Sequence: Synthetic oligonucleotide
  Target: LAMA2; (-) strand; PAM type: NRG; PAM sequence: AGG
tttgaattctctatgggatt

SEQ ID NO: 68211 - DNA, 20 bp, Artificial Sequence
  Description of Artificial Sequence: Synthetic oligonucleotide
  Target: LAMA2; (-) strand; PAM type: NRG; PAM sequence: TAG
ctttgaattctctatgggat

SEQ ID NO: 68212 - DNA, 20 bp, Artificial Sequence
  Description of Artificial Sequence: Synthetic oligonucleotide
  Target: LAMA2; (-) strand; PAM type: NRG; PAM sequence: GGG
agtcactttgaattctctat

SEQ ID NO: 68213 - DNA, 20 bp, Artificial Sequence
  Description of Artificial Sequence: Synthetic oligonucleotide
  Target: LAMA2; (-) strand; PAM type: NRG; PAM sequence: TGG
gagtcactttgaattctcta

SEQ ID NO: 68214 - DNA, 20 bp, Artificial Sequence
  Description of Artificial Sequence: Synthetic oligonucleotide
  Target: LAMA2; (-) strand; PAM type: NRG; PAM sequence: GAG
tcttttgtgtgtcttttcgt

SEQ ID NO: 68215 - DNA, 20 bp, Artificial Sequence
  Description of Artificial Sequence: Synthetic oligonucleotide
  Target: LAMA2; (-) strand; PAM type: NRG; PAM sequence: TGG
atagtttacattttccatct

SEQ ID NO: 68216 - DNA, 20 bp, Artificial Sequence
  Description of Artificial Sequence: Synthetic oligonucleotide
  Target: LAMA2; (-) strand; PAM type: NRG; PAM sequence: TAG
ccataccactgtcctctgga

SEQ ID NO: 68217 - DNA, 20 bp, Artificial Sequence
  Description of Artificial Sequence: Synthetic oligonucleotide
  Target: LAMA2; (-) strand; PAM type: NRG; PAM sequence: TGG
aaacccataccactgtcctc

SEQ ID NO: 68218 - DNA, 20 bp, Artificial Sequence
  Description of Artificial Sequence: Synthetic oligonucleotide
  Target: LAMA2; (-) strand; PAM type: NRG; PAM sequence: AAG
cagaaataatgttagcatca

SEQ ID NO: 68219 - DNA, 20 bp, Artificial Sequence
  Description of Artificial Sequence: Synthetic oligonucleotide
  Target: LAMA2; (-) strand; PAM type: NRG; PAM sequence: TAG
tggaagcccagaaataatgt

SEQ ID NO: 68220 - DNA, 20 bp, Artificial Sequence
  Description of Artificial Sequence: Synthetic oligonucleotide
  Target: LAMA2; (-) strand; PAM type: NRG; PAM sequence: CAG
gttttagtgacttggaagcc

SEQ ID NO: 68221 - DNA, 20 bp, Artificial Sequence
  Description of Artificial Sequence: Synthetic oligonucleotide
  Target: LAMA2; (-) strand; PAM type: NRG; PAM sequence: AAG
gtattgttttagtgacttgg

SEQ ID NO: 68222 - DNA, 20 bp, Artificial Sequence
  Description of Artificial Sequence: Synthetic oligonucleotide
  Target: LAMA2; (-) strand; PAM type: NRG; PAM sequence: TGG
tatgtattgttttagtgact

SEQ ID NO: 68223 - DNA, 20 bp, Artificial Sequence
  Description of Artificial Sequence: Synthetic oligonucleotide
  Target: LAMA2; (-) strand; PAM type: NRG; PAM sequence: TAG
aaaagatgtatgtattgttt

SEQ ID NO: 68224 - DNA, 20 bp, Artificial Sequence
  Description of Artificial Sequence: Synthetic oligonucleotide
  Target: LAMA2; (-) strand; PAM type: NRG; PAM sequence: AAG
aacaaaaataacattttaaa

SEQ ID NO: 68225 - DNA, 20 bp, Artificial Sequence
  Description of Artificial Sequence: Synthetic oligonucleotide
  Target: LAMA2; (-) strand; PAM type: NRG; PAM sequence: AAG
ttcttttgtcagaaaataaa

SEQ ID NO: 68226 - DNA, 20 bp, Artificial Sequence
  Description of Artificial Sequence: Synthetic oligonucleotide
  Target: LAMA2; (-) strand; PAM type: NRG; PAM sequence: CAG
catggcaaactttcttttgt

SEQ ID NO: 68227 - DNA, 20 bp, Artificial Sequence
  Description of Artificial Sequence: Synthetic oligonucleotide
  Target: LAMA2; (-) strand; PAM type: NRG; PAM sequence: TGG
gtgtgcctgttctggagaca

SEQ ID NO: 68228 - DNA, 20 bp, Artificial Sequence
  Description of Artificial Sequence: Synthetic oligonucleotide
  Target: LAMA2; (-) strand; PAM type: NRG; PAM sequence: GAG
taaattgtgtgcctgttctg

SEQ ID NO: 68229 - DNA, 20 bp, Artificial Sequence
  Description of Artificial Sequence: Synthetic oligonucleotide
  Target: LAMA2; (-) strand; PAM type: NRG; PAM sequence: TGG
cataaattgtgtgcctgttc

SEQ ID NO: 68230 - DNA, 20 bp, Artificial Sequence
  Description of Artificial Sequence: Synthetic oligonucleotide
  Target: LAMA2; (-) strand; PAM type: NRG; PAM sequence: TAG
aagaaattcatatcaggatt

SEQ ID NO: 68231 - DNA, 20 bp, Artificial Sequence
  Description of Artificial Sequence: Synthetic oligonucleotide
  Target: LAMA2; (-) strand; PAM type: NRG; PAM sequence: AGG
aaagaaaagaaattcatatc

SEQ ID NO: 68232 - DNA, 20 bp, Artificial Sequence
  Description of Artificial Sequence: Synthetic oligonucleotide
  Target: LAMA2; (-) strand; PAM type: NRG; PAM sequence: CAG
aaaagaaaagaaattcatat

SEQ ID NO: 68233 - DNA, 20 bp, Artificial Sequence
  Description of Artificial Sequence: Synthetic oligonucleotide
  Target: LAMA2; (-) strand; PAM type: NRG; PAM sequence: AAG
aaaaaaagaaaagaaaagaa

SEQ ID NO: 68234 - DNA, 20 bp, Artificial Sequence
  Description of Artificial Sequence: Synthetic oligonucleotide
  Target: LAMA2; (-) strand; PAM type: NRG; PAM sequence: AAG
ttcaaaaaaaaagaaaagaa

SEQ ID NO: 68235 - DNA, 20 bp, Artificial Sequence
  Description of Artificial Sequence: Synthetic oligonucleotide
  Target: LAMA2; (-) strand; PAM type: NRG; PAM sequence: AAG
tccatttcaaaaaaaaagaa

SEQ ID NO: 68236 - DNA, 20 bp, Artificial Sequence
  Description of Artificial Sequence: Synthetic oligonucleotide
  Target: LAMA2; (-) strand; PAM type: NRG; PAM sequence: AAG
aagactccatttcaaaaaaa

SEQ ID NO: 68237 - DNA, 20 bp, Artificial Sequence
  Description of Artificial Sequence: Synthetic oligonucleotide
  Target: LAMA2; (-) strand; PAM type: NRG; PAM sequence: AAG
tccagcctgggcaacagagt

SEQ ID NO: 68238 - DNA, 20 bp, Artificial Sequence
  Description of Artificial Sequence: Synthetic oligonucleotide
  Target: LAMA2; (-) strand; PAM type: NRG; PAM sequence: GAG
gtactccagcctgggcaaca

SEQ ID NO: 68239 - DNA, 20 bp, Artificial Sequence
  Description of Artificial Sequence: Synthetic oligonucleotide
  Target: LAMA2; (-) strand; PAM type: NRG; PAM sequence: CAG
ctgtactccagcctgggcaa

SEQ ID NO: 68240 - DNA, 20 bp, Artificial Sequence
  Description of Artificial Sequence: Synthetic oligonucleotide
  Target: LAMA2; (-) strand; PAM type: NRG; PAM sequence: GGG
gtgccactgtactccagcct

SEQ ID NO: 68241 - DNA, 20 bp, Artificial Sequence
  Description of Artificial Sequence: Synthetic oligonucleotide
  Target: LAMA2; (-) strand; PAM type: NRG; PAM sequence: TGG
cgtgccactgtactccagcc

SEQ ID NO: 68242 - DNA, 20 bp, Artificial Sequence
  Description of Artificial Sequence: Synthetic oligonucleotide
  Target: LAMA2; (-) strand; PAM type: NRG; PAM sequence: CAG
gagatcgtgccactgtactc

SEQ ID NO: 68243 - DNA, 20 bp, Artificial Sequence
  Description of Artificial Sequence: Synthetic oligonucleotide
  Target: LAMA2; (-) strand; PAM type: NRG; PAM sequence: GAG
cccaggaggtagaggttgca

SEQ ID NO: 68244 - DNA, 20 bp, Artificial Sequence
  Description of Artificial Sequence: Synthetic oligonucleotide
  Target: LAMA2; (-) strand; PAM type: NRG; PAM sequence: CAG
aacccaggaggtagaggttg

SEQ ID NO: 68245 - DNA, 20 bp, Artificial Sequence
  Description of Artificial Sequence: Synthetic oligonucleotide
  Target: LAMA2; (-) strand; PAM type: NRG; PAM sequence: AGG
attttgaacccaggaggtag

SEQ ID NO: 68246 - DNA, 20 bp, Artificial Sequence
  Description of Artificial Sequence: Synthetic oligonucleotide
  Target: LAMA2; (-) strand; PAM type: NRG; PAM sequence: GAG
cattttgaacccaggaggta

SEQ ID NO: 68247 - DNA, 20 bp, Artificial Sequence
  Description of Artificial Sequence: Synthetic oligonucleotide
  Target: LAMA2; (-) strand; PAM type: NRG; PAM sequence: TAG
atcattttgaacccaggagg

SEQ ID NO: 68248 - DNA, 20 bp, Artificial Sequence
  Description of Artificial Sequence: Synthetic oligonucleotide
  Target: LAMA2; (-) strand; PAM type: NRG; PAM sequence: AGG
agaatcattttgaacccagg

SEQ ID NO: 68249 - DNA, 20 bp, Artificial Sequence
  Description of Artificial Sequence: Synthetic oligonucleotide
  Target: LAMA2; (-) strand; PAM type: NRG; PAM sequence: GAG
gagaatcattttgaacccag

SEQ ID NO: 68250 - DNA, 20 bp, Artificial Sequence
  Description of Artificial Sequence: Synthetic oligonucleotide
  Target: LAMA2; (-) strand; PAM type: NRG; PAM sequence: AGG
aggagaatcattttgaaccc

SEQ ID NO: 68251 - DNA, 20 bp, Artificial Sequence
  Description of Artificial Sequence: Synthetic oligonucleotide
  Target: LAMA2; (-) strand; PAM type: NRG; PAM sequence: CAG
caggagaatcattttgaacc

SEQ ID NO: 68252 - DNA, 20 bp, Artificial Sequence
  Description of Artificial Sequence: Synthetic oligonucleotide
  Target: LAMA2; (-) strand; PAM type: NRG; PAM sequence: GAG
tactcgggaggataaggcag

SEQ ID NO: 68253 - DNA, 20 bp, Artificial Sequence
  Description of Artificial Sequence: Synthetic oligonucleotide
  Target: LAMA2; (-) strand; PAM type: NRG; PAM sequence: AGG
gctactcgggaggataaggc

SEQ ID NO: 68254 - DNA, 20 bp, Artificial Sequence
  Description of Artificial Sequence: Synthetic oligonucleotide
  Target: LAMA2; (-) strand; PAM type: NRG; PAM sequence: CAG
agctactcgggaggataagg

SEQ ID NO: 68255 - DNA, 20 bp, Artificial Sequence
  Description of Artificial Sequence: Synthetic oligonucleotide
  Target: LAMA2; (-) strand; PAM type: NRG; PAM sequence: AGG
cccagctactcgggaggata

SEQ ID NO: 68256 - DNA, 20 bp, Artificial Sequence
  Description of Artificial Sequence: Synthetic oligonucleotide
  Target: LAMA2; (-) strand; PAM type: NRG; PAM sequence: AAG
tcccagctactcgggaggat

SEQ ID NO: 68257 - DNA, 20 bp, Artificial Sequence
  Description of Artificial Sequence: Synthetic oligonucleotide
  Target: LAMA2; (-) strand; PAM type: NRG; PAM sequence: AGG
tgtaatcccagctactcggg

SEQ ID NO: 68258 - DNA, 20 bp, Artificial Sequence
  Description of Artificial Sequence: Synthetic oligonucleotide
  Target: LAMA2; (-) strand; PAM type: NRG; PAM sequence: GAG
ctgtaatcccagctactcgg

SEQ ID NO: 68259 - DNA, 20 bp, Artificial Sequence
  Description of Artificial Sequence: Synthetic oligonucleotide
  Target: LAMA2; (-) strand; PAM type: NRG; PAM sequence: GGG
gcctgtaatcccagctactc

SEQ ID NO: 68260 - DNA, 20 bp, Artificial Sequence
  Description of Artificial Sequence: Synthetic oligonucleotide
  Target: LAMA2; (-) strand; PAM type: NRG; PAM sequence: CGG
tgcctgtaatcccagctact

SEQ ID NO: 68261 - DNA, 20 bp, Artificial Sequence
  Description of Artificial Sequence: Synthetic oligonucleotide
  Target: LAMA2; (-) strand; PAM type: NRG; PAM sequence: CAG
gtagtgtatgcctgtaatcc

SEQ ID NO: 68262 - DNA, 20 bp, Artificial Sequence
  Description of Artificial Sequence: Synthetic oligonucleotide
  Target: LAMA2; (-) strand; PAM type: NRG; PAM sequence: TAG
caaaaattggccaggcatgg

SEQ ID NO: 68263 - DNA, 20 bp, Artificial Sequence
  Description of Artificial Sequence: Synthetic oligonucleotide
  Target: LAMA2; (-) strand; PAM type: NRG; PAM sequence: TGG
atacaaaaattggccaggca

SEQ ID NO: 68264 - DNA, 20 bp, Artificial Sequence
  Description of Artificial Sequence: Synthetic oligonucleotide
  Target: LAMA2; (-) strand; PAM type: NRG; PAM sequence: AGG
taaaaatacaaaaattggcc

SEQ ID NO: 68265 - DNA, 20 bp, Artificial Sequence
  Description of Artificial Sequence: Synthetic oligonucleotide
  Target: LAMA2; (-) strand; PAM type: NRG; PAM sequence: CAG
ctaaaaatacaaaaattggc

SEQ ID NO: 68266 - DNA, 20 bp, Artificial Sequence
  Description of Artificial Sequence: Synthetic oligonucleotide
  Target: LAMA2; (-) strand; PAM type: NRG; PAM sequence: TGG
tctactaaaaatacaaaaat

SEQ ID NO: 68267 - DNA, 20 bp, Artificial Sequence
  Description of Artificial Sequence: Synthetic oligonucleotide
  Target: LAMA2; (-) strand; PAM type: NRG; PAM sequence: TGG
caagaccagcctggccaaca

SEQ ID NO: 68268 - DNA, 20 bp, Artificial Sequence
  Description of Artificial Sequence: Synthetic oligonucleotide
  Target: LAMA2; (-) strand; PAM type: NRG; PAM sequence: TGG
gtaggagttcaagaccagcc

SEQ ID NO: 68269 - DNA, 20 bp, Artificial Sequence
  Description of Artificial Sequence: Synthetic oligonucleotide
  Target: LAMA2; (-) strand; PAM type: NRG; PAM sequence: CAG
cctgagtaggagttcaagac

SEQ ID NO: 68270 - DNA, 20 bp, Artificial Sequence
  Description of Artificial Sequence: Synthetic oligonucleotide
  Target: LAMA2; (-) strand; PAM type: NRG; PAM sequence: AAG
gatcacctgagtaggagttc

SEQ ID NO: 68271 - DNA, 20 bp, Artificial Sequence
  Description of Artificial Sequence: Synthetic oligonucleotide
  Target: LAMA2; (-) strand; PAM type: NRG; PAM sequence: GAG
caggaggatcacctgagtag

SEQ ID NO: 68272 - DNA, 20 bp, Artificial Sequence
  Description of Artificial Sequence: Synthetic oligonucleotide
  Target: LAMA2; (-) strand; PAM type: NRG; PAM sequence: AGG
ggcaggaggatcacctgagt

SEQ ID NO: 68273 - DNA, 20 bp, Artificial Sequence
  Description of Artificial Sequence: Synthetic oligonucleotide
  Target: LAMA2; (-) strand; PAM type: NRG; PAM sequence: TAG
aggcaggaggatcacctgag

SEQ ID NO: 68274 - DNA, 20 bp, Artificial Sequence
  Description of Artificial Sequence: Synthetic oligonucleotide
  Target: LAMA2; (-) strand; PAM type: NRG; PAM sequence: GAG
ccgaggcaggaggatcacct

SEQ ID NO: 68275 - DNA, 20 bp, Artificial Sequence
  Description of Artificial Sequence: Synthetic oligonucleotide
  Target: LAMA2; (-) strand; PAM type: NRG; PAM sequence: AGG
ctttgggaggccgaggcagg

SEQ ID NO: 68276 - DNA, 20 bp, Artificial Sequence
  Description of Artificial Sequence: Synthetic oligonucleotide
  Target: LAMA2; (-) strand; PAM type: NRG; PAM sequence: GAG
actttgggaggccgaggcag

SEQ ID NO: 68277 - DNA, 20 bp, Artificial Sequence
  Description of Artificial Sequence: Synthetic oligonucleotide
  Target: LAMA2; (-) strand; PAM type: NRG; PAM sequence: AGG
gcactttgggaggccgaggc

SEQ ID NO: 68278 - DNA, 20 bp, Artificial Sequence
  Description of Artificial Sequence: Synthetic oligonucleotide
  Target: LAMA2; (-) strand; PAM type: NRG; PAM sequence: CAG
agcactttgggaggccgagg

SEQ ID NO: 68279 - DNA, 20 bp, Artificial Sequence
  Description of Artificial Sequence: Synthetic oligonucleotide
  Target: LAMA2; (-) strand; PAM type: NRG; PAM sequence: AGG
cccagcactttgggaggccg

SEQ ID NO: 68280 - DNA, 20 bp, Artificial Sequence
  Description of Artificial Sequence: Synthetic oligonucleotide
  Target: LAMA2; (-) strand; PAM type: NRG; PAM sequence: GAG
tcccagcactttgggaggcc

SEQ ID NO: 68281 - DNA, 20 bp, Artificial Sequence
  Description of Artificial Sequence: Synthetic oligonucleotide
  Target: LAMA2; (-) strand; PAM type: NRG; PAM sequence: AGG
tgtaatcccagcactttggg

SEQ ID NO: 68282 - DNA, 20 bp, Artificial Sequence
  Description of Artificial Sequence: Synthetic oligonucleotide
  Target: LAMA2; (-) strand; PAM type: NRG; PAM sequence: GAG
ctgtaatcccagcactttgg

SEQ ID NO: 68283 - DNA, 20 bp, Artificial Sequence
  Description of Artificial Sequence: Synthetic oligonucleotide
  Target: LAMA2; (-) strand; PAM type: NRG; PAM sequence: GGG
gcctgtaatcccagcacttt

SEQ ID NO: 68284 - DNA, 20 bp, Artificial Sequence
  Description of Artificial Sequence: Synthetic oligonucleotide
  Target: LAMA2; (-) strand; PAM type: NRG; PAM sequence: TGG
cgcctgtaatcccagcactt

SEQ ID NO: 68285 - DNA, 20 bp, Artificial Sequence
  Description of Artificial Sequence: Synthetic oligonucleotide
  Target: LAMA2; (-) strand; PAM type: NRG; PAM sequence: CAG
gtggctcacgcctgtaatcc

SEQ ID NO: 68286 - DNA, 20 bp, Artificial Sequence
  Description of Artificial Sequence: Synthetic oligonucleotide
  Target: LAMA2; (-) strand; PAM type: NRG; PAM sequence: TGG
atatcagaggatgggcctgg

SEQ ID NO: 68287 - DNA, 20 bp, Artificial Sequence
  Description of Artificial Sequence: Synthetic oligonucleotide
  Target: LAMA2; (-) strand; PAM type: NRG; PAM sequence: TGG
ttcatatcagaggatgggcc

SEQ ID NO: 68288 - DNA, 20 bp, Artificial Sequence
  Description of Artificial Sequence: Synthetic oligonucleotide
  Target: LAMA2; (-) strand; PAM type: NRG; PAM sequence: GGG
agaaattcatatcagaggat

SEQ ID NO: 68289 - DNA, 20 bp, Artificial Sequence
  Description of Artificial Sequence: Synthetic oligonucleotide
  Target: LAMA2; (-) strand; PAM type: NRG; PAM sequence: TGG
aagaaattcatatcagagga

SEQ ID NO: 68290 - DNA, 20 bp, Artificial Sequence
  Description of Artificial Sequence: Synthetic oligonucleotide
  Target: LAMA2; (-) strand; PAM type: NRG; PAM sequence: AGG
caataagaaattcatatcag

SEQ ID NO: 68291 - DNA, 20 bp, Artificial Sequence
  Description of Artificial Sequence: Synthetic oligonucleotide
  Target: LAMA2; (-) strand; PAM type: NRG; PAM sequence: GAG
ccaataagaaattcatatca

SEQ ID NO: 68292 - DNA, 20 bp, Artificial Sequence
  Description of Artificial Sequence: Synthetic oligonucleotide
  Target: LAMA2; (-) strand; PAM type: NRG; PAM sequence: CAG
ctccaataagaaattcatat

SEQ ID NO: 68293 - DNA, 20 bp, Artificial Sequence
  Description of Artificial Sequence: Synthetic oligonucleotide
  Target: LAMA2; (-) strand; PAM type: NRG; PAM sequence: AAG
acataaagggattctccaat

SEQ ID NO: 68294 - DNA, 20 bp, Artificial Sequence
  Description of Artificial Sequence: Synthetic oligonucleotide
  Target: LAMA2; (-) strand; PAM type: NRG; PAM sequence: GGG
cacagggctggacacataaa

SEQ ID NO: 68295 - DNA, 20 bp, Artificial Sequence
  Description of Artificial Sequence: Synthetic oligonucleotide
  Target: LAMA2; (-) strand; PAM type: NRG; PAM sequence: AGG
ccacagggctggacacataa

SEQ ID NO: 68296 - DNA, 20 bp, Artificial Sequence
  Description of Artificial Sequence: Synthetic oligonucleotide
  Target: LAMA2; (-) strand; PAM type: NRG; PAM sequence: AAG
accacagggctggacacata

SEQ ID NO: 68297 - DNA, 20 bp, Artificial Sequence
  Description of Artificial Sequence: Synthetic oligonucleotide
  Target: LAMA2; (-) strand; PAM type: NRG; PAM sequence: TGG
ctcagagcctaccacagggc

SEQ ID NO: 68298 - DNA, 20 bp, Artificial Sequence
  Description of Artificial Sequence: Synthetic oligonucleotide
  Target: LAMA2; (-) strand; PAM type: NRG; PAM sequence: GGG
tattctcagagcctaccaca

SEQ ID NO: 68299 - DNA, 20 bp, Artificial Sequence
  Description of Artificial Sequence: Synthetic oligonucleotide
  Target: LAMA2; (-) strand; PAM type: NRG; PAM sequence: AGG
atattctcagagcctaccac

SEQ ID NO: 68300 - DNA, 20 bp, Artificial Sequence
  Description of Artificial Sequence: Synthetic oligonucleotide
  Target: LAMA2; (-) strand; PAM type: NRG; PAM sequence: CAG
tatattctcagagcctacca

SEQ ID NO: 68301 - DNA, 20 bp, Artificial Sequence
  Description of Artificial Sequence: Synthetic oligonucleotide
  Target: LAMA2; (-) strand; PAM type: NRG; PAM sequence: GAG
tgttcattactatattctca

SEQ ID NO: 68302 - DNA, 20 bp, Artificial Sequence
  Description of Artificial Sequence: Synthetic oligonucleotide
  Target: LAMA2; (-) strand; PAM type: NRG; PAM sequence: CAG
cttgttcattactatattct

SEQ ID NO: 68303 - DNA, 20 bp, Artificial Sequence
  Description of Artificial Sequence: Synthetic oligonucleotide
  Target: LAMA2; (-) strand; PAM type: NRG; PAM sequence: GAG
acgtaagcttcatgatggga

SEQ ID NO: 68304 - DNA, 20 bp, Artificial Sequence
  Description of Artificial Sequence: Synthetic oligonucleotide
  Target: LAMA2; (-) strand; PAM type: NRG; PAM sequence: GAG
gaacgtaagcttcatgatgg

SEQ ID NO: 68305 - DNA, 20 bp, Artificial Sequence
  Description of Artificial Sequence: Synthetic oligonucleotide
  Target: LAMA2; (-) strand; PAM type: NRG; PAM sequence: GGG
tggaacgtaagcttcatgat

SEQ ID NO: 68306 - DNA, 20 bp, Artificial Sequence
  Description of Artificial Sequence: Synthetic oligonucleotide
  Target: LAMA2; (-) strand; PAM type: NRG; PAM sequence: TGG
ctggaacgtaagcttcatga

SEQ ID NO: 68307 - DNA, 20 bp, Artificial Sequence
  Description of Artificial Sequence: Synthetic oligonucleotide
  Target: LAMA2; (-) strand; PAM type: NRG; PAM sequence: AAG
tagcttccttgctggaacgt

SEQ ID NO: 68308 - DNA, 20 bp, Artificial Sequence
  Description of Artificial Sequence: Synthetic oligonucleotide
  Target: LAMA2; (-) strand; PAM type: NRG; PAM sequence: TGG
tgaaggtctagcttccttgc

SEQ ID NO: 68309 - DNA, 20 bp, Artificial Sequence
  Description of Artificial Sequence: Synthetic oligonucleotide
  Target: LAMA2; (-) strand; PAM type: NRG; PAM sequence: TAG
ataattatctattgaaggtc

SEQ ID NO: 68310 - DNA, 20 bp, Artificial Sequence
  Description of Artificial Sequence: Synthetic oligonucleotide
  Target: LAMA2; (-) strand; PAM type: NRG; PAM sequence: AGG
aaatgataattatctattga

SEQ ID NO: 68311 - DNA, 20 bp, Artificial Sequence
  Description of Artificial Sequence: Synthetic oligonucleotide
  Target: LAMA2; (-) strand; PAM type: NRG; PAM sequence: AAG
taaatgataattatctattg

SEQ ID NO: 68312 - DNA, 20 bp, Artificial Sequence
  Description of Artificial Sequence: Synthetic oligonucleotide
  Target: LAMA2; (-) strand; PAM type: NRG; PAM sequence: AGG
cttgcatagcactgattaca

SEQ ID NO: 68313 - DNA, 20 bp, Artificial Sequence
  Description of Artificial Sequence: Synthetic oligonucleotide
  Target: LAMA2; (-) strand; PAM type: NRG; PAM sequence: AAG
tcttgcatagcactgattac

SEQ ID NO: 68314 - DNA, 20 bp, Artificial Sequence
  Description of Artificial Sequence: Synthetic oligonucleotide
  Target: LAMA2; (-) strand; PAM type: NRG; PAM sequence: TAG
tctgccttatttttcttgca

SEQ ID NO: 68315 - DNA, 20 bp, Artificial Sequence
  Description of Artificial Sequence: Synthetic oligonucleotide
  Target: LAMA2; (-) strand; PAM type: NRG; PAM sequence: CAG
tgtaaacaggtccttcatta

SEQ ID NO: 68316 - DNA, 20 bp, Artificial Sequence
  Description of Artificial Sequence: Synthetic oligonucleotide
  Target: LAMA2; (-) strand; PAM type: NRG; PAM sequence: AGG
tttcctaatgctttgtaaac

SEQ ID NO: 68317 - DNA, 20 bp, Artificial Sequence
  Description of Artificial Sequence: Synthetic oligonucleotide
  Target: LAMA2; (-) strand; PAM type: NRG; PAM sequence: CAG
ctttcctaatgctttgtaaa

SEQ ID NO: 68318 - DNA, 20 bp, Artificial Sequence
  Description of Artificial Sequence: Synthetic oligonucleotide
  Target: LAMA2; (-) strand; PAM type: NRG; PAM sequence: GGG
ttgtcttatttcctccatga

SEQ ID NO: 68319 - DNA, 20 bp, Artificial Sequence
  Description of Artificial Sequence: Synthetic oligonucleotide
  Target: LAMA2; (-) strand; PAM type: NRG; PAM sequence: AGG
cttgtcttatttcctccatg

SEQ ID NO: 68320 - DNA, 20 bp, Artificial Sequence
  Description of Artificial Sequence: Synthetic oligonucleotide
  Target: LAMA2; (-) strand; PAM type: NRG; PAM sequence: GAG
ccttgtcttatttcctccat

SEQ ID NO: 68321 - DNA, 20 bp, Artificial Sequence
  Description of Artificial Sequence: Synthetic oligonucleotide
  Target: LAMA2; (-) strand; PAM type: NRG; PAM sequence: AAG
cataccttcctattgttcac

SEQ ID NO: 68322 - DNA, 20 bp, Artificial Sequence
  Description of Artificial Sequence: Synthetic oligonucleotide
  Target: LAMA2; (-) strand; PAM type: NRG; PAM sequence: TAG
ttccttgcttagggcttgtc

SEQ ID NO: 68323 - DNA, 20 bp, Artificial Sequence
  Description of Artificial Sequence: Synthetic oligonucleotide
  Target: LAMA2; (-) strand; PAM type: NRG; PAM sequence: GGG
ctctgctttttccttgctta

SEQ ID NO: 68324 - DNA, 20 bp, Artificial Sequence
  Description of Artificial Sequence: Synthetic oligonucleotide
  Target: LAMA2; (-) strand; PAM type: NRG; PAM sequence: AGG
gctctgctttttccttgctt

SEQ ID NO: 68325 - DNA, 20 bp, Artificial Sequence
  Description of Artificial Sequence: Synthetic oligonucleotide
  Target: LAMA2; (-) strand; PAM type: NRG; PAM sequence: TAG
agctctgctttttccttgct

SEQ ID NO: 68326 - DNA, 20 bp, Artificial Sequence
  Description of Artificial Sequence: Synthetic oligonucleotide
  Target: LAMA2; (-) strand; PAM type: NRG; PAM sequence: AAG
tttagtccgattctagaata

SEQ ID NO: 68327 - DNA, 20 bp, Artificial Sequence
  Description of Artificial Sequence: Synthetic oligonucleotide
  Target: LAMA2; (-) strand; PAM type: NRG; PAM sequence: TAG
tactgcctttagtccgattc

SEQ ID NO: 68328 - DNA, 20 bp, Artificial Sequence
  Description of Artificial Sequence: Synthetic oligonucleotide
  Target: LAMA2; (-) strand; PAM type: NRG; PAM sequence: TAG
cattcaacgaatactgcctt

SEQ ID NO: 68329 - DNA, 20 bp, Artificial Sequence
  Description of Artificial Sequence: Synthetic oligonucleotide
  Target: LAMA2; (-) strand; PAM type: NRG; PAM sequence: TGG
aaaattcaaaatgattatcc

SEQ ID NO: 68330 - DNA, 20 bp, Artificial Sequence
  Description of Artificial Sequence: Synthetic oligonucleotide
  Target: LAMA2; (-) strand; PAM type: NRG; PAM sequence: AGG
aatagatcataattgtacct

SEQ ID NO: 68331 - DNA, 20 bp, Artificial Sequence
  Description of Artificial Sequence: Synthetic oligonucleotide
  Target: LAMA2; (-) strand; PAM type: NRG; PAM sequence: TAG
aaatagatcataattgtacc

SEQ ID NO: 68332 - DNA, 20 bp, Artificial Sequence
  Description of Artificial Sequence: Synthetic oligonucleotide
  Target: LAMA2; (-) strand; PAM type: NRG; PAM sequence: TAG
caagtcagtcttcttaaaaa

SEQ ID NO: 68333 - DNA, 20 bp, Artificial Sequence
  Description of Artificial Sequence: Synthetic oligonucleotide
  Target: LAMA2; (-) strand; PAM type: NRG; PAM sequence: CAG
agattcaaatctgatcaagt

SEQ ID NO: 68334 - DNA, 20 bp, Artificial Sequence
  Description of Artificial Sequence: Synthetic oligonucleotide
  Target: LAMA2; (-) strand; PAM type: NRG; PAM sequence: AAG
cttaagattcaaatctgatc

SEQ ID NO: 68335 - DNA, 20 bp, Artificial Sequence
  Description of Artificial Sequence: Synthetic oligonucleotide
  Target: LAMA2; (-) strand; PAM type: NRG; PAM sequence: AAG
tttacataatgagttttctt

SEQ ID NO: 68336 - DNA, 20 bp, Artificial Sequence
  Description of Artificial Sequence: Synthetic oligonucleotide
  Target: LAMA2; (-) strand; PAM type: NRG; PAM sequence: GAG
tagccctttttttacataat

SEQ ID NO: 68337 - DNA, 20 bp, Artificial Sequence
  Description of Artificial Sequence: Synthetic oligonucleotide
  Target: LAMA2; (-) strand; PAM type: NRG; PAM sequence: TAG
gactacccttatcctttctt

SEQ ID NO: 68338 - DNA, 20 bp, Artificial Sequence
  Description of Artificial Sequence: Synthetic oligonucleotide
  Target: LAMA2; (-) strand; PAM type: NRG; PAM sequence: TGG
atctgcaatagcctcctgaa

SEQ ID NO: 68339 - DNA, 20 bp, Artificial Sequence
  Description of Artificial Sequence: Synthetic oligonucleotide
  Target: LAMA2; (-) strand; PAM type: NRG; PAM sequence: TAG
taacatctggacatctgcaa

SEQ ID NO: 68340 - DNA, 20 bp, Artificial Sequence
  Description of Artificial Sequence: Synthetic oligonucleotide
  Target: LAMA2; (-) strand; PAM type: NRG; PAM sequence: TGG
tcacaagcatttgtaacatc

SEQ ID NO: 68341 - DNA, 20 bp, Artificial Sequence
  Description of Artificial Sequence: Synthetic oligonucleotide
  Target: LAMA2; (-) strand; PAM type: NRG; PAM sequence: AAG
aatacttggggccaagtcac

SEQ ID NO: 68342 - DNA, 20 bp, Artificial Sequence
  Description of Artificial Sequence: Synthetic oligonucleotide
  Target: LAMA2; (-) strand; PAM type: NRG; PAM sequence: AAG
cattgccaatacttggggcc

SEQ ID NO: 68343 - DNA, 20 bp, Artificial Sequence
  Description of Artificial Sequence: Synthetic oligonucleotide
  Target: LAMA2; (-) strand; PAM type: NRG; PAM sequence: GGG
agggtcattgccaatacttg

SEQ ID NO: 68344 - DNA, 20 bp, Artificial Sequence
  Description of Artificial Sequence: Synthetic oligonucleotide
  Target: LAMA2; (-) strand; PAM type: NRG; PAM sequence: GGG
cagggtcattgccaatactt

SEQ ID NO: 68345 - DNA, 20 bp, Artificial Sequence
  Description of Artificial Sequence: Synthetic oligonucleotide
  Target: LAMA2; (-) strand; PAM type: NRG; PAM sequence: TGG
ccagggtcattgccaatact

SEQ ID NO: 68346 - DNA, 20 bp, Artificial Sequence
  Description of Artificial Sequence: Synthetic oligonucleotide
  Target: LAMA2; (-) strand; PAM type: NRG; PAM sequence: GGG
gatccatctgcttctctcca

SEQ ID NO: 68347 - DNA, 20 bp, Artificial Sequence
  Description of Artificial Sequence: Synthetic oligonucleotide
  Target: LAMA2; (-) strand; PAM type: NRG; PAM sequence: AGG
agatccatctgcttctctcc

SEQ ID NO: 68348 - DNA, 20 bp, Artificial Sequence
  Description of Artificial Sequence: Synthetic oligonucleotide
  Target: LAMA2; (-) strand; PAM type: NRG; PAM sequence: CAG
cagatccatctgcttctctc

SEQ ID NO: 68349 - DNA, 20 bp, Artificial Sequence
  Description of Artificial Sequence: Synthetic oligonucleotide
  Target: LAMA2; (-) strand; PAM type: NRG; PAM sequence: CAG
gctaactccgaaataaatat

SEQ ID NO: 68350 - DNA, 20 bp, Artificial Sequence
  Description of Artificial Sequence: Synthetic oligonucleotide
  Target: LAMA2; (-) strand; PAM type: NRG; PAM sequence: GAG
tgtctcatagagaaaaccgg

SEQ ID NO: 68351 - DNA, 20 bp, Artificial Sequence
  Description of Artificial Sequence: Synthetic oligonucleotide
  Target: LAMA2; (-) strand; PAM type: NRG; PAM sequence: GGG
agtgtctcatagagaaaacc

SEQ ID NO: 68352 - DNA, 20 bp, Artificial Sequence
  Description of Artificial Sequence: Synthetic oligonucleotide
  Target: LAMA2; (-) strand; PAM type: NRG; PAM sequence: CGG
cagtgtctcatagagaaaac

SEQ ID NO: 68353 - DNA, 20 bp, Artificial Sequence
  Description of Artificial Sequence: Synthetic oligonucleotide
  Target: LAMA2; (-) strand; PAM type: NRG; PAM sequence: GAG
tacccacccagtgtctcata

SEQ ID NO: 68354 - DNA, 20 bp, Artificial Sequence
  Description of Artificial Sequence: Synthetic oligonucleotide
  Target: LAMA2; (-) strand; PAM type: NRG; PAM sequence: TAG
tttacccacccagtgtctca

SEQ ID NO: 68355 - DNA, 20 bp, Artificial Sequence
  Description of Artificial Sequence: Synthetic oligonucleotide
  Target: LAMA2; (-) strand; PAM type: NRG; PAM sequence: CAG
cacatcttagtttacccacc

SEQ ID NO: 68356 - DNA, 20 bp, Artificial Sequence
  Description of Artificial Sequence: Synthetic oligonucleotide
  Target: LAMA2; (-) strand; PAM type: NRG; PAM sequence: TAG
ctctcaagctcaacacatct

SEQ ID NO: 68357 - DNA, 20 bp, Artificial Sequence
  Description of Artificial Sequence: Synthetic oligonucleotide
  Target: LAMA2; (-) strand; PAM type: NRG; PAM sequence: AAG
agctactcctgaattctctc

SEQ ID NO: 68358 - DNA, 20 bp, Artificial Sequence
  Description of Artificial Sequence: Synthetic oligonucleotide
  Target: LAMA2; (-) strand; PAM type: NRG; PAM sequence: TAG
cccgaagggacacccagatt

SEQ ID NO: 68359 - DNA, 20 bp, Artificial Sequence
  Description of Artificial Sequence: Synthetic oligonucleotide
  Target: LAMA2; (-) strand; PAM type: NRG; PAM sequence: CAG
tccccacccgaagggacacc

SEQ ID NO: 68360 - DNA, 20 bp, Artificial Sequence
  Description of Artificial Sequence: Synthetic oligonucleotide
  Target: LAMA2; (-) strand; PAM type: NRG; PAM sequence: GGG
cgttctaatccccacccgaa

SEQ ID NO: 68361 - DNA, 20 bp, Artificial Sequence
  Description of Artificial Sequence: Synthetic oligonucleotide
  Target: LAMA2; (-) strand; PAM type: NRG; PAM sequence: AGG
gcgttctaatccccacccga

SEQ ID NO: 68362 - DNA, 20 bp, Artificial Sequence
  Description of Artificial Sequence: Synthetic oligonucleotide
  Target: LAMA2; (-) strand; PAM type: NRG; PAM sequence: AAG
agcgttctaatccccacccg

SEQ ID NO: 68363 - DNA, 20 bp, Artificial Sequence
  Description of Artificial Sequence: Synthetic oligonucleotide
  Target: LAMA2; (-) strand; PAM type: NRG; PAM sequence: CAG
aaagtagagttcgtggtttt

SEQ ID NO: 68364 - DNA, 20 bp, Artificial Sequence
  Description of Artificial Sequence: Synthetic oligonucleotide
  Target: LAMA2; (-) strand; PAM type: NRG; PAM sequence: TGG
actctccaaagtagagttcg

SEQ ID NO: 68365 - DNA, 20 bp, Artificial Sequence
  Description of Artificial Sequence: Synthetic oligonucleotide
  Target: LAMA2; (-) strand; PAM type: NRG; PAM sequence: GAG
taatattactctccaaagta

SEQ ID NO: 68366 - DNA, 20 bp, Artificial Sequence
  Description of Artificial Sequence: Synthetic oligonucleotide
  Target: LAMA2; (-) strand; PAM type: NRG; PAM sequence: TAG
tttaatattactctccaaag

SEQ ID NO: 68367 - DNA, 20 bp, Artificial Sequence
  Description of Artificial Sequence: Synthetic oligonucleotide
  Target: LAMA2; (-) strand; PAM type: NRG; PAM sequence: AAG
aaatttaatattactctcca

SEQ ID NO: 68368 - DNA, 20 bp, Artificial Sequence
  Description of Artificial Sequence: Synthetic oligonucleotide
  Target: LAMA2; (-) strand; PAM type: NRG; PAM sequence: AGG
tccatttttttagacgtctc

SEQ ID NO: 68369 - DNA, 20 bp, Artificial Sequence
  Description of Artificial Sequence: Synthetic oligonucleotide
  Target: LAMA2; (-) strand; PAM type: NRG; PAM sequence: CAG
ctccatttttttagacgtct

SEQ ID NO: 68370 - DNA, 20 bp, Artificial Sequence
  Description of Artificial Sequence: Synthetic oligonucleotide
  Target: LAMA2; (-) strand; PAM type: NRG; PAM sequence: TAG
tggttaaatctccatttttt

SEQ ID NO: 68371 - DNA, 20 bp, Artificial Sequence
  Description of Artificial Sequence: Synthetic oligonucleotide
  Target: LAMA2; (-) strand; PAM type: NRG; PAM sequence: TGG
gagctatatatccaaatgcc

SEQ ID NO: 68372 - DNA, 20 bp, Artificial Sequence
  Description of Artificial Sequence: Synthetic oligonucleotide
  Target: LAMA2; (-) strand; PAM type: NRG; PAM sequence: GAG
ggtatctttctgaaagtata

SEQ ID NO: 68373 - DNA, 20 bp, Artificial Sequence
  Description of Artificial Sequence: Synthetic oligonucleotide
  Target: LAMA2; (-) strand; PAM type: NRG; PAM sequence: TAG
caggtatctttctgaaagta

SEQ ID NO: 68374 - DNA, 20 bp, Artificial Sequence
  Description of Artificial Sequence: Synthetic oligonucleotide
  Target: LAMA2; (-) strand; PAM type: NRG; PAM sequence: AAG
cagaccaggtatctttctga

SEQ ID NO: 68375 - DNA, 20 bp, Artificial Sequence
  Description of Artificial Sequence: Synthetic oligonucleotide
  Target: LAMA2; (-) strand; PAM type: NRG; PAM sequence: AGG
ccaagttatatctccagacc

SEQ ID NO: 68376 - DNA, 20 bp, Artificial Sequence
  Description of Artificial Sequence: Synthetic oligonucleotide
  Target: LAMA2; (-) strand; PAM type: NRG; PAM sequence: CAG
cccaagttatatctccagac

SEQ ID NO: 68377 - DNA, 20 bp, Artificial Sequence
  Description of Artificial Sequence: Synthetic oligonucleotide
  Target: LAMA2; (-) strand; PAM type: NRG; PAM sequence: CAG
taactcccaagttatatctc

SEQ ID NO: 68378 - DNA, 20 bp, Artificial Sequence
  Description of Artificial Sequence: Synthetic oligonucleotide
  Target: LAMA2; (-) strand; PAM type: NRG; PAM sequence: AAG
ctgtagagtcaataactccc

SEQ ID NO: 68379 - DNA, 20 bp, Artificial Sequence
  Description of Artificial Sequence: Synthetic oligonucleotide
  Target: LAMA2; (-) strand; PAM type: NRG; PAM sequence: GAG
ccatttacacaccatctgta

SEQ ID NO: 68380 - DNA, 20 bp, Artificial Sequence
  Description of Artificial Sequence: Synthetic oligonucleotide
  Target: LAMA2; (-) strand; PAM type: NRG; PAM sequence: TAG
acccatttacacaccatctg

SEQ ID NO: 68381 - DNA, 20 bp, Artificial Sequence
  Description of Artificial Sequence: Synthetic oligonucleotide
  Target: LAMA2; (-) strand; PAM type: NRG; PAM sequence: TGG
cgttcctcagggcttaatcc

SEQ ID NO: 68382 - DNA, 20 bp, Artificial Sequence
  Description of Artificial Sequence: Synthetic oligonucleotide
  Target: LAMA2; (-) strand; PAM type: NRG; PAM sequence: GGG
gtaactattatcgttcctca

SEQ ID NO: 68383 - DNA, 20 bp, Artificial Sequence
  Description of Artificial Sequence: Synthetic oligonucleotide
  Target: LAMA2; (-) strand; PAM type: NRG; PAM sequence: AGG
agtaactattatcgttcctc

SEQ ID NO: 68384 - DNA, 20 bp, Artificial Sequence
  Description of Artificial Sequence: Synthetic oligonucleotide
  Target: LAMA2; (-) strand; PAM type: NRG; PAM sequence: CAG
cagtaactattatcgttcct

SEQ ID NO: 68385 - DNA, 20 bp, Artificial Sequence
  Description of Artificial Sequence: Synthetic oligonucleotide
  Target: LAMA2; (-) strand; PAM type: NRG; PAM sequence: CAG
ttttctttttttttttttat

SEQ ID NO: 68386 - DNA, 20 bp, Artificial Sequence
  Description of Artificial Sequence: Synthetic oligonucleotide
  Target: LAMA2; (-) strand; PAM type: NRG; PAM sequence: AAG
ttagaaaaaatgaaacagaa

SEQ ID NO: 68387 - DNA, 20 bp, Artificial Sequence
  Description of Artificial Sequence: Synthetic oligonucleotide
  Target: LAMA2; (-) strand; PAM type: NRG; PAM sequence: CAG
aagacttagaaaaaatgaaa

SEQ ID NO: 68388 - DNA, 20 bp, Artificial Sequence
  Description of Artificial Sequence: Synthetic oligonucleotide
  Target: LAMA2; (-) strand; PAM type: NRG; PAM sequence: TAG
tttctctggcttaaaagact

SEQ ID NO: 68389 - DNA, 20 bp, Artificial Sequence
  Description of Artificial Sequence: Synthetic oligonucleotide
  Target: LAMA2; (-) strand; PAM type: NRG; PAM sequence: AAG
ttatgttttctctggcttaa

SEQ ID NO: 68390 - DNA, 20 bp, Artificial Sequence
  Description of Artificial Sequence: Synthetic oligonucleotide
  Target: LAMA2; (-) strand; PAM type: NRG; PAM sequence: TGG
gttccacattatgttttctc

SEQ ID NO: 68391 - DNA, 20 bp, Artificial Sequence
  Description of Artificial Sequence: Synthetic oligonucleotide
  Target: LAMA2; (-) strand; PAM type: NRG; PAM sequence: TAG
gcttgacaatttcttatctc

SEQ ID NO: 68392 - DNA, 20 bp, Artificial Sequence
  Description of Artificial Sequence: Synthetic oligonucleotide
  Target: LAMA2; (-) strand; PAM type: NRG; PAM sequence: CAG
ccctccctggtccttaagga

SEQ ID NO: 68393 - DNA, 20 bp, Artificial Sequence
  Description of Artificial Sequence: Synthetic oligonucleotide
  Target: LAMA2; (-) strand; PAM type: NRG; PAM sequence: AGG
tgggccctccctggtcctta

SEQ ID NO: 68394 - DNA, 20 bp, Artificial Sequence
  Description of Artificial Sequence: Synthetic oligonucleotide
  Target: LAMA2; (-) strand; PAM type: NRG; PAM sequence: AAG
atgggccctccctggtcctt

SEQ ID NO: 68395 - DNA, 20 bp, Artificial Sequence
  Description of Artificial Sequence: Synthetic oligonucleotide
  Target: LAMA2; (-) strand; PAM type: NRG; PAM sequence: TGG
tgttccccatgggccctccc

SEQ ID NO: 68396 - DNA, 20 bp, Artificial Sequence
  Description of Artificial Sequence: Synthetic oligonucleotide
  Target: LAMA2; (-) strand; PAM type: NRG; PAM sequence: GGG
ggaaagatgctgttccccat

SEQ ID NO: 68397 - DNA, 20 bp, Artificial Sequence
  Description of Artificial Sequence: Synthetic oligonucleotide
  Target: LAMA2; (-) strand; PAM type: NRG; PAM sequence: TGG
aggaaagatgctgttcccca

SEQ ID NO: 68398 - DNA, 20 bp, Artificial Sequence
  Description of Artificial Sequence: Synthetic oligonucleotide
  Target: LAMA2; (-) strand; PAM type: NRG; PAM sequence: AAG
tgaatacaacagcatcagga

SEQ ID NO: 68399 - DNA, 20 bp, Artificial Sequence
  Description of Artificial Sequence: Synthetic oligonucleotide
  Target: LAMA2; (-) strand; PAM type: NRG; PAM sequence: AGG
ttgatgaatacaacagcatc

SEQ ID NO: 68400 - DNA, 20 bp, Artificial Sequence
  Description of Artificial Sequence: Synthetic oligonucleotide
  Target: LAMA2; (-) strand; PAM type: NRG; PAM sequence: CAG
tttgatgaatacaacagcat

SEQ ID NO: 68401 - DNA, 20 bp, Artificial Sequence
  Description of Artificial Sequence: Synthetic oligonucleotide
  Target: LAMA2; (-) strand; PAM type: NRG; PAM sequence: CAG
ctatgctttgatgaatacaa

SEQ ID NO: 68402 - DNA, 20 bp, Artificial Sequence
  Description of Artificial Sequence: Synthetic oligonucleotide
  Target: LAMA2; (-) strand; PAM type: NRG; PAM sequence: GAG
ctcaaacaaaaatatcagaa

SEQ ID NO: 68403 - DNA, 20 bp, Artificial Sequence
  Description of Artificial Sequence: Synthetic oligonucleotide
  Target: LAMA2; (-) strand; PAM type: NRG; PAM sequence: AAG
tcctcaaacaaaaatatcag

SEQ ID NO: 68404 - DNA, 20 bp, Artificial Sequence
  Description of Artificial Sequence: Synthetic oligonucleotide
  Target: LAMA2; (-) strand; PAM type: NRG; PAM sequence: CAG
tgttcctcaaacaaaaatat

SEQ ID NO: 68405 - DNA, 20 bp, Artificial Sequence
  Description of Artificial Sequence: Synthetic oligonucleotide
  Target: LAMA2; (-) strand; PAM type: NRG; PAM sequence: GAG
aattgctatgctaggagcat

SEQ ID NO: 68406 - DNA, 20 bp, Artificial Sequence
  Description of Artificial Sequence: Synthetic oligonucleotide
  Target: LAMA2; (-) strand; PAM type: NRG; PAM sequence: GAG
taaactaattgctatgctag

SEQ ID NO: 68407 - DNA, 20 bp, Artificial Sequence
  Description of Artificial Sequence: Synthetic oligonucleotide
  Target: LAMA2; (-) strand; PAM type: NRG; PAM sequence: AGG
tctaaactaattgctatgct

SEQ ID NO: 68408 - DNA, 20 bp, Artificial Sequence
  Description of Artificial Sequence: Synthetic oligonucleotide
  Target: LAMA2; (-) strand; PAM type: NRG; PAM sequence: TAG
ctctaaactaattgctatgc

SEQ ID NO: 68409 - DNA, 20 bp, Artificial Sequence
  Description of Artificial Sequence: Synthetic oligonucleotide
  Target: LAMA2; (-) strand; PAM type: NRG; PAM sequence: CAG
aaaatttagggctttgtctg

SEQ ID NO: 68410 - DNA, 20 bp, Artificial Sequence
  Description of Artificial Sequence: Synthetic oligonucleotide
  Target: LAMA2; (-) strand; PAM type: NRG; PAM sequence: GGG
tagaaaacaaaaaaaattta

SEQ ID NO: 68411 - DNA, 20 bp, Artificial Sequence
  Description of Artificial Sequence: Synthetic oligonucleotide
  Target: LAMA2; (-) strand; PAM type: NRG; PAM sequence: AGG
atagaaaacaaaaaaaattt

SEQ ID NO: 68412 - DNA, 20 bp, Artificial Sequence
  Description of Artificial Sequence: Synthetic oligonucleotide
  Target: LAMA2; (-) strand; PAM type: NRG; PAM sequence: TAG
tatagaaaacaaaaaaaatt

SEQ ID NO: 68413 - DNA, 20 bp, Artificial Sequence
  Description of Artificial Sequence: Synthetic oligonucleotide
  Target: LAMA2; (-) strand; PAM type: NRG; PAM sequence: TAG
aaaaaaaggtacttgtgata

SEQ ID NO: 68414 - DNA, 20 bp, Artificial Sequence
  Description of Artificial Sequence: Synthetic oligonucleotide
  Target: LAMA2; (-) strand; PAM type: NRG; PAM sequence: AGG
tagaaccttaaaccaaaaaa

SEQ ID NO: 68415 - DNA, 20 bp, Artificial Sequence
  Description of Artificial Sequence: Synthetic oligonucleotide
  Target: LAMA2; (-) strand; PAM type: NRG; PAM sequence: AAG
ttagaaccttaaaccaaaaa

SEQ ID NO: 68416 - DNA, 20 bp, Artificial Sequence
  Description of Artificial Sequence: Synthetic oligonucleotide
  Target: LAMA2; (-) strand; PAM type: NRG; PAM sequence: TAG
aagtcacggaaaatgaaatt

SEQ ID NO: 68417 - DNA, 20 bp, Artificial Sequence
  Description of Artificial Sequence: Synthetic oligonucleotide
  Target: LAMA2; (-) strand; PAM type: NRG; PAM sequence: CGG
tgcaaaacagtttcaagtca

SEQ ID NO: 68418 - DNA, 20 bp, Artificial Sequence
  Description of Artificial Sequence: Synthetic oligonucleotide
  Target: LAMA2; (-) strand; PAM type: NRG; PAM sequence: AAG
aggaagtgcaaaacagtttc

SEQ ID NO: 68419 - DNA, 20 bp, Artificial Sequence
  Description of Artificial Sequence: Synthetic oligonucleotide
  Target: LAMA2; (-) strand; PAM type: NRG; PAM sequence: CAG
caaggagaggaagtgcaaaa

SEQ ID NO: 68420 - DNA, 20 bp, Artificial Sequence
  Description of Artificial Sequence: Synthetic oligonucleotide
  Target: LAMA2; (-) strand; PAM type: NRG; PAM sequence: AAG
aaatataaagcaaggagagg

SEQ ID NO: 68421 - DNA, 20 bp, Artificial Sequence
  Description of Artificial Sequence: Synthetic oligonucleotide
  Target: LAMA2; (-) strand; PAM type: NRG; PAM sequence: AGG
tcaaaatataaagcaaggag

SEQ ID NO: 68422 - DNA, 20 bp, Artificial Sequence
  Description of Artificial Sequence: Synthetic oligonucleotide
  Target: LAMA2; (-) strand; PAM type: NRG; PAM sequence: GAG
ctcaaaatataaagcaagga

SEQ ID NO: 68423 - DNA, 20 bp, Artificial Sequence
  Description of Artificial Sequence: Synthetic oligonucleotide
  Target: LAMA2; (-) strand; PAM type: NRG; PAM sequence: GAG
aactcaaaatataaagcaag

SEQ ID NO: 68424 - DNA, 20 bp, Artificial Sequence
  Description of Artificial Sequence: Synthetic oligonucleotide
  Target: LAMA2; (-) strand; PAM type: NRG; PAM sequence: AGG
taaactcaaaatataaagca

SEQ ID NO: 68425 - DNA, 20 bp, Artificial Sequence
  Description of Artificial Sequence: Synthetic oligonucleotide
  Target: LAMA2; (-) strand; PAM type: NRG; PAM sequence: AAG
gtaaactcaaaatataaagc

SEQ ID NO: 68426 - DNA, 20 bp, Artificial Sequence
  Description of Artificial Sequence: Synthetic oligonucleotide
  Target: LAMA2; (-) strand; PAM type: NRG; PAM sequence: AAG
gtgtgtaaactcaaaatata

SEQ ID NO: 68427 - DNA, 20 bp, Artificial Sequence
  Description of Artificial Sequence: Synthetic oligonucleotide
  Target: LAMA2; (-) strand; PAM type: NRG; PAM sequence: TAG
tagatgtctctttggcaggt

SEQ ID NO: 68428 - DNA, 20 bp, Artificial Sequence
  Description of Artificial Sequence: Synthetic oligonucleotide
  Target: LAMA2; (-) strand; PAM type: NRG; PAM sequence: AGG
aaactagatgtctctttggc

SEQ ID NO: 68429 - DNA, 20 bp, Artificial Sequence
  Description of Artificial Sequence: Synthetic oligonucleotide
  Target: LAMA2; (-) strand; PAM type: NRG; PAM sequence: CAG
taaactagatgtctctttgg

SEQ ID NO: 68430 - DNA, 20 bp, Artificial Sequence
  Description of Artificial Sequence: Synthetic oligonucleotide
  Target: LAMA2; (-) strand; PAM type: NRG; PAM sequence: TGG
ctataaactagatgtctctt

SEQ ID NO: 68431 - DNA, 20 bp, Artificial Sequence
  Description of Artificial Sequence: Synthetic oligonucleotide
  Target: LAMA2; (-) strand; PAM type: NRG; PAM sequence: TAG
ccaaaatcaagcctataaac

SEQ ID NO: 68432 - DNA, 20 bp, Artificial Sequence
  Description of Artificial Sequence: Synthetic oligonucleotide
  Target: LAMA2; (-) strand; PAM type: NRG; PAM sequence: AAG
tctgtctttcttccaaaatc

SEQ ID NO: 68433 - DNA, 20 bp, Artificial Sequence
  Description of Artificial Sequence: Synthetic oligonucleotide
  Target: LAMA2; (-) strand; PAM type: NRG; PAM sequence: CAG
atatcagcggaacatatgtt

SEQ ID NO: 68434 - DNA, 20 bp, Artificial Sequence
  Description of Artificial Sequence: Synthetic oligonucleotide
  Target: LAMA2; (-) strand; PAM type: NRG; PAM sequence: CGG
cctcacttcatcaatatcag

SEQ ID NO: 68435 - DNA, 20 bp, Artificial Sequence
  Description of Artificial Sequence: Synthetic oligonucleotide
  Target: LAMA2; (-) strand; PAM type: NRG; PAM sequence: CAG
caacctcacttcatcaatat

SEQ ID NO: 68436 - DNA, 20 bp, Artificial Sequence
  Description of Artificial Sequence: Synthetic oligonucleotide
  Target: LAMA2; (-) strand; PAM type: NRG; PAM sequence: AAG
gagagaaatagactgcttcc

SEQ ID NO: 68437 - DNA, 20 bp, Artificial Sequence
  Description of Artificial Sequence: Synthetic oligonucleotide
  Target: LAMA2; (-) strand; PAM type: NRG; PAM sequence: TAG
gggtggcagttggagagaaa

SEQ ID NO: 68438 - DNA, 20 bp, Artificial Sequence
  Description of Artificial Sequence: Synthetic oligonucleotide
  Target: LAMA2; (-) strand; PAM type: NRG; PAM sequence: GAG
tagagggggtggcagttgga

SEQ ID NO: 68439 - DNA, 20 bp, Artificial Sequence
  Description of Artificial Sequence: Synthetic oligonucleotide
  Target: LAMA2; (-) strand; PAM type: NRG; PAM sequence: GAG
catagagggggtggcagttg

SEQ ID NO: 68440 - DNA, 20 bp, Artificial Sequence
  Description of Artificial Sequence: Synthetic oligonucleotide
  Target: LAMA2; (-) strand; PAM type: NRG; PAM sequence: TGG
ttcatagagggggtggcagt

SEQ ID NO: 68441 - DNA, 20 bp, Artificial Sequence
  Description of Artificial Sequence: Synthetic oligonucleotide
  Target: LAMA2; (-) strand; PAM type: NRG; PAM sequence: CAG
aatattcatagagggggtgg

SEQ ID NO: 68442 - DNA, 20 bp, Artificial Sequence
  Description of Artificial Sequence: Synthetic oligonucleotide
  Target: LAMA2; (-) strand; PAM type: NRG; PAM sequence: TGG
caaaatattcatagaggggg

SEQ ID NO: 68443 - DNA, 20 bp, Artificial Sequence
  Description of Artificial Sequence: Synthetic oligonucleotide
  Target: LAMA2; (-) strand; PAM type: NRG; PAM sequence: GGG
acccaaaatattcatagagg

SEQ ID NO: 68444 - DNA, 20 bp, Artificial Sequence
  Description of Artificial Sequence: Synthetic oligonucleotide
  Target: LAMA2; (-) strand; PAM type: NRG; PAM sequence: GGG
tacccaaaatattcatagag

SEQ ID NO: 68445 - DNA, 20 bp, Artificial Sequence
  Description of Artificial Sequence: Synthetic oligonucleotide
  Target: LAMA2; (-) strand; PAM type: NRG; PAM sequence: GGG
gtacccaaaatattcataga

SEQ ID NO: 68446 - DNA, 20 bp, Artificial Sequence
  Description of Artificial Sequence: Synthetic oligonucleotide
  Target: LAMA2; (-) strand; PAM type: NRG; PAM sequence: AGG
ggtacccaaaatattcatag

SEQ ID NO: 68447 - DNA, 20 bp, Artificial Sequence
  Description of Artificial Sequence: Synthetic oligonucleotide
  Target: LAMA2; (-) strand; PAM type: NRG; PAM sequence: GAG
gggtacccaaaatattcata

SEQ ID NO: 68448 - DNA, 20 bp, Artificial Sequence
  Description of Artificial Sequence: Synthetic oligonucleotide
  Target: LAMA2; (-) strand; PAM type: NRG; PAM sequence: TAG
aagggtacccaaaatattca

SEQ ID NO: 68449 - DNA, 20 bp, Artificial Sequence
  Description of Artificial Sequence: Synthetic oligonucleotide
  Target: LAMA2; (-) strand; PAM type: NRG; PAM sequence: GGG
tttggaatgttccagcataa

SEQ ID NO: 68450 - DNA, 20 bp, Artificial Sequence
  Description of Artificial Sequence: Synthetic oligonucleotide
  Target: LAMA2; (-) strand; PAM type: NRG; PAM sequence: AGG
atttggaatgttccagcata

SEQ ID NO: 68451 - DNA, 20 bp, Artificial Sequence
  Description of Artificial Sequence: Synthetic oligonucleotide
  Target: LAMA2; (-) strand; PAM type: NRG; PAM sequence: AAG
tatttggaatgttccagcat

SEQ ID NO: 68452 - DNA, 20 bp, Artificial Sequence
  Description of Artificial Sequence: Synthetic oligonucleotide
  Target: LAMA2; (-) strand; PAM type: NRG; PAM sequence: CAG
ggcacttatttggaatgttc

SEQ ID NO: 68453 - DNA, 20 bp, Artificial Sequence
  Description of Artificial Sequence: Synthetic oligonucleotide
  Target: LAMA2; (-) strand; PAM type: NRG; PAM sequence: TGG
ccatagctggggcacttatt

SEQ ID NO: 68454 - DNA, 20 bp, Artificial Sequence
  Description of Artificial Sequence: Synthetic oligonucleotide
  Target: LAMA2; (-) strand; PAM type: NRG; PAM sequence: GGG
aaaaaaaaaacccatagctg

SEQ ID NO: 68455 - DNA, 20 bp, Artificial Sequence
  Description of Artificial Sequence: Synthetic oligonucleotide
  Target: LAMA2; (-) strand; PAM type: NRG; PAM sequence: GGG
aaaaaaaaaaacccatagct

SEQ ID NO: 68456 - DNA, 20 bp, Artificial Sequence
  Description of Artificial Sequence: Synthetic oligonucleotide
  Target: LAMA2; (-) strand; PAM type: NRG; PAM sequence: TGG
aaaaaaaaaaaacccatagc

SEQ ID NO: 68457 - DNA, 20 bp, Artificial Sequence
  Description of Artificial Sequence: Synthetic oligonucleotide
  Target: LAMA2; (-) strand; PAM type: NRG; PAM sequence: TAG
tgagaaaaaaaaaaaaccca

SEQ ID NO: 68458 - DNA, 20 bp, Artificial Sequence
  Description of Artificial Sequence: Synthetic oligonucleotide
  Target: LAMA2; (-) strand; PAM type: NRG; PAM sequence: GAG
aaggctttcagaatcattat

SEQ ID NO: 68459 - DNA, 20 bp, Artificial Sequence
  Description of Artificial Sequence: Synthetic oligonucleotide
  Target: LAMA2; (-) strand; PAM type: NRG; PAM sequence: CAG
taaatcatcccaaaggcttt

SEQ ID NO: 68460 - DNA, 20 bp, Artificial Sequence
  Description of Artificial Sequence: Synthetic oligonucleotide
  Target: LAMA2; (-) strand; PAM type: NRG; PAM sequence: AGG
acaatcctaaatcatcccaa

SEQ ID NO: 68461 - DNA, 20 bp, Artificial Sequence
  Description of Artificial Sequence: Synthetic oligonucleotide
  Target: LAMA2; (-) strand; PAM type: NRG; PAM sequence: AAG
aacaatcctaaatcatccca

SEQ ID NO: 68462 - DNA, 20 bp, Artificial Sequence
  Description of Artificial Sequence: Synthetic oligonucleotide
  Target: LAMA2; (-) strand; PAM type: NRG; PAM sequence: TAG
tttggtttatgttccacttg

SEQ ID NO: 68463 - DNA, 20 bp, Artificial Sequence
  Description of Artificial Sequence: Synthetic oligonucleotide
  Target: LAMA2; (-) strand; PAM type: NRG; PAM sequence: TGG
gtccacgaactgctttgttt

SEQ ID NO: 68464 - DNA, 20 bp, Artificial Sequence
  Description of Artificial Sequence: Synthetic oligonucleotide
  Target: LAMA2; (-) strand; PAM type: NRG; PAM sequence: GAG
ccatcacccatttaaaatta

SEQ ID NO: 68465 - DNA, 20 bp, Artificial Sequence
  Description of Artificial Sequence: Synthetic oligonucleotide
  Target: LAMA2; (-) strand; PAM type: NRG; PAM sequence: TAG
atccatcacccatttaaaat

SEQ ID NO: 68466 - DNA, 20 bp, Artificial Sequence
  Description of Artificial Sequence: Synthetic oligonucleotide
  Target: LAMA2; (-) strand; PAM type: NRG; PAM sequence: CAG
ttctctggtcacatcatttt

SEQ ID NO: 68467 - DNA, 20 bp, Artificial Sequence
  Description of Artificial Sequence: Synthetic oligonucleotide
  Target: LAMA2; (-) strand; PAM type: NRG; PAM sequence: TGG
ctatctaggggtcccttctc

SEQ ID NO: 68468 - DNA, 20 bp, Artificial Sequence
  Description of Artificial Sequence: Synthetic oligonucleotide
  Target: LAMA2; (-) strand; PAM type: NRG; PAM sequence: GGG
attgagtacttactatctag

SEQ ID NO: 68469 - DNA, 20 bp, Artificial Sequence
  Description of Artificial Sequence: Synthetic oligonucleotide
  Target: LAMA2; (-) strand; PAM type: NRG; PAM sequence: GGG
tattgagtacttactatcta

SEQ ID NO: 68470 - DNA, 20 bp, Artificial Sequence
  Description of Artificial Sequence: Synthetic oligonucleotide
  Target: LAMA2; (-) strand; PAM type: NRG; PAM sequence: AGG
ttattgagtacttactatct

SEQ ID NO: 68471 - DNA, 20 bp, Artificial Sequence
  Description of Artificial Sequence: Synthetic oligonucleotide
  Target: LAMA2; (-) strand; PAM type: NRG; PAM sequence: TAG
tttattgagtacttactatc

SEQ ID NO: 68472 - DNA, 20 bp, Artificial Sequence
  Description of Artificial Sequence: Synthetic oligonucleotide
  Target: LAMA2; (-) strand; PAM type: NRG; PAM sequence: GAG
ccctgcttctgtcatttatt

SEQ ID NO: 68473 - DNA, 20 bp, Artificial Sequence
  Description of Artificial Sequence: Synthetic oligonucleotide
  Target: LAMA2; (-) strand; PAM type: NRG; PAM sequence: AGG
agtctattttcccaagaaac

SEQ ID NO: 68474 - DNA, 20 bp, Artificial Sequence
  Description of Artificial Sequence: Synthetic oligonucleotide
  Target: LAMA2; (-) strand; PAM type: NRG; PAM sequence: CAG
aagtctattttcccaagaaa

SEQ ID NO: 68475 - DNA, 20 bp, Artificial Sequence
  Description of Artificial Sequence: Synthetic oligonucleotide
  Target: LAMA2; (-) strand; PAM type: NRG; PAM sequence: AAG
aacttcaagtctattttccc

SEQ ID NO: 68476 - DNA, 20 bp, Artificial Sequence
  Description of Artificial Sequence: Synthetic oligonucleotide
  Target: LAMA2; (-) strand; PAM type: NRG; PAM sequence: AAG
atagattcttgtctaacttc

SEQ ID NO: 68477 - DNA, 20 bp, Artificial Sequence
  Description of Artificial Sequence: Synthetic oligonucleotide
  Target: LAMA2; (-) strand; PAM type: NRG; PAM sequence: TAG
atatctagagtttgattaaa

SEQ ID NO: 68478 - DNA, 20 bp, Artificial Sequence
  Description of Artificial Sequence: Synthetic oligonucleotide
  Target: LAMA2; (-) strand; PAM type: NRG; PAM sequence: GAG
ttagcaaaacatcatatcta

SEQ ID NO: 68479 - DNA, 20 bp, Artificial Sequence
  Description of Artificial Sequence: Synthetic oligonucleotide
  Target: LAMA2; (-) strand; PAM type: NRG; PAM sequence: TAG
agttagcaaaacatcatatc

SEQ ID NO: 68480 - DNA, 20 bp, Artificial Sequence
  Description of Artificial Sequence: Synthetic oligonucleotide
  Target: LAMA2; (-) strand; PAM type: NRG; PAM sequence: TAG
aagcaacaaaaaacaaaagt

SEQ ID NO: 68481 - DNA, 20 bp, Artificial Sequence
  Description of Artificial Sequence: Synthetic oligonucleotide
  Target: LAMA2; (-) strand; PAM type: NRG; PAM sequence: AAG
accaaagcaacaaaaaacaa

SEQ ID NO: 68482 - DNA, 20 bp, Artificial Sequence
  Description of Artificial Sequence: Synthetic oligonucleotide
  Target: LAMA2; (-) strand; PAM type: NRG; PAM sequence: AAG
aaaaaaactccaaaaaacca

SEQ ID NO: 68483 - DNA, 20 bp, Artificial Sequence
  Description of Artificial Sequence: Synthetic oligonucleotide
  Target: LAMA2; (-) strand; PAM type: NRG; PAM sequence: AAG
cagatcaaaaagacttcttg

SEQ ID NO: 68484 - DNA, 20 bp, Artificial Sequence
  Description of Artificial Sequence: Synthetic oligonucleotide
  Target: LAMA2; (-) strand; PAM type: NRG; PAM sequence: AAG
ctacactacctcagatcaaa

SEQ ID NO: 68485 - DNA, 20 bp, Artificial Sequence
  Description of Artificial Sequence: Synthetic oligonucleotide
  Target: LAMA2; (-) strand; PAM type: NRG; PAM sequence: CAG
tagagttgactacactacct

SEQ ID NO: 68486 - DNA, 20 bp, Artificial Sequence
  Description of Artificial Sequence: Synthetic oligonucleotide
  Target: LAMA2; (-) strand; PAM type: NRG; PAM sequence: GAG
acttcatgcttaataaatta

SEQ ID NO: 68487 - DNA, 20 bp, Artificial Sequence
  Description of Artificial Sequence: Synthetic oligonucleotide
  Target: LAMA2; (-) strand; PAM type: NRG; PAM sequence: TAG
tcacttcatgcttaataaat

SEQ ID NO: 68488 - DNA, 20 bp, Artificial Sequence
  Description of Artificial Sequence: Synthetic oligonucleotide
  Target: LAMA2; (-) strand; PAM type: NRG; PAM sequence: CAG
aaaatagtgcacctctgtaa

SEQ ID NO: 68489 - DNA, 20 bp, Artificial Sequence
  Description of Artificial Sequence: Synthetic oligonucleotide
  Target: LAMA2; (-) strand; PAM type: NRG; PAM sequence: TAG
ctacatcaggaaggacaaaa

SEQ ID NO: 68490 - DNA, 20 bp, Artificial Sequence
  Description of Artificial Sequence: Synthetic oligonucleotide
  Target: LAMA2; (-) strand; PAM type: NRG; PAM sequence: AGG
cactaatggctacatcagga

SEQ ID NO: 68491 - DNA, 20 bp, Artificial Sequence
  Description of Artificial Sequence: Synthetic oligonucleotide
  Target: LAMA2; (-) strand; PAM type: NRG; PAM sequence: AAG
acactaatggctacatcagg

SEQ ID NO: 68492 - DNA, 20 bp, Artificial Sequence
  Description of Artificial Sequence: Synthetic oligonucleotide
  Target: LAMA2; (-) strand; PAM type: NRG; PAM sequence: AGG
ggaacactaatggctacatc

SEQ ID NO: 68493 - DNA, 20 bp, Artificial Sequence
  Description of Artificial Sequence: Synthetic oligonucleotide
  Target: LAMA2; (-) strand; PAM type: NRG; PAM sequence: CAG
aggaacactaatggctacat

SEQ ID NO: 68494 - DNA, 20 bp, Artificial Sequence
  Description of Artificial Sequence: Synthetic oligonucleotide
  Target: LAMA2; (-) strand; PAM type: NRG; PAM sequence: TGG
atttcttgtaggaacactaa

SEQ ID NO: 68495 - DNA, 20 bp, Artificial Sequence
  Description of Artificial Sequence: Synthetic oligonucleotide
  Target: LAMA2; (-) strand; PAM type: NRG; PAM sequence: AGG
tgataatccagatttcttgt

SEQ ID NO: 68496 - DNA, 20 bp, Artificial Sequence
  Description of Artificial Sequence: Synthetic oligonucleotide
  Target: LAMA2; (-) strand; PAM type: NRG; PAM sequence: TAG
atgataatccagatttcttg

SEQ ID NO: 68497 - DNA, 20 bp, Artificial Sequence
  Description of Artificial Sequence: Synthetic oligonucleotide
  Target: LAMA2; (-) strand; PAM type: NRG; PAM sequence: CAG
aaaaaactgtcatgataatc

SEQ ID NO: 68498 - DNA, 20 bp, Artificial Sequence
  Description of Artificial Sequence: Synthetic oligonucleotide
  Target: LAMA2; (-) strand; PAM type: NRG; PAM sequence: AAG
taaaaaaagaaaaaggaaaa

SEQ ID NO: 68499 - DNA, 20 bp, Artificial Sequence
  Description of Artificial Sequence: Synthetic oligonucleotide
  Target: LAMA2; (-) strand; PAM type: NRG; PAM sequence: AGG
ctaaaattaaaaaaagaaaa

SEQ ID NO: 68500 - DNA, 20 bp, Artificial Sequence
  Description of Artificial Sequence: Synthetic oligonucleotide
  Target: LAMA2; (-) strand; PAM type: NRG; PAM sequence: AAG
tctaaaattaaaaaaagaaa

SEQ ID NO: 68501 - DNA, 20 bp, Artificial Sequence
  Description of Artificial Sequence: Synthetic oligonucleotide
  Target: LAMA2; (-) strand; PAM type: NRG; PAM sequence: AAG
cctaaatctaaaattaaaaa

SEQ ID NO: 68502 - DNA, 20 bp, Artificial Sequence
  Description of Artificial Sequence: Synthetic oligonucleotide
  Target: LAMA2; (-) strand; PAM type: NRG; PAM sequence: AAG
ttgggtgatgggttcagtag

SEQ ID NO: 68503 - DNA, 20 bp, Artificial Sequence
  Description of Artificial Sequence: Synthetic oligonucleotide
  Target: LAMA2; (-) strand; PAM type: NRG; PAM sequence: TAG
catttgggtgatgggttcag

SEQ ID NO: 68504 - DNA, 20 bp, Artificial Sequence
  Description of Artificial Sequence: Synthetic oligonucleotide
  Target: LAMA2; (-) strand; PAM type: NRG; PAM sequence: CAG
caccatttgggtgatgggtt

SEQ ID NO: 68505 - DNA, 20 bp, Artificial Sequence
  Description of Artificial Sequence: Synthetic oligonucleotide
  Target: LAMA2; (-) strand; PAM type: NRG; PAM sequence: GGG
atgttcaccatttgggtgat

SEQ ID NO: 68506 - DNA, 20 bp, Artificial Sequence
  Description of Artificial Sequence: Synthetic oligonucleotide
  Target: LAMA2; (-) strand; PAM type: NRG; PAM sequence: TGG
aatgttcaccatttgggtga

SEQ ID NO: 68507 - DNA, 20 bp, Artificial Sequence
  Description of Artificial Sequence: Synthetic oligonucleotide
  Target: LAMA2; (-) strand; PAM type: NRG; PAM sequence: GGG
gaatacaatgttcaccattt

SEQ ID NO: 68508 - DNA, 20 bp, Artificial Sequence
  Description of Artificial Sequence: Synthetic oligonucleotide
  Target: LAMA2; (-) strand; PAM type: NRG; PAM sequence: TGG
tgaatacaatgttcaccatt

SEQ ID NO: 68509 - DNA, 20 bp, Artificial Sequence
  Description of Artificial Sequence: Synthetic oligonucleotide
  Target: LAMA2; (-) strand; PAM type: NRG; PAM sequence: AGG
aagaggctgggagaggaatg

SEQ ID NO: 68510 - DNA, 20 bp, Artificial Sequence
  Description of Artificial Sequence: Synthetic oligonucleotide
  Target: LAMA2; (-) strand; PAM type: NRG; PAM sequence: GAG
gaagaggctgggagaggaat

SEQ ID NO: 68511 - DNA, 20 bp, Artificial Sequence
  Description of Artificial Sequence: Synthetic oligonucleotide
  Target: LAMA2; (-) strand; PAM type: NRG; PAM sequence: AGG
aaaagggaagaggctgggag

SEQ ID NO: 68512 - DNA, 20 bp, Artificial Sequence
  Description of Artificial Sequence: Synthetic oligonucleotide
  Target: LAMA2; (-) strand; PAM type: NRG; PAM sequence: GAG
caaaagggaagaggctggga

SEQ ID NO: 68513 - DNA, 20 bp, Artificial Sequence
  Description of Artificial Sequence: Synthetic oligonucleotide
  Target: LAMA2; (-) strand; PAM type: NRG; PAM sequence: GAG
tacaaaagggaagaggctgg

SEQ ID NO: 68514 - DNA, 20 bp, Artificial Sequence
  Description of Artificial Sequence: Synthetic oligonucleotide
  Target: LAMA2; (-) strand; PAM type: NRG; PAM sequence: GGG
aatacaaaagggaagaggct

SEQ ID NO: 68515 - DNA, 20 bp, Artificial Sequence
  Description of Artificial Sequence: Synthetic oligonucleotide
  Target: LAMA2; (-) strand; PAM type: NRG; PAM sequence: TGG
gaatacaaaagggaagaggc

SEQ ID NO: 68516 - DNA, 20 bp, Artificial Sequence
  Description of Artificial Sequence: Synthetic oligonucleotide
  Target: LAMA2; (-) strand; PAM type: NRG; PAM sequence: AGG
ccaggaatacaaaagggaag

SEQ ID NO: 68517 - DNA, 20 bp, Artificial Sequence
  Description of Artificial Sequence: Synthetic oligonucleotide
  Target: LAMA2; (-) strand; PAM type: NRG; PAM sequence: GAG
cccaggaatacaaaagggaa

SEQ ID NO: 68518 - DNA, 20 bp, Artificial Sequence
  Description of Artificial Sequence: Synthetic oligonucleotide
  Target: LAMA2; (-) strand; PAM type: NRG; PAM sequence: AAG
cacccaggaatacaaaaggg

SEQ ID NO: 68519 - DNA, 20 bp, Artificial Sequence
  Description of Artificial Sequence: Synthetic oligonucleotide
  Target: LAMA2; (-) strand; PAM type: NRG; PAM sequence: GGG
agacacccaggaatacaaaa

SEQ ID NO: 68520 - DNA, 20 bp, Artificial Sequence
  Description of Artificial Sequence: Synthetic oligonucleotide
  Target: LAMA2; (-) strand; PAM type: NRG; PAM sequence: AGG
tagacacccaggaatacaaa

SEQ ID NO: 68521 - DNA, 20 bp, Artificial Sequence
  Description of Artificial Sequence: Synthetic oligonucleotide
  Target: LAMA2; (-) strand; PAM type: NRG; PAM sequence: AAG
atagacacccaggaatacaa

SEQ ID NO: 68522 - DNA, 20 bp, Artificial Sequence
  Description of Artificial Sequence: Synthetic oligonucleotide
  Target: LAMA2; (-) strand; PAM type: NRG; PAM sequence: AGG
gatggaaataatagacaccc

SEQ ID NO: 68523 - DNA, 20 bp, Artificial Sequence
  Description of Artificial Sequence: Synthetic oligonucleotide
  Target: LAMA2; (-) strand; PAM type: NRG; PAM sequence: CAG
agatggaaataatagacacc

SEQ ID NO: 68524 - DNA, 20 bp, Artificial Sequence
  Description of Artificial Sequence: Synthetic oligonucleotide
  Target: LAMA2; (-) strand; PAM type: NRG; PAM sequence: TAG
ggaaacaaagatggaaataa

SEQ ID NO: 68525 - DNA, 20 bp, Artificial Sequence
  Description of Artificial Sequence: Synthetic oligonucleotide
  Target: LAMA2; (-) strand; PAM type: NRG; PAM sequence: TGG
gatacacatggaaacaaaga

SEQ ID NO: 68526 - DNA, 20 bp, Artificial Sequence
  Description of Artificial Sequence: Synthetic oligonucleotide
  Target: LAMA2; (-) strand; PAM type: NRG; PAM sequence: AAG
aatggatacacatggaaaca

SEQ ID NO: 68527 - DNA, 20 bp, Artificial Sequence
  Description of Artificial Sequence: Synthetic oligonucleotide
  Target: LAMA2; (-) strand; PAM type: NRG; PAM sequence: TGG
agctaaacaatggatacaca

SEQ ID NO: 68528 - DNA, 20 bp, Artificial Sequence
  Description of Artificial Sequence: Synthetic oligonucleotide
  Target: LAMA2; (-) strand; PAM type: NRG; PAM sequence: TGG
tctaagtgggagctaaacaa

SEQ ID NO: 68529 - DNA, 20 bp, Artificial Sequence
  Description of Artificial Sequence: Synthetic oligonucleotide
  Target: LAMA2; (-) strand; PAM type: NRG; PAM sequence: GAG
acattttcacttctaagtgg

SEQ ID NO: 68530 - DNA, 20 bp, Artificial Sequence
  Description of Artificial Sequence: Synthetic oligonucleotide
  Target: LAMA2; (-) strand; PAM type: NRG; PAM sequence: GGG
tgacattttcacttctaagt

SEQ ID NO: 68531 - DNA, 20 bp, Artificial Sequence
  Description of Artificial Sequence: Synthetic oligonucleotide
  Target: LAMA2; (-) strand; PAM type: NRG; PAM sequence: TGG
atgacattttcacttctaag

SEQ ID NO: 68532 - DNA, 20 bp, Artificial Sequence
  Description of Artificial Sequence: Synthetic oligonucleotide
  Target: LAMA2; (-) strand; PAM type: NRG; PAM sequence: AAG
aatatgacattttcacttct

SEQ ID NO: 68533 - DNA, 20 bp, Artificial Sequence
  Description of Artificial Sequence: Synthetic oligonucleotide
  Target: LAMA2; (-) strand; PAM type: NRG; PAM sequence: CAG
taagtgaaataactcagaag

SEQ ID NO: 68534 - DNA, 20 bp, Artificial Sequence
  Description of Artificial Sequence: Synthetic oligonucleotide
  Target: LAMA2; (-) strand; PAM type: NRG; PAM sequence: AAG
tcctaagtgaaataactcag

SEQ ID NO: 68535 - DNA, 20 bp, Artificial Sequence
  Description of Artificial Sequence: Synthetic oligonucleotide
  Target: LAMA2; (-) strand; PAM type: NRG; PAM sequence: CAG
ttatcctaagtgaaataact

SEQ ID NO: 68536 - DNA, 20 bp, Artificial Sequence
  Description of Artificial Sequence: Synthetic oligonucleotide
  Target: LAMA2; (-) strand; PAM type: NRG; PAM sequence: AAG
gagctggaggccattatcct

SEQ ID NO: 68537 - DNA, 20 bp, Artificial Sequence
  Description of Artificial Sequence: Synthetic oligonucleotide
  Target: LAMA2; (-) strand; PAM type: NRG; PAM sequence: AGG
agcaacatggatggagctgg

SEQ ID NO: 68538 - DNA, 20 bp, Artificial Sequence
  Description of Artificial Sequence: Synthetic oligonucleotide
  Target: LAMA2; (-) strand; PAM type: NRG; PAM sequence: GAG
cagcaacatggatggagctg

SEQ ID NO: 68539 - DNA, 20 bp, Artificial Sequence
  Description of Artificial Sequence: Synthetic oligonucleotide
  Target: LAMA2; (-) strand; PAM type: NRG; PAM sequence: TGG
tgcagcaacatggatggagc

SEQ ID NO: 68540 - DNA, 20 bp, Artificial Sequence
  Description of Artificial Sequence: Synthetic oligonucleotide
  Target: LAMA2; (-) strand; PAM type: NRG; PAM sequence: GAG
cctttgcagcaacatggatg

SEQ ID NO: 68541 - DNA, 20 bp, Artificial Sequence
  Description of Artificial Sequence: Synthetic oligonucleotide
  Target: LAMA2; (-) strand; PAM type: NRG; PAM sequence: TGG
gtcctttgcagcaacatgga

SEQ ID NO: 68542 - DNA, 20 bp, Artificial Sequence
  Description of Artificial Sequence: Synthetic oligonucleotide
  Target: LAMA2; (-) strand; PAM type: NRG; PAM sequence: TGG
tcatgtcctttgcagcaaca

SEQ ID NO: 68543 - DNA, 20 bp, Artificial Sequence
  Description of Artificial Sequence: Synthetic oligonucleotide
  Target: LAMA2; (-) strand; PAM type: NRG; PAM sequence: CAG
taatgaaatcatgtcctttg

SEQ ID NO: 68544 - DNA, 20 bp, Artificial Sequence
  Description of Artificial Sequence: Synthetic oligonucleotide
  Target: LAMA2; (-) strand; PAM type: NRG; PAM sequence: CAG
gaacaccatggaatactgtg

SEQ ID NO: 68545 - DNA, 20 bp, Artificial Sequence
  Description of Artificial Sequence: Synthetic oligonucleotide
  Target: LAMA2; (-) strand; PAM type: NRG; PAM sequence: TGG
ggtgtggtatatgaacacca

SEQ ID NO: 68546 - DNA, 20 bp, Artificial Sequence
  Description of Artificial Sequence: Synthetic oligonucleotide
  Target: LAMA2; (-) strand; PAM type: NRG; PAM sequence: TGG
tggacaaagaaaatgtggtg

SEQ ID NO: 68547 - DNA, 20 bp, Artificial Sequence
  Description of Artificial Sequence: Synthetic oligonucleotide
  Target: LAMA2; (-) strand; PAM type: NRG; PAM sequence: TGG
ttggttggacaaagaaaatg

SEQ ID NO: 68548 - DNA, 20 bp, Artificial Sequence
  Description of Artificial Sequence: Synthetic oligonucleotide
  Target: LAMA2; (-) strand; PAM type: NRG; PAM sequence: AAG
atctatgtgttggttggaca

SEQ ID NO: 68549 - DNA, 20 bp, Artificial Sequence
  Description of Artificial Sequence: Synthetic oligonucleotide
  Target: LAMA2; (-) strand; PAM type: NRG; PAM sequence: TGG
tcaacaatctatgtgttggt

SEQ ID NO: 68550 - DNA, 20 bp, Artificial Sequence
  Description of Artificial Sequence: Synthetic oligonucleotide
  Target: LAMA2; (-) strand; PAM type: NRG; PAM sequence: TGG
gtgctcaacaatctatgtgt

SEQ ID NO: 68551 - DNA, 20 bp, Artificial Sequence
  Description of Artificial Sequence: Synthetic oligonucleotide
  Target: LAMA2; (-) strand; PAM type: NRG; PAM sequence: TGG
tattcacaatagcaaagtca

SEQ ID NO: 68552 - DNA, 20 bp, Artificial Sequence
  Description of Artificial Sequence: Synthetic oligonucleotide
  Target: LAMA2; (-) strand; PAM type: NRG; PAM sequence: AAG
cagcactattcacaatagca

SEQ ID NO: 68553 - DNA, 20 bp, Artificial Sequence
  Description of Artificial Sequence: Synthetic oligonucleotide
  Target: LAMA2; (-) strand; PAM type: NRG; PAM sequence: TAG
tgttgcagcactattcacaa

SEQ ID NO: 68554 - DNA, 20 bp, Artificial Sequence
  Description of Artificial Sequence: Synthetic oligonucleotide
  Target: LAMA2; (-) strand; PAM type: NRG; PAM sequence: CAG
ctacatttgtgtgtttgttg

SEQ ID NO: 68555 - DNA, 20 bp, Artificial Sequence
  Description of Artificial Sequence: Synthetic oligonucleotide
  Target: LAMA2; (-) strand; PAM type: NRG; PAM sequence: AAG
aaagaactaactatatcaaa

SEQ ID NO: 68556 - DNA, 20 bp, Artificial Sequence
  Description of Artificial Sequence: Synthetic oligonucleotide
  Target: LAMA2; (-) strand; PAM type: NRG; PAM sequence: AAG
tgggtatctacccaaaggaa

SEQ ID NO: 68557 - DNA, 20 bp, Artificial Sequence
  Description of Artificial Sequence: Synthetic oligonucleotide
  Target: LAMA2; (-) strand; PAM type: NRG; PAM sequence: AGG
attactgggtatctacccaa

SEQ ID NO: 68558 - DNA, 20 bp, Artificial Sequence
  Description of Artificial Sequence: Synthetic oligonucleotide
  Target: LAMA2; (-) strand; PAM type: NRG; PAM sequence: AAG
cattactgggtatctaccca

SEQ ID NO: 68559 - DNA, 20 bp, Artificial Sequence
  Description of Artificial Sequence: Synthetic oligonucleotide
  Target: LAMA2; (-) strand; PAM type: NRG; PAM sequence: GGG
gatatagcaatcccattact

SEQ ID NO: 68560 - DNA, 20 bp, Artificial Sequence
  Description of Artificial Sequence: Synthetic oligonucleotide
  Target: LAMA2; (-) strand; PAM type: NRG; PAM sequence: TGG
tgatatagcaatcccattac

SEQ ID NO: 68561 - DNA, 20 bp, Artificial Sequence
  Description of Artificial Sequence: Synthetic oligonucleotide
  Target: LAMA2; (-) strand; PAM type: NRG; PAM sequence: TAG
aagagaactactatttgata

SEQ ID NO: 68562 - DNA, 20 bp, Artificial Sequence
  Description of Artificial Sequence: Synthetic oligonucleotide
  Target: LAMA2; (-) strand; PAM type: NRG; PAM sequence: GAG
agttcttaaagaacaaaaaa

SEQ ID NO: 68563 - DNA, 20 bp, Artificial Sequence
  Description of Artificial Sequence: Synthetic oligonucleotide
  Target: LAMA2; (-) strand; PAM type: NRG; PAM sequence: AAG
agagttcttaaagaacaaaa

SEQ ID NO: 68564 - DNA, 20 bp, Artificial Sequence
  Description of Artificial Sequence: Synthetic oligonucleotide
  Target: LAMA2; (-) strand; PAM type: NRG; PAM sequence: AAG
atcaatatggagagttctta

SEQ ID NO: 68565 - DNA, 20 bp, Artificial Sequence
  Description of Artificial Sequence: Synthetic oligonucleotide
  Target: LAMA2; (-) strand; PAM type: NRG; PAM sequence: GAG
cctatggaaatcaatatgga

SEQ ID NO: 68566 - DNA, 20 bp, Artificial Sequence
  Description of Artificial Sequence: Synthetic oligonucleotide
  Target: LAMA2; (-) strand; PAM type: NRG; PAM sequence: GAG
cccctatggaaatcaatatg

SEQ ID NO: 68567 - DNA, 20 bp, Artificial Sequence
  Description of Artificial Sequence: Synthetic oligonucleotide
  Target: LAMA2; (-) strand; PAM type: NRG; PAM sequence: TGG
aacccctatggaaatcaata

SEQ ID NO: 68568 - DNA, 20 bp, Artificial Sequence
  Description of Artificial Sequence: Synthetic oligonucleotide
  Target: LAMA2; (-) strand; PAM type: NRG; PAM sequence: TGG
gtaaattagttcaaccccta

SEQ ID NO: 68569 - DNA, 20 bp, Artificial Sequence
  Description of Artificial Sequence: Synthetic oligonucleotide
  Target: LAMA2; (-) strand; PAM type: NRG; PAM sequence: TAG
ctgctggtgggaatgtaaat

SEQ ID NO: 68570 - DNA, 20 bp, Artificial Sequence
  Description of Artificial Sequence: Synthetic oligonucleotide
  Target: LAMA2; (-) strand; PAM type: NRG; PAM sequence: GGG
aatgcttatacgctgctggt

SEQ ID NO: 68571 - DNA, 20 bp, Artificial Sequence
  Description of Artificial Sequence: Synthetic oligonucleotide
  Target: LAMA2; (-) strand; PAM type: NRG; PAM sequence: TGG
gaatgcttatacgctgctgg

SEQ ID NO: 68572 - DNA, 20 bp, Artificial Sequence
  Description of Artificial Sequence: Synthetic oligonucleotide
  Target: LAMA2; (-) strand; PAM type: NRG; PAM sequence: TGG
agggaatgcttatacgctgc

SEQ ID NO: 68573 - DNA, 20 bp, Artificial Sequence
  Description of Artificial Sequence: Synthetic oligonucleotide
  Target: LAMA2; (-) strand; PAM type: NRG; PAM sequence: GGG
cggtgaggttgcagagaaaa

SEQ ID NO: 68574 - DNA, 20 bp, Artificial Sequence
  Description of Artificial Sequence: Synthetic oligonucleotide
  Target: LAMA2; (-) strand; PAM type: NRG; PAM sequence: AGG
tcggtgaggttgcagagaaa

SEQ ID NO: 68575 - DNA, 20 bp, Artificial Sequence
  Description of Artificial Sequence: Synthetic oligonucleotide
  Target: LAMA2; (-) strand; PAM type: NRG; PAM sequence: AAG
atcggtgaggttgcagagaa

SEQ ID NO: 68576 - DNA, 20 bp, Artificial Sequence
  Description of Artificial Sequence: Synthetic oligonucleotide
  Target: LAMA2; (-) strand; PAM type: NRG; PAM sequence: GAG
tagatatcggtgaggttgca

SEQ ID NO: 68577 - DNA, 20 bp, Artificial Sequence
  Description of Artificial Sequence: Synthetic oligonucleotide
  Target: LAMA2; (-) strand; PAM type: NRG; PAM sequence: CAG
attagatatcggtgaggttg

SEQ ID NO: 68578 - DNA, 20 bp, Artificial Sequence
  Description of Artificial Sequence: Synthetic oligonucleotide
  Target: LAMA2; (-) strand; PAM type: NRG; PAM sequence: AGG
aaaaatattagatatcggtg

SEQ ID NO: 68579 - DNA, 20 bp, Artificial Sequence
  Description of Artificial Sequence: Synthetic oligonucleotide
  Target: LAMA2; (-) strand; PAM type: NRG; PAM sequence: GAG
aaaaaatattagatatcggt

SEQ ID NO: 68580 - DNA, 20 bp, Artificial Sequence
  Description of Artificial Sequence: Synthetic oligonucleotide
  Target: LAMA2; (-) strand; PAM type: NRG; PAM sequence: CGG
agtcaaaaaatattagatat

SEQ ID NO: 68581 - DNA, 20 bp, Artificial Sequence
  Description of Artificial Sequence: Synthetic oligonucleotide
  Target: LAMA2; (-) strand; PAM type: NRG; PAM sequence: TAG
attaaaaagtcaaaaaatat

SEQ ID NO: 68582 - DNA, 20 bp, Artificial Sequence
  Description of Artificial Sequence: Synthetic oligonucleotide
  Target: LAMA2; (-) strand; PAM type: NRG; PAM sequence: AAG
ttagaatagctagtattaaa

SEQ ID NO: 68583 - DNA, 20 bp, Artificial Sequence
  Description of Artificial Sequence: Synthetic oligonucleotide
  Target: LAMA2; (-) strand; PAM type: NRG; PAM sequence: TAG
gtcatacaaattagaatagc

SEQ ID NO: 68584 - DNA, 20 bp, Artificial Sequence
  Description of Artificial Sequence: Synthetic oligonucleotide
  Target: LAMA2; (-) strand; PAM type: NRG; PAM sequence: TAG
ccaagtcatacaaattagaa

SEQ ID NO: 68585 - DNA, 20 bp, Artificial Sequence
  Description of Artificial Sequence: Synthetic oligonucleotide
  Target: LAMA2; (-) strand; PAM type: NRG; PAM sequence: TAG
agataccaagtcatacaaat

SEQ ID NO: 68586 - DNA, 20 bp, Artificial Sequence
  Description of Artificial Sequence: Synthetic oligonucleotide
  Target: LAMA2; (-) strand; PAM type: NRG; PAM sequence: AAG
taaaaccacaatgagatacc

SEQ ID NO: 68587 - DNA, 20 bp, Artificial Sequence
  Description of Artificial Sequence: Synthetic oligonucleotide
  Target: LAMA2; (-) strand; PAM type: NRG; PAM sequence: GAG
atgcaaattaaaaccacaat

SEQ ID NO: 68588 - DNA, 20 bp, Artificial Sequence
  Description of Artificial Sequence: Synthetic oligonucleotide
  Target: LAMA2; (-) strand; PAM type: NRG; PAM sequence: GAG
cagtatcactaatcatcagg

SEQ ID NO: 68589 - DNA, 20 bp, Artificial Sequence
  Description of Artificial Sequence: Synthetic oligonucleotide
  Target: LAMA2; (-) strand; PAM type: NRG; PAM sequence: GGG
ctcagtatcactaatcatca

SEQ ID NO: 68590 - DNA, 20 bp, Artificial Sequence
  Description of Artificial Sequence: Synthetic oligonucleotide
  Target: LAMA2; (-) strand; PAM type: NRG; PAM sequence: AGG
gctcagtatcactaatcatc

SEQ ID NO: 68591 - DNA, 20 bp, Artificial Sequence
  Description of Artificial Sequence: Synthetic oligonucleotide
  Target: LAMA2; (-) strand; PAM type: NRG; PAM sequence: CAG
tgctcagtatcactaatcat

SEQ ID NO: 68592 - DNA, 20 bp, Artificial Sequence
  Description of Artificial Sequence: Synthetic oligonucleotide
  Target: LAMA2; (-) strand; PAM type: NRG; PAM sequence: CAG
aaagcaaatgaaaaaatgct

SEQ ID NO: 68593 - DNA, 20 bp, Artificial Sequence
  Description of Artificial Sequence: Synthetic oligonucleotide
  Target: LAMA2; (-) strand; PAM type: NRG; PAM sequence: AAG
aagacatacaagtggccaaa

SEQ ID NO: 68594 - DNA, 20 bp, Artificial Sequence
  Description of Artificial Sequence: Synthetic oligonucleotide
  Target: LAMA2; (-) strand; PAM type: NRG; PAM sequence: TGG
aaaagaaaaagacatacaag

SEQ ID NO: 68595 - DNA, 20 bp, Artificial Sequence
  Description of Artificial Sequence: Synthetic oligonucleotide
  Target: LAMA2; (-) strand; PAM type: NRG; PAM sequence: AAG
aagaaaagaaaaagacatac

SEQ ID NO: 68596 - DNA, 20 bp, Artificial Sequence
  Description of Artificial Sequence: Synthetic oligonucleotide
  Target: LAMA2; (-) strand; PAM type: NRG; PAM sequence: AAG
agaaaagaaaagaaaagaaa

SEQ ID NO: 68597 - DNA, 20 bp, Artificial Sequence
  Description of Artificial Sequence: Synthetic oligonucleotide
  Target: LAMA2; (-) strand; PAM type: NRG; PAM sequence: AAG
aaaaaaagaaaagaaaagaa

SEQ ID NO: 68598 - DNA, 20 bp, Artificial Sequence
  Description of Artificial Sequence: Synthetic oligonucleotide
  Target: LAMA2; (-) strand; PAM type: NRG; PAM sequence: AAG
aaaaaaaaaaaagaaaagaa

SEQ ID NO: 68599 - DNA, 20 bp, Artificial Sequence
  Description of Artificial Sequence: Synthetic oligonucleotide
  Target: LAMA2; (-) strand; PAM type: NRG; PAM sequence: AAG
tctaaaaaaaaaaaaaagaa

SEQ ID NO: 68600 - DNA, 20 bp, Artificial Sequence
  Description of Artificial Sequence: Synthetic oligonucleotide
  Target: LAMA2; (-) strand; PAM type: NRG; PAM sequence: AAG
acacttctaaaaaaaaaaaa

SEQ ID NO: 68601 - DNA, 20 bp, Artificial Sequence
  Description of Artificial Sequence: Synthetic oligonucleotide
  Target: LAMA2; (-) strand; PAM type: NRG; PAM sequence: CAG
aagtgggcaaaggaaattaa

SEQ ID NO: 68602 - DNA, 20 bp, Artificial Sequence
  Description of Artificial Sequence: Synthetic oligonucleotide
  Target: LAMA2; (-) strand; PAM type: NRG; PAM sequence: AGG
gctccattaaaagtgggcaa

SEQ ID NO: 68603 - DNA, 20 bp, Artificial Sequence
  Description of Artificial Sequence: Synthetic oligonucleotide
  Target: LAMA2; (-) strand; PAM type: NRG; PAM sequence: AAG
agctccattaaaagtgggca

SEQ ID NO: 68604 - DNA, 20 bp, Artificial Sequence
  Description of Artificial Sequence: Synthetic oligonucleotide
  Target: LAMA2; (-) strand; PAM type: NRG; PAM sequence: GGG
caaatagctccattaaaagt

SEQ ID NO: 68605 - DNA, 20 bp, Artificial Sequence
  Description of Artificial Sequence: Synthetic oligonucleotide
  Target: LAMA2; (-) strand; PAM type: NRG; PAM sequence: TGG
acaaatagctccattaaaag

SEQ ID NO: 68606 - DNA, 20 bp, Artificial Sequence
  Description of Artificial Sequence: Synthetic oligonucleotide
  Target: LAMA2; (-) strand; PAM type: NRG; PAM sequence: AAG
aaaacaaatagctccattaa

SEQ ID NO: 68607 - DNA, 20 bp, Artificial Sequence
  Description of Artificial Sequence: Synthetic oligonucleotide
  Target: LAMA2; (-) strand; PAM type: NRG; PAM sequence: TAG
atcaacaagaaaaaaacaaa

SEQ ID NO: 68608 - DNA, 20 bp, Artificial Sequence
  Description of Artificial Sequence: Synthetic oligonucleotide
  Target: LAMA2; (-) strand; PAM type: NRG; PAM sequence: AAG
tataagaaacttaaatcaac

SEQ ID NO: 68609 - DNA, 20 bp, Artificial Sequence
  Description of Artificial Sequence: Synthetic oligonucleotide
  Target: LAMA2; (-) strand; PAM type: NRG; PAM sequence: AAG
gactaatatccagaaactat

SEQ ID NO: 68610 - DNA, 20 bp, Artificial Sequence
  Description of Artificial Sequence: Synthetic oligonucleotide
  Target: LAMA2; (-) strand; PAM type: NRG; PAM sequence: CAG
tctgacaaatgactaatatc

SEQ ID NO: 68611 - DNA, 20 bp, Artificial Sequence
  Description of Artificial Sequence: Synthetic oligonucleotide
  Target: LAMA2; (-) strand; PAM type: NRG; PAM sequence: CAG
aacagacaactgcagaatga

SEQ ID NO: 68612 - DNA, 20 bp, Artificial Sequence
  Description of Artificial Sequence: Synthetic oligonucleotide
  Target: LAMA2; (-) strand; PAM type: NRG; PAM sequence: CAG
acaaaataaacagacaactg

SEQ ID NO: 68613 - DNA, 20 bp, Artificial Sequence
  Description of Artificial Sequence: Synthetic oligonucleotide
  Target: LAMA2; (-) strand; PAM type: NRG; PAM sequence: CAG
taaacaattaacaaaataaa

SEQ ID NO: 68614 - DNA, 20 bp, Artificial Sequence
  Description of Artificial Sequence: Synthetic oligonucleotide
  Target: LAMA2; (-) strand; PAM type: NRG; PAM sequence: CAG
taaactaaacggcgtttgca

SEQ ID NO: 68615 - DNA, 20 bp, Artificial Sequence
  Description of Artificial Sequence: Synthetic oligonucleotide
  Target: LAMA2; (-) strand; PAM type: NRG; PAM sequence: CGG
tgggacttaattaaactaaa

SEQ ID NO: 68616 - DNA, 20 bp, Artificial Sequence
  Description of Artificial Sequence: Synthetic oligonucleotide
  Target: LAMA2; (-) strand; PAM type: NRG; PAM sequence: GGG
aaaaaaaaaaatgaacaaat

SEQ ID NO: 68617 - DNA, 20 bp, Artificial Sequence
  Description of Artificial Sequence: Synthetic oligonucleotide
  Target: LAMA2; (-) strand; PAM type: NRG; PAM sequence: TGG
aaaaaaaaaaaatgaacaaa

SEQ ID NO: 68618 - DNA, 20 bp, Artificial Sequence
  Description of Artificial Sequence: Synthetic oligonucleotide
  Target: LAMA2; (-) strand; PAM type: NRG; PAM sequence: AAG
atgactaagactaattgcaa

SEQ ID NO: 68619 - DNA, 20 bp, Artificial Sequence
  Description of Artificial Sequence: Synthetic oligonucleotide
  Target: LAMA2; (-) strand; PAM type: NRG; PAM sequence: AAG
taggtaaagaattaatgact

SEQ ID NO: 68620 - DNA, 20 bp, Artificial Sequence
  Description of Artificial Sequence: Synthetic oligonucleotide
  Target: LAMA2; (-) strand; PAM type: NRG; PAM sequence: AAG
tctcgacattggcctaggta

SEQ ID NO: 68621 - DNA, 20 bp, Artificial Sequence
  Description of Artificial Sequence: Synthetic oligonucleotide
  Target: LAMA2; (-) strand; PAM type: NRG; PAM sequence: AGG
attattctcgacattggcct

SEQ ID NO: 68622 - DNA, 20 bp, Artificial Sequence
  Description of Artificial Sequence: Synthetic oligonucleotide
  Target: LAMA2; (-) strand; PAM type: NRG; PAM sequence: TAG
aattattctcgacattggcc

SEQ ID NO: 68623 - DNA, 20 bp, Artificial Sequence
  Description of Artificial Sequence: Synthetic oligonucleotide
  Target: LAMA2; (-) strand; PAM type: NRG; PAM sequence: TGG
ggaaaaattattctcgacat

SEQ ID NO: 68624 - DNA, 20 bp, Artificial Sequence
  Description of Artificial Sequence: Synthetic oligonucleotide
  Target: LAMA2; (-) strand; PAM type: NRG; PAM sequence: AGG
aaaccataaaaagaaaacct

SEQ ID NO: 68625 - DNA, 20 bp, Artificial Sequence
  Description of Artificial Sequence: Synthetic oligonucleotide
  Target: LAMA2; (-) strand; PAM type: NRG; PAM sequence: TAG
gaaaccataaaaagaaaacc

SEQ ID NO: 68626 - DNA, 20 bp, Artificial Sequence
  Description of Artificial Sequence: Synthetic oligonucleotide
  Target: LAMA2; (-) strand; PAM type: NRG; PAM sequence: AAG
gcaagacctgaaaccataaa

SEQ ID NO: 68627 - DNA, 20 bp, Artificial Sequence
  Description of Artificial Sequence: Synthetic oligonucleotide
  Target: LAMA2; (-) strand; PAM type: NRG; PAM sequence: AAG
tcaattaaagacttaaatgc

SEQ ID NO: 68628 - DNA, 20 bp, Artificial Sequence
  Description of Artificial Sequence: Synthetic oligonucleotide
  Target: LAMA2; (-) strand; PAM type: NRG; PAM sequence: AAG
aattaactcaagatcaatta

SEQ ID NO: 68629 - DNA, 20 bp, Artificial Sequence
  Description of Artificial Sequence: Synthetic oligonucleotide
  Target: LAMA2; (-) strand; PAM type: NRG; PAM sequence: AAG
ccatatacaaaaattaactc

SEQ ID NO: 68630 - DNA, 20 bp, Artificial Sequence
  Description of Artificial Sequence: Synthetic oligonucleotide
  Target: LAMA2; (-) strand; PAM type: NRG; PAM sequence: TGG
ggctagcggaagaatgaaac

SEQ ID NO: 68631 - DNA, 20 bp, Artificial Sequence
  Description of Artificial Sequence: Synthetic oligonucleotide
  Target: LAMA2; (-) strand; PAM type: NRG; PAM sequence: AAG
atttaataactggctagcgg

SEQ ID NO: 68632 - DNA, 20 bp, Artificial Sequence
  Description of Artificial Sequence: Synthetic oligonucleotide
  Target: LAMA2; (-) strand; PAM type: NRG; PAM sequence: CGG
cctatttaataactggctag

SEQ ID NO: 68633 - DNA, 20 bp, Artificial Sequence
  Description of Artificial Sequence: Synthetic oligonucleotide
  Target: LAMA2; (-) strand; PAM type: NRG; PAM sequence: TAG
caccctatttaataactggc

SEQ ID NO: 68634 - DNA, 20 bp, Artificial Sequence
  Description of Artificial Sequence: Synthetic oligonucleotide
  Target: LAMA2; (-) strand; PAM type: NRG; PAM sequence: TGG
aggacaccctatttaataac

SEQ ID NO: 68635 - DNA, 20 bp, Artificial Sequence
  Description of Artificial Sequence: Synthetic oligonucleotide
  Target: LAMA2; (-) strand; PAM type: NRG; PAM sequence: AGG
taaaaataagcaatggggaa

SEQ ID NO: 68636 - DNA, 20 bp, Artificial Sequence
  Description of Artificial Sequence: Synthetic oligonucleotide
  Target: LAMA2; (-) strand; PAM type: NRG; PAM sequence: AAG
ataaaaataagcaatgggga

SEQ ID NO: 68637 - DNA, 20 bp, Artificial Sequence
  Description of Artificial Sequence: Synthetic oligonucleotide
  Target: LAMA2; (-) strand; PAM type: NRG; PAM sequence: GGG
gtcaataaaaataagcaatg

SEQ ID NO: 68638 - DNA, 20 bp, Artificial Sequence
  Description of Artificial Sequence: Synthetic oligonucleotide
  Target: LAMA2; (-) strand; PAM type: NRG; PAM sequence: GGG
agtcaataaaaataagcaat

SEQ ID NO: 68639 - DNA, 20 bp, Artificial Sequence
  Description of Artificial Sequence: Synthetic oligonucleotide
  Target: LAMA2; (-) strand; PAM type: NRG; PAM sequence: TGG
aagtcaataaaaataagcaa

SEQ ID NO: 68640 - DNA, 20 bp, Artificial Sequence
  Description of Artificial Sequence: Synthetic oligonucleotide
  Target: LAMA2; (-) strand; PAM type: NRG; PAM sequence: AAG
tcgacaaagtcaataaaaat

SEQ ID NO: 68641 - DNA, 20 bp, Artificial Sequence
  Description of Artificial Sequence: Synthetic oligonucleotide
  Target: LAMA2; (-) strand; PAM type: NRG; PAM sequence: AAG
cctacaactaatcttcgaca

SEQ ID NO: 68642 - DNA, 20 bp, Artificial Sequence
  Description of Artificial Sequence: Synthetic oligonucleotide
  Target: LAMA2; (-) strand; PAM type: NRG; PAM sequence: GAG
taaggcaatgagacaaaata

SEQ ID NO: 68643 - DNA, 20 bp, Artificial Sequence
  Description of Artificial Sequence: Synthetic oligonucleotide
  Target: LAMA2; (-) strand; PAM type: NRG; PAM sequence: TAG
cataaggcaatgagacaaaa

SEQ ID NO: 68644 - DNA, 20 bp, Artificial Sequence
  Description of Artificial Sequence: Synthetic oligonucleotide
  Target: LAMA2; (-) strand; PAM type: NRG; PAM sequence: GAG
aaaatggcacataaggcaat

SEQ ID NO: 68645 - DNA, 20 bp, Artificial Sequence
  Description of Artificial Sequence: Synthetic oligonucleotide
  Target: LAMA2; (-) strand; PAM type: NRG; PAM sequence: AGG
tggtataaaaatggcacata

SEQ ID NO: 68646 - DNA, 20 bp, Artificial Sequence
  Description of Artificial Sequence: Synthetic oligonucleotide
  Target: LAMA2; (-) strand; PAM type: NRG; PAM sequence: AAG
atggtataaaaatggcacat

SEQ ID NO: 68647 - DNA, 20 bp, Artificial Sequence
  Description of Artificial Sequence: Synthetic oligonucleotide
  Target: LAMA2; (-) strand; PAM type: NRG; PAM sequence: TGG
gcatggtaatggtataaaaa

SEQ ID NO: 68648 - DNA, 20 bp, Artificial Sequence
  Description of Artificial Sequence: Synthetic oligonucleotide
  Target: LAMA2; (-) strand; PAM type: NRG; PAM sequence: TGG
taactaaaacagcatggtaa

SEQ ID NO: 68649 - DNA, 20 bp, Artificial Sequence
  Description of Artificial Sequence: Synthetic oligonucleotide
  Target: LAMA2; (-) strand; PAM type: NRG; PAM sequence: TGG
ctatagtaactaaaacagca

SEQ ID NO: 68650 - DNA, 20 bp, Artificial Sequence
  Description of Artificial Sequence: Synthetic oligonucleotide
  Target: LAMA2; (-) strand; PAM type: NRG; PAM sequence: CAG
tgaggctatagtaactaaaa

SEQ ID NO: 68651 - DNA, 20 bp, Artificial Sequence
  Description of Artificial Sequence: Synthetic oligonucleotide
  Target: LAMA2; (-) strand; PAM type: NRG; PAM sequence: TAG
gctctgagactatgaggcta

SEQ ID NO: 68652 - DNA, 20 bp, Artificial Sequence
  Description of Artificial Sequence: Synthetic oligonucleotide
  Target: LAMA2; (-) strand; PAM type: NRG; PAM sequence: AGG
cactatgctctgagactatg

SEQ ID NO: 68653 - DNA, 20 bp, Artificial Sequence
  Description of Artificial Sequence: Synthetic oligonucleotide
  Target: LAMA2; (-) strand; PAM type: NRG; PAM sequence: GAG
acactatgctctgagactat

SEQ ID NO: 68654 - DNA, 20 bp, Artificial Sequence
  Description of Artificial Sequence: Synthetic oligonucleotide
  Target: LAMA2; (-) strand; PAM type: NRG; PAM sequence: GAG
ctgacttcacactatgctct

SEQ ID NO: 68655 - DNA, 20 bp, Artificial Sequence
  Description of Artificial Sequence: Synthetic oligonucleotide
  Target: LAMA2; (-) strand; PAM type: NRG; PAM sequence: GGG
agcaaaaagatcaacgctgg

SEQ ID NO: 68656 - DNA, 20 bp, Artificial Sequence
  Description of Artificial Sequence: Synthetic oligonucleotide
  Target: LAMA2; (-) strand; PAM type: NRG; PAM sequence: GGG
aagcaaaaagatcaacgctg

SEQ ID NO: 68657 - DNA, 20 bp, Artificial Sequence
  Description of Artificial Sequence: Synthetic oligonucleotide
  Target: LAMA2; (-) strand; PAM type: NRG; PAM sequence: GGG
taagcaaaaagatcaacgct

SEQ ID NO: 68658 - DNA, 20 bp, Artificial Sequence
  Description of Artificial Sequence: Synthetic oligonucleotide
  Target: LAMA2; (-) strand; PAM type: NRG; PAM sequence: TGG
ctaagcaaaaagatcaacgc

SEQ ID NO: 68659 - DNA, 20 bp, Artificial Sequence
  Description of Artificial Sequence: Synthetic oligonucleotide
  Target: LAMA2; (-) strand; PAM type: NRG; PAM sequence: AAG
ccaaagcaattctaagcaaa

SEQ ID NO: 68660 - DNA, 20 bp, Artificial Sequence
  Description of Artificial Sequence: Synthetic oligonucleotide
  Target: LAMA2; (-) strand; PAM type: NRG; PAM sequence: AAG
caaataaccaaagcaattct

SEQ ID NO: 68661 - DNA, 20 bp, Artificial Sequence
  Description of Artificial Sequence: Synthetic oligonucleotide
  Target: LAMA2; (-) strand; PAM type: NRG; PAM sequence: AAG
aaaaggagcccaaataacca

SEQ ID NO: 68662 - DNA, 20 bp, Artificial Sequence
  Description of Artificial Sequence: Synthetic oligonucleotide
  Target: LAMA2; (-) strand; PAM type: NRG; PAM sequence: GAG
attaatatggaaacaaaaag

SEQ ID NO: 68663 - DNA, 20 bp, Artificial Sequence
  Description of Artificial Sequence: Synthetic oligonucleotide
  Target: LAMA2; (-) strand; PAM type: NRG; PAM sequence: AGG
aaattaatatggaaacaaaa

SEQ ID NO: 68664 - DNA, 20 bp, Artificial Sequence
  Description of Artificial Sequence: Synthetic oligonucleotide
  Target: LAMA2; (-) strand; PAM type: NRG; PAM sequence: AAG
aaaattaatatggaaacaaa

SEQ ID NO: 68665 - DNA, 20 bp, Artificial Sequence
  Description of Artificial Sequence: Synthetic oligonucleotide
  Target: LAMA2; (-) strand; PAM type: NRG; PAM sequence: TGG
aaacaattctaaaattaata

SEQ ID NO: 68666 - DNA, 20 bp, Artificial Sequence
  Description of Artificial Sequence: Synthetic oligonucleotide
  Target: LAMA2; (-) strand; PAM type: NRG; PAM sequence: TAG
aatgtcatttttcacagaat

SEQ ID NO: 68667 - DNA, 20 bp, Artificial Sequence
  Description of Artificial Sequence: Synthetic oligonucleotide
  Target: LAMA2; (-) strand; PAM type: NRG; PAM sequence: CAG
attaccaatgtcatttttca

SEQ ID NO: 68668 - DNA, 20 bp, Artificial Sequence
  Description of Artificial Sequence: Synthetic oligonucleotide
  Target: LAMA2; (-) strand; PAM type: NRG; PAM sequence: CAG
cccaaaacaatctacagatt

SEQ ID NO: 68669 - DNA, 20 bp, Artificial Sequence
  Description of Artificial Sequence: Synthetic oligonucleotide
  Target: LAMA2; (-) strand; PAM type: NRG; PAM sequence: CAG
atgctacccaaaacaatcta

SEQ ID NO: 68670 - DNA, 20 bp, Artificial Sequence
  Description of Artificial Sequence: Synthetic oligonucleotide
  Target: LAMA2; (-) strand; PAM type: NRG; PAM sequence: AAG
attccatgctcatggataga

SEQ ID NO: 68671 - DNA, 20 bp, Artificial Sequence
  Description of Artificial Sequence: Synthetic oligonucleotide
  Target: LAMA2; (-) strand; PAM type: NRG; PAM sequence: TAG
aaacattccatgctcatgga

SEQ ID NO: 68672 - DNA, 20 bp, Artificial Sequence
  Description of Artificial Sequence: Synthetic oligonucleotide
  Target: LAMA2; (-) strand; PAM type: NRG; PAM sequence: TGG
ggaaaaacattccatgctca

SEQ ID NO: 68673 - DNA, 20 bp, Artificial Sequence
  Description of Artificial Sequence: Synthetic oligonucleotide
  Target: LAMA2; (-) strand; PAM type: NRG; PAM sequence: TGG
tcataaatgacatggacaaa

SEQ ID NO: 68674 - DNA, 20 bp, Artificial Sequence
  Description of Artificial Sequence: Synthetic oligonucleotide
  Target: LAMA2; (-) strand; PAM type: NRG; PAM sequence: TGG
gaaagaaatcataaatgaca

SEQ ID NO: 68675 - DNA, 20 bp, Artificial Sequence
  Description of Artificial Sequence: Synthetic oligonucleotide
  Target: LAMA2; (-) strand; PAM type: NRG; PAM sequence: AAG
tttcttcaaaacactgagga

SEQ ID NO: 68676 - DNA, 20 bp, Artificial Sequence
  Description of Artificial Sequence: Synthetic oligonucleotide
  Target: LAMA2; (-) strand; PAM type: NRG; PAM sequence: AGG
atgatttcttcaaaacactg

SEQ ID NO: 68677 - DNA, 20 bp, Artificial Sequence
  Description of Artificial Sequence: Synthetic oligonucleotide
  Target: LAMA2; (-) strand; PAM type: NRG; PAM sequence: GAG
tatgatttcttcaaaacact

SEQ ID NO: 68678 - DNA, 20 bp, Artificial Sequence
  Description of Artificial Sequence: Synthetic oligonucleotide
  Target: LAMA2; (-) strand; PAM type: NRG; PAM sequence: AGG
ggaggtaaaagatctctacc

SEQ ID NO: 68679 - DNA, 20 bp, Artificial Sequence
  Description of Artificial Sequence: Synthetic oligonucleotide
  Target: LAMA2; (-) strand; PAM type: NRG; PAM sequence: CAG
aggaggtaaaagatctctac

SEQ ID NO: 68680 - DNA, 20 bp, Artificial Sequence
  Description of Artificial Sequence: Synthetic oligonucleotide
  Target: LAMA2; (-) strand; PAM type: NRG; PAM sequence: AAG
acatttaaccaaggaggtaa

SEQ ID NO: 68681 - DNA, 20 bp, Artificial Sequence
  Description of Artificial Sequence: Synthetic oligonucleotide
  Target: LAMA2; (-) strand; PAM type: NRG; PAM sequence: AGG
aggaatacatttaaccaagg

SEQ ID NO: 68682 - DNA, 20 bp, Artificial Sequence
  Description of Artificial Sequence: Synthetic oligonucleotide
  Target: LAMA2; (-) strand; PAM type: NRG; PAM sequence: GAG
taggaatacatttaaccaag

SEQ ID NO: 68683 - DNA, 20 bp, Artificial Sequence
  Description of Artificial Sequence: Synthetic oligonucleotide
  Target: LAMA2; (-) strand; PAM type: NRG; PAM sequence: AGG
cctaggaatacatttaacca

SEQ ID NO: 68684 - DNA, 20 bp, Artificial Sequence
  Description of Artificial Sequence: Synthetic oligonucleotide
  Target: LAMA2; (-) strand; PAM type: NRG; PAM sequence: AAG
acctaggaatacatttaacc

SEQ ID NO: 68685 - DNA, 20 bp, Artificial Sequence
  Description of Artificial Sequence: Synthetic oligonucleotide
  Target: LAMA2; (-) strand; PAM type: NRG; PAM sequence: AGG
ctattaaaagtgaaatacct

SEQ ID NO: 68686 - DNA, 20 bp, Artificial Sequence
  Description of Artificial Sequence: Synthetic oligonucleotide
  Target: LAMA2; (-) strand; PAM type: NRG; PAM sequence: TAG
actattaaaagtgaaatacc

SEQ ID NO: 68687 - DNA, 20 bp, Artificial Sequence
  Description of Artificial Sequence: Synthetic oligonucleotide
  Target: LAMA2; (-) strand; PAM type: NRG; PAM sequence: AAG
cataagaaaataactattaa

SEQ ID NO: 68688 - DNA, 20 bp, Artificial Sequence
  Description of Artificial Sequence: Synthetic oligonucleotide
  Target: LAMA2; (-) strand; PAM type: NRG; PAM sequence: AAG
attaaaatttagacatacat

SEQ ID NO: 68689 - DNA, 20 bp, Artificial Sequence
  Description of Artificial Sequence: Synthetic oligonucleotide
  Target: LAMA2; (-) strand; PAM type: NRG; PAM sequence: TAG
aatttgctgtgattaaaatt

SEQ ID NO: 68690 - DNA, 20 bp, Artificial Sequence
  Description of Artificial Sequence: Synthetic oligonucleotide
  Target: LAMA2; (-) strand; PAM type: NRG; PAM sequence: AGG
atcatccatctaattaagat

SEQ ID NO: 68691 - DNA, 20 bp, Artificial Sequence
  Description of Artificial Sequence: Synthetic oligonucleotide
  Target: LAMA2; (-) strand; PAM type: NRG; PAM sequence: TAG
catcatccatctaattaaga

SEQ ID NO: 68692 - DNA, 20 bp, Artificial Sequence
  Description of Artificial Sequence: Synthetic oligonucleotide
  Target: LAMA2; (-) strand; PAM type: NRG; PAM sequence: AAG
aggacatcatccatctaatt

SEQ ID NO: 68693 - DNA, 20 bp, Artificial Sequence
  Description of Artificial Sequence: Synthetic oligonucleotide
  Target: LAMA2; (-) strand; PAM type: NRG; PAM sequence: AGG
ttttattaaattcccaacaa

SEQ ID NO: 68694 - DNA, 20 bp, Artificial Sequence
  Description of Artificial Sequence: Synthetic oligonucleotide
  Target: LAMA2; (-) strand; PAM type: NRG; PAM sequence: AAG
attttattaaattcccaaca

SEQ ID NO: 68695 - DNA, 20 bp, Artificial Sequence
  Description of Artificial Sequence: Synthetic oligonucleotide
  Target: LAMA2; (-) strand; PAM type: NRG; PAM sequence: TAG
ttggtccagctaagcagtat

SEQ ID NO: 68696 - DNA, 20 bp, Artificial Sequence
  Description of Artificial Sequence: Synthetic oligonucleotide
  Target: LAMA2; (-) strand; PAM type: NRG; PAM sequence: CAG
atccacttggtccagctaag

SEQ ID NO: 68697 - DNA, 20 bp, Artificial Sequence
  Description of Artificial Sequence: Synthetic oligonucleotide
  Target: LAMA2; (-) strand; PAM type: NRG; PAM sequence: AAG
cttatccacttggtccagct

SEQ ID NO: 68698 - DNA, 20 bp, Artificial Sequence
  Description of Artificial Sequence: Synthetic oligonucleotide
  Target: LAMA2; (-) strand; PAM type: NRG; PAM sequence: CAG
gtcatcttatccacttggtc

SEQ ID NO: 68699 - DNA, 20 bp, Artificial Sequence
  Description of Artificial Sequence: Synthetic oligonucleotide
  Target: LAMA2; (-) strand; PAM type: NRG; PAM sequence: TGG
caaatgtcatcttatccact

SEQ ID NO: 68700 - DNA, 20 bp, Artificial Sequence
  Description of Artificial Sequence: Synthetic oligonucleotide
  Target: LAMA2; (-) strand; PAM type: NRG; PAM sequence: TGG
aagggctacaaggtccacta

SEQ ID NO: 68701 - DNA, 20 bp, Artificial Sequence
  Description of Artificial Sequence: Synthetic oligonucleotide
  Target: LAMA2; (-) strand; PAM type: NRG; PAM sequence: AGG
caaataaaagaagggctaca

SEQ ID NO: 68702 - DNA, 20 bp, Artificial Sequence
  Description of Artificial Sequence: Synthetic oligonucleotide
  Target: LAMA2; (-) strand; PAM type: NRG; PAM sequence: AAG
ccaaataaaagaagggctac

SEQ ID NO: 68703 - DNA, 20 bp, Artificial Sequence
  Description of Artificial Sequence: Synthetic oligonucleotide
  Target: LAMA2; (-) strand; PAM type: NRG; PAM sequence: GGG
tagatacccaaataaaagaa

SEQ ID NO: 68704 - DNA, 20 bp, Artificial Sequence
  Description of Artificial Sequence: Synthetic oligonucleotide
  Target: LAMA2; (-) strand; PAM type: NRG; PAM sequence: AGG
gtagatacccaaataaaaga

SEQ ID NO: 68705 - DNA, 20 bp, Artificial Sequence
  Description of Artificial Sequence: Synthetic oligonucleotide
  Target: LAMA2; (-) strand; PAM type: NRG; PAM sequence: AAG
agtagatacccaaataaaag

SEQ ID NO: 68706 - DNA, 20 bp, Artificial Sequence
  Description of Artificial Sequence: Synthetic oligonucleotide
  Target: LAMA2; (-) strand; PAM type: NRG; PAM sequence: AAG
tatagtagatacccaaataa

SEQ ID NO: 68707 - DNA, 20 bp, Artificial Sequence
  Description of Artificial Sequence: Synthetic oligonucleotide
  Target: LAMA2; (-) strand; PAM type: NRG; PAM sequence: TAG
ccaatgttttctctatatag

SEQ ID NO: 68708 - DNA, 20 bp, Artificial Sequence
  Description of Artificial Sequence: Synthetic oligonucleotide
  Target: LAMA2; (-) strand; PAM type: NRG; PAM sequence: TAG
ataccaatgttttctctata

SEQ ID NO: 68709 - DNA, 20 bp, Artificial Sequence
  Description of Artificial Sequence: Synthetic oligonucleotide
  Target: LAMA2; (-) strand; PAM type: NRG; PAM sequence: TAG
atggatcttaggcatgttta

SEQ ID NO: 68710 - DNA, 20 bp, Artificial Sequence
  Description of Artificial Sequence: Synthetic oligonucleotide
  Target: LAMA2; (-) strand; PAM type: NRG; PAM sequence: AGG
tacatactccaatggatctt

SEQ ID NO: 68711 - DNA, 20 bp, Artificial Sequence
  Description of Artificial Sequence: Synthetic oligonucleotide
  Target: LAMA2; (-) strand; PAM type: NRG; PAM sequence: TAG
atacatactccaatggatct

SEQ ID NO: 68712 - DNA, 20 bp, Artificial Sequence
  Description of Artificial Sequence: Synthetic oligonucleotide
  Target: LAMA2; (-) strand; PAM type: NRG; PAM sequence: TGG
gctaaccatacatactccaa

SEQ ID NO: 68713 - DNA, 20 bp, Artificial Sequence
  Description of Artificial Sequence: Synthetic oligonucleotide
  Target: LAMA2; (-) strand; PAM type: NRG; PAM sequence: GAG
aaccaaaaagaaaataaaca

SEQ ID NO: 68714 - DNA, 20 bp, Artificial Sequence
  Description of Artificial Sequence: Synthetic oligonucleotide
  Target: LAMA2; (-) strand; PAM type: NRG; PAM sequence: CAG
gtaaccaaaaagaaaataaa

SEQ ID NO: 68715 - DNA, 20 bp, Artificial Sequence
  Description of Artificial Sequence: Synthetic oligonucleotide
  Target: LAMA2; (-) strand; PAM type: NRG; PAM sequence: AAG
gtatttttattgtaaccaaa

SEQ ID NO: 68716 - DNA, 20 bp, Artificial Sequence
  Description of Artificial Sequence: Synthetic oligonucleotide
  Target: LAMA2; (-) strand; PAM type: NRG; PAM sequence: AAG
caggttacagtgaaaatgtt

SEQ ID NO: 68717 - DNA, 20 bp, Artificial Sequence
  Description of Artificial Sequence: Synthetic oligonucleotide
  Target: LAMA2; (-) strand; PAM type: NRG; PAM sequence: CAG
tcttccttccaaacaggtta

SEQ ID NO: 68718 - DNA, 20 bp, Artificial Sequence
  Description of Artificial Sequence: Synthetic oligonucleotide
  Target: LAMA2; (-) strand; PAM type: NRG; PAM sequence: AGG
ttactctcttccttccaaac

SEQ ID NO: 68719 - DNA, 20 bp, Artificial Sequence
  Description of Artificial Sequence: Synthetic oligonucleotide
  Target: LAMA2; (-) strand; PAM type: NRG; PAM sequence: CAG
cttactctcttccttccaaa

SEQ ID NO: 68720 - DNA, 20 bp, Artificial Sequence
  Description of Artificial Sequence: Synthetic oligonucleotide
  Target: LAMA2; (-) strand; PAM type: NRG; PAM sequence: TAG
ttttttttaatcagaaaaag

SEQ ID NO: 68721 - DNA, 20 bp, Artificial Sequence
  Description of Artificial Sequence: Synthetic oligonucleotide
  Target: LAMA2; (-) strand; PAM type: NRG; PAM sequence: AAG
tttttttttttaatcagaaa

SEQ ID NO: 68722 - DNA, 20 bp, Artificial Sequence
  Description of Artificial Sequence: Synthetic oligonucleotide
  Target: LAMA2; (-) strand; PAM type: NRG; PAM sequence: CAG
ttcttctttttttttttaat

SEQ ID NO: 68723 - DNA, 20 bp, Artificial Sequence
  Description of Artificial Sequence: Synthetic oligonucleotide
  Target: LAMA2; (-) strand; PAM type: NRG; PAM sequence: GGG
ggaggcttctgagctgctgt

SEQ ID NO: 68724 - DNA, 20 bp, Artificial Sequence
  Description of Artificial Sequence: Synthetic oligonucleotide
  Target: LAMA2; (-) strand; PAM type: NRG; PAM sequence: TGG
tggaggcttctgagctgctg

SEQ ID NO: 68725 - DNA, 20 bp, Artificial Sequence
  Description of Artificial Sequence: Synthetic oligonucleotide
  Target: LAMA2; (-) strand; PAM type: NRG; PAM sequence: GAG
gagtatttttggaggcttct

SEQ ID NO: 68726 - DNA, 20 bp, Artificial Sequence
  Description of Artificial Sequence: Synthetic oligonucleotide
  Target: LAMA2; (-) strand; PAM type: NRG; PAM sequence: AGG
aaataaaagagtatttttgg

SEQ ID NO: 68727 - DNA, 20 bp, Artificial Sequence
  Description of Artificial Sequence: Synthetic oligonucleotide
  Target: LAMA2; (-) strand; PAM type: NRG; PAM sequence: GAG
aaaataaaagagtatttttg

SEQ ID NO: 68728 - DNA, 20 bp, Artificial Sequence
  Description of Artificial Sequence: Synthetic oligonucleotide
  Target: LAMA2; (-) strand; PAM type: NRG; PAM sequence: TGG
ctaaaataaaagagtatttt

SEQ ID NO: 68729 - DNA, 20 bp, Artificial Sequence
  Description of Artificial Sequence: Synthetic oligonucleotide
  Target: LAMA2; (-) strand; PAM type: NRG; PAM sequence: GAG
tttcagcttctaaaataaaa

SEQ ID NO: 68730 - DNA, 20 bp, Artificial Sequence
  Description of Artificial Sequence: Synthetic oligonucleotide
  Target: LAMA2; (-) strand; PAM type: NRG; PAM sequence: AAG
cttttcagcttctaaaataa

SEQ ID NO: 68731 - DNA, 20 bp, Artificial Sequence
  Description of Artificial Sequence: Synthetic oligonucleotide
  Target: LAMA2; (-) strand; PAM type: NRG; PAM sequence: CAG
ttagttagatctgccctttt

SEQ ID NO: 68732 - DNA, 20 bp, Artificial Sequence
  Description of Artificial Sequence: Synthetic oligonucleotide
  Target: LAMA2; (-) strand; PAM type: NRG; PAM sequence: TAG
atttgtcttgtaccattagt

SEQ ID NO: 68733 - DNA, 20 bp, Artificial Sequence
  Description of Artificial Sequence: Synthetic oligonucleotide
  Target: LAMA2; (-) strand; PAM type: NRG; PAM sequence: TAG
ttcaatttgtcttgtaccat

SEQ ID NO: 68734 - DNA, 20 bp, Artificial Sequence
  Description of Artificial Sequence: Synthetic oligonucleotide
  Target: LAMA2; (-) strand; PAM type: NRG; PAM sequence: AGG
agtattctattcctgtttat

SEQ ID NO: 68735 - DNA, 20 bp, Artificial Sequence
  Description of Artificial Sequence: Synthetic oligonucleotide
  Target: LAMA2; (-) strand; PAM type: NRG; PAM sequence: TAG
aagtattctattcctgttta

SEQ ID NO: 68736 - DNA, 20 bp, Artificial Sequence
  Description of Artificial Sequence: Synthetic oligonucleotide
  Target: LAMA2; (-) strand; PAM type: NRG; PAM sequence: AAG
caaacaaaaccaaagagagt

SEQ ID NO: 68737 - DNA, 20 bp, Artificial Sequence
  Description of Artificial Sequence: Synthetic oligonucleotide
  Target: LAMA2; (-) strand; PAM type: NRG; PAM sequence: GAG
gaagcaaacaaaaccaaaga

SEQ ID NO: 68738 - DNA, 20 bp, Artificial Sequence
  Description of Artificial Sequence: Synthetic oligonucleotide
  Target: LAMA2; (-) strand; PAM type: NRG; PAM sequence: GAG
cagaagcaaacaaaaccaaa

SEQ ID NO: 68739 - DNA, 20 bp, Artificial Sequence
  Description of Artificial Sequence: Synthetic oligonucleotide
  Target: LAMA2; (-) strand; PAM type: NRG; PAM sequence: AAG
ttcagaagcaaacaaaacca

SEQ ID NO: 68740 - DNA, 20 bp, Artificial Sequence
  Description of Artificial Sequence: Synthetic oligonucleotide
  Target: LAMA2; (-) strand; PAM type: NRG; PAM sequence: AAG
ggttgaatccagttgttcag

SEQ ID NO: 68741 - DNA, 20 bp, Artificial Sequence
  Description of Artificial Sequence: Synthetic oligonucleotide
  Target: LAMA2; (-) strand; PAM type: NRG; PAM sequence: CAG
gaaggttgaatccagttgtt

SEQ ID NO: 68742 - DNA, 20 bp, Artificial Sequence
  Description of Artificial Sequence: Synthetic oligonucleotide
  Target: LAMA2; (-) strand; PAM type: NRG; PAM sequence: CAG
gaaagaaagaaggttgaatc

SEQ ID NO: 68743 - DNA, 20 bp, Artificial Sequence
  Description of Artificial Sequence: Synthetic oligonucleotide
  Target: LAMA2; (-) strand; PAM type: NRG; PAM sequence: AGG
gagctggggggaaagaaaga

SEQ ID NO: 68744 - DNA, 20 bp, Artificial Sequence
  Description of Artificial Sequence: Synthetic oligonucleotide
  Target: LAMA2; (-) strand; PAM type: NRG; PAM sequence: AAG
agagctggggggaaagaaag

SEQ ID NO: 68745 - DNA, 20 bp, Artificial Sequence
  Description of Artificial Sequence: Synthetic oligonucleotide
  Target: LAMA2; (-) strand; PAM type: NRG; PAM sequence: AAG
ctaagagctggggggaaaga

SEQ ID NO: 68746 - DNA, 20 bp, Artificial Sequence
  Description of Artificial Sequence: Synthetic oligonucleotide
  Target: LAMA2; (-) strand; PAM type: NRG; PAM sequence: AAG
atgcctaagagctgggggga

SEQ ID NO: 68747 - DNA, 20 bp, Artificial Sequence
  Description of Artificial Sequence: Synthetic oligonucleotide
  Target: LAMA2; (-) strand; PAM type: NRG; PAM sequence: GGG
aacaatgcctaagagctggg

SEQ ID NO: 68748 - DNA, 20 bp, Artificial Sequence
  Description of Artificial Sequence: Synthetic oligonucleotide
  Target: LAMA2; (-) strand; PAM type: NRG; PAM sequence: GGG
caacaatgcctaagagctgg

SEQ ID NO: 68749 - DNA, 20 bp, Artificial Sequence
  Description of Artificial Sequence: Synthetic oligonucleotide
  Target: LAMA2; (-) strand; PAM type: NRG; PAM sequence: GGG
acaacaatgcctaagagctg

SEQ ID NO: 68750 - DNA, 20 bp, Artificial Sequence
  Description of Artificial Sequence: Synthetic oligonucleotide
  Target: LAMA2; (-) strand; PAM type: NRG; PAM sequence: GGG
cacaacaatgcctaagagct

SEQ ID NO: 68751 - DNA, 20 bp, Artificial Sequence
  Description of Artificial Sequence: Synthetic oligonucleotide
  Target: LAMA2; (-) strand; PAM type: NRG; PAM sequence: TGG
acacaacaatgcctaagagc

SEQ ID NO: 68752 - DNA, 20 bp, Artificial Sequence
  Description of Artificial Sequence: Synthetic oligonucleotide
  Target: LAMA2; (-) strand; PAM type: NRG; PAM sequence: GAG
cctgacacaacaatgcctaa

SEQ ID NO: 68753 - DNA, 20 bp, Artificial Sequence
  Description of Artificial Sequence: Synthetic oligonucleotide
  Target: LAMA2; (-) strand; PAM type: NRG; PAM sequence: AAG
gtcctgacacaacaatgcct

SEQ ID NO: 68754 - DNA, 20 bp, Artificial Sequence
  Description of Artificial Sequence: Synthetic oligonucleotide
  Target: LAMA2; (-) strand; PAM type: NRG; PAM sequence: TAG
aatcagcccaatttgaacca

SEQ ID NO: 68755 - DNA, 20 bp, Artificial Sequence
  Description of Artificial Sequence: Synthetic oligonucleotide
  Target: LAMA2; (-) strand; PAM type: NRG; PAM sequence: CAG
gtttaatagaactggaaaat

SEQ ID NO: 68756 - DNA, 20 bp, Artificial Sequence
  Description of Artificial Sequence: Synthetic oligonucleotide
  Target: LAMA2; (-) strand; PAM type: NRG; PAM sequence: TGG
gatgaagggtttaatagaac

SEQ ID NO: 68757 - DNA, 20 bp, Artificial Sequence
  Description of Artificial Sequence: Synthetic oligonucleotide
  Target: LAMA2; (-) strand; PAM type: NRG; PAM sequence: TAG
gatgcagatgaagggtttaa

SEQ ID NO: 68758 - DNA, 20 bp, Artificial Sequence
  Description of Artificial Sequence: Synthetic oligonucleotide
  Target: LAMA2; (-) strand; PAM type: NRG; PAM sequence: GGG
tgatccacgatgcagatgaa

SEQ ID NO: 68759 - DNA, 20 bp, Artificial Sequence
  Description of Artificial Sequence: Synthetic oligonucleotide
  Target: LAMA2; (-) strand; PAM type: NRG; PAM sequence: AGG
ttgatccacgatgcagatga

SEQ ID NO: 68760 - DNA, 20 bp, Artificial Sequence
  Description of Artificial Sequence: Synthetic oligonucleotide
  Target: LAMA2; (-) strand; PAM type: NRG; PAM sequence: AAG
tttgatccacgatgcagatg

SEQ ID NO: 68761 - DNA, 20 bp, Artificial Sequence
  Description of Artificial Sequence: Synthetic oligonucleotide
  Target: LAMA2; (-) strand; PAM type: NRG; PAM sequence: CAG
aatgtatttgatccacgatg

SEQ ID NO: 68762 - DNA, 20 bp, Artificial Sequence
  Description of Artificial Sequence: Synthetic oligonucleotide
  Target: LAMA2; (-) strand; PAM type: NRG; PAM sequence: TAG
agctgtgcactgcagacagc

SEQ ID NO: 68763 - DNA, 20 bp, Artificial Sequence
  Description of Artificial Sequence: Synthetic oligonucleotide
  Target: LAMA2; (-) strand; PAM type: NRG; PAM sequence: CAG
ttccagctgtgcactgcaga

SEQ ID NO: 68764 - DNA, 20 bp, Artificial Sequence
  Description of Artificial Sequence: Synthetic oligonucleotide
  Target: LAMA2; (-) strand; PAM type: NRG; PAM sequence: CAG
tgatttccagctgtgcactg

SEQ ID NO: 68765 - DNA, 20 bp, Artificial Sequence
  Description of Artificial Sequence: Synthetic oligonucleotide
  Target: LAMA2; (-) strand; PAM type: NRG; PAM sequence: CAG
atgtggaagagaatgatttc

SEQ ID NO: 68766 - DNA, 20 bp, Artificial Sequence
  Description of Artificial Sequence: Synthetic oligonucleotide
  Target: LAMA2; (-) strand; PAM type: NRG; PAM sequence: GAG
gcacaaagcaaaatgtggaa

SEQ ID NO: 68767 - DNA, 20 bp, Artificial Sequence
  Description of Artificial Sequence: Synthetic oligonucleotide
  Target: LAMA2; (-) strand; PAM type: NRG; PAM sequence: AAG
tggcacaaagcaaaatgtgg

SEQ ID NO: 68768 - DNA, 20 bp, Artificial Sequence
  Description of Artificial Sequence: Synthetic oligonucleotide
  Target: LAMA2; (-) strand; PAM type: NRG; PAM sequence: TGG
aaatggcacaaagcaaaatg

SEQ ID NO: 68769 - DNA, 20 bp, Artificial Sequence
  Description of Artificial Sequence: Synthetic oligonucleotide
  Target: LAMA2; (-) strand; PAM type: NRG; PAM sequence: AAG
tataaaacaaaaatggcaca

SEQ ID NO: 68770 - DNA, 20 bp, Artificial Sequence
  Description of Artificial Sequence: Synthetic oligonucleotide
  Target: LAMA2; (-) strand; PAM type: NRG; PAM sequence: TGG
atattggtataaaacaaaaa

SEQ ID NO: 68771 - DNA, 20 bp, Artificial Sequence
  Description of Artificial Sequence: Synthetic oligonucleotide
  Target: LAMA2; (-) strand; PAM type: NRG; PAM sequence: TGG
gtgggtgtgtcagagcatat

SEQ ID NO: 68772 - DNA, 20 bp, Artificial Sequence
  Description of Artificial Sequence: Synthetic oligonucleotide
  Target: LAMA2; (-) strand; PAM type: NRG; PAM sequence: GAG
tgagctatgtgggtgtgtca

SEQ ID NO: 68773 - DNA, 20 bp, Artificial Sequence
  Description of Artificial Sequence: Synthetic oligonucleotide
  Target: LAMA2; (-) strand; PAM type: NRG; PAM sequence: CAG
cctgagctatgtgggtgtgt

SEQ ID NO: 68774 - DNA, 20 bp, Artificial Sequence
  Description of Artificial Sequence: Synthetic oligonucleotide
  Target: LAMA2; (-) strand; PAM type: NRG; PAM sequence: GGG
gctgaaatcctgagctatgt

SEQ ID NO: 68775 - DNA, 20 bp, Artificial Sequence
  Description of Artificial Sequence: Synthetic oligonucleotide
  Target: LAMA2; (-) strand; PAM type: NRG; PAM sequence: TGG
tgctgaaatcctgagctatg

SEQ ID NO: 68776 - DNA, 20 bp, Artificial Sequence
  Description of Artificial Sequence: Synthetic oligonucleotide
  Target: LAMA2; (-) strand; PAM type: NRG; PAM sequence: GAG
taattgactgctgaaatcct

SEQ ID NO: 68777 - DNA, 20 bp, Artificial Sequence
  Description of Artificial Sequence: Synthetic oligonucleotide
  Target: LAMA2; (-) strand; PAM type: NRG; PAM sequence: GAG
gacctatcaaggaagaaaag

SEQ ID NO: 68778 - DNA, 20 bp, Artificial Sequence
  Description of Artificial Sequence: Synthetic oligonucleotide
  Target: LAMA2; (-) strand; PAM type: NRG; PAM sequence: AGG
aagacctatcaaggaagaaa

SEQ ID NO: 68779 - DNA, 20 bp, Artificial Sequence
  Description of Artificial Sequence: Synthetic oligonucleotide
  Target: LAMA2; (-) strand; PAM type: NRG; PAM sequence: AAG
taagacctatcaaggaagaa

SEQ ID NO: 68780 - DNA, 20 bp, Artificial Sequence
  Description of Artificial Sequence: Synthetic oligonucleotide
  Target: LAMA2; (-) strand; PAM type: NRG; PAM sequence: AAG
tgttctaagacctatcaagg

SEQ ID NO: 68781 - DNA, 20 bp, Artificial Sequence
  Description of Artificial Sequence: Synthetic oligonucleotide
  Target: LAMA2; (-) strand; PAM type: NRG; PAM sequence: AGG
aaatgttctaagacctatca

SEQ ID NO: 68782 - DNA, 20 bp, Artificial Sequence
  Description of Artificial Sequence: Synthetic oligonucleotide
  Target: LAMA2; (-) strand; PAM type: NRG; PAM sequence: AAG
aaaatgttctaagacctatc

SEQ ID NO: 68783 - DNA, 20 bp, Artificial Sequence
  Description of Artificial Sequence: Synthetic oligonucleotide
  Target: LAMA2; (-) strand; PAM type: NRG; PAM sequence: AAG
acaccaatttaaaatgttct

SEQ ID NO: 68784 - DNA, 20 bp, Artificial Sequence
  Description of Artificial Sequence: Synthetic oligonucleotide
  Target: LAMA2; (-) strand; PAM type: NRG; PAM sequence: GAG
tcaatatttaaaagacaaaa

SEQ ID NO: 68785 - DNA, 20 bp, Artificial Sequence
  Description of Artificial Sequence: Synthetic oligonucleotide
  Target: LAMA2; (-) strand; PAM type: NRG; PAM sequence: AAG
attcaatatttaaaagacaa

SEQ ID NO: 68786 - DNA, 20 bp, Artificial Sequence
  Description of Artificial Sequence: Synthetic oligonucleotide
  Target: LAMA2; (-) strand; PAM type: NRG; PAM sequence: AAG
gcaagtgattcaatatttaa

SEQ ID NO: 68787 - DNA, 20 bp, Artificial Sequence
  Description of Artificial Sequence: Synthetic oligonucleotide
  Target: LAMA2; (-) strand; PAM type: NRG; PAM sequence: AAG
atgcaagcagagatgtttgc

SEQ ID NO: 68788 - DNA, 20 bp, Artificial Sequence
  Description of Artificial Sequence: Synthetic oligonucleotide
  Target: LAMA2; (-) strand; PAM type: NRG; PAM sequence: GAG
gaaaaatattcatgcaagca

SEQ ID NO: 68789 - DNA, 20 bp, Artificial Sequence
  Description of Artificial Sequence: Synthetic oligonucleotide
  Target: LAMA2; (-) strand; PAM type: NRG; PAM sequence: CAG
ttgaaaaatattcatgcaag

SEQ ID NO: 68790 - DNA, 20 bp, Artificial Sequence
  Description of Artificial Sequence: Synthetic oligonucleotide
  Target: LAMA2; (-) strand; PAM type: NRG; PAM sequence: AAG
attttgaaaaatattcatgc

SEQ ID NO: 68791 - DNA, 20 bp, Artificial Sequence
  Description of Artificial Sequence: Synthetic oligonucleotide
  Target: LAMA2; (-) strand; PAM type: NRG; PAM sequence: GAG
tttcagcttctaggtctatg

SEQ ID NO: 68792 - DNA, 20 bp, Artificial Sequence
  Description of Artificial Sequence: Synthetic oligonucleotide
  Target: LAMA2; (-) strand; PAM type: NRG; PAM sequence: TGG
catttcagcttctaggtcta

SEQ ID NO: 68793 - DNA, 20 bp, Artificial Sequence
  Description of Artificial Sequence: Synthetic oligonucleotide
  Target: LAMA2; (-) strand; PAM type: NRG; PAM sequence: AGG
aactttccatttcagcttct

SEQ ID NO: 68794 - DNA, 20 bp, Artificial Sequence
  Description of Artificial Sequence: Synthetic oligonucleotide
  Target: LAMA2; (-) strand; PAM type: NRG; PAM sequence: TAG
taactttccatttcagcttc

SEQ ID NO: 68795 - DNA, 20 bp, Artificial Sequence
  Description of Artificial Sequence: Synthetic oligonucleotide
  Target: LAMA2; (-) strand; PAM type: NRG; PAM sequence: CAG
atgattctaactttccattt

SEQ ID NO: 68796 - DNA, 20 bp, Artificial Sequence
  Description of Artificial Sequence: Synthetic oligonucleotide
  Target: LAMA2; (-) strand; PAM type: NRG; PAM sequence: AGG
aatcacctaccatctctcaa

SEQ ID NO: 68797 - DNA, 20 bp, Artificial Sequence
  Description of Artificial Sequence: Synthetic oligonucleotide
  Target: LAMA2; (-) strand; PAM type: NRG; PAM sequence: AAG
caatcacctaccatctctca

SEQ ID NO: 68798 - DNA, 20 bp, Artificial Sequence
  Description of Artificial Sequence: Synthetic oligonucleotide
  Target: LAMA2; (-) strand; PAM type: NRG; PAM sequence: TAG
ctctctcatcttacttttgg

SEQ ID NO: 68799 - DNA, 20 bp, Artificial Sequence
  Description of Artificial Sequence: Synthetic oligonucleotide
  Target: LAMA2; (-) strand; PAM type: NRG; PAM sequence: TGG
tctctctctcatcttacttt

SEQ ID NO: 68800 - DNA, 20 bp, Artificial Sequence
  Description of Artificial Sequence: Synthetic oligonucleotide
  Target: LAMA2; (-) strand; PAM type: NRG; PAM sequence: TGG
atactgtttacaataataca

SEQ ID NO: 68801 - DNA, 20 bp, Artificial Sequence
  Description of Artificial Sequence: Synthetic oligonucleotide
  Target: LAMA2; (-) strand; PAM type: NRG; PAM sequence: AAG
ttcattttaaaataatctct

SEQ ID NO: 68802 - DNA, 20 bp, Artificial Sequence
  Description of Artificial Sequence: Synthetic oligonucleotide
  Target: LAMA2; (-) strand; PAM type: NRG; PAM sequence: CAG
ctttctatggaaaagccatt

SEQ ID NO: 68803 - DNA, 20 bp, Artificial Sequence
  Description of Artificial Sequence: Synthetic oligonucleotide
  Target: LAMA2; (-) strand; PAM type: NRG; PAM sequence: AAG
gctggagtctttctatggaa

SEQ ID NO: 68804 - DNA, 20 bp, Artificial Sequence
  Description of Artificial Sequence: Synthetic oligonucleotide
  Target: LAMA2; (-) strand; PAM type: NRG; PAM sequence: TGG
tgatagctggagtctttcta

SEQ ID NO: 68805 - DNA, 20 bp, Artificial Sequence
  Description of Artificial Sequence: Synthetic oligonucleotide
  Target: LAMA2; (-) strand; PAM type: NRG; PAM sequence: GAG
ttgataactgatgatagctg

SEQ ID NO: 68806 - DNA, 20 bp, Artificial Sequence
  Description of Artificial Sequence: Synthetic oligonucleotide
  Target: LAMA2; (-) strand; PAM type: NRG; PAM sequence: TGG
aattgataactgatgatagc

SEQ ID NO: 68807 - DNA, 20 bp, Artificial Sequence
  Description of Artificial Sequence: Synthetic oligonucleotide
  Target: LAMA2; (-) strand; PAM type: NRG; PAM sequence: TAG
atgtaattgataactgatga

SEQ ID NO: 68808 - DNA, 20 bp, Artificial Sequence
  Description of Artificial Sequence: Synthetic oligonucleotide
  Target: LAMA2; (-) strand; PAM type: NRG; PAM sequence: AAG
catttatagtcaagtttgta

SEQ ID NO: 68809 - DNA, 20 bp, Artificial Sequence
  Description of Artificial Sequence: Synthetic oligonucleotide
  Target: LAMA2; (-) strand; PAM type: NRG; PAM sequence: AAG
atgtctcaacatttatagtc

SEQ ID NO: 68810 - DNA, 20 bp, Artificial Sequence
  Description of Artificial Sequence: Synthetic oligonucleotide
  Target: LAMA2; (-) strand; PAM type: NRG; PAM sequence: TAG
gaaaaatgtctcaacattta

SEQ ID NO: 68811 - DNA, 20 bp, Artificial Sequence
  Description of Artificial Sequence: Synthetic oligonucleotide
  Target: LAMA2; (-) strand; PAM type: NRG; PAM sequence: TAG
ctaacatgcggagataccaa

SEQ ID NO: 68812 - DNA, 20 bp, Artificial Sequence
  Description of Artificial Sequence: Synthetic oligonucleotide
  Target: LAMA2; (-) strand; PAM type: NRG; PAM sequence: GAG
atatttttaactaacatgcg

SEQ ID NO: 68813 - DNA, 20 bp, Artificial Sequence
  Description of Artificial Sequence: Synthetic oligonucleotide
  Target: LAMA2; (-) strand; PAM type: NRG; PAM sequence: CGG
ttatatttttaactaacatg

SEQ ID NO: 68814 - DNA, 20 bp, Artificial Sequence
  Description of Artificial Sequence: Synthetic oligonucleotide
  Target: LAMA2; (-) strand; PAM type: NRG; PAM sequence: TGG
ctgtcttcattgtccgtact

SEQ ID NO: 68815 - DNA, 20 bp, Artificial Sequence
  Description of Artificial Sequence: Synthetic oligonucleotide
  Target: LAMA2; (-) strand; PAM type: NRG; PAM sequence: TAG
attaaatgaatattgtggag

SEQ ID NO: 68816 - DNA, 20 bp, Artificial Sequence
  Description of Artificial Sequence: Synthetic oligonucleotide
  Target: LAMA2; (-) strand; PAM type: NRG; PAM sequence: GAG
taaattaaatgaatattgtg

SEQ ID NO: 68817 - DNA, 20 bp, Artificial Sequence
  Description of Artificial Sequence: Synthetic oligonucleotide
  Target: LAMA2; (-) strand; PAM type: NRG; PAM sequence: TGG
attaaattaaatgaatattg

SEQ ID NO: 68818 - DNA, 20 bp, Artificial Sequence
  Description of Artificial Sequence: Synthetic oligonucleotide
  Target: LAMA2; (-) strand; PAM type: NRG; PAM sequence: GAG
tccagcctgggcgacagagc

SEQ ID NO: 68819 - DNA, 20 bp, Artificial Sequence
  Description of Artificial Sequence: Synthetic oligonucleotide
  Target: LAMA2; (-) strand; PAM type: NRG; PAM sequence: GAG
tccatccagcctgggcgaca

SEQ ID NO: 68820 - DNA, 20 bp, Artificial Sequence
  Description of Artificial Sequence: Synthetic oligonucleotide
  Target: LAMA2; (-) strand; PAM type: NRG; PAM sequence: CAG
actccatccagcctgggcga

SEQ ID NO: 68821 - DNA, 20 bp, Artificial Sequence
  Description of Artificial Sequence: Synthetic oligonucleotide
  Target: LAMA2; (-) strand; PAM type: NRG; PAM sequence: GGG
cactgcactccatccagcct

SEQ ID NO: 68822 - DNA, 20 bp, Artificial Sequence
  Description of Artificial Sequence: Synthetic oligonucleotide
  Target: LAMA2; (-) strand; PAM type: NRG; PAM sequence: TGG
ccactgcactccatccagcc

SEQ ID NO: 68823 - DNA, 20 bp, Artificial Sequence
  Description of Artificial Sequence: Synthetic oligonucleotide
  Target: LAMA2; (-) strand; PAM type: NRG; PAM sequence: CAG
tcgcgccactgcactccatc

SEQ ID NO: 68824 - DNA, 20 bp, Artificial Sequence
  Description of Artificial Sequence: Synthetic oligonucleotide
  Target: LAMA2; (-) strand; PAM type: NRG; PAM sequence: GAG
ggcggagcttgcagtgagca

SEQ ID NO: 68825 - DNA, 20 bp, Artificial Sequence
  Description of Artificial Sequence: Synthetic oligonucleotide
  Target: LAMA2; (-) strand; PAM type: NRG; PAM sequence: CAG
gaggcggagcttgcagtgag

SEQ ID NO: 68826 - DNA, 20 bp, Artificial Sequence
  Description of Artificial Sequence: Synthetic oligonucleotide
  Target: LAMA2; (-) strand; PAM type: NRG; PAM sequence: GAG
tgggaggcggagcttgcagt

SEQ ID NO: 68827 - DNA, 20 bp, Artificial Sequence
  Description of Artificial Sequence: Synthetic oligonucleotide
  Target: LAMA2; (-) strand; PAM type: NRG; PAM sequence: CAG
aacctgggaggcggagcttg

SEQ ID NO: 68828 - DNA, 20 bp, Artificial Sequence
  Description of Artificial Sequence: Synthetic oligonucleotide
  Target: LAMA2; (-) strand; PAM type: NRG; PAM sequence: GAG
tggcgtgaacctgggaggcg

SEQ ID NO: 68829 - DNA, 20 bp, Artificial Sequence
  Description of Artificial Sequence: Synthetic oligonucleotide
  Target: LAMA2; (-) strand; PAM type: NRG; PAM sequence: CGG
aatggcgtgaacctgggagg

SEQ ID NO: 68830 - DNA, 20 bp, Artificial Sequence
  Description of Artificial Sequence: Synthetic oligonucleotide
  Target: LAMA2; (-) strand; PAM type: NRG; PAM sequence: AGG
gagaatggcgtgaacctggg

SEQ ID NO: 68831 - DNA, 20 bp, Artificial Sequence
  Description of Artificial Sequence: Synthetic oligonucleotide
  Target: LAMA2; (-) strand; PAM type: NRG; PAM sequence: GAG
ggagaatggcgtgaacctgg

SEQ ID NO: 68832 - DNA, 20 bp, Artificial Sequence
  Description of Artificial Sequence: Synthetic oligonucleotide
  Target: LAMA2; (-) strand; PAM type: NRG; PAM sequence: GGG
cgggagaatggcgtgaacct

SEQ ID NO: 68833 - DNA, 20 bp, Artificial Sequence
  Description of Artificial Sequence: Synthetic oligonucleotide
  Target: LAMA2; (-) strand; PAM type: NRG; PAM sequence: TGG
gcgggagaatggcgtgaacc

SEQ ID NO: 68834 - DNA, 20 bp, Artificial Sequence
  Description of Artificial Sequence: Synthetic oligonucleotide
  Target: LAMA2; (-) strand; PAM type: NRG; PAM sequence: TGG
gggaggctgaggcgggagaa

SEQ ID NO: 68835 - DNA, 20 bp, Artificial Sequence
  Description of Artificial Sequence: Synthetic oligonucleotide
  Target: LAMA2; (-) strand; PAM type: NRG; PAM sequence: GAG
tactcgggaggctgaggcgg

SEQ ID NO: 68836 - DNA, 20 bp, Artificial Sequence
  Description of Artificial Sequence: Synthetic oligonucleotide
  Target: LAMA2; (-) strand; PAM type: NRG; PAM sequence: GGG
gctactcgggaggctgaggc

SEQ ID NO: 68837 - DNA, 20 bp, Artificial Sequence
  Description of Artificial Sequence: Synthetic oligonucleotide
  Target: LAMA2; (-) strand; PAM type: NRG; PAM sequence: CGG
agctactcgggaggctgagg

SEQ ID NO: 68838 - DNA, 20 bp, Artificial Sequence
  Description of Artificial Sequence: Synthetic oligonucleotide
  Target: LAMA2; (-) strand; PAM type: NRG; PAM sequence: AGG
tgcagctactcgggaggctg

SEQ ID NO: 68839 - DNA, 20 bp, Artificial Sequence
  Description of Artificial Sequence: Synthetic oligonucleotide
  Target: LAMA2; (-) strand; PAM type: NRG; PAM sequence: GAG
ttgcagctactcgggaggct

SEQ ID NO: 68840 - DNA, 20 bp, Artificial Sequence
  Description of Artificial Sequence: Synthetic oligonucleotide
  Target: LAMA2; (-) strand; PAM type: NRG; PAM sequence: AGG
tgtagttgcagctactcggg

SEQ ID NO: 68841 - DNA, 20 bp, Artificial Sequence
  Description of Artificial Sequence: Synthetic oligonucleotide
  Target: LAMA2; (-) strand; PAM type: NRG; PAM sequence: GAG
ctgtagttgcagctactcgg

SEQ ID NO: 68842 - DNA, 20 bp, Artificial Sequence
  Description of Artificial Sequence: Synthetic oligonucleotide
  Target: LAMA2; (-) strand; PAM type: NRG; PAM sequence: GGG
acctgtagttgcagctactc

SEQ ID NO: 68843 - DNA, 20 bp, Artificial Sequence
  Description of Artificial Sequence: Synthetic oligonucleotide
  Target: LAMA2; (-) strand; PAM type: NRG; PAM sequence: CGG
cacctgtagttgcagctact

SEQ ID NO: 68844 - DNA, 20 bp, Artificial Sequence
  Description of Artificial Sequence: Synthetic oligonucleotide
  Target: LAMA2; (-) strand; PAM type: NRG; PAM sequence: CAG
gtggcaagcacctgtagttg

SEQ ID NO: 68845 - DNA, 20 bp, Artificial Sequence
  Description of Artificial Sequence: Synthetic oligonucleotide
  Target: LAMA2; (-) strand; PAM type: NRG; PAM sequence: TAG
ggtgtggtggcaagcacctg

SEQ ID NO: 68846 - DNA, 20 bp, Artificial Sequence
  Description of Artificial Sequence: Synthetic oligonucleotide
  Target: LAMA2; (-) strand; PAM type: NRG; PAM sequence: AAG
aattagccaggtgtggtggc

SEQ ID NO: 68847 - DNA, 20 bp, Artificial Sequence
  Description of Artificial Sequence: Synthetic oligonucleotide
  Target: LAMA2; (-) strand; PAM type: NRG; PAM sequence: TGG
aaaaaattagccaggtgtgg

SEQ ID NO: 68848 - DNA, 20 bp, Artificial Sequence
  Description of Artificial Sequence: Synthetic oligonucleotide
  Target: LAMA2; (-) strand; PAM type: NRG; PAM sequence: TGG
tacaaaaaattagccaggtg

SEQ ID NO: 68849 - DNA, 20 bp, Artificial Sequence
  Description of Artificial Sequence: Synthetic oligonucleotide
  Target: LAMA2; (-) strand; PAM type: NRG; PAM sequence: AGG
aaaaatacaaaaaattagcc

SEQ ID NO: 68850 - DNA, 20 bp, Artificial Sequence
  Description of Artificial Sequence: Synthetic oligonucleotide
  Target: LAMA2; (-) strand; PAM type: NRG; PAM sequence: CAG
taaaaatacaaaaaattagc

SEQ ID NO: 68851 - DNA, 20 bp, Artificial Sequence
  Description of Artificial Sequence: Synthetic oligonucleotide
  Target: LAMA2; (-) strand; PAM type: NRG; PAM sequence: TAG
ctactaaaaatacaaaaaat

SEQ ID NO: 68852 - DNA, 20 bp, Artificial Sequence
  Description of Artificial Sequence: Synthetic oligonucleotide
  Target: LAMA2; (-) strand; PAM type: NRG; PAM sequence: CGG
caagaccatcctggctaaca

SEQ ID NO: 68853 - DNA, 20 bp, Artificial Sequence
  Description of Artificial Sequence: Synthetic oligonucleotide
  Target: LAMA2; (-) strand; PAM type: NRG; PAM sequence: TGG
tcaggagatcaagaccatcc

SEQ ID NO: 68854 - DNA, 20 bp, Artificial Sequence
  Description of Artificial Sequence: Synthetic oligonucleotide
  Target: LAMA2; (-) strand; PAM type: NRG; PAM sequence: AAG
gatcacgaggtcaggagatc

SEQ ID NO: 68855 - DNA, 20 bp, Artificial Sequence
  Description of Artificial Sequence: Synthetic oligonucleotide
  Target: LAMA2; (-) strand; PAM type: NRG; PAM sequence: GAG
tgggcagatcacgaggtcag

SEQ ID NO: 68856 - DNA, 20 bp, Artificial Sequence
  Description of Artificial Sequence: Synthetic oligonucleotide
  Target: LAMA2; (-) strand; PAM type: NRG; PAM sequence: AGG
ggtgggcagatcacgaggtc

SEQ ID NO: 68857 - DNA, 20 bp, Artificial Sequence
  Description of Artificial Sequence: Synthetic oligonucleotide
  Target: LAMA2; (-) strand; PAM type: NRG; PAM sequence: CAG
aggtgggcagatcacgaggt

SEQ ID NO: 68858 - DNA, 20 bp, Artificial Sequence
  Description of Artificial Sequence: Synthetic oligonucleotide
  Target: LAMA2; (-) strand; PAM type: NRG; PAM sequence: AGG
gccaaggtgggcagatcacg

SEQ ID NO: 68859 - DNA, 20 bp, Artificial Sequence
  Description of Artificial Sequence: Synthetic oligonucleotide
  Target: LAMA2; (-) strand; PAM type: NRG; PAM sequence: GAG
ggccaaggtgggcagatcac

SEQ ID NO: 68860 - DNA, 20 bp, Artificial Sequence
  Description of Artificial Sequence: Synthetic oligonucleotide
  Target: LAMA2; (-) strand; PAM type: NRG; PAM sequence: CAG
ctttgggaggccaaggtggg

SEQ ID NO: 68861 - DNA, 20 bp, Artificial Sequence
  Description of Artificial Sequence: Synthetic oligonucleotide
  Target: LAMA2; (-) strand; PAM type: NRG; PAM sequence: GGG
acactttgggaggccaaggt

SEQ ID NO: 68862 - DNA, 20 bp, Artificial Sequence
  Description of Artificial Sequence: Synthetic oligonucleotide
  Target: LAMA2; (-) strand; PAM type: NRG; PAM sequence: TGG
tacactttgggaggccaagg

SEQ ID NO: 68863 - DNA, 20 bp, Artificial Sequence
  Description of Artificial Sequence: Synthetic oligonucleotide
  Target: LAMA2; (-) strand; PAM type: NRG; PAM sequence: AGG
aactacactttgggaggcca

SEQ ID NO: 68864 - DNA, 20 bp, Artificial Sequence
  Description of Artificial Sequence: Synthetic oligonucleotide
  Target: LAMA2; (-) strand; PAM type: NRG; PAM sequence: AAG
aaactacactttgggaggcc

SEQ ID NO: 68865 - DNA, 20 bp, Artificial Sequence
  Description of Artificial Sequence: Synthetic oligonucleotide
  Target: LAMA2; (-) strand; PAM type: NRG; PAM sequence: AGG
atattaaactacactttggg

SEQ ID NO: 68866 - DNA, 20 bp, Artificial Sequence
  Description of Artificial Sequence: Synthetic oligonucleotide
  Target: LAMA2; (-) strand; PAM type: NRG; PAM sequence: GAG
aatattaaactacactttgg

SEQ ID NO: 68867 - DNA, 20 bp, Artificial Sequence
  Description of Artificial Sequence: Synthetic oligonucleotide
  Target: LAMA2; (-) strand; PAM type: NRG; PAM sequence: GGG
taaatattaaactacacttt

SEQ ID NO: 68868 - DNA, 20 bp, Artificial Sequence
  Description of Artificial Sequence: Synthetic oligonucleotide
  Target: LAMA2; (-) strand; PAM type: NRG; PAM sequence: TGG
ttaaatattaaactacactt

SEQ ID NO: 68869 - DNA, 20 bp, Artificial Sequence
  Description of Artificial Sequence: Synthetic oligonucleotide
  Target: LAMA2; (-) strand; PAM type: NRG; PAM sequence: CAG
aatatattttcttgttttat

SEQ ID NO: 68870 - DNA, 20 bp, Artificial Sequence
  Description of Artificial Sequence: Synthetic oligonucleotide
  Target: LAMA2; (-) strand; PAM type: NRG; PAM sequence: TAG
aaaatctttctaatgtagtc

SEQ ID NO: 68871 - DNA, 20 bp, Artificial Sequence
  Description of Artificial Sequence: Synthetic oligonucleotide
  Target: LAMA2; (-) strand; PAM type: NRG; PAM sequence: TAG
taaagaaaatctttctaatg

SEQ ID NO: 68872 - DNA, 20 bp, Artificial Sequence
  Description of Artificial Sequence: Synthetic oligonucleotide
  Target: LAMA2; (-) strand; PAM type: NRG; PAM sequence: AAG
ctatctagctcacatcttta

SEQ ID NO: 68873 - DNA, 20 bp, Artificial Sequence
  Description of Artificial Sequence: Synthetic oligonucleotide
  Target: LAMA2; (-) strand; PAM type: NRG; PAM sequence: TAG
attttaaaatgacctctatc

SEQ ID NO: 68874 - DNA, 20 bp, Artificial Sequence
  Description of Artificial Sequence: Synthetic oligonucleotide
  Target: LAMA2; (-) strand; PAM type: NRG; PAM sequence: TAG
tcacagtgaaaatttccatc

SEQ ID NO: 68875 - DNA, 20 bp, Artificial Sequence
  Description of Artificial Sequence: Synthetic oligonucleotide
  Target: LAMA2; (-) strand; PAM type: NRG; PAM sequence: CAG
acttcagaaattctgtttca

SEQ ID NO: 68876 - DNA, 20 bp, Artificial Sequence
  Description of Artificial Sequence: Synthetic oligonucleotide
  Target: LAMA2; (-) strand; PAM type: NRG; PAM sequence: CAG
aagtgaacaccgtgtcactt

SEQ ID NO: 68877 - DNA, 20 bp, Artificial Sequence
  Description of Artificial Sequence: Synthetic oligonucleotide
  Target: LAMA2; (-) strand; PAM type: NRG; PAM sequence: AAG
tgtacaatgaccatgatcag

SEQ ID NO: 68878 - DNA, 20 bp, Artificial Sequence
  Description of Artificial Sequence: Synthetic oligonucleotide
  Target: LAMA2; (-) strand; PAM type: NRG; PAM sequence: CAG
ggttgtacaatgaccatgat

SEQ ID NO: 68879 - DNA, 20 bp, Artificial Sequence
  Description of Artificial Sequence: Synthetic oligonucleotide
  Target: LAMA2; (-) strand; PAM type: NRG; PAM sequence: TGG
gcaattatacaaagactcaa

SEQ ID NO: 68880 - DNA, 20 bp, Artificial Sequence
  Description of Artificial Sequence: Synthetic oligonucleotide
  Target: LAMA2; (-) strand; PAM type: NRG; PAM sequence: AAG
ctactcacagcaattataca

SEQ ID NO: 68881 - DNA, 20 bp, Artificial Sequence
  Description of Artificial Sequence: Synthetic oligonucleotide
  Target: LAMA2; (-) strand; PAM type: NRG; PAM sequence: CAG
aatggtagtgacactactca

SEQ ID NO: 68882 - DNA, 20 bp, Artificial Sequence
  Description of Artificial Sequence: Synthetic oligonucleotide
  Target: LAMA2; (-) strand; PAM type: NRG; PAM sequence: TAG
aaaaagtgaagggaaaatgg

SEQ ID NO: 68883 - DNA, 20 bp, Artificial Sequence
  Description of Artificial Sequence: Synthetic oligonucleotide
  Target: LAMA2; (-) strand; PAM type: NRG; PAM sequence: TGG
gaaaaaaagtgaagggaaaa

SEQ ID NO: 68884 - DNA, 20 bp, Artificial Sequence
  Description of Artificial Sequence: Synthetic oligonucleotide
  Target: LAMA2; (-) strand; PAM type: NRG; PAM sequence: GGG
atctatagaaaaaaagtgaa

SEQ ID NO: 68885 - DNA, 20 bp, Artificial Sequence
  Description of Artificial Sequence: Synthetic oligonucleotide
  Target: LAMA2; (-) strand; PAM type: NRG; PAM sequence: AGG
tatctatagaaaaaaagtga

SEQ ID NO: 68886 - DNA, 20 bp, Artificial Sequence
  Description of Artificial Sequence: Synthetic oligonucleotide
  Target: LAMA2; (-) strand; PAM type: NRG; PAM sequence: AAG
atatctatagaaaaaaagtg

SEQ ID NO: 68887 - DNA, 20 bp, Artificial Sequence
  Description of Artificial Sequence: Synthetic oligonucleotide
  Target: LAMA2; (-) strand; PAM type: NRG; PAM sequence: AAG
tttaaatatctatagaaaaa

SEQ ID NO: 68888 - DNA, 20 bp, Artificial Sequence
  Description of Artificial Sequence: Synthetic oligonucleotide
  Target: LAMA2; (-) strand; PAM type: NRG; PAM sequence: TAG
ttgcttcatttaaatatcta

SEQ ID NO: 68889 - DNA, 20 bp, Artificial Sequence
  Description of Artificial Sequence: Synthetic oligonucleotide
  Target: LAMA2; (-) strand; PAM type: NRG; PAM sequence: CAG
aaaatgaataaatatgtata

SEQ ID NO: 68890 - DNA, 20 bp, Artificial Sequence
  Description of Artificial Sequence: Synthetic oligonucleotide
  Target: LAMA2; (-) strand; PAM type: NRG; PAM sequence: TAG
tgaagatagaaagattagga

SEQ ID NO: 68891 - DNA, 20 bp, Artificial Sequence
  Description of Artificial Sequence: Synthetic oligonucleotide
  Target: LAMA2; (-) strand; PAM type: NRG; PAM sequence: AGG
agagtgaagatagaaagatt

SEQ ID NO: 68892 - DNA, 20 bp, Artificial Sequence
  Description of Artificial Sequence: Synthetic oligonucleotide
  Target: LAMA2; (-) strand; PAM type: NRG; PAM sequence: TAG
cagagtgaagatagaaagat

SEQ ID NO: 68893 - DNA, 20 bp, Artificial Sequence
  Description of Artificial Sequence: Synthetic oligonucleotide
  Target: LAMA2; (-) strand; PAM type: NRG; PAM sequence: AAG
acacacagagtgaagataga

SEQ ID NO: 68894 - DNA, 20 bp, Artificial Sequence
  Description of Artificial Sequence: Synthetic oligonucleotide
  Target: LAMA2; (-) strand; PAM type: NRG; PAM sequence: TAG
actcacacacagagtgaaga

SEQ ID NO: 68895 - DNA, 20 bp, Artificial Sequence
  Description of Artificial Sequence: Synthetic oligonucleotide
  Target: LAMA2; (-) strand; PAM type: NRG; PAM sequence: AAG
acagactcacacacagagtg

SEQ ID NO: 68896 - DNA, 20 bp, Artificial Sequence
  Description of Artificial Sequence: Synthetic oligonucleotide
  Target: LAMA2; (-) strand; PAM type: NRG; PAM sequence: GAG
tacacacagactcacacaca

SEQ ID NO: 68897 - DNA, 20 bp, Artificial Sequence
  Description of Artificial Sequence: Synthetic oligonucleotide
  Target: LAMA2; (-) strand; PAM type: NRG; PAM sequence: CAG
tgtacacacagactcacaca

SEQ ID NO: 68898 - DNA, 20 bp, Artificial Sequence
  Description of Artificial Sequence: Synthetic oligonucleotide
  Target: LAMA2; (-) strand; PAM type: NRG; PAM sequence: CAG
tatcacatgttatgtacaca

SEQ ID NO: 68899 - DNA, 20 bp, Artificial Sequence
  Description of Artificial Sequence: Synthetic oligonucleotide
  Target: LAMA2; (-) strand; PAM type: NRG; PAM sequence: TGG
ctcatgatcaagaaggaaga

SEQ ID NO: 68900 - DNA, 20 bp, Artificial Sequence
  Description of Artificial Sequence: Synthetic oligonucleotide
  Target: LAMA2; (-) strand; PAM type: NRG; PAM sequence: AAG
gttgctcatgatcaagaagg

SEQ ID NO: 68901 - DNA, 20 bp, Artificial Sequence
  Description of Artificial Sequence: Synthetic oligonucleotide
  Target: LAMA2; (-) strand; PAM type: NRG; PAM sequence: AGG
cctgttgctcatgatcaaga

SEQ ID NO: 68902 - DNA, 20 bp, Artificial Sequence
  Description of Artificial Sequence: Synthetic oligonucleotide
  Target: LAMA2; (-) strand; PAM type: NRG; PAM sequence: AAG
tcctgttgctcatgatcaag

SEQ ID NO: 68903 - DNA, 20 bp, Artificial Sequence
  Description of Artificial Sequence: Synthetic oligonucleotide
  Target: LAMA2; (-) strand; PAM type: NRG; PAM sequence: AAG
ggttcctgttgctcatgatc

SEQ ID NO: 68904 - DNA, 20 bp, Artificial Sequence
  Description of Artificial Sequence: Synthetic oligonucleotide
  Target: LAMA2; (-) strand; PAM type: NRG; PAM sequence: TGG
cttaagtaaaatagtattgg

SEQ ID NO: 68905 - DNA, 20 bp, Artificial Sequence
  Description of Artificial Sequence: Synthetic oligonucleotide
  Target: LAMA2; (-) strand; PAM type: NRG; PAM sequence: TGG
cagcttaagtaaaatagtat

SEQ ID NO: 68906 - DNA, 20 bp, Artificial Sequence
  Description of Artificial Sequence: Synthetic oligonucleotide
  Target: LAMA2; (-) strand; PAM type: NRG; PAM sequence: TAG
gtatttcagcttaagtaaaa

SEQ ID NO: 68907 - DNA, 20 bp, Artificial Sequence
  Description of Artificial Sequence: Synthetic oligonucleotide
  Target: LAMA2; (-) strand; PAM type: NRG; PAM sequence: AAG
tttcaaatgtatttcagctt

SEQ ID NO: 68908 - DNA, 20 bp, Artificial Sequence
  Description of Artificial Sequence: Synthetic oligonucleotide
  Target: LAMA2; (-) strand; PAM type: NRG; PAM sequence: CAG
ggtatatttcaaatgtattt

SEQ ID NO: 68909 - DNA, 20 bp, Artificial Sequence
  Description of Artificial Sequence: Synthetic oligonucleotide
  Target: LAMA2; (-) strand; PAM type: NRG; PAM sequence: TGG
catcaactctgcaagttata

SEQ ID NO: 68910 - DNA, 20 bp, Artificial Sequence
  Description of Artificial Sequence: Synthetic oligonucleotide
  Target: LAMA2; (-) strand; PAM type: NRG; PAM sequence: AAG
aattttcccatcaactctgc

SEQ ID NO: 68911 - DNA, 20 bp, Artificial Sequence
  Description of Artificial Sequence: Synthetic oligonucleotide
  Target: LAMA2; (-) strand; PAM type: NRG; PAM sequence: TGG
tgtctgccatcttctcaccc

SEQ ID NO: 68912 - DNA, 20 bp, Artificial Sequence
  Description of Artificial Sequence: Synthetic oligonucleotide
  Target: LAMA2; (-) strand; PAM type: NRG; PAM sequence: GGG
tgtacaggtatcaaaaccta

SEQ ID NO: 68913 - DNA, 20 bp, Artificial Sequence
  Description of Artificial Sequence: Synthetic oligonucleotide
  Target: LAMA2; (-) strand; PAM type: NRG; PAM sequence: AGG
ctgtacaggtatcaaaacct

SEQ ID NO: 68914 - DNA, 20 bp, Artificial Sequence
  Description of Artificial Sequence: Synthetic oligonucleotide
  Target: LAMA2; (-) strand; PAM type: NRG; PAM sequence: TAG
tctgtacaggtatcaaaacc

SEQ ID NO: 68915 - DNA, 20 bp, Artificial Sequence
  Description of Artificial Sequence: Synthetic oligonucleotide
  Target: LAMA2; (-) strand; PAM type: NRG; PAM sequence: AGG
aagcaatgactattctgtac

SEQ ID NO: 68916 - DNA, 20 bp, Artificial Sequence
  Description of Artificial Sequence: Synthetic oligonucleotide
  Target: LAMA2; (-) strand; PAM type: NRG; PAM sequence: CAG
taagcaatgactattctgta

SEQ ID NO: 68917 - DNA, 20 bp, Artificial Sequence
  Description of Artificial Sequence: Synthetic oligonucleotide
  Target: LAMA2; (-) strand; PAM type: NRG; PAM sequence: AAG
gtagtgatggcggcagcagt

SEQ ID NO: 68918 - DNA, 20 bp, Artificial Sequence
  Description of Artificial Sequence: Synthetic oligonucleotide
  Target: LAMA2; (-) strand; PAM type: NRG; PAM sequence: CAG
gaaagtagtgatggcggcag

SEQ ID NO: 68919 - DNA, 20 bp, Artificial Sequence
  Description of Artificial Sequence: Synthetic oligonucleotide
  Target: LAMA2; (-) strand; PAM type: NRG; PAM sequence: CAG
agagaaagtagtgatggcgg

SEQ ID NO: 68920 - DNA, 20 bp, Artificial Sequence
  Description of Artificial Sequence: Synthetic oligonucleotide
  Target: LAMA2; (-) strand; PAM type: NRG; PAM sequence: CGG
gaaagagaaagtagtgatgg

SEQ ID NO: 68921 - DNA, 20 bp, Artificial Sequence
  Description of Artificial Sequence: Synthetic oligonucleotide
  Target: LAMA2; (-) strand; PAM type: NRG; PAM sequence: TGG
aatgaaagagaaagtagtga

SEQ ID NO: 68922 - DNA, 20 bp, Artificial Sequence
  Description of Artificial Sequence: Synthetic oligonucleotide
  Target: LAMA2; (-) strand; PAM type: NRG; PAM sequence: TAG
cagaggaatgaaagagaaag

SEQ ID NO: 68923 - DNA, 20 bp, Artificial Sequence
  Description of Artificial Sequence: Synthetic oligonucleotide
  Target: LAMA2; (-) strand; PAM type: NRG; PAM sequence: AAG
tatcagaggaatgaaagaga

SEQ ID NO: 68924 - DNA, 20 bp, Artificial Sequence
  Description of Artificial Sequence: Synthetic oligonucleotide
  Target: LAMA2; (-) strand; PAM type: NRG; PAM sequence: GAG
gtcatatcagaggaatgaaa

SEQ ID NO: 68925 - DNA, 20 bp, Artificial Sequence
  Description of Artificial Sequence: Synthetic oligonucleotide
  Target: LAMA2; (-) strand; PAM type: NRG; PAM sequence: AAG
tagtcatatcagaggaatga

SEQ ID NO: 68926 - DNA, 20 bp, Artificial Sequence
  Description of Artificial Sequence: Synthetic oligonucleotide
  Target: LAMA2; (-) strand; PAM type: NRG; PAM sequence: AGG
agtagagatagtcatatcag

SEQ ID NO: 68927 - DNA, 20 bp, Artificial Sequence
  Description of Artificial Sequence: Synthetic oligonucleotide
  Target: LAMA2; (-) strand; PAM type: NRG; PAM sequence: GAG
gagtagagatagtcatatca

SEQ ID NO: 68928 - DNA, 20 bp, Artificial Sequence
  Description of Artificial Sequence: Synthetic oligonucleotide
  Target: LAMA2; (-) strand; PAM type: NRG; PAM sequence: CAG
aggagtagagatagtcatat

SEQ ID NO: 68929 - DNA, 20 bp, Artificial Sequence
  Description of Artificial Sequence: Synthetic oligonucleotide
  Target: LAMA2; (-) strand; PAM type: NRG; PAM sequence: TAG
gataatgataggagtagaga

SEQ ID NO: 68930 - DNA, 20 bp, Artificial Sequence
  Description of Artificial Sequence: Synthetic oligonucleotide
  Target: LAMA2; (-) strand; PAM type: NRG; PAM sequence: GAG
atcagataatgataggagta

SEQ ID NO: 68931 - DNA, 20 bp, Artificial Sequence
  Description of Artificial Sequence: Synthetic oligonucleotide
  Target: LAMA2; (-) strand; PAM type: NRG; PAM sequence: TAG
aaatcagataatgataggag

SEQ ID NO: 68932 - DNA, 20 bp, Artificial Sequence
  Description of Artificial Sequence: Synthetic oligonucleotide
  Target: LAMA2; (-) strand; PAM type: NRG; PAM sequence: GAG
ggaaaatcagataatgatag

SEQ ID NO: 68933 - DNA, 20 bp, Artificial Sequence
  Description of Artificial Sequence: Synthetic oligonucleotide
  Target: LAMA2; (-) strand; PAM type: NRG; PAM sequence: AGG
aaggaaaatcagataatgat

SEQ ID NO: 68934 - DNA, 20 bp, Artificial Sequence
  Description of Artificial Sequence: Synthetic oligonucleotide
  Target: LAMA2; (-) strand; PAM type: NRG; PAM sequence: TAG
taaggaaaatcagataatga

SEQ ID NO: 68935 - DNA, 20 bp, Artificial Sequence
  Description of Artificial Sequence: Synthetic oligonucleotide
  Target: LAMA2; (-) strand; PAM type: NRG; PAM sequence: CAG
actagagagataaggaaaat

SEQ ID NO: 68936 - DNA, 20 bp, Artificial Sequence
  Description of Artificial Sequence: Synthetic oligonucleotide
  Target: LAMA2; (-) strand; PAM type: NRG; PAM sequence: AGG
aagcacagactagagagata

SEQ ID NO: 68937 - DNA, 20 bp, Artificial Sequence
  Description of Artificial Sequence: Synthetic oligonucleotide
  Target: LAMA2; (-) strand; PAM type: NRG; PAM sequence: AAG
gaagcacagactagagagat

SEQ ID NO: 68938 - DNA, 20 bp, Artificial Sequence
  Description of Artificial Sequence: Synthetic oligonucleotide
  Target: LAMA2; (-) strand; PAM type: NRG; PAM sequence: GAG
catgtgaagcacagactaga

SEQ ID NO: 68939 - DNA, 20 bp, Artificial Sequence
  Description of Artificial Sequence: Synthetic oligonucleotide
  Target: LAMA2; (-) strand; PAM type: NRG; PAM sequence: GAG
agcatgtgaagcacagacta

SEQ ID NO: 68940 - DNA, 20 bp, Artificial Sequence
  Description of Artificial Sequence: Synthetic oligonucleotide
  Target: LAMA2; (-) strand; PAM type: NRG; PAM sequence: TAG
taagcatgtgaagcacagac

SEQ ID NO: 68941 - DNA, 20 bp, Artificial Sequence
  Description of Artificial Sequence: Synthetic oligonucleotide
  Target: LAMA2; (-) strand; PAM type: NRG; PAM sequence: CAG
aatattaagcatgtgaagca

SEQ ID NO: 68942 - DNA, 20 bp, Artificial Sequence
  Description of Artificial Sequence: Synthetic oligonucleotide
  Target: LAMA2; (-) strand; PAM type: NRG; PAM sequence: AAG
atttgaatattaagcatgtg

SEQ ID NO: 68943 - DNA, 20 bp, Artificial Sequence
  Description of Artificial Sequence: Synthetic oligonucleotide
  Target: LAMA2; (-) strand; PAM type: NRG; PAM sequence: AAG
ggcctaggaatttgaatatt

SEQ ID NO: 68944 - DNA, 20 bp, Artificial Sequence
  Description of Artificial Sequence: Synthetic oligonucleotide
  Target: LAMA2; (-) strand; PAM type: NRG; PAM sequence: AGG
tgtacatgtgactttggcct

SEQ ID NO: 68945 - DNA, 20 bp, Artificial Sequence
  Description of Artificial Sequence: Synthetic oligonucleotide
  Target: LAMA2; (-) strand; PAM type: NRG; PAM sequence: TAG
atgtacatgtgactttggcc

SEQ ID NO: 68946 - DNA, 20 bp, Artificial Sequence
  Description of Artificial Sequence: Synthetic oligonucleotide
  Target: LAMA2; (-) strand; PAM type: NRG; PAM sequence: TGG
agggcatgtacatgtgactt

SEQ ID NO: 68947 - DNA, 20 bp, Artificial Sequence
  Description of Artificial Sequence: Synthetic oligonucleotide
  Target: LAMA2; (-) strand; PAM type: NRG; PAM sequence: GGG
tccctaccctatagcagtta

SEQ ID NO: 68948 - DNA, 20 bp, Artificial Sequence
  Description of Artificial Sequence: Synthetic oligonucleotide
  Target: LAMA2; (-) strand; PAM type: NRG; PAM sequence: AGG
ctccctaccctatagcagtt

SEQ ID NO: 68949 - DNA, 20 bp, Artificial Sequence
  Description of Artificial Sequence: Synthetic oligonucleotide
  Target: LAMA2; (-) strand; PAM type: NRG; PAM sequence: TAG
tctccctaccctatagcagt

SEQ ID NO: 68950 - DNA, 20 bp, Artificial Sequence
  Description of Artificial Sequence: Synthetic oligonucleotide
  Target: LAMA2; (-) strand; PAM type: NRG; PAM sequence: CAG
ttcttctccctaccctatag

SEQ ID NO: 68951 - DNA, 20 bp, Artificial Sequence
  Description of Artificial Sequence: Synthetic oligonucleotide
  Target: LAMA2; (-) strand; PAM type: NRG; PAM sequence: TAG
cctttcttctccctacccta

SEQ ID NO: 68952 - DNA, 20 bp, Artificial Sequence
  Description of Artificial Sequence: Synthetic oligonucleotide
  Target: LAMA2; (-) strand; PAM type: NRG; PAM sequence: GAG
ccaaggaaatgtaaatagag

SEQ ID NO: 68953 - DNA, 20 bp, Artificial Sequence
  Description of Artificial Sequence: Synthetic oligonucleotide
  Target: LAMA2; (-) strand; PAM type: NRG; PAM sequence: AGG
tgccaaggaaatgtaaatag

SEQ ID NO: 68954 - DNA, 20 bp, Artificial Sequence
  Description of Artificial Sequence: Synthetic oligonucleotide
  Target: LAMA2; (-) strand; PAM type: NRG; PAM sequence: GAG
ctgccaaggaaatgtaaata

SEQ ID NO: 68955 - DNA, 20 bp, Artificial Sequence
  Description of Artificial Sequence: Synthetic oligonucleotide
  Target: LAMA2; (-) strand; PAM type: NRG; PAM sequence: TAG
tcctgccaaggaaatgtaaa

SEQ ID NO: 68956 - DNA, 20 bp, Artificial Sequence
  Description of Artificial Sequence: Synthetic oligonucleotide
  Target: LAMA2; (-) strand; PAM type: NRG; PAM sequence: AGG
cagtgtcctacctcctgcca

SEQ ID NO: 68957 - DNA, 20 bp, Artificial Sequence
  Description of Artificial Sequence: Synthetic oligonucleotide
  Target: LAMA2; (-) strand; PAM type: NRG; PAM sequence: AAG
gcagtgtcctacctcctgcc

SEQ ID NO: 68958 - DNA, 20 bp, Artificial Sequence
  Description of Artificial Sequence: Synthetic oligonucleotide
  Target: LAMA2; (-) strand; PAM type: NRG; PAM sequence: CAG
tgtctactattgagggtatg

SEQ ID NO: 68959 - DNA, 20 bp, Artificial Sequence
  Description of Artificial Sequence: Synthetic oligonucleotide
  Target: LAMA2; (-) strand; PAM type: NRG; PAM sequence: GGG
ggcattgtgtctactattga

SEQ ID NO: 68960 - DNA, 20 bp, Artificial Sequence
  Description of Artificial Sequence: Synthetic oligonucleotide
  Target: LAMA2; (-) strand; PAM type: NRG; PAM sequence: AGG
tggcattgtgtctactattg

SEQ ID NO: 68961 - DNA, 20 bp, Artificial Sequence
  Description of Artificial Sequence: Synthetic oligonucleotide
  Target: LAMA2; (-) strand; PAM type: NRG; PAM sequence: GAG
ttggcattgtgtctactatt

SEQ ID NO: 68962 - DNA, 20 bp, Artificial Sequence
  Description of Artificial Sequence: Synthetic oligonucleotide
  Target: LAMA2; (-) strand; PAM type: NRG; PAM sequence: TGG
catttcttttcttgagtaat

SEQ ID NO: 68963 - DNA, 20 bp, Artificial Sequence
  Description of Artificial Sequence: Synthetic oligonucleotide
  Target: LAMA2; (-) strand; PAM type: NRG; PAM sequence: GAG
catcctccatttcttttctt

SEQ ID NO: 68964 - DNA, 20 bp, Artificial Sequence
  Description of Artificial Sequence: Synthetic oligonucleotide
  Target: LAMA2; (-) strand; PAM type: NRG; PAM sequence: TGG
ggcagaccttcatcatttct

SEQ ID NO: 68965 - DNA, 20 bp, Artificial Sequence
  Description of Artificial Sequence: Synthetic oligonucleotide
  Target: LAMA2; (-) strand; PAM type: NRG; PAM sequence: CAG
aacctatatgaaaaatgtgg

SEQ ID NO: 68966 - DNA, 20 bp, Artificial Sequence
  Description of Artificial Sequence: Synthetic oligonucleotide
  Target: LAMA2; (-) strand; PAM type: NRG; PAM sequence: TGG
gccaacctatatgaaaaatg

SEQ ID NO: 68967 - DNA, 20 bp, Artificial Sequence
  Description of Artificial Sequence: Synthetic oligonucleotide
  Target: LAMA2; (-) strand; PAM type: NRG; PAM sequence: AAG
agtgaaaacattcaaagaaa

SEQ ID NO: 68968 - DNA, 20 bp, Artificial Sequence
  Description of Artificial Sequence: Synthetic oligonucleotide
  Target: LAMA2; (-) strand; PAM type: NRG; PAM sequence: AAG
tagctaagtgaaaacattca

SEQ ID NO: 68969 - DNA, 20 bp, Artificial Sequence
  Description of Artificial Sequence: Synthetic oligonucleotide
  Target: LAMA2; (-) strand; PAM type: NRG; PAM sequence: AAG
actgttttggtacactagct

SEQ ID NO: 68970 - DNA, 20 bp, Artificial Sequence
  Description of Artificial Sequence: Synthetic oligonucleotide
  Target: LAMA2; (-) strand; PAM type: NRG; PAM sequence: TAG
gtagaactgttttggtacac

SEQ ID NO: 68971 - DNA, 20 bp, Artificial Sequence
  Description of Artificial Sequence: Synthetic oligonucleotide
  Target: LAMA2; (-) strand; PAM type: NRG; PAM sequence: TGG
gtggaaatgtagaactgttt

SEQ ID NO: 68972 - DNA, 20 bp, Artificial Sequence
  Description of Artificial Sequence: Synthetic oligonucleotide
  Target: LAMA2; (-) strand; PAM type: NRG; PAM sequence: TAG
cctttaatttggtggaaatg

SEQ ID NO: 68973 - DNA, 20 bp, Artificial Sequence
  Description of Artificial Sequence: Synthetic oligonucleotide
  Target: LAMA2; (-) strand; PAM type: NRG; PAM sequence: TGG
taatcagacctttaatttgg

SEQ ID NO: 68974 - DNA, 20 bp, Artificial Sequence
  Description of Artificial Sequence: Synthetic oligonucleotide
  Target: LAMA2; (-) strand; PAM type: NRG; PAM sequence: TGG
aactaatcagacctttaatt

SEQ ID NO: 68975 - DNA, 20 bp, Artificial Sequence
  Description of Artificial Sequence: Synthetic oligonucleotide
  Target: LAMA2; (-) strand; PAM type: NRG; PAM sequence: CAG
atgaagggcattaaactaat

SEQ ID NO: 68976 - DNA, 20 bp, Artificial Sequence
  Description of Artificial Sequence: Synthetic oligonucleotide
  Target: LAMA2; (-) strand; PAM type: NRG; PAM sequence: GGG
agaaaaatatggcaaatgaa

SEQ ID NO: 68977 - DNA, 20 bp, Artificial Sequence
  Description of Artificial Sequence: Synthetic oligonucleotide
  Target: LAMA2; (-) strand; PAM type: NRG; PAM sequence: AGG
gagaaaaatatggcaaatga

SEQ ID NO: 68978 - DNA, 20 bp, Artificial Sequence
  Description of Artificial Sequence: Synthetic oligonucleotide
  Target: LAMA2; (-) strand; PAM type: NRG; PAM sequence: AAG
tgagaaaaatatggcaaatg

SEQ ID NO: 68979 - DNA, 20 bp, Artificial Sequence
  Description of Artificial Sequence: Synthetic oligonucleotide
  Target: LAMA2; (-) strand; PAM type: NRG; PAM sequence: TGG
aatctttcttgagaaaaata

SEQ ID NO: 68980 - DNA, 20 bp, Artificial Sequence
  Description of Artificial Sequence: Synthetic oligonucleotide
  Target: LAMA2; (-) strand; PAM type: NRG; PAM sequence: GAG
tgcactgtataatctttctt

SEQ ID NO: 68981 - DNA, 20 bp, Artificial Sequence
  Description of Artificial Sequence: Synthetic oligonucleotide
  Target: LAMA2; (-) strand; PAM type: NRG; PAM sequence: GAG
taaatttactgaataagaat

SEQ ID NO: 68982 - DNA, 20 bp, Artificial Sequence
  Description of Artificial Sequence: Synthetic oligonucleotide
  Target: LAMA2; (-) strand; PAM type: NRG; PAM sequence: AAG
caaatttaaatttactgaat

SEQ ID NO: 68983 - DNA, 20 bp, Artificial Sequence
  Description of Artificial Sequence: Synthetic oligonucleotide
  Target: LAMA2; (-) strand; PAM type: NRG; PAM sequence: TGG
agggcatggatagcactagt

SEQ ID NO: 68984 - DNA, 20 bp, Artificial Sequence
  Description of Artificial Sequence: Synthetic oligonucleotide
  Target: LAMA2; (-) strand; PAM type: NRG; PAM sequence: TAG
actgagggcatggatagcac

SEQ ID NO: 68985 - DNA, 20 bp, Artificial Sequence
  Description of Artificial Sequence: Synthetic oligonucleotide
  Target: LAMA2; (-) strand; PAM type: NRG; PAM sequence: TAG
aaaattactgagggcatgga

SEQ ID NO: 68986 - DNA, 20 bp, Artificial Sequence
  Description of Artificial Sequence: Synthetic oligonucleotide
  Target: LAMA2; (-) strand; PAM type: NRG; PAM sequence: TGG
ctataaaattactgagggca

SEQ ID NO: 68987 - DNA, 20 bp, Artificial Sequence
  Description of Artificial Sequence: Synthetic oligonucleotide
  Target: LAMA2; (-) strand; PAM type: NRG; PAM sequence: GGG
caagtctataaaattactga

SEQ ID NO: 68988 - DNA, 20 bp, Artificial Sequence
  Description of Artificial Sequence: Synthetic oligonucleotide
  Target: LAMA2; (-) strand; PAM type: NRG; PAM sequence: AGG
tcaagtctataaaattactg

SEQ ID NO: 68989 - DNA, 20 bp, Artificial Sequence
  Description of Artificial Sequence: Synthetic oligonucleotide
  Target: LAMA2; (-) strand; PAM type: NRG; PAM sequence: GAG
ctcaagtctataaaattact

SEQ ID NO: 68990 - DNA, 20 bp, Artificial Sequence
  Description of Artificial Sequence: Synthetic oligonucleotide
  Target: LAMA2; (-) strand; PAM type: NRG; PAM sequence: AAG
tattttttacggtggctctc

SEQ ID NO: 68991 - DNA, 20 bp, Artificial Sequence
  Description of Artificial Sequence: Synthetic oligonucleotide
  Target: LAMA2; (-) strand; PAM type: NRG; PAM sequence: TGG
aactttagtattttttacgg

SEQ ID NO: 68992 - DNA, 20 bp, Artificial Sequence
  Description of Artificial Sequence: Synthetic oligonucleotide
  Target: LAMA2; (-) strand; PAM type: NRG; PAM sequence: CGG
tgtaactttagtatttttta

SEQ ID NO: 68993 - DNA, 20 bp, Artificial Sequence
  Description of Artificial Sequence: Synthetic oligonucleotide
  Target: LAMA2; (-) strand; PAM type: NRG; PAM sequence: TAG
ccctcatcatactgtaactt

SEQ ID NO: 68994 - DNA, 20 bp, Artificial Sequence
  Description of Artificial Sequence: Synthetic oligonucleotide
  Target: LAMA2; (-) strand; PAM type: NRG; PAM sequence: TAG
attacttagttgatatttag

SEQ ID NO: 68995 - DNA, 20 bp, Artificial Sequence
  Description of Artificial Sequence: Synthetic oligonucleotide
  Target: LAMA2; (-) strand; PAM type: NRG; PAM sequence: TAG
tatattacttagttgatatt

SEQ ID NO: 68996 - DNA, 20 bp, Artificial Sequence
  Description of Artificial Sequence: Synthetic oligonucleotide
  Target: LAMA2; (-) strand; PAM type: NRG; PAM sequence: TAG
cttggtgtccgtatattact

SEQ ID NO: 68997 - DNA, 20 bp, Artificial Sequence
  Description of Artificial Sequence: Synthetic oligonucleotide
  Target: LAMA2; (-) strand; PAM type: NRG; PAM sequence: TGG
agaattttctgtttctttct

SEQ ID NO: 68998 - DNA, 20 bp, Artificial Sequence
  Description of Artificial Sequence: Synthetic oligonucleotide
  Target: LAMA2; (-) strand; PAM type: NRG; PAM sequence: CAG
tgttttctgactttgccaca

SEQ ID NO: 68999 - DNA, 20 bp, Artificial Sequence
  Description of Artificial Sequence: Synthetic oligonucleotide
  Target: LAMA2; (-) strand; PAM type: NRG; PAM sequence: AAG
aaatattccctgctctgtga

SEQ ID NO: 69000 - DNA, 20 bp, Artificial Sequence
  Description of Artificial Sequence: Synthetic oligonucleotide
  Target: LAMA2; (-) strand; PAM type: NRG; PAM sequence: TAG
tgttgcatgttcatctttca

SEQ ID NO: 69001 - DNA, 20 bp, Artificial Sequence
  Description of Artificial Sequence: Synthetic oligonucleotide
  Target: LAMA2; (-) strand; PAM type: NRG; PAM sequence: AAG
attatcttgtcccttcaaca

SEQ ID NO: 69002 - DNA, 20 bp, Artificial Sequence
  Description of Artificial Sequence: Synthetic oligonucleotide
  Target: LAMA2; (-) strand; PAM type: NRG; PAM sequence: AGG
ttcctatttacaaatatagc

SEQ ID NO: 69003 - DNA, 20 bp, Artificial Sequence
  Description of Artificial Sequence: Synthetic oligonucleotide
  Target: LAMA2; (-) strand; PAM type: NRG; PAM sequence: CAG
cttcctatttacaaatatag

SEQ ID NO: 69004 - DNA, 20 bp, Artificial Sequence
  Description of Artificial Sequence: Synthetic oligonucleotide
  Target: LAMA2; (-) strand; PAM type: NRG; PAM sequence: TAG
tctcttcctatttacaaata

SEQ ID NO: 69005 - DNA, 20 bp, Artificial Sequence
  Description of Artificial Sequence: Synthetic oligonucleotide
  Target: LAMA2; (-) strand; PAM type: NRG; PAM sequence: TAG
ttcatgccttcttatacatc

SEQ ID NO: 69006 - DNA, 20 bp, Artificial Sequence
  Description of Artificial Sequence: Synthetic oligonucleotide
  Target: LAMA2; (-) strand; PAM type: NRG; PAM sequence: AGG
tgatctaaacatttataatc

SEQ ID NO: 69007 - DNA, 20 bp, Artificial Sequence
  Description of Artificial Sequence: Synthetic oligonucleotide
  Target: LAMA2; (-) strand; PAM type: NRG; PAM sequence: CAG
gtgatctaaacatttataat

SEQ ID NO: 69008 - DNA, 20 bp, Artificial Sequence
  Description of Artificial Sequence: Synthetic oligonucleotide
  Target: LAMA2; (-) strand; PAM type: NRG; PAM sequence: TGG
agtgtcgtagacaaactcct

SEQ ID NO: 69009 - DNA, 20 bp, Artificial Sequence
  Description of Artificial Sequence: Synthetic oligonucleotide
  Target: LAMA2; (-) strand; PAM type: NRG; PAM sequence: TAG
gcctgtcacctgtagtgtcg

SEQ ID NO: 69010 - DNA, 20 bp, Artificial Sequence
  Description of Artificial Sequence: Synthetic oligonucleotide
  Target: LAMA2; (-) strand; PAM type: NRG; PAM sequence: TAG
tgtgagttgcctgtcacctg

SEQ ID NO: 69011 - DNA, 20 bp, Artificial Sequence
  Description of Artificial Sequence: Synthetic oligonucleotide
  Target: LAMA2; (-) strand; PAM type: NRG; PAM sequence: GAG
tcttttttaaagacttttgt

SEQ ID NO: 69012 - DNA, 20 bp, Artificial Sequence
  Description of Artificial Sequence: Synthetic oligonucleotide
  Target: LAMA2; (-) strand; PAM type: NRG; PAM sequence: AAG
aaaactcactttctttttta

SEQ ID NO: 69013 - DNA, 20 bp, Artificial Sequence
  Description of Artificial Sequence: Synthetic oligonucleotide
  Target: LAMA2; (-) strand; PAM type: NRG; PAM sequence: TAG
ttgagcaccactgcccttcc

SEQ ID NO: 69014 - DNA, 20 bp, Artificial Sequence
  Description of Artificial Sequence: Synthetic oligonucleotide
  Target: LAMA2; (-) strand; PAM type: NRG; PAM sequence: GAG
tccctggtgccaaacaggtt

SEQ ID NO: 69015 - DNA, 20 bp, Artificial Sequence
  Description of Artificial Sequence: Synthetic oligonucleotide
  Target: LAMA2; (-) strand; PAM type: NRG; PAM sequence: AGG
actggtccctggtgccaaac

SEQ ID NO: 69016 - DNA, 20 bp, Artificial Sequence
  Description of Artificial Sequence: Synthetic oligonucleotide
  Target: LAMA2; (-) strand; PAM type: NRG; PAM sequence: CAG
aactggtccctggtgccaaa

SEQ ID NO: 69017 - DNA, 20 bp, Artificial Sequence
  Description of Artificial Sequence: Synthetic oligonucleotide
  Target: LAMA2; (-) strand; PAM type: NRG; PAM sequence: TGG
tcttccacaaaactggtccc

SEQ ID NO: 69018 - DNA, 20 bp, Artificial Sequence
  Description of Artificial Sequence: Synthetic oligonucleotide
  Target: LAMA2; (-) strand; PAM type: NRG; PAM sequence: TGG
aaaattgtcttccacaaaac

SEQ ID NO: 69019 - DNA, 20 bp, Artificial Sequence
  Description of Artificial Sequence: Synthetic oligonucleotide
  Target: LAMA2; (-) strand; PAM type: NRG; PAM sequence: TGG
tccacccctatccctgtcaa

SEQ ID NO: 69020 - DNA, 20 bp, Artificial Sequence
  Description of Artificial Sequence: Synthetic oligonucleotide
  Target: LAMA2; (-) strand; PAM type: NRG; PAM sequence: CAG
gctgatgatctgaggtggaa

SEQ ID NO: 69021 - DNA, 20 bp, Artificial Sequence
  Description of Artificial Sequence: Synthetic oligonucleotide
  Target: LAMA2; (-) strand; PAM type: NRG; PAM sequence: TGG
taatggctgatgatctgagg

SEQ ID NO: 69022 - DNA, 20 bp, Artificial Sequence
  Description of Artificial Sequence: Synthetic oligonucleotide
  Target: LAMA2; (-) strand; PAM type: NRG; PAM sequence: AGG
atctaatggctgatgatctg

SEQ ID NO: 69023 - DNA, 20 bp, Artificial Sequence
  Description of Artificial Sequence: Synthetic oligonucleotide
  Target: LAMA2; (-) strand; PAM type: NRG; PAM sequence: GAG
aatctaatggctgatgatct

SEQ ID NO: 69024 - DNA, 20 bp, Artificial Sequence
  Description of Artificial Sequence: Synthetic oligonucleotide
  Target: LAMA2; (-) strand; PAM type: NRG; PAM sequence: TGG
agctacttataagaatctaa

SEQ ID NO: 69025 - DNA, 20 bp, Artificial Sequence
  Description of Artificial Sequence: Synthetic oligonucleotide
  Target: LAMA2; (-) strand; PAM type: NRG; PAM sequence: AAG
ctaggttgtgagctacttat

SEQ ID NO: 69026 - DNA, 20 bp, Artificial Sequence
  Description of Artificial Sequence: Synthetic oligonucleotide
  Target: LAMA2; (-) strand; PAM type: NRG; PAM sequence: GAG
atgcgagggatctaggttgt

SEQ ID NO: 69027 - DNA, 20 bp, Artificial Sequence
  Description of Artificial Sequence: Synthetic oligonucleotide
  Target: LAMA2; (-) strand; PAM type: NRG; PAM sequence: AGG
actgtgcatgcgagggatct

SEQ ID NO: 69028 - DNA, 20 bp, Artificial Sequence
  Description of Artificial Sequence: Synthetic oligonucleotide
  Target: LAMA2; (-) strand; PAM type: NRG; PAM sequence: TAG
aactgtgcatgcgagggatc

SEQ ID NO: 69029 - DNA, 20 bp, Artificial Sequence
  Description of Artificial Sequence: Synthetic oligonucleotide
  Target: LAMA2; (-) strand; PAM type: NRG; PAM sequence: GGG
attgtgaactgtgcatgcga

SEQ ID NO: 69030 - DNA, 20 bp, Artificial Sequence
  Description of Artificial Sequence: Synthetic oligonucleotide
  Target: LAMA2; (-) strand; PAM type: NRG; PAM sequence: AGG
tattgtgaactgtgcatgcg

SEQ ID NO: 69031 - DNA, 20 bp, Artificial Sequence
  Description of Artificial Sequence: Synthetic oligonucleotide
  Target: LAMA2; (-) strand; PAM type: NRG; PAM sequence: GAG
atattgtgaactgtgcatgc

SEQ ID NO: 69032 - DNA, 20 bp, Artificial Sequence
  Description of Artificial Sequence: Synthetic oligonucleotide
  Target: LAMA2; (-) strand; PAM type: NRG; PAM sequence: AGG
caacagcattagactctcac

SEQ ID NO: 69033 - DNA, 20 bp, Artificial Sequence
  Description of Artificial Sequence: Synthetic oligonucleotide
  Target: LAMA2; (-) strand; PAM type: NRG; PAM sequence: CAG
gcaacagcattagactctca

SEQ ID NO: 69034 - DNA, 20 bp, Artificial Sequence
  Description of Artificial Sequence: Synthetic oligonucleotide
  Target: LAMA2; (-) strand; PAM type: NRG; PAM sequence: TAG
tgtcagataagcaacagcat

SEQ ID NO: 69035 - DNA, 20 bp, Artificial Sequence
  Description of Artificial Sequence: Synthetic oligonucleotide
  Target: LAMA2; (-) strand; PAM type: NRG; PAM sequence: CAG
gcctcctgtcagataagcaa

SEQ ID NO: 69036 - DNA, 20 bp, Artificial Sequence
  Description of Artificial Sequence: Synthetic oligonucleotide
  Target: LAMA2; (-) strand; PAM type: NRG; PAM sequence: AAG
agctctgcctcctgtcagat

SEQ ID NO: 69037 - DNA, 20 bp, Artificial Sequence
  Description of Artificial Sequence: Synthetic oligonucleotide
  Target: LAMA2; (-) strand; PAM type: NRG; PAM sequence: CAG
acctgagctctgcctcctgt

SEQ ID NO: 69038 - DNA, 20 bp, Artificial Sequence
  Description of Artificial Sequence: Synthetic oligonucleotide
  Target: LAMA2; (-) strand; PAM type: NRG; PAM sequence: GAG
gcaaacaagcattaccacct

SEQ ID NO: 69039 - DNA, 20 bp, Artificial Sequence
  Description of Artificial Sequence: Synthetic oligonucleotide
  Target: LAMA2; (-) strand; PAM type: NRG; PAM sequence: AAG
gaagtgagtggctggcaaac

SEQ ID NO: 69040 - DNA, 20 bp, Artificial Sequence
  Description of Artificial Sequence: Synthetic oligonucleotide
  Target: LAMA2; (-) strand; PAM type: NRG; PAM sequence: TGG
cacagcaggaagtgagtggc

SEQ ID NO: 69041 - DNA, 20 bp, Artificial Sequence
  Description of Artificial Sequence: Synthetic oligonucleotide
  Target: LAMA2; (-) strand; PAM type: NRG; PAM sequence: TGG
gctgcacagcaggaagtgag

SEQ ID NO: 69042 - DNA, 20 bp, Artificial Sequence
  Description of Artificial Sequence: Synthetic oligonucleotide
  Target: LAMA2; (-) strand; PAM type: NRG; PAM sequence: GAG
agggctgcacagcaggaagt

SEQ ID NO: 69043 - DNA, 20 bp, Artificial Sequence
  Description of Artificial Sequence: Synthetic oligonucleotide
  Target: LAMA2; (-) strand; PAM type: NRG; PAM sequence: AAG
gaacagggctgcacagcagg

SEQ ID NO: 69044 - DNA, 20 bp, Artificial Sequence
  Description of Artificial Sequence: Synthetic oligonucleotide
  Target: LAMA2; (-) strand; PAM type: NRG; PAM sequence: AGG
taggaacagggctgcacagc

SEQ ID NO: 69045 - DNA, 20 bp, Artificial Sequence
  Description of Artificial Sequence: Synthetic oligonucleotide
  Target: LAMA2; (-) strand; PAM type: NRG; PAM sequence: CAG
ttaggaacagggctgcacag

SEQ ID NO: 69046 - DNA, 20 bp, Artificial Sequence
  Description of Artificial Sequence: Synthetic oligonucleotide
  Target: LAMA2; (-) strand; PAM type: NRG; PAM sequence: CAG
ctgttaggaacagggctgca

SEQ ID NO: 69047 - DNA, 20 bp, Artificial Sequence
  Description of Artificial Sequence: Synthetic oligonucleotide
  Target: LAMA2; (-) strand; PAM type: NRG; PAM sequence: GGG
cctgtggcctgttaggaaca

SEQ ID NO: 69048 - DNA, 20 bp, Artificial Sequence
  Description of Artificial Sequence: Synthetic oligonucleotide
  Target: LAMA2; (-) strand; PAM type: NRG; PAM sequence: AGG
gcctgtggcctgttaggaac

SEQ ID NO: 69049 - DNA, 20 bp, Artificial Sequence
  Description of Artificial Sequence: Synthetic oligonucleotide
  Target: LAMA2; (-) strand; PAM type: NRG; PAM sequence: CAG
agcctgtggcctgttaggaa

SEQ ID NO: 69050 - DNA, 20 bp, Artificial Sequence
  Description of Artificial Sequence: Synthetic oligonucleotide
  Target: LAMA2; (-) strand; PAM type: NRG; PAM sequence: AGG
gtaccagcctgtggcctgtt

SEQ ID NO: 69051 - DNA, 20 bp, Artificial Sequence
  Description of Artificial Sequence: Synthetic oligonucleotide
  Target: LAMA2; (-) strand; PAM type: NRG; PAM sequence: TAG
agtaccagcctgtggcctgt

SEQ ID NO: 69052 - DNA, 20 bp, Artificial Sequence
  Description of Artificial Sequence: Synthetic oligonucleotide
  Target: LAMA2; (-) strand; PAM type: NRG; PAM sequence: TGG
tgcagaccagtaccagcctg

SEQ ID NO: 69053 - DNA, 20 bp, Artificial Sequence
  Description of Artificial Sequence: Synthetic oligonucleotide
  Target: LAMA2; (-) strand; PAM type: NRG; PAM sequence: CAG
ccagggctgcagaccagtac

SEQ ID NO: 69054 - DNA, 20 bp, Artificial Sequence
  Description of Artificial Sequence: Synthetic oligonucleotide
  Target: LAMA2; (-) strand; PAM type: NRG; PAM sequence: CAG
ccaaccccagggctgcagac

SEQ ID NO: 69055 - DNA, 20 bp, Artificial Sequence
  Description of Artificial Sequence: Synthetic oligonucleotide
  Target: LAMA2; (-) strand; PAM type: NRG; PAM sequence: CAG
ggtccccaaccccagggctg

SEQ ID NO: 69056 - DNA, 20 bp, Artificial Sequence
  Description of Artificial Sequence: Synthetic oligonucleotide
  Target: LAMA2; (-) strand; PAM type: NRG; PAM sequence: GGG
acccggggtccccaacccca

SEQ ID NO: 69057 - DNA, 20 bp, Artificial Sequence
  Description of Artificial Sequence: Synthetic oligonucleotide
  Target: LAMA2; (-) strand; PAM type: NRG; PAM sequence: AGG
aacccggggtccccaacccc

SEQ ID NO: 69058 - DNA, 20 bp, Artificial Sequence
  Description of Artificial Sequence: Synthetic oligonucleotide
  Target: LAMA2; (-) strand; PAM type: NRG; PAM sequence: CAG
taacccggggtccccaaccc

SEQ ID NO: 69059 - DNA, 20 bp, Artificial Sequence
  Description of Artificial Sequence: Synthetic oligonucleotide
  Target: LAMA2; (-) strand; PAM type: NRG; PAM sequence: GGG
tacagtagcatcctaacccg

SEQ ID NO: 69060 - DNA, 20 bp, Artificial Sequence
  Description of Artificial Sequence: Synthetic oligonucleotide
  Target: LAMA2; (-) strand; PAM type: NRG; PAM sequence: GGG
ttacagtagcatcctaaccc

SEQ ID NO: 69061 - DNA, 20 bp, Artificial Sequence
  Description of Artificial Sequence: Synthetic oligonucleotide
  Target: LAMA2; (-) strand; PAM type: NRG; PAM sequence: CGG
attacagtagcatcctaacc

SEQ ID NO: 69062 - DNA, 20 bp, Artificial Sequence
  Description of Artificial Sequence: Synthetic oligonucleotide
  Target: LAMA2; (-) strand; PAM type: NRG; PAM sequence: TAG
ttactttacatttattacag

SEQ ID NO: 69063 - DNA, 20 bp, Artificial Sequence
  Description of Artificial Sequence: Synthetic oligonucleotide
  Target: LAMA2; (-) strand; PAM type: NRG; PAM sequence: CAG
accttactttacatttatta

SEQ ID NO: 69064 - DNA, 20 bp, Artificial Sequence
  Description of Artificial Sequence: Synthetic oligonucleotide
  Target: LAMA2; (-) strand; PAM type: NRG; PAM sequence: CAG
aacacatcaacatttatatt

SEQ ID NO: 69065 - DNA, 20 bp, Artificial Sequence
  Description of Artificial Sequence: Synthetic oligonucleotide
  Target: LAMA2; (-) strand; PAM type: NRG; PAM sequence: CAG
ttttgtctctacctcaaatt

SEQ ID NO: 69066 - DNA, 20 bp, Artificial Sequence
  Description of Artificial Sequence: Synthetic oligonucleotide
  Target: LAMA2; (-) strand; PAM type: NRG; PAM sequence: CAG
cattctaagatttctgcttc

SEQ ID NO: 69067 - DNA, 20 bp, Artificial Sequence
  Description of Artificial Sequence: Synthetic oligonucleotide
  Target: LAMA2; (-) strand; PAM type: NRG; PAM sequence: AAG
gccttacttttccccattct

SEQ ID NO: 69068 - DNA, 20 bp, Artificial Sequence
  Description of Artificial Sequence: Synthetic oligonucleotide
  Target: LAMA2; (-) strand; PAM type: NRG; PAM sequence: AAG
cagaaaccagaaaatgttaa

SEQ ID NO: 69069 - DNA, 20 bp, Artificial Sequence
  Description of Artificial Sequence: Synthetic oligonucleotide
  Target: LAMA2; (-) strand; PAM type: NRG; PAM sequence: CAG
aaatgtgactccacagaaac

SEQ ID NO: 69070 - DNA, 20 bp, Artificial Sequence
  Description of Artificial Sequence: Synthetic oligonucleotide
  Target: LAMA2; (-) strand; PAM type: NRG; PAM sequence: CAG
attaataaaatgtgactcca

SEQ ID NO: 69071 - DNA, 20 bp, Artificial Sequence
  Description of Artificial Sequence: Synthetic oligonucleotide
  Target: LAMA2; (-) strand; PAM type: NRG; PAM sequence: CAG
ctaggtagataaatgtcaac

SEQ ID NO: 69072 - DNA, 20 bp, Artificial Sequence
  Description of Artificial Sequence: Synthetic oligonucleotide
  Target: LAMA2; (-) strand; PAM type: NRG; PAM sequence: TAG
ttctgtcatttttttctagg

SEQ ID NO: 69073 - DNA, 20 bp, Artificial Sequence
  Description of Artificial Sequence: Synthetic oligonucleotide
  Target: LAMA2; (-) strand; PAM type: NRG; PAM sequence: AGG
aatttctgtcatttttttct

SEQ ID NO: 69074 - DNA, 20 bp, Artificial Sequence
  Description of Artificial Sequence: Synthetic oligonucleotide
  Target: LAMA2; (-) strand; PAM type: NRG; PAM sequence: TAG
aaatttctgtcatttttttc

SEQ ID NO: 69075 - DNA, 20 bp, Artificial Sequence
  Description of Artificial Sequence: Synthetic oligonucleotide
  Target: LAMA2; (-) strand; PAM type: NRG; PAM sequence: TAG
aaatattggtacctaattca

SEQ ID NO: 69076 - DNA, 20 bp, Artificial Sequence
  Description of Artificial Sequence: Synthetic oligonucleotide
  Target: LAMA2; (-) strand; PAM type: NRG; PAM sequence: TGG
aagatcatccacaaaaatat

SEQ ID NO: 69077 - DNA, 20 bp, Artificial Sequence
  Description of Artificial Sequence: Synthetic oligonucleotide
  Target: LAMA2; (-) strand; PAM type: NRG; PAM sequence: AAG
cattattggctgacttcatg

SEQ ID NO: 69078 - DNA, 20 bp, Artificial Sequence
  Description of Artificial Sequence: Synthetic oligonucleotide
  Target: LAMA2; (-) strand; PAM type: NRG; PAM sequence: TGG
cacatactcatctccattat

SEQ ID NO: 69079 - DNA, 20 bp, Artificial Sequence
  Description of Artificial Sequence: Synthetic oligonucleotide
  Target: LAMA2; (-) strand; PAM type: NRG; PAM sequence: AAG
cccaataacttcttttcaaa

SEQ ID NO: 69080 - DNA, 20 bp, Artificial Sequence
  Description of Artificial Sequence: Synthetic oligonucleotide
  Target: LAMA2; (-) strand; PAM type: NRG; PAM sequence: GAG
actgttgagattacaggcat

SEQ ID NO: 69081 - DNA, 20 bp, Artificial Sequence
  Description of Artificial Sequence: Synthetic oligonucleotide
  Target: LAMA2; (-) strand; PAM type: NRG; PAM sequence: AGG
tcccaaactgttgagattac

SEQ ID NO: 69082 - DNA, 20 bp, Artificial Sequence
  Description of Artificial Sequence: Synthetic oligonucleotide
  Target: LAMA2; (-) strand; PAM type: NRG; PAM sequence: CAG
ctcccaaactgttgagatta

SEQ ID NO: 69083 - DNA, 20 bp, Artificial Sequence
  Description of Artificial Sequence: Synthetic oligonucleotide
  Target: LAMA2; (-) strand; PAM type: NRG; PAM sequence: GAG
cctcaacctcccaaactgtt

SEQ ID NO: 69084 - DNA, 20 bp, Artificial Sequence
  Description of Artificial Sequence: Synthetic oligonucleotide
  Target: LAMA2; (-) strand; PAM type: NRG; PAM sequence: AAG
tatctcaaactcctggcctc

SEQ ID NO: 69085 - DNA, 20 bp, Artificial Sequence
  Description of Artificial Sequence: Synthetic oligonucleotide
  Target: LAMA2; (-) strand; PAM type: NRG; PAM sequence: TGG
ccaagtttatctcaaactcc

SEQ ID NO: 69086 - DNA, 20 bp, Artificial Sequence
  Description of Artificial Sequence: Synthetic oligonucleotide
  Target: LAMA2; (-) strand; PAM type: NRG; PAM sequence: AAG
tggatcttgctctgttgccc

SEQ ID NO: 69087 - DNA, 20 bp, Artificial Sequence
  Description of Artificial Sequence: Synthetic oligonucleotide
  Target: LAMA2; (-) strand; PAM type: NRG; PAM sequence: TGG
ttttttaattattgtaaaga

SEQ ID NO: 69088 - DNA, 20 bp, Artificial Sequence
  Description of Artificial Sequence: Synthetic oligonucleotide
  Target: LAMA2; (-) strand; PAM type: NRG; PAM sequence: AAG
ttttttttttaattattgta

SEQ ID NO: 69089 - DNA, 20 bp, Artificial Sequence
  Description of Artificial Sequence: Synthetic oligonucleotide
  Target: LAMA2; (-) strand; PAM type: NRG; PAM sequence: CAG
caggtgcaagccatcacata

SEQ ID NO: 69090 - DNA, 20 bp, Artificial Sequence
  Description of Artificial Sequence: Synthetic oligonucleotide
  Target: LAMA2; (-) strand; PAM type: NRG; PAM sequence: AAG
gtagctagaactacaggtgc

SEQ ID NO: 69091 - DNA, 20 bp, Artificial Sequence
  Description of Artificial Sequence: Synthetic oligonucleotide
  Target: LAMA2; (-) strand; PAM type: NRG; PAM sequence: AGG
tcctgagtagctagaactac

SEQ ID NO: 69092 - DNA, 20 bp, Artificial Sequence
  Description of Artificial Sequence: Synthetic oligonucleotide
  Target: LAMA2; (-) strand; PAM type: NRG; PAM sequence: CAG
atcctgagtagctagaacta

SEQ ID NO: 69093 - DNA, 20 bp, Artificial Sequence
  Description of Artificial Sequence: Synthetic oligonucleotide
  Target: LAMA2; (-) strand; PAM type: NRG; PAM sequence: TAG
gcctgagcatcctgagtagc

SEQ ID NO: 69094 - DNA, 20 bp, Artificial Sequence
  Description of Artificial Sequence: Synthetic oligonucleotide
  Target: LAMA2; (-) strand; PAM type: NRG; PAM sequence: TAG
tcttgcctgagcatcctgag

SEQ ID NO: 69095 - DNA, 20 bp, Artificial Sequence
  Description of Artificial Sequence: Synthetic oligonucleotide
  Target: LAMA2; (-) strand; PAM type: NRG; PAM sequence: GAG
tcctcttgcctgagcatcct

SEQ ID NO: 69096 - DNA, 20 bp, Artificial Sequence
  Description of Artificial Sequence: Synthetic oligonucleotide
  Target: LAMA2; (-) strand; PAM type: NRG; PAM sequence: GAG
ctcaagtgatcctcttgcct

SEQ ID NO: 69097 - DNA, 20 bp, Artificial Sequence
  Description of Artificial Sequence: Synthetic oligonucleotide
  Target: LAMA2; (-) strand; PAM type: NRG; PAM sequence: AAG
agcctctgcctcctaggctc

SEQ ID NO: 69098 - DNA, 20 bp, Artificial Sequence
  Description of Artificial Sequence: Synthetic oligonucleotide
  Target: LAMA2; (-) strand; PAM type: NRG; PAM sequence: AGG
cactgaagcctctgcctcct

SEQ ID NO: 69099 - DNA, 20 bp, Artificial Sequence
  Description of Artificial Sequence: Synthetic oligonucleotide
  Target: LAMA2; (-) strand; PAM type: NRG; PAM sequence: TAG
acactgaagcctctgcctcc

SEQ ID NO: 69100 - DNA, 20 bp, Artificial Sequence
  Description of Artificial Sequence: Synthetic oligonucleotide
  Target: LAMA2; (-) strand; PAM type: NRG; PAM sequence: AAG
ggcatgatcatggcacactg

SEQ ID NO: 69101 - DNA, 20 bp, Artificial Sequence
  Description of Artificial Sequence: Synthetic oligonucleotide
  Target: LAMA2; (-) strand; PAM type: NRG; PAM sequence: TGG
ggagtgcagtggcatgatca

SEQ ID NO: 69102 - DNA, 20 bp, Artificial Sequence
  Description of Artificial Sequence: Synthetic oligonucleotide
  Target: LAMA2; (-) strand; PAM type: NRG; PAM sequence: TGG
ttgcccaggctggagtgcag

SEQ ID NO: 69103 - DNA, 20 bp, Artificial Sequence
  Description of Artificial Sequence: Synthetic oligonucleotide
  Target: LAMA2; (-) strand; PAM type: NRG; PAM sequence: CAG
ttgttgcccaggctggagtg

SEQ ID NO: 69104 - DNA, 20 bp, Artificial Sequence
  Description of Artificial Sequence: Synthetic oligonucleotide
  Target: LAMA2; (-) strand; PAM type: NRG; PAM sequence: GAG
cactcttgttgcccaggctg

SEQ ID NO: 69105 - DNA, 20 bp, Artificial Sequence
  Description of Artificial Sequence: Synthetic oligonucleotide
  Target: LAMA2; (-) strand; PAM type: NRG; PAM sequence: TGG
ctcactcttgttgcccaggc

SEQ ID NO: 69106 - DNA, 20 bp, Artificial Sequence
  Description of Artificial Sequence: Synthetic oligonucleotide
  Target: LAMA2; (-) strand; PAM type: NRG; PAM sequence: AGG
gggtctcactcttgttgccc

SEQ ID NO: 69107 - DNA, 20 bp, Artificial Sequence
  Description of Artificial Sequence: Synthetic oligonucleotide
  Target: LAMA2; (-) strand; PAM type: NRG; PAM sequence: CAG
agggtctcactcttgttgcc

SEQ ID NO: 69108 - DNA, 20 bp, Artificial Sequence
  Description of Artificial Sequence: Synthetic oligonucleotide
  Target: LAMA2; (-) strand; PAM type: NRG; PAM sequence: GGG
tgtttaatttttttaagaca

SEQ ID NO: 69109 - DNA, 20 bp, Artificial Sequence
  Description of Artificial Sequence: Synthetic oligonucleotide
  Target: LAMA2; (-) strand; PAM type: NRG; PAM sequence: AGG
ttgtttaatttttttaagac

SEQ ID NO: 69110 - DNA, 20 bp, Artificial Sequence
  Description of Artificial Sequence: Synthetic oligonucleotide
  Target: LAMA2; (-) strand; PAM type: NRG; PAM sequence: CAG
tttgtttaatttttttaaga

SEQ ID NO: 69111 - DNA, 20 bp, Artificial Sequence
  Description of Artificial Sequence: Synthetic oligonucleotide
  Target: LAMA2; (-) strand; PAM type: NRG; PAM sequence: AAG
ttaatttgtttaattttttt

SEQ ID NO: 69112 - DNA, 20 bp, Artificial Sequence
  Description of Artificial Sequence: Synthetic oligonucleotide
  Target: LAMA2; (-) strand; PAM type: NRG; PAM sequence: CAG
cctgaaggccacttgcaaat

SEQ ID NO: 69113 - DNA, 20 bp, Artificial Sequence
  Description of Artificial Sequence: Synthetic oligonucleotide
  Target: LAMA2; (-) strand; PAM type: NRG; PAM sequence: AGG
agccttcttctgcctcctga

SEQ ID NO: 69114 - DNA, 20 bp, Artificial Sequence
  Description of Artificial Sequence: Synthetic oligonucleotide
  Target: LAMA2; (-) strand; PAM type: NRG; PAM sequence: AAG
tagccttcttctgcctcctg

SEQ ID NO: 69115 - DNA, 20 bp, Artificial Sequence
  Description of Artificial Sequence: Synthetic oligonucleotide
  Target: LAMA2; (-) strand; PAM type: NRG; PAM sequence: TAG
aatcactggggaaagacaag

SEQ ID NO: 69116 - DNA, 20 bp, Artificial Sequence
  Description of Artificial Sequence: Synthetic oligonucleotide
  Target: LAMA2; (-) strand; PAM type: NRG; PAM sequence: AAG
taaaatcactggggaaagac

SEQ ID NO: 69117 - DNA, 20 bp, Artificial Sequence
  Description of Artificial Sequence: Synthetic oligonucleotide
  Target: LAMA2; (-) strand; PAM type: NRG; PAM sequence: AAG
attcataaaatcactgggga

SEQ ID NO: 69118 - DNA, 20 bp, Artificial Sequence
  Description of Artificial Sequence: Synthetic oligonucleotide
  Target: LAMA2; (-) strand; PAM type: NRG; PAM sequence: GGG
atggattcataaaatcactg

SEQ ID NO: 69119 - DNA, 20 bp, Artificial Sequence
  Description of Artificial Sequence: Synthetic oligonucleotide
  Target: LAMA2; (-) strand; PAM type: NRG; PAM sequence: GGG
aatggattcataaaatcact

SEQ ID NO: 69120 - DNA, 20 bp, Artificial Sequence
  Description of Artificial Sequence: Synthetic oligonucleotide
  Target: LAMA2; (-) strand; PAM type: NRG; PAM sequence: TGG
caatggattcataaaatcac

SEQ ID NO: 69121 - DNA, 20 bp, Artificial Sequence
  Description of Artificial Sequence: Synthetic oligonucleotide
  Target: LAMA2; (-) strand; PAM type: NRG; PAM sequence: TGG
acttctgcagatctcctcaa

SEQ ID NO: 69122 - DNA, 20 bp, Artificial Sequence
  Description of Artificial Sequence: Synthetic oligonucleotide
  Target: LAMA2; (-) strand; PAM type: NRG; PAM sequence: CAG
cagcagtgacaacacttctg

SEQ ID NO: 69123 - DNA, 20 bp, Artificial Sequence
  Description of Artificial Sequence: Synthetic oligonucleotide
  Target: LAMA2; (-) strand; PAM type: NRG; PAM sequence: CAG
gaagccttggttttctccag

SEQ ID NO: 69124 - DNA, 20 bp, Artificial Sequence
  Description of Artificial Sequence: Synthetic oligonucleotide
  Target: LAMA2; (-) strand; PAM type: NRG; PAM sequence: CAG
agtgaagccttggttttctc

SEQ ID NO: 69125 - DNA, 20 bp, Artificial Sequence
  Description of Artificial Sequence: Synthetic oligonucleotide
  Target: LAMA2; (-) strand; PAM type: NRG; PAM sequence: TGG
cctttttgcaagtgaagcct

SEQ ID NO: 69126 - DNA, 20 bp, Artificial Sequence
  Description of Artificial Sequence: Synthetic oligonucleotide
  Target: LAMA2; (-) strand; PAM type: NRG; PAM sequence: AAG
agtactcctttttgcaagtg

SEQ ID NO: 69127 - DNA, 20 bp, Artificial Sequence
  Description of Artificial Sequence: Synthetic oligonucleotide
  Target: LAMA2; (-) strand; PAM type: NRG; PAM sequence: AAG
aagaaagtactcctttttgc

SEQ ID NO: 69128 - DNA, 20 bp, Artificial Sequence
  Description of Artificial Sequence: Synthetic oligonucleotide
  Target: LAMA2; (-) strand; PAM type: NRG; PAM sequence: AAG
caaatttctcagttttaaga

SEQ ID NO: 69129 - DNA, 20 bp, Artificial Sequence
  Description of Artificial Sequence: Synthetic oligonucleotide
  Target: LAMA2; (-) strand; PAM type: NRG; PAM sequence: AAG
tttccaaatttctcagtttt

SEQ ID NO: 69130 - DNA, 20 bp, Artificial Sequence
  Description of Artificial Sequence: Synthetic oligonucleotide
  Target: LAMA2; (-) strand; PAM type: NRG; PAM sequence: CAG
tgatatatttccaaatttct

SEQ ID NO: 69131 - DNA, 20 bp, Artificial Sequence
  Description of Artificial Sequence: Synthetic oligonucleotide
  Target: LAMA2; (-) strand; PAM type: NRG; PAM sequence: AAG
aacttccatcatagctttac

SEQ ID NO: 69132 - DNA, 20 bp, Artificial Sequence
  Description of Artificial Sequence: Synthetic oligonucleotide
  Target: LAMA2; (-) strand; PAM type: NRG; PAM sequence: TAG
tcatgggctaacttccatca

SEQ ID NO: 69133 - DNA, 20 bp, Artificial Sequence
  Description of Artificial Sequence: Synthetic oligonucleotide
  Target: LAMA2; (-) strand; PAM type: NRG; PAM sequence: GGG
ccttctgtaaacacactcat

SEQ ID NO: 69134 - DNA, 20 bp, Artificial Sequence
  Description of Artificial Sequence: Synthetic oligonucleotide
  Target: LAMA2; (-) strand; PAM type: NRG; PAM sequence: TGG
gccttctgtaaacacactca

SEQ ID NO: 69135 - DNA, 20 bp, Artificial Sequence
  Description of Artificial Sequence: Synthetic oligonucleotide
  Target: LAMA2; (-) strand; PAM type: NRG; PAM sequence: TAG
tccctgagtcttatgccatc

SEQ ID NO: 69136 - DNA, 20 bp, Artificial Sequence
  Description of Artificial Sequence: Synthetic oligonucleotide
  Target: LAMA2; (-) strand; PAM type: NRG; PAM sequence: GAG
tcacctcctgcatcatccct

SEQ ID NO: 69137 - DNA, 20 bp, Artificial Sequence
  Description of Artificial Sequence: Synthetic oligonucleotide
  Target: LAMA2; (-) strand; PAM type: NRG; PAM sequence: AAG
gagtgaaaattttattatta

SEQ ID NO: 69138 - DNA, 20 bp, Artificial Sequence
  Description of Artificial Sequence: Synthetic oligonucleotide
  Target: LAMA2; (-) strand; PAM type: NRG; PAM sequence: GAG
caattttcataattccaaat

SEQ ID NO: 69139 - DNA, 20 bp, Artificial Sequence
  Description of Artificial Sequence: Synthetic oligonucleotide
  Target: LAMA2; (-) strand; PAM type: NRG; PAM sequence: TGG
cagaatttaaatggcacagc

SEQ ID NO: 69140 - DNA, 20 bp, Artificial Sequence
  Description of Artificial Sequence: Synthetic oligonucleotide
  Target: LAMA2; (-) strand; PAM type: NRG; PAM sequence: CAG
tacccagaatttaaatggca

SEQ ID NO: 69141 - DNA, 20 bp, Artificial Sequence
  Description of Artificial Sequence: Synthetic oligonucleotide
  Target: LAMA2; (-) strand; PAM type: NRG; PAM sequence: TGG
acatatacccagaatttaaa

SEQ ID NO: 69142 - DNA, 20 bp, Artificial Sequence
  Description of Artificial Sequence: Synthetic oligonucleotide
  Target: LAMA2; (-) strand; PAM type: NRG; PAM sequence: CAG
caaatgaagaaacatatacc

SEQ ID NO: 69143 - DNA, 20 bp, Artificial Sequence
  Description of Artificial Sequence: Synthetic oligonucleotide
  Target: LAMA2; (-) strand; PAM type: NRG; PAM sequence: AAG
aaacttgaattttacaaatg

SEQ ID NO: 69144 - DNA, 20 bp, Artificial Sequence
  Description of Artificial Sequence: Synthetic oligonucleotide
  Target: LAMA2; (-) strand; PAM type: NRG; PAM sequence: TAG
gaatttagttcaaagaagcc

SEQ ID NO: 69145 - DNA, 20 bp, Artificial Sequence
  Description of Artificial Sequence: Synthetic oligonucleotide
  Target: LAMA2; (-) strand; PAM type: NRG; PAM sequence: AAG
aagaagaatttagttcaaag

SEQ ID NO: 69146 - DNA, 20 bp, Artificial Sequence
  Description of Artificial Sequence: Synthetic oligonucleotide
  Target: LAMA2; (-) strand; PAM type: NRG; PAM sequence: AAG
ggcaagaagaatttagttca

SEQ ID NO: 69147 - DNA, 20 bp, Artificial Sequence
  Description of Artificial Sequence: Synthetic oligonucleotide
  Target: LAMA2; (-) strand; PAM type: NRG; PAM sequence: TAG
gtctggtggcaagaagaatt

SEQ ID NO: 69148 - DNA, 20 bp, Artificial Sequence
  Description of Artificial Sequence: Synthetic oligonucleotide
  Target: LAMA2; (-) strand; PAM type: NRG; PAM sequence: AAG
ggttgttgtctggtggcaag

SEQ ID NO: 69149 - DNA, 20 bp, Artificial Sequence
  Description of Artificial Sequence: Synthetic oligonucleotide
  Target: LAMA2; (-) strand; PAM type: NRG; PAM sequence: AAG
gaaggttgttgtctggtggc

SEQ ID NO: 69150 - DNA, 20 bp, Artificial Sequence
  Description of Artificial Sequence: Synthetic oligonucleotide
  Target: LAMA2; (-) strand; PAM type: NRG; PAM sequence: TGG
agaagaaggttgttgtctgg

SEQ ID NO: 69151 - DNA, 20 bp, Artificial Sequence
  Description of Artificial Sequence: Synthetic oligonucleotide
  Target: LAMA2; (-) strand; PAM type: NRG; PAM sequence: TGG
tgaagaagaaggttgttgtc

SEQ ID NO: 69152 - DNA, 20 bp, Artificial Sequence
  Description of Artificial Sequence: Synthetic oligonucleotide
  Target: LAMA2; (-) strand; PAM type: NRG; PAM sequence: AGG
cctctaggtgatgaagaaga

SEQ ID NO: 69153 - DNA, 20 bp, Artificial Sequence
  Description of Artificial Sequence: Synthetic oligonucleotide
  Target: LAMA2; (-) strand; PAM type: NRG; PAM sequence: AAG
tcctctaggtgatgaagaag

SEQ ID NO: 69154 - DNA, 20 bp, Artificial Sequence
  Description of Artificial Sequence: Synthetic oligonucleotide
  Target: LAMA2; (-) strand; PAM type: NRG; PAM sequence: AAG
tgttcctctaggtgatgaag

SEQ ID NO: 69155 - DNA, 20 bp, Artificial Sequence
  Description of Artificial Sequence: Synthetic oligonucleotide
  Target: LAMA2; (-) strand; PAM type: NRG; PAM sequence: AAG
caatgttcctctaggtgatg

SEQ ID NO: 69156 - DNA, 20 bp, Artificial Sequence
  Description of Artificial Sequence: Synthetic oligonucleotide
  Target: LAMA2; (-) strand; PAM type: NRG; PAM sequence: AGG
gcttcaggcaatgttcctct

SEQ ID NO: 69157 - DNA, 20 bp, Artificial Sequence
  Description of Artificial Sequence: Synthetic oligonucleotide
  Target: LAMA2; (-) strand; PAM type: NRG; PAM sequence: TAG
ggcttcaggcaatgttcctc

SEQ ID NO: 69158 - DNA, 20 bp, Artificial Sequence
  Description of Artificial Sequence: Synthetic oligonucleotide
  Target: LAMA2; (-) strand; PAM type: NRG; PAM sequence: AGG
aggctgcttccttaggcttc

SEQ ID NO: 69159 - DNA, 20 bp, Artificial Sequence
  Description of Artificial Sequence: Synthetic oligonucleotide
  Target: LAMA2; (-) strand; PAM type: NRG; PAM sequence: CAG
aaggctgcttccttaggctt

SEQ ID NO: 69160 - DNA, 20 bp, Artificial Sequence
  Description of Artificial Sequence: Synthetic oligonucleotide
  Target: LAMA2; (-) strand; PAM type: NRG; PAM sequence: AGG
acagggaaggctgcttcctt

SEQ ID NO: 69161 - DNA, 20 bp, Artificial Sequence
  Description of Artificial Sequence: Synthetic oligonucleotide
  Target: LAMA2; (-) strand; PAM type: NRG; PAM sequence: TAG
cacagggaaggctgcttcct

SEQ ID NO: 69162 - DNA, 20 bp, Artificial Sequence
  Description of Artificial Sequence: Synthetic oligonucleotide
  Target: LAMA2; (-) strand; PAM type: NRG; PAM sequence: AGG
tcttctgtgtggcacaggga

SEQ ID NO: 69163 - DNA, 20 bp, Artificial Sequence
  Description of Artificial Sequence: Synthetic oligonucleotide
  Target: LAMA2; (-) strand; PAM type: NRG; PAM sequence: AAG
gtcttctgtgtggcacaggg

SEQ ID NO: 69164 - DNA, 20 bp, Artificial Sequence
  Description of Artificial Sequence: Synthetic oligonucleotide
  Target: LAMA2; (-) strand; PAM type: NRG; PAM sequence: GGG
ggggtcttctgtgtggcaca

SEQ ID NO: 69165 - DNA, 20 bp, Artificial Sequence
  Description of Artificial Sequence: Synthetic oligonucleotide
  Target: LAMA2; (-) strand; PAM type: NRG; PAM sequence: AGG
aggggtcttctgtgtggcac

SEQ ID NO: 69166 - DNA, 20 bp, Artificial Sequence
  Description of Artificial Sequence: Synthetic oligonucleotide
  Target: LAMA2; (-) strand; PAM type: NRG; PAM sequence: CAG
aaggggtcttctgtgtggca

SEQ ID NO: 69167 - DNA, 20 bp, Artificial Sequence
  Description of Artificial Sequence: Synthetic oligonucleotide
  Target: LAMA2; (-) strand; PAM type: NRG; PAM sequence: TGG
caattaaggggtcttctgtg

SEQ ID NO: 69168 - DNA, 20 bp, Artificial Sequence
  Description of Artificial Sequence: Synthetic oligonucleotide
  Target: LAMA2; (-) strand; PAM type: NRG; PAM sequence: GGG
aaattcattgaacaattaag

SEQ ID NO: 69169 - DNA, 20 bp, Artificial Sequence
  Description of Artificial Sequence: Synthetic oligonucleotide
  Target: LAMA2; (-) strand; PAM type: NRG; PAM sequence: GGG
gaaattcattgaacaattaa

SEQ ID NO: 69170 - DNA, 20 bp, Artificial Sequence
  Description of Artificial Sequence: Synthetic oligonucleotide
  Target: LAMA2; (-) strand; PAM type: NRG; PAM sequence: AGG
agaaattcattgaacaatta

SEQ ID NO: 69171 - DNA, 20 bp, Artificial Sequence
  Description of Artificial Sequence: Synthetic oligonucleotide
  Target: LAMA2; (-) strand; PAM type: NRG; PAM sequence: AAG
gagaaattcattgaacaatt

SEQ ID NO: 69172 - DNA, 20 bp, Artificial Sequence
  Description of Artificial Sequence: Synthetic oligonucleotide
  Target: LAMA2; (-) strand; PAM type: NRG; PAM sequence: GAG
gaagcactacacaagtcaat

SEQ ID NO: 69173 - DNA, 20 bp, Artificial Sequence
  Description of Artificial Sequence: Synthetic oligonucleotide
  Target: LAMA2; (-) strand; PAM type: NRG; PAM sequence: AAG
tttcttttgaagcactacac

SEQ ID NO: 69174 - DNA, 20 bp, Artificial Sequence
  Description of Artificial Sequence: Synthetic oligonucleotide
  Target: LAMA2; (-) strand; PAM type: NRG; PAM sequence: AAG
tgtgtaagtgttttcttttg

SEQ ID NO: 69175 - DNA, 20 bp, Artificial Sequence
  Description of Artificial Sequence: Synthetic oligonucleotide
  Target: LAMA2; (-) strand; PAM type: NRG; PAM sequence: AAG
tagaatcatgtttgatgtgt

SEQ ID NO: 69176 - DNA, 20 bp, Artificial Sequence
  Description of Artificial Sequence: Synthetic oligonucleotide
  Target: LAMA2; (-) strand; PAM type: NRG; PAM sequence: TAG
ataaatgaagaactttgact

SEQ ID NO: 69177 - DNA, 20 bp, Artificial Sequence
  Description of Artificial Sequence: Synthetic oligonucleotide
  Target: LAMA2; (-) strand; PAM type: NRG; PAM sequence: AAG
tctttaatctcatataaatg

SEQ ID NO: 69178 - DNA, 20 bp, Artificial Sequence
  Description of Artificial Sequence: Synthetic oligonucleotide
  Target: LAMA2; (-) strand; PAM type: NRG; PAM sequence: CAG
atttctcttgtacagttttc

SEQ ID NO: 69179 - DNA, 20 bp, Artificial Sequence
  Description of Artificial Sequence: Synthetic oligonucleotide
  Target: LAMA2; (-) strand; PAM type: NRG; PAM sequence: CAG
aggtgactatttctcttgta

SEQ ID NO: 69180 - DNA, 20 bp, Artificial Sequence
  Description of Artificial Sequence: Synthetic oligonucleotide
  Target: LAMA2; (-) strand; PAM type: NRG; PAM sequence: AGG
cccacaggcctgcaatcagc

SEQ ID NO: 69181 - DNA, 20 bp, Artificial Sequence
  Description of Artificial Sequence: Synthetic oligonucleotide
  Target: LAMA2; (-) strand; PAM type: NRG; PAM sequence: CAG
acccacaggcctgcaatcag

SEQ ID NO: 69182 - DNA, 20 bp, Artificial Sequence
  Description of Artificial Sequence: Synthetic oligonucleotide
  Target: LAMA2; (-) strand; PAM type: NRG; PAM sequence: CAG
gaaacccacaggcctgcaat

SEQ ID NO: 69183 - DNA, 20 bp, Artificial Sequence
  Description of Artificial Sequence: Synthetic oligonucleotide
  Target: LAMA2; (-) strand; PAM type: NRG; PAM sequence: AGG
agtttttccaagaaacccac

SEQ ID NO: 69184 - DNA, 20 bp, Artificial Sequence
  Description of Artificial Sequence: Synthetic oligonucleotide
  Target: LAMA2; (-) strand; PAM type: NRG; PAM sequence: CAG
gagtttttccaagaaaccca

SEQ ID NO: 69185 - DNA, 20 bp, Artificial Sequence
  Description of Artificial Sequence: Synthetic oligonucleotide
  Target: LAMA2; (-) strand; PAM type: NRG; PAM sequence: AAG
caaaattgctgagtttttcc

SEQ ID NO: 69186 - DNA, 20 bp, Artificial Sequence
  Description of Artificial Sequence: Synthetic oligonucleotide
  Target: LAMA2; (-) strand; PAM type: NRG; PAM sequence: GAG
cctggataagcaaaattgct

SEQ ID NO: 69187 - DNA, 20 bp, Artificial Sequence
  Description of Artificial Sequence: Synthetic oligonucleotide
  Target: LAMA2; (-) strand; PAM type: NRG; PAM sequence: AAG
gcaaaaagatagtcctggat

SEQ ID NO: 69188 - DNA, 20 bp, Artificial Sequence
  Description of Artificial Sequence: Synthetic oligonucleotide
  Target: LAMA2; (-) strand; PAM type: NRG; PAM sequence: TGG
actgggcaaaaagatagtcc

SEQ ID NO: 69189 - DNA, 20 bp, Artificial Sequence
  Description of Artificial Sequence: Synthetic oligonucleotide
  Target: LAMA2; (-) strand; PAM type: NRG; PAM sequence: TAG
agaggaactgggcaaaaaga

SEQ ID NO: 69190 - DNA, 20 bp, Artificial Sequence
  Description of Artificial Sequence: Synthetic oligonucleotide
  Target: LAMA2; (-) strand; PAM type: NRG; PAM sequence: AAG
aatcagaggaactgggcaaa

SEQ ID NO: 69191 - DNA, 20 bp, Artificial Sequence
  Description of Artificial Sequence: Synthetic oligonucleotide
  Target: LAMA2; (-) strand; PAM type: NRG; PAM sequence: GGG
ccttcagaatcagaggaact

SEQ ID NO: 69192 - DNA, 20 bp, Artificial Sequence
  Description of Artificial Sequence: Synthetic oligonucleotide
  Target: LAMA2; (-) strand; PAM type: NRG; PAM sequence: TGG
tccttcagaatcagaggaac

SEQ ID NO: 69193 - DNA, 20 bp, Artificial Sequence
  Description of Artificial Sequence: Synthetic oligonucleotide
  Target: LAMA2; (-) strand; PAM type: NRG; PAM sequence: AGG
tcaacttccttcagaatcag

SEQ ID NO: 69194 - DNA, 20 bp, Artificial Sequence
  Description of Artificial Sequence: Synthetic oligonucleotide
  Target: LAMA2; (-) strand; PAM type: NRG; PAM sequence: GAG
ttcaacttccttcagaatca

SEQ ID NO: 69195 - DNA, 20 bp, Artificial Sequence
  Description of Artificial Sequence: Synthetic oligonucleotide
  Target: LAMA2; (-) strand; PAM type: NRG; PAM sequence: CAG
ttttcaacttccttcagaat

SEQ ID NO: 69196 - DNA, 20 bp, Artificial Sequence
  Description of Artificial Sequence: Synthetic oligonucleotide
  Target: LAMA2; (-) strand; PAM type: NRG; PAM sequence: CAG
actatcttttcaacttcctt

SEQ ID NO: 69197 - DNA, 20 bp, Artificial Sequence
  Description of Artificial Sequence: Synthetic oligonucleotide
  Target: LAMA2; (-) strand; PAM type: NRG; PAM sequence: AGG
aaggatgttggatacagcaa

SEQ ID NO: 69198 - DNA, 20 bp, Artificial Sequence
  Description of Artificial Sequence: Synthetic oligonucleotide
  Target: LAMA2; (-) strand; PAM type: NRG; PAM sequence: AAG
aaaggatgttggatacagca

SEQ ID NO: 69199 - DNA, 20 bp, Artificial Sequence
  Description of Artificial Sequence: Synthetic oligonucleotide
  Target: LAMA2; (-) strand; PAM type: NRG; PAM sequence: CAG
gtagaaaaggatgttggata

SEQ ID NO: 69200 - DNA, 20 bp, Artificial Sequence
  Description of Artificial Sequence: Synthetic oligonucleotide
  Target: LAMA2; (-) strand; PAM type: NRG; PAM sequence: TGG
tcaaatgtagaaaaggatgt

SEQ ID NO: 69201 - DNA, 20 bp, Artificial Sequence
  Description of Artificial Sequence: Synthetic oligonucleotide
  Target: LAMA2; (-) strand; PAM type: NRG; PAM sequence: AGG
tcttaaatcaaatgtagaaa

SEQ ID NO: 69202 - DNA, 20 bp, Artificial Sequence
  Description of Artificial Sequence: Synthetic oligonucleotide
  Target: LAMA2; (-) strand; PAM type: NRG; PAM sequence: AAG
ttcttaaatcaaatgtagaa

SEQ ID NO: 69203 - DNA, 20 bp, Artificial Sequence
  Description of Artificial Sequence: Synthetic oligonucleotide
  Target: LAMA2; (-) strand; PAM type: NRG; PAM sequence: TAG
gacatttcttaaatcaaatg

SEQ ID NO: 69204 - DNA, 20 bp, Artificial Sequence
  Description of Artificial Sequence: Synthetic oligonucleotide
  Target: LAMA2; (-) strand; PAM type: NRG; PAM sequence: AAG
tcaatatcagtatcaataaa

SEQ ID NO: 69205 - DNA, 20 bp, Artificial Sequence
  Description of Artificial Sequence: Synthetic oligonucleotide
  Target: LAMA2; (-) strand; PAM type: NRG; PAM sequence: CAG
attttatgtattttcaatat

SEQ ID NO: 69206 - DNA, 20 bp, Artificial Sequence
  Description of Artificial Sequence: Synthetic oligonucleotide
  Target: LAMA2; (-) strand; PAM type: NRG; PAM sequence: TGG
gtaagatttatctcattctt

SEQ ID NO: 69207 - DNA, 20 bp, Artificial Sequence
  Description of Artificial Sequence: Synthetic oligonucleotide
  Target: LAMA2; (-) strand; PAM type: NRG; PAM sequence: AAG
tagaaatatgacacatatgt

SEQ ID NO: 69208 - DNA, 20 bp, Artificial Sequence
  Description of Artificial Sequence: Synthetic oligonucleotide
  Target: LAMA2; (-) strand; PAM type: NRG; PAM sequence: TAG
atgttggtcaaaaaaatcta

SEQ ID NO: 69209 - DNA, 20 bp, Artificial Sequence
  Description of Artificial Sequence: Synthetic oligonucleotide
  Target: LAMA2; (-) strand; PAM type: NRG; PAM sequence: TGG
aaattttcaaaataaaatgt

SEQ ID NO: 69210 - DNA, 20 bp, Artificial Sequence
  Description of Artificial Sequence: Synthetic oligonucleotide
  Target: LAMA2; (-) strand; PAM type: NRG; PAM sequence: AAG
atgattctttcaaccttacc

SEQ ID NO: 69211 - DNA, 20 bp, Artificial Sequence
  Description of Artificial Sequence: Synthetic oligonucleotide
  Target: LAMA2; (-) strand; PAM type: NRG; PAM sequence: TAG
gaatctagatttcgagtaca

SEQ ID NO: 69212 - DNA, 20 bp, Artificial Sequence
  Description of Artificial Sequence: Synthetic oligonucleotide
  Target: LAMA2; (-) strand; PAM type: NRG; PAM sequence: GAG
aattttagaatctagatttc

SEQ ID NO: 69213 - DNA, 20 bp, Artificial Sequence
  Description of Artificial Sequence: Synthetic oligonucleotide
  Target: LAMA2; (-) strand; PAM type: NRG; PAM sequence: TAG
cttggcctaattttagaatc

SEQ ID NO: 69214 - DNA, 20 bp, Artificial Sequence
  Description of Artificial Sequence: Synthetic oligonucleotide
  Target: LAMA2; (-) strand; PAM type: NRG; PAM sequence: TAG
cactatgcttggcctaattt

SEQ ID NO: 69215 - DNA, 20 bp, Artificial Sequence
  Description of Artificial Sequence: Synthetic oligonucleotide
  Target: LAMA2; (-) strand; PAM type: NRG; PAM sequence: TGG
caggcatcagccactatgct

SEQ ID NO: 69216 - DNA, 20 bp, Artificial Sequence
  Description of Artificial Sequence: Synthetic oligonucleotide
  Target: LAMA2; (-) strand; PAM type: NRG; PAM sequence: CAG
atccctgggattacaggcat

SEQ ID NO: 69217 - DNA, 20 bp, Artificial Sequence
  Description of Artificial Sequence: Synthetic oligonucleotide
  Target: LAMA2; (-) strand; PAM type: NRG; PAM sequence: AGG
tcccaaatccctgggattac

SEQ ID NO: 69218 - DNA, 20 bp, Artificial Sequence
  Description of Artificial Sequence: Synthetic oligonucleotide
  Target: LAMA2; (-) strand; PAM type: NRG; PAM sequence: CAG
ctcccaaatccctgggatta

SEQ ID NO: 69219 - DNA, 20 bp, Artificial Sequence
  Description of Artificial Sequence: Synthetic oligonucleotide
  Target: LAMA2; (-) strand; PAM type: NRG; PAM sequence: GGG
cctcagcctcccaaatccct

SEQ ID NO: 69220 - DNA, 20 bp, Artificial Sequence
  Description of Artificial Sequence: Synthetic oligonucleotide
  Target: LAMA2; (-) strand; PAM type: NRG; PAM sequence: TGG
acctcagcctcccaaatccc

SEQ ID NO: 69221 - DNA, 20 bp, Artificial Sequence
  Description of Artificial Sequence: Synthetic oligonucleotide
  Target: LAMA2; (-) strand; PAM type: NRG; PAM sequence: CAG
ctcaggcaatgctcccacct

SEQ ID NO: 69222 - DNA, 20 bp, Artificial Sequence
  Description of Artificial Sequence: Synthetic oligonucleotide
  Target: LAMA2; (-) strand; PAM type: NRG; PAM sequence: AGG
ggtcttaaaatcctgccctc

SEQ ID NO: 69223 - DNA, 20 bp, Artificial Sequence
  Description of Artificial Sequence: Synthetic oligonucleotide
  Target: LAMA2; (-) strand; PAM type: NRG; PAM sequence: CAG
tggtcttaaaatcctgccct

SEQ ID NO: 69224 - DNA, 20 bp, Artificial Sequence
  Description of Artificial Sequence: Synthetic oligonucleotide
  Target: LAMA2; (-) strand; PAM type: NRG; PAM sequence: TGG
tctcactatgttgcccatgc

SEQ ID NO: 69225 - DNA, 20 bp, Artificial Sequence
  Description of Artificial Sequence: Synthetic oligonucleotide
  Target: LAMA2; (-) strand; PAM type: NRG; PAM sequence: TGG
acttttttttggtagagaca

SEQ ID NO: 69226 - DNA, 20 bp, Artificial Sequence
  Description of Artificial Sequence: Synthetic oligonucleotide
  Target: LAMA2; (-) strand; PAM type: NRG; PAM sequence: GAG
ggccttacttttttttggta

SEQ ID NO: 69227 - DNA, 20 bp, Artificial Sequence
  Description of Artificial Sequence: Synthetic oligonucleotide
  Target: LAMA2; (-) strand; PAM type: NRG; PAM sequence: TAG
ctggccttacttttttttgg

SEQ ID NO: 69228 - DNA, 20 bp, Artificial Sequence
  Description of Artificial Sequence: Synthetic oligonucleotide
  Target: LAMA2; (-) strand; PAM type: NRG; PAM sequence: TGG
gtgctggccttacttttttt

SEQ ID NO: 69229 - DNA, 20 bp, Artificial Sequence
  Description of Artificial Sequence: Synthetic oligonucleotide
  Target: LAMA2; (-) strand; PAM type: NRG; PAM sequence: TGG
acaggcatgcagcaccgtgc

SEQ ID NO: 69230 - DNA, 20 bp, Artificial Sequence
  Description of Artificial Sequence: Synthetic oligonucleotide
  Target: LAMA2; (-) strand; PAM type: NRG; PAM sequence: CAG
tagctgtaactacaggcatg

SEQ ID NO: 69231 - DNA, 20 bp, Artificial Sequence
  Description of Artificial Sequence: Synthetic oligonucleotide
  Target: LAMA2; (-) strand; PAM type: NRG; PAM sequence: AGG
tcctgagtagctgtaactac

SEQ ID NO: 69232 - DNA, 20 bp, Artificial Sequence
  Description of Artificial Sequence: Synthetic oligonucleotide
  Target: LAMA2; (-) strand; PAM type: NRG; PAM sequence: CAG
ttcctgagtagctgtaacta

SEQ ID NO: 69233 - DNA, 20 bp, Artificial Sequence
  Description of Artificial Sequence: Synthetic oligonucleotide
  Target: LAMA2; (-) strand; PAM type: NRG; PAM sequence: TAG
tcctgcctcagcttcctgag

SEQ ID NO: 69234 - DNA, 20 bp, Artificial Sequence
  Description of Artificial Sequence: Synthetic oligonucleotide
  Target: LAMA2; (-) strand; PAM type: NRG; PAM sequence: GAG
tcctcctgcctcagcttcct

SEQ ID NO: 69235 - DNA, 20 bp, Artificial Sequence
  Description of Artificial Sequence: Synthetic oligonucleotide
  Target: LAMA2; (-) strand; PAM type: NRG; PAM sequence: CAG
ctcaagcaatcctcctgcct

SEQ ID NO: 69236 - DNA, 20 bp, Artificial Sequence
  Description of Artificial Sequence: Synthetic oligonucleotide
  Target: LAMA2; (-) strand; PAM type: NRG; PAM sequence: AAG
aaccttgaactcctgggctc

SEQ ID NO: 69237 - DNA, 20 bp, Artificial Sequence
  Description of Artificial Sequence: Synthetic oligonucleotide
  Target: LAMA2; (-) strand; PAM type: NRG; PAM sequence: GGG
cactgtaaccttgaactcct

SEQ ID NO: 69238 - DNA, 20 bp, Artificial Sequence
  Description of Artificial Sequence: Synthetic oligonucleotide
  Target: LAMA2; (-) strand; PAM type: NRG; PAM sequence: TGG
tcactgtaaccttgaactcc

SEQ ID NO: 69239 - DNA, 20 bp, Artificial Sequence
  Description of Artificial Sequence: Synthetic oligonucleotide
  Target: LAMA2; (-) strand; PAM type: NRG; PAM sequence: TAG
ttgcccaggttggagtgcaa

SEQ ID NO: 69240 - DNA, 20 bp, Artificial Sequence
  Description of Artificial Sequence: Synthetic oligonucleotide
  Target: LAMA2; (-) strand; PAM type: NRG; PAM sequence: GAG
tcattctgttgcccaggttg

SEQ ID NO: 69241 - DNA, 20 bp, Artificial Sequence
  Description of Artificial Sequence: Synthetic oligonucleotide
  Target: LAMA2; (-) strand; PAM type: NRG; PAM sequence: TGG
tctcattctgttgcccaggt

SEQ ID NO: 69242 - DNA, 20 bp, Artificial Sequence
  Description of Artificial Sequence: Synthetic oligonucleotide
  Target: LAMA2; (-) strand; PAM type: NRG; PAM sequence: AGG
agggtctcattctgttgccc

SEQ ID NO: 69243 - DNA, 20 bp, Artificial Sequence
  Description of Artificial Sequence: Synthetic oligonucleotide
  Target: LAMA2; (-) strand; PAM type: NRG; PAM sequence: CAG
cagggtctcattctgttgcc

SEQ ID NO: 69244 - DNA, 20 bp, Artificial Sequence
  Description of Artificial Sequence: Synthetic oligonucleotide
  Target: LAMA2; (-) strand; PAM type: NRG; PAM sequence: GGG
ttttttttttttttgagaca

SEQ ID NO: 69245 - DNA, 20 bp, Artificial Sequence
  Description of Artificial Sequence: Synthetic oligonucleotide
  Target: LAMA2; (-) strand; PAM type: NRG; PAM sequence: AGG
attttttttttttttgagac

SEQ ID NO: 69246 - DNA, 20 bp, Artificial Sequence
  Description of Artificial Sequence: Synthetic oligonucleotide
  Target: LAMA2; (-) strand; PAM type: NRG; PAM sequence: CAG
tattttttttttttttgaga

SEQ ID NO: 69247 - DNA, 20 bp, Artificial Sequence
  Description of Artificial Sequence: Synthetic oligonucleotide
  Target: LAMA2; (-) strand; PAM type: NRG; PAM sequence: GAG
taactatttttttttttttt

SEQ ID NO: 69248 - DNA, 20 bp, Artificial Sequence
  Description of Artificial Sequence: Synthetic oligonucleotide
  Target: LAMA2; (-) strand; PAM type: NRG; PAM sequence: TGG
caggcatgagtcaccacgcc

SEQ ID NO: 69249 - DNA, 20 bp, Artificial Sequence
  Description of Artificial Sequence: Synthetic oligonucleotide
  Target: LAMA2; (-) strand; PAM type: NRG; PAM sequence: GAG
agtgttaggattacaggcat

SEQ ID NO: 69250 - DNA, 20 bp, Artificial Sequence
  Description of Artificial Sequence: Synthetic oligonucleotide
  Target: LAMA2; (-) strand; PAM type: NRG; PAM sequence: AGG
tctgaaagtgttaggattac

SEQ ID NO: 69251 - DNA, 20 bp, Artificial Sequence
  Description of Artificial Sequence: Synthetic oligonucleotide
  Target: LAMA2; (-) strand; PAM type: NRG; PAM sequence: CAG
ctctgaaagtgttaggatta

SEQ ID NO: 69252 - DNA, 20 bp, Artificial Sequence
  Description of Artificial Sequence: Synthetic oligonucleotide
  Target: LAMA2; (-) strand; PAM type: NRG; PAM sequence: AGG
cctcagcctctgaaagtgtt

SEQ ID NO: 69253 - DNA, 20 bp, Artificial Sequence
  Description of Artificial Sequence: Synthetic oligonucleotide
  Target: LAMA2; (-) strand; PAM type: NRG; PAM sequence: TAG
gcctcagcctctgaaagtgt

SEQ ID NO: 69254 - DNA, 20 bp, Artificial Sequence
  Description of Artificial Sequence: Synthetic oligonucleotide
  Target: LAMA2; (-) strand; PAM type: NRG; PAM sequence: AAG
ccacctgcctcagcctctga

SEQ ID NO: 69255 - DNA, 20 bp, Artificial Sequence
  Description of Artificial Sequence: Synthetic oligonucleotide
  Target: LAMA2; (-) strand; PAM type: NRG; PAM sequence: CAG
ctcaactgatccacctgcct

SEQ ID NO: 69256 - DNA, 20 bp, Artificial Sequence
  Description of Artificial Sequence: Synthetic oligonucleotide
  Target: LAMA2; (-) strand; PAM type: NRG; PAM sequence: TGG
ttttgccatatcagccaggc

SEQ ID NO: 69257 - DNA, 20 bp, Artificial Sequence
  Description of Artificial Sequence: Synthetic oligonucleotide
  Target: LAMA2; (-) strand; PAM type: NRG; PAM sequence: AGG
ggggttttgccatatcagcc

SEQ ID NO: 69258 - DNA, 20 bp, Artificial Sequence
  Description of Artificial Sequence: Synthetic oligonucleotide
  Target: LAMA2; (-) strand; PAM type: NRG; PAM sequence: CAG
cggggttttgccatatcagc

SEQ ID NO: 69259 - DNA, 20 bp, Artificial Sequence
  Description of Artificial Sequence: Synthetic oligonucleotide
  Target: LAMA2; (-) strand; PAM type: NRG; PAM sequence: CAG
gagacggggttttgccatat

SEQ ID NO: 69260 - DNA, 20 bp, Artificial Sequence
  Description of Artificial Sequence: Synthetic oligonucleotide
  Target: LAMA2; (-) strand; PAM type: NRG; PAM sequence: GGG
ttgtatttttagtagagacg

SEQ ID NO: 69261 - DNA, 20 bp, Artificial Sequence
  Description of Artificial Sequence: Synthetic oligonucleotide
  Target: LAMA2; (-) strand; PAM type: NRG; PAM sequence: GGG
tttgtatttttagtagagac

SEQ ID NO: 69262 - DNA, 20 bp, Artificial Sequence
  Description of Artificial Sequence: Synthetic oligonucleotide
  Target: LAMA2; (-) strand; PAM type: NRG; PAM sequence: CGG
ttttgtatttttagtagaga

SEQ ID NO: 69263 - DNA, 20 bp, Artificial Sequence
  Description of Artificial Sequence: Synthetic oligonucleotide
  Target: LAMA2; (-) strand; PAM type: NRG; PAM sequence: GAG
taatttttgtatttttagta

SEQ ID NO: 69264 - DNA, 20 bp, Artificial Sequence
  Description of Artificial Sequence: Synthetic oligonucleotide
  Target: LAMA2; (-) strand; PAM type: NRG; PAM sequence: TAG
gctaatttttgtatttttag

SEQ ID NO: 69265 - DNA, 20 bp, Artificial Sequence
  Description of Artificial Sequence: Synthetic oligonucleotide
  Target: LAMA2; (-) strand; PAM type: NRG; PAM sequence: TAG
ccagctaatttttgtatttt

SEQ ID NO: 69266 - DNA, 20 bp, Artificial Sequence
  Description of Artificial Sequence: Synthetic oligonucleotide
  Target: LAMA2; (-) strand; PAM type: NRG; PAM sequence: CAG
caggagcctgccaccacgcc

SEQ ID NO: 69267 - DNA, 20 bp, Artificial Sequence
  Description of Artificial Sequence: Synthetic oligonucleotide
  Target: LAMA2; (-) strand; PAM type: NRG; PAM sequence: GAG
ccgagtagctgggattacag

SEQ ID NO: 69268 - DNA, 20 bp, Artificial Sequence
  Description of Artificial Sequence: Synthetic oligonucleotide
  Target: LAMA2; (-) strand; PAM type: NRG; PAM sequence: AGG
tcccgagtagctgggattac

SEQ ID NO: 69269 - DNA, 20 bp, Artificial Sequence
  Description of Artificial Sequence: Synthetic oligonucleotide
  Target: LAMA2; (-) strand; PAM type: NRG; PAM sequence: CAG
ctcccgagtagctgggatta

SEQ ID NO: 69270 - DNA, 20 bp, Artificial Sequence
  Description of Artificial Sequence: Synthetic oligonucleotide
  Target: LAMA2; (-) strand; PAM type: NRG; PAM sequence: GGG
cctcagcctcccgagtagct

SEQ ID NO: 69271 - DNA, 20 bp, Artificial Sequence
  Description of Artificial Sequence: Synthetic oligonucleotide
  Target: LAMA2; (-) strand; PAM type: NRG; PAM sequence: TGG
gcctcagcctcccgagtagc

SEQ ID NO: 69272 - DNA, 20 bp, Artificial Sequence
  Description of Artificial Sequence: Synthetic oligonucleotide
  Target: LAMA2; (-) strand; PAM type: NRG; PAM sequence: TAG
tcctgcctcagcctcccgag

SEQ ID NO: 69273 - DNA, 20 bp, Artificial Sequence
  Description of Artificial Sequence: Synthetic oligonucleotide
  Target: LAMA2; (-) strand; PAM type: NRG; PAM sequence: GAG
ttctcctgcctcagcctccc

SEQ ID NO: 69274 - DNA, 20 bp, Artificial Sequence
  Description of Artificial Sequence: Synthetic oligonucleotide
  Target: LAMA2; (-) strand; PAM type: NRG; PAM sequence: CAG
ttcaagtgattctcctgcct

SEQ ID NO: 69275 - DNA, 20 bp, Artificial Sequence
  Description of Artificial Sequence: Synthetic oligonucleotide
  Target: LAMA2; (-) strand; PAM type: NRG; PAM sequence: AAG
aacctccgcctctcaggttc

SEQ ID NO: 69276 - DNA, 20 bp, Artificial Sequence
  Description of Artificial Sequence: Synthetic oligonucleotide
  Target: LAMA2; (-) strand; PAM type: NRG; PAM sequence: AGG
cactgcaacctccgcctctc

SEQ ID NO: 69277 - DNA, 20 bp, Artificial Sequence
  Description of Artificial Sequence: Synthetic oligonucleotide
  Target: LAMA2; (-) strand; PAM type: NRG; PAM sequence: CAG
tcactgcaacctccgcctct

SEQ ID NO: 69278 - DNA, 20 bp, Artificial Sequence
  Description of Artificial Sequence: Synthetic oligonucleotide
  Target: LAMA2; (-) strand; PAM type: NRG; PAM sequence: TAG
ttgcccaggatggagtgcag

SEQ ID NO: 69279 - DNA, 20 bp, Artificial Sequence
  Description of Artificial Sequence: Synthetic oligonucleotide
  Target: LAMA2; (-) strand; PAM type: NRG; PAM sequence: CAG
ctgttgcccaggatggagtg

SEQ ID NO: 69280 - DNA, 20 bp, Artificial Sequence
  Description of Artificial Sequence: Synthetic oligonucleotide
  Target: LAMA2; (-) strand; PAM type: NRG; PAM sequence: GAG
tcgctctgttgcccaggatg

SEQ ID NO: 69281 - DNA, 20 bp, Artificial Sequence
  Description of Artificial Sequence: Synthetic oligonucleotide
  Target: LAMA2; (-) strand; PAM type: NRG; PAM sequence: TGG
tctcgctctgttgcccagga

SEQ ID NO: 69282 - DNA, 20 bp, Artificial Sequence
  Description of Artificial Sequence: Synthetic oligonucleotide
  Target: LAMA2; (-) strand; PAM type: NRG; PAM sequence: AGG
ggagtctcgctctgttgccc

SEQ ID NO: 69283 - DNA, 20 bp, Artificial Sequence
  Description of Artificial Sequence: Synthetic oligonucleotide
  Target: LAMA2; (-) strand; PAM type: NRG; PAM sequence: CAG
tggagtctcgctctgttgcc

SEQ ID NO: 69284 - DNA, 20 bp, Artificial Sequence
  Description of Artificial Sequence: Synthetic oligonucleotide
  Target: LAMA2; (-) strand; PAM type: NRG; PAM sequence: GAG
ttattactattattgacatg

SEQ ID NO: 69285 - DNA, 20 bp, Artificial Sequence
  Description of Artificial Sequence: Synthetic oligonucleotide
  Target: LAMA2; (-) strand; PAM type: NRG; PAM sequence: TGG
tattattactattattgaca

SEQ ID NO: 69286 - DNA, 20 bp, Artificial Sequence
  Description of Artificial Sequence: Synthetic oligonucleotide
  Target: LAMA2; (-) strand; PAM type: NRG; PAM sequence: AAG
agatggatagatatgtgata

SEQ ID NO: 69287 - DNA, 20 bp, Artificial Sequence
  Description of Artificial Sequence: Synthetic oligonucleotide
  Target: LAMA2; (-) strand; PAM type: NRG; PAM sequence: TAG
ggtagatatgttcagatgga

SEQ ID NO: 69288 - DNA, 20 bp, Artificial Sequence
  Description of Artificial Sequence: Synthetic oligonucleotide
  Target: LAMA2; (-) strand; PAM type: NRG; PAM sequence: TGG
tatgggtagatatgttcaga

SEQ ID NO: 69289 - DNA, 20 bp, Artificial Sequence
  Description of Artificial Sequence: Synthetic oligonucleotide
  Target: LAMA2; (-) strand; PAM type: NRG; PAM sequence: CAG
gatttatgggtagatatgtt

SEQ ID NO: 69290 - DNA, 20 bp, Artificial Sequence
  Description of Artificial Sequence: Synthetic oligonucleotide
  Target: LAMA2; (-) strand; PAM type: NRG; PAM sequence: TAG
agataaaatggatttatggg

SEQ ID NO: 69291 - DNA, 20 bp, Artificial Sequence
  Description of Artificial Sequence: Synthetic oligonucleotide
  Target: LAMA2; (-) strand; PAM type: NRG; PAM sequence: GGG
aaaagataaaatggatttat

SEQ ID NO: 69292 - DNA, 20 bp, Artificial Sequence
  Description of Artificial Sequence: Synthetic oligonucleotide
  Target: LAMA2; (-) strand; PAM type: NRG; PAM sequence: TGG
taaaagataaaatggattta

SEQ ID NO: 69293 - DNA, 20 bp, Artificial Sequence
  Description of Artificial Sequence: Synthetic oligonucleotide
  Target: LAMA2; (-) strand; PAM type: NRG; PAM sequence: TGG
cagtatattaaaagataaaa

SEQ ID NO: 69294 - DNA, 20 bp, Artificial Sequence
  Description of Artificial Sequence: Synthetic oligonucleotide
  Target: LAMA2; (-) strand; PAM type: NRG; PAM sequence: AAG
tgaggtttgcagtatattaa

SEQ ID NO: 69295 - DNA, 20 bp, Artificial Sequence
  Description of Artificial Sequence: Synthetic oligonucleotide
  Target: LAMA2; (-) strand; PAM type: NRG; PAM sequence: CAG
gtgtataggaatgaggtttg

SEQ ID NO: 69296 - DNA, 20 bp, Artificial Sequence
  Description of Artificial Sequence: Synthetic oligonucleotide
  Target: LAMA2; (-) strand; PAM type: NRG; PAM sequence: AGG
tgatcatgtgtataggaatg

SEQ ID NO: 69297 - DNA, 20 bp, Artificial Sequence
  Description of Artificial Sequence: Synthetic oligonucleotide
  Target: LAMA2; (-) strand; PAM type: NRG; PAM sequence: GAG
atgatcatgtgtataggaat

SEQ ID NO: 69298 - DNA, 20 bp, Artificial Sequence
  Description of Artificial Sequence: Synthetic oligonucleotide
  Target: LAMA2; (-) strand; PAM type: NRG; PAM sequence: AGG
atattcatgatcatgtgtat

SEQ ID NO: 69299 - DNA, 20 bp, Artificial Sequence
  Description of Artificial Sequence: Synthetic oligonucleotide
  Target: LAMA2; (-) strand; PAM type: NRG; PAM sequence: TAG
gatattcatgatcatgtgta

SEQ ID NO: 69300 - DNA, 20 bp, Artificial Sequence
  Description of Artificial Sequence: Synthetic oligonucleotide
  Target: LAMA2; (-) strand; PAM type: NRG; PAM sequence: CAG
aaattagcagtatttaactc

SEQ ID NO: 69301 - DNA, 20 bp, Artificial Sequence
  Description of Artificial Sequence: Synthetic oligonucleotide
  Target: LAMA2; (-) strand; PAM type: NRG; PAM sequence: CAG
ttgagcttgaaaaaaattag

SEQ ID NO: 69302 - DNA, 20 bp, Artificial Sequence
  Description of Artificial Sequence: Synthetic oligonucleotide
  Target: LAMA2; (-) strand; PAM type: NRG; PAM sequence: TAG
aatttgagcttgaaaaaaat

SEQ ID NO: 69303 - DNA, 20 bp, Artificial Sequence
  Description of Artificial Sequence: Synthetic oligonucleotide
  Target: LAMA2; (-) strand; PAM type: NRG; PAM sequence: GAG
atttcaatgtagataaattt

SEQ ID NO: 69304 - DNA, 20 bp, Artificial Sequence
  Description of Artificial Sequence: Synthetic oligonucleotide
  Target: LAMA2; (-) strand; PAM type: NRG; PAM sequence: TAG
ataatttatgcatttcaatg

SEQ ID NO: 69305 - DNA, 20 bp, Artificial Sequence
  Description of Artificial Sequence: Synthetic oligonucleotide
  Target: LAMA2; (-) strand; PAM type: NRG; PAM sequence: GGG
cagtgagtgaatgttacacg

SEQ ID NO: 69306 - DNA, 20 bp, Artificial Sequence
  Description of Artificial Sequence: Synthetic oligonucleotide
  Target: LAMA2; (-) strand; PAM type: NRG; PAM sequence: GGG
tcagtgagtgaatgttacac

SEQ ID NO: 69307 - DNA, 20 bp, Artificial Sequence
  Description of Artificial Sequence: Synthetic oligonucleotide
  Target: LAMA2; (-) strand; PAM type: NRG; PAM sequence: CGG
ttcagtgagtgaatgttaca

SEQ ID NO: 69308 - DNA, 20 bp, Artificial Sequence
  Description of Artificial Sequence: Synthetic oligonucleotide
  Target: LAMA2; (-) strand; PAM type: NRG; PAM sequence: GAG
aattaaatattacattcagt

SEQ ID NO: 69309 - DNA, 20 bp, Artificial Sequence
  Description of Artificial Sequence: Synthetic oligonucleotide
  Target: LAMA2; (-) strand; PAM type: NRG; PAM sequence: CAG
tgttaattaaatattacatt

SEQ ID NO: 69310 - DNA, 20 bp, Artificial Sequence
  Description of Artificial Sequence: Synthetic oligonucleotide
  Target: LAMA2; (-) strand; PAM type: NRG; PAM sequence: TGG
gatagcagtttgtattataa

SEQ ID NO: 69311 - DNA, 20 bp, Artificial Sequence
  Description of Artificial Sequence: Synthetic oligonucleotide
  Target: LAMA2; (-) strand; PAM type: NRG; PAM sequence: CAG
gatgataatattcttgatag

SEQ ID NO: 69312 - DNA, 20 bp, Artificial Sequence
  Description of Artificial Sequence: Synthetic oligonucleotide
  Target: LAMA2; (-) strand; PAM type: NRG; PAM sequence: TAG
gatgatgataatattcttga

SEQ ID NO: 69313 - DNA, 20 bp, Artificial Sequence
  Description of Artificial Sequence: Synthetic oligonucleotide
  Target: LAMA2; (-) strand; PAM type: NRG; PAM sequence: GGG
gaggcataaagaaaatttct

SEQ ID NO: 69314 - DNA, 20 bp, Artificial Sequence
  Description of Artificial Sequence: Synthetic oligonucleotide
  Target: LAMA2; (-) strand; PAM type: NRG; PAM sequence: TGG
agaggcataaagaaaatttc

SEQ ID NO: 69315 - DNA, 20 bp, Artificial Sequence
  Description of Artificial Sequence: Synthetic oligonucleotide
  Target: LAMA2; (-) strand; PAM type: NRG; PAM sequence: AAG
actgactgggaagaggcata

SEQ ID NO: 69316 - DNA, 20 bp, Artificial Sequence
  Description of Artificial Sequence: Synthetic oligonucleotide
  Target: LAMA2; (-) strand; PAM type: NRG; PAM sequence: AGG
ggcagagactgactgggaag

SEQ ID NO: 69317 - DNA, 20 bp, Artificial Sequence
  Description of Artificial Sequence: Synthetic oligonucleotide
  Target: LAMA2; (-) strand; PAM type: NRG; PAM sequence: GAG
gggcagagactgactgggaa

SEQ ID NO: 69318 - DNA, 20 bp, Artificial Sequence
  Description of Artificial Sequence: Synthetic oligonucleotide
  Target: LAMA2; (-) strand; PAM type: NRG; PAM sequence: AAG
gggggcagagactgactggg

SEQ ID NO: 69319 - DNA, 20 bp, Artificial Sequence
  Description of Artificial Sequence: Synthetic oligonucleotide
  Target: LAMA2; (-) strand; PAM type: NRG; PAM sequence: GGG
cttgggggcagagactgact

SEQ ID NO: 69320 - DNA, 20 bp, Artificial Sequence
  Description of Artificial Sequence: Synthetic oligonucleotide
  Target: LAMA2; (-) strand; PAM type: NRG; PAM sequence: TGG
gcttgggggcagagactgac

SEQ ID NO: 69321 - DNA, 20 bp, Artificial Sequence
  Description of Artificial Sequence: Synthetic oligonucleotide
  Target: LAMA2; (-) strand; PAM type: NRG; PAM sequence: GAG
cctttgggagcttgggggca

SEQ ID NO: 69322 - DNA, 20 bp, Artificial Sequence
  Description of Artificial Sequence: Synthetic oligonucleotide
  Target: LAMA2; (-) strand; PAM type: NRG; PAM sequence: CAG
tgcctttgggagcttggggg

SEQ ID NO: 69323 - DNA, 20 bp, Artificial Sequence
  Description of Artificial Sequence: Synthetic oligonucleotide
  Target: LAMA2; (-) strand; PAM type: NRG; PAM sequence: GGG
ggttgcctttgggagcttgg

SEQ ID NO: 69324 - DNA, 20 bp, Artificial Sequence
  Description of Artificial Sequence: Synthetic oligonucleotide
  Target: LAMA2; (-) strand; PAM type: NRG; PAM sequence: GGG
tggttgcctttgggagcttg

SEQ ID NO: 69325 - DNA, 20 bp, Artificial Sequence
  Description of Artificial Sequence: Synthetic oligonucleotide
  Target: LAMA2; (-) strand; PAM type: NRG; PAM sequence: GGG
atggttgcctttgggagctt

SEQ ID NO: 69326 - DNA, 20 bp, Artificial Sequence
  Description of Artificial Sequence: Synthetic oligonucleotide
  Target: LAMA2; (-) strand; PAM type: NRG; PAM sequence: TGG
aatggttgcctttgggagct

SEQ ID NO: 69327 - DNA, 20 bp, Artificial Sequence
  Description of Artificial Sequence: Synthetic oligonucleotide
  Target: LAMA2; (-) strand; PAM type: NRG; PAM sequence: GAG
ggaaaaatggttgcctttgg

SEQ ID NO: 69328 - DNA, 20 bp, Artificial Sequence
  Description of Artificial Sequence: Synthetic oligonucleotide
  Target: LAMA2; (-) strand; PAM type: NRG; PAM sequence: GGG
caggaaaaatggttgccttt

SEQ ID NO: 69329 - DNA, 20 bp, Artificial Sequence
  Description of Artificial Sequence: Synthetic oligonucleotide
  Target: LAMA2; (-) strand; PAM type: NRG; PAM sequence: TGG
acaggaaaaatggttgcctt

SEQ ID NO: 69330 - DNA, 20 bp, Artificial Sequence
  Description of Artificial Sequence: Synthetic oligonucleotide
  Target: LAMA2; (-) strand; PAM type: NRG; PAM sequence: TGG
ggaaaataaaacaggaaaaa

SEQ ID NO: 69331 - DNA, 20 bp, Artificial Sequence
  Description of Artificial Sequence: Synthetic oligonucleotide
  Target: LAMA2; (-) strand; PAM type: NRG; PAM sequence: AGG
atcttttaggaaaataaaac

SEQ ID NO: 69332 - DNA, 20 bp, Artificial Sequence
  Description of Artificial Sequence: Synthetic oligonucleotide
  Target: LAMA2; (-) strand; PAM type: NRG; PAM sequence: CAG
aatcttttaggaaaataaaa

SEQ ID NO: 69333 - DNA, 20 bp, Artificial Sequence
  Description of Artificial Sequence: Synthetic oligonucleotide
  Target: LAMA2; (-) strand; PAM type: NRG; PAM sequence: AGG
ttaaacatacctaatctttt

SEQ ID NO: 69334 - DNA, 20 bp, Artificial Sequence
  Description of Artificial Sequence: Synthetic oligonucleotide
  Target: LAMA2; (-) strand; PAM type: NRG; PAM sequence: TAG
tttaaacatacctaatcttt

SEQ ID NO: 69335 - DNA, 20 bp, Artificial Sequence
  Description of Artificial Sequence: Synthetic oligonucleotide
  Target: LAMA2; (-) strand; PAM type: NRG; PAM sequence: TGG
tataagtttacaccaaagag

SEQ ID NO: 69336 - DNA, 20 bp, Artificial Sequence
  Description of Artificial Sequence: Synthetic oligonucleotide
  Target: LAMA2; (-) strand; PAM type: NRG; PAM sequence: GAG
taatataagtttacaccaaa

SEQ ID NO: 69337 - DNA, 20 bp, Artificial Sequence
  Description of Artificial Sequence: Synthetic oligonucleotide
  Target: LAMA2; (-) strand; PAM type: NRG; PAM sequence: AAG
cataatataagtttacacca

SEQ ID NO: 69338 - DNA, 20 bp, Artificial Sequence
  Description of Artificial Sequence: Synthetic oligonucleotide
  Target: LAMA2; (-) strand; PAM type: NRG; PAM sequence: AAG
aggattatgccacataatat

SEQ ID NO: 69339 - DNA, 20 bp, Artificial Sequence
  Description of Artificial Sequence: Synthetic oligonucleotide
  Target: LAMA2; (-) strand; PAM type: NRG; PAM sequence: AGG
caatgctgatgactccaaaa

SEQ ID NO: 69340 - DNA, 20 bp, Artificial Sequence
  Description of Artificial Sequence: Synthetic oligonucleotide
  Target: LAMA2; (-) strand; PAM type: NRG; PAM sequence: AAG
acaatgctgatgactccaaa

SEQ ID NO: 69341 - DNA, 20 bp, Artificial Sequence
  Description of Artificial Sequence: Synthetic oligonucleotide
  Target: LAMA2; (-) strand; PAM type: NRG; PAM sequence: TGG
aatactattcaacataaaaa

SEQ ID NO: 69342 - DNA, 20 bp, Artificial Sequence
  Description of Artificial Sequence: Synthetic oligonucleotide
  Target: LAMA2; (-) strand; PAM type: NRG; PAM sequence: TGG
gggaaatgatacaaaaactg

SEQ ID NO: 69343 - DNA, 20 bp, Artificial Sequence
  Description of Artificial Sequence: Synthetic oligonucleotide
  Target: LAMA2; (-) strand; PAM type: NRG; PAM sequence: GGG
ccttaggtttccatgaatgg

SEQ ID NO: 69344 - DNA, 20 bp, Artificial Sequence
  Description of Artificial Sequence: Synthetic oligonucleotide
  Target: LAMA2; (-) strand; PAM type: NRG; PAM sequence: GGG
accttaggtttccatgaatg

SEQ ID NO: 69345 - DNA, 20 bp, Artificial Sequence
  Description of Artificial Sequence: Synthetic oligonucleotide
  Target: LAMA2; (-) strand; PAM type: NRG; PAM sequence: GGG
caccttaggtttccatgaat

SEQ ID NO: 69346 - DNA, 20 bp, Artificial Sequence
  Description of Artificial Sequence: Synthetic oligonucleotide
  Target: LAMA2; (-) strand; PAM type: NRG; PAM sequence: TGG
acaccttaggtttccatgaa

SEQ ID NO: 69347 - DNA, 20 bp, Artificial Sequence
  Description of Artificial Sequence: Synthetic oligonucleotide
  Target: LAMA2; (-) strand; PAM type: NRG; PAM sequence: AGG
gccaaacctggaaacacctt

SEQ ID NO: 69348 - DNA, 20 bp, Artificial Sequence
  Description of Artificial Sequence: Synthetic oligonucleotide
  Target: LAMA2; (-) strand; PAM type: NRG; PAM sequence: TAG
agccaaacctggaaacacct

SEQ ID NO: 69349 - DNA, 20 bp, Artificial Sequence
  Description of Artificial Sequence: Synthetic oligonucleotide
  Target: LAMA2; (-) strand; PAM type: NRG; PAM sequence: TGG
tttatcataatagccaaacc

SEQ ID NO: 69350 - DNA, 20 bp, Artificial Sequence
  Description of Artificial Sequence: Synthetic oligonucleotide
  Target: LAMA2; (-) strand; PAM type: NRG; PAM sequence: TAG
catagaagtttttatcataa

SEQ ID NO: 69351 - DNA, 20 bp, Artificial Sequence
  Description of Artificial Sequence: Synthetic oligonucleotide
  Target: LAMA2; (-) strand; PAM type: NRG; PAM sequence: AAG
ctaaacaaaaatgttcatag

SEQ ID NO: 69352 - DNA, 20 bp, Artificial Sequence
  Description of Artificial Sequence: Synthetic oligonucleotide
  Target: LAMA2; (-) strand; PAM type: NRG; PAM sequence: TAG
gacctaaacaaaaatgttca

SEQ ID NO: 69353 - DNA, 20 bp, Artificial Sequence
  Description of Artificial Sequence: Synthetic oligonucleotide
  Target: LAMA2; (-) strand; PAM type: NRG; PAM sequence: AAG
tgacattacatgtccttaaa

SEQ ID NO: 69354 - DNA, 20 bp, Artificial Sequence
  Description of Artificial Sequence: Synthetic oligonucleotide
  Target: LAMA2; (-) strand; PAM type: NRG; PAM sequence: AAG
cccctgttaggtacatatcc

SEQ ID NO: 69355 - DNA, 20 bp, Artificial Sequence
  Description of Artificial Sequence: Synthetic oligonucleotide
  Target: LAMA2; (-) strand; PAM type: NRG; PAM sequence: AGG
ccttcaaattttcccctgtt

SEQ ID NO: 69356 - DNA, 20 bp, Artificial Sequence
  Description of Artificial Sequence: Synthetic oligonucleotide
  Target: LAMA2; (-) strand; PAM type: NRG; PAM sequence: TAG
tccttcaaattttcccctgt

SEQ ID NO: 69357 - DNA, 20 bp, Artificial Sequence
  Description of Artificial Sequence: Synthetic oligonucleotide
  Target: LAMA2; (-) strand; PAM type: NRG; PAM sequence: AAG
gtagtttttaataaatataa

SEQ ID NO: 69358 - DNA, 20 bp, Artificial Sequence
  Description of Artificial Sequence: Synthetic oligonucleotide
  Target: LAMA2; (-) strand; PAM type: NRG; PAM sequence: TAG
caacccttttagaaaacagg

SEQ ID NO: 69359 - DNA, 20 bp, Artificial Sequence
  Description of Artificial Sequence: Synthetic oligonucleotide
  Target: LAMA2; (-) strand; PAM type: NRG; PAM sequence: AGG
gcacaacccttttagaaaac

SEQ ID NO: 69360 - DNA, 20 bp, Artificial Sequence
  Description of Artificial Sequence: Synthetic oligonucleotide
  Target: LAMA2; (-) strand; PAM type: NRG; PAM sequence: CAG
agcacaacccttttagaaaa

SEQ ID NO: 69361 - DNA, 20 bp, Artificial Sequence
  Description of Artificial Sequence: Synthetic oligonucleotide
  Target: LAMA2; (-) strand; PAM type: NRG; PAM sequence: TAG
gtaaattagcacaacccttt

SEQ ID NO: 69362 - DNA, 20 bp, Artificial Sequence
  Description of Artificial Sequence: Synthetic oligonucleotide
  Target: LAMA2; (-) strand; PAM type: NRG; PAM sequence: TAG
ttgctgttgggaatgtaaat

SEQ ID NO: 69363 - DNA, 20 bp, Artificial Sequence
  Description of Artificial Sequence: Synthetic oligonucleotide
  Target: LAMA2; (-) strand; PAM type: NRG; PAM sequence: GGG
aagtctgctgcattgctgtt

SEQ ID NO: 69364 - DNA, 20 bp, Artificial Sequence
  Description of Artificial Sequence: Synthetic oligonucleotide
  Target: LAMA2; (-) strand; PAM type: NRG; PAM sequence: TGG
aaagtctgctgcattgctgt

SEQ ID NO: 69365 - DNA, 20 bp, Artificial Sequence
  Description of Artificial Sequence: Synthetic oligonucleotide
  Target: LAMA2; (-) strand; PAM type: NRG; PAM sequence: AAG
aaagtttgtagaacaatcaa

SEQ ID NO: 69366 - DNA, 20 bp, Artificial Sequence
  Description of Artificial Sequence: Synthetic oligonucleotide
  Target: LAMA2; (-) strand; PAM type: NRG; PAM sequence: TAG
atcaaatattaaaaagtttg

SEQ ID NO: 69367 - DNA, 20 bp, Artificial Sequence
  Description of Artificial Sequence: Synthetic oligonucleotide
  Target: LAMA2; (-) strand; PAM type: NRG; PAM sequence: AAG
tgacaacatcaaatattaaa

SEQ ID NO: 69368 - DNA, 20 bp, Artificial Sequence
  Description of Artificial Sequence: Synthetic oligonucleotide
  Target: LAMA2; (-) strand; PAM type: NRG; PAM sequence: AAG
ttaaatggcattatattaaa

SEQ ID NO: 69369 - DNA, 20 bp, Artificial Sequence
  Description of Artificial Sequence: Synthetic oligonucleotide
  Target: LAMA2; (-) strand; PAM type: NRG; PAM sequence: TGG
ttctcatgttttagattaaa

SEQ ID NO: 69370 - DNA, 20 bp, Artificial Sequence
  Description of Artificial Sequence: Synthetic oligonucleotide
  Target: LAMA2; (-) strand; PAM type: NRG; PAM sequence: TAG
ttgacaaagttctcatgttt

SEQ ID NO: 69371 - DNA, 20 bp, Artificial Sequence
  Description of Artificial Sequence: Synthetic oligonucleotide
  Target: LAMA2; (-) strand; PAM type: NRG; PAM sequence: AAG
actggacctatatattgaca

SEQ ID NO: 69372 - DNA, 20 bp, Artificial Sequence
  Description of Artificial Sequence: Synthetic oligonucleotide
  Target: LAMA2; (-) strand; PAM type: NRG; PAM sequence: TGG
gggtgagagatcacagtaac

SEQ ID NO: 69373 - DNA, 20 bp, Artificial Sequence
  Description of Artificial Sequence: Synthetic oligonucleotide
  Target: LAMA2; (-) strand; PAM type: NRG; PAM sequence: CAG
aaatggtgggtgagagatca

SEQ ID NO: 69374 - DNA, 20 bp, Artificial Sequence
  Description of Artificial Sequence: Synthetic oligonucleotide
  Target: LAMA2; (-) strand; PAM type: NRG; PAM sequence: GAG
aataaagaaatggtgggtga

SEQ ID NO: 69375 - DNA, 20 bp, Artificial Sequence
  Description of Artificial Sequence: Synthetic oligonucleotide
  Target: LAMA2; (-) strand; PAM type: NRG; PAM sequence: GAG
ataataaagaaatggtgggt

SEQ ID NO: 69376 - DNA, 20 bp, Artificial Sequence
  Description of Artificial Sequence: Synthetic oligonucleotide
  Target: LAMA2; (-) strand; PAM type: NRG; PAM sequence: GGG
aactataataaagaaatggt

SEQ ID NO: 69377 - DNA, 20 bp, Artificial Sequence
  Description of Artificial Sequence: Synthetic oligonucleotide
  Target: LAMA2; (-) strand; PAM type: NRG; PAM sequence: TGG
caactataataaagaaatgg

SEQ ID NO: 69378 - DNA, 20 bp, Artificial Sequence
  Description of Artificial Sequence: Synthetic oligonucleotide
  Target: LAMA2; (-) strand; PAM type: NRG; PAM sequence: TGG
tgacaactataataaagaaa

SEQ ID NO: 69379 - DNA, 20 bp, Artificial Sequence
  Description of Artificial Sequence: Synthetic oligonucleotide
  Target: LAMA2; (-) strand; PAM type: NRG; PAM sequence: AAG
tatatatgacaactataata

SEQ ID NO: 69380 - DNA, 20 bp, Artificial Sequence
  Description of Artificial Sequence: Synthetic oligonucleotide
  Target: LAMA2; (-) strand; PAM type: NRG; PAM sequence: TAG
tcattgcatatgtttgtaaa

SEQ ID NO: 69381 - DNA, 20 bp, Artificial Sequence
  Description of Artificial Sequence: Synthetic oligonucleotide
  Target: LAMA2; (-) strand; PAM type: NRG; PAM sequence: AGG
taaatgcatattaatattta

SEQ ID NO: 69382 - DNA, 20 bp, Artificial Sequence
  Description of Artificial Sequence: Synthetic oligonucleotide
  Target: LAMA2; (-) strand; PAM type: NRG; PAM sequence: AAG
ttaaatgcatattaatattt

SEQ ID NO: 69383 - DNA, 20 bp, Artificial Sequence
  Description of Artificial Sequence: Synthetic oligonucleotide
  Target: LAMA2; (-) strand; PAM type: NRG; PAM sequence: TAG
ataagtacatttgatgtcaa

SEQ ID NO: 69384 - DNA, 20 bp, Artificial Sequence
  Description of Artificial Sequence: Synthetic oligonucleotide
  Target: LAMA2; (-) strand; PAM type: NRG; PAM sequence: AAG
gagatgataaaagacagtat

SEQ ID NO: 69385 - DNA, 20 bp, Artificial Sequence
  Description of Artificial Sequence: Synthetic oligonucleotide
  Target: LAMA2; (-) strand; PAM type: NRG; PAM sequence: CAG
aaattggagatgataaaaga

SEQ ID NO: 69386 - DNA, 20 bp, Artificial Sequence
  Description of Artificial Sequence: Synthetic oligonucleotide
  Target: LAMA2; (-) strand; PAM type: NRG; PAM sequence: AAG
tagaaaattggagatgataa

SEQ ID NO: 69387 - DNA, 20 bp, Artificial Sequence
  Description of Artificial Sequence: Synthetic oligonucleotide
  Target: LAMA2; (-) strand; PAM type: NRG; PAM sequence: GAG
atgtgattaatagaaaattg

SEQ ID NO: 69388 - DNA, 20 bp, Artificial Sequence
  Description of Artificial Sequence: Synthetic oligonucleotide
  Target: LAMA2; (-) strand; PAM type: NRG; PAM sequence: TGG
acatgtgattaatagaaaat

SEQ ID NO: 69389 - DNA, 20 bp, Artificial Sequence
  Description of Artificial Sequence: Synthetic oligonucleotide
  Target: LAMA2; (-) strand; PAM type: NRG; PAM sequence: TAG
aatccactacatgtgattaa

SEQ ID NO: 69390 - DNA, 20 bp, Artificial Sequence
  Description of Artificial Sequence: Synthetic oligonucleotide
  Target: LAMA2; (-) strand; PAM type: NRG; PAM sequence: TAG
gaaaaatgtaacacagtatc

SEQ ID NO: 69391 - DNA, 20 bp, Artificial Sequence
  Description of Artificial Sequence: Synthetic oligonucleotide
  Target: LAMA2; (-) strand; PAM type: NRG; PAM sequence: CAG
tgtgactgaaaaatgtaaca

SEQ ID NO: 69392 - DNA, 20 bp, Artificial Sequence
  Description of Artificial Sequence: Synthetic oligonucleotide
  Target: LAMA2; (-) strand; PAM type: NRG; PAM sequence: TGG
ttcttgtagcaaaaaagaaa

SEQ ID NO: 69393 - DNA, 20 bp, Artificial Sequence
  Description of Artificial Sequence: Synthetic oligonucleotide
  Target: LAMA2; (-) strand; PAM type: NRG; PAM sequence: AAG
cgaaaattcttgtagcaaaa

SEQ ID NO: 69394 - DNA, 20 bp, Artificial Sequence
  Description of Artificial Sequence: Synthetic oligonucleotide
  Target: LAMA2; (-) strand; PAM type: NRG; PAM sequence: TAG
cacacatacgaaaattcttg

SEQ ID NO: 69395 - DNA, 20 bp, Artificial Sequence
  Description of Artificial Sequence: Synthetic oligonucleotide
  Target: LAMA2; (-) strand; PAM type: NRG; PAM sequence: AGG
cagcttttaaactatactca

SEQ ID NO: 69396 - DNA, 20 bp, Artificial Sequence
  Description of Artificial Sequence: Synthetic oligonucleotide
  Target: LAMA2; (-) strand; PAM type: NRG; PAM sequence: AAG
gcagcttttaaactatactc

SEQ ID NO: 69397 - DNA, 20 bp, Artificial Sequence
  Description of Artificial Sequence: Synthetic oligonucleotide
  Target: LAMA2; (-) strand; PAM type: NRG; PAM sequence: CAG
agcaaacaagcatcttcaag

SEQ ID NO: 69398 - DNA, 20 bp, Artificial Sequence
  Description of Artificial Sequence: Synthetic oligonucleotide
  Target: LAMA2; (-) strand; PAM type: NRG; PAM sequence: AAG
ataagcaaacaagcatcttc

SEQ ID NO: 69399 - DNA, 20 bp, Artificial Sequence
  Description of Artificial Sequence: Synthetic oligonucleotide
  Target: LAMA2; (-) strand; PAM type: NRG; PAM sequence: AAG
agatgttggaataagcaaac

SEQ ID NO: 69400 - DNA, 20 bp, Artificial Sequence
  Description of Artificial Sequence: Synthetic oligonucleotide
  Target: LAMA2; (-) strand; PAM type: NRG; PAM sequence: AAG
gatcaaccagatgttggaat

SEQ ID NO: 69401 - DNA, 20 bp, Artificial Sequence
  Description of Artificial Sequence: Synthetic oligonucleotide
  Target: LAMA2; (-) strand; PAM type: NRG; PAM sequence: TGG
tactgagatcaaccagatgt

SEQ ID NO: 69402 - DNA, 20 bp, Artificial Sequence
  Description of Artificial Sequence: Synthetic oligonucleotide
  Target: LAMA2; (-) strand; PAM type: NRG; PAM sequence: CAG
gagattgtactgagatcaac

SEQ ID NO: 69403 - DNA, 20 bp, Artificial Sequence
  Description of Artificial Sequence: Synthetic oligonucleotide
  Target: LAMA2; (-) strand; PAM type: NRG; PAM sequence: GAG
caatcaacggagattgtact

SEQ ID NO: 69404 - DNA, 20 bp, Artificial Sequence
  Description of Artificial Sequence: Synthetic oligonucleotide
  Target: LAMA2; (-) strand; PAM type: NRG; PAM sequence: GAG
atgagaaaaagcaatcaacg

SEQ ID NO: 69405 - DNA, 20 bp, Artificial Sequence
  Description of Artificial Sequence: Synthetic oligonucleotide
  Target: LAMA2; (-) strand; PAM type: NRG; PAM sequence: CGG
ttatgagaaaaagcaatcaa

SEQ ID NO: 69406 - DNA, 20 bp, Artificial Sequence
  Description of Artificial Sequence: Synthetic oligonucleotide
  Target: LAMA2; (-) strand; PAM type: NRG; PAM sequence: AAG
taactcatacttatgagaaa

SEQ ID NO: 69407 - DNA, 20 bp, Artificial Sequence
  Description of Artificial Sequence: Synthetic oligonucleotide
  Target: LAMA2; (-) strand; PAM type: NRG; PAM sequence: GAG
aaaaagtaactcatacttat

SEQ ID NO: 69408 - DNA, 20 bp, Artificial Sequence
  Description of Artificial Sequence: Synthetic oligonucleotide
  Target: LAMA2; (-) strand; PAM type: NRG; PAM sequence: AAG
acatacaaggaagcaataaa

SEQ ID NO: 69409 - DNA, 20 bp, Artificial Sequence
  Description of Artificial Sequence: Synthetic oligonucleotide
  Target: LAMA2; (-) strand; PAM type: NRG; PAM sequence: AAG
aaaatactagacatacaagg

SEQ ID NO: 69410 - DNA, 20 bp, Artificial Sequence
  Description of Artificial Sequence: Synthetic oligonucleotide
  Target: LAMA2; (-) strand; PAM type: NRG; PAM sequence: AGG
aaaaaaatactagacataca

SEQ ID NO: 69411 - DNA, 20 bp, Artificial Sequence
  Description of Artificial Sequence: Synthetic oligonucleotide
  Target: LAMA2; (-) strand; PAM type: NRG; PAM sequence: AAG
aaaaaaaatactagacatac

SEQ ID NO: 69412 - DNA, 20 bp, Artificial Sequence
  Description of Artificial Sequence: Synthetic oligonucleotide
  Target: LAMA2; (-) strand; PAM type: NRG; PAM sequence: TAG
ttgcaattaaaaaaaaatac

SEQ ID NO: 69413 - DNA, 20 bp, Artificial Sequence
  Description of Artificial Sequence: Synthetic oligonucleotide
  Target: LAMA2; (-) strand; PAM type: NRG; PAM sequence: AGG
tgctattattcatgacatcc

SEQ ID NO: 69414 - DNA, 20 bp, Artificial Sequence
  Description of Artificial Sequence: Synthetic oligonucleotide
  Target: LAMA2; (-) strand; PAM type: NRG; PAM sequence: CAG
gtgctattattcatgacatc

SEQ ID NO: 69415 - DNA, 20 bp, Artificial Sequence
  Description of Artificial Sequence: Synthetic oligonucleotide
  Target: LAMA2; (-) strand; PAM type: NRG; PAM sequence: GAG
gaggaacataacaaaaccca

SEQ ID NO: 69416 - DNA, 20 bp, Artificial Sequence
  Description of Artificial Sequence: Synthetic oligonucleotide
  Target: LAMA2; (-) strand; PAM type: NRG; PAM sequence: CAG
cagaggaacataacaaaacc

SEQ ID NO: 69417 - DNA, 20 bp, Artificial Sequence
  Description of Artificial Sequence: Synthetic oligonucleotide
  Target: LAMA2; (-) strand; PAM type: NRG; PAM sequence: AGG
aatgggtgagtgctcttcag

SEQ ID NO: 69418 - DNA, 20 bp, Artificial Sequence
  Description of Artificial Sequence: Synthetic oligonucleotide
  Target: LAMA2; (-) strand; PAM type: NRG; PAM sequence: GAG
gaatgggtgagtgctcttca

SEQ ID NO: 69419 - DNA, 20 bp, Artificial Sequence
  Description of Artificial Sequence: Synthetic oligonucleotide
  Target: LAMA2; (-) strand; PAM type: NRG; PAM sequence: CAG
aagaatgggtgagtgctctt

SEQ ID NO: 69420 - DNA, 20 bp, Artificial Sequence
  Description of Artificial Sequence: Synthetic oligonucleotide
  Target: LAMA2; (-) strand; PAM type: NRG; PAM sequence: GAG
gacaacaaaaaagaatgggt

SEQ ID NO: 69421 - DNA, 20 bp, Artificial Sequence
  Description of Artificial Sequence: Synthetic oligonucleotide
  Target: LAMA2; (-) strand; PAM type: NRG; PAM sequence: GGG
atgcgacaacaaaaaagaat

SEQ ID NO: 69422 - DNA, 20 bp, Artificial Sequence
  Description of Artificial Sequence: Synthetic oligonucleotide
  Target: LAMA2; (-) strand; PAM type: NRG; PAM sequence: TGG
gatgcgacaacaaaaaagaa

SEQ ID NO: 69423 - DNA, 20 bp, Artificial Sequence
  Description of Artificial Sequence: Synthetic oligonucleotide
  Target: LAMA2; (-) strand; PAM type: NRG; PAM sequence: AAG
caactgatgcgacaacaaaa

SEQ ID NO: 69424 - DNA, 20 bp, Artificial Sequence
  Description of Artificial Sequence: Synthetic oligonucleotide
  Target: LAMA2; (-) strand; PAM type: NRG; PAM sequence: AAG
ttgggactttgagcccagtc

SEQ ID NO: 69425 - DNA, 20 bp, Artificial Sequence
  Description of Artificial Sequence: Synthetic oligonucleotide
  Target: LAMA2; (-) strand; PAM type: NRG; PAM sequence: CAG
aaaagttgggactttgagcc

SEQ ID NO: 69426 - DNA, 20 bp, Artificial Sequence
  Description of Artificial Sequence: Synthetic oligonucleotide
  Target: LAMA2; (-) strand; PAM type: NRG; PAM sequence: GAG
aagaaaaaagttgggacttt

SEQ ID NO: 69427 - DNA, 20 bp, Artificial Sequence
  Description of Artificial Sequence: Synthetic oligonucleotide
  Target: LAMA2; (-) strand; PAM type: NRG; PAM sequence: GGG
ctacaggaaagaaaaaagtt

SEQ ID NO: 69428 - DNA, 20 bp, Artificial Sequence
  Description of Artificial Sequence: Synthetic oligonucleotide
  Target: LAMA2; (-) strand; PAM type: NRG; PAM sequence: TGG
tctacaggaaagaaaaaagt

SEQ ID NO: 69429 - DNA, 20 bp, Artificial Sequence
  Description of Artificial Sequence: Synthetic oligonucleotide
  Target: LAMA2; (-) strand; PAM type: NRG; PAM sequence: AAG
gcactctacaggaaagaaaa

SEQ ID NO: 69430 - DNA, 20 bp, Artificial Sequence
  Description of Artificial Sequence: Synthetic oligonucleotide
  Target: LAMA2; (-) strand; PAM type: NRG; PAM sequence: AAG
aggttctgcactctacagga

SEQ ID NO: 69431 - DNA, 20 bp, Artificial Sequence
  Description of Artificial Sequence: Synthetic oligonucleotide
  Target: LAMA2; (-) strand; PAM type: NRG; PAM sequence: AGG
ttttaggttctgcactctac

SEQ ID NO: 69432 - DNA, 20 bp, Artificial Sequence
  Description of Artificial Sequence: Synthetic oligonucleotide
  Target: LAMA2; (-) strand; PAM type: NRG; PAM sequence: CAG
attttaggttctgcactcta

SEQ ID NO: 69433 - DNA, 20 bp, Artificial Sequence
  Description of Artificial Sequence: Synthetic oligonucleotide
  Target: LAMA2; (-) strand; PAM type: NRG; PAM sequence: AGG
aaaaactgaacagagatttt

SEQ ID NO: 69434 - DNA, 20 bp, Artificial Sequence
  Description of Artificial Sequence: Synthetic oligonucleotide
  Target: LAMA2; (-) strand; PAM type: NRG; PAM sequence: TAG
gaaaaactgaacagagattt

SEQ ID NO: 69435 - DNA, 20 bp, Artificial Sequence
  Description of Artificial Sequence: Synthetic oligonucleotide
  Target: LAMA2; (-) strand; PAM type: NRG; PAM sequence: GAG
tagggctgaaaaactgaaca

SEQ ID NO: 69436 - DNA, 20 bp, Artificial Sequence
  Description of Artificial Sequence: Synthetic oligonucleotide
  Target: LAMA2; (-) strand; PAM type: NRG; PAM sequence: CAG
gctagggctgaaaaactgaa

SEQ ID NO: 69437 - DNA, 20 bp, Artificial Sequence
  Description of Artificial Sequence: Synthetic oligonucleotide
  Target: LAMA2; (-) strand; PAM type: NRG; PAM sequence: GGG
gattccaagtagcccagcta

SEQ ID NO: 69438 - DNA, 20 bp, Artificial Sequence
  Description of Artificial Sequence: Synthetic oligonucleotide
  Target: LAMA2; (-) strand; PAM type: NRG; PAM sequence: AGG
agattccaagtagcccagct

SEQ ID NO: 69439 - DNA, 20 bp, Artificial Sequence
  Description of Artificial Sequence: Synthetic oligonucleotide
  Target: LAMA2; (-) strand; PAM type: NRG; PAM sequence: TAG
cagattccaagtagcccagc

SEQ ID NO: 69440 - DNA, 20 bp, Artificial Sequence
  Description of Artificial Sequence: Synthetic oligonucleotide
  Target: LAMA2; (-) strand; PAM type: NRG; PAM sequence: CAG
tagtcagattccaagtagcc

SEQ ID NO: 69441 - DNA, 20 bp, Artificial Sequence
  Description of Artificial Sequence: Synthetic oligonucleotide
  Target: LAMA2; (-) strand; PAM type: NRG; PAM sequence: TAG
tgccctagtcagattccaag

SEQ ID NO: 69442 - DNA, 20 bp, Artificial Sequence
  Description of Artificial Sequence: Synthetic oligonucleotide
  Target: LAMA2; (-) strand; PAM type: NRG; PAM sequence: AAG
acctgccctagtcagattcc

SEQ ID NO: 69443 - DNA, 20 bp, Artificial Sequence
  Description of Artificial Sequence: Synthetic oligonucleotide
  Target: LAMA2; (-) strand; PAM type: NRG; PAM sequence: CAG
agacctacacctgccctagt

SEQ ID NO: 69444 - DNA, 20 bp, Artificial Sequence
  Description of Artificial Sequence: Synthetic oligonucleotide
  Target: LAMA2; (-) strand; PAM type: NRG; PAM sequence: TAG
tgccagacctacacctgccc

SEQ ID NO: 69445 - DNA, 20 bp, Artificial Sequence
  Description of Artificial Sequence: Synthetic oligonucleotide
  Target: LAMA2; (-) strand; PAM type: NRG; PAM sequence: CAG
tccaaattgctcactgatgc

SEQ ID NO: 69446 - DNA, 20 bp, Artificial Sequence
  Description of Artificial Sequence: Synthetic oligonucleotide
  Target: LAMA2; (-) strand; PAM type: NRG; PAM sequence: GAG
aagagaggtccacagaaagg

SEQ ID NO: 69447 - DNA, 20 bp, Artificial Sequence
  Description of Artificial Sequence: Synthetic oligonucleotide
  Target: LAMA2; (-) strand; PAM type: NRG; PAM sequence: GGG
taaagagaggtccacagaaa

SEQ ID NO: 69448 - DNA, 20 bp, Artificial Sequence
  Description of Artificial Sequence: Synthetic oligonucleotide
  Target: LAMA2; (-) strand; PAM type: NRG; PAM sequence: AGG
gtaaagagaggtccacagaa

SEQ ID NO: 69449 - DNA, 20 bp, Artificial Sequence
  Description of Artificial Sequence: Synthetic oligonucleotide
  Target: LAMA2; (-) strand; PAM type: NRG; PAM sequence: AAG
tgtaaagagaggtccacaga

SEQ ID NO: 69450 - DNA, 20 bp, Artificial Sequence
  Description of Artificial Sequence: Synthetic oligonucleotide
  Target: LAMA2; (-) strand; PAM type: NRG; PAM sequence: CAG
caggtgtaaagagaggtcca

SEQ ID NO: 69451 - DNA, 20 bp, Artificial Sequence
  Description of Artificial Sequence: Synthetic oligonucleotide
  Target: LAMA2; (-) strand; PAM type: NRG; PAM sequence: AGG
gccacagcaggtgtaaagag

SEQ ID NO: 69452 - DNA, 20 bp, Artificial Sequence
  Description of Artificial Sequence: Synthetic oligonucleotide
  Target: LAMA2; (-) strand; PAM type: NRG; PAM sequence: GAG
agccacagcaggtgtaaaga

SEQ ID NO: 69453 - DNA, 20 bp, Artificial Sequence
  Description of Artificial Sequence: Synthetic oligonucleotide
  Target: LAMA2; (-) strand; PAM type: NRG; PAM sequence: GAG
atagccacagcaggtgtaaa

SEQ ID NO: 69454 - DNA, 20 bp, Artificial Sequence
  Description of Artificial Sequence: Synthetic oligonucleotide
  Target: LAMA2; (-) strand; PAM type: NRG; PAM sequence: AAG
aaatagccacagcaggtgta

SEQ ID NO: 69455 - DNA, 20 bp, Artificial Sequence
  Description of Artificial Sequence: Synthetic oligonucleotide
  Target: LAMA2; (-) strand; PAM type: NRG; PAM sequence: AGG
aaactaaaaatagccacagc

SEQ ID NO: 69456 - DNA, 20 bp, Artificial Sequence
  Description of Artificial Sequence: Synthetic oligonucleotide
  Target: LAMA2; (-) strand; PAM type: NRG; PAM sequence: CAG
aaaactaaaaatagccacag

SEQ ID NO: 69457 - DNA, 20 bp, Artificial Sequence
  Description of Artificial Sequence: Synthetic oligonucleotide
  Target: LAMA2; (-) strand; PAM type: NRG; PAM sequence: CAG
aacaaaactaaaaatagcca

SEQ ID NO: 69458 - DNA, 20 bp, Artificial Sequence
  Description of Artificial Sequence: Synthetic oligonucleotide
  Target: LAMA2; (-) strand; PAM type: NRG; PAM sequence: TAG
ctagtgaacaaaactaaaaa

SEQ ID NO: 69459 - DNA, 20 bp, Artificial Sequence
  Description of Artificial Sequence: Synthetic oligonucleotide
  Target: LAMA2; (-) strand; PAM type: NRG; PAM sequence: TAG
gttttactggcttgaagaac

SEQ ID NO: 69460 - DNA, 20 bp, Artificial Sequence
  Description of Artificial Sequence: Synthetic oligonucleotide
  Target: LAMA2; (-) strand; PAM type: NRG; PAM sequence: AAG
cccacagttttactggcttg

SEQ ID NO: 69461 - DNA, 20 bp, Artificial Sequence
  Description of Artificial Sequence: Synthetic oligonucleotide
  Target: LAMA2; (-) strand; PAM type: NRG; PAM sequence: TGG
atagaaacccacagttttac

SEQ ID NO: 69462 - DNA, 20 bp, Artificial Sequence
  Description of Artificial Sequence: Synthetic oligonucleotide
  Target: LAMA2; (-) strand; PAM type: NRG; PAM sequence: CAG
aaaactcaaatagaaaccca

SEQ ID NO: 69463 - DNA, 20 bp, Artificial Sequence
  Description of Artificial Sequence: Synthetic oligonucleotide
  Target: LAMA2; (-) strand; PAM type: NRG; PAM sequence: TAG
cagaatggctaaaactcaaa

SEQ ID NO: 69464 - DNA, 20 bp, Artificial Sequence
  Description of Artificial Sequence: Synthetic oligonucleotide
  Target: LAMA2; (-) strand; PAM type: NRG; PAM sequence: TGG
gcactggatgagctccagaa

SEQ ID NO: 69465 - DNA, 20 bp, Artificial Sequence
  Description of Artificial Sequence: Synthetic oligonucleotide
  Target: LAMA2; (-) strand; PAM type: NRG; PAM sequence: CAG
aaaaggcactggatgagctc

SEQ ID NO: 69466 - DNA, 20 bp, Artificial Sequence
  Description of Artificial Sequence: Synthetic oligonucleotide
  Target: LAMA2; (-) strand; PAM type: NRG; PAM sequence: GAG
agaaggaaaaggcactggat

SEQ ID NO: 69467 - DNA, 20 bp, Artificial Sequence
  Description of Artificial Sequence: Synthetic oligonucleotide
  Target: LAMA2; (-) strand; PAM type: NRG; PAM sequence: TGG
tacttagaaggaaaaggcac

SEQ ID NO: 69468 - DNA, 20 bp, Artificial Sequence
  Description of Artificial Sequence: Synthetic oligonucleotide
  Target: LAMA2; (-) strand; PAM type: NRG; PAM sequence: AGG
tatgaatacttagaaggaaa

SEQ ID NO: 69469 - DNA, 20 bp, Artificial Sequence
  Description of Artificial Sequence: Synthetic oligonucleotide
  Target: LAMA2; (-) strand; PAM type: NRG; PAM sequence: AAG
ctatgaatacttagaaggaa

SEQ ID NO: 69470 - DNA, 20 bp, Artificial Sequence
  Description of Artificial Sequence: Synthetic oligonucleotide
  Target: LAMA2; (-) strand; PAM type: NRG; PAM sequence: AGG
gaagactatgaatacttaga

SEQ ID NO: 69471 - DNA, 20 bp, Artificial Sequence
  Description of Artificial Sequence: Synthetic oligonucleotide
  Target: LAMA2; (-) strand; PAM type: NRG; PAM sequence: AAG
ggaagactatgaatacttag

SEQ ID NO: 69472 - DNA, 20 bp, Artificial Sequence
  Description of Artificial Sequence: Synthetic oligonucleotide
  Target: LAMA2; (-) strand; PAM type: NRG; PAM sequence: TAG
ccaggaagactatgaatact

SEQ ID NO: 69473 - DNA, 20 bp, Artificial Sequence
  Description of Artificial Sequence: Synthetic oligonucleotide
  Target: LAMA2; (-) strand; PAM type: NRG; PAM sequence: AAG
ctaagaacaggtaagccagg

SEQ ID NO: 69474 - DNA, 20 bp, Artificial Sequence
  Description of Artificial Sequence: Synthetic oligonucleotide
  Target: LAMA2; (-) strand; PAM type: NRG; PAM sequence: AGG
cacctaagaacaggtaagcc

SEQ ID NO: 69475 - DNA, 20 bp, Artificial Sequence
  Description of Artificial Sequence: Synthetic oligonucleotide
  Target: LAMA2; (-) strand; PAM type: NRG; PAM sequence: CAG
gcacctaagaacaggtaagc

SEQ ID NO: 69476 - DNA, 20 bp, Artificial Sequence
  Description of Artificial Sequence: Synthetic oligonucleotide
  Target: LAMA2; (-) strand; PAM type: NRG; PAM sequence: AAG
gagtgcacctaagaacaggt

SEQ ID NO: 69477 - DNA, 20 bp, Artificial Sequence
  Description of Artificial Sequence: Synthetic oligonucleotide
  Target: LAMA2; (-) strand; PAM type: NRG; PAM sequence: AGG
tctggagtgcacctaagaac

SEQ ID NO: 69478 - DNA, 20 bp, Artificial Sequence
  Description of Artificial Sequence: Synthetic oligonucleotide
  Target: LAMA2; (-) strand; PAM type: NRG; PAM sequence: CAG
atctggagtgcacctaagaa

SEQ ID NO: 69479 - DNA, 20 bp, Artificial Sequence
  Description of Artificial Sequence: Synthetic oligonucleotide
  Target: LAMA2; (-) strand; PAM type: NRG; PAM sequence: AAG
cagatatctggagtgcacct

SEQ ID NO: 69480 - DNA, 20 bp, Artificial Sequence
  Description of Artificial Sequence: Synthetic oligonucleotide
  Target: LAMA2; (-) strand; PAM type: NRG; PAM sequence: GAG
cagcaaacaccagatatctg

SEQ ID NO: 69481 - DNA, 20 bp, Artificial Sequence
  Description of Artificial Sequence: Synthetic oligonucleotide
  Target: LAMA2; (-) strand; PAM type: NRG; PAM sequence: TGG
cacagcaaacaccagatatc

SEQ ID NO: 69482 - DNA, 20 bp, Artificial Sequence
  Description of Artificial Sequence: Synthetic oligonucleotide
  Target: LAMA2; (-) strand; PAM type: NRG; PAM sequence: CAG
tatatacacacagcaaacac

SEQ ID NO: 69483 - DNA, 20 bp, Artificial Sequence
  Description of Artificial Sequence: Synthetic oligonucleotide
  Target: LAMA2; (-) strand; PAM type: NRG; PAM sequence: CAG
tatatatatatatatacaca

SEQ ID NO: 69484 - DNA, 20 bp, Artificial Sequence
  Description of Artificial Sequence: Synthetic oligonucleotide
  Target: LAMA2; (-) strand; PAM type: NRG; PAM sequence: TGG
ataaattctgtgtatatatt

SEQ ID NO: 69485 - DNA, 20 bp, Artificial Sequence
  Description of Artificial Sequence: Synthetic oligonucleotide
  Target: LAMA2; (-) strand; PAM type: NRG; PAM sequence: CAG
agcaaagctcccagagataa

SEQ ID NO: 69486 - DNA, 20 bp, Artificial Sequence
  Description of Artificial Sequence: Synthetic oligonucleotide
  Target: LAMA2; (-) strand; PAM type: NRG; PAM sequence: GAG
ttattggagcaaagctccca

SEQ ID NO: 69487 - DNA, 20 bp, Artificial Sequence
  Description of Artificial Sequence: Synthetic oligonucleotide
  Target: LAMA2; (-) strand; PAM type: NRG; PAM sequence: CAG
ttttattggagcaaagctcc

SEQ ID NO: 69488 - DNA, 20 bp, Artificial Sequence
  Description of Artificial Sequence: Synthetic oligonucleotide
  Target: LAMA2; (-) strand; PAM type: NRG; PAM sequence: AAG
aagtagcttttattggagca

SEQ ID NO: 69489 - DNA, 20 bp, Artificial Sequence
  Description of Artificial Sequence: Synthetic oligonucleotide
  Target: LAMA2; (-) strand; PAM type: NRG; PAM sequence: GAG
ttgtgaagtagcttttattg

SEQ ID NO: 69490 - DNA, 20 bp, Artificial Sequence
  Description of Artificial Sequence: Synthetic oligonucleotide
  Target: LAMA2; (-) strand; PAM type: NRG; PAM sequence: TGG
aattgtgaagtagcttttat

SEQ ID NO: 69491 - DNA, 20 bp, Artificial Sequence
  Description of Artificial Sequence: Synthetic oligonucleotide
  Target: LAMA2; (-) strand; PAM type: NRG; PAM sequence: TAG
tatttttaataattgtgaag

SEQ ID NO: 69492 - DNA, 20 bp, Artificial Sequence
  Description of Artificial Sequence: Synthetic oligonucleotide
  Target: LAMA2; (-) strand; PAM type: NRG; PAM sequence: AAG
ttctatttttaataattgtg

SEQ ID NO: 69493 - DNA, 20 bp, Artificial Sequence
  Description of Artificial Sequence: Synthetic oligonucleotide
  Target: LAMA2; (-) strand; PAM type: NRG; PAM sequence: AGG
attttaaaatctacttatgg

SEQ ID NO: 69494 - DNA, 20 bp, Artificial Sequence
  Description of Artificial Sequence: Synthetic oligonucleotide
  Target: LAMA2; (-) strand; PAM type: NRG; PAM sequence: GAG
cattttaaaatctacttatg

SEQ ID NO: 69495 - DNA, 20 bp, Artificial Sequence
  Description of Artificial Sequence: Synthetic oligonucleotide
  Target: LAMA2; (-) strand; PAM type: NRG; PAM sequence: TGG
aacattttaaaatctactta

SEQ ID NO: 69496 - DNA, 20 bp, Artificial Sequence
  Description of Artificial Sequence: Synthetic oligonucleotide
  Target: LAMA2; (-) strand; PAM type: NRG; PAM sequence: CAG
cactttttggtttcaaatgg

SEQ ID NO: 69497 - DNA, 20 bp, Artificial Sequence
  Description of Artificial Sequence: Synthetic oligonucleotide
  Target: LAMA2; (-) strand; PAM type: NRG; PAM sequence: TGG
tcccactttttggtttcaaa

SEQ ID NO: 69498 - DNA, 20 bp, Artificial Sequence
  Description of Artificial Sequence: Synthetic oligonucleotide
  Target: LAMA2; (-) strand; PAM type: NRG; PAM sequence: TGG
attctcaaaatcccactttt

SEQ ID NO: 69499 - DNA, 20 bp, Artificial Sequence
  Description of Artificial Sequence: Synthetic oligonucleotide
  Target: LAMA2; (-) strand; PAM type: NRG; PAM sequence: TGG
tgtagtatgttcacacatgt

SEQ ID NO: 69500 - DNA, 20 bp, Artificial Sequence
  Description of Artificial Sequence: Synthetic oligonucleotide
  Target: LAMA2; (-) strand; PAM type: NRG; PAM sequence: TAG
atttgctttctcaaataatg

SEQ ID NO: 69501 - DNA, 20 bp, Artificial Sequence
  Description of Artificial Sequence: Synthetic oligonucleotide
  Target: LAMA2; (-) strand; PAM type: NRG; PAM sequence: TGG
taacttccactgtttttatt

SEQ ID NO: 69502 - DNA, 20 bp, Artificial Sequence
  Description of Artificial Sequence: Synthetic oligonucleotide
  Target: LAMA2; (-) strand; PAM type: NRG; PAM sequence: TGG
actgaaattctgctacaata

SEQ ID NO: 69503 - DNA, 20 bp, Artificial Sequence
  Description of Artificial Sequence: Synthetic oligonucleotide
  Target: LAMA2; (-) strand; PAM type: NRG; PAM sequence: AAG
aggatatctagaaaaaggct

SEQ ID NO: 69504 - DNA, 20 bp, Artificial Sequence
  Description of Artificial Sequence: Synthetic oligonucleotide
  Target: LAMA2; (-) strand; PAM type: NRG; PAM sequence: AGG
gtaataggatatctagaaaa

SEQ ID NO: 69505 - DNA, 20 bp, Artificial Sequence
  Description of Artificial Sequence: Synthetic oligonucleotide
  Target: LAMA2; (-) strand; PAM type: NRG; PAM sequence: AAG
ggtaataggatatctagaaa

SEQ ID NO: 69506 - DNA, 20 bp, Artificial Sequence
  Description of Artificial Sequence: Synthetic oligonucleotide
  Target: LAMA2; (-) strand; PAM type: NRG; PAM sequence: TAG
atatatggtaataggatatc

SEQ ID NO: 69507 - DNA, 20 bp, Artificial Sequence
  Description of Artificial Sequence: Synthetic oligonucleotide
  Target: LAMA2; (-) strand; PAM type: NRG; PAM sequence: AGG
atatatatatatatggtaat

SEQ ID NO: 69508 - DNA, 20 bp, Artificial Sequence
  Description of Artificial Sequence: Synthetic oligonucleotide
  Target: LAMA2; (-) strand; PAM type: NRG; PAM sequence: TAG
tatatatatatatatggtaa

SEQ ID NO: 69509 - DNA, 20 bp, Artificial Sequence
  Description of Artificial Sequence: Synthetic oligonucleotide
  Target: LAMA2; (-) strand; PAM type: NRG; PAM sequence: TGG
atagtgtatatatatatata

SEQ ID NO: 69510 - DNA, 20 bp, Artificial Sequence
  Description of Artificial Sequence: Synthetic oligonucleotide
  Target: LAMA2; (-) strand; PAM type: NRG; PAM sequence: TAG
gaataatatattctgttcta

SEQ ID NO: 69511 - DNA, 20 bp, Artificial Sequence
  Description of Artificial Sequence: Synthetic oligonucleotide
  Target: LAMA2; (-) strand; PAM type: NRG; PAM sequence: TAG
tagaatattcatattatata

SEQ ID NO: 69512 - DNA, 20 bp, Artificial Sequence
  Description of Artificial Sequence: Synthetic oligonucleotide
  Target: LAMA2; (-) strand; PAM type: NRG; PAM sequence: TAG
ctatgtattttattagagat

SEQ ID NO: 69513 - DNA, 20 bp, Artificial Sequence
  Description of Artificial Sequence: Synthetic oligonucleotide
  Target: LAMA2; (-) strand; PAM type: NRG; PAM sequence: GAG
ttatactatgtattttatta

SEQ ID NO: 69514 - DNA, 20 bp, Artificial Sequence
  Description of Artificial Sequence: Synthetic oligonucleotide
  Target: LAMA2; (-) strand; PAM type: NRG; PAM sequence: TAG
gtttatactatgtattttat

SEQ ID NO: 69515 - DNA, 20 bp, Artificial Sequence
  Description of Artificial Sequence: Synthetic oligonucleotide
  Target: LAMA2; (-) strand; PAM type: NRG; PAM sequence: AGG
tagttggagttctggttata

SEQ ID NO: 69516 - DNA, 20 bp, Artificial Sequence
  Description of Artificial Sequence: Synthetic oligonucleotide
  Target: LAMA2; (-) strand; PAM type: NRG; PAM sequence: AAG
ttagttggagttctggttat

SEQ ID NO: 69517 - DNA, 20 bp, Artificial Sequence
  Description of Artificial Sequence: Synthetic oligonucleotide
  Target: LAMA2; (-) strand; PAM type: NRG; PAM sequence: TGG
aataagtttagttggagttc

SEQ ID NO: 69518 - DNA, 20 bp, Artificial Sequence
  Description of Artificial Sequence: Synthetic oligonucleotide
  Target: LAMA2; (-) strand; PAM type: NRG; PAM sequence: GAG
agactaaataagtttagttg

SEQ ID NO: 69519 - DNA, 20 bp, Artificial Sequence
  Description of Artificial Sequence: Synthetic oligonucleotide
  Target: LAMA2; (-) strand; PAM type: NRG; PAM sequence: TGG
ctagactaaataagtttagt

SEQ ID NO: 69520 - DNA, 20 bp, Artificial Sequence
  Description of Artificial Sequence: Synthetic oligonucleotide
  Target: LAMA2; (-) strand; PAM type: NRG; PAM sequence: TAG
agcactagactaaataagtt

SEQ ID NO: 69521 - DNA, 20 bp, Artificial Sequence
  Description of Artificial Sequence: Synthetic oligonucleotide
  Target: LAMA2; (-) strand; PAM type: NRG; PAM sequence: AAG
tgaatagcactagactaaat

SEQ ID NO: 69522 - DNA, 20 bp, Artificial Sequence
  Description of Artificial Sequence: Synthetic oligonucleotide
  Target: LAMA2; (-) strand; PAM type: NRG; PAM sequence: TAG
attttttttctgaatagcac

SEQ ID NO: 69523 - DNA, 20 bp, Artificial Sequence
  Description of Artificial Sequence: Synthetic oligonucleotide
  Target: LAMA2; (-) strand; PAM type: NRG; PAM sequence: TAG
attgacattttttttctgaa

SEQ ID NO: 69524 - DNA, 20 bp, Artificial Sequence
  Description of Artificial Sequence: Synthetic oligonucleotide
  Target: LAMA2; (-) strand; PAM type: NRG; PAM sequence: CAG
aatgttaatgacataaaagc

SEQ ID NO: 69525 - DNA, 20 bp, Artificial Sequence
  Description of Artificial Sequence: Synthetic oligonucleotide
  Target: LAMA2; (-) strand; PAM type: NRG; PAM sequence: AAG
ctgtaatgttaatgacataa

SEQ ID NO: 69526 - DNA, 20 bp, Artificial Sequence
  Description of Artificial Sequence: Synthetic oligonucleotide
  Target: LAMA2; (-) strand; PAM type: NRG; PAM sequence: AGG
catcttcttaactcaactta

SEQ ID NO: 69527 - DNA, 20 bp, Artificial Sequence
  Description of Artificial Sequence: Synthetic oligonucleotide
  Target: LAMA2; (-) strand; PAM type: NRG; PAM sequence: AAG
acatcttcttaactcaactt

SEQ ID NO: 69528 - DNA, 20 bp, Artificial Sequence
  Description of Artificial Sequence: Synthetic oligonucleotide
  Target: LAMA2; (-) strand; PAM type: NRG; PAM sequence: GAG
atagctgatgaacctttaga

SEQ ID NO: 69529 - DNA, 20 bp, Artificial Sequence
  Description of Artificial Sequence: Synthetic oligonucleotide
  Target: LAMA2; (-) strand; PAM type: NRG; PAM sequence: GAG
aaatagctgatgaaccttta

SEQ ID NO: 69530 - DNA, 20 bp, Artificial Sequence
  Description of Artificial Sequence: Synthetic oligonucleotide
  Target: LAMA2; (-) strand; PAM type: NRG; PAM sequence: TAG
ataaatagctgatgaacctt

SEQ ID NO: 69531 - DNA, 20 bp, Artificial Sequence
  Description of Artificial Sequence: Synthetic oligonucleotide
  Target: LAMA2; (-) strand; PAM type: NRG; PAM sequence: TAG
gagtgtaaattaactataaa

SEQ ID NO: 69532 - DNA, 20 bp, Artificial Sequence
  Description of Artificial Sequence: Synthetic oligonucleotide
  Target: LAMA2; (-) strand; PAM type: NRG; PAM sequence: GAG
taagattatgtaaacattag

SEQ ID NO: 69533 - DNA, 20 bp, Artificial Sequence
  Description of Artificial Sequence: Synthetic oligonucleotide
  Target: LAMA2; (-) strand; PAM type: NRG; PAM sequence: AGG
gttaagattatgtaaacatt

SEQ ID NO: 69534 - DNA, 20 bp, Artificial Sequence
  Description of Artificial Sequence: Synthetic oligonucleotide
  Target: LAMA2; (-) strand; PAM type: NRG; PAM sequence: TAG
ggttaagattatgtaaacat

SEQ ID NO: 69535 - DNA, 20 bp, Artificial Sequence
  Description of Artificial Sequence: Synthetic oligonucleotide
  Target: LAMA2; (-) strand; PAM type: NRG; PAM sequence: AAG
tcaatatgtgttacttggtt

SEQ ID NO: 69536 - DNA, 20 bp, Artificial Sequence
  Description of Artificial Sequence: Synthetic oligonucleotide
  Target: LAMA2; (-) strand; PAM type: NRG; PAM sequence: TGG
catattcaatatgtgttact

SEQ ID NO: 69537 - DNA, 20 bp, Artificial Sequence
  Description of Artificial Sequence: Synthetic oligonucleotide
  Target: LAMA2; (-) strand; PAM type: NRG; PAM sequence: GGG
attcccattcaaaagcacca

SEQ ID NO: 69538 - DNA, 20 bp, Artificial Sequence
  Description of Artificial Sequence: Synthetic oligonucleotide
  Target: LAMA2; (-) strand; PAM type: NRG; PAM sequence: AGG
tattcccattcaaaagcacc

SEQ ID NO: 69539 - DNA, 20 bp, Artificial Sequence
  Description of Artificial Sequence: Synthetic oligonucleotide
  Target: LAMA2; (-) strand; PAM type: NRG; PAM sequence: CAG
ttattcccattcaaaagcac

SEQ ID NO: 69540 - DNA, 20 bp, Artificial Sequence
  Description of Artificial Sequence: Synthetic oligonucleotide
  Target: LAMA2; (-) strand; PAM type: NRG; PAM sequence: AAG
gcctacttattcccattcaa

SEQ ID NO: 69541 - DNA, 20 bp, Artificial Sequence
  Description of Artificial Sequence: Synthetic oligonucleotide
  Target: LAMA2; (-) strand; PAM type: NRG; PAM sequence: TAG
atcttcagcatgtcttatta

SEQ ID NO: 69542 - DNA, 20 bp, Artificial Sequence
  Description of Artificial Sequence: Synthetic oligonucleotide
  Target: LAMA2; (-) strand; PAM type: NRG; PAM sequence: CAG
ctgagcttttattgaatctt

SEQ ID NO: 69543 - DNA, 20 bp, Artificial Sequence
  Description of Artificial Sequence: Synthetic oligonucleotide
  Target: LAMA2; (-) strand; PAM type: NRG; PAM sequence: GAG
tgaagaatgaatcaatatct

SEQ ID NO: 69544 - DNA, 20 bp, Artificial Sequence
  Description of Artificial Sequence: Synthetic oligonucleotide
  Target: LAMA2; (-) strand; PAM type: NRG; PAM sequence: AAG
gctaatgaatgaccaatttg

SEQ ID NO: 69545 - DNA, 20 bp, Artificial Sequence
  Description of Artificial Sequence: Synthetic oligonucleotide
  Target: LAMA2; (-) strand; PAM type: NRG; PAM sequence: TAG
ggtcagcaaaggtctccaat

SEQ ID NO: 69546 - DNA, 20 bp, Artificial Sequence
  Description of Artificial Sequence: Synthetic oligonucleotide
  Target: LAMA2; (-) strand; PAM type: NRG; PAM sequence: AGG
ttaagcatattggtcagcaa

SEQ ID NO: 69547 - DNA, 20 bp, Artificial Sequence
  Description of Artificial Sequence: Synthetic oligonucleotide
  Target: LAMA2; (-) strand; PAM type: NRG; PAM sequence: AAG
gttaagcatattggtcagca

SEQ ID NO: 69548 - DNA, 20 bp, Artificial Sequence
  Description of Artificial Sequence: Synthetic oligonucleotide
  Target: LAMA2; (-) strand; PAM type: NRG; PAM sequence: CAG
aatcggttaagcatattggt

SEQ ID NO: 69549 - DNA, 20 bp, Artificial Sequence
  Description of Artificial Sequence: Synthetic oligonucleotide
  Target: LAMA2; (-) strand; PAM type: NRG; PAM sequence: TGG
taaaaatcggttaagcatat

SEQ ID NO: 69550 - DNA, 20 bp, Artificial Sequence
  Description of Artificial Sequence: Synthetic oligonucleotide
  Target: LAMA2; (-) strand; PAM type: NRG; PAM sequence: AAG
tttatttttaaaaatcggtt

SEQ ID NO: 69551 - DNA, 20 bp, Artificial Sequence
  Description of Artificial Sequence: Synthetic oligonucleotide
  Target: LAMA2; (-) strand; PAM type: NRG; PAM sequence: CGG
tgctgtttatttttaaaaat

SEQ ID NO: 69552 - DNA, 20 bp, Artificial Sequence
  Description of Artificial Sequence: Synthetic oligonucleotide
  Target: LAMA2; (-) strand; PAM type: NRG; PAM sequence: TAG
cttgttttatggtcagggaa

SEQ ID NO: 69553 - DNA, 20 bp, Artificial Sequence
  Description of Artificial Sequence: Synthetic oligonucleotide
  Target: LAMA2; (-) strand; PAM type: NRG; PAM sequence: GGG
attgccttgttttatggtca

SEQ ID NO: 69554 - DNA, 20 bp, Artificial Sequence
  Description of Artificial Sequence: Synthetic oligonucleotide
  Target: LAMA2; (-) strand; PAM type: NRG; PAM sequence: AGG
aattgccttgttttatggtc

SEQ ID NO: 69555 - DNA, 20 bp, Artificial Sequence
  Description of Artificial Sequence: Synthetic oligonucleotide
  Target: LAMA2; (-) strand; PAM type: NRG; PAM sequence: CAG
taattgccttgttttatggt

SEQ ID NO: 69556 - DNA, 20 bp, Artificial Sequence
  Description of Artificial Sequence: Synthetic oligonucleotide
  Target: LAMA2; (-) strand; PAM type: NRG; PAM sequence: TGG
aatttaattgccttgtttta

SEQ ID NO: 69557 - DNA, 20 bp, Artificial Sequence
  Description of Artificial Sequence: Synthetic oligonucleotide
  Target: LAMA2; (-) strand; PAM type: NRG; PAM sequence: CAG
tctttgatttgtttctatta

SEQ ID NO: 69558 - DNA, 20 bp, Artificial Sequence
  Description of Artificial Sequence: Synthetic oligonucleotide
  Target: LAMA2; (-) strand; PAM type: NRG; PAM sequence: AGG
cactaataaaatttacattt

SEQ ID NO: 69559 - DNA, 20 bp, Artificial Sequence
  Description of Artificial Sequence: Synthetic oligonucleotide
  Target: LAMA2; (-) strand; PAM type: NRG; PAM sequence: TAG
acactaataaaatttacatt

SEQ ID NO: 69560 - DNA, 20 bp, Artificial Sequence
  Description of Artificial Sequence: Synthetic oligonucleotide
  Target: LAMA2; (-) strand; PAM type: NRG; PAM sequence: AAG
gttttctaaccataaaacta

SEQ ID NO: 69561 - DNA, 20 bp, Artificial Sequence
  Description of Artificial Sequence: Synthetic oligonucleotide
  Target: LAMA2; (-) strand; PAM type: NRG; PAM sequence: GAG
catgccattgttgcttcata

SEQ ID NO: 69562 - DNA, 20 bp, Artificial Sequence
  Description of Artificial Sequence: Synthetic oligonucleotide
  Target: LAMA2; (-) strand; PAM type: NRG; PAM sequence: TAG
accatgccattgttgcttca

SEQ ID NO: 69563 - DNA, 20 bp, Artificial Sequence
  Description of Artificial Sequence: Synthetic oligonucleotide
  Target: LAMA2; (-) strand; PAM type: NRG; PAM sequence: AAG
ccaaaatctggtccttggta

SEQ ID NO: 69564 - DNA, 20 bp, Artificial Sequence
  Description of Artificial Sequence: Synthetic oligonucleotide
  Target: LAMA2; (-) strand; PAM type: NRG; PAM sequence: TGG
tagaaccaaaatctggtcct

SEQ ID NO: 69565 - DNA, 20 bp, Artificial Sequence
  Description of Artificial Sequence: Synthetic oligonucleotide
  Target: LAMA2; (-) strand; PAM type: NRG; PAM sequence: TGG
cctaaagtagaaccaaaatc

SEQ ID NO: 69566 - DNA, 20 bp, Artificial Sequence
  Description of Artificial Sequence: Synthetic oligonucleotide
  Target: LAMA2; (-) strand; PAM type: NRG; PAM sequence: TAG
cttcttgtcagggcctaaag

SEQ ID NO: 69567 - DNA, 20 bp, Artificial Sequence
  Description of Artificial Sequence: Synthetic oligonucleotide
  Target: LAMA2; (-) strand; PAM type: NRG; PAM sequence: AAG
agacttcttgtcagggccta

SEQ ID NO: 69568 - DNA, 20 bp, Artificial Sequence
  Description of Artificial Sequence: Synthetic oligonucleotide
  Target: LAMA2; (-) strand; PAM type: NRG; PAM sequence: GGG
gcttacaagacttcttgtca

SEQ ID NO: 69569 - DNA, 20 bp, Artificial Sequence
  Description of Artificial Sequence: Synthetic oligonucleotide
  Target: LAMA2; (-) strand; PAM type: NRG; PAM sequence: AGG
agcttacaagacttcttgtc

SEQ ID NO: 69570 - DNA, 20 bp, Artificial Sequence
  Description of Artificial Sequence: Synthetic oligonucleotide
  Target: LAMA2; (-) strand; PAM type: NRG; PAM sequence: CAG
aagcttacaagacttcttgt

SEQ ID NO: 69571 - DNA, 20 bp, Artificial Sequence
  Description of Artificial Sequence: Synthetic oligonucleotide
  Target: LAMA2; (-) strand; PAM type: NRG; PAM sequence: AAG
gagctctttaaaaagcttac

SEQ ID NO: 69572 - DNA, 20 bp, Artificial Sequence
  Description of Artificial Sequence: Synthetic oligonucleotide
  Target: LAMA2; (-) strand; PAM type: NRG; PAM sequence: AAG
tttgaagtgagctctttaaa

SEQ ID NO: 69573 - DNA, 20 bp, Artificial Sequence
  Description of Artificial Sequence: Synthetic oligonucleotide
  Target: LAMA2; (-) strand; PAM type: NRG; PAM sequence: GAG
tgataactatgatttgaagt

SEQ ID NO: 69574 - DNA, 20 bp, Artificial Sequence
  Description of Artificial Sequence: Synthetic oligonucleotide
  Target: LAMA2; (-) strand; PAM type: NRG; PAM sequence: AAG
agattgataactatgatttg

SEQ ID NO: 69575 - DNA, 20 bp, Artificial Sequence
  Description of Artificial Sequence: Synthetic oligonucleotide
  Target: LAMA2; (-) strand; PAM type: NRG; PAM sequence: AAG
gtacaaagttatgaattagt

SEQ ID NO: 69576 - DNA, 20 bp, Artificial Sequence
  Description of Artificial Sequence: Synthetic oligonucleotide
  Target: LAMA2; (-) strand; PAM type: NRG; PAM sequence: TAG
atatgtacaaagttatgaat

SEQ ID NO: 69577 - DNA, 20 bp, Artificial Sequence
  Description of Artificial Sequence: Synthetic oligonucleotide
  Target: LAMA2; (-) strand; PAM type: NRG; PAM sequence: AAG
gaagataaatgatatgtaca

SEQ ID NO: 69578 - DNA, 20 bp, Artificial Sequence
  Description of Artificial Sequence: Synthetic oligonucleotide
  Target: LAMA2; (-) strand; PAM type: NRG; PAM sequence: AAG
gaaggaagtgcagctcagag

SEQ ID NO: 69579 - DNA, 20 bp, Artificial Sequence
  Description of Artificial Sequence: Synthetic oligonucleotide
  Target: LAMA2; (-) strand; PAM type: NRG; PAM sequence: GAG
aatgaaggaagtgcagctca

SEQ ID NO: 69580 - DNA, 20 bp, Artificial Sequence
  Description of Artificial Sequence: Synthetic oligonucleotide
  Target: LAMA2; (-) strand; PAM type: NRG; PAM sequence: CAG
aaaatgaaggaagtgcagct

SEQ ID NO: 69581 - DNA, 20 bp, Artificial Sequence
  Description of Artificial Sequence: Synthetic oligonucleotide
  Target: LAMA2; (-) strand; PAM type: NRG; PAM sequence: CAG
ttataaaaatgaaggaagtg

SEQ ID NO: 69582 - DNA, 20 bp, Artificial Sequence
  Description of Artificial Sequence: Synthetic oligonucleotide
  Target: LAMA2; (-) strand; PAM type: NRG; PAM sequence: AAG
ccactttataaaaatgaagg

SEQ ID NO: 69583 - DNA, 20 bp, Artificial Sequence
  Description of Artificial Sequence: Synthetic oligonucleotide
  Target: LAMA2; (-) strand; PAM type: NRG; PAM sequence: AGG
tttccactttataaaaatga

SEQ ID NO: 69584 - DNA, 20 bp, Artificial Sequence
  Description of Artificial Sequence: Synthetic oligonucleotide
  Target: LAMA2; (-) strand; PAM type: NRG; PAM sequence: AAG
ctttccactttataaaaatg

SEQ ID NO: 69585 - DNA, 20 bp, Artificial Sequence
  Description of Artificial Sequence: Synthetic oligonucleotide
  Target: LAMA2; (-) strand; PAM type: NRG; PAM sequence: AAG
tacaagaaacattgattctg

SEQ ID NO: 69586 - DNA, 20 bp, Artificial Sequence
  Description of Artificial Sequence: Synthetic oligonucleotide
  Target: LAMA2; (-) strand; PAM type: NRG; PAM sequence: AAG
acaaagggattacagagtac

SEQ ID NO: 69587 - DNA, 20 bp, Artificial Sequence
  Description of Artificial Sequence: Synthetic oligonucleotide
  Target: LAMA2; (-) strand; PAM type: NRG; PAM sequence: GAG
acagctacaaagggattaca

SEQ ID NO: 69588 - DNA, 20 bp, Artificial Sequence
  Description of Artificial Sequence: Synthetic oligonucleotide
  Target: LAMA2; (-) strand; PAM type: NRG; PAM sequence: CAG
atacagctacaaagggatta

SEQ ID NO: 69589 - DNA, 20 bp, Artificial Sequence
  Description of Artificial Sequence: Synthetic oligonucleotide
  Target: LAMA2; (-) strand; PAM type: NRG; PAM sequence: GGG
caaaagcatacagctacaaa

SEQ ID NO: 69590 - DNA, 20 bp, Artificial Sequence
  Description of Artificial Sequence: Synthetic oligonucleotide
  Target: LAMA2; (-) strand; PAM type: NRG; PAM sequence: AGG
gcaaaagcatacagctacaa

SEQ ID NO: 69591 - DNA, 20 bp, Artificial Sequence
  Description of Artificial Sequence: Synthetic oligonucleotide
  Target: LAMA2; (-) strand; PAM type: NRG; PAM sequence: AAG
agcaaaagcatacagctaca

SEQ ID NO: 69592 - DNA, 20 bp, Artificial Sequence
  Description of Artificial Sequence: Synthetic oligonucleotide
  Target: LAMA2; (-) strand; PAM type: NRG; PAM sequence: CAG
ataaagagagcaaaagcata

SEQ ID NO: 69593 - DNA, 20 bp, Artificial Sequence
  Description of Artificial Sequence: Synthetic oligonucleotide
  Target: LAMA2; (-) strand; PAM type: NRG; PAM sequence: AAG
taaataaataaagagagcaa

SEQ ID NO: 69594 - DNA, 20 bp, Artificial Sequence
  Description of Artificial Sequence: Synthetic oligonucleotide
  Target: LAMA2; (-) strand; PAM type: NRG; PAM sequence: GAG
cataattaaataaataaaga

SEQ ID NO: 69595 - DNA, 20 bp, Artificial Sequence
  Description of Artificial Sequence: Synthetic oligonucleotide
  Target: LAMA2; (-) strand; PAM type: NRG; PAM sequence: GAG
cacataattaaataaataaa

SEQ ID NO: 69596 - DNA, 20 bp, Artificial Sequence
  Description of Artificial Sequence: Synthetic oligonucleotide
  Target: LAMA2; (-) strand; PAM type: NRG; PAM sequence: AAG
cccacataattaaataaata

SEQ ID NO: 69597 - DNA, 20 bp, Artificial Sequence
  Description of Artificial Sequence: Synthetic oligonucleotide
  Target: LAMA2; (-) strand; PAM type: NRG; PAM sequence: TGG
atgttcagaaaatatagaat

SEQ ID NO: 69598 - DNA, 20 bp, Artificial Sequence
  Description of Artificial Sequence: Synthetic oligonucleotide
  Target: LAMA2; (-) strand; PAM type: NRG; PAM sequence: TAG
tgttgtatgttcagaaaata

SEQ ID NO: 69599 - DNA, 20 bp, Artificial Sequence
  Description of Artificial Sequence: Synthetic oligonucleotide
  Target: LAMA2; (-) strand; PAM type: NRG; PAM sequence: CAG
ttttctttatgttgtatgtt

SEQ ID NO: 69600 - DNA, 20 bp, Artificial Sequence
  Description of Artificial Sequence: Synthetic oligonucleotide
  Target: LAMA2; (-) strand; PAM type: NRG; PAM sequence: AAG
aagaaaagagaccagggata

SEQ ID NO: 69601 - DNA, 20 bp, Artificial Sequence
  Description of Artificial Sequence: Synthetic oligonucleotide
  Target: LAMA2; (-) strand; PAM type: NRG; PAM sequence: GGG
gaagccaagaaaagagacca

SEQ ID NO: 69602 - DNA, 20 bp, Artificial Sequence
  Description of Artificial Sequence: Synthetic oligonucleotide
  Target: LAMA2; (-) strand; PAM type: NRG; PAM sequence: AGG
ggaagccaagaaaagagacc

SEQ ID NO: 69603 - DNA, 20 bp, Artificial Sequence
  Description of Artificial Sequence: Synthetic oligonucleotide
  Target: LAMA2; (-) strand; PAM type: NRG; PAM sequence: CAG
aggaagccaagaaaagagac

SEQ ID NO: 69604 - DNA, 20 bp, Artificial Sequence
  Description of Artificial Sequence: Synthetic oligonucleotide
  Target: LAMA2; (-) strand; PAM type: NRG; PAM sequence: GAG
atgggaggaagccaagaaaa

SEQ ID NO: 69605 - DNA, 20 bp, Artificial Sequence
  Description of Artificial Sequence: Synthetic oligonucleotide
  Target: LAMA2; (-) strand; PAM type: NRG; PAM sequence: AAG
tcatgggaggaagccaagaa

SEQ ID NO: 69606 - DNA, 20 bp, Artificial Sequence
  Description of Artificial Sequence: Synthetic oligonucleotide
  Target: LAMA2; (-) strand; PAM type: NRG; PAM sequence: AAG
agcaatcatgggaggaagcc

SEQ ID NO: 69607 - DNA, 20 bp, Artificial Sequence
  Description of Artificial Sequence: Synthetic oligonucleotide
  Target: LAMA2; (-) strand; PAM type: NRG; PAM sequence: AAG
gcctcagcaatcatgggagg

SEQ ID NO: 69608 - DNA, 20 bp, Artificial Sequence
  Description of Artificial Sequence: Synthetic oligonucleotide
  Target: LAMA2; (-) strand; PAM type: NRG; PAM sequence: AGG
caggcctcagcaatcatggg

SEQ ID NO: 69609 - DNA, 20 bp, Artificial Sequence
  Description of Artificial Sequence: Synthetic oligonucleotide
  Target: LAMA2; (-) strand; PAM type: NRG; PAM sequence: GAG
ccaggcctcagcaatcatgg

SEQ ID NO: 69610 - DNA, 20 bp, Artificial Sequence
  Description of Artificial Sequence: Synthetic oligonucleotide
  Target: LAMA2; (-) strand; PAM type: NRG; PAM sequence: GGG
tcccaggcctcagcaatcat

SEQ ID NO: 69611 - DNA, 20 bp, Artificial Sequence
  Description of Artificial Sequence: Synthetic oligonucleotide
  Target: LAMA2; (-) strand; PAM type: NRG; PAM sequence: TGG
ttcccaggcctcagcaatca

SEQ ID NO: 69612 - DNA, 20 bp, Artificial Sequence
  Description of Artificial Sequence: Synthetic oligonucleotide
  Target: LAMA2; (-) strand; PAM type: NRG; PAM sequence: CAG
gcctgtactttcccaggcct

SEQ ID NO: 69613 - DNA, 20 bp, Artificial Sequence
  Description of Artificial Sequence: Synthetic oligonucleotide
  Target: LAMA2; (-) strand; PAM type: NRG; PAM sequence: AGG
ggccaggcctgtactttccc

SEQ ID NO: 69614 - DNA, 20 bp, Artificial Sequence
  Description of Artificial Sequence: Synthetic oligonucleotide
  Target: LAMA2; (-) strand; PAM type: NRG; PAM sequence: CAG
aggccaggcctgtactttcc

SEQ ID NO: 69615 - DNA, 20 bp, Artificial Sequence
  Description of Artificial Sequence: Synthetic oligonucleotide
  Target: LAMA2; (-) strand; PAM type: NRG; PAM sequence: AGG
agacctgattggagcaggcc

SEQ ID NO: 69616 - DNA, 20 bp, Artificial Sequence
  Description of Artificial Sequence: Synthetic oligonucleotide
  Target: LAMA2; (-) strand; PAM type: NRG; PAM sequence: CAG
aagacctgattggagcaggc

SEQ ID NO: 69617 - DNA, 20 bp, Artificial Sequence
  Description of Artificial Sequence: Synthetic oligonucleotide
  Target: LAMA2; (-) strand; PAM type: NRG; PAM sequence: AGG
ctgaaagacctgattggagc

SEQ ID NO: 69618 - DNA, 20 bp, Artificial Sequence
  Description of Artificial Sequence: Synthetic oligonucleotide
  Target: LAMA2; (-) strand; PAM type: NRG; PAM sequence: CAG
cctgaaagacctgattggag

SEQ ID NO: 69619 - DNA, 20 bp, Artificial Sequence
  Description of Artificial Sequence: Synthetic oligonucleotide
  Target: LAMA2; (-) strand; PAM type: NRG; PAM sequence: GAG
tgccctgaaagacctgattg

SEQ ID NO: 69620 - DNA, 20 bp, Artificial Sequence
  Description of Artificial Sequence: Synthetic oligonucleotide
  Target: LAMA2; (-) strand; PAM type: NRG; PAM sequence: TGG
tctgccctgaaagacctgat

SEQ ID NO: 69621 - DNA, 20 bp, Artificial Sequence
  Description of Artificial Sequence: Synthetic oligonucleotide
  Target: LAMA2; (-) strand; PAM type: NRG; PAM sequence: AAG
cctgctttggtctgccctga

SEQ ID NO: 69622 - DNA, 20 bp, Artificial Sequence
  Description of Artificial Sequence: Synthetic oligonucleotide
  Target: LAMA2; (-) strand; PAM type: NRG; PAM sequence: TGG
agactccctgtgccctgctt

SEQ ID NO: 69623 - DNA, 20 bp, Artificial Sequence
  Description of Artificial Sequence: Synthetic oligonucleotide
  Target: LAMA2; (-) strand; PAM type: NRG; PAM sequence: AAG
cctgttttgcaggtatgggt

SEQ ID NO: 69624 - DNA, 20 bp, Artificial Sequence
  Description of Artificial Sequence: Synthetic oligonucleotide
  Target: LAMA2; (-) strand; PAM type: NRG; PAM sequence: GGG
cattcctgttttgcaggtat

SEQ ID NO: 69625 - DNA, 20 bp, Artificial Sequence
  Description of Artificial Sequence: Synthetic oligonucleotide
  Target: LAMA2; (-) strand; PAM type: NRG; PAM sequence: TGG
tcattcctgttttgcaggta

SEQ ID NO: 69626 - DNA, 20 bp, Artificial Sequence
  Description of Artificial Sequence: Synthetic oligonucleotide
  Target: LAMA2; (-) strand; PAM type: NRG; PAM sequence: AGG
tggcctcattcctgttttgc

SEQ ID NO: 69627 - DNA, 20 bp, Artificial Sequence
  Description of Artificial Sequence: Synthetic oligonucleotide
  Target: LAMA2; (-) strand; PAM type: NRG; PAM sequence: CAG
atggcctcattcctgttttg

SEQ ID NO: 69628 - DNA, 20 bp, Artificial Sequence
  Description of Artificial Sequence: Synthetic oligonucleotide
  Target: LAMA2; (-) strand; PAM type: NRG; PAM sequence: TGG
actagttctgaccctgacca

SEQ ID NO: 69629 - DNA, 20 bp, Artificial Sequence
  Description of Artificial Sequence: Synthetic oligonucleotide
  Target: LAMA2; (-) strand; PAM type: NRG; PAM sequence: TAG
cctcctccctcagcactgac

SEQ ID NO: 69630 - DNA, 20 bp, Artificial Sequence
  Description of Artificial Sequence: Synthetic oligonucleotide
  Target: LAMA2; (-) strand; PAM type: NRG; PAM sequence: CAG
cggatttttgcctcctccct

SEQ ID NO: 69631 - DNA, 20 bp, Artificial Sequence
  Description of Artificial Sequence: Synthetic oligonucleotide
  Target: LAMA2; (-) strand; PAM type: NRG; PAM sequence: CGG
ggcattgtcactttttctct

SEQ ID NO: 69632 - DNA, 20 bp, Artificial Sequence
  Description of Artificial Sequence: Synthetic oligonucleotide
  Target: LAMA2; (-) strand; PAM type: NRG; PAM sequence: GGG
acatttctaaaacttcacca

SEQ ID NO: 69633 - DNA, 20 bp, Artificial Sequence
  Description of Artificial Sequence: Synthetic oligonucleotide
  Target: LAMA2; (-) strand; PAM type: NRG; PAM sequence: AGG
aacatttctaaaacttcacc

SEQ ID NO: 69634 - DNA, 20 bp, Artificial Sequence
  Description of Artificial Sequence: Synthetic oligonucleotide
  Target: LAMA2; (-) strand; PAM type: NRG; PAM sequence: CAG
taacatttctaaaacttcac

SEQ ID NO: 69635 - DNA, 20 bp, Artificial Sequence
  Description of Artificial Sequence: Synthetic oligonucleotide
  Target: LAMA2; (-) strand; PAM type: NRG; PAM sequence: AGG
acacaaaagccatctcaggc

SEQ ID NO: 69636 - DNA, 20 bp, Artificial Sequence
  Description of Artificial Sequence: Synthetic oligonucleotide
  Target: LAMA2; (-) strand; PAM type: NRG; PAM sequence: CAG
tacacaaaagccatctcagg

SEQ ID NO: 69637 - DNA, 20 bp, Artificial Sequence
  Description of Artificial Sequence: Synthetic oligonucleotide
  Target: LAMA2; (-) strand; PAM type: NRG; PAM sequence: AGG
acttacacaaaagccatctc

SEQ ID NO: 69638 - DNA, 20 bp, Artificial Sequence
  Description of Artificial Sequence: Synthetic oligonucleotide
  Target: LAMA2; (-) strand; PAM type: NRG; PAM sequence: CAG
tacttacacaaaagccatct

SEQ ID NO: 69639 - DNA, 20 bp, Artificial Sequence
  Description of Artificial Sequence: Synthetic oligonucleotide
  Target: LAMA2; (-) strand; PAM type: NRG; PAM sequence: AAG
cagccagcttacttacacaa

SEQ ID NO: 69640 - DNA, 20 bp, Artificial Sequence
  Description of Artificial Sequence: Synthetic oligonucleotide
  Target: LAMA2; (-) strand; PAM type: NRG; PAM sequence: CAG
ctgcccccttcaaagacagc

SEQ ID NO: 69641 - DNA, 20 bp, Artificial Sequence
  Description of Artificial Sequence: Synthetic oligonucleotide
  Target: LAMA2; (-) strand; PAM type: NRG; PAM sequence: CAG
ccatctgcccccttcaaaga

SEQ ID NO: 69642 - DNA, 20 bp, Artificial Sequence
  Description of Artificial Sequence: Synthetic oligonucleotide
  Target: LAMA2; (-) strand; PAM type: NRG; PAM sequence: AAG
agctccatctgcccccttca

SEQ ID NO: 69643 - DNA, 20 bp, Artificial Sequence
  Description of Artificial Sequence: Synthetic oligonucleotide
  Target: LAMA2; (-) strand; PAM type: NRG; PAM sequence: TAG
tatgatgagtttaagcagtc

SEQ ID NO: 69644 - DNA, 20 bp, Artificial Sequence
  Description of Artificial Sequence: Synthetic oligonucleotide
  Target: LAMA2; (-) strand; PAM type: NRG; PAM sequence: CAG
gcttatatgatgagtttaag

SEQ ID NO: 69645 - DNA, 20 bp, Artificial Sequence
  Description of Artificial Sequence: Synthetic oligonucleotide
  Target: LAMA2; (-) strand; PAM type: NRG; PAM sequence: AAG
ctcgcttatatgatgagttt

SEQ ID NO: 69646 - DNA, 20 bp, Artificial Sequence
  Description of Artificial Sequence: Synthetic oligonucleotide
  Target: LAMA2; (-) strand; PAM type: NRG; PAM sequence: GAG
ctcttgctcgcttatatgat

SEQ ID NO: 69647 - DNA, 20 bp, Artificial Sequence
  Description of Artificial Sequence: Synthetic oligonucleotide
  Target: LAMA2; (-) strand; PAM type: NRG; PAM sequence: GAG
tgggaattctgtttaaagga

SEQ ID NO: 69648 - DNA, 20 bp, Artificial Sequence
  Description of Artificial Sequence: Synthetic oligonucleotide
  Target: LAMA2; (-) strand; PAM type: NRG; PAM sequence: GAG
gctgggaattctgtttaaag

SEQ ID NO: 69649 - DNA, 20 bp, Artificial Sequence
  Description of Artificial Sequence: Synthetic oligonucleotide
  Target: LAMA2; (-) strand; PAM type: NRG; PAM sequence: AGG
atgctgggaattctgtttaa

SEQ ID NO: 69650 - DNA, 20 bp, Artificial Sequence
  Description of Artificial Sequence: Synthetic oligonucleotide
  Target: LAMA2; (-) strand; PAM type: NRG; PAM sequence: AAG
catgctgggaattctgttta

SEQ ID NO: 69651 - DNA, 20 bp, Artificial Sequence
  Description of Artificial Sequence: Synthetic oligonucleotide
  Target: LAMA2; (-) strand; PAM type: NRG; PAM sequence: GGG
taagaacaaagagacatgct

SEQ ID NO: 69652 - DNA, 20 bp, Artificial Sequence
  Description of Artificial Sequence: Synthetic oligonucleotide
  Target: LAMA2; (-) strand; PAM type: NRG; PAM sequence: TGG
gtaagaacaaagagacatgc

SEQ ID NO: 69653 - DNA, 20 bp, Artificial Sequence
  Description of Artificial Sequence: Synthetic oligonucleotide
  Target: LAMA2; (-) strand; PAM type: NRG; PAM sequence: GAG
aaataagtagtaagaacaaa

SEQ ID NO: 69654 - DNA, 20 bp, Artificial Sequence
  Description of Artificial Sequence: Synthetic oligonucleotide
  Target: LAMA2; (-) strand; PAM type: NRG; PAM sequence: AAG
aaaaataagtagtaagaaca

SEQ ID NO: 69655 - DNA, 20 bp, Artificial Sequence
  Description of Artificial Sequence: Synthetic oligonucleotide
  Target: LAMA2; (-) strand; PAM type: NRG; PAM sequence: AAG
agtatagaaaaataagtagt

SEQ ID NO: 69656 - DNA, 20 bp, Artificial Sequence
  Description of Artificial Sequence: Synthetic oligonucleotide
  Target: LAMA2; (-) strand; PAM type: NRG; PAM sequence: TAG
ttacagtatagaaaaataag

SEQ ID NO: 69657 - DNA, 20 bp, Artificial Sequence
  Description of Artificial Sequence: Synthetic oligonucleotide
  Target: LAMA2; (-) strand; PAM type: NRG; PAM sequence: AAG
aatttacagtatagaaaaat

SEQ ID NO: 69658 - DNA, 20 bp, Artificial Sequence
  Description of Artificial Sequence: Synthetic oligonucleotide
  Target: LAMA2; (-) strand; PAM type: NRG; PAM sequence: TAG
taaaaatttaatttacagta

SEQ ID NO: 69659 - DNA, 20 bp, Artificial Sequence
  Description of Artificial Sequence: Synthetic oligonucleotide
  Target: LAMA2; (-) strand; PAM type: NRG; PAM sequence: CAG
ttctttaaaaatttaattta

SEQ ID NO: 69660 - DNA, 20 bp, Artificial Sequence
  Description of Artificial Sequence: Synthetic oligonucleotide
  Target: LAMA2; (-) strand; PAM type: NRG; PAM sequence: CAG
tgttttagtggacttttctc

SEQ ID NO: 69661 - DNA, 20 bp, Artificial Sequence
  Description of Artificial Sequence: Synthetic oligonucleotide
  Target: LAMA2; (-) strand; PAM type: NRG; PAM sequence: TGG
ctgttagtaatttgttttag

SEQ ID NO: 69662 - DNA, 20 bp, Artificial Sequence
  Description of Artificial Sequence: Synthetic oligonucleotide
  Target: LAMA2; (-) strand; PAM type: NRG; PAM sequence: TAG
tcactgttagtaatttgttt

SEQ ID NO: 69663 - DNA, 20 bp, Artificial Sequence
  Description of Artificial Sequence: Synthetic oligonucleotide
  Target: LAMA2; (-) strand; PAM type: NRG; PAM sequence: TAG
cactgcttatttgtcactgt

SEQ ID NO: 69664 - DNA, 20 bp, Artificial Sequence
  Description of Artificial Sequence: Synthetic oligonucleotide
  Target: LAMA2; (-) strand; PAM type: NRG; PAM sequence: AAG
tgcacttacatattaacata

SEQ ID NO: 69665 - DNA, 20 bp, Artificial Sequence
  Description of Artificial Sequence: Synthetic oligonucleotide
  Target: LAMA2; (-) strand; PAM type: NRG; PAM sequence: TGG
atgagaatggactaatacaa

SEQ ID NO: 69666 - DNA, 20 bp, Artificial Sequence
  Description of Artificial Sequence: Synthetic oligonucleotide
  Target: LAMA2; (-) strand; PAM type: NRG; PAM sequence: TGG
ctttattagtagcatgagaa

SEQ ID NO: 69667 - DNA, 20 bp, Artificial Sequence
  Description of Artificial Sequence: Synthetic oligonucleotide
  Target: LAMA2; (-) strand; PAM type: NRG; PAM sequence: GAG
tatgtctttattagtagcat

SEQ ID NO: 69668 - DNA, 20 bp, Artificial Sequence
  Description of Artificial Sequence: Synthetic oligonucleotide
  Target: LAMA2; (-) strand; PAM type: NRG; PAM sequence: TAG
cttgggtatgtctttattag

SEQ ID NO: 69669 - DNA, 20 bp, Artificial Sequence
  Description of Artificial Sequence: Synthetic oligonucleotide
  Target: LAMA2; (-) strand; PAM type: NRG; PAM sequence: TAG
agtcttgggtatgtctttat

SEQ ID NO: 69670 - DNA, 20 bp, Artificial Sequence
  Description of Artificial Sequence: Synthetic oligonucleotide
  Target: LAMA2; (-) strand; PAM type: NRG; PAM sequence: GGG
tctataaattatccagtctt

SEQ ID NO: 69671 - DNA, 20 bp, Artificial Sequence
  Description of Artificial Sequence: Synthetic oligonucleotide
  Target: LAMA2; (-) strand; PAM type: NRG; PAM sequence: TGG
ctctataaattatccagtct

SEQ ID NO: 69672 - DNA, 20 bp, Artificial Sequence
  Description of Artificial Sequence: Synthetic oligonucleotide
  Target: LAMA2; (-) strand; PAM type: NRG; PAM sequence: CAG
atttttctctataaattatc

SEQ ID NO: 69673 - DNA, 20 bp, Artificial Sequence
  Description of Artificial Sequence: Synthetic oligonucleotide
  Target: LAMA2; (-) strand; PAM type: NRG; PAM sequence: GAG
ccccagccatgtggaactgt

SEQ ID NO: 69674 - DNA, 20 bp, Artificial Sequence
  Description of Artificial Sequence: Synthetic oligonucleotide
  Target: LAMA2; (-) strand; PAM type: NRG; PAM sequence: TGG
gtgagacctccccagccatg

SEQ ID NO: 69675 - DNA, 20 bp, Artificial Sequence
  Description of Artificial Sequence: Synthetic oligonucleotide
  Target: LAMA2; (-) strand; PAM type: NRG; PAM sequence: CAG
ccatgattgtgagacctccc

SEQ ID NO: 69676 - DNA, 20 bp, Artificial Sequence
  Description of Artificial Sequence: Synthetic oligonucleotide
  Target: LAMA2; (-) strand; PAM type: NRG; PAM sequence: GAG
ttgccttccaccatgattgt

SEQ ID NO: 69677 - DNA, 20 bp, Artificial Sequence
  Description of Artificial Sequence: Synthetic oligonucleotide
  Target: LAMA2; (-) strand; PAM type: NRG; PAM sequence: AAG
tctcttgcctgccaccatgt

SEQ ID NO: 69678 - DNA, 20 bp, Artificial Sequence
  Description of Artificial Sequence: Synthetic oligonucleotide
  Target: LAMA2; (-) strand; PAM type: NRG; PAM sequence: CAG
tctggcgattttataaagtg

SEQ ID NO: 69679 - DNA, 20 bp, Artificial Sequence
  Description of Artificial Sequence: Synthetic oligonucleotide
  Target: LAMA2; (-) strand; PAM type: NRG; PAM sequence: AAG
taatatctggcgattttata

SEQ ID NO: 69680 - DNA, 20 bp, Artificial Sequence
  Description of Artificial Sequence: Synthetic oligonucleotide
  Target: LAMA2; (-) strand; PAM type: NRG; PAM sequence: TGG
taaataagtctcataatatc

SEQ ID NO: 69681 - DNA, 20 bp, Artificial Sequence
  Description of Artificial Sequence: Synthetic oligonucleotide
  Target: LAMA2; (-) strand; PAM type: NRG; PAM sequence: AAG
ctgttctcgtgatagtaaat

SEQ ID NO: 69682 - DNA, 20 bp, Artificial Sequence
  Description of Artificial Sequence: Synthetic oligonucleotide
  Target: LAMA2; (-) strand; PAM type: NRG; PAM sequence: TAG
ttctcatgctgttctcgtga

SEQ ID NO: 69683 - DNA, 20 bp, Artificial Sequence
  Description of Artificial Sequence: Synthetic oligonucleotide
  Target: LAMA2; (-) strand; PAM type: NRG; PAM sequence: AGG
ggtatttgaatcatgagggc

SEQ ID NO: 69684 - DNA, 20 bp, Artificial Sequence
  Description of Artificial Sequence: Synthetic oligonucleotide
  Target: LAMA2; (-) strand; PAM type: NRG; PAM sequence: CAG
aggtatttgaatcatgaggg

SEQ ID NO: 69685 - DNA, 20 bp, Artificial Sequence
  Description of Artificial Sequence: Synthetic oligonucleotide
  Target: LAMA2; (-) strand; PAM type: NRG; PAM sequence: GGG
gggaggtatttgaatcatga

SEQ ID NO: 69686 - DNA, 20 bp, Artificial Sequence
  Description of Artificial Sequence: Synthetic oligonucleotide
  Target: LAMA2; (-) strand; PAM type: NRG; PAM sequence: AGG
tgggaggtatttgaatcatg

SEQ ID NO: 69687 - DNA, 20 bp, Artificial Sequence
  Description of Artificial Sequence: Synthetic oligonucleotide
  Target: LAMA2; (-) strand; PAM type: NRG; PAM sequence: GAG
ttgggaggtatttgaatcat

SEQ ID NO: 69688 - DNA, 20 bp, Artificial Sequence
  Description of Artificial Sequence: Synthetic oligonucleotide
  Target: LAMA2; (-) strand; PAM type: NRG; PAM sequence: AGG
tgtgggagggacacgttggg

SEQ ID NO: 69689 - DNA, 20 bp, Artificial Sequence
  Description of Artificial Sequence: Synthetic oligonucleotide
  Target: LAMA2; (-) strand; PAM type: NRG; PAM sequence: GAG
ttgtgggagggacacgttgg

SEQ ID NO: 69690 - DNA, 20 bp, Artificial Sequence
  Description of Artificial Sequence: Synthetic oligonucleotide
  Target: LAMA2; (-) strand; PAM type: NRG; PAM sequence: GGG
tgttgtgggagggacacgtt

SEQ ID NO: 69691 - DNA, 20 bp, Artificial Sequence
  Description of Artificial Sequence: Synthetic oligonucleotide
  Target: LAMA2; (-) strand; PAM type: NRG; PAM sequence: TGG
gtgttgtgggagggacacgt

SEQ ID NO: 69692 - DNA, 20 bp, Artificial Sequence
  Description of Artificial Sequence: Synthetic oligonucleotide
  Target: LAMA2; (-) strand; PAM type: NRG; PAM sequence: GGG
aatccccatgtgttgtggga

SEQ ID NO: 69693 - DNA, 20 bp, Artificial Sequence
  Description of Artificial Sequence: Synthetic oligonucleotide
  Target: LAMA2; (-) strand; PAM type: NRG; PAM sequence: AGG
taatccccatgtgttgtggg

SEQ ID NO: 69694 - DNA, 20 bp, Artificial Sequence
  Description of Artificial Sequence: Synthetic oligonucleotide
  Target: LAMA2; (-) strand; PAM type: NRG; PAM sequence: GAG
gtaatccccatgtgttgtgg

SEQ ID NO: 69695 - DNA, 20 bp, Artificial Sequence
  Description of Artificial Sequence: Synthetic oligonucleotide
  Target: LAMA2; (-) strand; PAM type: NRG; PAM sequence: GGG
ctgtaatccccatgtgttgt

SEQ ID NO: 69696 - DNA, 20 bp, Artificial Sequence
  Description of Artificial Sequence: Synthetic oligonucleotide
  Target: LAMA2; (-) strand; PAM type: NRG; PAM sequence: TGG
cctgtaatccccatgtgttg

SEQ ID NO: 69697 - DNA, 20 bp, Artificial Sequence
  Description of Artificial Sequence: Synthetic oligonucleotide
  Target: LAMA2; (-) strand; PAM type: NRG; PAM sequence: TAG
ccaaatctcatcttgaattg

SEQ ID NO: 69698 - DNA, 20 bp, Artificial Sequence
  Description of Artificial Sequence: Synthetic oligonucleotide
  Target: LAMA2; (-) strand; PAM type: NRG; PAM sequence: TGG
acataatggtggatatggtt

SEQ ID NO: 69699 - DNA, 20 bp, Artificial Sequence
  Description of Artificial Sequence: Synthetic oligonucleotide
  Target: LAMA2; (-) strand; PAM type: NRG; PAM sequence: TGG
aataaacataatggtggata

SEQ ID NO: 69700 - DNA, 20 bp, Artificial Sequence
  Description of Artificial Sequence: Synthetic oligonucleotide
  Target: LAMA2; (-) strand; PAM type: NRG; PAM sequence: TGG
acattgaataaacataatgg

SEQ ID NO: 69701 - DNA, 20 bp, Artificial Sequence
  Description of Artificial Sequence: Synthetic oligonucleotide
  Target: LAMA2; (-) strand; PAM type: NRG; PAM sequence: TGG
tacacattgaataaacataa

SEQ ID NO: 69702 - DNA, 20 bp, Artificial Sequence
  Description of Artificial Sequence: Synthetic oligonucleotide
  Target: LAMA2; (-) strand; PAM type: NRG; PAM sequence: AGG
ctatagatacagatacatat

SEQ ID NO: 69703 - DNA, 20 bp, Artificial Sequence
  Description of Artificial Sequence: Synthetic oligonucleotide
  Target: LAMA2; (-) strand; PAM type: NRG; PAM sequence: TAG
gctatagatacagatacata

SEQ ID NO: 69704 - DNA, 20 bp, Artificial Sequence
  Description of Artificial Sequence: Synthetic oligonucleotide
  Target: LAMA2; (-) strand; PAM type: NRG; PAM sequence: CAG
tatagatgtggctatagata

SEQ ID NO: 69705 - DNA, 20 bp, Artificial Sequence
  Description of Artificial Sequence: Synthetic oligonucleotide
  Target: LAMA2; (-) strand; PAM type: NRG; PAM sequence: TAG
tctggatatagatgtggcta

SEQ ID NO: 69706 - DNA, 20 bp, Artificial Sequence
  Description of Artificial Sequence: Synthetic oligonucleotide
  Target: LAMA2; (-) strand; PAM type: NRG; PAM sequence: TGG
taattgtctggatatagatg

SEQ ID NO: 69707 - DNA, 20 bp, Artificial Sequence
  Description of Artificial Sequence: Synthetic oligonucleotide
  Target: LAMA2; (-) strand; PAM type: NRG; PAM sequence: TAG
attatgtaattgtctggata

SEQ ID NO: 69708 - DNA, 20 bp, Artificial Sequence
  Description of Artificial Sequence: Synthetic oligonucleotide
  Target: LAMA2; (-) strand; PAM type: NRG; PAM sequence: TGG
tataagattatgtaattgtc

SEQ ID NO: 69709 - DNA, 20 bp, Artificial Sequence
  Description of Artificial Sequence: Synthetic oligonucleotide
  Target: LAMA2; (-) strand; PAM type: NRG; PAM sequence: AAG
ctgtaattgtttcaacatat

SEQ ID NO: 69710 - DNA, 20 bp, Artificial Sequence
  Description of Artificial Sequence: Synthetic oligonucleotide
  Target: LAMA2; (-) strand; PAM type: NRG; PAM sequence: GAG
tgtaaatgatgagtgagtca

SEQ ID NO: 69711 - DNA, 20 bp, Artificial Sequence
  Description of Artificial Sequence: Synthetic oligonucleotide
  Target: LAMA2; (-) strand; PAM type: NRG; PAM sequence: CAG
tatgtaaatgatgagtgagt

SEQ ID NO: 69712 - DNA, 20 bp, Artificial Sequence
  Description of Artificial Sequence: Synthetic oligonucleotide
  Target: LAMA2; (-) strand; PAM type: NRG; PAM sequence: GAG
agcttatgtaaatgatgagt

SEQ ID NO: 69713 - DNA, 20 bp, Artificial Sequence
  Description of Artificial Sequence: Synthetic oligonucleotide
  Target: LAMA2; (-) strand; PAM type: NRG; PAM sequence: GAG
tgaaagcttatgtaaatgat

SEQ ID NO: 69714 - DNA, 20 bp, Artificial Sequence
  Description of Artificial Sequence: Synthetic oligonucleotide
  Target: LAMA2; (-) strand; PAM type: NRG; PAM sequence: AAG
aagtatggtctctctgctga

SEQ ID NO: 69715 - DNA, 20 bp, Artificial Sequence
  Description of Artificial Sequence: Synthetic oligonucleotide
  Target: LAMA2; (-) strand; PAM type: NRG; PAM sequence: TGG
gagggaatggcatataagta

SEQ ID NO: 69716 - DNA, 20 bp, Artificial Sequence
  Description of Artificial Sequence: Synthetic oligonucleotide
  Target: LAMA2; (-) strand; PAM type: NRG; PAM sequence: AAG
aggcagagggaatggcatat

SEQ ID NO: 69717 - DNA, 20 bp, Artificial Sequence
  Description of Artificial Sequence: Synthetic oligonucleotide
  Target: LAMA2; (-) strand; PAM type: NRG; PAM sequence: TGG
aacatatcaggcagagggaa

SEQ ID NO: 69718 - DNA, 20 bp, Artificial Sequence
  Description of Artificial Sequence: Synthetic oligonucleotide
  Target: LAMA2; (-) strand; PAM type: NRG; PAM sequence: GGG
aaacaaacatatcaggcaga

SEQ ID NO: 69719 - DNA, 20 bp, Artificial Sequence
  Description of Artificial Sequence: Synthetic oligonucleotide
  Target: LAMA2; (-) strand; PAM type: NRG; PAM sequence: AGG
aaaacaaacatatcaggcag

SEQ ID NO: 69720 - DNA, 20 bp, Artificial Sequence
  Description of Artificial Sequence: Synthetic oligonucleotide
  Target: LAMA2; (-) strand; PAM type: NRG; PAM sequence: GAG
aaaaacaaacatatcaggca

SEQ ID NO: 69721 - DNA, 20 bp, Artificial Sequence
  Description of Artificial Sequence: Synthetic oligonucleotide
  Target: LAMA2; (-) strand; PAM type: NRG; PAM sequence: CAG
gaaaaaacaaacatatcagg

SEQ ID NO: 69722 - DNA, 20 bp, Artificial Sequence
  Description of Artificial Sequence: Synthetic oligonucleotide
  Target: LAMA2; (-) strand; PAM type: NRG; PAM sequence: AGG
aaagaaaaaacaaacatatc

SEQ ID NO: 69723 - DNA, 20 bp, Artificial Sequence
  Description of Artificial Sequence: Synthetic oligonucleotide
  Target: LAMA2; (-) strand; PAM type: NRG; PAM sequence: CAG
gaaagaaaaaacaaacatat

SEQ ID NO: 69724 - DNA, 20 bp, Artificial Sequence
  Description of Artificial Sequence: Synthetic oligonucleotide
  Target: LAMA2; (-) strand; PAM type: NRG; PAM sequence: AAG
tctgttagggaaaatgaaga

SEQ ID NO: 69725 - DNA, 20 bp, Artificial Sequence
  Description of Artificial Sequence: Synthetic oligonucleotide
  Target: LAMA2; (-) strand; PAM type: NRG; PAM sequence: AAG
tttatctgttagggaaaatg

SEQ ID NO: 69726 - DNA, 20 bp, Artificial Sequence
  Description of Artificial Sequence: Synthetic oligonucleotide
  Target: LAMA2; (-) strand; PAM type: NRG; PAM sequence: GGG
aaatagaagtttatctgtta

SEQ ID NO: 69727 - DNA, 20 bp, Artificial Sequence
  Description of Artificial Sequence: Synthetic oligonucleotide
  Target: LAMA2; (-) strand; PAM type: NRG; PAM sequence: AGG
gaaatagaagtttatctgtt

SEQ ID NO: 69728 - DNA, 20 bp, Artificial Sequence
  Description of Artificial Sequence: Synthetic oligonucleotide
  Target: LAMA2; (-) strand; PAM type: NRG; PAM sequence: TAG
agaaatagaagtttatctgt

SEQ ID NO: 69729 - DNA, 20 bp, Artificial Sequence
  Description of Artificial Sequence: Synthetic oligonucleotide
  Target: LAMA2; (-) strand; PAM type: NRG; PAM sequence: AAG
gaattttcaaggagaaatag

SEQ ID NO: 69730 - DNA, 20 bp, Artificial Sequence
  Description of Artificial Sequence: Synthetic oligonucleotide
  Target: LAMA2; (-) strand; PAM type: NRG; PAM sequence: TAG
gctgaattttcaaggagaaa

SEQ ID NO: 69731 - DNA, 20 bp, Artificial Sequence
  Description of Artificial Sequence: Synthetic oligonucleotide
  Target: LAMA2; (-) strand; PAM type: NRG; PAM sequence: GAG
tcttgagctgaattttcaag

SEQ ID NO: 69732 - DNA, 20 bp, Artificial Sequence
  Description of Artificial Sequence: Synthetic oligonucleotide
  Target: LAMA2; (-) strand; PAM type: NRG; PAM sequence: AGG
aatcttgagctgaattttca

SEQ ID NO: 69733 - DNA, 20 bp, Artificial Sequence
  Description of Artificial Sequence: Synthetic oligonucleotide
  Target: LAMA2; (-) strand; PAM type: NRG; PAM sequence: AAG
taatcttgagctgaattttc

SEQ ID NO: 69734 - DNA, 20 bp, Artificial Sequence
  Description of Artificial Sequence: Synthetic oligonucleotide
  Target: LAMA2; (-) strand; PAM type: NRG; PAM sequence: GAG
ttatcatgggaagtaatctt

SEQ ID NO: 69735 - DNA, 20 bp, Artificial Sequence
  Description of Artificial Sequence: Synthetic oligonucleotide
  Target: LAMA2; (-) strand; PAM type: NRG; PAM sequence: AAG
taagatgggcttatcatggg

SEQ ID NO: 69736 - DNA, 20 bp, Artificial Sequence
  Description of Artificial Sequence: Synthetic oligonucleotide
  Target: LAMA2; (-) strand; PAM type: NRG; PAM sequence: GGG
tactaagatgggcttatcat

SEQ ID NO: 69737 - DNA, 20 bp, Artificial Sequence
  Description of Artificial Sequence: Synthetic oligonucleotide
  Target: LAMA2; (-) strand; PAM type: NRG; PAM sequence: TGG
ttactaagatgggcttatca

SEQ ID NO: 69738 - DNA, 20 bp, Artificial Sequence
  Description of Artificial Sequence: Synthetic oligonucleotide
  Target: LAMA2; (-) strand; PAM type: NRG; PAM sequence: GGG
aataaaaatattactaagat

SEQ ID NO: 69739 - DNA, 20 bp, Artificial Sequence
  Description of Artificial Sequence: Synthetic oligonucleotide
  Target: LAMA2; (-) strand; PAM type: NRG; PAM sequence: TGG
gaataaaaatattactaaga

SEQ ID NO: 69740 - DNA, 20 bp, Artificial Sequence
  Description of Artificial Sequence: Synthetic oligonucleotide
  Target: LAMA2; (-) strand; PAM type: NRG; PAM sequence: AAG
ctgagaataaaaatattact

SEQ ID NO: 69741 - DNA, 20 bp, Artificial Sequence
  Description of Artificial Sequence: Synthetic oligonucleotide
  Target: LAMA2; (-) strand; PAM type: NRG; PAM sequence: GAG
tgccagacagtaaaggatct

SEQ ID NO: 69742 - DNA, 20 bp, Artificial Sequence
  Description of Artificial Sequence: Synthetic oligonucleotide
  Target: LAMA2; (-) strand; PAM type: NRG; PAM sequence: AGG
catattatgccagacagtaa

SEQ ID NO: 69743 - DNA, 20 bp, Artificial Sequence
  Description of Artificial Sequence: Synthetic oligonucleotide
  Target: LAMA2; (-) strand; PAM type: NRG; PAM sequence: AAG
acatattatgccagacagta

SEQ ID NO: 69744 - DNA, 20 bp, Artificial Sequence
  Description of Artificial Sequence: Synthetic oligonucleotide
  Target: LAMA2; (-) strand; PAM type: NRG; PAM sequence: CAG
tgagcacatattatgccaga

SEQ ID NO: 69745 - DNA, 20 bp, Artificial Sequence
  Description of Artificial Sequence: Synthetic oligonucleotide
  Target: LAMA2; (-) strand; PAM type: NRG; PAM sequence: CAG
gttttgagcacatattatgc

SEQ ID NO: 69746 - DNA, 20 bp, Artificial Sequence
  Description of Artificial Sequence: Synthetic oligonucleotide
  Target: LAMA2; (-) strand; PAM type: NRG; PAM sequence: GAG
tccttcatcaaatatgtttt

SEQ ID NO: 69747 - DNA, 20 bp, Artificial Sequence
  Description of Artificial Sequence: Synthetic oligonucleotide
  Target: LAMA2; (-) strand; PAM type: NRG; PAM sequence: CGG
catcaccattttgcatttaa

SEQ ID NO: 69748 - DNA, 20 bp, Artificial Sequence
  Description of Artificial Sequence: Synthetic oligonucleotide
  Target: LAMA2; (-) strand; PAM type: NRG; PAM sequence: AAG
aaatgatatgcgattaaata

SEQ ID NO: 69749 - DNA, 20 bp, Artificial Sequence
  Description of Artificial Sequence: Synthetic oligonucleotide
  Target: LAMA2; (-) strand; PAM type: NRG; PAM sequence: AGG
tcttagacattttattttct

SEQ ID NO: 69750 - DNA, 20 bp, Artificial Sequence
  Description of Artificial Sequence: Synthetic oligonucleotide
  Target: LAMA2; (-) strand; PAM type: NRG; PAM sequence: TAG
atcttagacattttattttc

SEQ ID NO: 69751 - DNA, 20 bp, Artificial Sequence
  Description of Artificial Sequence: Synthetic oligonucleotide
  Target: LAMA2; (-) strand; PAM type: NRG; PAM sequence: TAG
ctccacgccattatctatct

SEQ ID NO: 69752 - DNA, 20 bp, Artificial Sequence
  Description of Artificial Sequence: Synthetic oligonucleotide
  Target: LAMA2; (-) strand; PAM type: NRG; PAM sequence: TGG
caaatttaaaaataattaga

SEQ ID NO: 69753 - DNA, 20 bp, Artificial Sequence
  Description of Artificial Sequence: Synthetic oligonucleotide
  Target: LAMA2; (-) strand; PAM type: NRG; PAM sequence: TAG
gttacaaatttaaaaataat

SEQ ID NO: 69754 - DNA, 20 bp, Artificial Sequence
  Description of Artificial Sequence: Synthetic oligonucleotide
  Target: LAMA2; (-) strand; PAM type: NRG; PAM sequence: AGG
acaattttgtgacgtttgtc

SEQ ID NO: 69755 - DNA, 20 bp, Artificial Sequence
  Description of Artificial Sequence: Synthetic oligonucleotide
  Target: LAMA2; (-) strand; PAM type: NRG; PAM sequence: CAG
aacaattttgtgacgtttgt

SEQ ID NO: 69756 - DNA, 20 bp, Artificial Sequence
  Description of Artificial Sequence: Synthetic oligonucleotide
  Target: LAMA2; (-) strand; PAM type: NRG; PAM sequence: TAG
cttttccatgatataagcct

SEQ ID NO: 69757 - DNA, 20 bp, Artificial Sequence
  Description of Artificial Sequence: Synthetic oligonucleotide
  Target: LAMA2; (-) strand; PAM type: NRG; PAM sequence: AAG
ttttatcttttccatgatat

SEQ ID NO: 69758 - DNA, 20 bp, Artificial Sequence
  Description of Artificial Sequence: Synthetic oligonucleotide
  Target: LAMA2; (-) strand; PAM type: NRG; PAM sequence: AAG
aaaagtagagtaccatttaa

SEQ ID NO: 69759 - DNA, 20 bp, Artificial Sequence
  Description of Artificial Sequence: Synthetic oligonucleotide
  Target: LAMA2; (-) strand; PAM type: NRG; PAM sequence: GAG
gtaatgttttataaaaagta

SEQ ID NO: 69760 - DNA, 20 bp, Artificial Sequence
  Description of Artificial Sequence: Synthetic oligonucleotide
  Target: LAMA2; (-) strand; PAM type: NRG; PAM sequence: TAG
atgtaatgttttataaaaag

SEQ ID NO: 69761 - DNA, 20 bp, Artificial Sequence
  Description of Artificial Sequence: Synthetic oligonucleotide
  Target: LAMA2; (-) strand; PAM type: NRG; PAM sequence: AAG
aaaatgtaatgttttataaa

SEQ ID NO: 69762 - DNA, 20 bp, Artificial Sequence
  Description of Artificial Sequence: Synthetic oligonucleotide
  Target: LAMA2; (-) strand; PAM type: NRG; PAM sequence: TAG
taaagtattatttatttcat

SEQ ID NO: 69763 - DNA, 20 bp, Artificial Sequence
  Description of Artificial Sequence: Synthetic oligonucleotide
  Target: LAMA2; (-) strand; PAM type: NRG; PAM sequence: AAG
agaaatattaaacattcata

SEQ ID NO: 69764 - DNA, 20 bp, Artificial Sequence
  Description of Artificial Sequence: Synthetic oligonucleotide
  Target: LAMA2; (-) strand; PAM type: NRG; PAM sequence: GAG
gctaatgtaattgttggtta

SEQ ID NO: 69765 - DNA, 20 bp, Artificial Sequence
  Description of Artificial Sequence: Synthetic oligonucleotide
  Target: LAMA2; (-) strand; PAM type: NRG; PAM sequence: TAG
aagctaatgtaattgttggt

SEQ ID NO: 69766 - DNA, 20 bp, Artificial Sequence
  Description of Artificial Sequence: Synthetic oligonucleotide
  Target: LAMA2; (-) strand; PAM type: NRG; PAM sequence: TGG
aggaaagctaatgtaattgt

SEQ ID NO: 69767 - DNA, 20 bp, Artificial Sequence
  Description of Artificial Sequence: Synthetic oligonucleotide
  Target: LAMA2; (-) strand; PAM type: NRG; PAM sequence: AAG
ctgtcagtgtgacataagga

SEQ ID NO: 69768 - DNA, 20 bp, Artificial Sequence
  Description of Artificial Sequence: Synthetic oligonucleotide
  Target: LAMA2; (-) strand; PAM type: NRG; PAM sequence: AGG
cattctgtcagtgtgacata

SEQ ID NO: 69769 - DNA, 20 bp, Artificial Sequence
  Description of Artificial Sequence: Synthetic oligonucleotide
  Target: LAMA2; (-) strand; PAM type: NRG; PAM sequence: AAG
acattctgtcagtgtgacat

SEQ ID NO: 69770 - DNA, 20 bp, Artificial Sequence
  Description of Artificial Sequence: Synthetic oligonucleotide
  Target: LAMA2; (-) strand; PAM type: NRG; PAM sequence: CAG
aacacaatgagacattctgt

SEQ ID NO: 69771 - DNA, 20 bp, Artificial Sequence
  Description of Artificial Sequence: Synthetic oligonucleotide
  Target: LAMA2; (-) strand; PAM type: NRG; PAM sequence: GAG
ctctctggccccaacacaat

SEQ ID NO: 69772 - DNA, 20 bp, Artificial Sequence
  Description of Artificial Sequence: Synthetic oligonucleotide
  Target: LAMA2; (-) strand; PAM type: NRG; PAM sequence: TGG
cccctcatctctgtgctctc

SEQ ID NO: 69773 - DNA, 20 bp, Artificial Sequence
  Description of Artificial Sequence: Synthetic oligonucleotide
  Target: LAMA2; (-) strand; PAM type: NRG; PAM sequence: TGG
aatttttcctgatttgccaa

SEQ ID NO: 69774 - DNA, 20 bp, Artificial Sequence
  Description of Artificial Sequence: Synthetic oligonucleotide
  Target: LAMA2; (-) strand; PAM type: NRG; PAM sequence: AGG
ttttcttcagctgaaagttg

SEQ ID NO: 69775 - DNA, 20 bp, Artificial Sequence
  Description of Artificial Sequence: Synthetic oligonucleotide
  Target: LAMA2; (-) strand; PAM type: NRG; PAM sequence: GAG
tttttcttcagctgaaagtt

SEQ ID NO: 69776 - DNA, 20 bp, Artificial Sequence
  Description of Artificial Sequence: Synthetic oligonucleotide
  Target: LAMA2; (-) strand; PAM type: NRG; PAM sequence: AAG
ttgtgtttttcttcagctga

SEQ ID NO: 69777 - DNA, 20 bp, Artificial Sequence
  Description of Artificial Sequence: Synthetic oligonucleotide
  Target: LAMA2; (-) strand; PAM type: NRG; PAM sequence: CAG
tcctgccttgtgtttttctt

SEQ ID NO: 69778 - DNA, 20 bp, Artificial Sequence
  Description of Artificial Sequence: Synthetic oligonucleotide
  Target: LAMA2; (-) strand; PAM type: NRG; PAM sequence: TGG
agtgacccccaactctcatc

SEQ ID NO: 69779 - DNA, 20 bp, Artificial Sequence
  Description of Artificial Sequence: Synthetic oligonucleotide
  Target: LAMA2; (-) strand; PAM type: NRG; PAM sequence: TAG
ttaatcctgttcctccaaaa

SEQ ID NO: 69780 - DNA, 20 bp, Artificial Sequence
  Description of Artificial Sequence: Synthetic oligonucleotide
  Target: LAMA2; (-) strand; PAM type: NRG; PAM sequence: AAG
ctcccaaagagctgccccca

SEQ ID NO: 69781 - DNA, 20 bp, Artificial Sequence
  Description of Artificial Sequence: Synthetic oligonucleotide
  Target: LAMA2; (-) strand; PAM type: NRG; PAM sequence: GAG
cattcttaagatctcccaaa

SEQ ID NO: 69782 - DNA, 20 bp, Artificial Sequence
  Description of Artificial Sequence: Synthetic oligonucleotide
  Target: LAMA2; (-) strand; PAM type: NRG; PAM sequence: AAG
gtcattcttaagatctccca

SEQ ID NO: 69783 - DNA, 20 bp, Artificial Sequence
  Description of Artificial Sequence: Synthetic oligonucleotide
  Target: LAMA2; (-) strand; PAM type: NRG; PAM sequence: AAG
ttcttgtctcagtcattctt

SEQ ID NO: 69784 - DNA, 20 bp, Artificial Sequence
  Description of Artificial Sequence: Synthetic oligonucleotide
  Target: LAMA2; (-) strand; PAM type: NRG; PAM sequence: CAG
tgacaactcagttcttgtct

SEQ ID NO: 69785 - DNA, 20 bp, Artificial Sequence
  Description of Artificial Sequence: Synthetic oligonucleotide
  Target: LAMA2; (-) strand; PAM type: NRG; PAM sequence: CAG
caaaagatcaagtgacaact

SEQ ID NO: 69786 - DNA, 20 bp, Artificial Sequence
  Description of Artificial Sequence: Synthetic oligonucleotide
  Target: LAMA2; (-) strand; PAM type: NRG; PAM sequence: AAG
gtaaatgaattcaaaagatc

SEQ ID NO: 69787 - DNA, 20 bp, Artificial Sequence
  Description of Artificial Sequence: Synthetic oligonucleotide
  Target: LAMA2; (-) strand; PAM type: NRG; PAM sequence: AAG
ccacaggtaaatgaattcaa

SEQ ID NO: 69788 - DNA, 20 bp, Artificial Sequence
  Description of Artificial Sequence: Synthetic oligonucleotide
  Target: LAMA2; (-) strand; PAM type: NRG; PAM sequence: AGG
atcactccaaaaaattccac

SEQ ID NO: 69789 - DNA, 20 bp, Artificial Sequence
  Description of Artificial Sequence: Synthetic oligonucleotide
  Target: LAMA2; (-) strand; PAM type: NRG; PAM sequence: CAG
aatcactccaaaaaattcca

SEQ ID NO: 69790 - DNA, 20 bp, Artificial Sequence
  Description of Artificial Sequence: Synthetic oligonucleotide
  Target: LAMA2; (-) strand; PAM type: NRG; PAM sequence: TAG
gtaaaaattgcaattataaa

SEQ ID NO: 69791 - DNA, 20 bp, Artificial Sequence
  Description of Artificial Sequence: Synthetic oligonucleotide
  Target: LAMA2; (-) strand; PAM type: NRG; PAM sequence: CAG
gttaaaaaaagataatagta

SEQ ID NO: 69792 - DNA, 20 bp, Artificial Sequence
  Description of Artificial Sequence: Synthetic oligonucleotide
  Target: LAMA2; (-) strand; PAM type: NRG; PAM sequence: TAG
tttctgttaaaaaaagataa

SEQ ID NO: 69793 - DNA, 20 bp, Artificial Sequence
  Description of Artificial Sequence: Synthetic oligonucleotide
  Target: LAMA2; (-) strand; PAM type: NRG; PAM sequence: AAG
gttttcttttctgttaaaaa

SEQ ID NO: 69794 - DNA, 20 bp, Artificial Sequence
  Description of Artificial Sequence: Synthetic oligonucleotide
  Target: LAMA2; (-) strand; PAM type: NRG; PAM sequence: AAG
tagagtatgtattgactatt

SEQ ID NO: 69795 - DNA, 20 bp, Artificial Sequence
  Description of Artificial Sequence: Synthetic oligonucleotide
  Target: LAMA2; (-) strand; PAM type: NRG; PAM sequence: GAG
tttataatatttgattatta

SEQ ID NO: 69796 - DNA, 20 bp, Artificial Sequence
  Description of Artificial Sequence: Synthetic oligonucleotide
  Target: LAMA2; (-) strand; PAM type: NRG; PAM sequence: TAG
tttttataatatttgattat

SEQ ID NO: 69797 - DNA, 20 bp, Artificial Sequence
  Description of Artificial Sequence: Synthetic oligonucleotide
  Target: LAMA2; (-) strand; PAM type: NRG; PAM sequence: AAG
aaaaaagaaagtaaattagg

SEQ ID NO: 69798 - DNA, 20 bp, Artificial Sequence
  Description of Artificial Sequence: Synthetic oligonucleotide
  Target: LAMA2; (-) strand; PAM type: NRG; PAM sequence: AGG
attaaaaaagaaagtaaatt

SEQ ID NO: 69799 - DNA, 20 bp, Artificial Sequence
  Description of Artificial Sequence: Synthetic oligonucleotide
  Target: LAMA2; (-) strand; PAM type: NRG; PAM sequence: TAG
aattaaaaaagaaagtaaat

SEQ ID NO: 69800 - DNA, 20 bp, Artificial Sequence
  Description of Artificial Sequence: Synthetic oligonucleotide
  Target: LAMA2; (-) strand; PAM type: NRG; PAM sequence: AAG
aaacaaaaaattaaaaaaga

SEQ ID NO: 69801 - DNA, 20 bp, Artificial Sequence
  Description of Artificial Sequence: Synthetic oligonucleotide
  Target: LAMA2; (-) strand; PAM type: NRG; PAM sequence: AAG
aaagaaacaaaaaattaaaa

SEQ ID NO: 69802 - DNA, 20 bp, Artificial Sequence
  Description of Artificial Sequence: Synthetic oligonucleotide
  Target: LAMA2; (-) strand; PAM type: NRG; PAM sequence: AAG
tggccttagaattgcattga

SEQ ID NO: 69803 - DNA, 20 bp, Artificial Sequence
  Description of Artificial Sequence: Synthetic oligonucleotide
  Target: LAMA2; (-) strand; PAM type: NRG; PAM sequence: TAG
cttgcggacctggttggcct

SEQ ID NO: 69804 - DNA, 20 bp, Artificial Sequence
  Description of Artificial Sequence: Synthetic oligonucleotide
  Target: LAMA2; (-) strand; PAM type: NRG; PAM sequence: TGG
tgctaccttgcggacctggt

SEQ ID NO: 69805 - DNA, 20 bp, Artificial Sequence
  Description of Artificial Sequence: Synthetic oligonucleotide
  Target: LAMA2; (-) strand; PAM type: NRG; PAM sequence: TGG
ctagtgctaccttgcggacc

SEQ ID NO: 69806 - DNA, 20 bp, Artificial Sequence
  Description of Artificial Sequence: Synthetic oligonucleotide
  Target: LAMA2; (-) strand; PAM type: NRG; PAM sequence: CGG
atagatctagtgctaccttg

SEQ ID NO: 69807 - DNA, 20 bp, Artificial Sequence
  Description of Artificial Sequence: Synthetic oligonucleotide
  Target: LAMA2; (-) strand; PAM type: NRG; PAM sequence: TAG
ttatgaaaccagcatagatc

SEQ ID NO: 69808 - DNA, 20 bp, Artificial Sequence
  Description of Artificial Sequence: Synthetic oligonucleotide
  Target: LAMA2; (-) strand; PAM type: NRG; PAM sequence: TAG
aatgttttatgaaaccagca

SEQ ID NO: 69809 - DNA, 20 bp, Artificial Sequence
  Description of Artificial Sequence: Synthetic oligonucleotide
  Target: LAMA2; (-) strand; PAM type: NRG; PAM sequence: CAG
tctacaatgttttatgaaac

SEQ ID NO: 69810 - DNA, 20 bp, Artificial Sequence
  Description of Artificial Sequence: Synthetic oligonucleotide
  Target: LAMA2; (-) strand; PAM type: NRG; PAM sequence: TGG
ctcttaatcactctactgaa

SEQ ID NO: 69811 - DNA, 20 bp, Artificial Sequence
  Description of Artificial Sequence: Synthetic oligonucleotide
  Target: LAMA2; (-) strand; PAM type: NRG; PAM sequence: GAG
accaaagcaatctggctcca

SEQ ID NO: 69812 - DNA, 20 bp, Artificial Sequence
  Description of Artificial Sequence: Synthetic oligonucleotide
  Target: LAMA2; (-) strand; PAM type: NRG; PAM sequence: CAG
gaaccaaagcaatctggctc

SEQ ID NO: 69813 - DNA, 20 bp, Artificial Sequence
  Description of Artificial Sequence: Synthetic oligonucleotide
  Target: LAMA2; (-) strand; PAM type: NRG; PAM sequence: TGG
tgatttgaaccaaagcaatc

SEQ ID NO: 69814 - DNA, 20 bp, Artificial Sequence
  Description of Artificial Sequence: Synthetic oligonucleotide
  Target: LAMA2; (-) strand; PAM type: NRG; PAM sequence: AAG
cagagctatgatttgaacca

SEQ ID NO: 69815 - DNA, 20 bp, Artificial Sequence
  Description of Artificial Sequence: Synthetic oligonucleotide
  Target: LAMA2; (-) strand; PAM type: NRG; PAM sequence: GAG
attacagctagcaagtagca

SEQ ID NO: 69816 - DNA, 20 bp, Artificial Sequence
  Description of Artificial Sequence: Synthetic oligonucleotide
  Target: LAMA2; (-) strand; PAM type: NRG; PAM sequence: CAG
tgattacagctagcaagtag

SEQ ID NO: 69817 - DNA, 20 bp, Artificial Sequence
  Description of Artificial Sequence: Synthetic oligonucleotide
  Target: LAMA2; (-) strand; PAM type: NRG; PAM sequence: TAG
tcctgattacagctagcaag

SEQ ID NO: 69818 - DNA, 20 bp, Artificial Sequence
  Description of Artificial Sequence: Synthetic oligonucleotide
  Target: LAMA2; (-) strand; PAM type: NRG; PAM sequence: AAG
cgctcctgattacagctagc

SEQ ID NO: 69819 - DNA, 20 bp, Artificial Sequence
  Description of Artificial Sequence: Synthetic oligonucleotide
  Target: LAMA2; (-) strand; PAM type: NRG; PAM sequence: TAG
aactcgctcctgattacagc

SEQ ID NO: 69820 - DNA, 20 bp, Artificial Sequence
  Description of Artificial Sequence: Synthetic oligonucleotide
  Target: LAMA2; (-) strand; PAM type: NRG; PAM sequence: CAG
aagtaactcgctcctgatta

SEQ ID NO: 69821 - DNA, 20 bp, Artificial Sequence
  Description of Artificial Sequence: Synthetic oligonucleotide
  Target: LAMA2; (-) strand; PAM type: NRG; PAM sequence: AAG
taagaaggcagagaggtgtt

SEQ ID NO: 69822 - DNA, 20 bp, Artificial Sequence
  Description of Artificial Sequence: Synthetic oligonucleotide
  Target: LAMA2; (-) strand; PAM type: NRG; PAM sequence: AGG
attttattaagaaggcagag

SEQ ID NO: 69823 - DNA, 20 bp, Artificial Sequence
  Description of Artificial Sequence: Synthetic oligonucleotide
  Target: LAMA2; (-) strand; PAM type: NRG; PAM sequence: GAG
tattttattaagaaggcaga

SEQ ID NO: 69824 - DNA, 20 bp, Artificial Sequence
  Description of Artificial Sequence: Synthetic oligonucleotide
  Target: LAMA2; (-) strand; PAM type: NRG; PAM sequence: GAG
tctattttattaagaaggca

SEQ ID NO: 69825 - DNA, 20 bp, Artificial Sequence
  Description of Artificial Sequence: Synthetic oligonucleotide
  Target: LAMA2; (-) strand; PAM type: NRG; PAM sequence: CAG
tctctattttattaagaagg

SEQ ID NO: 69826 - DNA, 20 bp, Artificial Sequence
  Description of Artificial Sequence: Synthetic oligonucleotide
  Target: LAMA2; (-) strand; PAM type: NRG; PAM sequence: AGG
ttatctctattttattaaga

SEQ ID NO: 69827 - DNA, 20 bp, Artificial Sequence
  Description of Artificial Sequence: Synthetic oligonucleotide
  Target: LAMA2; (-) strand; PAM type: NRG; PAM sequence: AAG
attatctctattttattaag

SEQ ID NO: 69828 - DNA, 20 bp, Artificial Sequence
  Description of Artificial Sequence: Synthetic oligonucleotide
  Target: LAMA2; (-) strand; PAM type: NRG; PAM sequence: AAG
actattatctctattttatt

SEQ ID NO: 69829 - DNA, 20 bp, Artificial Sequence
  Description of Artificial Sequence: Synthetic oligonucleotide
  Target: LAMA2; (-) strand; PAM type: NRG; PAM sequence: GAG
gctacacaaaacatccacat

SEQ ID NO: 69830 - DNA, 20 bp, Artificial Sequence
  Description of Artificial Sequence: Synthetic oligonucleotide
  Target: LAMA2; (-) strand; PAM type: NRG; PAM sequence: CAG
aatgtgccaagcactattgt

SEQ ID NO: 69831 - DNA, 20 bp, Artificial Sequence
  Description of Artificial Sequence: Synthetic oligonucleotide
  Target: LAMA2; (-) strand; PAM type: NRG; PAM sequence: AAG
ttgaatgtttgcaatgtgcc

SEQ ID NO: 69832 - DNA, 20 bp, Artificial Sequence
  Description of Artificial Sequence: Synthetic oligonucleotide
  Target: LAMA2; (-) strand; PAM type: NRG; PAM sequence: CAG
ataattataatcataatagc

SEQ ID NO: 69833 - DNA, 20 bp, Artificial Sequence
  Description of Artificial Sequence: Synthetic oligonucleotide
  Target: LAMA2; (-) strand; PAM type: NRG; PAM sequence: TAG
aataataattataatcataa

SEQ ID NO: 69834 - DNA, 20 bp, Artificial Sequence
  Description of Artificial Sequence: Synthetic oligonucleotide
  Target: LAMA2; (-) strand; PAM type: NRG; PAM sequence: TGG
aataattagattataaatat

SEQ ID NO: 69835 - DNA, 20 bp, Artificial Sequence
  Description of Artificial Sequence: Synthetic oligonucleotide
  Target: LAMA2; (-) strand; PAM type: NRG; PAM sequence: TAG
ttgtaaaataaacgaataat

SEQ ID NO: 69836 - DNA, 20 bp, Artificial Sequence
  Description of Artificial Sequence: Synthetic oligonucleotide
  Target: LAMA2; (-) strand; PAM type: NRG; PAM sequence: AGG
gcacatagtagggacagagt

SEQ ID NO: 69837 - DNA, 20 bp, Artificial Sequence
  Description of Artificial Sequence: Synthetic oligonucleotide
  Target: LAMA2; (-) strand; PAM type: NRG; PAM sequence: TAG
ggcacatagtagggacagag

SEQ ID NO: 69838 - DNA, 20 bp, Artificial Sequence
  Description of Artificial Sequence: Synthetic oligonucleotide
  Target: LAMA2; (-) strand; PAM type: NRG; PAM sequence: GAG
cttggcacatagtagggaca

SEQ ID NO: 69839 - DNA, 20 bp, Artificial Sequence
  Description of Artificial Sequence: Synthetic oligonucleotide
  Target: LAMA2; (-) strand; PAM type: NRG; PAM sequence: CAG
agcttggcacatagtaggga

SEQ ID NO: 69840 - DNA, 20 bp, Artificial Sequence
  Description of Artificial Sequence: Synthetic oligonucleotide
  Target: LAMA2; (-) strand; PAM type: NRG; PAM sequence: GGG
tcaaagcttggcacatagta

SEQ ID NO: 69841 - DNA, 20 bp, Artificial Sequence
  Description of Artificial Sequence: Synthetic oligonucleotide
  Target: LAMA2; (-) strand; PAM type: NRG; PAM sequence: AGG
ctcaaagcttggcacatagt

SEQ ID NO: 69842 - DNA, 20 bp, Artificial Sequence
  Description of Artificial Sequence: Synthetic oligonucleotide
  Target: LAMA2; (-) strand; PAM type: NRG; PAM sequence: TAG
cctcaaagcttggcacatag

SEQ ID NO: 69843 - DNA, 20 bp, Artificial Sequence
  Description of Artificial Sequence: Synthetic oligonucleotide
  Target: LAMA2; (-) strand; PAM type: NRG; PAM sequence: TAG
tatcctcaaagcttggcaca

SEQ ID NO: 69844 - DNA, 20 bp, Artificial Sequence
  Description of Artificial Sequence: Synthetic oligonucleotide
  Target: LAMA2; (-) strand; PAM type: NRG; PAM sequence: TGG
tctgccttatcctcaaagct

SEQ ID NO: 69845 - DNA, 20 bp, Artificial Sequence
  Description of Artificial Sequence: Synthetic oligonucleotide
  Target: LAMA2; (-) strand; PAM type: NRG; PAM sequence: AAG
tattttctgccttatcctca

SEQ ID NO: 69846 - DNA, 20 bp, Artificial Sequence
  Description of Artificial Sequence: Synthetic oligonucleotide
  Target: LAMA2; (-) strand; PAM type: NRG; PAM sequence: TAG
gccttttttaccaagatctc

SEQ ID NO: 69847 - DNA, 20 bp, Artificial Sequence
  Description of Artificial Sequence: Synthetic oligonucleotide
  Target: LAMA2; (-) strand; PAM type: NRG; PAM sequence: AAG
tgttttctgccttttttacc

SEQ ID NO: 69848 - DNA, 20 bp, Artificial Sequence
  Description of Artificial Sequence: Synthetic oligonucleotide
  Target: LAMA2; (-) strand; PAM type: NRG; PAM sequence: GAG
tactgagatccctagatctt

SEQ ID NO: 69849 - DNA, 20 bp, Artificial Sequence
  Description of Artificial Sequence: Synthetic oligonucleotide
  Target: LAMA2; (-) strand; PAM type: NRG; PAM sequence: TAG
tgatattttactgagatccc

SEQ ID NO: 69850 - DNA, 20 bp, Artificial Sequence
  Description of Artificial Sequence: Synthetic oligonucleotide
  Target: LAMA2; (-) strand; PAM type: NRG; PAM sequence: GAG
tcatggcttgatattttact

SEQ ID NO: 69851 - DNA, 20 bp, Artificial Sequence
  Description of Artificial Sequence: Synthetic oligonucleotide
  Target: LAMA2; (-) strand; PAM type: NRG; PAM sequence: TGG
accttcctgactaaatctca

SEQ ID NO: 69852 - DNA, 20 bp, Artificial Sequence
  Description of Artificial Sequence: Synthetic oligonucleotide
  Target: LAMA2; (-) strand; PAM type: NRG; PAM sequence: AAG
aagaaagaaagaaaagaaaa

SEQ ID NO: 69853 - DNA, 20 bp, Artificial Sequence
  Description of Artificial Sequence: Synthetic oligonucleotide
  Target: LAMA2; (-) strand; PAM type: NRG; PAM sequence: AAG
agaaagaaagaaagaaagaa

SEQ ID NO: 69854 - DNA, 20 bp, Artificial Sequence
  Description of Artificial Sequence: Synthetic oligonucleotide
  Target: LAMA2; (-) strand; PAM type: NRG; PAM sequence: AAG
aagaaagaaagaaagaaaga

SEQ ID NO: 69855 - DNA, 20 bp, Artificial Sequence
  Description of Artificial Sequence: Synthetic oligonucleotide
  Target: LAMA2; (-) strand; PAM type: NRG; PAM sequence: AAG
aagaaagaaagaaagaaaga

SEQ ID NO: 69856 - DNA, 20 bp, Artificial Sequence
  Description of Artificial Sequence: Synthetic oligonucleotide
  Target: LAMA2; (-) strand; PAM type: NRG; PAM sequence: AAG
aagaaagaaagaaagaaaga

SEQ ID NO: 69857 - DNA, 20 bp, Artificial Sequence
  Description of Artificial Sequence: Synthetic oligonucleotide
  Target: LAMA2; (-) strand; PAM type: NRG; PAM sequence: AAG
aagaaagaaagaaagaaaga

SEQ ID NO: 69858 - DNA, 20 bp, Artificial Sequence
  Description of Artificial Sequence: Synthetic oligonucleotide
  Target: LAMA2; (-) strand; PAM type: NRG; PAM sequence: AAG
aagaaagaaagaaagaaaga

SEQ ID NO: 69859 - DNA, 20 bp, Artificial Sequence
  Description of Artificial Sequence: Synthetic oligonucleotide
  Target: LAMA2; (-) strand; PAM type: NRG; PAM sequence: AAG
aagaaagaaagaaagaaaga

SEQ ID NO: 69860 - DNA, 20 bp, Artificial Sequence
  Description of Artificial Sequence: Synthetic oligonucleotide
  Target: LAMA2; (-) strand; PAM type: NRG; PAM sequence: AAG
aagaaagaaagaaagaaaga

SEQ ID NO: 69861 - DNA, 20 bp, Artificial Sequence
  Description of Artificial Sequence: Synthetic oligonucleotide
  Target: LAMA2; (-) strand; PAM type: NRG; PAM sequence: AAG
aagaaagaaagaaagaaaga

SEQ ID NO: 69862 - DNA, 20 bp, Artificial Sequence
  Description of Artificial Sequence: Synthetic oligonucleotide
  Target: LAMA2; (-) strand; PAM type: NRG; PAM sequence: AAG
aggaaagaaagaaagaaaga

SEQ ID NO: 69863 - DNA, 20 bp, Artificial Sequence
  Description of Artificial Sequence: Synthetic oligonucleotide
  Target: LAMA2; (-) strand; PAM type: NRG; PAM sequence: AAG
aggaaggaaagaaagaaaga

SEQ ID NO: 69864 - DNA, 20 bp, Artificial Sequence
  Description of Artificial Sequence: Synthetic oligonucleotide
  Target: LAMA2; (-) strand; PAM type: NRG; PAM sequence: AAG
aggaaggaaggaaagaaaga

SEQ ID NO: 69865 - DNA, 20 bp, Artificial Sequence
  Description of Artificial Sequence: Synthetic oligonucleotide
  Target: LAMA2; (-) strand; PAM type: NRG; PAM sequence: AAG
aggaaggaaggaaggaaaga

SEQ ID NO: 69866 - DNA, 20 bp, Artificial Sequence
  Description of Artificial Sequence: Synthetic oligonucleotide
  Target: LAMA2; (-) strand; PAM type: NRG; PAM sequence: AAG
aggaaggaaggaaggaagga

SEQ ID NO: 69867 - DNA, 20 bp, Artificial Sequence
  Description of Artificial Sequence: Synthetic oligonucleotide
  Target: LAMA2; (-) strand; PAM type: NRG; PAM sequence: AGG
aggaaggaaggaaggaagga

SEQ ID NO: 69868 - DNA, 20 bp, Artificial Sequence
  Description of Artificial Sequence: Synthetic oligonucleotide
  Target: LAMA2; (-) strand; PAM type: NRG; PAM sequence: AAG
aaggaaggaaggaaggaagg

SEQ ID NO: 69869 - DNA, 20 bp, Artificial Sequence
  Description of Artificial Sequence: Synthetic oligonucleotide
  Target: LAMA2; (-) strand; PAM type: NRG; PAM sequence: AGG
aggaaggaaggaaggaagga

SEQ ID NO: 69870 - DNA, 20 bp, Artificial Sequence
  Description of Artificial Sequence: Synthetic oligonucleotide
  Target: LAMA2; (-) strand; PAM type: NRG; PAM sequence: AAG
aaggaaggaaggaaggaagg

SEQ ID NO: 69871 - DNA, 20 bp, Artificial Sequence
  Description of Artificial Sequence: Synthetic oligonucleotide
  Target: LAMA2; (-) strand; PAM type: NRG; PAM sequence: AGG
aggaaggaaggaaggaagga

SEQ ID NO: 69872 - DNA, 20 bp, Artificial Sequence
  Description of Artificial Sequence: Synthetic oligonucleotide
  Target: LAMA2; (-) strand; PAM type: NRG; PAM sequence: AAG
aaggaaggaaggaaggaagg

SEQ ID NO: 69873 - DNA, 20 bp, Artificial Sequence
  Description of Artificial Sequence: Synthetic oligonucleotide
  Target: LAMA2; (-) strand; PAM type: NRG; PAM sequence: AGG
aggaaggaaggaaggaagga

SEQ ID NO: 69874 - DNA, 20 bp, Artificial Sequence
  Description of Artificial Sequence: Synthetic oligonucleotide
  Target: LAMA2; (-) strand; PAM type: NRG; PAM sequence: AAG
aaggaaggaaggaaggaagg

SEQ ID NO: 69875 - DNA, 20 bp, Artificial Sequence
  Description of Artificial Sequence: Synthetic oligonucleotide
  Target: LAMA2; (-) strand; PAM type: NRG; PAM sequence: AGG
aggaaggaaggaaggaagga

SEQ ID NO: 69876 - DNA, 20 bp, Artificial Sequence
  Description of Artificial Sequence: Synthetic oligonucleotide
  Target: LAMA2; (-) strand; PAM type: NRG; PAM sequence: AAG
aaggaaggaaggaaggaagg

SEQ ID NO: 69877 - DNA, 20 bp, Artificial Sequence
  Description of Artificial Sequence: Synthetic oligonucleotide
  Target: LAMA2; (-) strand; PAM type: NRG; PAM sequence: AGG
aggaaggaaggaaggaagga

SEQ ID NO: 69878 - DNA, 20 bp, Artificial Sequence
  Description of Artificial Sequence: Synthetic oligonucleotide
  Target: LAMA2; (-) strand; PAM type: NRG; PAM sequence: AAG
aaggaaggaaggaaggaagg

SEQ ID NO: 69879 - DNA, 20 bp, Artificial Sequence
  Description of Artificial Sequence: Synthetic oligonucleotide
  Target: LAMA2; (-) strand; PAM type: NRG; PAM sequence: AGG
aggaaggaaggaaggaagga

SEQ ID NO: 69880 - DNA, 20 bp, Artificial Sequence
  Description of Artificial Sequence: Synthetic oligonucleotide
  Target: LAMA2; (-) strand; PAM type: NRG; PAM sequence: AAG
aaggaaggaaggaaggaagg

SEQ ID NO: 69881 - DNA, 20 bp, Artificial Sequence
  Description of Artificial Sequence: Synthetic oligonucleotide
  Target: LAMA2; (-) strand; PAM type: NRG; PAM sequence: AGG
agaaaggaaggaaggaagga

SEQ ID NO: 69882 - DNA, 20 bp, Artificial Sequence
  Description of Artificial Sequence: Synthetic oligonucleotide
  Target: LAMA2; (-) strand; PAM type: NRG; PAM sequence: AAG
aagaaaggaaggaaggaagg

SEQ ID NO: 69883 - DNA, 20 bp, Artificial Sequence
  Description of Artificial Sequence: Synthetic oligonucleotide
  Target: LAMA2; (-) strand; PAM type: NRG; PAM sequence: AGG
agaaagaaaggaaggaagga

SEQ ID NO: 69884 - DNA, 20 bp, Artificial Sequence
  Description of Artificial Sequence: Synthetic oligonucleotide
  Target: LAMA2; (-) strand; PAM type: NRG; PAM sequence: AAG
aagaaagaaaggaaggaagg

SEQ ID NO: 69885 - DNA, 20 bp, Artificial Sequence
  Description of Artificial Sequence: Synthetic oligonucleotide
  Target: LAMA2; (-) strand; PAM type: NRG; PAM sequence: AGG
agaaagaaagaaaggaagga

SEQ ID NO: 69886 - DNA, 20 bp, Artificial Sequence
  Description of Artificial Sequence: Synthetic oligonucleotide
  Target: LAMA2; (-) strand; PAM type: NRG; PAM sequence: AAG
gagaaagaaagaaaggaagg

SEQ ID NO: 69887 - DNA, 20 bp, Artificial Sequence
  Description of Artificial Sequence: Synthetic oligonucleotide
  Target: LAMA2; (-) strand; PAM type: NRG; PAM sequence: AGG
agagagaaagaaagaaagga

SEQ ID NO: 69888 - DNA, 20 bp, Artificial Sequence
  Description of Artificial Sequence: Synthetic oligonucleotide
  Target: LAMA2; (-) strand; PAM type: NRG; PAM sequence: AAG
gagagagaaagaaagaaagg

SEQ ID NO: 69889 - DNA, 20 bp, Artificial Sequence
  Description of Artificial Sequence: Synthetic oligonucleotide
  Target: LAMA2; (-) strand; PAM type: NRG; PAM sequence: AGG
agagagagagaaagaaagaa

SEQ ID NO: 69890 - DNA, 20 bp, Artificial Sequence
  Description of Artificial Sequence: Synthetic oligonucleotide
  Target: LAMA2; (-) strand; PAM type: NRG; PAM sequence: AAG
gagagagagagaaagaaaga

SEQ ID NO: 69891 - DNA, 20 bp, Artificial Sequence
  Description of Artificial Sequence: Synthetic oligonucleotide
  Target: LAMA2; (-) strand; PAM type: NRG; PAM sequence: AAG
gagagagagagagagaaaga

SEQ ID NO: 69892 - DNA, 20 bp, Artificial Sequence
  Description of Artificial Sequence: Synthetic oligonucleotide
  Target: LAMA2; (-) strand; PAM type: NRG; PAM sequence: AAG
gaaagagagagagagagaga

SEQ ID NO: 69893 - DNA, 20 bp, Artificial Sequence
  Description of Artificial Sequence: Synthetic oligonucleotide
  Target: LAMA2; (-) strand; PAM type: NRG; PAM sequence: GAG
gaaagaaagagagagagaga

SEQ ID NO: 69894 - DNA, 20 bp, Artificial Sequence
  Description of Artificial Sequence: Synthetic oligonucleotide
  Target: LAMA2; (-) strand; PAM type: NRG; PAM sequence: GAG
gagaaagaaagagagagaga

SEQ ID NO: 69895 - DNA, 20 bp, Artificial Sequence
  Description of Artificial Sequence: Synthetic oligonucleotide
  Target: LAMA2; (-) strand; PAM type: NRG; PAM sequence: GAG
aggagaaagaaagagagaga

SEQ ID NO: 69896 - DNA, 20 bp, Artificial Sequence
  Description of Artificial Sequence: Synthetic oligonucleotide
  Target: LAMA2; (-) strand; PAM type: NRG; PAM sequence: GAG
gaaggagaaagaaagagaga

SEQ ID NO: 69897 - DNA, 20 bp, Artificial Sequence
  Description of Artificial Sequence: Synthetic oligonucleotide
  Target: LAMA2; (-) strand; PAM type: NRG; PAM sequence: GAG
aggaaggagaaagaaagaga

SEQ ID NO: 69898 - DNA, 20 bp, Artificial Sequence
  Description of Artificial Sequence: Synthetic oligonucleotide
  Target: LAMA2; (-) strand; PAM type: NRG; PAM sequence: GAG
gaaggaaggagaaagaaaga

SEQ ID NO: 69899 - DNA, 20 bp, Artificial Sequence
  Description of Artificial Sequence: Synthetic oligonucleotide
  Target: LAMA2; (-) strand; PAM type: NRG; PAM sequence: GAG
aagaaggaaggagaaagaaa

SEQ ID NO: 69900 - DNA, 20 bp, Artificial Sequence
  Description of Artificial Sequence: Synthetic oligonucleotide
  Target: LAMA2; (-) strand; PAM type: NRG; PAM sequence: AAG
caaagaaggaaggagaaaga

SEQ ID NO: 69901 - DNA, 20 bp, Artificial Sequence
  Description of Artificial Sequence: Synthetic oligonucleotide
  Target: LAMA2; (-) strand; PAM type: NRG; PAM sequence: AAG
gaagcaaagaaggaaggaga

SEQ ID NO: 69902 - DNA, 20 bp, Artificial Sequence
  Description of Artificial Sequence: Synthetic oligonucleotide
  Target: LAMA2; (-) strand; PAM type: NRG; PAM sequence: GAG
gaaggaagcaaagaaggaag

SEQ ID NO: 69903 - DNA, 20 bp, Artificial Sequence
  Description of Artificial Sequence: Synthetic oligonucleotide
  Target: LAMA2; (-) strand; PAM type: NRG; PAM sequence: AGG
aggaaggaagcaaagaagga

SEQ ID NO: 69904 - DNA, 20 bp, Artificial Sequence
  Description of Artificial Sequence: Synthetic oligonucleotide
  Target: LAMA2; (-) strand; PAM type: NRG; PAM sequence: AAG
aaggaaggaagcaaagaagg

SEQ ID NO: 69905 - DNA, 20 bp, Artificial Sequence
  Description of Artificial Sequence: Synthetic oligonucleotide
  Target: LAMA2; (-) strand; PAM type: NRG; PAM sequence: AGG
aggaaggaaggaagcaaaga

SEQ ID NO: 69906 - DNA, 20 bp, Artificial Sequence
  Description of Artificial Sequence: Synthetic oligonucleotide
  Target: LAMA2; (-) strand; PAM type: NRG; PAM sequence: AAG
aaggaaggaaggaagcaaag

SEQ ID NO: 69907 - DNA, 20 bp, Artificial Sequence
  Description of Artificial Sequence: Synthetic oligonucleotide
  Target: LAMA2; (-) strand; PAM type: NRG; PAM sequence: AAG
agaaaggaaggaaggaagca

SEQ ID NO: 69908 - DNA, 20 bp, Artificial Sequence
  Description of Artificial Sequence: Synthetic oligonucleotide
  Target: LAMA2; (-) strand; PAM type: NRG; PAM sequence: AAG
gagagagaaaggaaggaagg

SEQ ID NO: 69909 - DNA, 20 bp, Artificial Sequence
  Description of Artificial Sequence: Synthetic oligonucleotide
  Target: LAMA2; (-) strand; PAM type: NRG; PAM sequence: AGG
agagagagagaaaggaagga

SEQ ID NO: 69910 - DNA, 20 bp, Artificial Sequence
  Description of Artificial Sequence: Synthetic oligonucleotide
  Target: LAMA2; (-) strand; PAM type: NRG; PAM sequence: AAG
gagagagagagaaaggaagg

SEQ ID NO: 69911 - DNA, 20 bp, Artificial Sequence
  Description of Artificial Sequence: Synthetic oligonucleotide
  Target: LAMA2; (-) strand; PAM type: NRG; PAM sequence: AGG
agagagagagagagaaagga

SEQ ID NO: 69912 - DNA, 20 bp, Artificial Sequence
  Description of Artificial Sequence: Synthetic oligonucleotide
  Target: LAMA2; (-) strand; PAM type: NRG; PAM sequence: AAG
gagagagagagagagaaagg

SEQ ID NO: 69913 - DNA, 20 bp, Artificial Sequence
  Description of Artificial Sequence: Synthetic oligonucleotide
  Target: LAMA2; (-) strand; PAM type: NRG; PAM sequence: AGG
agagagagagagagagagaa

SEQ ID NO: 69914 - DNA, 20 bp, Artificial Sequence
  Description of Artificial Sequence: Synthetic oligonucleotide
  Target: LAMA2; (-) strand; PAM type: NRG; PAM sequence: AAG
gagagagagagagagagaga

SEQ ID NO: 69915 - DNA, 20 bp, Artificial Sequence
  Description of Artificial Sequence: Synthetic oligonucleotide
  Target: LAMA2; (-) strand; PAM type: NRG; PAM sequence: GAG
gagagagagagagagagaga

SEQ ID NO: 69916 - DNA, 20 bp, Artificial Sequence
  Description of Artificial Sequence: Synthetic oligonucleotide
  Target: LAMA2; (-) strand; PAM type: NRG; PAM sequence: GAG
aagagagagagagagagaga

SEQ ID NO: 69917 - DNA, 20 bp, Artificial Sequence
  Description of Artificial Sequence: Synthetic oligonucleotide
  Target: LAMA2; (-) strand; PAM type: NRG; PAM sequence: GAG
gaaagagagagagagagaga

SEQ ID NO: 69918 - DNA, 20 bp, Artificial Sequence
  Description of Artificial Sequence: Synthetic oligonucleotide
  Target: LAMA2; (-) strand; PAM type: NRG; PAM sequence: GAG
aagaaagagagagagagaga

SEQ ID NO: 69919 - DNA, 20 bp, Artificial Sequence
  Description of Artificial Sequence: Synthetic oligonucleotide
  Target: LAMA2; (-) strand; PAM type: NRG; PAM sequence: GAG
tcaagaaagagagagagaga

SEQ ID NO: 69920 - DNA, 20 bp, Artificial Sequence
  Description of Artificial Sequence: Synthetic oligonucleotide
  Target: LAMA2; (-) strand; PAM type: NRG; PAM sequence: GAG
tgtcaagaaagagagagaga

SEQ ID NO: 69921 - DNA, 20 bp, Artificial Sequence
  Description of Artificial Sequence: Synthetic oligonucleotide
  Target: LAMA2; (-) strand; PAM type: NRG; PAM sequence: GAG
tctgtcaagaaagagagaga

SEQ ID NO: 69922 - DNA, 20 bp, Artificial Sequence
  Description of Artificial Sequence: Synthetic oligonucleotide
  Target: LAMA2; (-) strand; PAM type: NRG; PAM sequence: GAG
actctgtcaagaaagagaga

SEQ ID NO: 69923 - DNA, 20 bp, Artificial Sequence
  Description of Artificial Sequence: Synthetic oligonucleotide
  Target: LAMA2; (-) strand; PAM type: NRG; PAM sequence: GAG
agactctgtcaagaaagaga

SEQ ID NO: 69924 - DNA, 20 bp, Artificial Sequence
  Description of Artificial Sequence: Synthetic oligonucleotide
  Target: LAMA2; (-) strand; PAM type: NRG; PAM sequence: GAG
gaagactctgtcaagaaaga

SEQ ID NO: 69925 - DNA, 20 bp, Artificial Sequence
  Description of Artificial Sequence: Synthetic oligonucleotide
  Target: LAMA2; (-) strand; PAM type: NRG; PAM sequence: GAG
aggaagactctgtcaagaaa

SEQ ID NO: 69926 - DNA, 20 bp, Artificial Sequence
  Description of Artificial Sequence: Synthetic oligonucleotide
  Target: LAMA2; (-) strand; PAM type: NRG; PAM sequence: AAG
agaggaagactctgtcaaga

SEQ ID NO: 69927 - DNA, 20 bp, Artificial Sequence
  Description of Artificial Sequence: Synthetic oligonucleotide
  Target: LAMA2; (-) strand; PAM type: NRG; PAM sequence: AAG
agacagaggaagactctgtc

SEQ ID NO: 69928 - DNA, 20 bp, Artificial Sequence
  Description of Artificial Sequence: Synthetic oligonucleotide
  Target: LAMA2; (-) strand; PAM type: NRG; PAM sequence: AAG
tccagcctgggagacagagg

SEQ ID NO: 69929 - DNA, 20 bp, Artificial Sequence
  Description of Artificial Sequence: Synthetic oligonucleotide
  Target: LAMA2; (-) strand; PAM type: NRG; PAM sequence: AGG
cactccagcctgggagacag

SEQ ID NO: 69930 - DNA, 20 bp, Artificial Sequence
  Description of Artificial Sequence: Synthetic oligonucleotide
  Target: LAMA2; (-) strand; PAM type: NRG; PAM sequence: GAG
gcactccagcctgggagaca

SEQ ID NO: 69931 - DNA, 20 bp, Artificial Sequence
  Description of Artificial Sequence: Synthetic oligonucleotide
  Target: LAMA2; (-) strand; PAM type: NRG; PAM sequence: CAG
ctgcactccagcctgggaga

SEQ ID NO: 69932 - DNA, 20 bp, Artificial Sequence
  Description of Artificial Sequence: Synthetic oligonucleotide
  Target: LAMA2; (-) strand; PAM type: NRG; PAM sequence: GAG
atcactgcactccagcctgg

SEQ ID NO: 69933 - DNA, 20 bp, Artificial Sequence
  Description of Artificial Sequence: Synthetic oligonucleotide
  Target: LAMA2; (-) strand; PAM type: NRG; PAM sequence: GGG
acatcactgcactccagcct

SEQ ID NO: 69934 - DNA, 20 bp, Artificial Sequence
  Description of Artificial Sequence: Synthetic oligonucleotide
  Target: LAMA2; (-) strand; PAM type: NRG; PAM sequence: TGG
cacatcactgcactccagcc

SEQ ID NO: 69935 - DNA, 20 bp, Artificial Sequence
  Description of Artificial Sequence: Synthetic oligonucleotide
  Target: LAMA2; (-) strand; PAM type: NRG; PAM sequence: CAG
gagatcacatcactgcactc

SEQ ID NO: 69936 - DNA, 20 bp, Artificial Sequence
  Description of Artificial Sequence: Synthetic oligonucleotide
  Target: LAMA2; (-) strand; PAM type: NRG; PAM sequence: GAG
ggtggaggttgcagtgagct

SEQ ID NO: 69937 - DNA, 20 bp, Artificial Sequence
  Description of Artificial Sequence: Synthetic oligonucleotide
  Target: LAMA2; (-) strand; PAM type: NRG; PAM sequence: GAG
cgggaggtggaggttgcagt

SEQ ID NO: 69938 - DNA, 20 bp, Artificial Sequence
  Description of Artificial Sequence: Synthetic oligonucleotide
  Target: LAMA2; (-) strand; PAM type: NRG; PAM sequence: CAG
agcccgggaggtggaggttg

SEQ ID NO: 69939 - DNA, 20 bp, Artificial Sequence
  Description of Artificial Sequence: Synthetic oligonucleotide
  Target: LAMA2; (-) strand; PAM type: NRG; PAM sequence: AGG
tgcttgagcccgggaggtgg

SEQ ID NO: 69940 - DNA, 20 bp, Artificial Sequence
  Description of Artificial Sequence: Synthetic oligonucleotide
  Target: LAMA2; (-) strand; PAM type: NRG; PAM sequence: GAG
ttgcttgagcccgggaggtg

SEQ ID NO: 69941 - DNA, 20 bp, Artificial Sequence
  Description of Artificial Sequence: Synthetic oligonucleotide
  Target: LAMA2; (-) strand; PAM type: NRG; PAM sequence: TGG
aattgcttgagcccgggagg

SEQ ID NO: 69942 - DNA, 20 bp, Artificial Sequence
  Description of Artificial Sequence: Synthetic oligonucleotide
  Target: LAMA2; (-) strand; PAM type: NRG; PAM sequence: AGG
gagaattgcttgagcccggg

SEQ ID NO: 69943 - DNA, 20 bp, Artificial Sequence
  Description of Artificial Sequence: Synthetic oligonucleotide
  Target: LAMA2; (-) strand; PAM type: NRG; PAM sequence: GAG
ggagaattgcttgagcccgg

SEQ ID NO: 69944 - DNA, 20 bp, Artificial Sequence
  Description of Artificial Sequence: Synthetic oligonucleotide
  Target: LAMA2; (-) strand; PAM type: NRG; PAM sequence: GGG
caggagaattgcttgagccc

SEQ ID NO: 69945 - DNA, 20 bp, Artificial Sequence
  Description of Artificial Sequence: Synthetic oligonucleotide
  Target: LAMA2; (-) strand; PAM type: NRG; PAM sequence: CGG
gcaggagaattgcttgagcc

SEQ ID NO: 69946 - DNA, 20 bp, Artificial Sequence
  Description of Artificial Sequence: Synthetic oligonucleotide
  Target: LAMA2; (-) strand; PAM type: NRG; PAM sequence: GAG
ctgaggcaggagaattgctt

SEQ ID NO: 69947 - DNA, 20 bp, Artificial Sequence
  Description of Artificial Sequence: Synthetic oligonucleotide
  Target: LAMA2; (-) strand; PAM type: NRG; PAM sequence: GAG
tacttggaaacctgaggcag

SEQ ID NO: 69948 - DNA, 20 bp, Artificial Sequence
  Description of Artificial Sequence: Synthetic oligonucleotide
  Target: LAMA2; (-) strand; PAM type: NRG; PAM sequence: AGG
gctacttggaaacctgaggc

SEQ ID NO: 69949 - DNA, 20 bp, Artificial Sequence
  Description of Artificial Sequence: Synthetic oligonucleotide
  Target: LAMA2; (-) strand; PAM type: NRG; PAM sequence: CAG
agctacttggaaacctgagg

SEQ ID NO: 69950 - DNA, 20 bp, Artificial Sequence
  Description of Artificial Sequence: Synthetic oligonucleotide
  Target: LAMA2; (-) strand; PAM type: NRG; PAM sequence: AGG
cccagctacttggaaacctg

SEQ ID NO: 69951 - DNA, 20 bp, Artificial Sequence
  Description of Artificial Sequence: Synthetic oligonucleotide
  Target: LAMA2; (-) strand; PAM type: NRG; PAM sequence: GAG
tcccagctacttggaaacct

SEQ ID NO: 69952 - DNA, 20 bp, Artificial Sequence
  Description of Artificial Sequence: Synthetic oligonucleotide
  Target: LAMA2; (-) strand; PAM type: NRG; PAM sequence: TGG
catctgtaatcccagctact

SEQ ID NO: 69953 - DNA, 20 bp, Artificial Sequence
  Description of Artificial Sequence: Synthetic oligonucleotide
  Target: LAMA2; (-) strand; PAM type: NRG; PAM sequence: CAG
gtggtgggcatctgtaatcc

SEQ ID NO: 69954 - DNA, 20 bp, Artificial Sequence
  Description of Artificial Sequence: Synthetic oligonucleotide
  Target: LAMA2; (-) strand; PAM type: NRG; PAM sequence: GGG
aattagcagggcgtggtggt

SEQ ID NO: 69955 - DNA, 20 bp, Artificial Sequence
  Description of Artificial Sequence: Synthetic oligonucleotide
  Target: LAMA2; (-) strand; PAM type: NRG; PAM sequence: TGG
aaattagcagggcgtggtgg

SEQ ID NO: 69956 - DNA, 20 bp, Artificial Sequence
  Description of Artificial Sequence: Synthetic oligonucleotide
  Target: LAMA2; (-) strand; PAM type: NRG; PAM sequence: TGG
caaaaattagcagggcgtgg

SEQ ID NO: 69957 - DNA, 20 bp, Artificial Sequence
  Description of Artificial Sequence: Synthetic oligonucleotide
  Target: LAMA2; (-) strand; PAM type: NRG; PAM sequence: TGG
atacaaaaattagcagggcg

SEQ ID NO: 69958 - DNA, 20 bp, Artificial Sequence
  Description of Artificial Sequence: Synthetic oligonucleotide
  Target: LAMA2; (-) strand; PAM type: NRG; PAM sequence: GGG
taaaaatacaaaaattagca

SEQ ID NO: 69959 - DNA, 20 bp, Artificial Sequence
  Description of Artificial Sequence: Synthetic oligonucleotide
  Target: LAMA2; (-) strand; PAM type: NRG; PAM sequence: AGG
ctaaaaatacaaaaattagc

SEQ ID NO: 69960 - DNA, 20 bp, Artificial Sequence
  Description of Artificial Sequence: Synthetic oligonucleotide
  Target: LAMA2; (-) strand; PAM type: NRG; PAM sequence: CAG
actaaaaatacaaaaattag

SEQ ID NO: 69961 - DNA, 20 bp, Artificial Sequence
  Description of Artificial Sequence: Synthetic oligonucleotide
  Target: LAMA2; (-) strand; PAM type: NRG; PAM sequence: TAG
tctactaaaaatacaaaaat

SEQ ID NO: 69962 - DNA, 20 bp, Artificial Sequence
  Description of Artificial Sequence: Synthetic oligonucleotide
  Target: LAMA2; (-) strand; PAM type: NRG; PAM sequence: TGG
caagaccagtctggccaaca

SEQ ID NO: 69963 - DNA, 20 bp, Artificial Sequence
  Description of Artificial Sequence: Synthetic oligonucleotide
  Target: LAMA2; (-) strand; PAM type: NRG; PAM sequence: TGG
tcaggagttcaagaccagtc

SEQ ID NO: 69964 - DNA, 20 bp, Artificial Sequence
  Description of Artificial Sequence: Synthetic oligonucleotide
  Target: LAMA2; (-) strand; PAM type: NRG; PAM sequence: CAG
tgaggtcaggagttcaagac

SEQ ID NO: 69965 - DNA, 20 bp, Artificial Sequence
  Description of Artificial Sequence: Synthetic oligonucleotide
  Target: LAMA2; (-) strand; PAM type: NRG; PAM sequence: AAG
tcacttgaggtcaggagttc

SEQ ID NO: 69966 - DNA, 20 bp, Artificial Sequence
  Description of Artificial Sequence: Synthetic oligonucleotide
  Target: LAMA2; (-) strand; PAM type: NRG; PAM sequence: GAG
ggcggatcacttgaggtcag

SEQ ID NO: 69967 - DNA, 20 bp, Artificial Sequence
  Description of Artificial Sequence: Synthetic oligonucleotide
  Target: LAMA2; (-) strand; PAM type: NRG; PAM sequence: AGG
tgggcggatcacttgaggtc

SEQ ID NO: 69968 - DNA, 20 bp, Artificial Sequence
  Description of Artificial Sequence: Synthetic oligonucleotide
  Target: LAMA2; (-) strand; PAM type: NRG; PAM sequence: CAG
gtgggcggatcacttgaggt

SEQ ID NO: 69969 - DNA, 20 bp, Artificial Sequence
  Description of Artificial Sequence: Synthetic oligonucleotide
  Target: LAMA2; (-) strand; PAM type: NRG; PAM sequence: AGG
tgaggtgggcggatcacttg

SEQ ID NO: 69970 - DNA, 20 bp, Artificial Sequence
  Description of Artificial Sequence: Synthetic oligonucleotide
  Target: LAMA2; (-) strand; PAM type: NRG; PAM sequence: GAG
ctgaggtgggcggatcactt

SEQ ID NO: 69971 - DNA, 20 bp, Artificial Sequence
  Description of Artificial Sequence: Synthetic oligonucleotide
  Target: LAMA2; (-) strand; PAM type: NRG; PAM sequence: CGG
ctttgggaggctgaggtggg

SEQ ID NO: 69972 - DNA, 20 bp, Artificial Sequence
  Description of Artificial Sequence: Synthetic oligonucleotide
  Target: LAMA2; (-) strand; PAM type: NRG; PAM sequence: GGG
gcactttgggaggctgaggt

SEQ ID NO: 69973 - DNA, 20 bp, Artificial Sequence
  Description of Artificial Sequence: Synthetic oligonucleotide
  Target: LAMA2; (-) strand; PAM type: NRG; PAM sequence: TGG
agcactttgggaggctgagg

SEQ ID NO: 69974 - DNA, 20 bp, Artificial Sequence
  Description of Artificial Sequence: Synthetic oligonucleotide
  Target: LAMA2; (-) strand; PAM type: NRG; PAM sequence: AGG
cccagcactttgggaggctg

SEQ ID NO: 69975 - DNA, 20 bp, Artificial Sequence
  Description of Artificial Sequence: Synthetic oligonucleotide
  Target: LAMA2; (-) strand; PAM type: NRG; PAM sequence: GAG
tcccagcactttgggaggct

SEQ ID NO: 69976 - DNA, 20 bp, Artificial Sequence
  Description of Artificial Sequence: Synthetic oligonucleotide
  Target: LAMA2; (-) strand; PAM type: NRG; PAM sequence: AGG
tgtaatcccagcactttggg

SEQ ID NO: 69977 - DNA, 20 bp, Artificial Sequence
  Description of Artificial Sequence: Synthetic oligonucleotide
  Target: LAMA2; (-) strand; PAM type: NRG; PAM sequence: GAG
ctgtaatcccagcactttgg

SEQ ID NO: 69978 - DNA, 20 bp, Artificial Sequence
  Description of Artificial Sequence: Synthetic oligonucleotide
  Target: LAMA2; (-) strand; PAM type: NRG; PAM sequence: GGG
gcctgtaatcccagcacttt

SEQ ID NO: 69979 - DNA, 20 bp, Artificial Sequence
  Description of Artificial Sequence: Synthetic oligonucleotide
  Target: LAMA2; (-) strand; PAM type: NRG; PAM sequence: TGG
cgcctgtaatcccagcactt

SEQ ID NO: 69980 - DNA, 20 bp, Artificial Sequence
  Description of Artificial Sequence: Synthetic oligonucleotide
  Target: LAMA2; (-) strand; PAM type: NRG; PAM sequence: CAG
gtgactcacgcctgtaatcc

SEQ ID NO: 69981 - DNA, 20 bp, Artificial Sequence
  Description of Artificial Sequence: Synthetic oligonucleotide
  Target: LAMA2; (-) strand; PAM type: NRG; PAM sequence: TGG
aagtcattcctcgccgggtg

SEQ ID NO: 69982 - DNA, 20 bp, Artificial Sequence
  Description of Artificial Sequence: Synthetic oligonucleotide
  Target: LAMA2; (-) strand; PAM type: NRG; PAM sequence: GGG
atagaaagtcattcctcgcc

SEQ ID NO: 69983 - DNA, 20 bp, Artificial Sequence
  Description of Artificial Sequence: Synthetic oligonucleotide
  Target: LAMA2; (-) strand; PAM type: NRG; PAM sequence: CGG
gatagaaagtcattcctcgc

SEQ ID NO: 69984 - DNA, 20 bp, Artificial Sequence
  Description of Artificial Sequence: Synthetic oligonucleotide
  Target: LAMA2; (-) strand; PAM type: NRG; PAM sequence: AAG
tcaattcaacttctgataga

SEQ ID NO: 69985 - DNA, 20 bp, Artificial Sequence
  Description of Artificial Sequence: Synthetic oligonucleotide
  Target: LAMA2; (-) strand; PAM type: NRG; PAM sequence: TAG
tatatcaattcaacttctga

SEQ ID NO: 69986 - DNA, 20 bp, Artificial Sequence
  Description of Artificial Sequence: Synthetic oligonucleotide
  Target: LAMA2; (-) strand; PAM type: NRG; PAM sequence: AGG
gctctatatatgtgccaagt

SEQ ID NO: 69987 - DNA, 20 bp, Artificial Sequence
  Description of Artificial Sequence: Synthetic oligonucleotide
  Target: LAMA2; (-) strand; PAM type: NRG; PAM sequence: TAG
agctctatatatgtgccaag

SEQ ID NO: 69988 - DNA, 20 bp, Artificial Sequence
  Description of Artificial Sequence: Synthetic oligonucleotide
  Target: LAMA2; (-) strand; PAM type: NRG; PAM sequence: AAG
ttcagctctatatatgtgcc

SEQ ID NO: 69989 - DNA, 20 bp, Artificial Sequence
  Description of Artificial Sequence: Synthetic oligonucleotide
  Target: LAMA2; (-) strand; PAM type: NRG; PAM sequence: CAG
gccgaccatctaggttgttt

SEQ ID NO: 69990 - DNA, 20 bp, Artificial Sequence
  Description of Artificial Sequence: Synthetic oligonucleotide
  Target: LAMA2; (-) strand; PAM type: NRG; PAM sequence: AGG
agaaaatatgccgaccatct

SEQ ID NO: 69991 - DNA, 20 bp, Artificial Sequence
  Description of Artificial Sequence: Synthetic oligonucleotide
  Target: LAMA2; (-) strand; PAM type: NRG; PAM sequence: TAG
gagaaaatatgccgaccatc

SEQ ID NO: 69992 - DNA, 20 bp, Artificial Sequence
  Description of Artificial Sequence: Synthetic oligonucleotide
  Target: LAMA2; (-) strand; PAM type: NRG; PAM sequence: GAG
ataatttgactctatttatg

SEQ ID NO: 69993 - DNA, 20 bp, Artificial Sequence
  Description of Artificial Sequence: Synthetic oligonucleotide
  Target: LAMA2; (-) strand; PAM type: NRG; PAM sequence: TGG
agataatttgactctattta

SEQ ID NO: 69994 - DNA, 20 bp, Artificial Sequence
  Description of Artificial Sequence: Synthetic oligonucleotide
  Target: LAMA2; (-) strand; PAM type: NRG; PAM sequence: CAG
agaaagtacatttgaaatta

SEQ ID NO: 69995 - DNA, 20 bp, Artificial Sequence
  Description of Artificial Sequence: Synthetic oligonucleotide
  Target: LAMA2; (-) strand; PAM type: NRG; PAM sequence: AAG
gaaaaatctgttcttggaga

SEQ ID NO: 69996 - DNA, 20 bp, Artificial Sequence
  Description of Artificial Sequence: Synthetic oligonucleotide
  Target: LAMA2; (-) strand; PAM type: NRG; PAM sequence: GAG
aactgaaaaatctgttcttg

SEQ ID NO: 69997 - DNA, 20 bp, Artificial Sequence
  Description of Artificial Sequence: Synthetic oligonucleotide
  Target: LAMA2; (-) strand; PAM type: NRG; PAM sequence: TGG
ttaactgaaaaatctgttct

SEQ ID NO: 69998 - DNA, 20 bp, Artificial Sequence
  Description of Artificial Sequence: Synthetic oligonucleotide
  Target: LAMA2; (-) strand; PAM type: NRG; PAM sequence: AAG
atagcaaagtcactcatcaa

SEQ ID NO: 69999 - DNA, 20 bp, Artificial Sequence
  Description of Artificial Sequence: Synthetic oligonucleotide
  Target: LAMA2; (-) strand; PAM type: NRG; PAM sequence: AAG
ttttcaataacagtatagca

SEQ ID NO: 70000 - DNA, 20 bp, Artificial Sequence
  Description of Artificial Sequence: Synthetic oligonucleotide
  Target: LAMA2; (-) strand; PAM type: NRG; PAM sequence: TAG
accctttttcaataacagta

SEQ ID NO: 70001 - DNA, 20 bp, Artificial Sequence
  Description of Artificial Sequence: Synthetic oligonucleotide
  Target: LAMA2; (-) strand; PAM type: NRG; PAM sequence: CAG
tatagaccctttttcaataa

SEQ ID NO: 70002 - DNA, 20 bp, Artificial Sequence
  Description of Artificial Sequence: Synthetic oligonucleotide
  Target: LAMA2; (-) strand; PAM type: NRG; PAM sequence: TAG
tgtctagcatttgcatatta

SEQ ID NO: 70003 - DNA, 20 bp, Artificial Sequence
  Description of Artificial Sequence: Synthetic oligonucleotide
  Target: LAMA2; (-) strand; PAM type: NRG; PAM sequence: TAG
aattgtgcttcatacatgtc

SEQ ID NO: 70004 - DNA, 20 bp, Artificial Sequence
  Description of Artificial Sequence: Synthetic oligonucleotide
  Target: LAMA2; (-) strand; PAM type: NRG; PAM sequence: AAG
tcagtctcttttcttcctgt

SEQ ID NO: 70005 - DNA, 20 bp, Artificial Sequence
  Description of Artificial Sequence: Synthetic oligonucleotide
  Target: LAMA2; (-) strand; PAM type: NRG; PAM sequence: CAG
ttccctctgagaaccaaatt

SEQ ID NO: 70006 - DNA, 20 bp, Artificial Sequence
  Description of Artificial Sequence: Synthetic oligonucleotide
  Target: LAMA2; (-) strand; PAM type: NRG; PAM sequence: GAG
gagatttttttattccctct

SEQ ID NO: 70007 - DNA, 20 bp, Artificial Sequence
  Description of Artificial Sequence: Synthetic oligonucleotide
  Target: LAMA2; (-) strand; PAM type: NRG; PAM sequence: GAG
catctaagtgtagggctggg

SEQ ID NO: 70008 - DNA, 20 bp, Artificial Sequence
  Description of Artificial Sequence: Synthetic oligonucleotide
  Target: LAMA2; (-) strand; PAM type: NRG; PAM sequence: GGG
tccatctaagtgtagggctg

SEQ ID NO: 70009 - DNA, 20 bp, Artificial Sequence
  Description of Artificial Sequence: Synthetic oligonucleotide
  Target: LAMA2; (-) strand; PAM type: NRG; PAM sequence: GGG
gtccatctaagtgtagggct

SEQ ID NO: 70010 - DNA, 20 bp, Artificial Sequence
  Description of Artificial Sequence: Synthetic oligonucleotide
  Target: LAMA2; (-) strand; PAM type: NRG; PAM sequence: TGG
ggtccatctaagtgtagggc

SEQ ID NO: 70011 - DNA, 20 bp, Artificial Sequence
  Description of Artificial Sequence: Synthetic oligonucleotide
  Target: LAMA2; (-) strand; PAM type: NRG; PAM sequence: GGG
cagaggtccatctaagtgta

SEQ ID NO: 70012 - DNA, 20 bp, Artificial Sequence
  Description of Artificial Sequence: Synthetic oligonucleotide
  Target: LAMA2; (-) strand; PAM type: NRG; PAM sequence: AGG
tcagaggtccatctaagtgt

SEQ ID NO: 70013 - DNA, 20 bp, Artificial Sequence
  Description of Artificial Sequence: Synthetic oligonucleotide
  Target: LAMA2; (-) strand; PAM type: NRG; PAM sequence: TAG
ctcagaggtccatctaagtg

SEQ ID NO: 70014 - DNA, 20 bp, Artificial Sequence
  Description of Artificial Sequence: Synthetic oligonucleotide
  Target: LAMA2; (-) strand; PAM type: NRG; PAM sequence: AAG
acgatctcagaggtccatct

SEQ ID NO: 70015 - DNA, 20 bp, Artificial Sequence
  Description of Artificial Sequence: Synthetic oligonucleotide
  Target: LAMA2; (-) strand; PAM type: NRG; PAM sequence: AGG
tttcatagatacgatctcag

SEQ ID NO: 70016 - DNA, 20 bp, Artificial Sequence
  Description of Artificial Sequence: Synthetic oligonucleotide
  Target: LAMA2; (-) strand; PAM type: NRG; PAM sequence: GAG
ctttcatagatacgatctca

SEQ ID NO: 70017 - DNA, 20 bp, Artificial Sequence
  Description of Artificial Sequence: Synthetic oligonucleotide
  Target: LAMA2; (-) strand; PAM type: NRG; PAM sequence: CAG
aactttcatagatacgatct

SEQ ID NO: 70018 - DNA, 20 bp, Artificial Sequence
  Description of Artificial Sequence: Synthetic oligonucleotide
  Target: LAMA2; (-) strand; PAM type: NRG; PAM sequence: TAG
atagaagtttttaactttca

SEQ ID NO: 70019 - DNA, 20 bp, Artificial Sequence
  Description of Artificial Sequence: Synthetic oligonucleotide
  Target: LAMA2; (-) strand; PAM type: NRG; PAM sequence: AAG
ttatgtcttagatataatag

SEQ ID NO: 70020 - DNA, 20 bp, Artificial Sequence
  Description of Artificial Sequence: Synthetic oligonucleotide
  Target: LAMA2; (-) strand; PAM type: NRG; PAM sequence: TAG
taattatgtcttagatataa

SEQ ID NO: 70021 - DNA, 20 bp, Artificial Sequence
  Description of Artificial Sequence: Synthetic oligonucleotide
  Target: LAMA2; (-) strand; PAM type: NRG; PAM sequence: TAG
atacaccagtaattatgtct

SEQ ID NO: 70022 - DNA, 20 bp, Artificial Sequence
  Description of Artificial Sequence: Synthetic oligonucleotide
  Target: LAMA2; (-) strand; PAM type: NRG; PAM sequence: CAG
agtggtccatgatcatacac

SEQ ID NO: 70023 - DNA, 20 bp, Artificial Sequence
  Description of Artificial Sequence: Synthetic oligonucleotide
  Target: LAMA2; (-) strand; PAM type: NRG; PAM sequence: TGG
ccagaaacaagccattatag

SEQ ID NO: 70024 - DNA, 20 bp, Artificial Sequence
  Description of Artificial Sequence: Synthetic oligonucleotide
  Target: LAMA2; (-) strand; PAM type: NRG; PAM sequence: TAG
ttgccagaaacaagccatta

SEQ ID NO: 70025 - DNA, 20 bp, Artificial Sequence
  Description of Artificial Sequence: Synthetic oligonucleotide
  Target: LAMA2; (-) strand; PAM type: NRG; PAM sequence: AAG
agcaatatattgccagaaac

SEQ ID NO: 70026 - DNA, 20 bp, Artificial Sequence
  Description of Artificial Sequence: Synthetic oligonucleotide
  Target: LAMA2; (-) strand; PAM type: NRG; PAM sequence: CAG
ataataaagcaatatattgc

SEQ ID NO: 70027 - DNA, 20 bp, Artificial Sequence
  Description of Artificial Sequence: Synthetic oligonucleotide
  Target: LAMA2; (-) strand; PAM type: NRG; PAM sequence: AAG
tgccatccagcaatataata

SEQ ID NO: 70028 - DNA, 20 bp, Artificial Sequence
  Description of Artificial Sequence: Synthetic oligonucleotide
  Target: LAMA2; (-) strand; PAM type: NRG; PAM sequence: CAG
ttactgctttccatgccatc

SEQ ID NO: 70029 - DNA, 20 bp, Artificial Sequence
  Description of Artificial Sequence: Synthetic oligonucleotide
  Target: LAMA2; (-) strand; PAM type: NRG; PAM sequence: TGG
aagatagataatgtttactt

SEQ ID NO: 70030 - DNA, 20 bp, Artificial Sequence
  Description of Artificial Sequence: Synthetic oligonucleotide
  Target: LAMA2; (-) strand; PAM type: NRG; PAM sequence: TAG
ttatcccagactagagaaga

SEQ ID NO: 70031 - DNA, 20 bp, Artificial Sequence
  Description of Artificial Sequence: Synthetic oligonucleotide
  Target: LAMA2; (-) strand; PAM type: NRG; PAM sequence: AAG
ttctttatcccagactagag

SEQ ID NO: 70032 - DNA, 20 bp, Artificial Sequence
  Description of Artificial Sequence: Synthetic oligonucleotide
  Target: LAMA2; (-) strand; PAM type: NRG; PAM sequence: GAG
aacttctttatcccagacta

SEQ ID NO: 70033 - DNA, 20 bp, Artificial Sequence
  Description of Artificial Sequence: Synthetic oligonucleotide
  Target: LAMA2; (-) strand; PAM type: NRG; PAM sequence: TAG
aaaacttctttatcccagac

SEQ ID NO: 70034 - DNA, 20 bp, Artificial Sequence
  Description of Artificial Sequence: Synthetic oligonucleotide
  Target: LAMA2; (-) strand; PAM type: NRG; PAM sequence: CAG
ttattaaaacttctttatcc

SEQ ID NO: 70035 - DNA, 20 bp, Artificial Sequence
  Description of Artificial Sequence: Synthetic oligonucleotide
  Target: LAMA2; (-) strand; PAM type: NRG; PAM sequence: CAG
ttcatgctctaattatcctt

SEQ ID NO: 70036 - DNA, 20 bp, Artificial Sequence
  Description of Artificial Sequence: Synthetic oligonucleotide
  Target: LAMA2; (-) strand; PAM type: NRG; PAM sequence: TGG
tatgcaaatatattttttca

SEQ ID NO: 70037 - DNA, 20 bp, Artificial Sequence
  Description of Artificial Sequence: Synthetic oligonucleotide
  Target: LAMA2; (-) strand; PAM type: NRG; PAM sequence: AAG
gatattttatatctagtatc

SEQ ID NO: 70038 - DNA, 20 bp, Artificial Sequence
  Description of Artificial Sequence: Synthetic oligonucleotide
  Target: LAMA2; (-) strand; PAM type: NRG; PAM sequence: TAG
catttcagatattttatatc

SEQ ID NO: 70039 - DNA, 20 bp, Artificial Sequence
  Description of Artificial Sequence: Synthetic oligonucleotide
  Target: LAMA2; (-) strand; PAM type: NRG; PAM sequence: CAG
aaatcttccatcttccattt

SEQ ID NO: 70040 - DNA, 20 bp, Artificial Sequence
  Description of Artificial Sequence: Synthetic oligonucleotide
  Target: LAMA2; (-) strand; PAM type: NRG; PAM sequence: AAG
tctgttgaagttattggtaa

SEQ ID NO: 70041 - DNA, 20 bp, Artificial Sequence
  Description of Artificial Sequence: Synthetic oligonucleotide
  Target: LAMA2; (-) strand; PAM type: NRG; PAM sequence: TGG
aaatcttctgttgaagttat

SEQ ID NO: 70042 - DNA, 20 bp, Artificial Sequence
  Description of Artificial Sequence: Synthetic oligonucleotide
  Target: LAMA2; (-) strand; PAM type: NRG; PAM sequence: AAG
aaaacacaaatcttctgttg

SEQ ID NO: 70043 - DNA, 20 bp, Artificial Sequence
  Description of Artificial Sequence: Synthetic oligonucleotide
  Target: LAMA2; (-) strand; PAM type: NRG; PAM sequence: AGG
aggaagaaggtcctgtctct

SEQ ID NO: 70044 - DNA, 20 bp, Artificial Sequence
  Description of Artificial Sequence: Synthetic oligonucleotide
  Target: LAMA2; (-) strand; PAM type: NRG; PAM sequence: TAG
taggaagaaggtcctgtctc

SEQ ID NO: 70045 - DNA, 20 bp, Artificial Sequence
  Description of Artificial Sequence: Synthetic oligonucleotide
  Target: LAMA2; (-) strand; PAM type: NRG; PAM sequence: AGG
ctaatatttagctaggaaga

SEQ ID NO: 70046 - DNA, 20 bp, Artificial Sequence
  Description of Artificial Sequence: Synthetic oligonucleotide
  Target: LAMA2; (-) strand; PAM type: NRG; PAM sequence: AAG
tctaatatttagctaggaag

SEQ ID NO: 70047 - DNA, 20 bp, Artificial Sequence
  Description of Artificial Sequence: Synthetic oligonucleotide
  Target: LAMA2; (-) strand; PAM type: NRG; PAM sequence: AAG
atctctaatatttagctagg

SEQ ID NO: 70048 - DNA, 20 bp, Artificial Sequence
  Description of Artificial Sequence: Synthetic oligonucleotide
  Target: LAMA2; (-) strand; PAM type: NRG; PAM sequence: AGG
tttatctctaatatttagct

SEQ ID NO: 70049 - DNA, 20 bp, Artificial Sequence
  Description of Artificial Sequence: Synthetic oligonucleotide
  Target: LAMA2; (-) strand; PAM type: NRG; PAM sequence: TAG
ttttatctctaatatttagc

SEQ ID NO: 70050 - DNA, 20 bp, Artificial Sequence
  Description of Artificial Sequence: Synthetic oligonucleotide
  Target: LAMA2; (-) strand; PAM type: NRG; PAM sequence: TAG
aattttttatctctaatatt

SEQ ID NO: 70051 - DNA, 20 bp, Artificial Sequence
  Description of Artificial Sequence: Synthetic oligonucleotide
  Target: LAMA2; (-) strand; PAM type: NRG; PAM sequence: AAG
gggtcttaagtatggacttt

SEQ ID NO: 70052 - DNA, 20 bp, Artificial Sequence
  Description of Artificial Sequence: Synthetic oligonucleotide
  Target: LAMA2; (-) strand; PAM type: NRG; PAM sequence: TGG
ttctttctgggtcttaagta

SEQ ID NO: 70053 - DNA, 20 bp, Artificial Sequence
  Description of Artificial Sequence: Synthetic oligonucleotide
  Target: LAMA2; (-) strand; PAM type: NRG; PAM sequence: AAG
tatttttctttctgggtctt

SEQ ID NO: 70054 - DNA, 20 bp, Artificial Sequence
  Description of Artificial Sequence: Synthetic oligonucleotide
  Target: LAMA2; (-) strand; PAM type: NRG; PAM sequence: GGG
agaatactatttttctttct

SEQ ID NO: 70055 - DNA, 20 bp, Artificial Sequence
  Description of Artificial Sequence: Synthetic oligonucleotide
  Target: LAMA2; (-) strand; PAM type: NRG; PAM sequence: TGG
aagaatactatttttctttc

SEQ ID NO: 70056 - DNA, 20 bp, Artificial Sequence
  Description of Artificial Sequence: Synthetic oligonucleotide
  Target: LAMA2; (-) strand; PAM type: NRG; PAM sequence: AAG
taaatactatgtgttatcaa

SEQ ID NO: 70057 - DNA, 20 bp, Artificial Sequence
  Description of Artificial Sequence: Synthetic oligonucleotide
  Target: LAMA2; (-) strand; PAM type: NRG; PAM sequence: CAG
atgataaatacctgacaatt

SEQ ID NO: 70058 - DNA, 20 bp, Artificial Sequence
  Description of Artificial Sequence: Synthetic oligonucleotide
  Target: LAMA2; (-) strand; PAM type: NRG; PAM sequence: GAG
gcattaaagtaacccaacat

SEQ ID NO: 70059 - DNA, 20 bp, Artificial Sequence
  Description of Artificial Sequence: Synthetic oligonucleotide
  Target: LAMA2; (-) strand; PAM type: NRG; PAM sequence: AAG
aaatatttttcggagcatta

SEQ ID NO: 70060 - DNA, 20 bp, Artificial Sequence
  Description of Artificial Sequence: Synthetic oligonucleotide
  Target: LAMA2; (-) strand; PAM type: NRG; PAM sequence: GAG
ttgagataaaatatttttcg

SEQ ID NO: 70061 - DNA, 20 bp, Artificial Sequence
  Description of Artificial Sequence: Synthetic oligonucleotide
  Target: LAMA2; (-) strand; PAM type: NRG; PAM sequence: CGG
aattgagataaaatattttt

SEQ ID NO: 70062 - DNA, 20 bp, Artificial Sequence
  Description of Artificial Sequence: Synthetic oligonucleotide
  Target: LAMA2; (-) strand; PAM type: NRG; PAM sequence: GAG
gatacattttaaaagcaatt

SEQ ID NO: 70063 - DNA, 20 bp, Artificial Sequence
  Description of Artificial Sequence: Synthetic oligonucleotide
  Target: LAMA2; (-) strand; PAM type: NRG; PAM sequence: AAG
aggattttgatacattttaa

SEQ ID NO: 70064 - DNA, 20 bp, Artificial Sequence
  Description of Artificial Sequence: Synthetic oligonucleotide
  Target: LAMA2; (-) strand; PAM type: NRG; PAM sequence: AGG
tgtagaccagaaacaaagtt

SEQ ID NO: 70065 - DNA, 20 bp, Artificial Sequence
  Description of Artificial Sequence: Synthetic oligonucleotide
  Target: LAMA2; (-) strand; PAM type: NRG; PAM sequence: TAG
gtgtagaccagaaacaaagt

SEQ ID NO: 70066 - DNA, 20 bp, Artificial Sequence
  Description of Artificial Sequence: Synthetic oligonucleotide
  Target: LAMA2; (-) strand; PAM type: NRG; PAM sequence: AAG
aggtgtgtagaccagaaaca

SEQ ID NO: 70067 - DNA, 20 bp, Artificial Sequence
  Description of Artificial Sequence: Synthetic oligonucleotide
  Target: LAMA2; (-) strand; PAM type: NRG; PAM sequence: CAG
acaaatgaaggtgtgtagac

SEQ ID NO: 70068 - DNA, 20 bp, Artificial Sequence
  Description of Artificial Sequence: Synthetic oligonucleotide
  Target: LAMA2; (-) strand; PAM type: NRG; PAM sequence: TAG
gatggacaaatgaaggtgtg

SEQ ID NO: 70069 - DNA, 20 bp, Artificial Sequence
  Description of Artificial Sequence: Synthetic oligonucleotide
  Target: LAMA2; (-) strand; PAM type: NRG; PAM sequence: AGG
tgaaaaagatggacaaatga

SEQ ID NO: 70070 - DNA, 20 bp, Artificial Sequence
  Description of Artificial Sequence: Synthetic oligonucleotide
  Target: LAMA2; (-) strand; PAM type: NRG; PAM sequence: AAG
ctgaaaaagatggacaaatg

SEQ ID NO: 70071 - DNA, 20 bp, Artificial Sequence
  Description of Artificial Sequence: Synthetic oligonucleotide
  Target: LAMA2; (-) strand; PAM type: NRG; PAM sequence: TGG
gggaataaacctgaaaaaga

SEQ ID NO: 70072 - DNA, 20 bp, Artificial Sequence
  Description of Artificial Sequence: Synthetic oligonucleotide
  Target: LAMA2; (-) strand; PAM type: NRG; PAM sequence: AAG
agcagggaataaacctgaaa

SEQ ID NO: 70073 - DNA, 20 bp, Artificial Sequence
  Description of Artificial Sequence: Synthetic oligonucleotide
  Target: LAMA2; (-) strand; PAM type: NRG; PAM sequence: GGG
aagcaagattcaggacagca

SEQ ID NO: 70074 - DNA, 20 bp, Artificial Sequence
  Description of Artificial Sequence: Synthetic oligonucleotide
  Target: LAMA2; (-) strand; PAM type: NRG; PAM sequence: AGG
gaagcaagattcaggacagc

SEQ ID NO: 70075 - DNA, 20 bp, Artificial Sequence
  Description of Artificial Sequence: Synthetic oligonucleotide
  Target: LAMA2; (-) strand; PAM type: NRG; PAM sequence: CAG
agaagcaagattcaggacag

SEQ ID NO: 70076 - DNA, 20 bp, Artificial Sequence
  Description of Artificial Sequence: Synthetic oligonucleotide
  Target: LAMA2; (-) strand; PAM type: NRG; PAM sequence: CAG
attagaagcaagattcagga

SEQ ID NO: 70077 - DNA, 20 bp, Artificial Sequence
  Description of Artificial Sequence: Synthetic oligonucleotide
  Target: LAMA2; (-) strand; PAM type: NRG; PAM sequence: AGG
gagcattagaagcaagattc

SEQ ID NO: 70078 - DNA, 20 bp, Artificial Sequence
  Description of Artificial Sequence: Synthetic oligonucleotide
  Target: LAMA2; (-) strand; PAM type: NRG; PAM sequence: CAG
agagcattagaagcaagatt

SEQ ID NO: 70079 - DNA, 20 bp, Artificial Sequence
  Description of Artificial Sequence: Synthetic oligonucleotide
  Target: LAMA2; (-) strand; PAM type: NRG; PAM sequence: AAG
gtgataagagcattagaagc

SEQ ID NO: 70080 - DNA, 20 bp, Artificial Sequence
  Description of Artificial Sequence: Synthetic oligonucleotide
  Target: LAMA2; (-) strand; PAM type: NRG; PAM sequence: AAG
ggtcgtgataagagcattag

SEQ ID NO: 70081 - DNA, 20 bp, Artificial Sequence
  Description of Artificial Sequence: Synthetic oligonucleotide
  Target: LAMA2; (-) strand; PAM type: NRG; PAM sequence: TAG
attggtcgtgataagagcat

SEQ ID NO: 70082 - DNA, 20 bp, Artificial Sequence
  Description of Artificial Sequence: Synthetic oligonucleotide
  Target: LAMA2; (-) strand; PAM type: NRG; PAM sequence: GAG
tgttgcattggtcgtgataa

SEQ ID NO: 70083 - DNA, 20 bp, Artificial Sequence
  Description of Artificial Sequence: Synthetic oligonucleotide
  Target: LAMA2; (-) strand; PAM type: NRG; PAM sequence: AAG
catgttgcattggtcgtgat

SEQ ID NO: 70084 - DNA, 20 bp, Artificial Sequence
  Description of Artificial Sequence: Synthetic oligonucleotide
  Target: LAMA2; (-) strand; PAM type: NRG; PAM sequence: TGG
tttttctccacatgttgcat

SEQ ID NO: 70085 - DNA, 20 bp, Artificial Sequence
  Description of Artificial Sequence: Synthetic oligonucleotide
  Target: LAMA2; (-) strand; PAM type: NRG; PAM sequence: AGG
accaatttgcagtacatttc

SEQ ID NO: 70086 - DNA, 20 bp, Artificial Sequence
  Description of Artificial Sequence: Synthetic oligonucleotide
  Target: LAMA2; (-) strand; PAM type: NRG; PAM sequence: CAG
taccaatttgcagtacattt

SEQ ID NO: 70087 - DNA, 20 bp, Artificial Sequence
  Description of Artificial Sequence: Synthetic oligonucleotide
  Target: LAMA2; (-) strand; PAM type: NRG; PAM sequence: CAG
ggacatgttctaccaatttg

SEQ ID NO: 70088 - DNA, 20 bp, Artificial Sequence
  Description of Artificial Sequence: Synthetic oligonucleotide
  Target: LAMA2; (-) strand; PAM type: NRG; PAM sequence: GGG
ggttcctcacaggctgccca

SEQ ID NO: 70089 - DNA, 20 bp, Artificial Sequence
  Description of Artificial Sequence: Synthetic oligonucleotide
  Target: LAMA2; (-) strand; PAM type: NRG; PAM sequence: AGG
gggttcctcacaggctgccc

SEQ ID NO: 70090 - DNA, 20 bp, Artificial Sequence
  Description of Artificial Sequence: Synthetic oligonucleotide
  Target: LAMA2; (-) strand; PAM type: NRG; PAM sequence: CAG
cgggttcctcacaggctgcc

SEQ ID NO: 70091 - DNA, 20 bp, Artificial Sequence
  Description of Artificial Sequence: Synthetic oligonucleotide
  Target: LAMA2; (-) strand; PAM type: NRG; PAM sequence: AGG
cgacactgcgggttcctcac

SEQ ID NO: 70092 - DNA, 20 bp, Artificial Sequence
  Description of Artificial Sequence: Synthetic oligonucleotide
  Target: LAMA2; (-) strand; PAM type: NRG; PAM sequence: CAG
tcgacactgcgggttcctca

SEQ ID NO: 70093 - DNA, 20 bp, Artificial Sequence
  Description of Artificial Sequence: Synthetic oligonucleotide
  Target: LAMA2; (-) strand; PAM type: NRG; PAM sequence: GGG
gattgcagattcgacactgc

SEQ ID NO: 70094 - DNA, 20 bp, Artificial Sequence
  Description of Artificial Sequence: Synthetic oligonucleotide
  Target: LAMA2; (-) strand; PAM type: NRG; PAM sequence: CGG
tgattgcagattcgacactg

SEQ ID NO: 70095 - DNA, 20 bp, Artificial Sequence
  Description of Artificial Sequence: Synthetic oligonucleotide
  Target: LAMA2; (-) strand; PAM type: NRG; PAM sequence: CAG
gattgctgctgttttgattg

SEQ ID NO: 70096 - DNA, 20 bp, Artificial Sequence
  Description of Artificial Sequence: Synthetic oligonucleotide
  Target: LAMA2; (-) strand; PAM type: NRG; PAM sequence: TGG
acactaaaatacatacggtt

SEQ ID NO: 70097 - DNA, 20 bp, Artificial Sequence
  Description of Artificial Sequence: Synthetic oligonucleotide
  Target: LAMA2; (-) strand; PAM type: NRG; PAM sequence: CGG
cctacacactaaaatacata

SEQ ID NO: 70098 - DNA, 20 bp, Artificial Sequence
  Description of Artificial Sequence: Synthetic oligonucleotide
  Target: LAMA2; (-) strand; PAM type: NRG; PAM sequence: CAG
tcacaattatagatcctacc

SEQ ID NO: 70099 - DNA, 20 bp, Artificial Sequence
  Description of Artificial Sequence: Synthetic oligonucleotide
  Target: LAMA2; (-) strand; PAM type: NRG; PAM sequence: TAG
gcctcaacatctcacaatta

SEQ ID NO: 70100 - DNA, 20 bp, Artificial Sequence
  Description of Artificial Sequence: Synthetic oligonucleotide
  Target: LAMA2; (-) strand; PAM type: NRG; PAM sequence: TGG
cccttgaatttaatgcaact

SEQ ID NO: 70101 - DNA, 20 bp, Artificial Sequence
  Description of Artificial Sequence: Synthetic oligonucleotide
  Target: LAMA2; (-) strand; PAM type: NRG; PAM sequence: TAG
aaaagaattctaggaattct

SEQ ID NO: 70102 - DNA, 20 bp, Artificial Sequence
  Description of Artificial Sequence: Synthetic oligonucleotide
  Target: LAMA2; (-) strand; PAM type: NRG; PAM sequence: AGG
ttaatggtaaaaagaattct

SEQ ID NO: 70103 - DNA, 20 bp, Artificial Sequence
  Description of Artificial Sequence: Synthetic oligonucleotide
  Target: LAMA2; (-) strand; PAM type: NRG; PAM sequence: TAG
cttaatggtaaaaagaattc

SEQ ID NO: 70104 - DNA, 20 bp, Artificial Sequence
  Description of Artificial Sequence: Synthetic oligonucleotide
  Target: LAMA2; (-) strand; PAM type: NRG; PAM sequence: AAG
aagaagctcttaatggtaaa

SEQ ID NO: 70105 - DNA, 20 bp, Artificial Sequence
  Description of Artificial Sequence: Synthetic oligonucleotide
  Target: LAMA2; (-) strand; PAM type: NRG; PAM sequence: TGG
ggccaggaagaagctcttaa

SEQ ID NO: 70106 - DNA, 20 bp, Artificial Sequence
  Description of Artificial Sequence: Synthetic oligonucleotide
  Target: LAMA2; (-) strand; PAM type: NRG; PAM sequence: AAG
gacagagaggggccaggaag

SEQ ID NO: 70107 - DNA, 20 bp, Artificial Sequence
  Description of Artificial Sequence: Synthetic oligonucleotide
  Target: LAMA2; (-) strand; PAM type: NRG; PAM sequence: AAG
aatgacagagaggggccagg

SEQ ID NO: 70108 - DNA, 20 bp, Artificial Sequence
  Description of Artificial Sequence: Synthetic oligonucleotide
  Target: LAMA2; (-) strand; PAM type: NRG; PAM sequence: AGG
ctgaatgacagagaggggcc

SEQ ID NO: 70109 - DNA, 20 bp, Artificial Sequence
  Description of Artificial Sequence: Synthetic oligonucleotide
  Target: LAMA2; (-) strand; PAM type: NRG; PAM sequence: CAG
gctgaatgacagagaggggc

SEQ ID NO: 70110 - DNA, 20 bp, Artificial Sequence
  Description of Artificial Sequence: Synthetic oligonucleotide
  Target: LAMA2; (-) strand; PAM type: NRG; PAM sequence: GGG
gtttgctgaatgacagagag

SEQ ID NO: 70111 - DNA, 20 bp, Artificial Sequence
  Description of Artificial Sequence: Synthetic oligonucleotide
  Target: LAMA2; (-) strand; PAM type: NRG; PAM sequence: GGG
tgtttgctgaatgacagaga

SEQ ID NO: 70112 - DNA, 20 bp, Artificial Sequence
  Description of Artificial Sequence: Synthetic oligonucleotide
  Target: LAMA2; (-) strand; PAM type: NRG; PAM sequence: AGG
atgtttgctgaatgacagag

SEQ ID NO: 70113 - DNA, 20 bp, Artificial Sequence
  Description of Artificial Sequence: Synthetic oligonucleotide
  Target: LAMA2; (-) strand; PAM type: NRG; PAM sequence: GAG
aatgtttgctgaatgacaga

SEQ ID NO: 70114 - DNA, 20 bp, Artificial Sequence
  Description of Artificial Sequence: Synthetic oligonucleotide
  Target: LAMA2; (-) strand; PAM type: NRG; PAM sequence: GAG
ataatgtttgctgaatgaca

SEQ ID NO: 70115 - DNA, 20 bp, Artificial Sequence
  Description of Artificial Sequence: Synthetic oligonucleotide
  Target: LAMA2; (-) strand; PAM type: NRG; PAM sequence: CAG
caataatgtttgctgaatga

SEQ ID NO: 70116 - DNA, 20 bp, Artificial Sequence
  Description of Artificial Sequence: Synthetic oligonucleotide
  Target: LAMA2; (-) strand; PAM type: NRG; PAM sequence: AGG
cactgtacttagcacatagc

SEQ ID NO: 70117 - DNA, 20 bp, Artificial Sequence
  Description of Artificial Sequence: Synthetic oligonucleotide
  Target: LAMA2; (-) strand; PAM type: NRG; PAM sequence: CAG
tcactgtacttagcacatag

SEQ ID NO: 70118 - DNA, 20 bp, Artificial Sequence
  Description of Artificial Sequence: Synthetic oligonucleotide
  Target: LAMA2; (-) strand; PAM type: NRG; PAM sequence: TAG
caatcactgtacttagcaca

SEQ ID NO: 70119 - DNA, 20 bp, Artificial Sequence
  Description of Artificial Sequence: Synthetic oligonucleotide
  Target: LAMA2; (-) strand; PAM type: NRG; PAM sequence: TAG
tcatctccaatcactgtact

SEQ ID NO: 70120 - DNA, 20 bp, Artificial Sequence
  Description of Artificial Sequence: Synthetic oligonucleotide
  Target: LAMA2; (-) strand; PAM type: NRG; PAM sequence: TGG
gactgccacaggccttcagc

SEQ ID NO: 70121 - DNA, 20 bp, Artificial Sequence
  Description of Artificial Sequence: Synthetic oligonucleotide
  Target: LAMA2; (-) strand; PAM type: NRG; PAM sequence: CAG
caatgactgccacaggcctt

SEQ ID NO: 70122 - DNA, 20 bp, Artificial Sequence
  Description of Artificial Sequence: Synthetic oligonucleotide
  Target: LAMA2; (-) strand; PAM type: NRG; PAM sequence: AGG
gtaaacccaatgactgccac

SEQ ID NO: 70123 - DNA, 20 bp, Artificial Sequence
  Description of Artificial Sequence: Synthetic oligonucleotide
  Target: LAMA2; (-) strand; PAM type: NRG; PAM sequence: CAG
agtaaacccaatgactgcca

SEQ ID NO: 70124 - DNA, 20 bp, Artificial Sequence
  Description of Artificial Sequence: Synthetic oligonucleotide
  Target: LAMA2; (-) strand; PAM type: NRG; PAM sequence: TAG
accactttggtatctggagt

SEQ ID NO: 70125 - DNA, 20 bp, Artificial Sequence
  Description of Artificial Sequence: Synthetic oligonucleotide
  Target: LAMA2; (-) strand; PAM type: NRG; PAM sequence: GAG
agaaaccactttggtatctg

SEQ ID NO: 70126 - DNA, 20 bp, Artificial Sequence
  Description of Artificial Sequence: Synthetic oligonucleotide
  Target: LAMA2; (-) strand; PAM type: NRG; PAM sequence: TGG
tcagaaaccactttggtatc

SEQ ID NO: 70127 - DNA, 20 bp, Artificial Sequence
  Description of Artificial Sequence: Synthetic oligonucleotide
  Target: LAMA2; (-) strand; PAM type: NRG; PAM sequence: TGG
cacaccctcagaaaccactt

SEQ ID NO: 70128 - DNA, 20 bp, Artificial Sequence
  Description of Artificial Sequence: Synthetic oligonucleotide
  Target: LAMA2; (-) strand; PAM type: NRG; PAM sequence: CAG
tgagttaataaccacaccct

SEQ ID NO: 70129 - DNA, 20 bp, Artificial Sequence
  Description of Artificial Sequence: Synthetic oligonucleotide
  Target: LAMA2; (-) strand; PAM type: NRG; PAM sequence: GAG
ccaatgaatgatgacagcct

SEQ ID NO: 70130 - DNA, 20 bp, Artificial Sequence
  Description of Artificial Sequence: Synthetic oligonucleotide
  Target: LAMA2; (-) strand; PAM type: NRG; PAM sequence: CAG
aaattaccaatgaatgatga

SEQ ID NO: 70131 - DNA, 20 bp, Artificial Sequence
  Description of Artificial Sequence: Synthetic oligonucleotide
  Target: LAMA2; (-) strand; PAM type: NRG; PAM sequence: TGG
tggatctcaggcacaatatc

SEQ ID NO: 70132 - DNA, 20 bp, Artificial Sequence
  Description of Artificial Sequence: Synthetic oligonucleotide
  Target: LAMA2; (-) strand; PAM type: NRG; PAM sequence: AGG
ccttattcctcctggatctc

SEQ ID NO: 70133 - DNA, 20 bp, Artificial Sequence
  Description of Artificial Sequence: Synthetic oligonucleotide
  Target: LAMA2; (-) strand; PAM type: NRG; PAM sequence: CAG
accttattcctcctggatct

SEQ ID NO: 70134 - DNA, 20 bp, Artificial Sequence
  Description of Artificial Sequence: Synthetic oligonucleotide
  Target: LAMA2; (-) strand; PAM type: NRG; PAM sequence: TGG
atatcctaccttattcctcc

SEQ ID NO: 70135 - DNA, 20 bp, Artificial Sequence
  Description of Artificial Sequence: Synthetic oligonucleotide
  Target: LAMA2; (-) strand; PAM type: NRG; PAM sequence: AAG
cactatatatcagtagctca

SEQ ID NO: 70136 - DNA, 20 bp, Artificial Sequence
  Description of Artificial Sequence: Synthetic oligonucleotide
  Target: LAMA2; (-) strand; PAM type: NRG; PAM sequence: TAG
cttaccacactatatatcag

SEQ ID NO: 70137 - DNA, 20 bp, Artificial Sequence
  Description of Artificial Sequence: Synthetic oligonucleotide
  Target: LAMA2; (-) strand; PAM type: NRG; PAM sequence: CAG
gtacttaccacactatatat

SEQ ID NO: 70138 - DNA, 20 bp, Artificial Sequence
  Description of Artificial Sequence: Synthetic oligonucleotide
  Target: LAMA2; (-) strand; PAM type: NRG; PAM sequence: CAG
tggccatcctctctcttctg

SEQ ID NO: 70139 - DNA, 20 bp, Artificial Sequence
  Description of Artificial Sequence: Synthetic oligonucleotide
  Target: LAMA2; (-) strand; PAM type: NRG; PAM sequence: TGG
ttacttacaccaagcctttg

SEQ ID NO: 70140 - DNA, 20 bp, Artificial Sequence
  Description of Artificial Sequence: Synthetic oligonucleotide
  Target: LAMA2; (-) strand; PAM type: NRG; PAM sequence: AAG
ggcaagcctttacttacacc

SEQ ID NO: 70141 - DNA, 20 bp, Artificial Sequence
  Description of Artificial Sequence: Synthetic oligonucleotide
  Target: LAMA2; (-) strand; PAM type: NRG; PAM sequence: AAG
tggatatcgctccttctggc

SEQ ID NO: 70142 - DNA, 20 bp, Artificial Sequence
  Description of Artificial Sequence: Synthetic oligonucleotide
  Target: LAMA2; (-) strand; PAM type: NRG; PAM sequence: TGG
agcttggatatcgctccttc

SEQ ID NO: 70143 - DNA, 20 bp, Artificial Sequence
  Description of Artificial Sequence: Synthetic oligonucleotide
  Target: LAMA2; (-) strand; PAM type: NRG; PAM sequence: TGG
catgtccttggtcatcagct

SEQ ID NO: 70144 - DNA, 20 bp, Artificial Sequence
  Description of Artificial Sequence: Synthetic oligonucleotide
  Target: LAMA2; (-) strand; PAM type: NRG; PAM sequence: CAG
tagctcatgtccttggtcat

SEQ ID NO: 70145 - DNA, 20 bp, Artificial Sequence
  Description of Artificial Sequence: Synthetic oligonucleotide
  Target: LAMA2; (-) strand; PAM type: NRG; PAM sequence: TGG
ccttgtttagctcatgtcct

SEQ ID NO: 70146 - DNA, 20 bp, Artificial Sequence
  Description of Artificial Sequence: Synthetic oligonucleotide
  Target: LAMA2; (-) strand; PAM type: NRG; PAM sequence: TAG
gtttatctcatacccttgtt

SEQ ID NO: 70147 - DNA, 20 bp, Artificial Sequence
  Description of Artificial Sequence: Synthetic oligonucleotide
  Target: LAMA2; (-) strand; PAM type: NRG; PAM sequence: TGG
ctaattctgatttctcttcc

SEQ ID NO: 70148 - DNA, 20 bp, Artificial Sequence
  Description of Artificial Sequence: Synthetic oligonucleotide
  Target: LAMA2; (-) strand; PAM type: NRG; PAM sequence: AGG
ttgtagctccccgagtaact

SEQ ID NO: 70149 - DNA, 20 bp, Artificial Sequence
  Description of Artificial Sequence: Synthetic oligonucleotide
  Target: LAMA2; (-) strand; PAM type: NRG; PAM sequence: TAG
cttgtagctccccgagtaac

SEQ ID NO: 70150 - DNA, 20 bp, Artificial Sequence
  Description of Artificial Sequence: Synthetic oligonucleotide
  Target: LAMA2; (-) strand; PAM type: NRG; PAM sequence: GAG
attcctacttgtagctcccc

SEQ ID NO: 70151 - DNA, 20 bp, Artificial Sequence
  Description of Artificial Sequence: Synthetic oligonucleotide
  Target: LAMA2; (-) strand; PAM type: NRG; PAM sequence: TAG
gttctagtcattcctacttg

SEQ ID NO: 70152 - DNA, 20 bp, Artificial Sequence
  Description of Artificial Sequence: Synthetic oligonucleotide
  Target: LAMA2; (-) strand; PAM type: NRG; PAM sequence: TAG
ccctttggcactttcagttc

SEQ ID NO: 70153 - DNA, 20 bp, Artificial Sequence
  Description of Artificial Sequence: Synthetic oligonucleotide
  Target: LAMA2; (-) strand; PAM type: NRG; PAM sequence: CAG
tctctgccctttggcacttt

SEQ ID NO: 70154 - DNA, 20 bp, Artificial Sequence
  Description of Artificial Sequence: Synthetic oligonucleotide
  Target: LAMA2; (-) strand; PAM type: NRG; PAM sequence: TGG
catctctactctctgccctt

SEQ ID NO: 70155 - DNA, 20 bp, Artificial Sequence
  Description of Artificial Sequence: Synthetic oligonucleotide
  Target: LAMA2; (-) strand; PAM type: NRG; PAM sequence: TAG
ctggctccagccttttgctc

SEQ ID NO: 70156 - DNA, 20 bp, Artificial Sequence
  Description of Artificial Sequence: Synthetic oligonucleotide
  Target: LAMA2; (-) strand; PAM type: NRG; PAM sequence: CAG
atgccttcataatctggctc

SEQ ID NO: 70157 - DNA, 20 bp, Artificial Sequence
  Description of Artificial Sequence: Synthetic oligonucleotide
  Target: LAMA2; (-) strand; PAM type: NRG; PAM sequence: TGG
tgttaaatgccttcataatc

SEQ ID NO: 70158 - DNA, 20 bp, Artificial Sequence
  Description of Artificial Sequence: Synthetic oligonucleotide
  Target: LAMA2; (-) strand; PAM type: NRG; PAM sequence: TGG
tccctaaatcacttctcctg

SEQ ID NO: 70159 - DNA, 20 bp, Artificial Sequence
  Description of Artificial Sequence: Synthetic oligonucleotide
  Target: LAMA2; (-) strand; PAM type: NRG; PAM sequence: TGG
gctggaaagagggctttaca

SEQ ID NO: 70160 - DNA, 20 bp, Artificial Sequence
  Description of Artificial Sequence: Synthetic oligonucleotide
  Target: LAMA2; (-) strand; PAM type: NRG; PAM sequence: GGG
gttcatagaggctggaaaga

SEQ ID NO: 70161 - DNA, 20 bp, Artificial Sequence
  Description of Artificial Sequence: Synthetic oligonucleotide
  Target: LAMA2; (-) strand; PAM type: NRG; PAM sequence: AGG
ggttcatagaggctggaaag

SEQ ID NO: 70162 - DNA, 20 bp, Artificial Sequence
  Description of Artificial Sequence: Synthetic oligonucleotide
  Target: LAMA2; (-) strand; PAM type: NRG; PAM sequence: GAG
tggttcatagaggctggaaa

SEQ ID NO: 70163 - DNA, 20 bp, Artificial Sequence
  Description of Artificial Sequence: Synthetic oligonucleotide
  Target: LAMA2; (-) strand; PAM type: NRG; PAM sequence: AAG
tgtggttcatagaggctgga

SEQ ID NO: 70164 - DNA, 20 bp, Artificial Sequence
  Description of Artificial Sequence: Synthetic oligonucleotide
  Target: LAMA2; (-) strand; PAM type: NRG; PAM sequence: TGG
tcactgtggttcatagaggc

SEQ ID NO: 70165 - DNA, 20 bp, Artificial Sequence
  Description of Artificial Sequence: Synthetic oligonucleotide
  Target: LAMA2; (-) strand; PAM type: NRG; PAM sequence: AGG
ggtatcactgtggttcatag

SEQ ID NO: 70166 - DNA, 20 bp, Artificial Sequence
  Description of Artificial Sequence: Synthetic oligonucleotide
  Target: LAMA2; (-) strand; PAM type: NRG; PAM sequence: GAG
aggtatcactgtggttcata

SEQ ID NO: 70167 - DNA, 20 bp, Artificial Sequence
  Description of Artificial Sequence: Synthetic oligonucleotide
  Target: LAMA2; (-) strand; PAM type: NRG; PAM sequence: TAG
tgaggtatcactgtggttca

SEQ ID NO: 70168 - DNA, 20 bp, Artificial Sequence
  Description of Artificial Sequence: Synthetic oligonucleotide
  Target: LAMA2; (-) strand; PAM type: NRG; PAM sequence: TGG
atgagtctgaggtatcactg

SEQ ID NO: 70169 - DNA, 20 bp, Artificial Sequence
  Description of Artificial Sequence: Synthetic oligonucleotide
  Target: LAMA2; (-) strand; PAM type: NRG; PAM sequence: AGG
taaatacatcaatgagtctg

SEQ ID NO: 70170 - DNA, 20 bp, Artificial Sequence
  Description of Artificial Sequence: Synthetic oligonucleotide
  Target: LAMA2; (-) strand; PAM type: NRG; PAM sequence: GAG
ataaatacatcaatgagtct

SEQ ID NO: 70171 - DNA, 20 bp, Artificial Sequence
  Description of Artificial Sequence: Synthetic oligonucleotide
  Target: LAMA2; (-) strand; PAM type: NRG; PAM sequence: GAG
tgttgaataaatacatcaat

SEQ ID NO: 70172 - DNA, 20 bp, Artificial Sequence
  Description of Artificial Sequence: Synthetic oligonucleotide
  Target: LAMA2; (-) strand; PAM type: NRG; PAM sequence: AGG
tgctagtaggaggtgttcaa

SEQ ID NO: 70173 - DNA, 20 bp, Artificial Sequence
  Description of Artificial Sequence: Synthetic oligonucleotide
  Target: LAMA2; (-) strand; PAM type: NRG; PAM sequence: AAG
ttgctagtaggaggtgttca

SEQ ID NO: 70174 - DNA, 20 bp, Artificial Sequence
  Description of Artificial Sequence: Synthetic oligonucleotide
  Target: LAMA2; (-) strand; PAM type: NRG; PAM sequence: AGG
tacaatgctttgctagtagg

SEQ ID NO: 70175 - DNA, 20 bp, Artificial Sequence
  Description of Artificial Sequence: Synthetic oligonucleotide
  Target: LAMA2; (-) strand; PAM type: NRG; PAM sequence: GAG
atacaatgctttgctagtag

SEQ ID NO: 70176 - DNA, 20 bp, Artificial Sequence
  Description of Artificial Sequence: Synthetic oligonucleotide
  Target: LAMA2; (-) strand; PAM type: NRG; PAM sequence: AGG
caatacaatgctttgctagt

SEQ ID NO: 70177 - DNA, 20 bp, Artificial Sequence
  Description of Artificial Sequence: Synthetic oligonucleotide
  Target: LAMA2; (-) strand; PAM type: NRG; PAM sequence: TAG
ccaatacaatgctttgctag

SEQ ID NO: 70178 - DNA, 20 bp, Artificial Sequence
  Description of Artificial Sequence: Synthetic oligonucleotide
  Target: LAMA2; (-) strand; PAM type: NRG; PAM sequence: TAG
gctccaatacaatgctttgc

SEQ ID NO: 70179 - DNA, 20 bp, Artificial Sequence
  Description of Artificial Sequence: Synthetic oligonucleotide
  Target: LAMA2; (-) strand; PAM type: NRG; PAM sequence: GGG
ctctaggtcctctgaatcag

SEQ ID NO: 70180 - DNA, 20 bp, Artificial Sequence
  Description of Artificial Sequence: Synthetic oligonucleotide
  Target: LAMA2; (-) strand; PAM type: NRG; PAM sequence: GGG
cctctaggtcctctgaatca

SEQ ID NO: 70181 - DNA, 20 bp, Artificial Sequence
  Description of Artificial Sequence: Synthetic oligonucleotide
  Target: LAMA2; (-) strand; PAM type: NRG; PAM sequence: AGG
ccctctaggtcctctgaatc

SEQ ID NO: 70182 - DNA, 20 bp, Artificial Sequence
  Description of Artificial Sequence: Synthetic oligonucleotide
  Target: LAMA2; (-) strand; PAM type: NRG; PAM sequence: CAG
cccctctaggtcctctgaat

SEQ ID NO: 70183 - DNA, 20 bp, Artificial Sequence
  Description of Artificial Sequence: Synthetic oligonucleotide
  Target: LAMA2; (-) strand; PAM type: NRG; PAM sequence: AGG
tttgcctctatttcccctct

SEQ ID NO: 70184 - DNA, 20 bp, Artificial Sequence
  Description of Artificial Sequence: Synthetic oligonucleotide
  Target: LAMA2; (-) strand; PAM type: NRG; PAM sequence: TAG
ttttgcctctatttcccctc

SEQ ID NO: 70185 - DNA, 20 bp, Artificial Sequence
  Description of Artificial Sequence: Synthetic oligonucleotide
  Target: LAMA2; (-) strand; PAM type: NRG; PAM sequence: TAG
atggagcattcatgttattt

SEQ ID NO: 70186 - DNA, 20 bp, Artificial Sequence
  Description of Artificial Sequence: Synthetic oligonucleotide
  Target: LAMA2; (-) strand; PAM type: NRG; PAM sequence: GAG
atgactttagcatctacatg

SEQ ID NO: 70187 - DNA, 20 bp, Artificial Sequence
  Description of Artificial Sequence: Synthetic oligonucleotide
  Target: LAMA2; (-) strand; PAM type: NRG; PAM sequence: TGG
agatgactttagcatctaca

SEQ ID NO: 70188 - DNA, 20 bp, Artificial Sequence
  Description of Artificial Sequence: Synthetic oligonucleotide
  Target: LAMA2; (-) strand; PAM type: NRG; PAM sequence: TAG
cagaaatctttagatgactt

SEQ ID NO: 70189 - DNA, 20 bp, Artificial Sequence
  Description of Artificial Sequence: Synthetic oligonucleotide
  Target: LAMA2; (-) strand; PAM type: NRG; PAM sequence: TAG
atttcttagccagaaatctt

SEQ ID NO: 70190 - DNA, 20 bp, Artificial Sequence
  Description of Artificial Sequence: Synthetic oligonucleotide
  Target: LAMA2; (-) strand; PAM type: NRG; PAM sequence: CAG
agatataaagatttcttagc

SEQ ID NO: 70191 - DNA, 20 bp, Artificial Sequence
  Description of Artificial Sequence: Synthetic oligonucleotide
  Target: LAMA2; (-) strand; PAM type: NRG; PAM sequence: TAG
atatagatataaagatttct

SEQ ID NO: 70192 - DNA, 20 bp, Artificial Sequence
  Description of Artificial Sequence: Synthetic oligonucleotide
  Target: LAMA2; (-) strand; PAM type: NRG; PAM sequence: AAG
gatagagatatatagatata

SEQ ID NO: 70193 - DNA, 20 bp, Artificial Sequence
  Description of Artificial Sequence: Synthetic oligonucleotide
  Target: LAMA2; (-) strand; PAM type: NRG; PAM sequence: TAG
tagatacagatagagatata

SEQ ID NO: 70194 - DNA, 20 bp, Artificial Sequence
  Description of Artificial Sequence: Synthetic oligonucleotide
  Target: LAMA2; (-) strand; PAM type: NRG; PAM sequence: GAG
cagaaagatagatacagata

SEQ ID NO: 70195 - DNA, 20 bp, Artificial Sequence
  Description of Artificial Sequence: Synthetic oligonucleotide
  Target: LAMA2; (-) strand; PAM type: NRG; PAM sequence: TAG
gtcagaaagatagatacaga

SEQ ID NO: 70196 - DNA, 20 bp, Artificial Sequence
  Description of Artificial Sequence: Synthetic oligonucleotide
  Target: LAMA2; (-) strand; PAM type: NRG; PAM sequence: CAG
gcatgtcagaaagatagata

SEQ ID NO: 70197 - DNA, 20 bp, Artificial Sequence
  Description of Artificial Sequence: Synthetic oligonucleotide
  Target: LAMA2; (-) strand; PAM type: NRG; PAM sequence: TAG
aagaaggcatgtcagaaaga

SEQ ID NO: 70198 - DNA, 20 bp, Artificial Sequence
  Description of Artificial Sequence: Synthetic oligonucleotide
  Target: LAMA2; (-) strand; PAM type: NRG; PAM sequence: AAG
agagaagaaggcatgtcaga

SEQ ID NO: 70199 - DNA, 20 bp, Artificial Sequence
  Description of Artificial Sequence: Synthetic oligonucleotide
  Target: LAMA2; (-) strand; PAM type: NRG; PAM sequence: CAG
gagaagagaagaaggcatgt

SEQ ID NO: 70200 - DNA, 20 bp, Artificial Sequence
  Description of Artificial Sequence: Synthetic oligonucleotide
  Target: LAMA2; (-) strand; PAM type: NRG; PAM sequence: AGG
taagcgaggagaagagaaga

SEQ ID NO: 70201 - DNA, 20 bp, Artificial Sequence
  Description of Artificial Sequence: Synthetic oligonucleotide
  Target: LAMA2; (-) strand; PAM type: NRG; PAM sequence: AAG
gtaagcgaggagaagagaag

SEQ ID NO: 70202 - DNA, 20 bp, Artificial Sequence
  Description of Artificial Sequence: Synthetic oligonucleotide
  Target: LAMA2; (-) strand; PAM type: NRG; PAM sequence: AAG
gaggtaagcgaggagaagag

SEQ ID NO: 70203 - DNA, 20 bp, Artificial Sequence
  Description of Artificial Sequence: Synthetic oligonucleotide
  Target: LAMA2; (-) strand; PAM type: NRG; PAM sequence: GAG
agagaggtaagcgaggagaa

SEQ ID NO: 70204 - DNA, 20 bp, Artificial Sequence
  Description of Artificial Sequence: Synthetic oligonucleotide
  Target: LAMA2; (-) strand; PAM type: NRG; PAM sequence: AAG
agagagaggtaagcgaggag

SEQ ID NO: 70205 - DNA, 20 bp, Artificial Sequence
  Description of Artificial Sequence: Synthetic oligonucleotide
  Target: LAMA2; (-) strand; PAM type: NRG; PAM sequence: GAG
gagagagagaggtaagcgag

SEQ ID NO: 70206 - DNA, 20 bp, Artificial Sequence
  Description of Artificial Sequence: Synthetic oligonucleotide
  Target: LAMA2; (-) strand; PAM type: NRG; PAM sequence: AGG
cagagagagagaggtaagcg

SEQ ID NO: 70207 - DNA, 20 bp, Artificial Sequence
  Description of Artificial Sequence: Synthetic oligonucleotide
  Target: LAMA2; (-) strand; PAM type: NRG; PAM sequence: GAG
acagagagagagaggtaagc

SEQ ID NO: 70208 - DNA, 20 bp, Artificial Sequence
  Description of Artificial Sequence: Synthetic oligonucleotide
  Target: LAMA2; (-) strand; PAM type: NRG; PAM sequence: AAG
atatacagagagagagaggt

SEQ ID NO: 70209 - DNA, 20 bp, Artificial Sequence
  Description of Artificial Sequence: Synthetic oligonucleotide
  Target: LAMA2; (-) strand; PAM type: NRG; PAM sequence: AGG
atatatatacagagagagag

SEQ ID NO: 70210 - DNA, 20 bp, Artificial Sequence
  Description of Artificial Sequence: Synthetic oligonucleotide
  Target: LAMA2; (-) strand; PAM type: NRG; PAM sequence: GAG
tatatatatacagagagaga

SEQ ID NO: 70211 - DNA, 20 bp, Artificial Sequence
  Description of Artificial Sequence: Synthetic oligonucleotide
  Target: LAMA2; (-) strand; PAM type: NRG; PAM sequence: GAG
attatatatatacagagaga

SEQ ID NO: 70212 - DNA, 20 bp, Artificial Sequence
  Description of Artificial Sequence: Synthetic oligonucleotide
  Target: LAMA2; (-) strand; PAM type: NRG; PAM sequence: GAG
atattatatatatacagaga

SEQ ID NO: 70213 - DNA, 20 bp, Artificial Sequence
  Description of Artificial Sequence: Synthetic oligonucleotide
  Target: LAMA2; (-) strand; PAM type: NRG; PAM sequence: GAG
atatattatatatatacaga

SEQ ID NO: 70214 - DNA, 20 bp, Artificial Sequence
  Description of Artificial Sequence: Synthetic oligonucleotide
  Target: LAMA2; (-) strand; PAM type: NRG; PAM sequence: GAG
atatatattatatatataca

SEQ ID NO: 70215 - DNA, 20 bp, Artificial Sequence
  Description of Artificial Sequence: Synthetic oligonucleotide
  Target: LAMA2; (-) strand; PAM type: NRG; PAM sequence: CAG
atatatatattatatatata

SEQ ID NO: 70216 - DNA, 20 bp, Artificial Sequence
  Description of Artificial Sequence: Synthetic oligonucleotide
  Target: LAMA2; (-) strand; PAM type: NRG; PAM sequence: AAG
cctttatgtagattacatat

SEQ ID NO: 70217 - DNA, 20 bp, Artificial Sequence
  Description of Artificial Sequence: Synthetic oligonucleotide
  Target: LAMA2; (-) strand; PAM type: NRG; PAM sequence: TAG
tatatatttttacctttatg

SEQ ID NO: 70218 - DNA, 20 bp, Artificial Sequence
  Description of Artificial Sequence: Synthetic oligonucleotide
  Target: LAMA2; (-) strand; PAM type: NRG; PAM sequence: GAG
tccagcctgggtgacagagt

SEQ ID NO: 70219 - DNA, 20 bp, Artificial Sequence
  Description of Artificial Sequence: Synthetic oligonucleotide
  Target: LAMA2; (-) strand; PAM type: NRG; PAM sequence: GAG
gcactccagcctgggtgaca

SEQ ID NO: 70220 - DNA, 20 bp, Artificial Sequence
  Description of Artificial Sequence: Synthetic oligonucleotide
  Target: LAMA2; (-) strand; PAM type: NRG; PAM sequence: CAG
ctgcactccagcctgggtga

SEQ ID NO: 70221 - DNA, 20 bp, Artificial Sequence
  Description of Artificial Sequence: Synthetic oligonucleotide
  Target: LAMA2; (-) strand; PAM type: NRG; PAM sequence: GGG
gcaccactgcactccagcct

SEQ ID NO: 70222 - DNA, 20 bp, Artificial Sequence
  Description of Artificial Sequence: Synthetic oligonucleotide
  Target: LAMA2; (-) strand; PAM type: NRG; PAM sequence: TGG
cgcaccactgcactccagcc

SEQ ID NO: 70223 - DNA, 20 bp, Artificial Sequence
  Description of Artificial Sequence: Synthetic oligonucleotide
  Target: LAMA2; (-) strand; PAM type: NRG; PAM sequence: CAG
gagatcgcaccactgcactc

SEQ ID NO: 70224 - DNA, 20 bp, Artificial Sequence
  Description of Artificial Sequence: Synthetic oligonucleotide
  Target: LAMA2; (-) strand; PAM type: NRG; PAM sequence: GAG
gatggcggttgcagtgagct

SEQ ID NO: 70225 - DNA, 20 bp, Artificial Sequence
  Description of Artificial Sequence: Synthetic oligonucleotide
  Target: LAMA2; (-) strand; PAM type: NRG; PAM sequence: GAG
cgggagatggcggttgcagt

SEQ ID NO: 70226 - DNA, 20 bp, Artificial Sequence
  Description of Artificial Sequence: Synthetic oligonucleotide
  Target: LAMA2; (-) strand; PAM type: NRG; PAM sequence: CAG
aacccgggagatggcggttg

SEQ ID NO: 70227 - DNA, 20 bp, Artificial Sequence
  Description of Artificial Sequence: Synthetic oligonucleotide
  Target: LAMA2; (-) strand; PAM type: NRG; PAM sequence: CGG
tgcttgaacccgggagatgg

SEQ ID NO: 70228 - DNA, 20 bp, Artificial Sequence
  Description of Artificial Sequence: Synthetic oligonucleotide
  Target: LAMA2; (-) strand; PAM type: NRG; PAM sequence: TGG
aattgcttgaacccgggaga

SEQ ID NO: 70229 - DNA, 20 bp, Artificial Sequence
  Description of Artificial Sequence: Synthetic oligonucleotide
  Target: LAMA2; (-) strand; PAM type: NRG; PAM sequence: GAG
ggagaattgcttgaacccgg

SEQ ID NO: 70230 - DNA, 20 bp, Artificial Sequence
  Description of Artificial Sequence: Synthetic oligonucleotide
  Target: LAMA2; (-) strand; PAM type: NRG; PAM sequence: GGG
caggagaattgcttgaaccc

SEQ ID NO: 70231 - DNA, 20 bp, Artificial Sequence
  Description of Artificial Sequence: Synthetic oligonucleotide
  Target: LAMA2; (-) strand; PAM type: NRG; PAM sequence: CGG
gcaggagaattgcttgaacc

SEQ ID NO: 70232 - DNA, 20 bp, Artificial Sequence
  Description of Artificial Sequence: Synthetic oligonucleotide
  Target: LAMA2; (-) strand; PAM type: NRG; PAM sequence: GAG
tactcgggaggctgaggcag

SEQ ID NO: 70233 - DNA, 20 bp, Artificial Sequence
  Description of Artificial Sequence: Synthetic oligonucleotide
  Target: LAMA2; (-) strand; PAM type: NRG; PAM sequence: AGG
gctactcgggaggctgaggc

SEQ ID NO: 70234 - DNA, 20 bp, Artificial Sequence
  Description of Artificial Sequence: Synthetic oligonucleotide
  Target: LAMA2; (-) strand; PAM type: NRG; PAM sequence: CAG
agctactcgggaggctgagg

SEQ ID NO: 70235 - DNA, 20 bp, Artificial Sequence
  Description of Artificial Sequence: Synthetic oligonucleotide
  Target: LAMA2; (-) strand; PAM type: NRG; PAM sequence: AGG
tccagctactcgggaggctg

SEQ ID NO: 70236 - DNA, 20 bp, Artificial Sequence
  Description of Artificial Sequence: Synthetic oligonucleotide
  Target: LAMA2; (-) strand; PAM type: NRG; PAM sequence: GAG
atccagctactcgggaggct

SEQ ID NO: 70237 - DNA, 20 bp, Artificial Sequence
  Description of Artificial Sequence: Synthetic oligonucleotide
  Target: LAMA2; (-) strand; PAM type: NRG; PAM sequence: AGG
ctgtaatccagctactcggg

SEQ ID NO: 70238 - DNA, 20 bp, Artificial Sequence
  Description of Artificial Sequence: Synthetic oligonucleotide
  Target: LAMA2; (-) strand; PAM type: NRG; PAM sequence: GAG
cctgtaatccagctactcgg

SEQ ID NO: 70239 - DNA, 20 bp, Artificial Sequence
  Description of Artificial Sequence: Synthetic oligonucleotide
  Target: LAMA2; (-) strand; PAM type: NRG; PAM sequence: GGG
tgcctgtaatccagctactc

SEQ ID NO: 70240 - DNA, 20 bp, Artificial Sequence
  Description of Artificial Sequence: Synthetic oligonucleotide
  Target: LAMA2; (-) strand; PAM type: NRG; PAM sequence: CGG
gtgcctgtaatccagctact

SEQ ID NO: 70241 - DNA, 20 bp, Artificial Sequence
  Description of Artificial Sequence: Synthetic oligonucleotide
  Target: LAMA2; (-) strand; PAM type: NRG; PAM sequence: CAG
ggtgtcacgtgcctgtaatc

SEQ ID NO: 70242 - DNA, 20 bp, Artificial Sequence
  Description of Artificial Sequence: Synthetic oligonucleotide
  Target: LAMA2; (-) strand; PAM type: NRG; PAM sequence: TGG
atacaaaaaatagccaggca

SEQ ID NO: 70243 - DNA, 20 bp, Artificial Sequence
  Description of Artificial Sequence: Synthetic oligonucleotide
  Target: LAMA2; (-) strand; PAM type: NRG; PAM sequence: AGG
ttgaaatacaaaaaatagcc

SEQ ID NO: 70244 - DNA, 20 bp, Artificial Sequence
  Description of Artificial Sequence: Synthetic oligonucleotide
  Target: LAMA2; (-) strand; PAM type: NRG; PAM sequence: CAG
cttgaaatacaaaaaatagc

SEQ ID NO: 70245 - DNA, 20 bp, Artificial Sequence
  Description of Artificial Sequence: Synthetic oligonucleotide
  Target: LAMA2; (-) strand; PAM type: NRG; PAM sequence: TAG
tctacttgaaatacaaaaaa

SEQ ID NO: 70246 - DNA, 20 bp, Artificial Sequence
  Description of Artificial Sequence: Synthetic oligonucleotide
  Target: LAMA2; (-) strand; PAM type: NRG; PAM sequence: TGG
tgagaccagcctggccaaca

SEQ ID NO: 70247 - DNA, 20 bp, Artificial Sequence
  Description of Artificial Sequence: Synthetic oligonucleotide
  Target: LAMA2; (-) strand; PAM type: NRG; PAM sequence: TGG
tcaggagtttgagaccagcc

SEQ ID NO: 70248 - DNA, 20 bp, Artificial Sequence
  Description of Artificial Sequence: Synthetic oligonucleotide
  Target: LAMA2; (-) strand; PAM type: NRG; PAM sequence: CAG
tgaggtcaggagtttgagac

SEQ ID NO: 70249 - DNA, 20 bp, Artificial Sequence
  Description of Artificial Sequence: Synthetic oligonucleotide
  Target: LAMA2; (-) strand; PAM type: NRG; PAM sequence: GAG
tcacttgaggtcaggagttt

SEQ ID NO: 70250 - DNA, 20 bp, Artificial Sequence
  Description of Artificial Sequence: Synthetic oligonucleotide
  Target: LAMA2; (-) strand; PAM type: NRG; PAM sequence: GAG
gggtgatcacttgaggtcag

SEQ ID NO: 70251 - DNA, 20 bp, Artificial Sequence
  Description of Artificial Sequence: Synthetic oligonucleotide
  Target: LAMA2; (-) strand; PAM type: NRG; PAM sequence: AGG
gcgggtgatcacttgaggtc

SEQ ID NO: 70252 - DNA, 20 bp, Artificial Sequence
  Description of Artificial Sequence: Synthetic oligonucleotide
  Target: LAMA2; (-) strand; PAM type: NRG; PAM sequence: CAG
agcgggtgatcacttgaggt

SEQ ID NO: 70253 - DNA, 20 bp, Artificial Sequence
  Description of Artificial Sequence: Synthetic oligonucleotide
  Target: LAMA2; (-) strand; PAM type: NRG; PAM sequence: AGG
ctgaagcgggtgatcacttg

SEQ ID NO: 70254 - DNA, 20 bp, Artificial Sequence
  Description of Artificial Sequence: Synthetic oligonucleotide
  Target: LAMA2; (-) strand; PAM type: NRG; PAM sequence: GAG
gctgaagcgggtgatcactt

SEQ ID NO: 70255 - DNA, 20 bp, Artificial Sequence
  Description of Artificial Sequence: Synthetic oligonucleotide
  Target: LAMA2; (-) strand; PAM type: NRG; PAM sequence: GGG
atctattgggaggctgaagc

SEQ ID NO: 70256 - DNA, 20 bp, Artificial Sequence
  Description of Artificial Sequence: Synthetic oligonucleotide
  Target: LAMA2; (-) strand; PAM type: NRG; PAM sequence: CGG
tatctattgggaggctgaag

SEQ ID NO: 70257 - DNA, 20 bp, Artificial Sequence
  Description of Artificial Sequence: Synthetic oligonucleotide
  Target: LAMA2; (-) strand; PAM type: NRG; PAM sequence: AAG
atatatctattgggaggctg

SEQ ID NO: 70258 - DNA, 20 bp, Artificial Sequence
  Description of Artificial Sequence: Synthetic oligonucleotide
  Target: LAMA2; (-) strand; PAM type: NRG; PAM sequence: AGG
caaaaaatatatctattggg

SEQ ID NO: 70259 - DNA, 20 bp, Artificial Sequence
  Description of Artificial Sequence: Synthetic oligonucleotide
  Target: LAMA2; (-) strand; PAM type: NRG; PAM sequence: GAG
acaaaaaatatatctattgg

SEQ ID NO: 70260 - DNA, 20 bp, Artificial Sequence
  Description of Artificial Sequence: Synthetic oligonucleotide
  Target: LAMA2; (-) strand; PAM type: NRG; PAM sequence: GGG
taacaaaaaatatatctatt

SEQ ID NO: 70261 - DNA, 20 bp, Artificial Sequence
  Description of Artificial Sequence: Synthetic oligonucleotide
  Target: LAMA2; (-) strand; PAM type: NRG; PAM sequence: TGG
ttaacaaaaaatatatctat

SEQ ID NO: 70262 - DNA, 20 bp, Artificial Sequence
  Description of Artificial Sequence: Synthetic oligonucleotide
  Target: LAMA2; (-) strand; PAM type: NRG; PAM sequence: TAG
gatatctatagatcgatcta

SEQ ID NO: 70263 - DNA, 20 bp, Artificial Sequence
  Description of Artificial Sequence: Synthetic oligonucleotide
  Target: LAMA2; (-) strand; PAM type: NRG; PAM sequence: TAG
tctatagatatagatatcta

SEQ ID NO: 70264 - DNA, 20 bp, Artificial Sequence
  Description of Artificial Sequence: Synthetic oligonucleotide
  Target: LAMA2; (-) strand; PAM type: NRG; PAM sequence: TAG
tatagatcgatctatagata

SEQ ID NO: 70265 - DNA, 20 bp, Artificial Sequence
  Description of Artificial Sequence: Synthetic oligonucleotide
  Target: LAMA2; (-) strand; PAM type: NRG; PAM sequence: TAG
gatatctatagatcgatcta

SEQ ID NO: 70266 - DNA, 20 bp, Artificial Sequence
  Description of Artificial Sequence: Synthetic oligonucleotide
  Target: LAMA2; (-) strand; PAM type: NRG; PAM sequence: TAG
tctatagatatagatatcta

SEQ ID NO: 70267 - DNA, 20 bp, Artificial Sequence
  Description of Artificial Sequence: Synthetic oligonucleotide
  Target: LAMA2; (-) strand; PAM type: NRG; PAM sequence: TAG
tatatatctatctatagata

SEQ ID NO: 70268 - DNA, 20 bp, Artificial Sequence
  Description of Artificial Sequence: Synthetic oligonucleotide
  Target: LAMA2; (-) strand; PAM type: NRG; PAM sequence: TAG
ggcctctatatatctatcta

SEQ ID NO: 70269 - DNA, 20 bp, Artificial Sequence
  Description of Artificial Sequence: Synthetic oligonucleotide
  Target: LAMA2; (-) strand; PAM type: NRG; PAM sequence: TGG
ccatcaattcatttactttc

SEQ ID NO: 70270 - DNA, 20 bp, Artificial Sequence
  Description of Artificial Sequence: Synthetic oligonucleotide
  Target: LAMA2; (-) strand; PAM type: NRG; PAM sequence: AGG
aatggtggtttccctccatc

SEQ ID NO: 70271 - DNA, 20 bp, Artificial Sequence
  Description of Artificial Sequence: Synthetic oligonucleotide
  Target: LAMA2; (-) strand; PAM type: NRG; PAM sequence: CAG
caatggtggtttccctccat

SEQ ID NO: 70272 - DNA, 20 bp, Artificial Sequence
  Description of Artificial Sequence: Synthetic oligonucleotide
  Target: LAMA2; (-) strand; PAM type: NRG; PAM sequence: TGG
accagtctctgaaccaatgg

SEQ ID NO: 70273 - DNA, 20 bp, Artificial Sequence
  Description of Artificial Sequence: Synthetic oligonucleotide
  Target: LAMA2; (-) strand; PAM type: NRG; PAM sequence: TGG
gccaccagtctctgaaccaa

SEQ ID NO: 70274 - DNA, 20 bp, Artificial Sequence
  Description of Artificial Sequence: Synthetic oligonucleotide
  Target: LAMA2; (-) strand; PAM type: NRG; PAM sequence: CAG
catgaaattttcaaggccac

SEQ ID NO: 70275 - DNA, 20 bp, Artificial Sequence
  Description of Artificial Sequence: Synthetic oligonucleotide
  Target: LAMA2; (-) strand; PAM type: NRG; PAM sequence: AGG
tattcttcatgaaattttca

SEQ ID NO: 70276 - DNA, 20 bp, Artificial Sequence
  Description of Artificial Sequence: Synthetic oligonucleotide
  Target: LAMA2; (-) strand; PAM type: NRG; PAM sequence: AAG
atattcttcatgaaattttc

SEQ ID NO: 70277 - DNA, 20 bp, Artificial Sequence
  Description of Artificial Sequence: Synthetic oligonucleotide
  Target: LAMA2; (-) strand; PAM type: NRG; PAM sequence: GGG
acaactccgttcatgcccct

SEQ ID NO: 70278 - DNA, 20 bp, Artificial Sequence
  Description of Artificial Sequence: Synthetic oligonucleotide
  Target: LAMA2; (-) strand; PAM type: NRG; PAM sequence: TGG
cacaactccgttcatgcccc

SEQ ID NO: 70279 - DNA, 20 bp, Artificial Sequence
  Description of Artificial Sequence: Synthetic oligonucleotide
  Target: LAMA2; (-) strand; PAM type: NRG; PAM sequence: CAG
tctaattctccccgtctgca

SEQ ID NO: 70280 - DNA, 20 bp, Artificial Sequence
  Description of Artificial Sequence: Synthetic oligonucleotide
  Target: LAMA2; (-) strand; PAM type: NRG; PAM sequence: TGG
catacatatacacacactta

SEQ ID NO: 70281 - DNA, 20 bp, Artificial Sequence
  Description of Artificial Sequence: Synthetic oligonucleotide
  Target: LAMA2; (-) strand; PAM type: NRG; PAM sequence: AAG
agttcacctcacttggcatt

SEQ ID NO: 70282 - DNA, 20 bp, Artificial Sequence
  Description of Artificial Sequence: Synthetic oligonucleotide
  Target: LAMA2; (-) strand; PAM type: NRG; PAM sequence: TGG
ccatcatagttcacctcact

SEQ ID NO: 70283 - DNA, 20 bp, Artificial Sequence
  Description of Artificial Sequence: Synthetic oligonucleotide
  Target: LAMA2; (-) strand; PAM type: NRG; PAM sequence: TAG
gtgaagctttacccccatca

SEQ ID NO: 70284 - DNA, 20 bp, Artificial Sequence
  Description of Artificial Sequence: Synthetic oligonucleotide
  Target: LAMA2; (-) strand; PAM type: NRG; PAM sequence: AAG
tttaaaataatataattgtg

SEQ ID NO: 70285 - DNA, 20 bp, Artificial Sequence
  Description of Artificial Sequence: Synthetic oligonucleotide
  Target: LAMA2; (-) strand; PAM type: NRG; PAM sequence: AAG
aaaaaaggagaagaaatact

SEQ ID NO: 70286 - DNA, 20 bp, Artificial Sequence
  Description of Artificial Sequence: Synthetic oligonucleotide
  Target: LAMA2; (-) strand; PAM type: NRG; PAM sequence: AAG
aaaaaaaaaaaaaaaaggag

SEQ ID NO: 70287 - DNA, 20 bp, Artificial Sequence
  Description of Artificial Sequence: Synthetic oligonucleotide
  Target: LAMA2; (-) strand; PAM type: NRG; PAM sequence: GAG
aaaaaaaaaaaaaaaaaaag

SEQ ID NO: 70288 - DNA, 20 bp, Artificial Sequence
  Description of Artificial Sequence: Synthetic oligonucleotide
  Target: LAMA2; (-) strand; PAM type: NRG; PAM sequence: AGG
ctaaaaaaaaaaaaaaaaaa

SEQ ID NO: 70289 - DNA, 20 bp, Artificial Sequence
  Description of Artificial Sequence: Synthetic oligonucleotide
  Target: LAMA2; (-) strand; PAM type: NRG; PAM sequence: AAG
cctaaaaaaaaaaaaaaaaa

SEQ ID NO: 70290 - DNA, 20 bp, Artificial Sequence
  Description of Artificial Sequence: Synthetic oligonucleotide
  Target: LAMA2; (-) strand; PAM type: NRG; PAM sequence: GAG
gcactgcagcctgggcgaca

SEQ ID NO: 70291 - DNA, 20 bp, Artificial Sequence
  Description of Artificial Sequence: Synthetic oligonucleotide
  Target: LAMA2; (-) strand; PAM type: NRG; PAM sequence: CAG
ctgcactgcagcctgggcga

SEQ ID NO: 70292 - DNA, 20 bp, Artificial Sequence
  Description of Artificial Sequence: Synthetic oligonucleotide
  Target: LAMA2; (-) strand; PAM type: NRG; PAM sequence: GGG
gcgccactgcactgcagcct

SEQ ID NO: 70293 - DNA, 20 bp, Artificial Sequence
  Description of Artificial Sequence: Synthetic oligonucleotide
  Target: LAMA2; (-) strand; PAM type: NRG; PAM sequence: TGG
cgcgccactgcactgcagcc

SEQ ID NO: 70294 - DNA, 20 bp, Artificial Sequence
  Description of Artificial Sequence: Synthetic oligonucleotide
  Target: LAMA2; (-) strand; PAM type: NRG; PAM sequence: CAG
gagatcgcgccactgcactg

SEQ ID NO: 70295 - DNA, 20 bp, Artificial Sequence
  Description of Artificial Sequence: Synthetic oligonucleotide
  Target: LAMA2; (-) strand; PAM type: NRG; PAM sequence: GAG
ggcggagcttgcagtgagcc

SEQ ID NO: 70296 - DNA, 20 bp, Artificial Sequence
  Description of Artificial Sequence: Synthetic oligonucleotide
  Target: LAMA2; (-) strand; PAM type: NRG; PAM sequence: GAG
cgggaggcggagcttgcagt

SEQ ID NO: 70297 - DNA, 20 bp, Artificial Sequence
  Description of Artificial Sequence: Synthetic oligonucleotide
  Target: LAMA2; (-) strand; PAM type: NRG; PAM sequence: CAG
aacccgggaggcggagcttg

SEQ ID NO: 70298 - DNA, 20 bp, Artificial Sequence
  Description of Artificial Sequence: Synthetic oligonucleotide
  Target: LAMA2; (-) strand; PAM type: NRG; PAM sequence: GAG
tggcgtgaacccgggaggcg

SEQ ID NO: 70299 - DNA, 20 bp, Artificial Sequence
  Description of Artificial Sequence: Synthetic oligonucleotide
  Target: LAMA2; (-) strand; PAM type: NRG; PAM sequence: CGG
aatggcgtgaacccgggagg

SEQ ID NO: 70300 - DNA, 20 bp, Artificial Sequence
  Description of Artificial Sequence: Synthetic oligonucleotide
  Target: LAMA2; (-) strand; PAM type: NRG; PAM sequence: AGG
gagaatggcgtgaacccggg

SEQ ID NO: 70301 - DNA, 20 bp, Artificial Sequence
  Description of Artificial Sequence: Synthetic oligonucleotide
  Target: LAMA2; (-) strand; PAM type: NRG; PAM sequence: GAG
agagaatggcgtgaacccgg

SEQ ID NO: 70302 - DNA, 20 bp, Artificial Sequence
  Description of Artificial Sequence: Synthetic oligonucleotide
  Target: LAMA2; (-) strand; PAM type: NRG; PAM sequence: GGG
caagagaatggcgtgaaccc

SEQ ID NO: 70303 - DNA, 20 bp, Artificial Sequence
  Description of Artificial Sequence: Synthetic oligonucleotide
  Target: LAMA2; (-) strand; PAM type: NRG; PAM sequence: CGG
gcaagagaatggcgtgaacc

SEQ ID NO: 70304 - DNA, 20 bp, Artificial Sequence
  Description of Artificial Sequence: Synthetic oligonucleotide
  Target: LAMA2; (-) strand; PAM type: NRG; PAM sequence: TGG
gggaggctgaggcaagagaa

SEQ ID NO: 70305 - DNA, 20 bp, Artificial Sequence
  Description of Artificial Sequence: Synthetic oligonucleotide
  Target: LAMA2; (-) strand; PAM type: NRG; PAM sequence: GAG
tgctggggaggctgaggcaa

SEQ ID NO: 70306 - DNA, 20 bp, Artificial Sequence
  Description of Artificial Sequence: Synthetic oligonucleotide
  Target: LAMA2; (-) strand; PAM type: NRG; PAM sequence: AAG
gctgctggggaggctgaggc

SEQ ID NO: 70307 - DNA, 20 bp, Artificial Sequence
  Description of Artificial Sequence: Synthetic oligonucleotide
  Target: LAMA2; (-) strand; PAM type: NRG; PAM sequence: AGG
cccagctgctggggaggctg

SEQ ID NO: 70308 - DNA, 20 bp, Artificial Sequence
  Description of Artificial Sequence: Synthetic oligonucleotide
  Target: LAMA2; (-) strand; PAM type: NRG; PAM sequence: GAG
tcccagctgctggggaggct

SEQ ID NO: 70309 - DNA, 20 bp, Artificial Sequence
  Description of Artificial Sequence: Synthetic oligonucleotide
  Target: LAMA2; (-) strand; PAM type: NRG; PAM sequence: AGG
tgcagtcccagctgctgggg

SEQ ID NO: 70310 - DNA, 20 bp, Artificial Sequence
  Description of Artificial Sequence: Synthetic oligonucleotide
  Target: LAMA2; (-) strand; PAM type: NRG; PAM sequence: GAG
ctgcagtcccagctgctggg

SEQ ID NO: 70311 - DNA, 20 bp, Artificial Sequence
  Description of Artificial Sequence: Synthetic oligonucleotide
  Target: LAMA2; (-) strand; PAM type: NRG; PAM sequence: GGG
gcctgcagtcccagctgctg

SEQ ID NO: 70312 - DNA, 20 bp, Artificial Sequence
  Description of Artificial Sequence: Synthetic oligonucleotide
  Target: LAMA2; (-) strand; PAM type: NRG; PAM sequence: GGG
cgcctgcagtcccagctgct

SEQ ID NO: 70313 - DNA, 20 bp, Artificial Sequence
  Description of Artificial Sequence: Synthetic oligonucleotide
  Target: LAMA2; (-) strand; PAM type: NRG; PAM sequence: TGG
gcgcctgcagtcccagctgc

SEQ ID NO: 70314 - DNA, 20 bp, Artificial Sequence
  Description of Artificial Sequence: Synthetic oligonucleotide
  Target: LAMA2; (-) strand; PAM type: NRG; PAM sequence: CAG
gcaacgtgcgcctgcagtcc

SEQ ID NO: 70315 - DNA, 20 bp, Artificial Sequence
  Description of Artificial Sequence: Synthetic oligonucleotide
  Target: LAMA2; (-) strand; PAM type: NRG; PAM sequence: CAG
ggcgtggcaacgtgcgcctg

SEQ ID NO: 70316 - DNA, 20 bp, Artificial Sequence
  Description of Artificial Sequence: Synthetic oligonucleotide
  Target: LAMA2; (-) strand; PAM type: NRG; PAM sequence: TGG
aaaaaagaattagccgggcg

SEQ ID NO: 70317 - DNA, 20 bp, Artificial Sequence
  Description of Artificial Sequence: Synthetic oligonucleotide
  Target: LAMA2; (-) strand; PAM type: NRG; PAM sequence: GGG
aaaaaaaaaaagaattagcc

SEQ ID NO: 70318 - DNA, 20 bp, Artificial Sequence
  Description of Artificial Sequence: Synthetic oligonucleotide
  Target: LAMA2; (-) strand; PAM type: NRG; PAM sequence: CGG
aaaaaaaaaaaagaattagc

SEQ ID NO: 70319 - DNA, 20 bp, Artificial Sequence
  Description of Artificial Sequence: Synthetic oligonucleotide
  Target: LAMA2; (-) strand; PAM type: NRG; PAM sequence: TAG
aaaaaaaaaaaaaaaagaat

SEQ ID NO: 70320 - DNA, 20 bp, Artificial Sequence
  Description of Artificial Sequence: Synthetic oligonucleotide
  Target: LAMA2; (-) strand; PAM type: NRG; PAM sequence: AAG
aaatacaaaaaaaaaaaaaa

SEQ ID NO: 70321 - DNA, 20 bp, Artificial Sequence
  Description of Artificial Sequence: Synthetic oligonucleotide
  Target: LAMA2; (-) strand; PAM type: NRG; PAM sequence: CGG
tgagaccgtgctagctaaca

SEQ ID NO: 70322 - DNA, 20 bp, Artificial Sequence
  Description of Artificial Sequence: Synthetic oligonucleotide
  Target: LAMA2; (-) strand; PAM type: NRG; PAM sequence: TAG
tcaggagattgagaccgtgc

SEQ ID NO: 70323 - DNA, 20 bp, Artificial Sequence
  Description of Artificial Sequence: Synthetic oligonucleotide
  Target: LAMA2; (-) strand; PAM type: NRG; PAM sequence: GAG
tatcacgagatcaggagatt

SEQ ID NO: 70324 - DNA, 20 bp, Artificial Sequence
  Description of Artificial Sequence: Synthetic oligonucleotide
  Target: LAMA2; (-) strand; PAM type: NRG; PAM sequence: GAG
cgggcatatcacgagatcag

SEQ ID NO: 70325 - DNA, 20 bp, Artificial Sequence
  Description of Artificial Sequence: Synthetic oligonucleotide
  Target: LAMA2; (-) strand; PAM type: NRG; PAM sequence: AGG
ggcgggcatatcacgagatc

SEQ ID NO: 70326 - DNA, 20 bp, Artificial Sequence
  Description of Artificial Sequence: Synthetic oligonucleotide
  Target: LAMA2; (-) strand; PAM type: NRG; PAM sequence: CAG
aggcgggcatatcacgagat

SEQ ID NO: 70327 - DNA, 20 bp, Artificial Sequence
  Description of Artificial Sequence: Synthetic oligonucleotide
  Target: LAMA2; (-) strand; PAM type: NRG; PAM sequence: GAG
ggccgaggcgggcatatcac

SEQ ID NO: 70328 - DNA, 20 bp, Artificial Sequence
  Description of Artificial Sequence: Synthetic oligonucleotide
  Target: LAMA2; (-) strand; PAM type: NRG; PAM sequence: GGG
gcactttgggaggccgaggc

SEQ ID NO: 70329 - DNA, 20 bp, Artificial Sequence
  Description of Artificial Sequence: Synthetic oligonucleotide
  Target: LAMA2; (-) strand; PAM type: NRG; PAM sequence: CGG
agcactttgggaggccgagg

SEQ ID NO: 70330 - DNA, 20 bp, Artificial Sequence
  Description of Artificial Sequence: Synthetic oligonucleotide
  Target: LAMA2; (-) strand; PAM type: NRG; PAM sequence: AGG
cccagcactttgggaggccg

SEQ ID NO: 70331 - DNA, 20 bp, Artificial Sequence
  Description of Artificial Sequence: Synthetic oligonucleotide
  Target: LAMA2; (-) strand; PAM type: NRG; PAM sequence: GAG
tcccagcactttgggaggcc

SEQ ID NO: 70332 - DNA, 20 bp, Artificial Sequence
  Description of Artificial Sequence: Synthetic oligonucleotide
  Target: LAMA2; (-) strand; PAM type: NRG; PAM sequence: AGG
tgtaatcccagcactttggg

SEQ ID NO: 70333 - DNA, 20 bp, Artificial Sequence
  Description of Artificial Sequence: Synthetic oligonucleotide
  Target: LAMA2; (-) strand; PAM type: NRG; PAM sequence: GAG
ctgtaatcccagcactttgg

SEQ ID NO: 70334 - DNA, 20 bp, Artificial Sequence
  Description of Artificial Sequence: Synthetic oligonucleotide
  Target: LAMA2; (-) strand; PAM type: NRG; PAM sequence: GGG
gcctgtaatcccagcacttt

SEQ ID NO: 70335 - DNA, 20 bp, Artificial Sequence
  Description of Artificial Sequence: Synthetic oligonucleotide
  Target: LAMA2; (-) strand; PAM type: NRG; PAM sequence: TGG
cgcctgtaatcccagcactt

SEQ ID NO: 70336 - DNA, 20 bp, Artificial Sequence
  Description of Artificial Sequence: Synthetic oligonucleotide
  Target: LAMA2; (-) strand; PAM type: NRG; PAM sequence: CAG
gtggctcacgcctgtaatcc

SEQ ID NO: 70337 - DNA, 20 bp, Artificial Sequence
  Description of Artificial Sequence: Synthetic oligonucleotide
  Target: LAMA2; (-) strand; PAM type: NRG; PAM sequence: TGG
agagaaaaggccgggcgcgg

SEQ ID NO: 70338 - DNA, 20 bp, Artificial Sequence
  Description of Artificial Sequence: Synthetic oligonucleotide
  Target: LAMA2; (-) strand; PAM type: NRG; PAM sequence: CGG
gacagagaaaaggccgggcg

SEQ ID NO: 70339 - DNA, 20 bp, Artificial Sequence
  Description of Artificial Sequence: Synthetic oligonucleotide
  Target: LAMA2; (-) strand; PAM type: NRG; PAM sequence: GGG
aaaaagacagagaaaaggcc

SEQ ID NO: 70340 - DNA, 20 bp, Artificial Sequence
  Description of Artificial Sequence: Synthetic oligonucleotide
  Target: LAMA2; (-) strand; PAM type: NRG; PAM sequence: CGG
taaaaagacagagaaaaggc

SEQ ID NO: 70341 - DNA, 20 bp, Artificial Sequence
  Description of Artificial Sequence: Synthetic oligonucleotide
  Target: LAMA2; (-) strand; PAM type: NRG; PAM sequence: AGG
tatttaaaaagacagagaaa

SEQ ID NO: 70342 - DNA, 20 bp, Artificial Sequence
  Description of Artificial Sequence: Synthetic oligonucleotide
  Target: LAMA2; (-) strand; PAM type: NRG; PAM sequence: AAG
ctatttaaaaagacagagaa

SEQ ID NO: 70343 - DNA, 20 bp, Artificial Sequence
  Description of Artificial Sequence: Synthetic oligonucleotide
  Target: LAMA2; (-) strand; PAM type: NRG; PAM sequence: GAG
aaggtctatttaaaaagaca

SEQ ID NO: 70344 - DNA, 20 bp, Artificial Sequence
  Description of Artificial Sequence: Synthetic oligonucleotide
  Target: LAMA2; (-) strand; PAM type: NRG; PAM sequence: CAG
ataaggtctatttaaaaaga

SEQ ID NO: 70345 - DNA, 20 bp, Artificial Sequence
  Description of Artificial Sequence: Synthetic oligonucleotide
  Target: LAMA2; (-) strand; PAM type: NRG; PAM sequence: AAG
aaaaataaggtctatttaaa

SEQ ID NO: 70346 - DNA, 20 bp, Artificial Sequence
  Description of Artificial Sequence: Synthetic oligonucleotide
  Target: LAMA2; (-) strand; PAM type: NRG; PAM sequence: AGG
ctcaaactgctctaaaaata

SEQ ID NO: 70347 - DNA, 20 bp, Artificial Sequence
  Description of Artificial Sequence: Synthetic oligonucleotide
  Target: LAMA2; (-) strand; PAM type: NRG; PAM sequence: AAG
cctcaaactgctctaaaaat

SEQ ID NO: 70348 - DNA, 20 bp, Artificial Sequence
  Description of Artificial Sequence: Synthetic oligonucleotide
  Target: LAMA2; (-) strand; PAM type: NRG; PAM sequence: GGG
gttggggcgggggaaatatg

SEQ ID NO: 70349 - DNA, 20 bp, Artificial Sequence
  Description of Artificial Sequence: Synthetic oligonucleotide
  Target: LAMA2; (-) strand; PAM type: NRG; PAM sequence: GGG
tgttggggcgggggaaatat

SEQ ID NO: 70350 - DNA, 20 bp, Artificial Sequence
  Description of Artificial Sequence: Synthetic oligonucleotide
  Target: LAMA2; (-) strand; PAM type: NRG; PAM sequence: TGG
gtgttggggcgggggaaata

SEQ ID NO: 70351 - DNA, 20 bp, Artificial Sequence
  Description of Artificial Sequence: Synthetic oligonucleotide
  Target: LAMA2; (-) strand; PAM type: NRG; PAM sequence: GGG
ccacgcatgtgttggggcgg

SEQ ID NO: 70352 - DNA, 20 bp, Artificial Sequence
  Description of Artificial Sequence: Synthetic oligonucleotide
  Target: LAMA2; (-) strand; PAM type: NRG; PAM sequence: GGG
tccacgcatgtgttggggcg

SEQ ID NO: 70353 - DNA, 20 bp, Artificial Sequence
  Description of Artificial Sequence: Synthetic oligonucleotide
  Target: LAMA2; (-) strand; PAM type: NRG; PAM sequence: GGG
gtccacgcatgtgttggggc

SEQ ID NO: 70354 - DNA, 20 bp, Artificial Sequence
  Description of Artificial Sequence: Synthetic oligonucleotide
  Target: LAMA2; (-) strand; PAM type: NRG; PAM sequence: CGG
agtccacgcatgtgttgggg

SEQ ID NO: 70355 - DNA, 20 bp, Artificial Sequence
  Description of Artificial Sequence: Synthetic oligonucleotide
  Target: LAMA2; (-) strand; PAM type: NRG; PAM sequence: GGG
agaagtccacgcatgtgttg

SEQ ID NO: 70356 - DNA, 20 bp, Artificial Sequence
  Description of Artificial Sequence: Synthetic oligonucleotide
  Target: LAMA2; (-) strand; PAM type: NRG; PAM sequence: GGG
gagaagtccacgcatgtgtt

SEQ ID NO: 70357 - DNA, 20 bp, Artificial Sequence
  Description of Artificial Sequence: Synthetic oligonucleotide
  Target: LAMA2; (-) strand; PAM type: NRG; PAM sequence: TGG
ggagaagtccacgcatgtgt

SEQ ID NO: 70358 - DNA, 20 bp, Artificial Sequence
  Description of Artificial Sequence: Synthetic oligonucleotide
  Target: LAMA2; (-) strand; PAM type: NRG; PAM sequence: AAG
gggggattttggtaatggag

SEQ ID NO: 70359 - DNA, 20 bp, Artificial Sequence
  Description of Artificial Sequence: Synthetic oligonucleotide
  Target: LAMA2; (-) strand; PAM type: NRG; PAM sequence: GAG
ggagggggattttggtaatg

SEQ ID NO: 70360 - DNA, 20 bp, Artificial Sequence
  Description of Artificial Sequence: Synthetic oligonucleotide
  Target: LAMA2; (-) strand; PAM type: NRG; PAM sequence: TGG
ctggagggggattttggtaa

SEQ ID NO: 70361 - DNA, 20 bp, Artificial Sequence
  Description of Artificial Sequence: Synthetic oligonucleotide
  Target: LAMA2; (-) strand; PAM type: NRG; PAM sequence: TGG
agcactctggagggggattt

SEQ ID NO: 70362 - DNA, 20 bp, Artificial Sequence
  Description of Artificial Sequence: Synthetic oligonucleotide
  Target: LAMA2; (-) strand; PAM type: NRG; PAM sequence: GGG
caaatgtagcactctggagg

SEQ ID NO: 70363 - DNA, 20 bp, Artificial Sequence
  Description of Artificial Sequence: Synthetic oligonucleotide
  Target: LAMA2; (-) strand; PAM type: NRG; PAM sequence: GGG
acaaatgtagcactctggag

SEQ ID NO: 70364 - DNA, 20 bp, Artificial Sequence
  Description of Artificial Sequence: Synthetic oligonucleotide
  Target: LAMA2; (-) strand; PAM type: NRG; PAM sequence: GGG
aacaaatgtagcactctgga

SEQ ID NO: 70365 - DNA, 20 bp, Artificial Sequence
  Description of Artificial Sequence: Synthetic oligonucleotide
  Target: LAMA2; (-) strand; PAM type: NRG; PAM sequence: AGG
taacaaatgtagcactctgg

SEQ ID NO: 70366 - DNA, 20 bp, Artificial Sequence
  Description of Artificial Sequence: Synthetic oligonucleotide
  Target: LAMA2; (-) strand; PAM type: NRG; PAM sequence: GAG
gtaacaaatgtagcactctg

SEQ ID NO: 70367 - DNA, 20 bp, Artificial Sequence
  Description of Artificial Sequence: Synthetic oligonucleotide
  Target: LAMA2; (-) strand; PAM type: NRG; PAM sequence: TGG
ctgtaacaaatgtagcactc

SEQ ID NO: 70368 - DNA, 20 bp, Artificial Sequence
  Description of Artificial Sequence: Synthetic oligonucleotide
  Target: LAMA2; (-) strand; PAM type: NRG; PAM sequence: TAG
ttcatggactgtaacaaatg

SEQ ID NO: 70369 - DNA, 20 bp, Artificial Sequence
  Description of Artificial Sequence: Synthetic oligonucleotide
  Target: LAMA2; (-) strand; PAM type: NRG; PAM sequence: TGG
ctgttgtcaatgtaggttca

SEQ ID NO: 70370 - DNA, 20 bp, Artificial Sequence
  Description of Artificial Sequence: Synthetic oligonucleotide
  Target: LAMA2; (-) strand; PAM type: NRG; PAM sequence: AGG
ggtgatgctgttgtcaatgt

SEQ ID NO: 70371 - DNA, 20 bp, Artificial Sequence
  Description of Artificial Sequence: Synthetic oligonucleotide
  Target: LAMA2; (-) strand; PAM type: NRG; PAM sequence: TAG
gggtgatgctgttgtcaatg

SEQ ID NO: 70372 - DNA, 20 bp, Artificial Sequence
  Description of Artificial Sequence: Synthetic oligonucleotide
  Target: LAMA2; (-) strand; PAM type: NRG; PAM sequence: GGG
taatgcagtctatgaagttt

SEQ ID NO: 70373 - DNA, 20 bp, Artificial Sequence
  Description of Artificial Sequence: Synthetic oligonucleotide
  Target: LAMA2; (-) strand; PAM type: NRG; PAM sequence: TGG
ctaatgcagtctatgaagtt

SEQ ID NO: 70374 - DNA, 20 bp, Artificial Sequence
  Description of Artificial Sequence: Synthetic oligonucleotide
  Target: LAMA2; (-) strand; PAM type: NRG; PAM sequence: AAG
aaaccctaatgcagtctatg

SEQ ID NO: 70375 - DNA, 20 bp, Artificial Sequence
  Description of Artificial Sequence: Synthetic oligonucleotide
  Target: LAMA2; (-) strand; PAM type: NRG; PAM sequence: CAG
accaaaagtaaaccctaatg

SEQ ID NO: 70376 - DNA, 20 bp, Artificial Sequence
  Description of Artificial Sequence: Synthetic oligonucleotide
  Target: LAMA2; (-) strand; PAM type: NRG; PAM sequence: AAG
cataaaaggtacaccaccaa

SEQ ID NO: 70377 - DNA, 20 bp, Artificial Sequence
  Description of Artificial Sequence: Synthetic oligonucleotide
  Target: LAMA2; (-) strand; PAM type: NRG; PAM sequence: AGG
agtttgtccaaacccataaa

SEQ ID NO: 70378 - DNA, 20 bp, Artificial Sequence
  Description of Artificial Sequence: Synthetic oligonucleotide
  Target: LAMA2; (-) strand; PAM type: NRG; PAM sequence: AAG
aagtttgtccaaacccataa

SEQ ID NO: 70379 - DNA, 20 bp, Artificial Sequence
  Description of Artificial Sequence: Synthetic oligonucleotide
  Target: LAMA2; (-) strand; PAM type: NRG; PAM sequence: AAG
tggtagatatatatcattat

SEQ ID NO: 70380 - DNA, 20 bp, Artificial Sequence
  Description of Artificial Sequence: Synthetic oligonucleotide
  Target: LAMA2; (-) strand; PAM type: NRG; PAM sequence: TAG
tttgcgtgatactctaatgg

SEQ ID NO: 70381 - DNA, 20 bp, Artificial Sequence
  Description of Artificial Sequence: Synthetic oligonucleotide
  Target: LAMA2; (-) strand; PAM type: NRG; PAM sequence: TGG
tactttgcgtgatactctaa

SEQ ID NO: 70382 - DNA, 20 bp, Artificial Sequence
  Description of Artificial Sequence: Synthetic oligonucleotide
  Target: LAMA2; (-) strand; PAM type: NRG; PAM sequence: GAG
tttataatttaaaaaaaaaa

SEQ ID NO: 70383 - DNA, 20 bp, Artificial Sequence
  Description of Artificial Sequence: Synthetic oligonucleotide
  Target: LAMA2; (-) strand; PAM type: NRG; PAM sequence: AAG
attttataatttaaaaaaaa

SEQ ID NO: 70384 - DNA, 20 bp, Artificial Sequence
  Description of Artificial Sequence: Synthetic oligonucleotide
  Target: LAMA2; (-) strand; PAM type: NRG; PAM sequence: AAG
aaaatgtaaattgtgagaaa

SEQ ID NO: 70385 - DNA, 20 bp, Artificial Sequence
  Description of Artificial Sequence: Synthetic oligonucleotide
  Target: LAMA2; (-) strand; PAM type: NRG; PAM sequence: GAG
ggataaaaaatgtaaattgt

SEQ ID NO: 70386 - DNA, 20 bp, Artificial Sequence
  Description of Artificial Sequence: Synthetic oligonucleotide
  Target: LAMA2; (-) strand; PAM type: NRG; PAM sequence: GGG
tgcctttcaattttcttttt

SEQ ID NO: 70387 - DNA, 20 bp, Artificial Sequence
  Description of Artificial Sequence: Synthetic oligonucleotide
  Target: LAMA2; (-) strand; PAM type: NRG; PAM sequence: TGG
atgcctttcaattttctttt

SEQ ID NO: 70388 - DNA, 20 bp, Artificial Sequence
  Description of Artificial Sequence: Synthetic oligonucleotide
  Target: LAMA2; (-) strand; PAM type: NRG; PAM sequence: AGG
ttaaccagctccaagaaaaa

SEQ ID NO: 70389 - DNA, 20 bp, Artificial Sequence
  Description of Artificial Sequence: Synthetic oligonucleotide
  Target: LAMA2; (-) strand; PAM type: NRG; PAM sequence: AAG
tttaaccagctccaagaaaa

SEQ ID NO: 70390 - DNA, 20 bp, Artificial Sequence
  Description of Artificial Sequence: Synthetic oligonucleotide
  Target: LAMA2; (-) strand; PAM type: NRG; PAM sequence: AAG
gcctctctttaaccagctcc

SEQ ID NO: 70391 - DNA, 20 bp, Artificial Sequence
  Description of Artificial Sequence: Synthetic oligonucleotide
  Target: LAMA2; (-) strand; PAM type: NRG; PAM sequence: CAG
tatgcatgcctctctttaac

SEQ ID NO: 70392 - DNA, 20 bp, Artificial Sequence
  Description of Artificial Sequence: Synthetic oligonucleotide
  Target: LAMA2; (-) strand; PAM type: NRG; PAM sequence: GGG
ttcctaaattatataatgag

SEQ ID NO: 70393 - DNA, 20 bp, Artificial Sequence
  Description of Artificial Sequence: Synthetic oligonucleotide
  Target: LAMA2; (-) strand; PAM type: NRG; PAM sequence: GGG
attcctaaattatataatga

SEQ ID NO: 70394 - DNA, 20 bp, Artificial Sequence
  Description of Artificial Sequence: Synthetic oligonucleotide
  Target: LAMA2; (-) strand; PAM type: NRG; PAM sequence: AGG
cattcctaaattatataatg

SEQ ID NO: 70395 - DNA, 20 bp, Artificial Sequence
  Description of Artificial Sequence: Synthetic oligonucleotide
  Target: LAMA2; (-) strand; PAM type: NRG; PAM sequence: GAG
gcattcctaaattatataat

SEQ ID NO: 70396 - DNA, 20 bp, Artificial Sequence
  Description of Artificial Sequence: Synthetic oligonucleotide
  Target: LAMA2; (-) strand; PAM type: NRG; PAM sequence: TAG
aagtgtcaattgctgaaata

SEQ ID NO: 70397 - DNA, 20 bp, Artificial Sequence
  Description of Artificial Sequence: Synthetic oligonucleotide
  Target: LAMA2; (-) strand; PAM type: NRG; PAM sequence: AAG
accactaattttaatcaaac

SEQ ID NO: 70398 - DNA, 20 bp, Artificial Sequence
  Description of Artificial Sequence: Synthetic oligonucleotide
  Target: LAMA2; (-) strand; PAM type: NRG; PAM sequence: TGG
tttctggtggttgccttctt

SEQ ID NO: 70399 - DNA, 20 bp, Artificial Sequence
  Description of Artificial Sequence: Synthetic oligonucleotide
  Target: LAMA2; (-) strand; PAM type: NRG; PAM sequence: TGG
ttaataggaaaggtttctgg

SEQ ID NO: 70400 - DNA, 20 bp, Artificial Sequence
  Description of Artificial Sequence: Synthetic oligonucleotide
  Target: LAMA2; (-) strand; PAM type: NRG; PAM sequence: TGG
tcattaataggaaaggtttc

SEQ ID NO: 70401 - DNA, 20 bp, Artificial Sequence
  Description of Artificial Sequence: Synthetic oligonucleotide
  Target: LAMA2; (-) strand; PAM type: NRG; PAM sequence: AGG
accagagtcattaataggaa

SEQ ID NO: 70402 - DNA, 20 bp, Artificial Sequence
  Description of Artificial Sequence: Synthetic oligonucleotide
  Target: LAMA2; (-) strand; PAM type: NRG; PAM sequence: AAG
aaccagagtcattaatagga

SEQ ID NO: 70403 - DNA, 20 bp, Artificial Sequence
  Description of Artificial Sequence: Synthetic oligonucleotide
  Target: LAMA2; (-) strand; PAM type: NRG; PAM sequence: AGG
aattaaccagagtcattaat

SEQ ID NO: 70404 - DNA, 20 bp, Artificial Sequence
  Description of Artificial Sequence: Synthetic oligonucleotide
  Target: LAMA2; (-) strand; PAM type: NRG; PAM sequence: TAG
aaattaaccagagtcattaa

SEQ ID NO: 70405 - DNA, 20 bp, Artificial Sequence
  Description of Artificial Sequence: Synthetic oligonucleotide
  Target: LAMA2; (-) strand; PAM type: NRG; PAM sequence: GAG
aaaaagaaagaaattaacca

SEQ ID NO: 70406 - DNA, 20 bp, Artificial Sequence
  Description of Artificial Sequence: Synthetic oligonucleotide
  Target: LAMA2; (-) strand; PAM type: NRG; PAM sequence: CAG
caaaaaagaaagaaattaac

SEQ ID NO: 70407 - DNA, 20 bp, Artificial Sequence
  Description of Artificial Sequence: Synthetic oligonucleotide
  Target: LAMA2; (-) strand; PAM type: NRG; PAM sequence: AAG
acaaaacaaaacaaaaaaga

SEQ ID NO: 70408 - DNA, 20 bp, Artificial Sequence
  Description of Artificial Sequence: Synthetic oligonucleotide
  Target: LAMA2; (-) strand; PAM type: NRG; PAM sequence: AAG
caaaacaaaacaaaacaaaa

SEQ ID NO: 70409 - DNA, 20 bp, Artificial Sequence
  Description of Artificial Sequence: Synthetic oligonucleotide
  Target: LAMA2; (-) strand; PAM type: NRG; PAM sequence: GAG
cactccagcctgggcaacaa

SEQ ID NO: 70410 - DNA, 20 bp, Artificial Sequence
  Description of Artificial Sequence: Synthetic oligonucleotide
  Target: LAMA2; (-) strand; PAM type: NRG; PAM sequence: AAG
tgcactccagcctgggcaac

SEQ ID NO: 70411 - DNA, 20 bp, Artificial Sequence
  Description of Artificial Sequence: Synthetic oligonucleotide
  Target: LAMA2; (-) strand; PAM type: NRG; PAM sequence: GGG
gtgccattgcactccagcct

SEQ ID NO: 70412 - DNA, 20 bp, Artificial Sequence
  Description of Artificial Sequence: Synthetic oligonucleotide
  Target: LAMA2; (-) strand; PAM type: NRG; PAM sequence: TGG
cgtgccattgcactccagcc

SEQ ID NO: 70413 - DNA, 20 bp, Artificial Sequence
  Description of Artificial Sequence: Synthetic oligonucleotide
  Target: LAMA2; (-) strand; PAM type: NRG; PAM sequence: CAG
gaggtcgtgccattgcactc

SEQ ID NO: 70414 - DNA, 20 bp, Artificial Sequence
  Description of Artificial Sequence: Synthetic oligonucleotide
  Target: LAMA2; (-) strand; PAM type: NRG; PAM sequence: AGG
gcggaggttgcggtgagccg

SEQ ID NO: 70415 - DNA, 20 bp, Artificial Sequence
  Description of Artificial Sequence: Synthetic oligonucleotide
  Target: LAMA2; (-) strand; PAM type: NRG; PAM sequence: GAG
ggcggaggttgcggtgagcc

SEQ ID NO: 70416 - DNA, 20 bp, Artificial Sequence
  Description of Artificial Sequence: Synthetic oligonucleotide
  Target: LAMA2; (-) strand; PAM type: NRG; PAM sequence: GAG
cgggaggcggaggttgcggt

SEQ ID NO: 70417 - DNA, 20 bp, Artificial Sequence
  Description of Artificial Sequence: Synthetic oligonucleotide
  Target: LAMA2; (-) strand; PAM type: NRG; PAM sequence: CGG
aacccgggaggcggaggttg

SEQ ID NO: 70418 - DNA, 20 bp, Artificial Sequence
  Description of Artificial Sequence: Synthetic oligonucleotide
  Target: LAMA2; (-) strand; PAM type: NRG; PAM sequence: AGG
ctcttgaacccgggaggcgg

SEQ ID NO: 70419 - DNA, 20 bp, Artificial Sequence
  Description of Artificial Sequence: Synthetic oligonucleotide
  Target: LAMA2; (-) strand; PAM type: NRG; PAM sequence: GAG
tctcttgaacccgggaggcg

SEQ ID NO: 70420 - DNA, 20 bp, Artificial Sequence
  Description of Artificial Sequence: Synthetic oligonucleotide
  Target: LAMA2; (-) strand; PAM type: NRG; PAM sequence: CGG
aatctcttgaacccgggagg

SEQ ID NO: 70421 - DNA, 20 bp, Artificial Sequence
  Description of Artificial Sequence: Synthetic oligonucleotide
  Target: LAMA2; (-) strand; PAM type: NRG; PAM sequence: AGG
aagaatctcttgaacccggg

SEQ ID NO: 70422 - DNA, 20 bp, Artificial Sequence
  Description of Artificial Sequence: Synthetic oligonucleotide
  Target: LAMA2; (-) strand; PAM type: NRG; PAM sequence: GAG
gaagaatctcttgaacccgg

SEQ ID NO: 70423 - DNA, 20 bp, Artificial Sequence
  Description of Artificial Sequence: Synthetic oligonucleotide
  Target: LAMA2; (-) strand; PAM type: NRG; PAM sequence: GGG
cagaagaatctcttgaaccc

SEQ ID NO: 70424 - DNA, 20 bp, Artificial Sequence
  Description of Artificial Sequence: Synthetic oligonucleotide
  Target: LAMA2; (-) strand; PAM type: NRG; PAM sequence: CGG
gcagaagaatctcttgaacc

SEQ ID NO: 70425 - DNA, 20 bp, Artificial Sequence
  Description of Artificial Sequence: Synthetic oligonucleotide
  Target: LAMA2; (-) strand; PAM type: NRG; PAM sequence: AAG
ctctcaggaggctgaggcag

SEQ ID NO: 70426 - DNA, 20 bp, Artificial Sequence
  Description of Artificial Sequence: Synthetic oligonucleotide
  Target: LAMA2; (-) strand; PAM type: NRG; PAM sequence: CAG
tgcctctcaggaggctgagg

SEQ ID NO: 70427 - DNA, 20 bp, Artificial Sequence
  Description of Artificial Sequence: Synthetic oligonucleotide
  Target: LAMA2; (-) strand; PAM type: NRG; PAM sequence: AGG
gcatgcctctcaggaggctg

SEQ ID NO: 70428 - DNA, 20 bp, Artificial Sequence
  Description of Artificial Sequence: Synthetic oligonucleotide
  Target: LAMA2; (-) strand; PAM type: NRG; PAM sequence: GAG
cgcatgcctctcaggaggct

SEQ ID NO: 70429 - DNA, 20 bp, Artificial Sequence
  Description of Artificial Sequence: Synthetic oligonucleotide
  Target: LAMA2; (-) strand; PAM type: NRG; PAM sequence: AGG
ggtggcgcatgcctctcagg

SEQ ID NO: 70430 - DNA, 20 bp, Artificial Sequence
  Description of Artificial Sequence: Synthetic oligonucleotide
  Target: LAMA2; (-) strand; PAM type: NRG; PAM sequence: GAG
tggtggcgcatgcctctcag

SEQ ID NO: 70431 - DNA, 20 bp, Artificial Sequence
  Description of Artificial Sequence: Synthetic oligonucleotide
  Target: LAMA2; (-) strand; PAM type: NRG; PAM sequence: AGG
catggtggcgcatgcctctc

SEQ ID NO: 70432 - DNA, 20 bp, Artificial Sequence
  Description of Artificial Sequence: Synthetic oligonucleotide
  Target: LAMA2; (-) strand; PAM type: NRG; PAM sequence: CAG
gcatggtggcgcatgcctct

SEQ ID NO: 70433 - DNA, 20 bp, Artificial Sequence
  Description of Artificial Sequence: Synthetic oligonucleotide
  Target: LAMA2; (-) strand; PAM type: NRG; PAM sequence: TGG
acaaaattagccgggcatgg

SEQ ID NO: 70434 - DNA, 20 bp, Artificial Sequence
  Description of Artificial Sequence: Synthetic oligonucleotide
  Target: LAMA2; (-) strand; PAM type: NRG; PAM sequence: TGG
aatacaaaattagccgggca

SEQ ID NO: 70435 - DNA, 20 bp, Artificial Sequence
  Description of Artificial Sequence: Synthetic oligonucleotide
  Target: LAMA2; (-) strand; PAM type: NRG; PAM sequence: GGG
ctaaaaatacaaaattagcc

SEQ ID NO: 70436 - DNA, 20 bp, Artificial Sequence
  Description of Artificial Sequence: Synthetic oligonucleotide
  Target: LAMA2; (-) strand; PAM type: NRG; PAM sequence: CGG
actaaaaatacaaaattagc

SEQ ID NO: 70437 - DNA, 20 bp, Artificial Sequence
  Description of Artificial Sequence: Synthetic oligonucleotide
  Target: LAMA2; (-) strand; PAM type: NRG; PAM sequence: TAG
ctctactaaaaatacaaaat

SEQ ID NO: 70438 - DNA, 20 bp, Artificial Sequence
  Description of Artificial Sequence: Synthetic oligonucleotide
  Target: LAMA2; (-) strand; PAM type: NRG; PAM sequence: GAG
ggaccagcctaaccaacatg

SEQ ID NO: 70439 - DNA, 20 bp, Artificial Sequence
  Description of Artificial Sequence: Synthetic oligonucleotide
  Target: LAMA2; (-) strand; PAM type: NRG; PAM sequence: TGG
cgggaccagcctaaccaaca

SEQ ID NO: 70440 - DNA, 20 bp, Artificial Sequence
  Description of Artificial Sequence: Synthetic oligonucleotide
  Target: LAMA2; (-) strand; PAM type: NRG; PAM sequence: CAG
tgaggtctggagttcgggac

SEQ ID NO: 70441 - DNA, 20 bp, Artificial Sequence
  Description of Artificial Sequence: Synthetic oligonucleotide
  Target: LAMA2; (-) strand; PAM type: NRG; PAM sequence: GGG
tcaactgaggtctggagttc

SEQ ID NO: 70442 - DNA, 20 bp, Artificial Sequence
  Description of Artificial Sequence: Synthetic oligonucleotide
  Target: LAMA2; (-) strand; PAM type: NRG; PAM sequence: CGG
atcaactgaggtctggagtt

SEQ ID NO: 70443 - DNA, 20 bp, Artificial Sequence
  Description of Artificial Sequence: Synthetic oligonucleotide
  Target: LAMA2; (-) strand; PAM type: NRG; PAM sequence: GAG
gttggatcaactgaggtctg

SEQ ID NO: 70444 - DNA, 20 bp, Artificial Sequence
  Description of Artificial Sequence: Synthetic oligonucleotide
  Target: LAMA2; (-) strand; PAM type: NRG; PAM sequence: TGG
cagttggatcaactgaggtc

SEQ ID NO: 70445 - DNA, 20 bp, Artificial Sequence
  Description of Artificial Sequence: Synthetic oligonucleotide
  Target: LAMA2; (-) strand; PAM type: NRG; PAM sequence: AGG
cgaggcagttggatcaactg

SEQ ID NO: 70446 - DNA, 20 bp, Artificial Sequence
  Description of Artificial Sequence: Synthetic oligonucleotide
  Target: LAMA2; (-) strand; PAM type: NRG; PAM sequence: GAG
ccgaggcagttggatcaact

SEQ ID NO: 70447 - DNA, 20 bp, Artificial Sequence
  Description of Artificial Sequence: Synthetic oligonucleotide
  Target: LAMA2; (-) strand; PAM type: NRG; PAM sequence: TGG
ctttgggaggccgaggcagt

SEQ ID NO: 70448 - DNA, 20 bp, Artificial Sequence
  Description of Artificial Sequence: Synthetic oligonucleotide
  Target: LAMA2; (-) strand; PAM type: NRG; PAM sequence: CAG
agcactttgggaggccgagg

SEQ ID NO: 70449 - DNA, 20 bp, Artificial Sequence
  Description of Artificial Sequence: Synthetic oligonucleotide
  Target: LAMA2; (-) strand; PAM type: NRG; PAM sequence: AGG
cccagcactttgggaggccg

SEQ ID NO: 70450 - DNA, 20 bp, Artificial Sequence
  Description of Artificial Sequence: Synthetic oligonucleotide
  Target: LAMA2; (-) strand; PAM type: NRG; PAM sequence: GAG
tcccagcactttgggaggcc

SEQ ID NO: 70451 - DNA, 20 bp, Artificial Sequence
  Description of Artificial Sequence: Synthetic oligonucleotide
  Target: LAMA2; (-) strand; PAM type: NRG; PAM sequence: AGG
tgtaatcccagcactttggg

SEQ ID NO: 70452 - DNA, 20 bp, Artificial Sequence
  Description of Artificial Sequence: Synthetic oligonucleotide
  Target: LAMA2; (-) strand; PAM type: NRG; PAM sequence: GAG
ctgtaatcccagcactttgg

SEQ ID NO: 70453 - DNA, 20 bp, Artificial Sequence
  Description of Artificial Sequence: Synthetic oligonucleotide
  Target: LAMA2; (-) strand; PAM type: NRG; PAM sequence: GGG
gtctgtaatcccagcacttt

SEQ ID NO: 70454 - DNA, 20 bp, Artificial Sequence
  Description of Artificial Sequence: Synthetic oligonucleotide
  Target: LAMA2; (-) strand; PAM type: NRG; PAM sequence: TGG
tgtctgtaatcccagcactt

SEQ ID NO: 70455 - DNA, 20 bp, Artificial Sequence
  Description of Artificial Sequence: Synthetic oligonucleotide
  Target: LAMA2; (-) strand; PAM type: NRG; PAM sequence: CAG
gtggctcatgtctgtaatcc

SEQ ID NO: 70456 - DNA, 20 bp, Artificial Sequence
  Description of Artificial Sequence: Synthetic oligonucleotide
  Target: LAMA2; (-) strand; PAM type: NRG; PAM sequence: TGG
ccagagtcggccgggcgcag

SEQ ID NO: 70457 - DNA, 20 bp, Artificial Sequence
  Description of Artificial Sequence: Synthetic oligonucleotide
  Target: LAMA2; (-) strand; PAM type: NRG; PAM sequence: CAG
tcaccagagtcggccgggcg

SEQ ID NO: 70458 - DNA, 20 bp, Artificial Sequence
  Description of Artificial Sequence: Synthetic oligonucleotide
  Target: LAMA2; (-) strand; PAM type: NRG; PAM sequence: GGG
gaaattcaccagagtcggcc

SEQ ID NO: 70459 - DNA, 20 bp, Artificial Sequence
  Description of Artificial Sequence: Synthetic oligonucleotide
  Target: LAMA2; (-) strand; PAM type: NRG; PAM sequence: CGG
agaaattcaccagagtcggc

SEQ ID NO: 70460 - DNA, 20 bp, Artificial Sequence
  Description of Artificial Sequence: Synthetic oligonucleotide
  Target: LAMA2; (-) strand; PAM type: NRG; PAM sequence: CGG
tccgagaaattcaccagagt

SEQ ID NO: 70461 - DNA, 20 bp, Artificial Sequence
  Description of Artificial Sequence: Synthetic oligonucleotide
  Target: LAMA2; (-) strand; PAM type: NRG; PAM sequence: GAG
tacatccgagaaattcacca

SEQ ID NO: 70462 - DNA, 20 bp, Artificial Sequence
  Description of Artificial Sequence: Synthetic oligonucleotide
  Target: LAMA2; (-) strand; PAM type: NRG; PAM sequence: CAG
cttacatccgagaaattcac

SEQ ID NO: 70463 - DNA, 20 bp, Artificial Sequence
  Description of Artificial Sequence: Synthetic oligonucleotide
  Target: LAMA2; (-) strand; PAM type: NRG; PAM sequence: GAG
taccataacaacttacatcc

SEQ ID NO: 70464 - DNA, 20 bp, Artificial Sequence
  Description of Artificial Sequence: Synthetic oligonucleotide
  Target: LAMA2; (-) strand; PAM type: NRG; PAM sequence: GGG
acaagagctagcaaacacat

SEQ ID NO: 70465 - DNA, 20 bp, Artificial Sequence
  Description of Artificial Sequence: Synthetic oligonucleotide
  Target: LAMA2; (-) strand; PAM type: NRG; PAM sequence: TGG
tacaagagctagcaaacaca

SEQ ID NO: 70466 - DNA, 20 bp, Artificial Sequence
  Description of Artificial Sequence: Synthetic oligonucleotide
  Target: LAMA2; (-) strand; PAM type: NRG; PAM sequence: TAG
cttacattctatacaagagc

SEQ ID NO: 70467 - DNA, 20 bp, Artificial Sequence
  Description of Artificial Sequence: Synthetic oligonucleotide
  Target: LAMA2; (-) strand; PAM type: NRG; PAM sequence: GAG
tcctcttacattctatacaa

SEQ ID NO: 70468 - DNA, 20 bp, Artificial Sequence
  Description of Artificial Sequence: Synthetic oligonucleotide
  Target: LAMA2; (-) strand; PAM type: NRG; PAM sequence: AAG
tttcctcttacattctatac

SEQ ID NO: 70469 - DNA, 20 bp, Artificial Sequence
  Description of Artificial Sequence: Synthetic oligonucleotide
  Target: LAMA2; (-) strand; PAM type: NRG; PAM sequence: GGG
ggcttttacataaaagcaaa

SEQ ID NO: 70470 - DNA, 20 bp, Artificial Sequence
  Description of Artificial Sequence: Synthetic oligonucleotide
  Target: LAMA2; (-) strand; PAM type: NRG; PAM sequence: AGG
tggcttttacataaaagcaa

SEQ ID NO: 70471 - DNA, 20 bp, Artificial Sequence
  Description of Artificial Sequence: Synthetic oligonucleotide
  Target: LAMA2; (-) strand; PAM type: NRG; PAM sequence: AAG
ttggcttttacataaaagca

SEQ ID NO: 70472 - DNA, 20 bp, Artificial Sequence
  Description of Artificial Sequence: Synthetic oligonucleotide
  Target: LAMA2; (-) strand; PAM type: NRG; PAM sequence: AAG
ctcccttggcttttacataa

SEQ ID NO: 70473 - DNA, 20 bp, Artificial Sequence
  Description of Artificial Sequence: Synthetic oligonucleotide
  Target: LAMA2; (-) strand; PAM type: NRG; PAM sequence: TGG
tccatttacctgaactccct

SEQ ID NO: 70474 - DNA, 20 bp, Artificial Sequence
  Description of Artificial Sequence: Synthetic oligonucleotide
  Target: LAMA2; (-) strand; PAM type: NRG; PAM sequence: AAG
ttcttactcaattatcttcg

SEQ ID NO: 70475 - DNA, 20 bp, Artificial Sequence
  Description of Artificial Sequence: Synthetic oligonucleotide
  Target: LAMA2; (-) strand; PAM type: NRG; PAM sequence: GGG
ggccatgttgtcaaaagcaa

SEQ ID NO: 70476 - DNA, 20 bp, Artificial Sequence
  Description of Artificial Sequence: Synthetic oligonucleotide
  Target: LAMA2; (-) strand; PAM type: NRG; PAM sequence: AGG
tggccatgttgtcaaaagca

SEQ ID NO: 70477 - DNA, 20 bp, Artificial Sequence
  Description of Artificial Sequence: Synthetic oligonucleotide
  Target: LAMA2; (-) strand; PAM type: NRG; PAM sequence: AAG
atggccatgttgtcaaaagc

SEQ ID NO: 70478 - DNA, 20 bp, Artificial Sequence
  Description of Artificial Sequence: Synthetic oligonucleotide
  Target: LAMA2; (-) strand; PAM type: NRG; PAM sequence: AAG
atggatggccatgttgtcaa

SEQ ID NO: 70479 - DNA, 20 bp, Artificial Sequence
  Description of Artificial Sequence: Synthetic oligonucleotide
  Target: LAMA2; (-) strand; PAM type: NRG; PAM sequence: TGG
ttagaaaggtgttcaatgga

SEQ ID NO: 70480 - DNA, 20 bp, Artificial Sequence
  Description of Artificial Sequence: Synthetic oligonucleotide
  Target: LAMA2; (-) strand; PAM type: NRG; PAM sequence: TGG
tactttagaaaggtgttcaa

SEQ ID NO: 70481 - DNA, 20 bp, Artificial Sequence
  Description of Artificial Sequence: Synthetic oligonucleotide
  Target: LAMA2; (-) strand; PAM type: NRG; PAM sequence: AGG
atctgctgagtactttagaa

SEQ ID NO: 70482 - DNA, 20 bp, Artificial Sequence
  Description of Artificial Sequence: Synthetic oligonucleotide
  Target: LAMA2; (-) strand; PAM type: NRG; PAM sequence: AAG
aatctgctgagtactttaga

SEQ ID NO: 70483 - DNA, 20 bp, Artificial Sequence
  Description of Artificial Sequence: Synthetic oligonucleotide
  Target: LAMA2; (-) strand; PAM type: NRG; PAM sequence: TAG
tatgaatctgctgagtactt

SEQ ID NO: 70484 - DNA, 20 bp, Artificial Sequence
  Description of Artificial Sequence: Synthetic oligonucleotide
  Target: LAMA2; (-) strand; PAM type: NRG; PAM sequence: GAG
cttgccactatgaatctgct

SEQ ID NO: 70485 - DNA, 20 bp, Artificial Sequence
  Description of Artificial Sequence: Synthetic oligonucleotide
  Target: LAMA2; (-) strand; PAM type: NRG; PAM sequence: CAG
tcattcatttattacctctt

SEQ ID NO: 70486 - DNA, 20 bp, Artificial Sequence
  Description of Artificial Sequence: Synthetic oligonucleotide
  Target: LAMA2; (-) strand; PAM type: NRG; PAM sequence: TAG
tacttgacagaatatttcta

SEQ ID NO: 70487 - DNA, 20 bp, Artificial Sequence
  Description of Artificial Sequence: Synthetic oligonucleotide
  Target: LAMA2; (-) strand; PAM type: NRG; PAM sequence: CAG
ttcacatcaaggatacttga

SEQ ID NO: 70488 - DNA, 20 bp, Artificial Sequence
  Description of Artificial Sequence: Synthetic oligonucleotide
  Target: LAMA2; (-) strand; PAM type: NRG; PAM sequence: AGG
cttcattctctttcacatca

SEQ ID NO: 70489 - DNA, 20 bp, Artificial Sequence
  Description of Artificial Sequence: Synthetic oligonucleotide
  Target: LAMA2; (-) strand; PAM type: NRG; PAM sequence: AAG
ccttcattctctttcacatc

SEQ ID NO: 70490 - DNA, 20 bp, Artificial Sequence
  Description of Artificial Sequence: Synthetic oligonucleotide
  Target: LAMA2; (-) strand; PAM type: NRG; PAM sequence: AAG
acttccctgcctttcccccc

SEQ ID NO: 70491 - DNA, 20 bp, Artificial Sequence
  Description of Artificial Sequence: Synthetic oligonucleotide
  Target: LAMA2; (-) strand; PAM type: NRG; PAM sequence: TGG
acaccatgcccaccaccact

SEQ ID NO: 70492 - DNA, 20 bp, Artificial Sequence
  Description of Artificial Sequence: Synthetic oligonucleotide
  Target: LAMA2; (-) strand; PAM type: NRG; PAM sequence: GAG
catatgtttttacttctaga

SEQ ID NO: 70493 - DNA, 20 bp, Artificial Sequence
  Description of Artificial Sequence: Synthetic oligonucleotide
  Target: LAMA2; (-) strand; PAM type: NRG; PAM sequence: GAG
cccatatgtttttacttcta

SEQ ID NO: 70494 - DNA, 20 bp, Artificial Sequence
  Description of Artificial Sequence: Synthetic oligonucleotide
  Target: LAMA2; (-) strand; PAM type: NRG; PAM sequence: TAG
gacccatatgtttttacttc

SEQ ID NO: 70495 - DNA, 20 bp, Artificial Sequence
  Description of Artificial Sequence: Synthetic oligonucleotide
  Target: LAMA2; (-) strand; PAM type: NRG; PAM sequence: AGG
agtatgtatcttctaatata

SEQ ID NO: 70496 - DNA, 20 bp, Artificial Sequence
  Description of Artificial Sequence: Synthetic oligonucleotide
  Target: LAMA2; (-) strand; PAM type: NRG; PAM sequence: AAG
aagtatgtatcttctaatat

SEQ ID NO: 70497 - DNA, 20 bp, Artificial Sequence
  Description of Artificial Sequence: Synthetic oligonucleotide
  Target: LAMA2; (-) strand; PAM type: NRG; PAM sequence: AAG
tttctgatttggtgagttaa

SEQ ID NO: 70498 - DNA, 20 bp, Artificial Sequence
  Description of Artificial Sequence: Synthetic oligonucleotide
  Target: LAMA2; (-) strand; PAM type: NRG; PAM sequence: GAG
tttcttctttctgatttggt

SEQ ID NO: 70499 - DNA, 20 bp, Artificial Sequence
  Description of Artificial Sequence: Synthetic oligonucleotide
  Target: LAMA2; (-) strand; PAM type: NRG; PAM sequence: TGG
attctttcttctttctgatt

SEQ ID NO: 70500 - DNA, 20 bp, Artificial Sequence
  Description of Artificial Sequence: Synthetic oligonucleotide
  Target: LAMA2; (-) strand; PAM type: NRG; PAM sequence: AAG
agaaatcaagatcatcaaat

SEQ ID NO: 70501 - DNA, 20 bp, Artificial Sequence
  Description of Artificial Sequence: Synthetic oligonucleotide
  Target: LAMA2; (-) strand; PAM type: NRG; PAM sequence: AAG
tacatcttaatgaagaaatc

SEQ ID NO: 70502 - DNA, 20 bp, Artificial Sequence
  Description of Artificial Sequence: Synthetic oligonucleotide
  Target: LAMA2; (-) strand; PAM type: NRG; PAM sequence: AAG
cccagatttacatcttaatg

SEQ ID NO: 70503 - DNA, 20 bp, Artificial Sequence
  Description of Artificial Sequence: Synthetic oligonucleotide
  Target: LAMA2; (-) strand; PAM type: NRG; PAM sequence: CAG
tctttcctcagcaggtaacc

SEQ ID NO: 70504 - DNA, 20 bp, Artificial Sequence
  Description of Artificial Sequence: Synthetic oligonucleotide
  Target: LAMA2; (-) strand; PAM type: NRG; PAM sequence: AGG
tgtttgcttctttcctcagc

SEQ ID NO: 70505 - DNA, 20 bp, Artificial Sequence
  Description of Artificial Sequence: Synthetic oligonucleotide
  Target: LAMA2; (-) strand; PAM type: NRG; PAM sequence: CAG
atgtttgcttctttcctcag

SEQ ID NO: 70506 - DNA, 20 bp, Artificial Sequence
  Description of Artificial Sequence: Synthetic oligonucleotide
  Target: LAMA2; (-) strand; PAM type: NRG; PAM sequence: CAG
taaatgtttgcttctttcct

SEQ ID NO: 70507 - DNA, 20 bp, Artificial Sequence
  Description of Artificial Sequence: Synthetic oligonucleotide
  Target: LAMA2; (-) strand; PAM type: NRG; PAM sequence: AGG
tcccctcctattcccctgag

SEQ ID NO: 70508 - DNA, 20 bp, Artificial Sequence
  Description of Artificial Sequence: Synthetic oligonucleotide
  Target: LAMA2; (-) strand; PAM type: NRG; PAM sequence: GAG
atcccctcctattcccctga

SEQ ID NO: 70509 - DNA, 20 bp, Artificial Sequence
  Description of Artificial Sequence: Synthetic oligonucleotide
  Target: LAMA2; (-) strand; PAM type: NRG; PAM sequence: GAG
tgatcccctcctattcccct

SEQ ID NO: 70510 - DNA, 20 bp, Artificial Sequence
  Description of Artificial Sequence: Synthetic oligonucleotide
  Target: LAMA2; (-) strand; PAM type: NRG; PAM sequence: CAG
actttattctgattacggct

SEQ ID NO: 70511 - DNA, 20 bp, Artificial Sequence
  Description of Artificial Sequence: Synthetic oligonucleotide
  Target: LAMA2; (-) strand; PAM type: NRG; PAM sequence: CGG
ttgccactttattctgatta

SEQ ID NO: 70512 - DNA, 20 bp, Artificial Sequence
  Description of Artificial Sequence: Synthetic oligonucleotide
  Target: LAMA2; (-) strand; PAM type: NRG; PAM sequence: TGG
attctttattttactccata

SEQ ID NO: 70513 - DNA, 20 bp, Artificial Sequence
  Description of Artificial Sequence: Synthetic oligonucleotide
  Target: LAMA2; (-) strand; PAM type: NRG; PAM sequence: CAG
ctgtaatgctccaagagtat

SEQ ID NO: 70514 - DNA, 20 bp, Artificial Sequence
  Description of Artificial Sequence: Synthetic oligonucleotide
  Target: LAMA2; (-) strand; PAM type: NRG; PAM sequence: GAG
ctttccctgtaatgctccaa

SEQ ID NO: 70515 - DNA, 20 bp, Artificial Sequence
  Description of Artificial Sequence: Synthetic oligonucleotide
  Target: LAMA2; (-) strand; PAM type: NRG; PAM sequence: AAG
tactttccctgtaatgctcc

SEQ ID NO: 70516 - DNA, 20 bp, Artificial Sequence
  Description of Artificial Sequence: Synthetic oligonucleotide
  Target: LAMA2; (-) strand; PAM type: NRG; PAM sequence: AGG
aatggtagtttccctccatc

SEQ ID NO: 70517 - DNA, 20 bp, Artificial Sequence
  Description of Artificial Sequence: Synthetic oligonucleotide
  Target: LAMA2; (-) strand; PAM type: NRG; PAM sequence: CAG
caatggtagtttccctccat

SEQ ID NO: 70518 - DNA, 20 bp, Artificial Sequence
  Description of Artificial Sequence: Synthetic oligonucleotide
  Target: LAMA2; (-) strand; PAM type: NRG; PAM sequence: TAG
accagtccctgaaccaatgg

SEQ ID NO: 70519 - DNA, 20 bp, Artificial Sequence
  Description of Artificial Sequence: Synthetic oligonucleotide
  Target: LAMA2; (-) strand; PAM type: NRG; PAM sequence: TGG
gccaccagtccctgaaccaa

SEQ ID NO: 70520 - DNA, 20 bp, Artificial Sequence
  Description of Artificial Sequence: Synthetic oligonucleotide
  Target: LAMA2; (-) strand; PAM type: NRG; PAM sequence: CAG
tatgaaattttcaaggccac

SEQ ID NO: 70521 - DNA, 20 bp, Artificial Sequence
  Description of Artificial Sequence: Synthetic oligonucleotide
  Target: LAMA2; (-) strand; PAM type: NRG; PAM sequence: AGG
cattctctatgaaattttca

SEQ ID NO: 70522 - DNA, 20 bp, Artificial Sequence
  Description of Artificial Sequence: Synthetic oligonucleotide
  Target: LAMA2; (-) strand; PAM type: NRG; PAM sequence: AAG
acattctctatgaaattttc

SEQ ID NO: 70523 - DNA, 20 bp, Artificial Sequence
  Description of Artificial Sequence: Synthetic oligonucleotide
  Target: LAMA2; (-) strand; PAM type: NRG; PAM sequence: GGG
acaactccgttcatgcccct

SEQ ID NO: 70524 - DNA, 20 bp, Artificial Sequence
  Description of Artificial Sequence: Synthetic oligonucleotide
  Target: LAMA2; (-) strand; PAM type: NRG; PAM sequence: TGG
cacaactccgttcatgcccc

SEQ ID NO: 70525 - DNA, 20 bp, Artificial Sequence
  Description of Artificial Sequence: Synthetic oligonucleotide
  Target: LAMA2; (-) strand; PAM type: NRG; PAM sequence: CAG
tctaattctccctgtctgca

SEQ ID NO: 70526 - DNA, 20 bp, Artificial Sequence
  Description of Artificial Sequence: Synthetic oligonucleotide
  Target: LAMA2; (-) strand; PAM type: NRG; PAM sequence: TGG
catacatatacacacactta

SEQ ID NO: 70527 - DNA, 20 bp, Artificial Sequence
  Description of Artificial Sequence: Synthetic oligonucleotide
  Target: LAMA2; (-) strand; PAM type: NRG; PAM sequence: AAG
taaatatttaataaatacat

SEQ ID NO: 70528 - DNA, 20 bp, Artificial Sequence
  Description of Artificial Sequence: Synthetic oligonucleotide
  Target: LAMA2; (-) strand; PAM type: NRG; PAM sequence: AAG
aaatttatttaatattatat

SEQ ID NO: 70529 - DNA, 20 bp, Artificial Sequence
  Description of Artificial Sequence: Synthetic oligonucleotide
  Target: LAMA2; (-) strand; PAM type: NRG; PAM sequence: AGG
tgtaaatattatatacacat

SEQ ID NO: 70530 - DNA, 20 bp, Artificial Sequence
  Description of Artificial Sequence: Synthetic oligonucleotide
  Target: LAMA2; (-) strand; PAM type: NRG; PAM sequence: TAG
gtgtaaatattatatacaca

SEQ ID NO: 70531 - DNA, 20 bp, Artificial Sequence
  Description of Artificial Sequence: Synthetic oligonucleotide
  Target: LAMA2; (-) strand; PAM type: NRG; PAM sequence: TAG
tttcttatttcttgcctttc

SEQ ID NO: 70532 - DNA, 20 bp, Artificial Sequence
  Description of Artificial Sequence: Synthetic oligonucleotide
  Target: LAMA2; (-) strand; PAM type: NRG; PAM sequence: TGG
ctccatcccatttttatgat

SEQ ID NO: 70533 - DNA, 20 bp, Artificial Sequence
  Description of Artificial Sequence: Synthetic oligonucleotide
  Target: LAMA2; (-) strand; PAM type: NRG; PAM sequence: GAG
agaataaaaataattgagtg

SEQ ID NO: 70534 - DNA, 20 bp, Artificial Sequence
  Description of Artificial Sequence: Synthetic oligonucleotide
  Target: LAMA2; (-) strand; PAM type: NRG; PAM sequence: TGG
caagaataaaaataattgag

SEQ ID NO: 70535 - DNA, 20 bp, Artificial Sequence
  Description of Artificial Sequence: Synthetic oligonucleotide
  Target: LAMA2; (-) strand; PAM type: NRG; PAM sequence: GAG
agccaagaataaaaataatt

SEQ ID NO: 70536 - DNA, 20 bp, Artificial Sequence
  Description of Artificial Sequence: Synthetic oligonucleotide
  Target: LAMA2; (-) strand; PAM type: NRG; PAM sequence: AAG
tctcatccatttttccagcc

SEQ ID NO: 70537 - DNA, 20 bp, Artificial Sequence
  Description of Artificial Sequence: Synthetic oligonucleotide
  Target: LAMA2; (-) strand; PAM type: NRG; PAM sequence: CAG
atgcatctcatccatttttc

SEQ ID NO: 70538 - DNA, 20 bp, Artificial Sequence
  Description of Artificial Sequence: Synthetic oligonucleotide
  Target: LAMA2; (-) strand; PAM type: NRG; PAM sequence: TGG
gtgaaagacagaatagcttt

SEQ ID NO: 70539 - DNA, 20 bp, Artificial Sequence
  Description of Artificial Sequence: Synthetic oligonucleotide
  Target: LAMA2; (-) strand; PAM type: NRG; PAM sequence: TAG
caagagggtgaaagacagaa

SEQ ID NO: 70540 - DNA, 20 bp, Artificial Sequence
  Description of Artificial Sequence: Synthetic oligonucleotide
  Target: LAMA2; (-) strand; PAM type: NRG; PAM sequence: CAG
actttcaagagggtgaaaga

SEQ ID NO: 70541 - DNA, 20 bp, Artificial Sequence
  Description of Artificial Sequence: Synthetic oligonucleotide
  Target: LAMA2; (-) strand; PAM type: NRG; PAM sequence: AAG
tagaactttcaagagggtga

SEQ ID NO: 70542 - DNA, 20 bp, Artificial Sequence
  Description of Artificial Sequence: Synthetic oligonucleotide
  Target: LAMA2; (-) strand; PAM type: NRG; PAM sequence: GGG
tgaatgtagaactttcaaga

SEQ ID NO: 70543 - DNA, 20 bp, Artificial Sequence
  Description of Artificial Sequence: Synthetic oligonucleotide
  Target: LAMA2; (-) strand; PAM type: NRG; PAM sequence: AGG
ctgaatgtagaactttcaag

SEQ ID NO: 70544 - DNA, 20 bp, Artificial Sequence
  Description of Artificial Sequence: Synthetic oligonucleotide
  Target: LAMA2; (-) strand; PAM type: NRG; PAM sequence: GAG
tctgaatgtagaactttcaa

SEQ ID NO: 70545 - DNA, 20 bp, Artificial Sequence
  Description of Artificial Sequence: Synthetic oligonucleotide
  Target: LAMA2; (-) strand; PAM type: NRG; PAM sequence: AAG
actctgaatgtagaactttc

SEQ ID NO: 70546 - DNA, 20 bp, Artificial Sequence
  Description of Artificial Sequence: Synthetic oligonucleotide
  Target: LAMA2; (-) strand; PAM type: NRG; PAM sequence: TAG
gacaaaagatactctgaatg

SEQ ID NO: 70547 - DNA, 20 bp, Artificial Sequence
  Description of Artificial Sequence: Synthetic oligonucleotide
  Target: LAMA2; (-) strand; PAM type: NRG; PAM sequence: AAG
atttatcttccacgagacaa

SEQ ID NO: 70548 - DNA, 20 bp, Artificial Sequence
  Description of Artificial Sequence: Synthetic oligonucleotide
  Target: LAMA2; (-) strand; PAM type: NRG; PAM sequence: GAG
tgaatatatttatcttccac

SEQ ID NO: 70549 - DNA, 20 bp, Artificial Sequence
  Description of Artificial Sequence: Synthetic oligonucleotide
  Target: LAMA2; (-) strand; PAM type: NRG; PAM sequence: TGG
tgtgaaaacatggatagtat

SEQ ID NO: 70550 - DNA, 20 bp, Artificial Sequence
  Description of Artificial Sequence: Synthetic oligonucleotide
  Target: LAMA2; (-) strand; PAM type: NRG; PAM sequence: TAG
tttcaatgtgaaaacatgga

SEQ ID NO: 70551 - DNA, 20 bp, Artificial Sequence
  Description of Artificial Sequence: Synthetic oligonucleotide
  Target: LAMA2; (-) strand; PAM type: NRG; PAM sequence: TGG
ttggtttcaatgtgaaaaca

SEQ ID NO: 70552 - DNA, 20 bp, Artificial Sequence
  Description of Artificial Sequence: Synthetic oligonucleotide
  Target: LAMA2; (-) strand; PAM type: NRG; PAM sequence: TGG
tgaaataattgattcatttt

SEQ ID NO: 70553 - DNA, 20 bp, Artificial Sequence
  Description of Artificial Sequence: Synthetic oligonucleotide
  Target: LAMA2; (-) strand; PAM type: NRG; PAM sequence: GGG
actacaggtaaataaaaatg

SEQ ID NO: 70554 - DNA, 20 bp, Artificial Sequence
  Description of Artificial Sequence: Synthetic oligonucleotide
  Target: LAMA2; (-) strand; PAM type: NRG; PAM sequence: GGG
cactacaggtaaataaaaat

SEQ ID NO: 70555 - DNA, 20 bp, Artificial Sequence
  Description of Artificial Sequence: Synthetic oligonucleotide
  Target: LAMA2; (-) strand; PAM type: NRG; PAM sequence: TGG
acactacaggtaaataaaaa

SEQ ID NO: 70556 - DNA, 20 bp, Artificial Sequence
  Description of Artificial Sequence: Synthetic oligonucleotide
  Target: LAMA2; (-) strand; PAM type: NRG; PAM sequence: AGG
actggtttagaaaacactac

SEQ ID NO: 70557 - DNA, 20 bp, Artificial Sequence
  Description of Artificial Sequence: Synthetic oligonucleotide
  Target: LAMA2; (-) strand; PAM type: NRG; PAM sequence: CAG
gactggtttagaaaacacta

SEQ ID NO: 70558 - DNA, 20 bp, Artificial Sequence
  Description of Artificial Sequence: Synthetic oligonucleotide
  Target: LAMA2; (-) strand; PAM type: NRG; PAM sequence: TAG
aatccagactgtgactggtt

SEQ ID NO: 70559 - DNA, 20 bp, Artificial Sequence
  Description of Artificial Sequence: Synthetic oligonucleotide
  Target: LAMA2; (-) strand; PAM type: NRG; PAM sequence: TGG
aagtaaatccagactgtgac

SEQ ID NO: 70560 - DNA, 20 bp, Artificial Sequence
  Description of Artificial Sequence: Synthetic oligonucleotide
  Target: LAMA2; (-) strand; PAM type: NRG; PAM sequence: CAG
ataataatgtaaagtaaatc

SEQ ID NO: 70561 - DNA, 20 bp, Artificial Sequence
  Description of Artificial Sequence: Synthetic oligonucleotide
  Target: LAMA2; (-) strand; PAM type: NRG; PAM sequence: AAG
taataaataataataatgta

SEQ ID NO: 70562 - DNA, 20 bp, Artificial Sequence
  Description of Artificial Sequence: Synthetic oligonucleotide
  Target: LAMA2; (-) strand; PAM type: NRG; PAM sequence: GAG
tccagcccgggtgacagagt

SEQ ID NO: 70563 - DNA, 20 bp, Artificial Sequence
  Description of Artificial Sequence: Synthetic oligonucleotide
  Target: LAMA2; (-) strand; PAM type: NRG; PAM sequence: GAG
gcactccagcccgggtgaca

SEQ ID NO: 70564 - DNA, 20 bp, Artificial Sequence
  Description of Artificial Sequence: Synthetic oligonucleotide
  Target: LAMA2; (-) strand; PAM type: NRG; PAM sequence: CAG
ctgcactccagcccgggtga

SEQ ID NO: 70565 - DNA, 20 bp, Artificial Sequence
  Description of Artificial Sequence: Synthetic oligonucleotide
  Target: LAMA2; (-) strand; PAM type: NRG; PAM sequence: GGG
gtgccactgcactccagccc

SEQ ID NO: 70566 - DNA, 20 bp, Artificial Sequence
  Description of Artificial Sequence: Synthetic oligonucleotide
  Target: LAMA2; (-) strand; PAM type: NRG; PAM sequence: CGG
tgtgccactgcactccagcc

SEQ ID NO: 70567 - DNA, 20 bp, Artificial Sequence
  Description of Artificial Sequence: Synthetic oligonucleotide
  Target: LAMA2; (-) strand; PAM type: NRG; PAM sequence: CAG
aagattgtgccactgcactc

SEQ ID NO: 70568 - DNA, 20 bp, Artificial Sequence
  Description of Artificial Sequence: Synthetic oligonucleotide
  Target: LAMA2; (-) strand; PAM type: NRG; PAM sequence: AAG
ggcgaaggttgcagtgagcc

SEQ ID NO: 70569 - DNA, 20 bp, Artificial Sequence
  Description of Artificial Sequence: Synthetic oligonucleotide
  Target: LAMA2; (-) strand; PAM type: NRG; PAM sequence: GAG
tgggaggcgaaggttgcagt

SEQ ID NO: 70570 - DNA, 20 bp, Artificial Sequence
  Description of Artificial Sequence: Synthetic oligonucleotide
  Target: LAMA2; (-) strand; PAM type: NRG; PAM sequence: CAG
aacctgggaggcgaaggttg

SEQ ID NO: 70571 - DNA, 20 bp, Artificial Sequence
  Description of Artificial Sequence: Synthetic oligonucleotide
  Target: LAMA2; (-) strand; PAM type: NRG; PAM sequence: AGG
cgcttgaacctgggaggcga

SEQ ID NO: 70572 - DNA, 20 bp, Artificial Sequence
  Description of Artificial Sequence: Synthetic oligonucleotide
  Target: LAMA2; (-) strand; PAM type: NRG; PAM sequence: AAG
tcgcttgaacctgggaggcg

SEQ ID NO: 70573 - DNA, 20 bp, Artificial Sequence
  Description of Artificial Sequence: Synthetic oligonucleotide
  Target: LAMA2; (-) strand; PAM type: NRG; PAM sequence: AGG
gagaatcgcttgaacctggg

SEQ ID NO: 70574 - DNA, 20 bp, Artificial Sequence
  Description of Artificial Sequence: Synthetic oligonucleotide
  Target: LAMA2; (-) strand; PAM type: NRG; PAM sequence: GAG
tgagaatcgcttgaacctgg

SEQ ID NO: 70575 - DNA, 20 bp, Artificial Sequence
  Description of Artificial Sequence: Synthetic oligonucleotide
  Target: LAMA2; (-) strand; PAM type: NRG; PAM sequence: GGG
cttgagaatcgcttgaacct

SEQ ID NO: 70576 - DNA, 20 bp, Artificial Sequence
  Description of Artificial Sequence: Synthetic oligonucleotide
  Target: LAMA2; (-) strand; PAM type: NRG; PAM sequence: TGG
gcttgagaatcgcttgaacc

SEQ ID NO: 70577 - DNA, 20 bp, Artificial Sequence
  Description of Artificial Sequence: Synthetic oligonucleotide
  Target: LAMA2; (-) strand; PAM type: NRG; PAM sequence: GAG
tactcaggaggctgaggctt

SEQ ID NO: 70578 - DNA, 20 bp, Artificial Sequence
  Description of Artificial Sequence: Synthetic oligonucleotide
  Target: LAMA2; (-) strand; PAM type: NRG; PAM sequence: AGG
cccagctactcaggaggctg

SEQ ID NO: 70579 - DNA, 20 bp, Artificial Sequence
  Description of Artificial Sequence: Synthetic oligonucleotide
  Target: LAMA2; (-) strand; PAM type: NRG; PAM sequence: GAG
tcccagctactcaggaggct

SEQ ID NO: 70580 - DNA, 20 bp, Artificial Sequence
  Description of Artificial Sequence: Synthetic oligonucleotide
  Target: LAMA2; (-) strand; PAM type: NRG; PAM sequence: AGG
tgtagtcccagctactcagg

SEQ ID NO: 70581 - DNA, 20 bp, Artificial Sequence
  Description of Artificial Sequence: Synthetic oligonucleotide
  Target: LAMA2; (-) strand; PAM type: NRG; PAM sequence: GAG
gtgtagtcccagctactcag

SEQ ID NO: 70582 - DNA, 20 bp, Artificial Sequence
  Description of Artificial Sequence: Synthetic oligonucleotide
  Target: LAMA2; (-) strand; PAM type: NRG; PAM sequence: AGG
gcgtgtagtcccagctactc

SEQ ID NO: 70583 - DNA, 20 bp, Artificial Sequence
  Description of Artificial Sequence: Synthetic oligonucleotide
  Target: LAMA2; (-) strand; PAM type: NRG; PAM sequence: CAG
cgcgtgtagtcccagctact

SEQ ID NO: 70584 - DNA, 20 bp, Artificial Sequence
  Description of Artificial Sequence: Synthetic oligonucleotide
  Target: LAMA2; (-) strand; PAM type: NRG; PAM sequence: CAG
gtggcacacgcgtgtagtcc

SEQ ID NO: 70585 - DNA, 20 bp, Artificial Sequence
  Description of Artificial Sequence: Synthetic oligonucleotide
  Target: LAMA2; (-) strand; PAM type: NRG; PAM sequence: TAG
gacgcagtggcacacgcgtg

SEQ ID NO: 70586 - DNA, 20 bp, Artificial Sequence
  Description of Artificial Sequence: Synthetic oligonucleotide
  Target: LAMA2; (-) strand; PAM type: NRG; PAM sequence: TGG
aaaaaattagccagacgcag

SEQ ID NO: 70587 - DNA, 20 bp, Artificial Sequence
  Description of Artificial Sequence: Synthetic oligonucleotide
  Target: LAMA2; (-) strand; PAM type: NRG; PAM sequence: CAG
acaaaaaaattagccagacg

SEQ ID NO: 70588 - DNA, 20 bp, Artificial Sequence
  Description of Artificial Sequence: Synthetic oligonucleotide
  Target: LAMA2; (-) strand; PAM type: NRG; PAM sequence: CAG
aaaaatacaaaaaaattagc

SEQ ID NO: 70589 - DNA, 20 bp, Artificial Sequence
  Description of Artificial Sequence: Synthetic oligonucleotide
  Target: LAMA2; (-) strand; PAM type: NRG; PAM sequence: TAG
tactaaaaatacaaaaaaat

SEQ ID NO: 70590 - DNA, 20 bp, Artificial Sequence
  Description of Artificial Sequence: Synthetic oligonucleotide
  Target: LAMA2; (-) strand; PAM type: NRG; PAM sequence: CGG
caagaccagcctggccaaca

SEQ ID NO: 70591 - DNA, 20 bp, Artificial Sequence
  Description of Artificial Sequence: Synthetic oligonucleotide
  Target: LAMA2; (-) strand; PAM type: NRG; PAM sequence: TGG
tcgagagttcaagaccagcc

SEQ ID NO: 70592 - DNA, 20 bp, Artificial Sequence
  Description of Artificial Sequence: Synthetic oligonucleotide
  Target: LAMA2; (-) strand; PAM type: NRG; PAM sequence: CAG
tgaagtcgagagttcaagac

SEQ ID NO: 70593 - DNA, 20 bp, Artificial Sequence
  Description of Artificial Sequence: Synthetic oligonucleotide
  Target: LAMA2; (-) strand; PAM type: NRG; PAM sequence: AAG
tcatgtgaagtcgagagttc

SEQ ID NO: 70594 - DNA, 20 bp, Artificial Sequence
  Description of Artificial Sequence: Synthetic oligonucleotide
  Target: LAMA2; (-) strand; PAM type: NRG; PAM sequence: GAG
ggtagatcatgtgaagtcga

SEQ ID NO: 70595 - DNA, 20 bp, Artificial Sequence
  Description of Artificial Sequence: Synthetic oligonucleotide
  Target: LAMA2; (-) strand; PAM type: NRG; PAM sequence: GAG
caggtagatcatgtgaagtc

SEQ ID NO: 70596 - DNA, 20 bp, Artificial Sequence
  Description of Artificial Sequence: Synthetic oligonucleotide
  Target: LAMA2; (-) strand; PAM type: NRG; PAM sequence: AAG
caaggcaggtagatcatgtg

SEQ ID NO: 70597 - DNA, 20 bp, Artificial Sequence
  Description of Artificial Sequence: Synthetic oligonucleotide
  Target: LAMA2; (-) strand; PAM type: NRG; PAM sequence: TAG
ctttgggaggccaaggcagg

SEQ ID NO: 70598 - DNA, 20 bp, Artificial Sequence
  Description of Artificial Sequence: Synthetic oligonucleotide
  Target: LAMA2; (-) strand; PAM type: NRG; PAM sequence: AGG
gcactttgggaggccaaggc

SEQ ID NO: 70599 - DNA, 20 bp, Artificial Sequence
  Description of Artificial Sequence: Synthetic oligonucleotide
  Target: LAMA2; (-) strand; PAM type: NRG; PAM sequence: CAG
agcactttgggaggccaagg

SEQ ID NO: 70600 - DNA, 20 bp, Artificial Sequence
  Description of Artificial Sequence: Synthetic oligonucleotide
  Target: LAMA2; (-) strand; PAM type: NRG; PAM sequence: AGG
cccagcactttgggaggcca

SEQ ID NO: 70601 - DNA, 20 bp, Artificial Sequence
  Description of Artificial Sequence: Synthetic oligonucleotide
  Target: LAMA2; (-) strand; PAM type: NRG; PAM sequence: AAG
tcccagcactttgggaggcc

SEQ ID NO: 70602 - DNA, 20 bp, Artificial Sequence
  Description of Artificial Sequence: Synthetic oligonucleotide
  Target: LAMA2; (-) strand; PAM type: NRG; PAM sequence: AGG
tgtaatcccagcactttggg

SEQ ID NO: 70603 - DNA, 20 bp, Artificial Sequence
  Description of Artificial Sequence: Synthetic oligonucleotide
  Target: LAMA2; (-) strand; PAM type: NRG; PAM sequence: GAG
ctgtaatcccagcactttgg

SEQ ID NO: 70604 - DNA, 20 bp, Artificial Sequence
  Description of Artificial Sequence: Synthetic oligonucleotide
  Target: LAMA2; (-) strand; PAM type: NRG; PAM sequence: GGG
acctgtaatcccagcacttt

SEQ ID NO: 70605 - DNA, 20 bp, Artificial Sequence
  Description of Artificial Sequence: Synthetic oligonucleotide
  Target: LAMA2; (-) strand; PAM type: NRG; PAM sequence: TGG
cacctgtaatcccagcactt

SEQ ID NO: 70606 - DNA, 20 bp, Artificial Sequence
  Description of Artificial Sequence: Synthetic oligonucleotide
  Target: LAMA2; (-) strand; PAM type: NRG; PAM sequence: CAG
gtggctcacacctgtaatcc

SEQ ID NO: 70607 - DNA, 20 bp, Artificial Sequence
  Description of Artificial Sequence: Synthetic oligonucleotide
  Target: LAMA2; (-) strand; PAM type: NRG; PAM sequence: TGG
atcatgcaggccaggcgcgg

SEQ ID NO: 70608 - DNA, 20 bp, Artificial Sequence
  Description of Artificial Sequence: Synthetic oligonucleotide
  Target: LAMA2; (-) strand; PAM type: NRG; PAM sequence: CGG
ataatcatgcaggccaggcg

SEQ ID NO: 70609 - DNA, 20 bp, Artificial Sequence
  Description of Artificial Sequence: Synthetic oligonucleotide
  Target: LAMA2; (-) strand; PAM type: NRG; PAM sequence: AGG
taaaaataatcatgcaggcc

SEQ ID NO: 70610 - DNA, 20 bp, Artificial Sequence
  Description of Artificial Sequence: Synthetic oligonucleotide
  Target: LAMA2; (-) strand; PAM type: NRG; PAM sequence: CAG
ttaaaaataatcatgcaggc

SEQ ID NO: 70611 - DNA, 20 bp, Artificial Sequence
  Description of Artificial Sequence: Synthetic oligonucleotide
  Target: LAMA2; (-) strand; PAM type: NRG; PAM sequence: AGG
tcatttaaaaataatcatgc

SEQ ID NO: 70612 - DNA, 20 bp, Artificial Sequence
  Description of Artificial Sequence: Synthetic oligonucleotide
  Target: LAMA2; (-) strand; PAM type: NRG; PAM sequence: CAG
gtcatttaaaaataatcatg

SEQ ID NO: 70613 - DNA, 20 bp, Artificial Sequence
  Description of Artificial Sequence: Synthetic oligonucleotide
  Target: LAMA2; (-) strand; PAM type: NRG; PAM sequence: TGG
ctggaaatgtggaatgaatc

SEQ ID NO: 70614 - DNA, 20 bp, Artificial Sequence
  Description of Artificial Sequence: Synthetic oligonucleotide
  Target: LAMA2; (-) strand; PAM type: NRG; PAM sequence: TGG
caaagcataatctggaaatg

SEQ ID NO: 70615 - DNA, 20 bp, Artificial Sequence
  Description of Artificial Sequence: Synthetic oligonucleotide
  Target: LAMA2; (-) strand; PAM type: NRG; PAM sequence: TGG
tctagtatcaaagcataatc

SEQ ID NO: 70616 - DNA, 20 bp, Artificial Sequence
  Description of Artificial Sequence: Synthetic oligonucleotide
  Target: LAMA2; (-) strand; PAM type: NRG; PAM sequence: AAG
tttctaaatttctagtatca

SEQ ID NO: 70617 - DNA, 20 bp, Artificial Sequence
  Description of Artificial Sequence: Synthetic oligonucleotide
  Target: LAMA2; (-) strand; PAM type: NRG; PAM sequence: TAG
ttttattctttctaaatttc

SEQ ID NO: 70618 - DNA, 20 bp, Artificial Sequence
  Description of Artificial Sequence: Synthetic oligonucleotide
  Target: LAMA2; (-) strand; PAM type: NRG; PAM sequence: GGG
gctagatttttattcttgtg

SEQ ID NO: 70619 - DNA, 20 bp, Artificial Sequence
  Description of Artificial Sequence: Synthetic oligonucleotide
  Target: LAMA2; (-) strand; PAM type: NRG; PAM sequence: GGG
tgctagatttttattcttgt

SEQ ID NO: 70620 - DNA, 20 bp, Artificial Sequence
  Description of Artificial Sequence: Synthetic oligonucleotide
  Target: LAMA2; (-) strand; PAM type: NRG; PAM sequence: TGG
ttgctagatttttattcttg

SEQ ID NO: 70621 - DNA, 20 bp, Artificial Sequence
  Description of Artificial Sequence: Synthetic oligonucleotide
  Target: LAMA2; (-) strand; PAM type: NRG; PAM sequence: TAG
atattcatgcagttgattgc

SEQ ID NO: 70622 - DNA, 20 bp, Artificial Sequence
  Description of Artificial Sequence: Synthetic oligonucleotide
  Target: LAMA2; (-) strand; PAM type: NRG; PAM sequence: CAG
tttactaaaatatattcatg

SEQ ID NO: 70623 - DNA, 20 bp, Artificial Sequence
  Description of Artificial Sequence: Synthetic oligonucleotide
  Target: LAMA2; (-) strand; PAM type: NRG; PAM sequence: TGG
ctcagagttcactgaatttg

SEQ ID NO: 70624 - DNA, 20 bp, Artificial Sequence
  Description of Artificial Sequence: Synthetic oligonucleotide
  Target: LAMA2; (-) strand; PAM type: NRG; PAM sequence: GAG
accttccatatttattctca

SEQ ID NO: 70625 - DNA, 20 bp, Artificial Sequence
  Description of Artificial Sequence: Synthetic oligonucleotide
  Target: LAMA2; (-) strand; PAM type: NRG; PAM sequence: CAG
ggaccttccatatttattct

SEQ ID NO: 70626 - DNA, 20 bp, Artificial Sequence
  Description of Artificial Sequence: Synthetic oligonucleotide
  Target: LAMA2; (-) strand; PAM type: NRG; PAM sequence: CGG
ctttgcaggataattaactg

SEQ ID NO: 70627 - DNA, 20 bp, Artificial Sequence
  Description of Artificial Sequence: Synthetic oligonucleotide
  Target: LAMA2; (-) strand; PAM type: NRG; PAM sequence: AGG
tcaaggttcgttttctttgc

SEQ ID NO: 70628 - DNA, 20 bp, Artificial Sequence
  Description of Artificial Sequence: Synthetic oligonucleotide
  Target: LAMA2; (-) strand; PAM type: NRG; PAM sequence: CAG
ttcaaggttcgttttctttg

SEQ ID NO: 70629 - DNA, 20 bp, Artificial Sequence
  Description of Artificial Sequence: Synthetic oligonucleotide
  Target: LAMA2; (-) strand; PAM type: NRG; PAM sequence: AGG
gtctattaacagaaagttca

SEQ ID NO: 70630 - DNA, 20 bp, Artificial Sequence
  Description of Artificial Sequence: Synthetic oligonucleotide
  Target: LAMA2; (-) strand; PAM type: NRG; PAM sequence: AAG
agtctattaacagaaagttc

SEQ ID NO: 70631 - DNA, 20 bp, Artificial Sequence
  Description of Artificial Sequence: Synthetic oligonucleotide
  Target: LAMA2; (-) strand; PAM type: NRG; PAM sequence: AAG
aagcaaagtctattaacaga

SEQ ID NO: 70632 - DNA, 20 bp, Artificial Sequence
  Description of Artificial Sequence: Synthetic oligonucleotide
  Target: LAMA2; (-) strand; PAM type: NRG; PAM sequence: CAG
tgggaagcaaagtctattaa

SEQ ID NO: 70633 - DNA, 20 bp, Artificial Sequence
  Description of Artificial Sequence: Synthetic oligonucleotide
  Target: LAMA2; (-) strand; PAM type: NRG; PAM sequence: AAG
tagcttttaattgggaagca

SEQ ID NO: 70634 - DNA, 20 bp, Artificial Sequence
  Description of Artificial Sequence: Synthetic oligonucleotide
  Target: LAMA2; (-) strand; PAM type: NRG; PAM sequence: AAG
actgctagcttttaattggg

SEQ ID NO: 70635 - DNA, 20 bp, Artificial Sequence
  Description of Artificial Sequence: Synthetic oligonucleotide
  Target: LAMA2; (-) strand; PAM type: NRG; PAM sequence: GGG
caaactgctagcttttaatt

SEQ ID NO: 70636 - DNA, 20 bp, Artificial Sequence
  Description of Artificial Sequence: Synthetic oligonucleotide
  Target: LAMA2; (-) strand; PAM type: NRG; PAM sequence: TGG
tcaaactgctagcttttaat

SEQ ID NO: 70637 - DNA, 20 bp, Artificial Sequence
  Description of Artificial Sequence: Synthetic oligonucleotide
  Target: LAMA2; (-) strand; PAM type: NRG; PAM sequence: TAG
aggtaaacctttcaaactgc

SEQ ID NO: 70638 - DNA, 20 bp, Artificial Sequence
  Description of Artificial Sequence: Synthetic oligonucleotide
  Target: LAMA2; (-) strand; PAM type: NRG; PAM sequence: AGG
tggatagggaatcgctgatg

SEQ ID NO: 70639 - DNA, 20 bp, Artificial Sequence
  Description of Artificial Sequence: Synthetic oligonucleotide
  Target: LAMA2; (-) strand; PAM type: NRG; PAM sequence: GAG
ctggatagggaatcgctgat

SEQ ID NO: 70640 - DNA, 20 bp, Artificial Sequence
  Description of Artificial Sequence: Synthetic oligonucleotide
  Target: LAMA2; (-) strand; PAM type: NRG; PAM sequence: GGG
ctgcatctgaaaactggata

SEQ ID NO: 70641 - DNA, 20 bp, Artificial Sequence
  Description of Artificial Sequence: Synthetic oligonucleotide
  Target: LAMA2; (-) strand; PAM type: NRG; PAM sequence: AGG
actgcatctgaaaactggat

SEQ ID NO: 70642 - DNA, 20 bp, Artificial Sequence
  Description of Artificial Sequence: Synthetic oligonucleotide
  Target: LAMA2; (-) strand; PAM type: NRG; PAM sequence: TAG
aactgcatctgaaaactgga

SEQ ID NO: 70643 - DNA, 20 bp, Artificial Sequence
  Description of Artificial Sequence: Synthetic oligonucleotide
  Target: LAMA2; (-) strand; PAM type: NRG; PAM sequence: TGG
ggctaactgcatctgaaaac

SEQ ID NO: 70644 - DNA, 20 bp, Artificial Sequence
  Description of Artificial Sequence: Synthetic oligonucleotide
  Target: LAMA2; (-) strand; PAM type: NRG; PAM sequence: GGG
aaatatgcaagtcaatccaa

SEQ ID NO: 70645 - DNA, 20 bp, Artificial Sequence
  Description of Artificial Sequence: Synthetic oligonucleotide
  Target: LAMA2; (-) strand; PAM type: NRG; PAM sequence: AGG
taaatatgcaagtcaatcca

SEQ ID NO: 70646 - DNA, 20 bp, Artificial Sequence
  Description of Artificial Sequence: Synthetic oligonucleotide
  Target: LAMA2; (-) strand; PAM type: NRG; PAM sequence: AAG
ataaatatgcaagtcaatcc

SEQ ID NO: 70647 - DNA, 20 bp, Artificial Sequence
  Description of Artificial Sequence: Synthetic oligonucleotide
  Target: LAMA2; (-) strand; PAM type: NRG; PAM sequence: AAG
ctcaacagggataaatatgc

SEQ ID NO: 70648 - DNA, 20 bp, Artificial Sequence
  Description of Artificial Sequence: Synthetic oligonucleotide
  Target: LAMA2; (-) strand; PAM type: NRG; PAM sequence: GGG
aacgtataacatcctcaaca

SEQ ID NO: 70649 - DNA, 20 bp, Artificial Sequence
  Description of Artificial Sequence: Synthetic oligonucleotide
  Target: LAMA2; (-) strand; PAM type: NRG; PAM sequence: AGG
aaacgtataacatcctcaac

SEQ ID NO: 70650 - DNA, 20 bp, Artificial Sequence
  Description of Artificial Sequence: Synthetic oligonucleotide
  Target: LAMA2; (-) strand; PAM type: NRG; PAM sequence: CAG
gaaacgtataacatcctcaa

SEQ ID NO: 70651 - DNA, 20 bp, Artificial Sequence
  Description of Artificial Sequence: Synthetic oligonucleotide
  Target: LAMA2; (-) strand; PAM type: NRG; PAM sequence: TAG
ttcccttatttaaaaggaga

SEQ ID NO: 70652 - DNA, 20 bp, Artificial Sequence
  Description of Artificial Sequence: Synthetic oligonucleotide
  Target: LAMA2; (-) strand; PAM type: NRG; PAM sequence: GAG
aaagttcccttatttaaaag

SEQ ID NO: 70653 - DNA, 20 bp, Artificial Sequence
  Description of Artificial Sequence: Synthetic oligonucleotide
  Target: LAMA2; (-) strand; PAM type: NRG; PAM sequence: AGG
gcaaagttcccttatttaaa

SEQ ID NO: 70654 - DNA, 20 bp, Artificial Sequence
  Description of Artificial Sequence: Synthetic oligonucleotide
  Target: LAMA2; (-) strand; PAM type: NRG; PAM sequence: AAG
ggcaaagttcccttatttaa

SEQ ID NO: 70655 - DNA, 20 bp, Artificial Sequence
  Description of Artificial Sequence: Synthetic oligonucleotide
  Target: LAMA2; (-) strand; PAM type: NRG; PAM sequence: AAG
atactgacgaattgttggca

SEQ ID NO: 70656 - DNA, 20 bp, Artificial Sequence
  Description of Artificial Sequence: Synthetic oligonucleotide
  Target: LAMA2; (-) strand; PAM type: NRG; PAM sequence: TGG
tgcaaatactgacgaattgt

SEQ ID NO: 70657 - DNA, 20 bp, Artificial Sequence
  Description of Artificial Sequence: Synthetic oligonucleotide
  Target: LAMA2; (-) strand; PAM type: NRG; PAM sequence: AAG
aaccataatccctattatga

SEQ ID NO: 70658 - DNA, 20 bp, Artificial Sequence
  Description of Artificial Sequence: Synthetic oligonucleotide
  Target: LAMA2; (-) strand; PAM type: NRG; PAM sequence: GAG
gtcacaaaaaggaggactgg

SEQ ID NO: 70659 - DNA, 20 bp, Artificial Sequence
  Description of Artificial Sequence: Synthetic oligonucleotide
  Target: LAMA2; (-) strand; PAM type: NRG; PAM sequence: GGG
tagtcacaaaaaggaggact

SEQ ID NO: 70660 - DNA, 20 bp, Artificial Sequence
  Description of Artificial Sequence: Synthetic oligonucleotide
  Target: LAMA2; (-) strand; PAM type: NRG; PAM sequence: TGG
ttagtcacaaaaaggaggac

SEQ ID NO: 70661 - DNA, 20 bp, Artificial Sequence
  Description of Artificial Sequence: Synthetic oligonucleotide
  Target: LAMA2; (-) strand; PAM type: NRG; PAM sequence: AGG
gagaattagtcacaaaaagg

SEQ ID NO: 70662 - DNA, 20 bp, Artificial Sequence
  Description of Artificial Sequence: Synthetic oligonucleotide
  Target: LAMA2; (-) strand; PAM type: NRG; PAM sequence: GAG
agagaattagtcacaaaaag

SEQ ID NO: 70663 - DNA, 20 bp, Artificial Sequence
  Description of Artificial Sequence: Synthetic oligonucleotide
  Target: LAMA2; (-) strand; PAM type: NRG; PAM sequence: AGG
taagagaattagtcacaaaa

SEQ ID NO: 70664 - DNA, 20 bp, Artificial Sequence
  Description of Artificial Sequence: Synthetic oligonucleotide
  Target: LAMA2; (-) strand; PAM type: NRG; PAM sequence: AAG
ataagagaattagtcacaaa

SEQ ID NO: 70665 - DNA, 20 bp, Artificial Sequence
  Description of Artificial Sequence: Synthetic oligonucleotide
  Target: LAMA2; (-) strand; PAM type: NRG; PAM sequence: TAG
ggtcaaactgataagagaat

SEQ ID NO: 70666 - DNA, 20 bp, Artificial Sequence
  Description of Artificial Sequence: Synthetic oligonucleotide
  Target: LAMA2; (-) strand; PAM type: NRG; PAM sequence: GAG
acctcaggtcaaactgataa

SEQ ID NO: 70667 - DNA, 20 bp, Artificial Sequence
  Description of Artificial Sequence: Synthetic oligonucleotide
  Target: LAMA2; (-) strand; PAM type: NRG; PAM sequence: AAG
ccacctcaggtcaaactgat

SEQ ID NO: 70668 - DNA, 20 bp, Artificial Sequence
  Description of Artificial Sequence: Synthetic oligonucleotide
  Target: LAMA2; (-) strand; PAM type: NRG; PAM sequence: AGG
attgtggtatctgccacctc

SEQ ID NO: 70669 - DNA, 20 bp, Artificial Sequence
  Description of Artificial Sequence: Synthetic oligonucleotide
  Target: LAMA2; (-) strand; PAM type: NRG; PAM sequence: CAG
aattgtggtatctgccacct

SEQ ID NO: 70670 - DNA, 20 bp, Artificial Sequence
  Description of Artificial Sequence: Synthetic oligonucleotide
  Target: LAMA2; (-) strand; PAM type: NRG; PAM sequence: TGG
agttgtctaataggaaattg

SEQ ID NO: 70671 - DNA, 20 bp, Artificial Sequence
  Description of Artificial Sequence: Synthetic oligonucleotide
  Target: LAMA2; (-) strand; PAM type: NRG; PAM sequence: AGG
tgtgagagaagttgtctaat

SEQ ID NO: 70672 - DNA, 20 bp, Artificial Sequence
  Description of Artificial Sequence: Synthetic oligonucleotide
  Target: LAMA2; (-) strand; PAM type: NRG; PAM sequence: TAG
ttgtgagagaagttgtctaa

SEQ ID NO: 70673 - DNA, 20 bp, Artificial Sequence
  Description of Artificial Sequence: Synthetic oligonucleotide
  Target: LAMA2; (-) strand; PAM type: NRG; PAM sequence: AAG
ctcttaggtaattgtgagag

SEQ ID NO: 70674 - DNA, 20 bp, Artificial Sequence
  Description of Artificial Sequence: Synthetic oligonucleotide
  Target: LAMA2; (-) strand; PAM type: NRG; PAM sequence: GAG
tggctcttaggtaattgtga

SEQ ID NO: 70675 - DNA, 20 bp, Artificial Sequence
  Description of Artificial Sequence: Synthetic oligonucleotide
  Target: LAMA2; (-) strand; PAM type: NRG; PAM sequence: GAG
catggctcttaggtaattgt

SEQ ID NO: 70676 - DNA, 20 bp, Artificial Sequence
  Description of Artificial Sequence: Synthetic oligonucleotide
  Target: LAMA2; (-) strand; PAM type: NRG; PAM sequence: AGG
aaatcaaattcatggctctt

SEQ ID NO: 70677 - DNA, 20 bp, Artificial Sequence
  Description of Artificial Sequence: Synthetic oligonucleotide
  Target: LAMA2; (-) strand; PAM type: NRG; PAM sequence: TAG
taaatcaaattcatggctct

SEQ ID NO: 70678 - DNA, 20 bp, Artificial Sequence
  Description of Artificial Sequence: Synthetic oligonucleotide
  Target: LAMA2; (-) strand; PAM type: NRG; PAM sequence: TGG
ccatttctaaatcaaattca

SEQ ID NO: 70679 - DNA, 20 bp, Artificial Sequence
  Description of Artificial Sequence: Synthetic oligonucleotide
  Target: LAMA2; (-) strand; PAM type: NRG; PAM sequence: TAG
attgtgcgtttaatatgtga

SEQ ID NO: 70680 - DNA, 20 bp, Artificial Sequence
  Description of Artificial Sequence: Synthetic oligonucleotide
  Target: LAMA2; (-) strand; PAM type: NRG; PAM sequence: CAG
atcctcctgaatctttttta

SEQ ID NO: 70681 - DNA, 20 bp, Artificial Sequence
  Description of Artificial Sequence: Synthetic oligonucleotide
  Target: LAMA2; (-) strand; PAM type: NRG; PAM sequence: CAG
ctgaagaaaaataaatatca

SEQ ID NO: 70682 - DNA, 20 bp, Artificial Sequence
  Description of Artificial Sequence: Synthetic oligonucleotide
  Target: LAMA2; (-) strand; PAM type: NRG; PAM sequence: AAG
tattgttggcacttcttctg

SEQ ID NO: 70683 - DNA, 20 bp, Artificial Sequence
  Description of Artificial Sequence: Synthetic oligonucleotide
  Target: LAMA2; (-) strand; PAM type: NRG; PAM sequence: TGG
aaccataaatgaaatattgt

SEQ ID NO: 70684 - DNA, 20 bp, Artificial Sequence
  Description of Artificial Sequence: Synthetic oligonucleotide
  Target: LAMA2; (-) strand; PAM type: NRG; PAM sequence: GGG
ggtgctgaaattggcatatg

SEQ ID NO: 70685 - DNA, 20 bp, Artificial Sequence
  Description of Artificial Sequence: Synthetic oligonucleotide
  Target: LAMA2; (-) strand; PAM type: NRG; PAM sequence: GGG
gggtgctgaaattggcatat

SEQ ID NO: 70686 - DNA, 20 bp, Artificial Sequence
  Description of Artificial Sequence: Synthetic oligonucleotide
  Target: LAMA2; (-) strand; PAM type: NRG; PAM sequence: TGG
agggtgctgaaattggcata

SEQ ID NO: 70687 - DNA, 20 bp, Artificial Sequence
  Description of Artificial Sequence: Synthetic oligonucleotide
  Target: LAMA2; (-) strand; PAM type: NRG; PAM sequence: TGG
aaataagagggtgctgaaat

SEQ ID NO: 70688 - DNA, 20 bp, Artificial Sequence
  Description of Artificial Sequence: Synthetic oligonucleotide
  Target: LAMA2; (-) strand; PAM type: NRG; PAM sequence: GGG
atgaccctggtgaaataaga

SEQ ID NO: 70689 - DNA, 20 bp, Artificial Sequence
  Description of Artificial Sequence: Synthetic oligonucleotide
  Target: LAMA2; (-) strand; PAM type: NRG; PAM sequence: AGG
aatgaccctggtgaaataag

SEQ ID NO: 70690 - DNA, 20 bp, Artificial Sequence
  Description of Artificial Sequence: Synthetic oligonucleotide
  Target: LAMA2; (-) strand; PAM type: NRG; PAM sequence: GAG
aaatgaccctggtgaaataa

SEQ ID NO: 70691 - DNA, 20 bp, Artificial Sequence
  Description of Artificial Sequence: Synthetic oligonucleotide
  Target: LAMA2; (-) strand; PAM type: NRG; PAM sequence: AAG
ataaatgaccctggtgaaat

SEQ ID NO: 70692 - DNA, 20 bp, Artificial Sequence
  Description of Artificial Sequence: Synthetic oligonucleotide
  Target: LAMA2; (-) strand; PAM type: NRG; PAM sequence: TGG
aaataccaaataaatgaccc

SEQ ID NO: 70693 - DNA, 20 bp, Artificial Sequence
  Description of Artificial Sequence: Synthetic oligonucleotide
  Target: LAMA2; (-) strand; PAM type: NRG; PAM sequence: AAG
atgatgacagcaaatatcag

SEQ ID NO: 70694 - DNA, 20 bp, Artificial Sequence
  Description of Artificial Sequence: Synthetic oligonucleotide
  Target: LAMA2; (-) strand; PAM type: NRG; PAM sequence: CAG
tttatgatgacagcaaatat

SEQ ID NO: 70695 - DNA, 20 bp, Artificial Sequence
  Description of Artificial Sequence: Synthetic oligonucleotide
  Target: LAMA2; (-) strand; PAM type: NRG; PAM sequence: CAG
atgtcaggtctttatgatga

SEQ ID NO: 70696 - DNA, 20 bp, Artificial Sequence
  Description of Artificial Sequence: Synthetic oligonucleotide
  Target: LAMA2; (-) strand; PAM type: NRG; PAM sequence: AGG
ttgaagctagggaagatgtc

SEQ ID NO: 70697 - DNA, 20 bp, Artificial Sequence
  Description of Artificial Sequence: Synthetic oligonucleotide
  Target: LAMA2; (-) strand; PAM type: NRG; PAM sequence: CAG
tttgaagctagggaagatgt

SEQ ID NO: 70698 - DNA, 20 bp, Artificial Sequence
  Description of Artificial Sequence: Synthetic oligonucleotide
  Target: LAMA2; (-) strand; PAM type: NRG; PAM sequence: AAG
ttgttcttttgaagctaggg

SEQ ID NO: 70699 - DNA, 20 bp, Artificial Sequence
  Description of Artificial Sequence: Synthetic oligonucleotide
  Target: LAMA2; (-) strand; PAM type: NRG; PAM sequence: GGG
aaattgttcttttgaagcta

SEQ ID NO: 70700 - DNA, 20 bp, Artificial Sequence
  Description of Artificial Sequence: Synthetic oligonucleotide
  Target: LAMA2; (-) strand; PAM type: NRG; PAM sequence: AGG
caaattgttcttttgaagct

SEQ ID NO: 70701 - DNA, 20 bp, Artificial Sequence
  Description of Artificial Sequence: Synthetic oligonucleotide
  Target: LAMA2; (-) strand; PAM type: NRG; PAM sequence: TAG
tcaaattgttcttttgaagc

SEQ ID NO: 70702 - DNA, 20 bp, Artificial Sequence
  Description of Artificial Sequence: Synthetic oligonucleotide
  Target: LAMA2; (-) strand; PAM type: NRG; PAM sequence: AAG
ttagtcaaattgttcttttg

SEQ ID NO: 70703 - DNA, 20 bp, Artificial Sequence
  Description of Artificial Sequence: Synthetic oligonucleotide
  Target: LAMA2; (-) strand; PAM type: NRG; PAM sequence: TAG
atatatttaaatgttagcat

SEQ ID NO: 70704 - DNA, 20 bp, Artificial Sequence
  Description of Artificial Sequence: Synthetic oligonucleotide
  Target: LAMA2; (-) strand; PAM type: NRG; PAM sequence: TAG
ttctgaatatatttaaatgt

SEQ ID NO: 70705 - DNA, 20 bp, Artificial Sequence
  Description of Artificial Sequence: Synthetic oligonucleotide
  Target: LAMA2; (-) strand; PAM type: NRG; PAM sequence: AAG
cttcctgtctcattaatgaa

SEQ ID NO: 70706 - DNA, 20 bp, Artificial Sequence
  Description of Artificial Sequence: Synthetic oligonucleotide
  Target: LAMA2; (-) strand; PAM type: NRG; PAM sequence: AGG
gttagcagtccatagagatg

SEQ ID NO: 70707 - DNA, 20 bp, Artificial Sequence
  Description of Artificial Sequence: Synthetic oligonucleotide
  Target: LAMA2; (-) strand; PAM type: NRG; PAM sequence: GAG
tgttagcagtccatagagat

SEQ ID NO: 70708 - DNA, 20 bp, Artificial Sequence
  Description of Artificial Sequence: Synthetic oligonucleotide
  Target: LAMA2; (-) strand; PAM type: NRG; PAM sequence: GAG
catcatgttagcagtccata

SEQ ID NO: 70709 - DNA, 20 bp, Artificial Sequence
  Description of Artificial Sequence: Synthetic oligonucleotide
  Target: LAMA2; (-) strand; PAM type: NRG; PAM sequence: TAG
atcatcatgttagcagtcca

SEQ ID NO: 70710 - DNA, 20 bp, Artificial Sequence
  Description of Artificial Sequence: Synthetic oligonucleotide
  Target: LAMA2; (-) strand; PAM type: NRG; PAM sequence: CAG
ccaccaaatcatcatgttag

SEQ ID NO: 70711 - DNA, 20 bp, Artificial Sequence
  Description of Artificial Sequence: Synthetic oligonucleotide
  Target: LAMA2; (-) strand; PAM type: NRG; PAM sequence: TAG
tttccaccaaatcatcatgt

SEQ ID NO: 70712 - DNA, 20 bp, Artificial Sequence
  Description of Artificial Sequence: Synthetic oligonucleotide
  Target: LAMA2; (-) strand; PAM type: NRG; PAM sequence: TGG
aattcaacttaacagctggc

SEQ ID NO: 70713 - DNA, 20 bp, Artificial Sequence
  Description of Artificial Sequence: Synthetic oligonucleotide
  Target: LAMA2; (-) strand; PAM type: NRG; PAM sequence: TGG
ttttaattcaacttaacagc

SEQ ID NO: 70714 - DNA, 20 bp, Artificial Sequence
  Description of Artificial Sequence: Synthetic oligonucleotide
  Target: LAMA2; (-) strand; PAM type: NRG; PAM sequence: CAG
aattttttaattcaacttaa

SEQ ID NO: 70715 - DNA, 20 bp, Artificial Sequence
  Description of Artificial Sequence: Synthetic oligonucleotide
  Target: LAMA2; (-) strand; PAM type: NRG; PAM sequence: TGG
caaaaatattccattattat

SEQ ID NO: 70716 - DNA, 20 bp, Artificial Sequence
  Description of Artificial Sequence: Synthetic oligonucleotide
  Target: LAMA2; (-) strand; PAM type: NRG; PAM sequence: GGG
taatatgactgtacaagaca

SEQ ID NO: 70717 - DNA, 20 bp, Artificial Sequence
  Description of Artificial Sequence: Synthetic oligonucleotide
  Target: LAMA2; (-) strand; PAM type: NRG; PAM sequence: AGG
ttaatatgactgtacaagac

SEQ ID NO: 70718 - DNA, 20 bp, Artificial Sequence
  Description of Artificial Sequence: Synthetic oligonucleotide
  Target: LAMA2; (-) strand; PAM type: NRG; PAM sequence: CAG
cttaatatgactgtacaaga

SEQ ID NO: 70719 - DNA, 20 bp, Artificial Sequence
  Description of Artificial Sequence: Synthetic oligonucleotide
  Target: LAMA2; (-) strand; PAM type: NRG; PAM sequence: AAG
aaatcttaatatgactgtac

SEQ ID NO: 70720 - DNA, 20 bp, Artificial Sequence
  Description of Artificial Sequence: Synthetic oligonucleotide
  Target: LAMA2; (-) strand; PAM type: NRG; PAM sequence: TGG
ttatagtcctattccagata

SEQ ID NO: 70721 - DNA, 20 bp, Artificial Sequence
  Description of Artificial Sequence: Synthetic oligonucleotide
  Target: LAMA2; (-) strand; PAM type: NRG; PAM sequence: CAG
atggtattatagtcctattc

SEQ ID NO: 70722 - DNA, 20 bp, Artificial Sequence
  Description of Artificial Sequence: Synthetic oligonucleotide
  Target: LAMA2; (-) strand; PAM type: NRG; PAM sequence: TAG
ttaagctatttatggtatta

SEQ ID NO: 70723 - DNA, 20 bp, Artificial Sequence
  Description of Artificial Sequence: Synthetic oligonucleotide
  Target: LAMA2; (-) strand; PAM type: NRG; PAM sequence: TGG
actatgttttaagctattta

SEQ ID NO: 70724 - DNA, 20 bp, Artificial Sequence
  Description of Artificial Sequence: Synthetic oligonucleotide
  Target: LAMA2; (-) strand; PAM type: NRG; PAM sequence: AAG
aaacatgaagactatgtttt

SEQ ID NO: 70725 - DNA, 20 bp, Artificial Sequence
  Description of Artificial Sequence: Synthetic oligonucleotide
  Target: LAMA2; (-) strand; PAM type: NRG; PAM sequence: AAG
taacatttactgaaaacatg

SEQ ID NO: 70726 - DNA, 20 bp, Artificial Sequence
  Description of Artificial Sequence: Synthetic oligonucleotide
  Target: LAMA2; (-) strand; PAM type: NRG; PAM sequence: AAG
ttggcattttcagatttgtg

SEQ ID NO: 70727 - DNA, 20 bp, Artificial Sequence
  Description of Artificial Sequence: Synthetic oligonucleotide
  Target: LAMA2; (-) strand; PAM type: NRG; PAM sequence: CAG
ttcactaaatttggcatttt

SEQ ID NO: 70728 - DNA, 20 bp, Artificial Sequence
  Description of Artificial Sequence: Synthetic oligonucleotide
  Target: LAMA2; (-) strand; PAM type: NRG; PAM sequence: TGG
agctgaatattcactaaatt

SEQ ID NO: 70729 - DNA, 20 bp, Artificial Sequence
  Description of Artificial Sequence: Synthetic oligonucleotide
  Target: LAMA2; (-) strand; PAM type: NRG; PAM sequence: AAG
actccatttcaaaatttaaa

SEQ ID NO: 70730 - DNA, 20 bp, Artificial Sequence
  Description of Artificial Sequence: Synthetic oligonucleotide
  Target: LAMA2; (-) strand; PAM type: NRG; PAM sequence: GAG
tccagcctaggtgacagagt

SEQ ID NO: 70731 - DNA, 20 bp, Artificial Sequence
  Description of Artificial Sequence: Synthetic oligonucleotide
  Target: LAMA2; (-) strand; PAM type: NRG; PAM sequence: GAG
gcactccagcctaggtgaca

SEQ ID NO: 70732 - DNA, 20 bp, Artificial Sequence
  Description of Artificial Sequence: Synthetic oligonucleotide
  Target: LAMA2; (-) strand; PAM type: NRG; PAM sequence: CAG
ttgcactccagcctaggtga

SEQ ID NO: 70733 - DNA, 20 bp, Artificial Sequence
  Description of Artificial Sequence: Synthetic oligonucleotide
  Target: LAMA2; (-) strand; PAM type: NRG; PAM sequence: AGG
acgccattgcactccagcct

SEQ ID NO: 70734 - DNA, 20 bp, Artificial Sequence
  Description of Artificial Sequence: Synthetic oligonucleotide
  Target: LAMA2; (-) strand; PAM type: NRG; PAM sequence: TAG
cacgccattgcactccagcc

SEQ ID NO: 70735 - DNA, 20 bp, Artificial Sequence
  Description of Artificial Sequence: Synthetic oligonucleotide
  Target: LAMA2; (-) strand; PAM type: NRG; PAM sequence: CAG
aagatcacgccattgcactc

SEQ ID NO: 70736 - DNA, 20 bp, Artificial Sequence
  Description of Artificial Sequence: Synthetic oligonucleotide
  Target: LAMA2; (-) strand; PAM type: NRG; PAM sequence: AAG
ggtagaggttgcagtgagcc

SEQ ID NO: 70737 - DNA, 20 bp, Artificial Sequence
  Description of Artificial Sequence: Synthetic oligonucleotide
  Target: LAMA2; (-) strand; PAM type: NRG; PAM sequence: GAG
caggaggtagaggttgcagt

SEQ ID NO: 70738 - DNA, 20 bp, Artificial Sequence
  Description of Artificial Sequence: Synthetic oligonucleotide
  Target: LAMA2; (-) strand; PAM type: NRG; PAM sequence: CAG
aacccaggaggtagaggttg

SEQ ID NO: 70739 - DNA, 20 bp, Artificial Sequence
  Description of Artificial Sequence: Synthetic oligonucleotide
  Target: LAMA2; (-) strand; PAM type: NRG; PAM sequence: AGG
cacttgaacccaggaggtag

SEQ ID NO: 70740 - DNA, 20 bp, Artificial Sequence
  Description of Artificial Sequence: Synthetic oligonucleotide
  Target: LAMA2; (-) strand; PAM type: NRG; PAM sequence: GAG
tcacttgaacccaggaggta

SEQ ID NO: 70741 - DNA, 20 bp, Artificial Sequence
  Description of Artificial Sequence: Synthetic oligonucleotide
  Target: LAMA2; (-) strand; PAM type: NRG; PAM sequence: TAG
aatcacttgaacccaggagg

SEQ ID NO: 70742 - DNA, 20 bp, Artificial Sequence
  Description of Artificial Sequence: Synthetic oligonucleotide
  Target: LAMA2; (-) strand; PAM type: NRG; PAM sequence: AGG
gagaatcacttgaacccagg

SEQ ID NO: 70743 - DNA, 20 bp, Artificial Sequence
  Description of Artificial Sequence: Synthetic oligonucleotide
  Target: LAMA2; (-) strand; PAM type: NRG; PAM sequence: GAG
ggagaatcacttgaacccag

SEQ ID NO: 70744 - DNA, 20 bp, Artificial Sequence
  Description of Artificial Sequence: Synthetic oligonucleotide
  Target: LAMA2; (-) strand; PAM type: NRG; PAM sequence: AGG
caggagaatcacttgaaccc

SEQ ID NO: 70745 - DNA, 20 bp, Artificial Sequence
  Description of Artificial Sequence: Synthetic oligonucleotide
  Target: LAMA2; (-) strand; PAM type: NRG; PAM sequence: CAG
gcaggagaatcacttgaacc

SEQ ID NO: 70746 - DNA, 20 bp, Artificial Sequence
  Description of Artificial Sequence: Synthetic oligonucleotide
  Target: LAMA2; (-) strand; PAM type: NRG; PAM sequence: GAG
tacttgggaggctgaggcag

SEQ ID NO: 70747 - DNA, 20 bp, Artificial Sequence
  Description of Artificial Sequence: Synthetic oligonucleotide
  Target: LAMA2; (-) strand; PAM type: NRG; PAM sequence: AGG
gctacttgggaggctgaggc

SEQ ID NO: 70748 - DNA, 20 bp, Artificial Sequence
  Description of Artificial Sequence: Synthetic oligonucleotide
  Target: LAMA2; (-) strand; PAM type: NRG; PAM sequence: CAG
agctacttgggaggctgagg

SEQ ID NO: 70749 - DNA, 20 bp, Artificial Sequence
  Description of Artificial Sequence: Synthetic oligonucleotide
  Target: LAMA2; (-) strand; PAM type: NRG; PAM sequence: AGG
cccagctacttgggaggctg

SEQ ID NO: 70750 - DNA, 20 bp, Artificial Sequence
  Description of Artificial Sequence: Synthetic oligonucleotide
  Target: LAMA2; (-) strand; PAM type: NRG; PAM sequence: GAG
tcccagctacttgggaggct

SEQ ID NO: 70751 - DNA, 20 bp, Artificial Sequence
  Description of Artificial Sequence: Synthetic oligonucleotide
  Target: LAMA2; (-) strand; PAM type: NRG; PAM sequence: AGG
tgtattcccagctacttggg

SEQ ID NO: 70752 - DNA, 20 bp, Artificial Sequence
  Description of Artificial Sequence: Synthetic oligonucleotide
  Target: LAMA2; (-) strand; PAM type: NRG; PAM sequence: GAG
ctgtattcccagctacttgg

SEQ ID NO: 70753 - DNA, 20 bp, Artificial Sequence
  Description of Artificial Sequence: Synthetic oligonucleotide
  Target: LAMA2; (-) strand; PAM type: NRG; PAM sequence: GGG
gcctgtattcccagctactt

SEQ ID NO: 70754 - DNA, 20 bp, Artificial Sequence
  Description of Artificial Sequence: Synthetic oligonucleotide
  Target: LAMA2; (-) strand; PAM type: NRG; PAM sequence: TGG
tgcctgtattcccagctact

SEQ ID NO: 70755 - DNA, 20 bp, Artificial Sequence
  Description of Artificial Sequence: Synthetic oligonucleotide
  Target: LAMA2; (-) strand; PAM type: NRG; PAM sequence: CAG
gtggcgggtgcctgtattcc

SEQ ID NO: 70756 - DNA, 20 bp, Artificial Sequence
  Description of Artificial Sequence: Synthetic oligonucleotide
  Target: LAMA2; (-) strand; PAM type: NRG; PAM sequence: GGG
aatagcacaggcatggtggc

SEQ ID NO: 70757 - DNA, 20 bp, Artificial Sequence
  Description of Artificial Sequence: Synthetic oligonucleotide
  Target: LAMA2; (-) strand; PAM type: NRG; PAM sequence: CGG
aaatagcacaggcatggtgg

SEQ ID NO: 70758 - DNA, 20 bp, Artificial Sequence
  Description of Artificial Sequence: Synthetic oligonucleotide
  Target: LAMA2; (-) strand; PAM type: NRG; PAM sequence: TGG
aaaaaatagcacaggcatgg

SEQ ID NO: 70759 - DNA, 20 bp, Artificial Sequence
  Description of Artificial Sequence: Synthetic oligonucleotide
  Target: LAMA2; (-) strand; PAM type: NRG; PAM sequence: TGG
aaaaaaaaatagcacaggca

SEQ ID NO: 70760 - DNA, 20 bp, Artificial Sequence
  Description of Artificial Sequence: Synthetic oligonucleotide
  Target: LAMA2; (-) strand; PAM type: NRG; PAM sequence: AGG
aaaaaaaaaaaaaatagcac

SEQ ID NO: 70761 - DNA, 20 bp, Artificial Sequence
  Description of Artificial Sequence: Synthetic oligonucleotide
  Target: LAMA2; (-) strand; PAM type: NRG; PAM sequence: CAG
aaaaaaaaaaaaaaatagca

SEQ ID NO: 70762 - DNA, 20 bp, Artificial Sequence
  Description of Artificial Sequence: Synthetic oligonucleotide
  Target: LAMA2; (-) strand; PAM type: NRG; PAM sequence: TAG
ctatgaaaaaaaaaaaaaaa

SEQ ID NO: 70763 - DNA, 20 bp, Artificial Sequence
  Description of Artificial Sequence: Synthetic oligonucleotide
  Target: LAMA2; (-) strand; PAM type: NRG; PAM sequence: CAG
caagaccagcctggccaaca

SEQ ID NO: 70764 - DNA, 20 bp, Artificial Sequence
  Description of Artificial Sequence: Synthetic oligonucleotide
  Target: LAMA2; (-) strand; PAM type: NRG; PAM sequence: TGG
tcaggagttcaagaccagcc

SEQ ID NO: 70765 - DNA, 20 bp, Artificial Sequence
  Description of Artificial Sequence: Synthetic oligonucleotide
  Target: LAMA2; (-) strand; PAM type: NRG; PAM sequence: CAG
tgaggtcaggagttcaagac

SEQ ID NO: 70766 - DNA, 20 bp, Artificial Sequence
  Description of Artificial Sequence: Synthetic oligonucleotide
  Target: LAMA2; (-) strand; PAM type: NRG; PAM sequence: AAG
tcacctgaggtcaggagttc

SEQ ID NO: 70767 - DNA, 20 bp, Artificial Sequence
  Description of Artificial Sequence: Synthetic oligonucleotide
  Target: LAMA2; (-) strand; PAM type: NRG; PAM sequence: GAG
ggcagatcacctgaggtcag

SEQ ID NO: 70768 - DNA, 20 bp, Artificial Sequence
  Description of Artificial Sequence: Synthetic oligonucleotide
  Target: LAMA2; (-) strand; PAM type: NRG; PAM sequence: AGG
tgggcagatcacctgaggtc

SEQ ID NO: 70769 - DNA, 20 bp, Artificial Sequence
  Description of Artificial Sequence: Synthetic oligonucleotide
  Target: LAMA2; (-) strand; PAM type: NRG; PAM sequence: CAG
gtgggcagatcacctgaggt

SEQ ID NO: 70770 - DNA, 20 bp, Artificial Sequence
  Description of Artificial Sequence: Synthetic oligonucleotide
  Target: LAMA2; (-) strand; PAM type: NRG; PAM sequence: AGG
tgaggtgggcagatcacctg

SEQ ID NO: 70771 - DNA, 20 bp, Artificial Sequence
  Description of Artificial Sequence: Synthetic oligonucleotide
  Target: LAMA2; (-) strand; PAM type: NRG; PAM sequence: GAG
ctgaggtgggcagatcacct

SEQ ID NO: 70772 - DNA, 20 bp, Artificial Sequence
  Description of Artificial Sequence: Synthetic oligonucleotide
  Target: LAMA2; (-) strand; PAM type: NRG; PAM sequence: CAG
ctttgggaggctgaggtggg

SEQ ID NO: 70773 - DNA, 20 bp, Artificial Sequence
  Description of Artificial Sequence: Synthetic oligonucleotide
  Target: LAMA2; (-) strand; PAM type: NRG; PAM sequence: GGG
gcactttgggaggctgaggt

SEQ ID NO: 70774 - DNA, 20 bp, Artificial Sequence
  Description of Artificial Sequence: Synthetic oligonucleotide
  Target: LAMA2; (-) strand; PAM type: NRG; PAM sequence: TGG
agcactttgggaggctgagg

SEQ ID NO: 70775 - DNA, 20 bp, Artificial Sequence
  Description of Artificial Sequence: Synthetic oligonucleotide
  Target: LAMA2; (-) strand; PAM type: NRG; PAM sequence: AGG
cccagcactttgggaggctg

SEQ ID NO: 70776 - DNA, 20 bp, Artificial Sequence
  Description of Artificial Sequence: Synthetic oligonucleotide
  Target: LAMA2; (-) strand; PAM type: NRG; PAM sequence: GAG
tcccagcactttgggaggct

SEQ ID NO: 70777 - DNA, 20 bp, Artificial Sequence
  Description of Artificial Sequence: Synthetic oligonucleotide
  Target: LAMA2; (-) strand; PAM type: NRG; PAM sequence: AGG
tgtaatcccagcactttggg

SEQ ID NO: 70778 - DNA, 20 bp, Artificial Sequence
  Description of Artificial Sequence: Synthetic oligonucleotide
  Target: LAMA2; (-) strand; PAM type: NRG; PAM sequence: GAG
ctgtaatcccagcactttgg

SEQ ID NO: 70779 - DNA, 20 bp, Artificial Sequence
  Description of Artificial Sequence: Synthetic oligonucleotide
  Target: LAMA2; (-) strand; PAM type: NRG; PAM sequence: GGG
acctgtaatcccagcacttt

SEQ ID NO: 70780 - DNA, 20 bp, Artificial Sequence
  Description of Artificial Sequence: Synthetic oligonucleotide
  Target: LAMA2; (-) strand; PAM type: NRG; PAM sequence: TGG
cacctgtaatcccagcactt

SEQ ID NO: 70781 - DNA, 20 bp, Artificial Sequence
  Description of Artificial Sequence: Synthetic oligonucleotide
  Target: LAMA2; (-) strand; PAM type: NRG; PAM sequence: CAG
gtggctcacacctgtaatcc

SEQ ID NO: 70782 - DNA, 20 bp, Artificial Sequence
  Description of Artificial Sequence: Synthetic oligonucleotide
  Target: LAMA2; (-) strand; PAM type: NRG; PAM sequence: TGG
tgaatattggccaggtgcag

SEQ ID NO: 70783 - DNA, 20 bp, Artificial Sequence
  Description of Artificial Sequence: Synthetic oligonucleotide
  Target: LAMA2; (-) strand; PAM type: NRG; PAM sequence: CAG
agctgaatattggccaggtg

SEQ ID NO: 70784 - DNA, 20 bp, Artificial Sequence
  Description of Artificial Sequence: Synthetic oligonucleotide
  Target: LAMA2; (-) strand; PAM type: NRG; PAM sequence: AGG
ttaaaagctgaatattggcc

SEQ ID NO: 70785 - DNA, 20 bp, Artificial Sequence
  Description of Artificial Sequence: Synthetic oligonucleotide
  Target: LAMA2; (-) strand; PAM type: NRG; PAM sequence: CAG
attaaaagctgaatattggc

SEQ ID NO: 70786 - DNA, 20 bp, Artificial Sequence
  Description of Artificial Sequence: Synthetic oligonucleotide
  Target: LAMA2; (-) strand; PAM type: NRG; PAM sequence: TGG
ttttattaaaagctgaatat

SEQ ID NO: 70787 - DNA, 20 bp, Artificial Sequence
  Description of Artificial Sequence: Synthetic oligonucleotide
  Target: LAMA2; (-) strand; PAM type: NRG; PAM sequence: AAG
taaaagaaaaattttattaa

SEQ ID NO: 70788 - DNA, 20 bp, Artificial Sequence
  Description of Artificial Sequence: Synthetic oligonucleotide
  Target: LAMA2; (-) strand; PAM type: NRG; PAM sequence: AAG
gaaagtaaaatcatctttaa

SEQ ID NO: 70789 - DNA, 20 bp, Artificial Sequence
  Description of Artificial Sequence: Synthetic oligonucleotide
  Target: LAMA2; (-) strand; PAM type: NRG; PAM sequence: AAG
tgcaataggaatctgataga

SEQ ID NO: 70790 - DNA, 20 bp, Artificial Sequence
  Description of Artificial Sequence: Synthetic oligonucleotide
  Target: LAMA2; (-) strand; PAM type: NRG; PAM sequence: TAG
tcaatgcaataggaatctga

SEQ ID NO: 70791 - DNA, 20 bp, Artificial Sequence
  Description of Artificial Sequence: Synthetic oligonucleotide
  Target: LAMA2; (-) strand; PAM type: NRG; PAM sequence: AGG
aactaagtcctcaatgcaat

SEQ ID NO: 70792 - DNA, 20 bp, Artificial Sequence
  Description of Artificial Sequence: Synthetic oligonucleotide
  Target: LAMA2; (-) strand; PAM type: NRG; PAM sequence: TAG
aaactaagtcctcaatgcaa

SEQ ID NO: 70793 - DNA, 20 bp, Artificial Sequence
  Description of Artificial Sequence: Synthetic oligonucleotide
  Target: LAMA2; (-) strand; PAM type: NRG; PAM sequence: AAG
aataaaaataaagcaaaact

SEQ ID NO: 70794 - DNA, 20 bp, Artificial Sequence
  Description of Artificial Sequence: Synthetic oligonucleotide
  Target: LAMA2; (-) strand; PAM type: NRG; PAM sequence: AAG
ttgaaaaaacaataaaaata

SEQ ID NO: 70795 - DNA, 20 bp, Artificial Sequence
  Description of Artificial Sequence: Synthetic oligonucleotide
  Target: LAMA2; (-) strand; PAM type: NRG; PAM sequence: TGG
tcttagagacaagttgtact

SEQ ID NO: 70796 - DNA, 20 bp, Artificial Sequence
  Description of Artificial Sequence: Synthetic oligonucleotide
  Target: LAMA2; (-) strand; PAM type: NRG; PAM sequence: AAG
ctgttttgaatcttagagac

SEQ ID NO: 70797 - DNA, 20 bp, Artificial Sequence
  Description of Artificial Sequence: Synthetic oligonucleotide
  Target: LAMA2; (-) strand; PAM type: NRG; PAM sequence: GAG
gtacactgttttgaatctta

SEQ ID NO: 70798 - DNA, 20 bp, Artificial Sequence
  Description of Artificial Sequence: Synthetic oligonucleotide
  Target: LAMA2; (-) strand; PAM type: NRG; PAM sequence: TAG
atgtacactgttttgaatct

SEQ ID NO: 70799 - DNA, 20 bp, Artificial Sequence
  Description of Artificial Sequence: Synthetic oligonucleotide
  Target: LAMA2; (-) strand; PAM type: NRG; PAM sequence: GAG
ctgatgaacagtataactgt

SEQ ID NO: 70800 - DNA, 20 bp, Artificial Sequence
  Description of Artificial Sequence: Synthetic oligonucleotide
  Target: LAMA2; (-) strand; PAM type: NRG; PAM sequence: CAG
ttcacagggttactgatgaa

SEQ ID NO: 70801 - DNA, 20 bp, Artificial Sequence
  Description of Artificial Sequence: Synthetic oligonucleotide
  Target: LAMA2; (-) strand; PAM type: NRG; PAM sequence: GGG
atgtgaaccctgtattcaca

SEQ ID NO: 70802 - DNA, 20 bp, Artificial Sequence
  Description of Artificial Sequence: Synthetic oligonucleotide
  Target: LAMA2; (-) strand; PAM type: NRG; PAM sequence: AGG
gatgtgaaccctgtattcac

SEQ ID NO: 70803 - DNA, 20 bp, Artificial Sequence
  Description of Artificial Sequence: Synthetic oligonucleotide
  Target: LAMA2; (-) strand; PAM type: NRG; PAM sequence: CAG
ggatgtgaaccctgtattca

SEQ ID NO: 70804 - DNA, 20 bp, Artificial Sequence
  Description of Artificial Sequence: Synthetic oligonucleotide
  Target: LAMA2; (-) strand; PAM type: NRG; PAM sequence: TGG
acggaccagtgagaacatct

SEQ ID NO: 70805 - DNA, 20 bp, Artificial Sequence
  Description of Artificial Sequence: Synthetic oligonucleotide
  Target: LAMA2; (-) strand; PAM type: NRG; PAM sequence: GAG
ttactttgccacggaccagt

SEQ ID NO: 70806 - DNA, 20 bp, Artificial Sequence
  Description of Artificial Sequence: Synthetic oligonucleotide
  Target: LAMA2; (-) strand; PAM type: NRG; PAM sequence: CAG
tttcttactttgccacggac

SEQ ID NO: 70807 - DNA, 20 bp, Artificial Sequence
  Description of Artificial Sequence: Synthetic oligonucleotide
  Target: LAMA2; (-) strand; PAM type: NRG; PAM sequence: CGG
ctcattttcttactttgcca

SEQ ID NO: 70808 - DNA, 20 bp, Artificial Sequence
  Description of Artificial Sequence: Synthetic oligonucleotide
  Target: LAMA2; (-) strand; PAM type: NRG; PAM sequence: AAG
atttttatgaaaaatgtgga

SEQ ID NO: 70809 - DNA, 20 bp, Artificial Sequence
  Description of Artificial Sequence: Synthetic oligonucleotide
  Target: LAMA2; (-) strand; PAM type: NRG; PAM sequence: TGG
ttctatttttatgaaaaatg

SEQ ID NO: 70810 - DNA, 20 bp, Artificial Sequence
  Description of Artificial Sequence: Synthetic oligonucleotide
  Target: LAMA2; (-) strand; PAM type: NRG; PAM sequence: AGG
aacccataatatcaaaatgg

SEQ ID NO: 70811 - DNA, 20 bp, Artificial Sequence
  Description of Artificial Sequence: Synthetic oligonucleotide
  Target: LAMA2; (-) strand; PAM type: NRG; PAM sequence: GAG
aaacccataatatcaaaatg

SEQ ID NO: 70812 - DNA, 20 bp, Artificial Sequence
  Description of Artificial Sequence: Synthetic oligonucleotide
  Target: LAMA2; (-) strand; PAM type: NRG; PAM sequence: TGG
taaaacccataatatcaaaa

SEQ ID NO: 70813 - DNA, 20 bp, Artificial Sequence
  Description of Artificial Sequence: Synthetic oligonucleotide
  Target: LAMA2; (-) strand; PAM type: NRG; PAM sequence: TAG
gggcatttaaaaaccatcat

SEQ ID NO: 70814 - DNA, 20 bp, Artificial Sequence
  Description of Artificial Sequence: Synthetic oligonucleotide
  Target: LAMA2; (-) strand; PAM type: NRG; PAM sequence: GGG
ttattatttcatgaaacaaa

SEQ ID NO: 70815 - DNA, 20 bp, Artificial Sequence
  Description of Artificial Sequence: Synthetic oligonucleotide
  Target: LAMA2; (-) strand; PAM type: NRG; PAM sequence: AGG
attattatttcatgaaacaa

SEQ ID NO: 70816 - DNA, 20 bp, Artificial Sequence
  Description of Artificial Sequence: Synthetic oligonucleotide
  Target: LAMA2; (-) strand; PAM type: NRG; PAM sequence: AAG
cattattatttcatgaaaca

SEQ ID NO: 70817 - DNA, 20 bp, Artificial Sequence
  Description of Artificial Sequence: Synthetic oligonucleotide
  Target: LAMA2; (-) strand; PAM type: NRG; PAM sequence: AAG
tatatttctatcatttaata

SEQ ID NO: 70818 - DNA, 20 bp, Artificial Sequence
  Description of Artificial Sequence: Synthetic oligonucleotide
  Target: LAMA2; (-) strand; PAM type: NRG; PAM sequence: AAG
ttctagctcttagtttttcc

SEQ ID NO: 70819 - DNA, 20 bp, Artificial Sequence
  Description of Artificial Sequence: Synthetic oligonucleotide
  Target: LAMA2; (-) strand; PAM type: NRG; PAM sequence: TAG
gatataggagttctagctct

SEQ ID NO: 70820 - DNA, 20 bp, Artificial Sequence
  Description of Artificial Sequence: Synthetic oligonucleotide
  Target: LAMA2; (-) strand; PAM type: NRG; PAM sequence: TAG
tgaaattgatataggagttc

SEQ ID NO: 70821 - DNA, 20 bp, Artificial Sequence
  Description of Artificial Sequence: Synthetic oligonucleotide
  Target: LAMA2; (-) strand; PAM type: NRG; PAM sequence: GAG
gatttgtgaaattgatatag

SEQ ID NO: 70822 - DNA, 20 bp, Artificial Sequence
  Description of Artificial Sequence: Synthetic oligonucleotide
  Target: LAMA2; (-) strand; PAM type: NRG; PAM sequence: AGG
tcgatttgtgaaattgatat

SEQ ID NO: 70823 - DNA, 20 bp, Artificial Sequence
  Description of Artificial Sequence: Synthetic oligonucleotide
  Target: LAMA2; (-) strand; PAM type: NRG; PAM sequence: TAG
atcgatttgtgaaattgata

SEQ ID NO: 70824 - DNA, 20 bp, Artificial Sequence
  Description of Artificial Sequence: Synthetic oligonucleotide
  Target: LAMA2; (-) strand; PAM type: NRG; PAM sequence: GAG
ttccagattcataattttca

SEQ ID NO: 70825 - DNA, 20 bp, Artificial Sequence
  Description of Artificial Sequence: Synthetic oligonucleotide
  Target: LAMA2; (-) strand; PAM type: NRG; PAM sequence: CAG
gtttccagattcataatttt

SEQ ID NO: 70826 - DNA, 20 bp, Artificial Sequence
  Description of Artificial Sequence: Synthetic oligonucleotide
  Target: LAMA2; (-) strand; PAM type: NRG; PAM sequence: CAG
ccgctcacagcagtggtttc

SEQ ID NO: 70827 - DNA, 20 bp, Artificial Sequence
  Description of Artificial Sequence: Synthetic oligonucleotide
  Target: LAMA2; (-) strand; PAM type: NRG; PAM sequence: TGG
caaaattccgctcacagcag

SEQ ID NO: 70828 - DNA, 20 bp, Artificial Sequence
  Description of Artificial Sequence: Synthetic oligonucleotide
  Target: LAMA2; (-) strand; PAM type: NRG; PAM sequence: CAG
taacaaaattccgctcacag

SEQ ID NO: 70829 - DNA, 20 bp, Artificial Sequence
  Description of Artificial Sequence: Synthetic oligonucleotide
  Target: LAMA2; (-) strand; PAM type: NRG; PAM sequence: CAG
gaataacaaaattccgctca

SEQ ID NO: 70830 - DNA, 20 bp, Artificial Sequence
  Description of Artificial Sequence: Synthetic oligonucleotide
  Target: LAMA2; (-) strand; PAM type: NRG; PAM sequence: AGG
ttatgtgtcatctctgatct

SEQ ID NO: 70831 - DNA, 20 bp, Artificial Sequence
  Description of Artificial Sequence: Synthetic oligonucleotide
  Target: LAMA2; (-) strand; PAM type: NRG; PAM sequence: TAG
attatgtgtcatctctgatc

SEQ ID NO: 70832 - DNA, 20 bp, Artificial Sequence
  Description of Artificial Sequence: Synthetic oligonucleotide
  Target: LAMA2; (-) strand; PAM type: NRG; PAM sequence: CAG
acttagtacgtaactgacca

SEQ ID NO: 70833 - DNA, 20 bp, Artificial Sequence
  Description of Artificial Sequence: Synthetic oligonucleotide
  Target: LAMA2; (-) strand; PAM type: NRG; PAM sequence: TAG
ttcctcctggctccaccact

SEQ ID NO: 70834 - DNA, 20 bp, Artificial Sequence
  Description of Artificial Sequence: Synthetic oligonucleotide
  Target: LAMA2; (-) strand; PAM type: NRG; PAM sequence: TGG
cgggtagctgatattcctcc

SEQ ID NO: 70835 - DNA, 20 bp, Artificial Sequence
  Description of Artificial Sequence: Synthetic oligonucleotide
  Target: LAMA2; (-) strand; PAM type: NRG; PAM sequence: TAG
atgaggtgctggcacacggg

SEQ ID NO: 70836 - DNA, 20 bp, Artificial Sequence
  Description of Artificial Sequence: Synthetic oligonucleotide
  Target: LAMA2; (-) strand; PAM type: NRG; PAM sequence: GGG
accatgaggtgctggcacac

SEQ ID NO: 70837 - DNA, 20 bp, Artificial Sequence
  Description of Artificial Sequence: Synthetic oligonucleotide
  Target: LAMA2; (-) strand; PAM type: NRG; PAM sequence: CGG
gaccatgaggtgctggcaca

SEQ ID NO: 70838 - DNA, 20 bp, Artificial Sequence
  Description of Artificial Sequence: Synthetic oligonucleotide
  Target: LAMA2; (-) strand; PAM type: NRG; PAM sequence: TGG
agagggggaccatgaggtgc

SEQ ID NO: 70839 - DNA, 20 bp, Artificial Sequence
  Description of Artificial Sequence: Synthetic oligonucleotide
  Target: LAMA2; (-) strand; PAM type: NRG; PAM sequence: AGG
gtgatgagagggggaccatg

SEQ ID NO: 70840 - DNA, 20 bp, Artificial Sequence
  Description of Artificial Sequence: Synthetic oligonucleotide
  Target: LAMA2; (-) strand; PAM type: NRG; PAM sequence: GAG
ggtgatgagagggggaccat

SEQ ID NO: 70841 - DNA, 20 bp, Artificial Sequence
  Description of Artificial Sequence: Synthetic oligonucleotide
  Target: LAMA2; (-) strand; PAM type: NRG; PAM sequence: GGG
ataataatggtgatgagagg

SEQ ID NO: 70842 - DNA, 20 bp, Artificial Sequence
  Description of Artificial Sequence: Synthetic oligonucleotide
  Target: LAMA2; (-) strand; PAM type: NRG; PAM sequence: GGG
aataataatggtgatgagag

SEQ ID NO: 70843 - DNA, 20 bp, Artificial Sequence
  Description of Artificial Sequence: Synthetic oligonucleotide
  Target: LAMA2; (-) strand; PAM type: NRG; PAM sequence: GGG
taataataatggtgatgaga

SEQ ID NO: 70844 - DNA, 20 bp, Artificial Sequence
  Description of Artificial Sequence: Synthetic oligonucleotide
  Target: LAMA2; (-) strand; PAM type: NRG; PAM sequence: AGG
ctaataataatggtgatgag

SEQ ID NO: 70845 - DNA, 20 bp, Artificial Sequence
  Description of Artificial Sequence: Synthetic oligonucleotide
  Target: LAMA2; (-) strand; PAM type: NRG; PAM sequence: GAG
tctaataataatggtgatga

SEQ ID NO: 70846 - DNA, 20 bp, Artificial Sequence
  Description of Artificial Sequence: Synthetic oligonucleotide
  Target: LAMA2; (-) strand; PAM type: NRG; PAM sequence: GAG
attctaataataatggtgat

SEQ ID NO: 70847 - DNA, 20 bp, Artificial Sequence
  Description of Artificial Sequence: Synthetic oligonucleotide
  Target: LAMA2; (-) strand; PAM type: NRG; PAM sequence: TGG
gccatgtattctaataataa

SEQ ID NO: 70848 - DNA, 20 bp, Artificial Sequence
  Description of Artificial Sequence: Synthetic oligonucleotide
  Target: LAMA2; (-) strand; PAM type: NRG; PAM sequence: TAG
gcctacctaatattgcaatc

SEQ ID NO: 70849 - DNA, 20 bp, Artificial Sequence
  Description of Artificial Sequence: Synthetic oligonucleotide
  Target: LAMA2; (-) strand; PAM type: NRG; PAM sequence: TGG
attgctatgaggaacaaaca

SEQ ID NO: 70850 - DNA, 20 bp, Artificial Sequence
  Description of Artificial Sequence: Synthetic oligonucleotide
  Target: LAMA2; (-) strand; PAM type: NRG; PAM sequence: AGG
gaacaaatcacattgctatg

SEQ ID NO: 70851 - DNA, 20 bp, Artificial Sequence
  Description of Artificial Sequence: Synthetic oligonucleotide
  Target: LAMA2; (-) strand; PAM type: NRG; PAM sequence: GAG
ggaacaaatcacattgctat

SEQ ID NO: 70852 - DNA, 20 bp, Artificial Sequence
  Description of Artificial Sequence: Synthetic oligonucleotide
  Target: LAMA2; (-) strand; PAM type: NRG; PAM sequence: AGG
ttgaaggaatacctcacata

SEQ ID NO: 70853 - DNA, 20 bp, Artificial Sequence
  Description of Artificial Sequence: Synthetic oligonucleotide
  Target: LAMA2; (-) strand; PAM type: NRG; PAM sequence: AAG
tttgaaggaatacctcacat

SEQ ID NO: 70854 - DNA, 20 bp, Artificial Sequence
  Description of Artificial Sequence: Synthetic oligonucleotide
  Target: LAMA2; (-) strand; PAM type: NRG; PAM sequence: AGG
acaatcctttttaaatttga

SEQ ID NO: 70855 - DNA, 20 bp, Artificial Sequence
  Description of Artificial Sequence: Synthetic oligonucleotide
  Target: LAMA2; (-) strand; PAM type: NRG; PAM sequence: AAG
cacaatcctttttaaatttg

SEQ ID NO: 70856 - DNA, 20 bp, Artificial Sequence
  Description of Artificial Sequence: Synthetic oligonucleotide
  Target: LAMA2; (-) strand; PAM type: NRG; PAM sequence: TAG
ttatgaatgaccttttagat

SEQ ID NO: 70857 - DNA, 20 bp, Artificial Sequence
  Description of Artificial Sequence: Synthetic oligonucleotide
  Target: LAMA2; (-) strand; PAM type: NRG; PAM sequence: TAG
gtggcttatgaatgaccttt

SEQ ID NO: 70858 - DNA, 20 bp, Artificial Sequence
  Description of Artificial Sequence: Synthetic oligonucleotide
  Target: LAMA2; (-) strand; PAM type: NRG; PAM sequence: TGG
gggaagatgtttcgaatgag

SEQ ID NO: 70859 - DNA, 20 bp, Artificial Sequence
  Description of Artificial Sequence: Synthetic oligonucleotide
  Target: LAMA2; (-) strand; PAM type: NRG; PAM sequence: GAG
tctgggaagatgtttcgaat

SEQ ID NO: 70860 - DNA, 20 bp, Artificial Sequence
  Description of Artificial Sequence: Synthetic oligonucleotide
  Target: LAMA2; (-) strand; PAM type: NRG; PAM sequence: AAG
cataaaactaagtatctggg

SEQ ID NO: 70861 - DNA, 20 bp, Artificial Sequence
  Description of Artificial Sequence: Synthetic oligonucleotide
  Target: LAMA2; (-) strand; PAM type: NRG; PAM sequence: GGG
tttcataaaactaagtatct

SEQ ID NO: 70862 - DNA, 20 bp, Artificial Sequence
  Description of Artificial Sequence: Synthetic oligonucleotide
  Target: LAMA2; (-) strand; PAM type: NRG; PAM sequence: TGG
atttcataaaactaagtatc

SEQ ID NO: 70863 - DNA, 20 bp, Artificial Sequence
  Description of Artificial Sequence: Synthetic oligonucleotide
  Target: LAMA2; (-) strand; PAM type: NRG; PAM sequence: AAG
cttgagaatttcataaaact

SEQ ID NO: 70864 - DNA, 20 bp, Artificial Sequence
  Description of Artificial Sequence: Synthetic oligonucleotide
  Target: LAMA2; (-) strand; PAM type: NRG; PAM sequence: GAG
tgctttggggtgtcagtctt

SEQ ID NO: 70865 - DNA, 20 bp, Artificial Sequence
  Description of Artificial Sequence: Synthetic oligonucleotide
  Target: LAMA2; (-) strand; PAM type: NRG; PAM sequence: CAG
ttaaggatgctttggggtgt

SEQ ID NO: 70866 - DNA, 20 bp, Artificial Sequence
  Description of Artificial Sequence: Synthetic oligonucleotide
  Target: LAMA2; (-) strand; PAM type: NRG; PAM sequence: GGG
tatagattaaggatgctttg

SEQ ID NO: 70867 - DNA, 20 bp, Artificial Sequence
  Description of Artificial Sequence: Synthetic oligonucleotide
  Target: LAMA2; (-) strand; PAM type: NRG; PAM sequence: GGG
ttatagattaaggatgcttt

SEQ ID NO: 70868 - DNA, 20 bp, Artificial Sequence
  Description of Artificial Sequence: Synthetic oligonucleotide
  Target: LAMA2; (-) strand; PAM type: NRG; PAM sequence: TGG
attatagattaaggatgctt

SEQ ID NO: 70869 - DNA, 20 bp, Artificial Sequence
  Description of Artificial Sequence: Synthetic oligonucleotide
  Target: LAMA2; (-) strand; PAM type: NRG; PAM sequence: AGG
cctgtgtttattatagatta

SEQ ID NO: 70870 - DNA, 20 bp, Artificial Sequence
  Description of Artificial Sequence: Synthetic oligonucleotide
  Target: LAMA2; (-) strand; PAM type: NRG; PAM sequence: AAG
tcctgtgtttattatagatt

SEQ ID NO: 70871 - DNA, 20 bp, Artificial Sequence
  Description of Artificial Sequence: Synthetic oligonucleotide
  Target: LAMA2; (-) strand; PAM type: NRG; PAM sequence: TAG
ctgtactcctgtgtttatta

SEQ ID NO: 70872 - DNA, 20 bp, Artificial Sequence
  Description of Artificial Sequence: Synthetic oligonucleotide
  Target: LAMA2; (-) strand; PAM type: NRG; PAM sequence: GAG
aatgtaaacaaagtggaggt

SEQ ID NO: 70873 - DNA, 20 bp, Artificial Sequence
  Description of Artificial Sequence: Synthetic oligonucleotide
  Target: LAMA2; (-) strand; PAM type: NRG; PAM sequence: AGG
tagaaatgtaaacaaagtgg

SEQ ID NO: 70874 - DNA, 20 bp, Artificial Sequence
  Description of Artificial Sequence: Synthetic oligonucleotide
  Target: LAMA2; (-) strand; PAM type: NRG; PAM sequence: GAG
atagaaatgtaaacaaagtg

SEQ ID NO: 70875 - DNA, 20 bp, Artificial Sequence
  Description of Artificial Sequence: Synthetic oligonucleotide
  Target: LAMA2; (-) strand; PAM type: NRG; PAM sequence: TGG
ccatagaaatgtaaacaaag

SEQ ID NO: 70876 - DNA, 20 bp, Artificial Sequence
  Description of Artificial Sequence: Synthetic oligonucleotide
  Target: LAMA2; (-) strand; PAM type: NRG; PAM sequence: AAG
tgcccatagaaatgtaaaca

SEQ ID NO: 70877 - DNA, 20 bp, Artificial Sequence
  Description of Artificial Sequence: Synthetic oligonucleotide
  Target: LAMA2; (-) strand; PAM type: NRG; PAM sequence: TAG
aaagtcggcacatttgccca

SEQ ID NO: 70878 - DNA, 20 bp, Artificial Sequence
  Description of Artificial Sequence: Synthetic oligonucleotide
  Target: LAMA2; (-) strand; PAM type: NRG; PAM sequence: CGG
ctcacatctcactagaaagt

SEQ ID NO: 70879 - DNA, 20 bp, Artificial Sequence
  Description of Artificial Sequence: Synthetic oligonucleotide
  Target: LAMA2; (-) strand; PAM type: NRG; PAM sequence: AAG
attcctcacatctcactaga

SEQ ID NO: 70880 - DNA, 20 bp, Artificial Sequence
  Description of Artificial Sequence: Synthetic oligonucleotide
  Target: LAMA2; (-) strand; PAM type: NRG; PAM sequence: TAG
ttaaattcctcacatctcac

SEQ ID NO: 70881 - DNA, 20 bp, Artificial Sequence
  Description of Artificial Sequence: Synthetic oligonucleotide
  Target: LAMA2; (-) strand; PAM type: NRG; PAM sequence: GGG
tattcccaaggctgcagtaa

SEQ ID NO: 70882 - DNA, 20 bp, Artificial Sequence
  Description of Artificial Sequence: Synthetic oligonucleotide
  Target: LAMA2; (-) strand; PAM type: NRG; PAM sequence: AGG
ctattcccaaggctgcagta

SEQ ID NO: 70883 - DNA, 20 bp, Artificial Sequence
  Description of Artificial Sequence: Synthetic oligonucleotide
  Target: LAMA2; (-) strand; PAM type: NRG; PAM sequence: AAG
tctattcccaaggctgcagt

SEQ ID NO: 70884 - DNA, 20 bp, Artificial Sequence
  Description of Artificial Sequence: Synthetic oligonucleotide
  Target: LAMA2; (-) strand; PAM type: NRG; PAM sequence: CAG
tgtttctattcccaaggctg

SEQ ID NO: 70885 - DNA, 20 bp, Artificial Sequence
  Description of Artificial Sequence: Synthetic oligonucleotide
  Target: LAMA2; (-) strand; PAM type: NRG; PAM sequence: AGG
tgatcctgtttctattccca

SEQ ID NO: 70886 - DNA, 20 bp, Artificial Sequence
  Description of Artificial Sequence: Synthetic oligonucleotide
  Target: LAMA2; (-) strand; PAM type: NRG; PAM sequence: AAG
atgatcctgtttctattccc

SEQ ID NO: 70887 - DNA, 20 bp, Artificial Sequence
  Description of Artificial Sequence: Synthetic oligonucleotide
  Target: LAMA2; (-) strand; PAM type: NRG; PAM sequence: AGG
ggtgaggatggcaggagtgg

SEQ ID NO: 70888 - DNA, 20 bp, Artificial Sequence
  Description of Artificial Sequence: Synthetic oligonucleotide
  Target: LAMA2; (-) strand; PAM type: NRG; PAM sequence: GAG
gggtgaggatggcaggagtg

SEQ ID NO: 70889 - DNA, 20 bp, Artificial Sequence
  Description of Artificial Sequence: Synthetic oligonucleotide
  Target: LAMA2; (-) strand; PAM type: NRG; PAM sequence: TGG
atgggtgaggatggcaggag

SEQ ID NO: 70890 - DNA, 20 bp, Artificial Sequence
  Description of Artificial Sequence: Synthetic oligonucleotide
  Target: LAMA2; (-) strand; PAM type: NRG; PAM sequence: GAG
tgcatgggtgaggatggcag

SEQ ID NO: 70891 - DNA, 20 bp, Artificial Sequence
  Description of Artificial Sequence: Synthetic oligonucleotide
  Target: LAMA2; (-) strand; PAM type: NRG; PAM sequence: AGG
catgcatgggtgaggatggc

SEQ ID NO: 70892 - DNA, 20 bp, Artificial Sequence
  Description of Artificial Sequence: Synthetic oligonucleotide
  Target: LAMA2; (-) strand; PAM type: NRG; PAM sequence: CAG
tcatgcatgggtgaggatgg

SEQ ID NO: 70893 - DNA, 20 bp, Artificial Sequence
  Description of Artificial Sequence: Synthetic oligonucleotide
  Target: LAMA2; (-) strand; PAM type: NRG; PAM sequence: TGG
tgctcatgcatgggtgagga

SEQ ID NO: 70894 - DNA, 20 bp, Artificial Sequence
  Description of Artificial Sequence: Synthetic oligonucleotide
  Target: LAMA2; (-) strand; PAM type: NRG; PAM sequence: AGG
gccttgctcatgcatgggtg

SEQ ID NO: 70895 - DNA, 20 bp, Artificial Sequence
  Description of Artificial Sequence: Synthetic oligonucleotide
  Target: LAMA2; (-) strand; PAM type: NRG; PAM sequence: GAG
ggccttgctcatgcatgggt

SEQ ID NO: 70896 - DNA, 20 bp, Artificial Sequence
  Description of Artificial Sequence: Synthetic oligonucleotide
  Target: LAMA2; (-) strand; PAM type: NRG; PAM sequence: GGG
aacaggccttgctcatgcat

SEQ ID NO: 70897 - DNA, 20 bp, Artificial Sequence
  Description of Artificial Sequence: Synthetic oligonucleotide
  Target: LAMA2; (-) strand; PAM type: NRG; PAM sequence: TGG
aaacaggccttgctcatgca

SEQ ID NO: 70898 - DNA, 20 bp, Artificial Sequence
  Description of Artificial Sequence: Synthetic oligonucleotide
  Target: LAMA2; (-) strand; PAM type: NRG; PAM sequence: AGG
ttctttctccctctctaaac

SEQ ID NO: 70899 - DNA, 20 bp, Artificial Sequence
  Description of Artificial Sequence: Synthetic oligonucleotide
  Target: LAMA2; (-) strand; PAM type: NRG; PAM sequence: CAG
tttctttctccctctctaaa

SEQ ID NO: 70900 - DNA, 20 bp, Artificial Sequence
  Description of Artificial Sequence: Synthetic oligonucleotide
  Target: LAMA2; (-) strand; PAM type: NRG; PAM sequence: AGG
ctcattttccaagtaatata

SEQ ID NO: 70901 - DNA, 20 bp, Artificial Sequence
  Description of Artificial Sequence: Synthetic oligonucleotide
  Target: LAMA2; (-) strand; PAM type: NRG; PAM sequence: AAG
tctcattttccaagtaatat

SEQ ID NO: 70902 - DNA, 20 bp, Artificial Sequence
  Description of Artificial Sequence: Synthetic oligonucleotide
  Target: LAMA2; (-) strand; PAM type: NRG; PAM sequence: AAG
atctttgcttctcattttcc

SEQ ID NO: 70903 - DNA, 20 bp, Artificial Sequence
  Description of Artificial Sequence: Synthetic oligonucleotide
  Target: LAMA2; (-) strand; PAM type: NRG; PAM sequence: TGG
gcattttggttcccagtcat

SEQ ID NO: 70904 - DNA, 20 bp, Artificial Sequence
  Description of Artificial Sequence: Synthetic oligonucleotide
  Target: LAMA2; (-) strand; PAM type: NRG; PAM sequence: CAG
cctcattgcattttggttcc

SEQ ID NO: 70905 - DNA, 20 bp, Artificial Sequence
  Description of Artificial Sequence: Synthetic oligonucleotide
  Target: LAMA2; (-) strand; PAM type: NRG; PAM sequence: TGG
gccaagccctcattgcattt

SEQ ID NO: 70906 - DNA, 20 bp, Artificial Sequence
  Description of Artificial Sequence: Synthetic oligonucleotide
  Target: LAMA2; (-) strand; PAM type: NRG; PAM sequence: AAG
gccactactcctgggctgcc

SEQ ID NO: 70907 - DNA, 20 bp, Artificial Sequence
  Description of Artificial Sequence: Synthetic oligonucleotide
  Target: LAMA2; (-) strand; PAM type: NRG; PAM sequence: GGG
caacagcagccactactcct

SEQ ID NO: 70908 - DNA, 20 bp, Artificial Sequence
  Description of Artificial Sequence: Synthetic oligonucleotide
  Target: LAMA2; (-) strand; PAM type: NRG; PAM sequence: TGG
acaacagcagccactactcc

SEQ ID NO: 70909 - DNA, 20 bp, Artificial Sequence
  Description of Artificial Sequence: Synthetic oligonucleotide
  Target: LAMA2; (-) strand; PAM type: NRG; PAM sequence: CAG
ctccatgtgtctcacaacag

SEQ ID NO: 70910 - DNA, 20 bp, Artificial Sequence
  Description of Artificial Sequence: Synthetic oligonucleotide
  Target: LAMA2; (-) strand; PAM type: NRG; PAM sequence: CAG
tagctccatgtgtctcacaa

SEQ ID NO: 70911 - DNA, 20 bp, Artificial Sequence
  Description of Artificial Sequence: Synthetic oligonucleotide
  Target: LAMA2; (-) strand; PAM type: NRG; PAM sequence: TAG
gtttctcatctctcccattt

SEQ ID NO: 70912 - DNA, 20 bp, Artificial Sequence
  Description of Artificial Sequence: Synthetic oligonucleotide
  Target: LAMA2; (-) strand; PAM type: NRG; PAM sequence: CAG
cttacaatcctcaaagctca

SEQ ID NO: 70913 - DNA, 20 bp, Artificial Sequence
  Description of Artificial Sequence: Synthetic oligonucleotide
  Target: LAMA2; (-) strand; PAM type: NRG; PAM sequence: AAG
cttccttcttacaatcctca

SEQ ID NO: 70914 - DNA, 20 bp, Artificial Sequence
  Description of Artificial Sequence: Synthetic oligonucleotide
  Target: LAMA2; (-) strand; PAM type: NRG; PAM sequence: CAG
cagacctgtgacctttgttg

SEQ ID NO: 70915 - DNA, 20 bp, Artificial Sequence
  Description of Artificial Sequence: Synthetic oligonucleotide
  Target: LAMA2; (-) strand; PAM type: NRG; PAM sequence: CAG
taggaggcgtggcaacccca

SEQ ID NO: 70916 - DNA, 20 bp, Artificial Sequence
  Description of Artificial Sequence: Synthetic oligonucleotide
  Target: LAMA2; (-) strand; PAM type: NRG; PAM sequence: TGG
gagatagaaaataggaggcg

SEQ ID NO: 70917 - DNA, 20 bp, Artificial Sequence
  Description of Artificial Sequence: Synthetic oligonucleotide
  Target: LAMA2; (-) strand; PAM type: NRG; PAM sequence: AGG
gattagagatagaaaatagg

SEQ ID NO: 70918 - DNA, 20 bp, Artificial Sequence
  Description of Artificial Sequence: Synthetic oligonucleotide
  Target: LAMA2; (-) strand; PAM type: NRG; PAM sequence: GAG
agattagagatagaaaatag

SEQ ID NO: 70919 - DNA, 20 bp, Artificial Sequence
  Description of Artificial Sequence: Synthetic oligonucleotide
  Target: LAMA2; (-) strand; PAM type: NRG; PAM sequence: AGG
ggagattagagatagaaaat

SEQ ID NO: 70920 - DNA, 20 bp, Artificial Sequence
  Description of Artificial Sequence: Synthetic oligonucleotide
  Target: LAMA2; (-) strand; PAM type: NRG; PAM sequence: TAG
gggagattagagatagaaaa

SEQ ID NO: 70921 - DNA, 20 bp, Artificial Sequence
  Description of Artificial Sequence: Synthetic oligonucleotide
  Target: LAMA2; (-) strand; PAM type: NRG; PAM sequence: TAG
atcaaaagggagattagaga

SEQ ID NO: 70922 - DNA, 20 bp, Artificial Sequence
  Description of Artificial Sequence: Synthetic oligonucleotide
  Target: LAMA2; (-) strand; PAM type: NRG; PAM sequence: GAG
gaaaatcaaaagggagatta

SEQ ID NO: 70923 - DNA, 20 bp, Artificial Sequence
  Description of Artificial Sequence: Synthetic oligonucleotide
  Target: LAMA2; (-) strand; PAM type: NRG; PAM sequence: TAG
gtgaaaatcaaaagggagat

SEQ ID NO: 70924 - DNA, 20 bp, Artificial Sequence
  Description of Artificial Sequence: Synthetic oligonucleotide
  Target: LAMA2; (-) strand; PAM type: NRG; PAM sequence: GAG
caattgtgaaaatcaaaagg

SEQ ID NO: 70925 - DNA, 20 bp, Artificial Sequence
  Description of Artificial Sequence: Synthetic oligonucleotide
  Target: LAMA2; (-) strand; PAM type: NRG; PAM sequence: GGG
accaattgtgaaaatcaaaa

SEQ ID NO: 70926 - DNA, 20 bp, Artificial Sequence
  Description of Artificial Sequence: Synthetic oligonucleotide
  Target: LAMA2; (-) strand; PAM type: NRG; PAM sequence: AGG
gaccaattgtgaaaatcaaa

SEQ ID NO: 70927 - DNA, 20 bp, Artificial Sequence
  Description of Artificial Sequence: Synthetic oligonucleotide
  Target: LAMA2; (-) strand; PAM type: NRG; PAM sequence: AAG
ggaccaattgtgaaaatcaa

SEQ ID NO: 70928 - DNA, 20 bp, Artificial Sequence
  Description of Artificial Sequence: Synthetic oligonucleotide
  Target: LAMA2; (-) strand; PAM type: NRG; PAM sequence: AGG
tcacccagacatataagaac

SEQ ID NO: 70929 - DNA, 20 bp, Artificial Sequence
  Description of Artificial Sequence: Synthetic oligonucleotide
  Target: LAMA2; (-) strand; PAM type: NRG; PAM sequence: CAG
ttcacccagacatataagaa

SEQ ID NO: 70930 - DNA, 20 bp, Artificial Sequence
  Description of Artificial Sequence: Synthetic oligonucleotide
  Target: LAMA2; (-) strand; PAM type: NRG; PAM sequence: AAG
ttactttcacccagacatat

SEQ ID NO: 70931 - DNA, 20 bp, Artificial Sequence
  Description of Artificial Sequence: Synthetic oligonucleotide
  Target: LAMA2; (-) strand; PAM type: NRG; PAM sequence: CAG
gatcttcccttactttcacc

SEQ ID NO: 70932 - DNA, 20 bp, Artificial Sequence
  Description of Artificial Sequence: Synthetic oligonucleotide
  Target: LAMA2; (-) strand; PAM type: NRG; PAM sequence: CAG
ctctatcctaccaaaaacca

SEQ ID NO: 70933 - DNA, 20 bp, Artificial Sequence
  Description of Artificial Sequence: Synthetic oligonucleotide
  Target: LAMA2; (-) strand; PAM type: NRG; PAM sequence: TGG
aatggcaaggaaggagatga

SEQ ID NO: 70934 - DNA, 20 bp, Artificial Sequence
  Description of Artificial Sequence: Synthetic oligonucleotide
  Target: LAMA2; (-) strand; PAM type: NRG; PAM sequence: GAG
ttacaataatggcaaggaag

SEQ ID NO: 70935 - DNA, 20 bp, Artificial Sequence
  Description of Artificial Sequence: Synthetic oligonucleotide
  Target: LAMA2; (-) strand; PAM type: NRG; PAM sequence: AGG
ctttacaataatggcaagga

SEQ ID NO: 70936 - DNA, 20 bp, Artificial Sequence
  Description of Artificial Sequence: Synthetic oligonucleotide
  Target: LAMA2; (-) strand; PAM type: NRG; PAM sequence: AAG
tctttacaataatggcaagg

SEQ ID NO: 70937 - DNA, 20 bp, Artificial Sequence
  Description of Artificial Sequence: Synthetic oligonucleotide
  Target: LAMA2; (-) strand; PAM type: NRG; PAM sequence: AGG
gaatctttacaataatggca

SEQ ID NO: 70938 - DNA, 20 bp, Artificial Sequence
  Description of Artificial Sequence: Synthetic oligonucleotide
  Target: LAMA2; (-) strand; PAM type: NRG; PAM sequence: AAG
ggaatctttacaataatggc

SEQ ID NO: 70939 - DNA, 20 bp, Artificial Sequence
  Description of Artificial Sequence: Synthetic oligonucleotide
  Target: LAMA2; (-) strand; PAM type: NRG; PAM sequence: TGG
tggaggaatctttacaataa

SEQ ID NO: 70940 - DNA, 20 bp, Artificial Sequence
  Description of Artificial Sequence: Synthetic oligonucleotide
  Target: LAMA2; (-) strand; PAM type: NRG; PAM sequence: AGG
atcatcactaactctagtgg

SEQ ID NO: 70941 - DNA, 20 bp, Artificial Sequence
  Description of Artificial Sequence: Synthetic oligonucleotide
  Target: LAMA2; (-) strand; PAM type: NRG; PAM sequence: GAG
catcatcactaactctagtg

SEQ ID NO: 70942 - DNA, 20 bp, Artificial Sequence
  Description of Artificial Sequence: Synthetic oligonucleotide
  Target: LAMA2; (-) strand; PAM type: NRG; PAM sequence: TGG
gccatcatcactaactctag

SEQ ID NO: 70943 - DNA, 20 bp, Artificial Sequence
  Description of Artificial Sequence: Synthetic oligonucleotide
  Target: LAMA2; (-) strand; PAM type: NRG; PAM sequence: TAG
gttgccatcatcactaactc

SEQ ID NO: 70944 - DNA, 20 bp, Artificial Sequence
  Description of Artificial Sequence: Synthetic oligonucleotide
  Target: LAMA2; (-) strand; PAM type: NRG; PAM sequence: CGG
gataacccaaacctctcatc

SEQ ID NO: 70945 - DNA, 20 bp, Artificial Sequence
  Description of Artificial Sequence: Synthetic oligonucleotide
  Target: LAMA2; (-) strand; PAM type: NRG; PAM sequence: GAG
atcactatttaataatatga

SEQ ID NO: 70946 - DNA, 20 bp, Artificial Sequence
  Description of Artificial Sequence: Synthetic oligonucleotide
  Target: LAMA2; (-) strand; PAM type: NRG; PAM sequence: GAG
ctatcactatttaataatat

SEQ ID NO: 70947 - DNA, 20 bp, Artificial Sequence
  Description of Artificial Sequence: Synthetic oligonucleotide
  Target: LAMA2; (-) strand; PAM type: NRG; PAM sequence: CAG
ttacagaagctttttgcggc

SEQ ID NO: 70948 - DNA, 20 bp, Artificial Sequence
  Description of Artificial Sequence: Synthetic oligonucleotide
  Target: LAMA2; (-) strand; PAM type: NRG; PAM sequence: CGG
gcccttacagaagctttttg

SEQ ID NO: 70949 - DNA, 20 bp, Artificial Sequence
  Description of Artificial Sequence: Synthetic oligonucleotide
  Target: LAMA2; (-) strand; PAM type: NRG; PAM sequence: AAG
ttttcccttggcccttacag

SEQ ID NO: 70950 - DNA, 20 bp, Artificial Sequence
  Description of Artificial Sequence: Synthetic oligonucleotide
  Target: LAMA2; (-) strand; PAM type: NRG; PAM sequence: CAG
aagttttcccttggccctta

SEQ ID NO: 70951 - DNA, 20 bp, Artificial Sequence
  Description of Artificial Sequence: Synthetic oligonucleotide
  Target: LAMA2; (-) strand; PAM type: NRG; PAM sequence: TGG
gcaaaagagaagttttccct

SEQ ID NO: 70952 - DNA, 20 bp, Artificial Sequence
  Description of Artificial Sequence: Synthetic oligonucleotide
  Target: LAMA2; (-) strand; PAM type: NRG; PAM sequence: AAG
accttcagagggcaaaagag

SEQ ID NO: 70953 - DNA, 20 bp, Artificial Sequence
  Description of Artificial Sequence: Synthetic oligonucleotide
  Target: LAMA2; (-) strand; PAM type: NRG; PAM sequence: GAG
caaaccttcagagggcaaaa

SEQ ID NO: 70954 - DNA, 20 bp, Artificial Sequence
  Description of Artificial Sequence: Synthetic oligonucleotide
  Target: LAMA2; (-) strand; PAM type: NRG; PAM sequence: AAG
agcaaaccttcagagggcaa

SEQ ID NO: 70955 - DNA, 20 bp, Artificial Sequence
  Description of Artificial Sequence: Synthetic oligonucleotide
  Target: LAMA2; (-) strand; PAM type: NRG; PAM sequence: GGG
tttttcagcaaaccttcaga

SEQ ID NO: 70956 - DNA, 20 bp, Artificial Sequence
  Description of Artificial Sequence: Synthetic oligonucleotide
  Target: LAMA2; (-) strand; PAM type: NRG; PAM sequence: AGG
atttttcagcaaaccttcag

SEQ ID NO: 70957 - DNA, 20 bp, Artificial Sequence
  Description of Artificial Sequence: Synthetic oligonucleotide
  Target: LAMA2; (-) strand; PAM type: NRG; PAM sequence: GAG
gatttttcagcaaaccttca

SEQ ID NO: 70958 - DNA, 20 bp, Artificial Sequence
  Description of Artificial Sequence: Synthetic oligonucleotide
  Target: LAMA2; (-) strand; PAM type: NRG; PAM sequence: CAG
ttgatttttcagcaaacctt

SEQ ID NO: 70959 - DNA, 20 bp, Artificial Sequence
  Description of Artificial Sequence: Synthetic oligonucleotide
  Target: LAMA2; (-) strand; PAM type: NRG; PAM sequence: CAG
acttttttcagttgattttt

SEQ ID NO: 70960 - DNA, 20 bp, Artificial Sequence
  Description of Artificial Sequence: Synthetic oligonucleotide
  Target: LAMA2; (-) strand; PAM type: NRG; PAM sequence: CAG
cctaccaagctaactttttt

SEQ ID NO: 70961 - DNA, 20 bp, Artificial Sequence
  Description of Artificial Sequence: Synthetic oligonucleotide
  Target: LAMA2; (-) strand; PAM type: NRG; PAM sequence: AAG
ttgtatgcctttcacctacc

SEQ ID NO: 70962 - DNA, 20 bp, Artificial Sequence
  Description of Artificial Sequence: Synthetic oligonucleotide
  Target: LAMA2; (-) strand; PAM type: NRG; PAM sequence: GGG
tatgctcctattgggttatt

SEQ ID NO: 70963 - DNA, 20 bp, Artificial Sequence
  Description of Artificial Sequence: Synthetic oligonucleotide
  Target: LAMA2; (-) strand; PAM type: NRG; PAM sequence: TGG
ctatgctcctattgggttat

SEQ ID NO: 70964 - DNA, 20 bp, Artificial Sequence
  Description of Artificial Sequence: Synthetic oligonucleotide
  Target: LAMA2; (-) strand; PAM type: NRG; PAM sequence: GGG
tctacatctatgctcctatt

SEQ ID NO: 70965 - DNA, 20 bp, Artificial Sequence
  Description of Artificial Sequence: Synthetic oligonucleotide
  Target: LAMA2; (-) strand; PAM type: NRG; PAM sequence: TGG
atctacatctatgctcctat

SEQ ID NO: 70966 - DNA, 20 bp, Artificial Sequence
  Description of Artificial Sequence: Synthetic oligonucleotide
  Target: LAMA2; (-) strand; PAM type: NRG; PAM sequence: GGG
cttccctcccccgtgaagaa

SEQ ID NO: 70967 - DNA, 20 bp, Artificial Sequence
  Description of Artificial Sequence: Synthetic oligonucleotide
  Target: LAMA2; (-) strand; PAM type: NRG; PAM sequence: AGG
tcttccctcccccgtgaaga

SEQ ID NO: 70968 - DNA, 20 bp, Artificial Sequence
  Description of Artificial Sequence: Synthetic oligonucleotide
  Target: LAMA2; (-) strand; PAM type: NRG; PAM sequence: AAG
atcttccctcccccgtgaag

SEQ ID NO: 70969 - DNA, 20 bp, Artificial Sequence
  Description of Artificial Sequence: Synthetic oligonucleotide
  Target: LAMA2; (-) strand; PAM type: NRG; PAM sequence: AAG
cccatcttccctcccccgtg

SEQ ID NO: 70970 - DNA, 20 bp, Artificial Sequence
  Description of Artificial Sequence: Synthetic oligonucleotide
  Target: LAMA2; (-) strand; PAM type: NRG; PAM sequence: AGG
actttgtcccaggccattgt

SEQ ID NO: 70971 - DNA, 20 bp, Artificial Sequence
  Description of Artificial Sequence: Synthetic oligonucleotide
  Target: LAMA2; (-) strand; PAM type: NRG; PAM sequence: TAG
gactttgtcccaggccattg

SEQ ID NO: 70972 - DNA, 20 bp, Artificial Sequence
  Description of Artificial Sequence: Synthetic oligonucleotide
  Target: LAMA2; (-) strand; PAM type: NRG; PAM sequence: AGG
ggcccaacagactttgtccc

SEQ ID NO: 70973 - DNA, 20 bp, Artificial Sequence
  Description of Artificial Sequence: Synthetic oligonucleotide
  Target: LAMA2; (-) strand; PAM type: NRG; PAM sequence: CAG
gggcccaacagactttgtcc

SEQ ID NO: 70974 - DNA, 20 bp, Artificial Sequence
  Description of Artificial Sequence: Synthetic oligonucleotide
  Target: LAMA2; (-) strand; PAM type: NRG; PAM sequence: CAG
tatctgctctgtgggcccaa

SEQ ID NO: 70975 - DNA, 20 bp, Artificial Sequence
  Description of Artificial Sequence: Synthetic oligonucleotide
  Target: LAMA2; (-) strand; PAM type: NRG; PAM sequence: GGG
caaaccactatctgctctgt

SEQ ID NO: 70976 - DNA, 20 bp, Artificial Sequence
  Description of Artificial Sequence: Synthetic oligonucleotide
  Target: LAMA2; (-) strand; PAM type: NRG; PAM sequence: TGG
acaaaccactatctgctctg

SEQ ID NO: 70977 - DNA, 20 bp, Artificial Sequence
  Description of Artificial Sequence: Synthetic oligonucleotide
  Target: LAMA2; (-) strand; PAM type: NRG; PAM sequence: CAG
agtctgtcggcacacctgaa

SEQ ID NO: 70978 - DNA, 20 bp, Artificial Sequence
  Description of Artificial Sequence: Synthetic oligonucleotide
  Target: LAMA2; (-) strand; PAM type: NRG; PAM sequence: CGG
gaagagagactgaagtctgt

SEQ ID NO: 70979 - DNA, 20 bp, Artificial Sequence
  Description of Artificial Sequence: Synthetic oligonucleotide
  Target: LAMA2; (-) strand; PAM type: NRG; PAM sequence: AAG
tttcacatgaagagagactg

SEQ ID NO: 70980 - DNA, 20 bp, Artificial Sequence
  Description of Artificial Sequence: Synthetic oligonucleotide
  Target: LAMA2; (-) strand; PAM type: NRG; PAM sequence: GAG
taactcatttcacatgaaga

SEQ ID NO: 70981 - DNA, 20 bp, Artificial Sequence
  Description of Artificial Sequence: Synthetic oligonucleotide
  Target: LAMA2; (-) strand; PAM type: NRG; PAM sequence: GAG
tttaactcatttcacatgaa

SEQ ID NO: 70982 - DNA, 20 bp, Artificial Sequence
  Description of Artificial Sequence: Synthetic oligonucleotide
  Target: LAMA2; (-) strand; PAM type: NRG; PAM sequence: AAG
aatttaactcatttcacatg

SEQ ID NO: 70983 - DNA, 20 bp, Artificial Sequence
  Description of Artificial Sequence: Synthetic oligonucleotide
  Target: LAMA2; (-) strand; PAM type: NRG; PAM sequence: AAG
ttcctctggccctcttgctt

SEQ ID NO: 70984 - DNA, 20 bp, Artificial Sequence
  Description of Artificial Sequence: Synthetic oligonucleotide
  Target: LAMA2; (-) strand; PAM type: NRG; PAM sequence: TGG
ccaggaggaaaagtttcctc

SEQ ID NO: 70985 - DNA, 20 bp, Artificial Sequence
  Description of Artificial Sequence: Synthetic oligonucleotide
  Target: LAMA2; (-) strand; PAM type: NRG; PAM sequence: AAG
tctgatcccaccaggaggaa

SEQ ID NO: 70986 - DNA, 20 bp, Artificial Sequence
  Description of Artificial Sequence: Synthetic oligonucleotide
  Target: LAMA2; (-) strand; PAM type: NRG; PAM sequence: AGG
tacagtctgatcccaccagg

SEQ ID NO: 70987 - DNA, 20 bp, Artificial Sequence
  Description of Artificial Sequence: Synthetic oligonucleotide
  Target: LAMA2; (-) strand; PAM type: NRG; PAM sequence: GAG
ttacagtctgatcccaccag

SEQ ID NO: 70988 - DNA, 20 bp, Artificial Sequence
  Description of Artificial Sequence: Synthetic oligonucleotide
  Target: LAMA2; (-) strand; PAM type: NRG; PAM sequence: AGG
acttacagtctgatcccacc

SEQ ID NO: 70989 - DNA, 20 bp, Artificial Sequence
  Description of Artificial Sequence: Synthetic oligonucleotide
  Target: LAMA2; (-) strand; PAM type: NRG; PAM sequence: CAG
tacttacagtctgatcccac

SEQ ID NO: 70990 - DNA, 20 bp, Artificial Sequence
  Description of Artificial Sequence: Synthetic oligonucleotide
  Target: LAMA2; (-) strand; PAM type: NRG; PAM sequence: CAG
gatactcccgtatctactta

SEQ ID NO: 70991 - DNA, 20 bp, Artificial Sequence
  Description of Artificial Sequence: Synthetic oligonucleotide
  Target: LAMA2; (-) strand; PAM type: NRG; PAM sequence: AAG
agaccagcaaatgctgaaat

SEQ ID NO: 70992 - DNA, 20 bp, Artificial Sequence
  Description of Artificial Sequence: Synthetic oligonucleotide
  Target: LAMA2; (-) strand; PAM type: NRG; PAM sequence: CAG
aattaaaggctcttggagac

SEQ ID NO: 70993 - DNA, 20 bp, Artificial Sequence
  Description of Artificial Sequence: Synthetic oligonucleotide
  Target: LAMA2; (-) strand; PAM type: NRG; PAM sequence: GAG
ttttaaattaaaggctcttg

SEQ ID NO: 70994 - DNA, 20 bp, Artificial Sequence
  Description of Artificial Sequence: Synthetic oligonucleotide
  Target: LAMA2; (-) strand; PAM type: NRG; PAM sequence: TGG
tattttaaattaaaggctct

SEQ ID NO: 70995 - DNA, 20 bp, Artificial Sequence
  Description of Artificial Sequence: Synthetic oligonucleotide
  Target: LAMA2; (-) strand; PAM type: NRG; PAM sequence: AGG
tgctgattattttaaattaa

SEQ ID NO: 70996 - DNA, 20 bp, Artificial Sequence
  Description of Artificial Sequence: Synthetic oligonucleotide
  Target: LAMA2; (-) strand; PAM type: NRG; PAM sequence: AAG
atgctgattattttaaatta

SEQ ID NO: 70997 - DNA, 20 bp, Artificial Sequence
  Description of Artificial Sequence: Synthetic oligonucleotide
  Target: LAMA2; (-) strand; PAM type: NRG; PAM sequence: TGG
tacccgaaaatatagcatgc

SEQ ID NO: 70998 - DNA, 20 bp, Artificial Sequence
  Description of Artificial Sequence: Synthetic oligonucleotide
  Target: LAMA2; (-) strand; PAM type: NRG; PAM sequence: TAG
gaaaccaatacccgaaaata

SEQ ID NO: 70999 - DNA, 20 bp, Artificial Sequence
  Description of Artificial Sequence: Synthetic oligonucleotide
  Target: LAMA2; (-) strand; PAM type: NRG; PAM sequence: CAG
ttctatgagatattgaggct

SEQ ID NO: 71000 - DNA, 20 bp, Artificial Sequence
  Description of Artificial Sequence: Synthetic oligonucleotide
  Target: LAMA2; (-) strand; PAM type: NRG; PAM sequence: AGG
attcattctatgagatattg

SEQ ID NO: 71001 - DNA, 20 bp, Artificial Sequence
  Description of Artificial Sequence: Synthetic oligonucleotide
  Target: LAMA2; (-) strand; PAM type: NRG; PAM sequence: GAG
aattcattctatgagatatt

SEQ ID NO: 71002 - DNA, 20 bp, Artificial Sequence
  Description of Artificial Sequence: Synthetic oligonucleotide
  Target: LAMA2; (-) strand; PAM type: NRG; PAM sequence: GAG
tgctgttaaattcattctat

SEQ ID NO: 71003 - DNA, 20 bp, Artificial Sequence
  Description of Artificial Sequence: Synthetic oligonucleotide
  Target: LAMA2; (-) strand; PAM type: NRG; PAM sequence: TGG
tagggagtccaatatatatc

SEQ ID NO: 71004 - DNA, 20 bp, Artificial Sequence
  Description of Artificial Sequence: Synthetic oligonucleotide
  Target: LAMA2; (-) strand; PAM type: NRG; PAM sequence: GAG
cattattattaagacgtagg

SEQ ID NO: 71005 - DNA, 20 bp, Artificial Sequence
  Description of Artificial Sequence: Synthetic oligonucleotide
  Target: LAMA2; (-) strand; PAM type: NRG; PAM sequence: GGG
ttcattattattaagacgta

SEQ ID NO: 71006 - DNA, 20 bp, Artificial Sequence
  Description of Artificial Sequence: Synthetic oligonucleotide
  Target: LAMA2; (-) strand; PAM type: NRG; PAM sequence: AGG
attcattattattaagacgt

SEQ ID NO: 71007 - DNA, 20 bp, Artificial Sequence
  Description of Artificial Sequence: Synthetic oligonucleotide
  Target: LAMA2; (-) strand; PAM type: NRG; PAM sequence: TAG
cattcattattattaagacg

SEQ ID NO: 71008 - DNA, 20 bp, Artificial Sequence
  Description of Artificial Sequence: Synthetic oligonucleotide
  Target: LAMA2; (-) strand; PAM type: NRG; PAM sequence: AAG
ctgacacattcattattatt

SEQ ID NO: 71009 - DNA, 20 bp, Artificial Sequence
  Description of Artificial Sequence: Synthetic oligonucleotide
  Target: LAMA2; (-) strand; PAM type: NRG; PAM sequence: TGG
aaacataaaatcctgacttg

SEQ ID NO: 71010 - DNA, 20 bp, Artificial Sequence
  Description of Artificial Sequence: Synthetic oligonucleotide
  Target: LAMA2; (-) strand; PAM type: NRG; PAM sequence: CAG
tatgccatcaaccttgttaa

SEQ ID NO: 71011 - DNA, 20 bp, Artificial Sequence
  Description of Artificial Sequence: Synthetic oligonucleotide
  Target: LAMA2; (-) strand; PAM type: NRG; PAM sequence: TAG
actaactattgagacagctc

SEQ ID NO: 71012 - DNA, 20 bp, Artificial Sequence
  Description of Artificial Sequence: Synthetic oligonucleotide
  Target: LAMA2; (-) strand; PAM type: NRG; PAM sequence: CAG
gcaacaactaactattgaga

SEQ ID NO: 71013 - DNA, 20 bp, Artificial Sequence
  Description of Artificial Sequence: Synthetic oligonucleotide
  Target: LAMA2; (-) strand; PAM type: NRG; PAM sequence: GAG
aaaagcaacaactaactatt

SEQ ID NO: 71014 - DNA, 20 bp, Artificial Sequence
  Description of Artificial Sequence: Synthetic oligonucleotide
  Target: LAMA2; (-) strand; PAM type: NRG; PAM sequence: AAG
gacttgtcaatcattcaaaa

SEQ ID NO: 71015 - DNA, 20 bp, Artificial Sequence
  Description of Artificial Sequence: Synthetic oligonucleotide
  Target: LAMA2; (-) strand; PAM type: NRG; PAM sequence: AAG
aactacagaaattaagtgta

SEQ ID NO: 71016 - DNA, 20 bp, Artificial Sequence
  Description of Artificial Sequence: Synthetic oligonucleotide
  Target: LAMA2; (-) strand; PAM type: NRG; PAM sequence: AAG
taaaggtaactacagaaatt

SEQ ID NO: 71017 - DNA, 20 bp, Artificial Sequence
  Description of Artificial Sequence: Synthetic oligonucleotide
  Target: LAMA2; (-) strand; PAM type: NRG; PAM sequence: CAG
ggcaattttaaaggtaacta

SEQ ID NO: 71018 - DNA, 20 bp, Artificial Sequence
  Description of Artificial Sequence: Synthetic oligonucleotide
  Target: LAMA2; (-) strand; PAM type: NRG; PAM sequence: AGG
accaaaatgggcaattttaa

SEQ ID NO: 71019 - DNA, 20 bp, Artificial Sequence
  Description of Artificial Sequence: Synthetic oligonucleotide
  Target: LAMA2; (-) strand; PAM type: NRG; PAM sequence: AAG
aaccaaaatgggcaatttta

SEQ ID NO: 71020 - DNA, 20 bp, Artificial Sequence
  Description of Artificial Sequence: Synthetic oligonucleotide
  Target: LAMA2; (-) strand; PAM type: NRG; PAM sequence: GGG
ctctggccattaaccaaaat

SEQ ID NO: 71021 - DNA, 20 bp, Artificial Sequence
  Description of Artificial Sequence: Synthetic oligonucleotide
  Target: LAMA2; (-) strand; PAM type: NRG; PAM sequence: TGG
actctggccattaaccaaaa

SEQ ID NO: 71022 - DNA, 20 bp, Artificial Sequence
  Description of Artificial Sequence: Synthetic oligonucleotide
  Target: LAMA2; (-) strand; PAM type: NRG; PAM sequence: TGG
gaatgagctggtcagcactc

SEQ ID NO: 71023 - DNA, 20 bp, Artificial Sequence
  Description of Artificial Sequence: Synthetic oligonucleotide
  Target: LAMA2; (-) strand; PAM type: NRG; PAM sequence: CAG
ctgcaggggaatgagctggt

SEQ ID NO: 71024 - DNA, 20 bp, Artificial Sequence
  Description of Artificial Sequence: Synthetic oligonucleotide
  Target: LAMA2; (-) strand; PAM type: NRG; PAM sequence: TGG
taggctgcaggggaatgagc

SEQ ID NO: 71025 - DNA, 20 bp, Artificial Sequence
  Description of Artificial Sequence: Synthetic oligonucleotide
  Target: LAMA2; (-) strand; PAM type: NRG; PAM sequence: GAG
tgcttaggctgcaggggaat

SEQ ID NO: 71026 - DNA, 20 bp, Artificial Sequence
  Description of Artificial Sequence: Synthetic oligonucleotide
  Target: LAMA2; (-) strand; PAM type: NRG; PAM sequence: GGG
tttaaatgcttaggctgcag

SEQ ID NO: 71027 - DNA, 20 bp, Artificial Sequence
  Description of Artificial Sequence: Synthetic oligonucleotide
  Target: LAMA2; (-) strand; PAM type: NRG; PAM sequence: GGG
gtttaaatgcttaggctgca

SEQ ID NO: 71028 - DNA, 20 bp, Artificial Sequence
  Description of Artificial Sequence: Synthetic oligonucleotide
  Target: LAMA2; (-) strand; PAM type: NRG; PAM sequence: AGG
tgtttaaatgcttaggctgc

SEQ ID NO: 71029 - DNA, 20 bp, Artificial Sequence
  Description of Artificial Sequence: Synthetic oligonucleotide
  Target: LAMA2; (-) strand; PAM type: NRG; PAM sequence: CAG
atgtttaaatgcttaggctg

SEQ ID NO: 71030 - DNA, 20 bp, Artificial Sequence
  Description of Artificial Sequence: Synthetic oligonucleotide
  Target: LAMA2; (-) strand; PAM type: NRG; PAM sequence: AGG
caggaaatgtttaaatgctt

SEQ ID NO: 71031 - DNA, 20 bp, Artificial Sequence
  Description of Artificial Sequence: Synthetic oligonucleotide
  Target: LAMA2; (-) strand; PAM type: NRG; PAM sequence: TAG
gcaggaaatgtttaaatgct

SEQ ID NO: 71032 - DNA, 20 bp, Artificial Sequence
  Description of Artificial Sequence: Synthetic oligonucleotide
  Target: LAMA2; (-) strand; PAM type: NRG; PAM sequence: AGG
atagcaccatacaaggtagc

SEQ ID NO: 71033 - DNA, 20 bp, Artificial Sequence
  Description of Artificial Sequence: Synthetic oligonucleotide
  Target: LAMA2; (-) strand; PAM type: NRG; PAM sequence: CAG
catagcaccatacaaggtag

SEQ ID NO: 71034 - DNA, 20 bp, Artificial Sequence
  Description of Artificial Sequence: Synthetic oligonucleotide
  Target: LAMA2; (-) strand; PAM type: NRG; PAM sequence: TAG
tctcatagcaccatacaagg

SEQ ID NO: 71035 - DNA, 20 bp, Artificial Sequence
  Description of Artificial Sequence: Synthetic oligonucleotide
  Target: LAMA2; (-) strand; PAM type: NRG; PAM sequence: AGG
ctgtctcatagcaccataca

SEQ ID NO: 71036 - DNA, 20 bp, Artificial Sequence
  Description of Artificial Sequence: Synthetic oligonucleotide
  Target: LAMA2; (-) strand; PAM type: NRG; PAM sequence: AAG
gctgtctcatagcaccatac

SEQ ID NO: 71037 - DNA, 20 bp, Artificial Sequence
  Description of Artificial Sequence: Synthetic oligonucleotide
  Target: LAMA2; (-) strand; PAM type: NRG; PAM sequence: TAG
cttcaatgacagctgtctca

SEQ ID NO: 71038 - DNA, 20 bp, Artificial Sequence
  Description of Artificial Sequence: Synthetic oligonucleotide
  Target: LAMA2; (-) strand; PAM type: NRG; PAM sequence: CAG
caacagaatttcttcaatga

SEQ ID NO: 71039 - DNA, 20 bp, Artificial Sequence
  Description of Artificial Sequence: Synthetic oligonucleotide
  Target: LAMA2; (-) strand; PAM type: NRG; PAM sequence: CAG
agagtaattcagattctcaa

SEQ ID NO: 71040 - DNA, 20 bp, Artificial Sequence
  Description of Artificial Sequence: Synthetic oligonucleotide
  Target: LAMA2; (-) strand; PAM type: NRG; PAM sequence: CAG
aatacagaaggagagtaatt

SEQ ID NO: 71041 - DNA, 20 bp, Artificial Sequence
  Description of Artificial Sequence: Synthetic oligonucleotide
  Target: LAMA2; (-) strand; PAM type: NRG; PAM sequence: GAG
attaaaataatacagaagga

SEQ ID NO: 71042 - DNA, 20 bp, Artificial Sequence
  Description of Artificial Sequence: Synthetic oligonucleotide
  Target: LAMA2; (-) strand; PAM type: NRG; PAM sequence: GAG
acattaaaataatacagaag

SEQ ID NO: 71043 - DNA, 20 bp, Artificial Sequence
  Description of Artificial Sequence: Synthetic oligonucleotide
  Target: LAMA2; (-) strand; PAM type: NRG; PAM sequence: AGG
aaacattaaaataatacaga

SEQ ID NO: 71044 - DNA, 20 bp, Artificial Sequence
  Description of Artificial Sequence: Synthetic oligonucleotide
  Target: LAMA2; (-) strand; PAM type: NRG; PAM sequence: AAG
caaacattaaaataatacag

SEQ ID NO: 71045 - DNA, 20 bp, Artificial Sequence
  Description of Artificial Sequence: Synthetic oligonucleotide
  Target: LAMA2; (-) strand; PAM type: NRG; PAM sequence: CAG
tatcaaacattaaaataata

SEQ ID NO: 71046 - DNA, 20 bp, Artificial Sequence
  Description of Artificial Sequence: Synthetic oligonucleotide
  Target: LAMA2; (-) strand; PAM type: NRG; PAM sequence: TGG
ttctttaaagtaaaaaaaaa

SEQ ID NO: 71047 - DNA, 20 bp, Artificial Sequence
  Description of Artificial Sequence: Synthetic oligonucleotide
  Target: LAMA2; (-) strand; PAM type: NRG; PAM sequence: AAG
agtttatagctttttcttta

SEQ ID NO: 71048 - DNA, 20 bp, Artificial Sequence
  Description of Artificial Sequence: Synthetic oligonucleotide
  Target: LAMA2; (-) strand; PAM type: NRG; PAM sequence: TAG
aagatcatataactagttta

SEQ ID NO: 71049 - DNA, 20 bp, Artificial Sequence
  Description of Artificial Sequence: Synthetic oligonucleotide
  Target: LAMA2; (-) strand; PAM type: NRG; PAM sequence: TAG
agaagaaaagatcatataac

SEQ ID NO: 71050 - DNA, 20 bp, Artificial Sequence
  Description of Artificial Sequence: Synthetic oligonucleotide
  Target: LAMA2; (-) strand; PAM type: NRG; PAM sequence: AAG
tcatatgaaaggaagaagaa

SEQ ID NO: 71051 - DNA, 20 bp, Artificial Sequence
  Description of Artificial Sequence: Synthetic oligonucleotide
  Target: LAMA2; (-) strand; PAM type: NRG; PAM sequence: AAG
cagcatcatatgaaaggaag

SEQ ID NO: 71052 - DNA, 20 bp, Artificial Sequence
  Description of Artificial Sequence: Synthetic oligonucleotide
  Target: LAMA2; (-) strand; PAM type: NRG; PAM sequence: AAG
tagcagcatcatatgaaagg

SEQ ID NO: 71053 - DNA, 20 bp, Artificial Sequence
  Description of Artificial Sequence: Synthetic oligonucleotide
  Target: LAMA2; (-) strand; PAM type: NRG; PAM sequence: AGG
agttagcagcatcatatgaa

SEQ ID NO: 71054 - DNA, 20 bp, Artificial Sequence
  Description of Artificial Sequence: Synthetic oligonucleotide
  Target: LAMA2; (-) strand; PAM type: NRG; PAM sequence: AAG
gagttagcagcatcatatga

SEQ ID NO: 71055 - DNA, 20 bp, Artificial Sequence
  Description of Artificial Sequence: Synthetic oligonucleotide
  Target: LAMA2; (-) strand; PAM type: NRG; PAM sequence: CAG
gtgtctctctattgagttag

SEQ ID NO: 71056 - DNA, 20 bp, Artificial Sequence
  Description of Artificial Sequence: Synthetic oligonucleotide
  Target: LAMA2; (-) strand; PAM type: NRG; PAM sequence: TAG
cgggtgtctctctattgagt

SEQ ID NO: 71057 - DNA, 20 bp, Artificial Sequence
  Description of Artificial Sequence: Synthetic oligonucleotide
  Target: LAMA2; (-) strand; PAM type: NRG; PAM sequence: GAG
taatcgggtgtctctctatt

SEQ ID NO: 71058 - DNA, 20 bp, Artificial Sequence
  Description of Artificial Sequence: Synthetic oligonucleotide
  Target: LAMA2; (-) strand; PAM type: NRG; PAM sequence: GGG
catcaatagcatttgtaatc

SEQ ID NO: 71059 - DNA, 20 bp, Artificial Sequence
  Description of Artificial Sequence: Synthetic oligonucleotide
  Target: LAMA2; (-) strand; PAM type: NRG; PAM sequence: CGG
ccatcaatagcatttgtaat

SEQ ID NO: 71060 - DNA, 20 bp, Artificial Sequence
  Description of Artificial Sequence: Synthetic oligonucleotide
  Target: LAMA2; (-) strand; PAM type: NRG; PAM sequence: TAG
ccaagtgttctttccatcaa

SEQ ID NO: 71061 - DNA, 20 bp, Artificial Sequence
  Description of Artificial Sequence: Synthetic oligonucleotide
  Target: LAMA2; (-) strand; PAM type: NRG; PAM sequence: AAG
aatactgggactctgccacc

SEQ ID NO: 71062 - DNA, 20 bp, Artificial Sequence
  Description of Artificial Sequence: Synthetic oligonucleotide
  Target: LAMA2; (-) strand; PAM type: NRG; PAM sequence: GGG
tcgattccattcttaatact

SEQ ID NO: 71063 - DNA, 20 bp, Artificial Sequence
  Description of Artificial Sequence: Synthetic oligonucleotide
  Target: LAMA2; (-) strand; PAM type: NRG; PAM sequence: TGG
ttcgattccattcttaatac

SEQ ID NO: 71064 - DNA, 20 bp, Artificial Sequence
  Description of Artificial Sequence: Synthetic oligonucleotide
  Target: LAMA2; (-) strand; PAM type: NRG; PAM sequence: TGG
ccagggtaattgtcacataa

SEQ ID NO: 71065 - DNA, 20 bp, Artificial Sequence
  Description of Artificial Sequence: Synthetic oligonucleotide
  Target: LAMA2; (-) strand; PAM type: NRG; PAM sequence: GGG
ctatacctgctgtaaatcca

SEQ ID NO: 71066 - DNA, 20 bp, Artificial Sequence
  Description of Artificial Sequence: Synthetic oligonucleotide
  Target: LAMA2; (-) strand; PAM type: NRG; PAM sequence: AGG
actatacctgctgtaaatcc

SEQ ID NO: 71067 - DNA, 20 bp, Artificial Sequence
  Description of Artificial Sequence: Synthetic oligonucleotide
  Target: LAMA2; (-) strand; PAM type: NRG; PAM sequence: CAG
aactatacctgctgtaaatc

SEQ ID NO: 71068 - DNA, 20 bp, Artificial Sequence
  Description of Artificial Sequence: Synthetic oligonucleotide
  Target: LAMA2; (-) strand; PAM type: NRG; PAM sequence: AGG
agtggaaatgacaaaaaaag

SEQ ID NO: 71069 - DNA, 20 bp, Artificial Sequence
  Description of Artificial Sequence: Synthetic oligonucleotide
  Target: LAMA2; (-) strand; PAM type: NRG; PAM sequence: GAG
aagtggaaatgacaaaaaaa

SEQ ID NO: 71070 - DNA, 20 bp, Artificial Sequence
  Description of Artificial Sequence: Synthetic oligonucleotide
  Target: LAMA2; (-) strand; PAM type: NRG; PAM sequence: AAG
aaaagtggaaatgacaaaaa

SEQ ID NO: 71071 - DNA, 20 bp, Artificial Sequence
  Description of Artificial Sequence: Synthetic oligonucleotide
  Target: LAMA2; (-) strand; PAM type: NRG; PAM sequence: TGG
gtaaaatgcaatttcaaaag

SEQ ID NO: 71072 - DNA, 20 bp, Artificial Sequence
  Description of Artificial Sequence: Synthetic oligonucleotide
  Target: LAMA2; (-) strand; PAM type: NRG; PAM sequence: AAG
aatgtaaaatgcaatttcaa

SEQ ID NO: 71073 - DNA, 20 bp, Artificial Sequence
  Description of Artificial Sequence: Synthetic oligonucleotide
  Target: LAMA2; (-) strand; PAM type: NRG; PAM sequence: TAG
caaaccactaactaaacaaa

SEQ ID NO: 71074 - DNA, 20 bp, Artificial Sequence
  Description of Artificial Sequence: Synthetic oligonucleotide
  Target: LAMA2; (-) strand; PAM type: NRG; PAM sequence: GAG
caatggagagtgataagaaa

SEQ ID NO: 71075 - DNA, 20 bp, Artificial Sequence
  Description of Artificial Sequence: Synthetic oligonucleotide
  Target: LAMA2; (-) strand; PAM type: NRG; PAM sequence: AAG
aacaatggagagtgataaga

SEQ ID NO: 71076 - DNA, 20 bp, Artificial Sequence
  Description of Artificial Sequence: Synthetic oligonucleotide
  Target: LAMA2; (-) strand; PAM type: NRG; PAM sequence: AAG
agaaaacaatggagagtgat

SEQ ID NO: 71077 - DNA, 20 bp, Artificial Sequence
  Description of Artificial Sequence: Synthetic oligonucleotide
  Target: LAMA2; (-) strand; PAM type: NRG; PAM sequence: GAG
cttatcaagaaaacaatgga

SEQ ID NO: 71078 - DNA, 20 bp, Artificial Sequence
  Description of Artificial Sequence: Synthetic oligonucleotide
  Target: LAMA2; (-) strand; PAM type: NRG; PAM sequence: GAG
atcttatcaagaaaacaatg

SEQ ID NO: 71079 - DNA, 20 bp, Artificial Sequence
  Description of Artificial Sequence: Synthetic oligonucleotide
  Target: LAMA2; (-) strand; PAM type: NRG; PAM sequence: TGG
tcatcttatcaagaaaacaa

SEQ ID NO: 71080 - DNA, 20 bp, Artificial Sequence
  Description of Artificial Sequence: Synthetic oligonucleotide
  Target: LAMA2; (-) strand; PAM type: NRG; PAM sequence: AAG
gaccctttgttcatcttatc

SEQ ID NO: 71081 - DNA, 20 bp, Artificial Sequence
  Description of Artificial Sequence: Synthetic oligonucleotide
  Target: LAMA2; (-) strand; PAM type: NRG; PAM sequence: AGG
taacaatacgctatatgaat

SEQ ID NO: 71082 - DNA, 20 bp, Artificial Sequence
  Description of Artificial Sequence: Synthetic oligonucleotide
  Target: LAMA2; (-) strand; PAM type: NRG; PAM sequence: TAG
ataacaatacgctatatgaa

SEQ ID NO: 71083 - DNA, 20 bp, Artificial Sequence
  Description of Artificial Sequence: Synthetic oligonucleotide
  Target: LAMA2; (-) strand; PAM type: NRG; PAM sequence: AAG
ttagcacctaattcatttct

SEQ ID NO: 71084 - DNA, 20 bp, Artificial Sequence
  Description of Artificial Sequence: Synthetic oligonucleotide
  Target: LAMA2; (-) strand; PAM type: NRG; PAM sequence: TAG
ccagctagctaaaacagagt

SEQ ID NO: 71085 - DNA, 20 bp, Artificial Sequence
  Description of Artificial Sequence: Synthetic oligonucleotide
  Target: LAMA2; (-) strand; PAM type: NRG; PAM sequence: GAG
aagtccagctagctaaaaca

SEQ ID NO: 71086 - DNA, 20 bp, Artificial Sequence
  Description of Artificial Sequence: Synthetic oligonucleotide
  Target: LAMA2; (-) strand; PAM type: NRG; PAM sequence: CAG
ttaagtccagctagctaaaa

SEQ ID NO: 71087 - DNA, 20 bp, Artificial Sequence
  Description of Artificial Sequence: Synthetic oligonucleotide
  Target: LAMA2; (-) strand; PAM type: NRG; PAM sequence: TAG
ttttcatcattaagtccagc

SEQ ID NO: 71088 - DNA, 20 bp, Artificial Sequence
  Description of Artificial Sequence: Synthetic oligonucleotide
  Target: LAMA2; (-) strand; PAM type: NRG; PAM sequence: CAG
catattttcatcattaagtc

SEQ ID NO: 71089 - DNA, 20 bp, Artificial Sequence
  Description of Artificial Sequence: Synthetic oligonucleotide
  Target: LAMA2; (-) strand; PAM type: NRG; PAM sequence: AAG
tgatccatattttcatcatt

SEQ ID NO: 71090 - DNA, 20 bp, Artificial Sequence
  Description of Artificial Sequence: Synthetic oligonucleotide
  Target: LAMA2; (-) strand; PAM type: NRG; PAM sequence: AAG
ggagcaatgtattattttaa

SEQ ID NO: 71091 - DNA, 20 bp, Artificial Sequence
  Description of Artificial Sequence: Synthetic oligonucleotide
  Target: LAMA2; (-) strand; PAM type: NRG; PAM sequence: GAG
acacaccatcagcacagtgg

SEQ ID NO: 71092 - DNA, 20 bp, Artificial Sequence
  Description of Artificial Sequence: Synthetic oligonucleotide
  Target: LAMA2; (-) strand; PAM type: NRG; PAM sequence: GGG
gcacacaccatcagcacagt

SEQ ID NO: 71093 - DNA, 20 bp, Artificial Sequence
  Description of Artificial Sequence: Synthetic oligonucleotide
  Target: LAMA2; (-) strand; PAM type: NRG; PAM sequence: TGG
tgcacacaccatcagcacag

SEQ ID NO: 71094 - DNA, 20 bp, Artificial Sequence
  Description of Artificial Sequence: Synthetic oligonucleotide
  Target: LAMA2; (-) strand; PAM type: NRG; PAM sequence: CAG
aagtgcacacaccatcagca

SEQ ID NO: 71095 - DNA, 20 bp, Artificial Sequence
  Description of Artificial Sequence: Synthetic oligonucleotide
  Target: LAMA2; (-) strand; PAM type: NRG; PAM sequence: CAG
cctttaagtgcacacaccat

SEQ ID NO: 71096 - DNA, 20 bp, Artificial Sequence
  Description of Artificial Sequence: Synthetic oligonucleotide
  Target: LAMA2; (-) strand; PAM type: NRG; PAM sequence: AAG
cttgttatccaagaaccttt

SEQ ID NO: 71097 - DNA, 20 bp, Artificial Sequence
  Description of Artificial Sequence: Synthetic oligonucleotide
  Target: LAMA2; (-) strand; PAM type: NRG; PAM sequence: AAG
gctcaagagccttgttatcc

SEQ ID NO: 71098 - DNA, 20 bp, Artificial Sequence
  Description of Artificial Sequence: Synthetic oligonucleotide
  Target: LAMA2; (-) strand; PAM type: NRG; PAM sequence: GAG
atgagaggcaatttgctcaa

SEQ ID NO: 71099 - DNA, 20 bp, Artificial Sequence
  Description of Artificial Sequence: Synthetic oligonucleotide
  Target: LAMA2; (-) strand; PAM type: NRG; PAM sequence: AAG
taatgagaggcaatttgctc

SEQ ID NO: 71100 - DNA, 20 bp, Artificial Sequence
  Description of Artificial Sequence: Synthetic oligonucleotide
  Target: LAMA2; (-) strand; PAM type: NRG; PAM sequence: AGG
tctcagctctcagtaatgag

SEQ ID NO: 71101 - DNA, 20 bp, Artificial Sequence
  Description of Artificial Sequence: Synthetic oligonucleotide
  Target: LAMA2; (-) strand; PAM type: NRG; PAM sequence: GAG
ttctcagctctcagtaatga

SEQ ID NO: 71102 - DNA, 20 bp, Artificial Sequence
  Description of Artificial Sequence: Synthetic oligonucleotide
  Target: LAMA2; (-) strand; PAM type: NRG; PAM sequence: GAG
ctttctcagctctcagtaat

SEQ ID NO: 71103 - DNA, 20 bp, Artificial Sequence
  Description of Artificial Sequence: Synthetic oligonucleotide
  Target: LAMA2; (-) strand; PAM type: NRG; PAM sequence: CAG
gtcaaaactttctcagctct

SEQ ID NO: 71104 - DNA, 20 bp, Artificial Sequence
  Description of Artificial Sequence: Synthetic oligonucleotide
  Target: LAMA2; (-) strand; PAM type: NRG; PAM sequence: CAG
agcaactgtcaaaactttct

SEQ ID NO: 71105 - DNA, 20 bp, Artificial Sequence
  Description of Artificial Sequence: Synthetic oligonucleotide
  Target: LAMA2; (-) strand; PAM type: NRG; PAM sequence: AAG
gtcacccaagtttaacttga

SEQ ID NO: 71106 - DNA, 20 bp, Artificial Sequence
  Description of Artificial Sequence: Synthetic oligonucleotide
  Target: LAMA2; (-) strand; PAM type: NRG; PAM sequence: AAG
gttacttcatttagtcaccc

SEQ ID NO: 71107 - DNA, 20 bp, Artificial Sequence
  Description of Artificial Sequence: Synthetic oligonucleotide
  Target: LAMA2; (-) strand; PAM type: NRG; PAM sequence: TAG
acaaagcttgttacttcatt

SEQ ID NO: 71108 - DNA, 20 bp, Artificial Sequence
  Description of Artificial Sequence: Synthetic oligonucleotide
  Target: LAMA2; (-) strand; PAM type: NRG; PAM sequence: AAG
atcaattttgtataactaca

SEQ ID NO: 71109 - DNA, 20 bp, Artificial Sequence
  Description of Artificial Sequence: Synthetic oligonucleotide
  Target: LAMA2; (-) strand; PAM type: NRG; PAM sequence: CGG
agacaaacttgaacaacttc

SEQ ID NO: 71110 - DNA, 20 bp, Artificial Sequence
  Description of Artificial Sequence: Synthetic oligonucleotide
  Target: LAMA2; (-) strand; PAM type: NRG; PAM sequence: AAG
gaaggcacccaggcctatgc

SEQ ID NO: 71111 - DNA, 20 bp, Artificial Sequence
  Description of Artificial Sequence: Synthetic oligonucleotide
  Target: LAMA2; (-) strand; PAM type: NRG; PAM sequence: AGG
attaagcatagaaggcaccc

SEQ ID NO: 71112 - DNA, 20 bp, Artificial Sequence
  Description of Artificial Sequence: Synthetic oligonucleotide
  Target: LAMA2; (-) strand; PAM type: NRG; PAM sequence: CAG
gattaagcatagaaggcacc

SEQ ID NO: 71113 - DNA, 20 bp, Artificial Sequence
  Description of Artificial Sequence: Synthetic oligonucleotide
  Target: LAMA2; (-) strand; PAM type: NRG; PAM sequence: AGG
agaaagagattaagcataga

SEQ ID NO: 71114 - DNA, 20 bp, Artificial Sequence
  Description of Artificial Sequence: Synthetic oligonucleotide
  Target: LAMA2; (-) strand; PAM type: NRG; PAM sequence: AAG
aagaaagagattaagcatag

SEQ ID NO: 71115 - DNA, 20 bp, Artificial Sequence
  Description of Artificial Sequence: Synthetic oligonucleotide
  Target: LAMA2; (-) strand; PAM type: NRG; PAM sequence: TAG
aggaagaaagagattaagca

SEQ ID NO: 71116 - DNA, 20 bp, Artificial Sequence
  Description of Artificial Sequence: Synthetic oligonucleotide
  Target: LAMA2; (-) strand; PAM type: NRG; PAM sequence: AAG
agagaaggaagaaagagatt

SEQ ID NO: 71117 - DNA, 20 bp, Artificial Sequence
  Description of Artificial Sequence: Synthetic oligonucleotide
  Target: LAMA2; (-) strand; PAM type: NRG; PAM sequence: GAG
ttgtgaagagaaggaagaaa

SEQ ID NO: 71118 - DNA, 20 bp, Artificial Sequence
  Description of Artificial Sequence: Synthetic oligonucleotide
  Target: LAMA2; (-) strand; PAM type: NRG; PAM sequence: AAG
tattgtgaagagaaggaaga

SEQ ID NO: 71119 - DNA, 20 bp, Artificial Sequence
  Description of Artificial Sequence: Synthetic oligonucleotide
  Target: LAMA2; (-) strand; PAM type: NRG; PAM sequence: AAG
tgaatattgtgaagagaagg

SEQ ID NO: 71120 - DNA, 20 bp, Artificial Sequence
  Description of Artificial Sequence: Synthetic oligonucleotide
  Target: LAMA2; (-) strand; PAM type: NRG; PAM sequence: AGG
acctgaatattgtgaagaga

SEQ ID NO: 71121 - DNA, 20 bp, Artificial Sequence
  Description of Artificial Sequence: Synthetic oligonucleotide
  Target: LAMA2; (-) strand; PAM type: NRG; PAM sequence: AAG
gacctgaatattgtgaagag

SEQ ID NO: 71122 - DNA, 20 bp, Artificial Sequence
  Description of Artificial Sequence: Synthetic oligonucleotide
  Target: LAMA2; (-) strand; PAM type: NRG; PAM sequence: GAG
cctgacctgaatattgtgaa

SEQ ID NO: 71123 - DNA, 20 bp, Artificial Sequence
  Description of Artificial Sequence: Synthetic oligonucleotide
  Target: LAMA2; (-) strand; PAM type: NRG; PAM sequence: AAG
agcctgacctgaatattgtg

SEQ ID NO: 71124 - DNA, 20 bp, Artificial Sequence
  Description of Artificial Sequence: Synthetic oligonucleotide
  Target: LAMA2; (-) strand; PAM type: NRG; PAM sequence: CAG
cgattcctgattaataactt

SEQ ID NO: 71125 - DNA, 20 bp, Artificial Sequence
  Description of Artificial Sequence: Synthetic oligonucleotide
  Target: LAMA2; (-) strand; PAM type: NRG; PAM sequence: TGG
gcctaaataatttgaggtgc

SEQ ID NO: 71126 - DNA, 20 bp, Artificial Sequence
  Description of Artificial Sequence: Synthetic oligonucleotide
  Target: LAMA2; (-) strand; PAM type: NRG; PAM sequence: AGG
ttgcaagcctaaataatttg

SEQ ID NO: 71127 - DNA, 20 bp, Artificial Sequence
  Description of Artificial Sequence: Synthetic oligonucleotide
  Target: LAMA2; (-) strand; PAM type: NRG; PAM sequence: GAG
attgcaagcctaaataattt

SEQ ID NO: 71128 - DNA, 20 bp, Artificial Sequence
  Description of Artificial Sequence: Synthetic oligonucleotide
  Target: LAMA2; (-) strand; PAM type: NRG; PAM sequence: AAG
ccactttccatcctaattgc

SEQ ID NO: 71129 - DNA, 20 bp, Artificial Sequence
  Description of Artificial Sequence: Synthetic oligonucleotide
  Target: LAMA2; (-) strand; PAM type: NRG; PAM sequence: TGG
catacaaataggatggaatg

SEQ ID NO: 71130 - DNA, 20 bp, Artificial Sequence
  Description of Artificial Sequence: Synthetic oligonucleotide
  Target: LAMA2; (-) strand; PAM type: NRG; PAM sequence: TGG
atttaggcatacaaatagga

SEQ ID NO: 71131 - DNA, 20 bp, Artificial Sequence
  Description of Artificial Sequence: Synthetic oligonucleotide
  Target: LAMA2; (-) strand; PAM type: NRG; PAM sequence: AGG
cattatttaggcatacaaat

SEQ ID NO: 71132 - DNA, 20 bp, Artificial Sequence
  Description of Artificial Sequence: Synthetic oligonucleotide
  Target: LAMA2; (-) strand; PAM type: NRG; PAM sequence: TAG
acattatttaggcatacaaa

SEQ ID NO: 71133 - DNA, 20 bp, Artificial Sequence
  Description of Artificial Sequence: Synthetic oligonucleotide
  Target: LAMA2; (-) strand; PAM type: NRG; PAM sequence: AGG
atcacccctgcacattattt

SEQ ID NO: 71134 - DNA, 20 bp, Artificial Sequence
  Description of Artificial Sequence: Synthetic oligonucleotide
  Target: LAMA2; (-) strand; PAM type: NRG; PAM sequence: TAG
catcacccctgcacattatt

SEQ ID NO: 71135 - DNA, 20 bp, Artificial Sequence
  Description of Artificial Sequence: Synthetic oligonucleotide
  Target: LAMA2; (-) strand; PAM type: NRG; PAM sequence: TGG
accatgacctttacagtgta

SEQ ID NO: 71136 - DNA, 20 bp, Artificial Sequence
  Description of Artificial Sequence: Synthetic oligonucleotide
  Target: LAMA2; (-) strand; PAM type: NRG; PAM sequence: CAG
tataaaaaccatgaccttta

SEQ ID NO: 71137 - DNA, 20 bp, Artificial Sequence
  Description of Artificial Sequence: Synthetic oligonucleotide
  Target: LAMA2; (-) strand; PAM type: NRG; PAM sequence: CAG
tggctgggggcttccccaca

SEQ ID NO: 71138 - DNA, 20 bp, Artificial Sequence
  Description of Artificial Sequence: Synthetic oligonucleotide
  Target: LAMA2; (-) strand; PAM type: NRG; PAM sequence: GGG
tgatctggcccactggctgg

SEQ ID NO: 71139 - DNA, 20 bp, Artificial Sequence
  Description of Artificial Sequence: Synthetic oligonucleotide
  Target: LAMA2; (-) strand; PAM type: NRG; PAM sequence: GGG
ctgatctggcccactggctg

SEQ ID NO: 71140 - DNA, 20 bp, Artificial Sequence
  Description of Artificial Sequence: Synthetic oligonucleotide
  Target: LAMA2; (-) strand; PAM type: NRG; PAM sequence: GGG
gctgatctggcccactggct

SEQ ID NO: 71141 - DNA, 20 bp, Artificial Sequence
  Description of Artificial Sequence: Synthetic oligonucleotide
  Target: LAMA2; (-) strand; PAM type: NRG; PAM sequence: TGG
tgctgatctggcccactggc

SEQ ID NO: 71142 - DNA, 20 bp, Artificial Sequence
  Description of Artificial Sequence: Synthetic oligonucleotide
  Target: LAMA2; (-) strand; PAM type: NRG; PAM sequence: TGG
cttgtgctgatctggcccac

SEQ ID NO: 71143 - DNA, 20 bp, Artificial Sequence
  Description of Artificial Sequence: Synthetic oligonucleotide
  Target: LAMA2; (-) strand; PAM type: NRG; PAM sequence: TGG
gaaaatgtcttgtgctgatc

SEQ ID NO: 71144 - DNA, 20 bp, Artificial Sequence
  Description of Artificial Sequence: Synthetic oligonucleotide
  Target: LAMA2; (-) strand; PAM type: NRG; PAM sequence: AGG
ggtggcaaatggcatccatt

SEQ ID NO: 71145 - DNA, 20 bp, Artificial Sequence
  Description of Artificial Sequence: Synthetic oligonucleotide
  Target: LAMA2; (-) strand; PAM type: NRG; PAM sequence: TAG
tggtggcaaatggcatccat

SEQ ID NO: 71146 - DNA, 20 bp, Artificial Sequence
  Description of Artificial Sequence: Synthetic oligonucleotide
  Target: LAMA2; (-) strand; PAM type: NRG; PAM sequence: TGG
gtactcatgctggtggcaaa

SEQ ID NO: 71147 - DNA, 20 bp, Artificial Sequence
  Description of Artificial Sequence: Synthetic oligonucleotide
  Target: LAMA2; (-) strand; PAM type: NRG; PAM sequence: TGG
ggagattgtactcatgctgg

SEQ ID NO: 71148 - DNA, 20 bp, Artificial Sequence
  Description of Artificial Sequence: Synthetic oligonucleotide
  Target: LAMA2; (-) strand; PAM type: NRG; PAM sequence: TGG
gagggagattgtactcatgc

SEQ ID NO: 71149 - DNA, 20 bp, Artificial Sequence
  Description of Artificial Sequence: Synthetic oligonucleotide
  Target: LAMA2; (-) strand; PAM type: NRG; PAM sequence: GAG
aacctagacactggaggagg

SEQ ID NO: 71150 - DNA, 20 bp, Artificial Sequence
  Description of Artificial Sequence: Synthetic oligonucleotide
  Target: LAMA2; (-) strand; PAM type: NRG; PAM sequence: GGG
tgaacctagacactggagga

SEQ ID NO: 71151 - DNA, 20 bp, Artificial Sequence
  Description of Artificial Sequence: Synthetic oligonucleotide
  Target: LAMA2; (-) strand; PAM type: NRG; PAM sequence: AGG
atgaacctagacactggagg

SEQ ID NO: 71152 - DNA, 20 bp, Artificial Sequence
  Description of Artificial Sequence: Synthetic oligonucleotide
  Target: LAMA2; (-) strand; PAM type: NRG; PAM sequence: GAG
aatgaacctagacactggag

SEQ ID NO: 71153 - DNA, 20 bp, Artificial Sequence
  Description of Artificial Sequence: Synthetic oligonucleotide
  Target: LAMA2; (-) strand; PAM type: NRG; PAM sequence: AGG
aaaatgaacctagacactgg

SEQ ID NO: 71154 - DNA, 20 bp, Artificial Sequence
  Description of Artificial Sequence: Synthetic oligonucleotide
  Target: LAMA2; (-) strand; PAM type: NRG; PAM sequence: GAG
caaaatgaacctagacactg

SEQ ID NO: 71155 - DNA, 20 bp, Artificial Sequence
  Description of Artificial Sequence: Synthetic oligonucleotide
  Target: LAMA2; (-) strand; PAM type: NRG; PAM sequence: TGG
accaaaatgaacctagacac

SEQ ID NO: 71156 - DNA, 20 bp, Artificial Sequence
  Description of Artificial Sequence: Synthetic oligonucleotide
  Target: LAMA2; (-) strand; PAM type: NRG; PAM sequence: TAG
agccctcaccaaaatgaacc

SEQ ID NO: 71157 - DNA, 20 bp, Artificial Sequence
  Description of Artificial Sequence: Synthetic oligonucleotide
  Target: LAMA2; (-) strand; PAM type: NRG; PAM sequence: CAG
ctgtggctcttgaatatatg

SEQ ID NO: 71158 - DNA, 20 bp, Artificial Sequence
  Description of Artificial Sequence: Synthetic oligonucleotide
  Target: LAMA2; (-) strand; PAM type: NRG; PAM sequence: TGG
ttgctccagccagctttctg

SEQ ID NO: 71159 - DNA, 20 bp, Artificial Sequence
  Description of Artificial Sequence: Synthetic oligonucleotide
  Target: LAMA2; (-) strand; PAM type: NRG; PAM sequence: CAG
accagcttgtttgctccagc

SEQ ID NO: 71160 - DNA, 20 bp, Artificial Sequence
  Description of Artificial Sequence: Synthetic oligonucleotide
  Target: LAMA2; (-) strand; PAM type: NRG; PAM sequence: CAG
atccaccagcttgtttgctc

SEQ ID NO: 71161 - DNA, 20 bp, Artificial Sequence
  Description of Artificial Sequence: Synthetic oligonucleotide
  Target: LAMA2; (-) strand; PAM type: NRG; PAM sequence: CAG
aggtctaccgtgcaatccac

SEQ ID NO: 71162 - DNA, 20 bp, Artificial Sequence
  Description of Artificial Sequence: Synthetic oligonucleotide
  Target: LAMA2; (-) strand; PAM type: NRG; PAM sequence: AGG
ggcccatatgggtggaaggc

SEQ ID NO: 71163 - DNA, 20 bp, Artificial Sequence
  Description of Artificial Sequence: Synthetic oligonucleotide
  Target: LAMA2; (-) strand; PAM type: NRG; PAM sequence: CAG
aggcccatatgggtggaagg

SEQ ID NO: 71164 - DNA, 20 bp, Artificial Sequence
  Description of Artificial Sequence: Synthetic oligonucleotide
  Target: LAMA2; (-) strand; PAM type: NRG; PAM sequence: AGG
aggaggcccatatgggtgga

SEQ ID NO: 71165 - DNA, 20 bp, Artificial Sequence
  Description of Artificial Sequence: Synthetic oligonucleotide
  Target: LAMA2; (-) strand; PAM type: NRG; PAM sequence: AAG
gaggaggcccatatgggtgg

SEQ ID NO: 71166 - DNA, 20 bp, Artificial Sequence
  Description of Artificial Sequence: Synthetic oligonucleotide
  Target: LAMA2; (-) strand; PAM type: NRG; PAM sequence: TGG
cccgaggaggcccatatggg

SEQ ID NO: 71167 - DNA, 20 bp, Artificial Sequence
  Description of Artificial Sequence: Synthetic oligonucleotide
  Target: LAMA2; (-) strand; PAM type: NRG; PAM sequence: GGG
tatcccgaggaggcccatat

SEQ ID NO: 71168 - DNA, 20 bp, Artificial Sequence
  Description of Artificial Sequence: Synthetic oligonucleotide
  Target: LAMA2; (-) strand; PAM type: NRG; PAM sequence: TGG
atatcccgaggaggcccata

SEQ ID NO: 71169 - DNA, 20 bp, Artificial Sequence
  Description of Artificial Sequence: Synthetic oligonucleotide
  Target: LAMA2; (-) strand; PAM type: NRG; PAM sequence: AGG
cagttcctcatatcccgagg

SEQ ID NO: 71170 - DNA, 20 bp, Artificial Sequence
  Description of Artificial Sequence: Synthetic oligonucleotide
  Target: LAMA2; (-) strand; PAM type: NRG; PAM sequence: GAG
ccagttcctcatatcccgag

SEQ ID NO: 71171 - DNA, 20 bp, Artificial Sequence
  Description of Artificial Sequence: Synthetic oligonucleotide
  Target: LAMA2; (-) strand; PAM type: NRG; PAM sequence: AGG
caccagttcctcatatcccg

SEQ ID NO: 71172 - DNA, 20 bp, Artificial Sequence
  Description of Artificial Sequence: Synthetic oligonucleotide
  Target: LAMA2; (-) strand; PAM type: NRG; PAM sequence: GAG
ccaccagttcctcatatccc

SEQ ID NO: 71173 - DNA, 20 bp, Artificial Sequence
  Description of Artificial Sequence: Synthetic oligonucleotide
  Target: LAMA2; (-) strand; PAM type: NRG; PAM sequence: CAG
cactgagcccctgccgccac

SEQ ID NO: 71174 - DNA, 20 bp, Artificial Sequence
  Description of Artificial Sequence: Synthetic oligonucleotide
  Target: LAMA2; (-) strand; PAM type: NRG; PAM sequence: GAG
gtgatataagctgcagcact

SEQ ID NO: 71175 - DNA, 20 bp, Artificial Sequence
  Description of Artificial Sequence: Synthetic oligonucleotide
  Target: LAMA2; (-) strand; PAM type: NRG; PAM sequence: CAG
ccatttggtgatataagctg

SEQ ID NO: 71176 - DNA, 20 bp, Artificial Sequence
  Description of Artificial Sequence: Synthetic oligonucleotide
  Target: LAMA2; (-) strand; PAM type: NRG; PAM sequence: AAG
tccatgccatttggtgatat

SEQ ID NO: 71177 - DNA, 20 bp, Artificial Sequence
  Description of Artificial Sequence: Synthetic oligonucleotide
  Target: LAMA2; (-) strand; PAM type: NRG; PAM sequence: TGG
agaaataagtccatgccatt

SEQ ID NO: 71178 - DNA, 20 bp, Artificial Sequence
  Description of Artificial Sequence: Synthetic oligonucleotide
  Target: LAMA2; (-) strand; PAM type: NRG; PAM sequence: AAG
atattagtgagggtagaaat

SEQ ID NO: 71179 - DNA, 20 bp, Artificial Sequence
  Description of Artificial Sequence: Synthetic oligonucleotide
  Target: LAMA2; (-) strand; PAM type: NRG; PAM sequence: TAG
ctgctgtatattagtgaggg

SEQ ID NO: 71180 - DNA, 20 bp, Artificial Sequence
  Description of Artificial Sequence: Synthetic oligonucleotide
  Target: LAMA2; (-) strand; PAM type: NRG; PAM sequence: GGG
cagctgctgtatattagtga

SEQ ID NO: 71181 - DNA, 20 bp, Artificial Sequence
  Description of Artificial Sequence: Synthetic oligonucleotide
  Target: LAMA2; (-) strand; PAM type: NRG; PAM sequence: AGG
tcagctgctgtatattagtg

SEQ ID NO: 71182 - DNA, 20 bp, Artificial Sequence
  Description of Artificial Sequence: Synthetic oligonucleotide
  Target: LAMA2; (-) strand; PAM type: NRG; PAM sequence: GAG
ttcagctgctgtatattagt

SEQ ID NO: 71183 - DNA, 20 bp, Artificial Sequence
  Description of Artificial Sequence: Synthetic oligonucleotide
  Target: LAMA2; (-) strand; PAM type: NRG; PAM sequence: TAG
gacattcagctgctgtatat

SEQ ID NO: 71184 - DNA, 20 bp, Artificial Sequence
  Description of Artificial Sequence: Synthetic oligonucleotide
  Target: LAMA2; (-) strand; PAM type: NRG; PAM sequence: CAG
attaactcaggactgacatt

SEQ ID NO: 71185 - DNA, 20 bp, Artificial Sequence
  Description of Artificial Sequence: Synthetic oligonucleotide
  Target: LAMA2; (-) strand; PAM type: NRG; PAM sequence: AGG
ctgagaaatattattaactc

SEQ ID NO: 71186 - DNA, 20 bp, Artificial Sequence
  Description of Artificial Sequence: Synthetic oligonucleotide
  Target: LAMA2; (-) strand; PAM type: NRG; PAM sequence: CAG
cctgagaaatattattaact

SEQ ID NO: 71187 - DNA, 20 bp, Artificial Sequence
  Description of Artificial Sequence: Synthetic oligonucleotide
  Target: LAMA2; (-) strand; PAM type: NRG; PAM sequence: GAG
atagtgctctgagacttcct

SEQ ID NO: 71188 - DNA, 20 bp, Artificial Sequence
  Description of Artificial Sequence: Synthetic oligonucleotide
  Target: LAMA2; (-) strand; PAM type: NRG; PAM sequence: GAG
ccattctctgatagtgctct

SEQ ID NO: 71189 - DNA, 20 bp, Artificial Sequence
  Description of Artificial Sequence: Synthetic oligonucleotide
  Target: LAMA2; (-) strand; PAM type: NRG; PAM sequence: TAG
cttgccctgccattctctga

SEQ ID NO: 71190 - DNA, 20 bp, Artificial Sequence
  Description of Artificial Sequence: Synthetic oligonucleotide
  Target: LAMA2; (-) strand; PAM type: NRG; PAM sequence: TAG
agcatgattgatcagtgtgg

SEQ ID NO: 71191 - DNA, 20 bp, Artificial Sequence
  Description of Artificial Sequence: Synthetic oligonucleotide
  Target: LAMA2; (-) strand; PAM type: NRG; PAM sequence: TGG
taaagcatgattgatcagtg

SEQ ID NO: 71192 - DNA, 20 bp, Artificial Sequence
  Description of Artificial Sequence: Synthetic oligonucleotide
  Target: LAMA2; (-) strand; PAM type: NRG; PAM sequence: CAG
tttcctaaagcatgattgat

SEQ ID NO: 71193 - DNA, 20 bp, Artificial Sequence
  Description of Artificial Sequence: Synthetic oligonucleotide
  Target: LAMA2; (-) strand; PAM type: NRG; PAM sequence: AAG
gcacaggattaattttccta

SEQ ID NO: 71194 - DNA, 20 bp, Artificial Sequence
  Description of Artificial Sequence: Synthetic oligonucleotide
  Target: LAMA2; (-) strand; PAM type: NRG; PAM sequence: AGG
tccccaggggattcatgcac

SEQ ID NO: 71195 - DNA, 20 bp, Artificial Sequence
  Description of Artificial Sequence: Synthetic oligonucleotide
  Target: LAMA2; (-) strand; PAM type: NRG; PAM sequence: CAG
atccccaggggattcatgca

SEQ ID NO: 71196 - DNA, 20 bp, Artificial Sequence
  Description of Artificial Sequence: Synthetic oligonucleotide
  Target: LAMA2; (-) strand; PAM type: NRG; PAM sequence: GGG
tttgaggctaagatccccag

SEQ ID NO: 71197 - DNA, 20 bp, Artificial Sequence
  Description of Artificial Sequence: Synthetic oligonucleotide
  Target: LAMA2; (-) strand; PAM type: NRG; PAM sequence: GGG
ttttgaggctaagatcccca

SEQ ID NO: 71198 - DNA, 20 bp, Artificial Sequence
  Description of Artificial Sequence: Synthetic oligonucleotide
  Target: LAMA2; (-) strand; PAM type: NRG; PAM sequence: AGG
attttgaggctaagatcccc

SEQ ID NO: 71199 - DNA, 20 bp, Artificial Sequence
  Description of Artificial Sequence: Synthetic oligonucleotide
  Target: LAMA2; (-) strand; PAM type: NRG; PAM sequence: CAG
cattttgaggctaagatccc

SEQ ID NO: 71200 - DNA, 20 bp, Artificial Sequence
  Description of Artificial Sequence: Synthetic oligonucleotide
  Target: LAMA2; (-) strand; PAM type: NRG; PAM sequence: AAG
atgcagtccattttgaggct

SEQ ID NO: 71201 - DNA, 20 bp, Artificial Sequence
  Description of Artificial Sequence: Synthetic oligonucleotide
  Target: LAMA2; (-) strand; PAM type: NRG; PAM sequence: AGG
gtggtatgcagtccattttg

SEQ ID NO: 71202 - DNA, 20 bp, Artificial Sequence
  Description of Artificial Sequence: Synthetic oligonucleotide
  Target: LAMA2; (-) strand; PAM type: NRG; PAM sequence: GAG
agtggtatgcagtccatttt

SEQ ID NO: 71203 - DNA, 20 bp, Artificial Sequence
  Description of Artificial Sequence: Synthetic oligonucleotide
  Target: LAMA2; (-) strand; PAM type: NRG; PAM sequence: CAG
tctttatcaggagtggtatg

SEQ ID NO: 71204 - DNA, 20 bp, Artificial Sequence
  Description of Artificial Sequence: Synthetic oligonucleotide
  Target: LAMA2; (-) strand; PAM type: NRG; PAM sequence: TGG
aaagttgtctttatcaggag

SEQ ID NO: 71205 - DNA, 20 bp, Artificial Sequence
  Description of Artificial Sequence: Synthetic oligonucleotide
  Target: LAMA2; (-) strand; PAM type: NRG; PAM sequence: GAG
gacaaagttgtctttatcag

SEQ ID NO: 71206 - DNA, 20 bp, Artificial Sequence
  Description of Artificial Sequence: Synthetic oligonucleotide
  Target: LAMA2; (-) strand; PAM type: NRG; PAM sequence: AGG
aggacaaagttgtctttatc

SEQ ID NO: 71207 - DNA, 20 bp, Artificial Sequence
  Description of Artificial Sequence: Synthetic oligonucleotide
  Target: LAMA2; (-) strand; PAM type: NRG; PAM sequence: CAG
aaggacaaagttgtctttat

SEQ ID NO: 71208 - DNA, 20 bp, Artificial Sequence
  Description of Artificial Sequence: Synthetic oligonucleotide
  Target: LAMA2; (-) strand; PAM type: NRG; PAM sequence: AAG
cttgtgaccaataaaggaca

SEQ ID NO: 71209 - DNA, 20 bp, Artificial Sequence
  Description of Artificial Sequence: Synthetic oligonucleotide
  Target: LAMA2; (-) strand; PAM type: NRG; PAM sequence: AGG
agaactcttgtgaccaataa

SEQ ID NO: 71210 - DNA, 20 bp, Artificial Sequence
  Description of Artificial Sequence: Synthetic oligonucleotide
  Target: LAMA2; (-) strand; PAM type: NRG; PAM sequence: AAG
gagaactcttgtgaccaata

SEQ ID NO: 71211 - DNA, 20 bp, Artificial Sequence
  Description of Artificial Sequence: Synthetic oligonucleotide
  Target: LAMA2; (-) strand; PAM type: NRG; PAM sequence: GAG
tcaatgatcacatgaagggg

SEQ ID NO: 71212 - DNA, 20 bp, Artificial Sequence
  Description of Artificial Sequence: Synthetic oligonucleotide
  Target: LAMA2; (-) strand; PAM type: NRG; PAM sequence: GGG
tttcaatgatcacatgaagg

SEQ ID NO: 71213 - DNA, 20 bp, Artificial Sequence
  Description of Artificial Sequence: Synthetic oligonucleotide
  Target: LAMA2; (-) strand; PAM type: NRG; PAM sequence: GGG
ctttcaatgatcacatgaag

SEQ ID NO: 71214 - DNA, 20 bp, Artificial Sequence
  Description of Artificial Sequence: Synthetic oligonucleotide
  Target: LAMA2; (-) strand; PAM type: NRG; PAM sequence: GGG
actttcaatgatcacatgaa

SEQ ID NO: 71215 - DNA, 20 bp, Artificial Sequence
  Description of Artificial Sequence: Synthetic oligonucleotide
  Target: LAMA2; (-) strand; PAM type: NRG; PAM sequence: AGG
gactttcaatgatcacatga

SEQ ID NO: 71216 - DNA, 20 bp, Artificial Sequence
  Description of Artificial Sequence: Synthetic oligonucleotide
  Target: LAMA2; (-) strand; PAM type: NRG; PAM sequence: AAG
agactttcaatgatcacatg

SEQ ID NO: 71217 - DNA, 20 bp, Artificial Sequence
  Description of Artificial Sequence: Synthetic oligonucleotide
  Target: LAMA2; (-) strand; PAM type: NRG; PAM sequence: TAG
ctcactcttgattgggagac

SEQ ID NO: 71218 - DNA, 20 bp, Artificial Sequence
  Description of Artificial Sequence: Synthetic oligonucleotide
  Target: LAMA2; (-) strand; PAM type: NRG; PAM sequence: GAG
gcagactcactcttgattgg

SEQ ID NO: 71219 - DNA, 20 bp, Artificial Sequence
  Description of Artificial Sequence: Synthetic oligonucleotide
  Target: LAMA2; (-) strand; PAM type: NRG; PAM sequence: GGG
cagcagactcactcttgatt

SEQ ID NO: 71220 - DNA, 20 bp, Artificial Sequence
  Description of Artificial Sequence: Synthetic oligonucleotide
  Target: LAMA2; (-) strand; PAM type: NRG; PAM sequence: TGG
acagcagactcactcttgat

SEQ ID NO: 71221 - DNA, 20 bp, Artificial Sequence
  Description of Artificial Sequence: Synthetic oligonucleotide
  Target: LAMA2; (-) strand; PAM type: NRG; PAM sequence: CAG
tgacctgagtcaatgcacag

SEQ ID NO: 71222 - DNA, 20 bp, Artificial Sequence
  Description of Artificial Sequence: Synthetic oligonucleotide
  Target: LAMA2; (-) strand; PAM type: NRG; PAM sequence: CAG
agatgacctgagtcaatgca

SEQ ID NO: 71223 - DNA, 20 bp, Artificial Sequence
  Description of Artificial Sequence: Synthetic oligonucleotide
  Target: LAMA2; (-) strand; PAM type: NRG; PAM sequence: GAG
cctgtccctggagatgacct

SEQ ID NO: 71224 - DNA, 20 bp, Artificial Sequence
  Description of Artificial Sequence: Synthetic oligonucleotide
  Target: LAMA2; (-) strand; PAM type: NRG; PAM sequence: GAG
ttattgattgcctgtccctg

SEQ ID NO: 71225 - DNA, 20 bp, Artificial Sequence
  Description of Artificial Sequence: Synthetic oligonucleotide
  Target: LAMA2; (-) strand; PAM type: NRG; PAM sequence: TGG
atttattgattgcctgtccc

SEQ ID NO: 71226 - DNA, 20 bp, Artificial Sequence
  Description of Artificial Sequence: Synthetic oligonucleotide
  Target: LAMA2; (-) strand; PAM type: NRG; PAM sequence: AAG
gagaataaaccagaacaata

SEQ ID NO: 71227 - DNA, 20 bp, Artificial Sequence
  Description of Artificial Sequence: Synthetic oligonucleotide
  Target: LAMA2; (-) strand; PAM type: NRG; PAM sequence: CAG
agaataaatggagaataaac

SEQ ID NO: 71228 - DNA, 20 bp, Artificial Sequence
  Description of Artificial Sequence: Synthetic oligonucleotide
  Target: LAMA2; (-) strand; PAM type: NRG; PAM sequence: GAG
gcaatctaaaagaataaatg

SEQ ID NO: 71229 - DNA, 20 bp, Artificial Sequence
  Description of Artificial Sequence: Synthetic oligonucleotide
  Target: LAMA2; (-) strand; PAM type: NRG; PAM sequence: TGG
gtgcaatctaaaagaataaa

SEQ ID NO: 71230 - DNA, 20 bp, Artificial Sequence
  Description of Artificial Sequence: Synthetic oligonucleotide
  Target: LAMA2; (-) strand; PAM type: NRG; PAM sequence: AAG
ttgttctatgtgcaatctaa

SEQ ID NO: 71231 - DNA, 20 bp, Artificial Sequence
  Description of Artificial Sequence: Synthetic oligonucleotide
  Target: LAMA2; (-) strand; PAM type: NRG; PAM sequence: AAG
ttcagctcaaagagtactat

SEQ ID NO: 71232 - DNA, 20 bp, Artificial Sequence
  Description of Artificial Sequence: Synthetic oligonucleotide
  Target: LAMA2; (-) strand; PAM type: NRG; PAM sequence: GAG
atattgctgttcagctcaaa

SEQ ID NO: 71233 - DNA, 20 bp, Artificial Sequence
  Description of Artificial Sequence: Synthetic oligonucleotide
  Target: LAMA2; (-) strand; PAM type: NRG; PAM sequence: AAG
taatattgctgttcagctca

SEQ ID NO: 71234 - DNA, 20 bp, Artificial Sequence
  Description of Artificial Sequence: Synthetic oligonucleotide
  Target: LAMA2; (-) strand; PAM type: NRG; PAM sequence: CAG
aggtaaataatattgctgtt

SEQ ID NO: 71235 - DNA, 20 bp, Artificial Sequence
  Description of Artificial Sequence: Synthetic oligonucleotide
  Target: LAMA2; (-) strand; PAM type: NRG; PAM sequence: AGG
atgctgccatgtttgataac

SEQ ID NO: 71236 - DNA, 20 bp, Artificial Sequence
  Description of Artificial Sequence: Synthetic oligonucleotide
  Target: LAMA2; (-) strand; PAM type: NRG; PAM sequence: CAG
aatgctgccatgtttgataa

SEQ ID NO: 71237 - DNA, 20 bp, Artificial Sequence
  Description of Artificial Sequence: Synthetic oligonucleotide
  Target: LAMA2; (-) strand; PAM type: NRG; PAM sequence: GGG
atccagttgtaaattaggag

SEQ ID NO: 71238 - DNA, 20 bp, Artificial Sequence
  Description of Artificial Sequence: Synthetic oligonucleotide
  Target: LAMA2; (-) strand; PAM type: NRG; PAM sequence: GGG
catccagttgtaaattagga

SEQ ID NO: 71239 - DNA, 20 bp, Artificial Sequence
  Description of Artificial Sequence: Synthetic oligonucleotide
  Target: LAMA2; (-) strand; PAM type: NRG; PAM sequence: AGG
ccatccagttgtaaattagg

SEQ ID NO: 71240 - DNA, 20 bp, Artificial Sequence
  Description of Artificial Sequence: Synthetic oligonucleotide
  Target: LAMA2; (-) strand; PAM type: NRG; PAM sequence: GAG
gccatccagttgtaaattag

SEQ ID NO: 71241 - DNA, 20 bp, Artificial Sequence
  Description of Artificial Sequence: Synthetic oligonucleotide
  Target: LAMA2; (-) strand; PAM type: NRG; PAM sequence: AGG
gcgccatccagttgtaaatt

SEQ ID NO: 71242 - DNA, 20 bp, Artificial Sequence
  Description of Artificial Sequence: Synthetic oligonucleotide
  Target: LAMA2; (-) strand; PAM type: NRG; PAM sequence: TAG
tgcgccatccagttgtaaat

SEQ ID NO: 71243 - DNA, 20 bp, Artificial Sequence
  Description of Artificial Sequence: Synthetic oligonucleotide
  Target: LAMA2; (-) strand; PAM type: NRG; PAM sequence: CAG
aaacttgtggttgcgccatc

SEQ ID NO: 71244 - DNA, 20 bp, Artificial Sequence
  Description of Artificial Sequence: Synthetic oligonucleotide
  Target: LAMA2; (-) strand; PAM type: NRG; PAM sequence: TGG
aatgatttagtaaaaacttg

SEQ ID NO: 71245 - DNA, 20 bp, Artificial Sequence
  Description of Artificial Sequence: Synthetic oligonucleotide
  Target: LAMA2; (-) strand; PAM type: NRG; PAM sequence: TAG
caggcaagttagaaatgatt

SEQ ID NO: 71246 - DNA, 20 bp, Artificial Sequence
  Description of Artificial Sequence: Synthetic oligonucleotide
  Target: LAMA2; (-) strand; PAM type: NRG; PAM sequence: TAG
attgataaaaacaggcaagt

SEQ ID NO: 71247 - DNA, 20 bp, Artificial Sequence
  Description of Artificial Sequence: Synthetic oligonucleotide
  Target: LAMA2; (-) strand; PAM type: NRG; PAM sequence: AAG
ctgaattgataaaaacaggc

SEQ ID NO: 71248 - DNA, 20 bp, Artificial Sequence
  Description of Artificial Sequence: Synthetic oligonucleotide
  Target: LAMA2; (-) strand; PAM type: NRG; PAM sequence: AGG
cttgctgaattgataaaaac

SEQ ID NO: 71249 - DNA, 20 bp, Artificial Sequence
  Description of Artificial Sequence: Synthetic oligonucleotide
  Target: LAMA2; (-) strand; PAM type: NRG; PAM sequence: CAG
acttgctgaattgataaaaa

SEQ ID NO: 71250 - DNA, 20 bp, Artificial Sequence
  Description of Artificial Sequence: Synthetic oligonucleotide
  Target: LAMA2; (-) strand; PAM type: NRG; PAM sequence: AGG
tcactgaaaaataggctttc

SEQ ID NO: 71251 - DNA, 20 bp, Artificial Sequence
  Description of Artificial Sequence: Synthetic oligonucleotide
  Target: LAMA2; (-) strand; PAM type: NRG; PAM sequence: CAG
atcactgaaaaataggcttt

SEQ ID NO: 71252 - DNA, 20 bp, Artificial Sequence
  Description of Artificial Sequence: Synthetic oligonucleotide
  Target: LAMA2; (-) strand; PAM type: NRG; PAM sequence: AGG
caatgacatcactgaaaaat

SEQ ID NO: 71253 - DNA, 20 bp, Artificial Sequence
  Description of Artificial Sequence: Synthetic oligonucleotide
  Target: LAMA2; (-) strand; PAM type: NRG; PAM sequence: TAG
tcaatgacatcactgaaaaa

SEQ ID NO: 71254 - DNA, 20 bp, Artificial Sequence
  Description of Artificial Sequence: Synthetic oligonucleotide
  Target: LAMA2; (-) strand; PAM type: NRG; PAM sequence: AGG
tgagtatgcaaagtaaattt

SEQ ID NO: 71255 - DNA, 20 bp, Artificial Sequence
  Description of Artificial Sequence: Synthetic oligonucleotide
  Target: LAMA2; (-) strand; PAM type: NRG; PAM sequence: TAG
gtgagtatgcaaagtaaatt

SEQ ID NO: 71256 - DNA, 20 bp, Artificial Sequence
  Description of Artificial Sequence: Synthetic oligonucleotide
  Target: LAMA2; (-) strand; PAM type: NRG; PAM sequence: AAG
aatggatgagtgagtatgca

SEQ ID NO: 71257 - DNA, 20 bp, Artificial Sequence
  Description of Artificial Sequence: Synthetic oligonucleotide
  Target: LAMA2; (-) strand; PAM type: NRG; PAM sequence: GAG
ctgtgtgggaatggatgagt

SEQ ID NO: 71258 - DNA, 20 bp, Artificial Sequence
  Description of Artificial Sequence: Synthetic oligonucleotide
  Target: LAMA2; (-) strand; PAM type: NRG; PAM sequence: GAG
gatactgtgtgggaatggat

SEQ ID NO: 71259 - DNA, 20 bp, Artificial Sequence
  Description of Artificial Sequence: Synthetic oligonucleotide
  Target: LAMA2; (-) strand; PAM type: NRG; PAM sequence: TGG
cttaagatactgtgtgggaa

SEQ ID NO: 71260 - DNA, 20 bp, Artificial Sequence
  Description of Artificial Sequence: Synthetic oligonucleotide
  Target: LAMA2; (-) strand; PAM type: NRG; PAM sequence: GGG
taattcttaagatactgtgt

SEQ ID NO: 71261 - DNA, 20 bp, Artificial Sequence
  Description of Artificial Sequence: Synthetic oligonucleotide
  Target: LAMA2; (-) strand; PAM type: NRG; PAM sequence: TGG
ataattcttaagatactgtg

SEQ ID NO: 71262 - DNA, 20 bp, Artificial Sequence
  Description of Artificial Sequence: Synthetic oligonucleotide
  Target: LAMA2; (-) strand; PAM type: NRG; PAM sequence: AAG
gacaaatccacataattctt

SEQ ID NO: 71263 - DNA, 20 bp, Artificial Sequence
  Description of Artificial Sequence: Synthetic oligonucleotide
  Target: LAMA2; (-) strand; PAM type: NRG; PAM sequence: CAG
taaatgggaggaagagaaaa

SEQ ID NO: 71264 - DNA, 20 bp, Artificial Sequence
  Description of Artificial Sequence: Synthetic oligonucleotide
  Target: LAMA2; (-) strand; PAM type: NRG; PAM sequence: GAG
attaaactaaatgggaggaa

SEQ ID NO: 71265 - DNA, 20 bp, Artificial Sequence
  Description of Artificial Sequence: Synthetic oligonucleotide
  Target: LAMA2; (-) strand; PAM type: NRG; PAM sequence: AAG
ccattaaactaaatgggagg

SEQ ID NO: 71266 - DNA, 20 bp, Artificial Sequence
  Description of Artificial Sequence: Synthetic oligonucleotide
  Target: LAMA2; (-) strand; PAM type: NRG; PAM sequence: AGG
cctccattaaactaaatggg

SEQ ID NO: 71267 - DNA, 20 bp, Artificial Sequence
  Description of Artificial Sequence: Synthetic oligonucleotide
  Target: LAMA2; (-) strand; PAM type: NRG; PAM sequence: GAG
acctccattaaactaaatgg

SEQ ID NO: 71268 - DNA, 20 bp, Artificial Sequence
  Description of Artificial Sequence: Synthetic oligonucleotide
  Target: LAMA2; (-) strand; PAM type: NRG; PAM sequence: GGG
ttacctccattaaactaaat

SEQ ID NO: 71269 - DNA, 20 bp, Artificial Sequence
  Description of Artificial Sequence: Synthetic oligonucleotide
  Target: LAMA2; (-) strand; PAM type: NRG; PAM sequence: TGG
cttacctccattaaactaaa

SEQ ID NO: 71270 - DNA, 20 bp, Artificial Sequence
  Description of Artificial Sequence: Synthetic oligonucleotide
  Target: LAMA2; (-) strand; PAM type: NRG; PAM sequence: TGG
atgaagcataaaatatgtct

SEQ ID NO: 71271 - DNA, 20 bp, Artificial Sequence
  Description of Artificial Sequence: Synthetic oligonucleotide
  Target: LAMA2; (-) strand; PAM type: NRG; PAM sequence: AAG
gcactttgttatgatgaatg

SEQ ID NO: 71272 - DNA, 20 bp, Artificial Sequence
  Description of Artificial Sequence: Synthetic oligonucleotide
  Target: LAMA2; (-) strand; PAM type: NRG; PAM sequence: TGG
ctgggttatatacagaattc

SEQ ID NO: 71273 - DNA, 20 bp, Artificial Sequence
  Description of Artificial Sequence: Synthetic oligonucleotide
  Target: LAMA2; (-) strand; PAM type: NRG; PAM sequence: CAG
aggtagacctgggttatata

SEQ ID NO: 71274 - DNA, 20 bp, Artificial Sequence
  Description of Artificial Sequence: Synthetic oligonucleotide
  Target: LAMA2; (-) strand; PAM type: NRG; PAM sequence: GGG
ctttggagtcaggtagacct

SEQ ID NO: 71275 - DNA, 20 bp, Artificial Sequence
  Description of Artificial Sequence: Synthetic oligonucleotide
  Target: LAMA2; (-) strand; PAM type: NRG; PAM sequence: TGG
actttggagtcaggtagacc

SEQ ID NO: 71276 - DNA, 20 bp, Artificial Sequence
  Description of Artificial Sequence: Synthetic oligonucleotide
  Target: LAMA2; (-) strand; PAM type: NRG; PAM sequence: TAG
tttcagactttggagtcagg

SEQ ID NO: 71277 - DNA, 20 bp, Artificial Sequence
  Description of Artificial Sequence: Synthetic oligonucleotide
  Target: LAMA2; (-) strand; PAM type: NRG; PAM sequence: AGG
gaatttcagactttggagtc

SEQ ID NO: 71278 - DNA, 20 bp, Artificial Sequence
  Description of Artificial Sequence: Synthetic oligonucleotide
  Target: LAMA2; (-) strand; PAM type: NRG; PAM sequence: CAG
tgaatttcagactttggagt

SEQ ID NO: 71279 - DNA, 20 bp, Artificial Sequence
  Description of Artificial Sequence: Synthetic oligonucleotide
  Target: LAMA2; (-) strand; PAM type: NRG; PAM sequence: GAG
ttggtgaatttcagactttg

SEQ ID NO: 71280 - DNA, 20 bp, Artificial Sequence
  Description of Artificial Sequence: Synthetic oligonucleotide
  Target: LAMA2; (-) strand; PAM type: NRG; PAM sequence: TGG
acttggtgaatttcagactt

SEQ ID NO: 71281 - DNA, 20 bp, Artificial Sequence
  Description of Artificial Sequence: Synthetic oligonucleotide
  Target: LAMA2; (-) strand; PAM type: NRG; PAM sequence: CAG
caattccacttggtgaattt

SEQ ID NO: 71282 - DNA, 20 bp, Artificial Sequence
  Description of Artificial Sequence: Synthetic oligonucleotide
  Target: LAMA2; (-) strand; PAM type: NRG; PAM sequence: TGG
tgctctgtaccaattccact

SEQ ID NO: 71283 - DNA, 20 bp, Artificial Sequence
  Description of Artificial Sequence: Synthetic oligonucleotide
  Target: LAMA2; (-) strand; PAM type: NRG; PAM sequence: GGG
tggacaccatcctggaatat

SEQ ID NO: 71284 - DNA, 20 bp, Artificial Sequence
  Description of Artificial Sequence: Synthetic oligonucleotide
  Target: LAMA2; (-) strand; PAM type: NRG; PAM sequence: TGG
atggacaccatcctggaata

SEQ ID NO: 71285 - DNA, 20 bp, Artificial Sequence
  Description of Artificial Sequence: Synthetic oligonucleotide
  Target: LAMA2; (-) strand; PAM type: NRG; PAM sequence: TGG
gatatggatggacaccatcc

SEQ ID NO: 71286 - DNA, 20 bp, Artificial Sequence
  Description of Artificial Sequence: Synthetic oligonucleotide
  Target: LAMA2; (-) strand; PAM type: NRG; PAM sequence: TGG
ggaataaataaggatatgga

SEQ ID NO: 71287 - DNA, 20 bp, Artificial Sequence
  Description of Artificial Sequence: Synthetic oligonucleotide
  Target: LAMA2; (-) strand; PAM type: NRG; PAM sequence: TGG
agctggaataaataaggata

SEQ ID NO: 71288 - DNA, 20 bp, Artificial Sequence
  Description of Artificial Sequence: Synthetic oligonucleotide
  Target: LAMA2; (-) strand; PAM type: NRG; PAM sequence: AGG
atagaaagctggaataaata

SEQ ID NO: 71289 - DNA, 20 bp, Artificial Sequence
  Description of Artificial Sequence: Synthetic oligonucleotide
  Target: LAMA2; (-) strand; PAM type: NRG; PAM sequence: AAG
aatagaaagctggaataaat

SEQ ID NO: 71290 - DNA, 20 bp, Artificial Sequence
  Description of Artificial Sequence: Synthetic oligonucleotide
  Target: LAMA2; (-) strand; PAM type: NRG; PAM sequence: TGG
attttcaggaaatagaaagc

SEQ ID NO: 71291 - DNA, 20 bp, Artificial Sequence
  Description of Artificial Sequence: Synthetic oligonucleotide
  Target: LAMA2; (-) strand; PAM type: NRG; PAM sequence: AAG
gttgattttcaggaaataga

SEQ ID NO: 71292 - DNA, 20 bp, Artificial Sequence
  Description of Artificial Sequence: Synthetic oligonucleotide
  Target: LAMA2; (-) strand; PAM type: NRG; PAM sequence: TAG
gtaggttgattttcaggaaa

SEQ ID NO: 71293 - DNA, 20 bp, Artificial Sequence
  Description of Artificial Sequence: Synthetic oligonucleotide
  Target: LAMA2; (-) strand; PAM type: NRG; PAM sequence: AGG
cacacagtaggttgattttc

SEQ ID NO: 71294 - DNA, 20 bp, Artificial Sequence
  Description of Artificial Sequence: Synthetic oligonucleotide
  Target: LAMA2; (-) strand; PAM type: NRG; PAM sequence: CAG
acacacagtaggttgatttt

SEQ ID NO: 71295 - DNA, 20 bp, Artificial Sequence
  Description of Artificial Sequence: Synthetic oligonucleotide
  Target: LAMA2; (-) strand; PAM type: NRG; PAM sequence: AGG
ccttcttctacacacacagt

SEQ ID NO: 71296 - DNA, 20 bp, Artificial Sequence
  Description of Artificial Sequence: Synthetic oligonucleotide
  Target: LAMA2; (-) strand; PAM type: NRG; PAM sequence: TAG
cccttcttctacacacacag

SEQ ID NO: 71297 - DNA, 20 bp, Artificial Sequence
  Description of Artificial Sequence: Synthetic oligonucleotide
  Target: LAMA2; (-) strand; PAM type: NRG; PAM sequence: CAG
ttccccttcttctacacaca

SEQ ID NO: 71298 - DNA, 20 bp, Artificial Sequence
  Description of Artificial Sequence: Synthetic oligonucleotide
  Target: LAMA2; (-) strand; PAM type: NRG; PAM sequence: GAG
aaggatttattacattttta

SEQ ID NO: 71299 - DNA, 20 bp, Artificial Sequence
  Description of Artificial Sequence: Synthetic oligonucleotide
  Target: LAMA2; (-) strand; PAM type: NRG; PAM sequence: TAG
ataaggatttattacatttt

SEQ ID NO: 71300 - DNA, 20 bp, Artificial Sequence
  Description of Artificial Sequence: Synthetic oligonucleotide
  Target: LAMA2; (-) strand; PAM type: NRG; PAM sequence: AGG
tcttgagtcaagtagaaata

SEQ ID NO: 71301 - DNA, 20 bp, Artificial Sequence
  Description of Artificial Sequence: Synthetic oligonucleotide
  Target: LAMA2; (-) strand; PAM type: NRG; PAM sequence: AAG
atcttgagtcaagtagaaat

SEQ ID NO: 71302 - DNA, 20 bp, Artificial Sequence
  Description of Artificial Sequence: Synthetic oligonucleotide
  Target: LAMA2; (-) strand; PAM type: NRG; PAM sequence: TAG
aattaaaatcttgagtcaag

SEQ ID NO: 71303 - DNA, 20 bp, Artificial Sequence
  Description of Artificial Sequence: Synthetic oligonucleotide
  Target: LAMA2; (-) strand; PAM type: NRG; PAM sequence: AAG
ctaaattaaaatcttgagtc

SEQ ID NO: 71304 - DNA, 20 bp, Artificial Sequence
  Description of Artificial Sequence: Synthetic oligonucleotide
  Target: LAMA2; (-) strand; PAM type: NRG; PAM sequence: GAG
actgactaaattaaaatctt

SEQ ID NO: 71305 - DNA, 20 bp, Artificial Sequence
  Description of Artificial Sequence: Synthetic oligonucleotide
  Target: LAMA2; (-) strand; PAM type: NRG; PAM sequence: AAG
gaagctctttcttgtctgag

SEQ ID NO: 71306 - DNA, 20 bp, Artificial Sequence
  Description of Artificial Sequence: Synthetic oligonucleotide
  Target: LAMA2; (-) strand; PAM type: NRG; PAM sequence: GAG
tctgaagctctttcttgtct

SEQ ID NO: 71307 - DNA, 20 bp, Artificial Sequence
  Description of Artificial Sequence: Synthetic oligonucleotide
  Target: LAMA2; (-) strand; PAM type: NRG; PAM sequence: AAG
gaggccaaattggaagtctg

SEQ ID NO: 71308 - DNA, 20 bp, Artificial Sequence
  Description of Artificial Sequence: Synthetic oligonucleotide
  Target: LAMA2; (-) strand; PAM type: NRG; PAM sequence: AAG
aaagcctgaggccaaattgg

SEQ ID NO: 71309 - DNA, 20 bp, Artificial Sequence
  Description of Artificial Sequence: Synthetic oligonucleotide
  Target: LAMA2; (-) strand; PAM type: NRG; PAM sequence: TGG
tccaaagcctgaggccaaat

SEQ ID NO: 71310 - DNA, 20 bp, Artificial Sequence
  Description of Artificial Sequence: Synthetic oligonucleotide
  Target: LAMA2; (-) strand; PAM type: NRG; PAM sequence: AGG
gtttgttattccaaagcctg

SEQ ID NO: 71311 - DNA, 20 bp, Artificial Sequence
  Description of Artificial Sequence: Synthetic oligonucleotide
  Target: LAMA2; (-) strand; PAM type: NRG; PAM sequence: GAG
agtttgttattccaaagcct

SEQ ID NO: 71312 - DNA, 20 bp, Artificial Sequence
  Description of Artificial Sequence: Synthetic oligonucleotide
  Target: LAMA2; (-) strand; PAM type: NRG; PAM sequence: AAG
tctcacagtttgttattcca

SEQ ID NO: 71313 - DNA, 20 bp, Artificial Sequence
  Description of Artificial Sequence: Synthetic oligonucleotide
  Target: LAMA2; (-) strand; PAM type: NRG; PAM sequence: CAG
agtattataaacatgtctca

SEQ ID NO: 71314 - DNA, 20 bp, Artificial Sequence
  Description of Artificial Sequence: Synthetic oligonucleotide
  Target: LAMA2; (-) strand; PAM type: NRG; PAM sequence: AAG
tataccatccatagctgaat

SEQ ID NO: 71315 - DNA, 20 bp, Artificial Sequence
  Description of Artificial Sequence: Synthetic oligonucleotide
  Target: LAMA2; (-) strand; PAM type: NRG; PAM sequence: TAG
gcagtacaatataccatcca

SEQ ID NO: 71316 - DNA, 20 bp, Artificial Sequence
  Description of Artificial Sequence: Synthetic oligonucleotide
  Target: LAMA2; (-) strand; PAM type: NRG; PAM sequence: CAG
cattttctctgttgccagtg

SEQ ID NO: 71317 - DNA, 20 bp, Artificial Sequence
  Description of Artificial Sequence: Synthetic oligonucleotide
  Target: LAMA2; (-) strand; PAM type: NRG; PAM sequence: CAG
gtccacattttctctgttgc

SEQ ID NO: 71318 - DNA, 20 bp, Artificial Sequence
  Description of Artificial Sequence: Synthetic oligonucleotide
  Target: LAMA2; (-) strand; PAM type: NRG; PAM sequence: AAG
attgtgaggagttacataat

SEQ ID NO: 71319 - DNA, 20 bp, Artificial Sequence
  Description of Artificial Sequence: Synthetic oligonucleotide
  Target: LAMA2; (-) strand; PAM type: NRG; PAM sequence: GAG
ttattcaggattattgtgag

SEQ ID NO: 71320 - DNA, 20 bp, Artificial Sequence
  Description of Artificial Sequence: Synthetic oligonucleotide
  Target: LAMA2; (-) strand; PAM type: NRG; PAM sequence: AGG
gtttattcaggattattgtg

SEQ ID NO: 71321 - DNA, 20 bp, Artificial Sequence
  Description of Artificial Sequence: Synthetic oligonucleotide
  Target: LAMA2; (-) strand; PAM type: NRG; PAM sequence: GAG
ggtttattcaggattattgt

SEQ ID NO: 71322 - DNA, 20 bp, Artificial Sequence
  Description of Artificial Sequence: Synthetic oligonucleotide
  Target: LAMA2; (-) strand; PAM type: NRG; PAM sequence: AGG
taatattagctggtttattc

SEQ ID NO: 71323 - DNA, 20 bp, Artificial Sequence
  Description of Artificial Sequence: Synthetic oligonucleotide
  Target: LAMA2; (-) strand; PAM type: NRG; PAM sequence: CAG
ttaatattagctggtttatt

SEQ ID NO: 71324 - DNA, 20 bp, Artificial Sequence
  Description of Artificial Sequence: Synthetic oligonucleotide
  Target: LAMA2; (-) strand; PAM type: NRG; PAM sequence: TGG
ataggaatattaatattagc

SEQ ID NO: 71325 - DNA, 20 bp, Artificial Sequence
  Description of Artificial Sequence: Synthetic oligonucleotide
  Target: LAMA2; (-) strand; PAM type: NRG; PAM sequence: TAG
tgcaataggaatattaatat

SEQ ID NO: 71326 - DNA, 20 bp, Artificial Sequence
  Description of Artificial Sequence: Synthetic oligonucleotide
  Target: LAMA2; (-) strand; PAM type: NRG; PAM sequence: AGG
gtgttcttcaactatgcaat

SEQ ID NO: 71327 - DNA, 20 bp, Artificial Sequence
  Description of Artificial Sequence: Synthetic oligonucleotide
  Target: LAMA2; (-) strand; PAM type: NRG; PAM sequence: TAG
agtgttcttcaactatgcaa

SEQ ID NO: 71328 - DNA, 20 bp, Artificial Sequence
  Description of Artificial Sequence: Synthetic oligonucleotide
  Target: LAMA2; (-) strand; PAM type: NRG; PAM sequence: CAG
cactgaacttttctaaagca

SEQ ID NO: 71329 - DNA, 20 bp, Artificial Sequence
  Description of Artificial Sequence: Synthetic oligonucleotide
  Target: LAMA2; (-) strand; PAM type: NRG; PAM sequence: AAG
caagtcactgaacttttcta

SEQ ID NO: 71330 - DNA, 20 bp, Artificial Sequence
  Description of Artificial Sequence: Synthetic oligonucleotide
  Target: LAMA2; (-) strand; PAM type: NRG; PAM sequence: AAG
taagctttagaaagaaggcc

SEQ ID NO: 71331 - DNA, 20 bp, Artificial Sequence
  Description of Artificial Sequence: Synthetic oligonucleotide
  Target: LAMA2; (-) strand; PAM type: NRG; PAM sequence: AGG
cataataagctttagaaaga

SEQ ID NO: 71332 - DNA, 20 bp, Artificial Sequence
  Description of Artificial Sequence: Synthetic oligonucleotide
  Target: LAMA2; (-) strand; PAM type: NRG; PAM sequence: AAG
ccataataagctttagaaag

SEQ ID NO: 71333 - DNA, 20 bp, Artificial Sequence
  Description of Artificial Sequence: Synthetic oligonucleotide
  Target: LAMA2; (-) strand; PAM type: NRG; PAM sequence: AAG
tgcccataataagctttaga

SEQ ID NO: 71334 - DNA, 20 bp, Artificial Sequence
  Description of Artificial Sequence: Synthetic oligonucleotide
  Target: LAMA2; (-) strand; PAM type: NRG; PAM sequence: TAG
gccctgcccataataagctt

SEQ ID NO: 71335 - DNA, 20 bp, Artificial Sequence
  Description of Artificial Sequence: Synthetic oligonucleotide
  Target: LAMA2; (-) strand; PAM type: NRG; PAM sequence: AAG
gccccagccctgcccataat

SEQ ID NO: 71336 - DNA, 20 bp, Artificial Sequence
  Description of Artificial Sequence: Synthetic oligonucleotide
  Target: LAMA2; (-) strand; PAM type: NRG; PAM sequence: CAG
tcagactattcatgttgccc

SEQ ID NO: 71337 - DNA, 20 bp, Artificial Sequence
  Description of Artificial Sequence: Synthetic oligonucleotide
  Target: LAMA2; (-) strand; PAM type: NRG; PAM sequence: CAG
agtgtatttgggtctggatt

SEQ ID NO: 71338 - DNA, 20 bp, Artificial Sequence
  Description of Artificial Sequence: Synthetic oligonucleotide
  Target: LAMA2; (-) strand; PAM type: NRG; PAM sequence: TGG
aaagatagtgtatttgggtc

SEQ ID NO: 71339 - DNA, 20 bp, Artificial Sequence
  Description of Artificial Sequence: Synthetic oligonucleotide
  Target: LAMA2; (-) strand; PAM type: NRG; PAM sequence: GGG
ttagaaaagatagtgtattt

SEQ ID NO: 71340 - DNA, 20 bp, Artificial Sequence
  Description of Artificial Sequence: Synthetic oligonucleotide
  Target: LAMA2; (-) strand; PAM type: NRG; PAM sequence: TGG
attagaaaagatagtgtatt

SEQ ID NO: 71341 - DNA, 20 bp, Artificial Sequence
  Description of Artificial Sequence: Synthetic oligonucleotide
  Target: LAMA2; (-) strand; PAM type: NRG; PAM sequence: TAG
cagatacccattagaaaaga

SEQ ID NO: 71342 - DNA, 20 bp, Artificial Sequence
  Description of Artificial Sequence: Synthetic oligonucleotide
  Target: LAMA2; (-) strand; PAM type: NRG; PAM sequence: AAG
tcttcagatacccattagaa

SEQ ID NO: 71343 - DNA, 20 bp, Artificial Sequence
  Description of Artificial Sequence: Synthetic oligonucleotide
  Target: LAMA2; (-) strand; PAM type: NRG; PAM sequence: TAG
ttatgtcttcagatacccat

SEQ ID NO: 71344 - DNA, 20 bp, Artificial Sequence
  Description of Artificial Sequence: Synthetic oligonucleotide
  Target: LAMA2; (-) strand; PAM type: NRG; PAM sequence: CAG
gctccctaggattatgtctt

SEQ ID NO: 71345 - DNA, 20 bp, Artificial Sequence
  Description of Artificial Sequence: Synthetic oligonucleotide
  Target: LAMA2; (-) strand; PAM type: NRG; PAM sequence: AGG
aaaattatcctgagctccct

SEQ ID NO: 71346 - DNA, 20 bp, Artificial Sequence
  Description of Artificial Sequence: Synthetic oligonucleotide
  Target: LAMA2; (-) strand; PAM type: NRG; PAM sequence: TAG
aaaaattatcctgagctccc

SEQ ID NO: 71347 - DNA, 20 bp, Artificial Sequence
  Description of Artificial Sequence: Synthetic oligonucleotide
  Target: LAMA2; (-) strand; PAM type: NRG; PAM sequence: GAG
tatataataaaaattatcct

SEQ ID NO: 71348 - DNA, 20 bp, Artificial Sequence
  Description of Artificial Sequence: Synthetic oligonucleotide
  Target: LAMA2; (-) strand; PAM type: NRG; PAM sequence: GAG
ttgaacctgaactacatttg

SEQ ID NO: 71349 - DNA, 20 bp, Artificial Sequence
  Description of Artificial Sequence: Synthetic oligonucleotide
  Target: LAMA2; (-) strand; PAM type: NRG; PAM sequence: TGG
tcttgaacctgaactacatt

SEQ ID NO: 71350 - DNA, 20 bp, Artificial Sequence
  Description of Artificial Sequence: Synthetic oligonucleotide
  Target: LAMA2; (-) strand; PAM type: NRG; PAM sequence: TAG
ccatagaagccaggagaaga

SEQ ID NO: 71351 - DNA, 20 bp, Artificial Sequence
  Description of Artificial Sequence: Synthetic oligonucleotide
  Target: LAMA2; (-) strand; PAM type: NRG; PAM sequence: AAG
tatcccatagaagccaggag

SEQ ID NO: 71352 - DNA, 20 bp, Artificial Sequence
  Description of Artificial Sequence: Synthetic oligonucleotide
  Target: LAMA2; (-) strand; PAM type: NRG; PAM sequence: GAG
tattatcccatagaagccag

SEQ ID NO: 71353 - DNA, 20 bp, Artificial Sequence
  Description of Artificial Sequence: Synthetic oligonucleotide
  Target: LAMA2; (-) strand; PAM type: NRG; PAM sequence: AGG
tatattatcccatagaagcc

SEQ ID NO: 71354 - DNA, 20 bp, Artificial Sequence
  Description of Artificial Sequence: Synthetic oligonucleotide
  Target: LAMA2; (-) strand; PAM type: NRG; PAM sequence: CAG
ctatattatcccatagaagc

SEQ ID NO: 71355 - DNA, 20 bp, Artificial Sequence
  Description of Artificial Sequence: Synthetic oligonucleotide
  Target: LAMA2; (-) strand; PAM type: NRG; PAM sequence: AAG
ttggctatattatcccatag

SEQ ID NO: 71356 - DNA, 20 bp, Artificial Sequence
  Description of Artificial Sequence: Synthetic oligonucleotide
  Target: LAMA2; (-) strand; PAM type: NRG; PAM sequence: TAG
ttgttggctatattatccca

SEQ ID NO: 71357 - DNA, 20 bp, Artificial Sequence
  Description of Artificial Sequence: Synthetic oligonucleotide
  Target: LAMA2; (-) strand; PAM type: NRG; PAM sequence: TGG
tttataacgaaacaggttgt

SEQ ID NO: 71358 - DNA, 20 bp, Artificial Sequence
  Description of Artificial Sequence: Synthetic oligonucleotide
  Target: LAMA2; (-) strand; PAM type: NRG; PAM sequence: AGG
cccctgctttataacgaaac

SEQ ID NO: 71359 - DNA, 20 bp, Artificial Sequence
  Description of Artificial Sequence: Synthetic oligonucleotide
  Target: LAMA2; (-) strand; PAM type: NRG; PAM sequence: CAG
tcccctgctttataacgaaa

SEQ ID NO: 71360 - DNA, 20 bp, Artificial Sequence
  Description of Artificial Sequence: Synthetic oligonucleotide
  Target: LAMA2; (-) strand; PAM type: NRG; PAM sequence: TAG
atactagaaaatgagggttc

SEQ ID NO: 71361 - DNA, 20 bp, Artificial Sequence
  Description of Artificial Sequence: Synthetic oligonucleotide
  Target: LAMA2; (-) strand; PAM type: NRG; PAM sequence: GGG
tagagtatactagaaaatga

SEQ ID NO: 71362 - DNA, 20 bp, Artificial Sequence
  Description of Artificial Sequence: Synthetic oligonucleotide
  Target: LAMA2; (-) strand; PAM type: NRG; PAM sequence: AGG
ctagagtatactagaaaatg

SEQ ID NO: 71363 - DNA, 20 bp, Artificial Sequence
  Description of Artificial Sequence: Synthetic oligonucleotide
  Target: LAMA2; (-) strand; PAM type: NRG; PAM sequence: GAG
actagagtatactagaaaat

SEQ ID NO: 71364 - DNA, 20 bp, Artificial Sequence
  Description of Artificial Sequence: Synthetic oligonucleotide
  Target: LAMA2; (-) strand; PAM type: NRG; PAM sequence: TAG
agaggcacactagagtatac

SEQ ID NO: 71365 - DNA, 20 bp, Artificial Sequence
  Description of Artificial Sequence: Synthetic oligonucleotide
  Target: LAMA2; (-) strand; PAM type: NRG; PAM sequence: GAG
gccattttagaggcacacta

SEQ ID NO: 71366 - DNA, 20 bp, Artificial Sequence
  Description of Artificial Sequence: Synthetic oligonucleotide
  Target: LAMA2; (-) strand; PAM type: NRG; PAM sequence: TAG
ttgccattttagaggcacac

SEQ ID NO: 71367 - DNA, 20 bp, Artificial Sequence
  Description of Artificial Sequence: Synthetic oligonucleotide
  Target: LAMA2; (-) strand; PAM type: NRG; PAM sequence: AGG
cagaagctttgccattttag

SEQ ID NO: 71368 - DNA, 20 bp, Artificial Sequence
  Description of Artificial Sequence: Synthetic oligonucleotide
  Target: LAMA2; (-) strand; PAM type: NRG; PAM sequence: GAG
acagaagctttgccatttta

SEQ ID NO: 71369 - DNA, 20 bp, Artificial Sequence
  Description of Artificial Sequence: Synthetic oligonucleotide
  Target: LAMA2; (-) strand; PAM type: NRG; PAM sequence: TAG
agacagaagctttgccattt

SEQ ID NO: 71370 - DNA, 20 bp, Artificial Sequence
  Description of Artificial Sequence: Synthetic oligonucleotide
  Target: LAMA2; (-) strand; PAM type: NRG; PAM sequence: AAG
gcggtaggtagaaaagacag

SEQ ID NO: 71371 - DNA, 20 bp, Artificial Sequence
  Description of Artificial Sequence: Synthetic oligonucleotide
  Target: LAMA2; (-) strand; PAM type: NRG; PAM sequence: CAG
catgcggtaggtagaaaaga

SEQ ID NO: 71372 - DNA, 20 bp, Artificial Sequence
  Description of Artificial Sequence: Synthetic oligonucleotide
  Target: LAMA2; (-) strand; PAM type: NRG; PAM sequence: AAG
ccttcatgcggtaggtagaa

SEQ ID NO: 71373 - DNA, 20 bp, Artificial Sequence
  Description of Artificial Sequence: Synthetic oligonucleotide
  Target: LAMA2; (-) strand; PAM type: NRG; PAM sequence: TAG
ttaatccttcatgcggtagg

SEQ ID NO: 71374 - DNA, 20 bp, Artificial Sequence
  Description of Artificial Sequence: Synthetic oligonucleotide
  Target: LAMA2; (-) strand; PAM type: NRG; PAM sequence: AGG
ctattaatccttcatgcggt

SEQ ID NO: 71375 - DNA, 20 bp, Artificial Sequence
  Description of Artificial Sequence: Synthetic oligonucleotide
  Target: LAMA2; (-) strand; PAM type: NRG; PAM sequence: TAG
cctattaatccttcatgcgg

SEQ ID NO: 71376 - DNA, 20 bp, Artificial Sequence
  Description of Artificial Sequence: Synthetic oligonucleotide
  Target: LAMA2; (-) strand; PAM type: NRG; PAM sequence: CGG
taacctattaatccttcatg

SEQ ID NO: 71377 - DNA, 20 bp, Artificial Sequence
  Description of Artificial Sequence: Synthetic oligonucleotide
  Target: LAMA2; (-) strand; PAM type: NRG; PAM sequence: TAG
ttttaatcccagttggataa

SEQ ID NO: 71378 - DNA, 20 bp, Artificial Sequence
  Description of Artificial Sequence: Synthetic oligonucleotide
  Target: LAMA2; (-) strand; PAM type: NRG; PAM sequence: TGG
tactgccttttaatcccagt

SEQ ID NO: 71379 - DNA, 20 bp, Artificial Sequence
  Description of Artificial Sequence: Synthetic oligonucleotide
  Target: LAMA2; (-) strand; PAM type: NRG; PAM sequence: CAG
attttactgccttttaatcc

SEQ ID NO: 71380 - DNA, 20 bp, Artificial Sequence
  Description of Artificial Sequence: Synthetic oligonucleotide
  Target: LAMA2; (-) strand; PAM type: NRG; PAM sequence: TAG
ataaatgacaaacaaacatt

SEQ ID NO: 71381 - DNA, 20 bp, Artificial Sequence
  Description of Artificial Sequence: Synthetic oligonucleotide
  Target: LAMA2; (-) strand; PAM type: NRG; PAM sequence: AAG
agaagaactaataaatggtc

SEQ ID NO: 71382 - DNA, 20 bp, Artificial Sequence
  Description of Artificial Sequence: Synthetic oligonucleotide
  Target: LAMA2; (-) strand; PAM type: NRG; PAM sequence: TGG
acaaaagaagaactaataaa

SEQ ID NO: 71383 - DNA, 20 bp, Artificial Sequence
  Description of Artificial Sequence: Synthetic oligonucleotide
  Target: LAMA2; (-) strand; PAM type: NRG; PAM sequence: AAG
tgttgaaatttatacaaaag

SEQ ID NO: 71384 - DNA, 20 bp, Artificial Sequence
  Description of Artificial Sequence: Synthetic oligonucleotide
  Target: LAMA2; (-) strand; PAM type: NRG; PAM sequence: AAG
acttgttgaaatttatacaa

SEQ ID NO: 71385 - DNA, 20 bp, Artificial Sequence
  Description of Artificial Sequence: Synthetic oligonucleotide
  Target: LAMA2; (-) strand; PAM type: NRG; PAM sequence: TGG
gcatttatcaacaacaatac

SEQ ID NO: 71386 - DNA, 20 bp, Artificial Sequence
  Description of Artificial Sequence: Synthetic oligonucleotide
  Target: LAMA2; (-) strand; PAM type: NRG; PAM sequence: AAG
aaatgtgtcacagaggagcc

SEQ ID NO: 71387 - DNA, 20 bp, Artificial Sequence
  Description of Artificial Sequence: Synthetic oligonucleotide
  Target: LAMA2; (-) strand; PAM type: NRG; PAM sequence: GAG
tatgaaaatgtgtcacagag

SEQ ID NO: 71388 - DNA, 20 bp, Artificial Sequence
  Description of Artificial Sequence: Synthetic oligonucleotide
  Target: LAMA2; (-) strand; PAM type: NRG; PAM sequence: AGG
tttatgaaaatgtgtcacag

SEQ ID NO: 71389 - DNA, 20 bp, Artificial Sequence
  Description of Artificial Sequence: Synthetic oligonucleotide
  Target: LAMA2; (-) strand; PAM type: NRG; PAM sequence: GAG
atttatgaaaatgtgtcaca

SEQ ID NO: 71390 - DNA, 20 bp, Artificial Sequence
  Description of Artificial Sequence: Synthetic oligonucleotide
  Target: LAMA2; (-) strand; PAM type: NRG; PAM sequence: CAG
taatttatgaaaatgtgtca

SEQ ID NO: 71391 - DNA, 20 bp, Artificial Sequence
  Description of Artificial Sequence: Synthetic oligonucleotide
  Target: LAMA2; (-) strand; PAM type: NRG; PAM sequence: AAG
caatcgtttctgttatgttt

SEQ ID NO: 71392 - DNA, 20 bp, Artificial Sequence
  Description of Artificial Sequence: Synthetic oligonucleotide
  Target: LAMA2; (-) strand; PAM type: NRG; PAM sequence: TAG
aaaaaacccactgtaatcta

SEQ ID NO: 71393 - DNA, 20 bp, Artificial Sequence
  Description of Artificial Sequence: Synthetic oligonucleotide
  Target: LAMA2; (-) strand; PAM type: NRG; PAM sequence: TAG
aaacaaattgctattttttc

SEQ ID NO: 71394 - DNA, 20 bp, Artificial Sequence
  Description of Artificial Sequence: Synthetic oligonucleotide
  Target: LAMA2; (-) strand; PAM type: NRG; PAM sequence: TAG
caatctacttataaaataag

SEQ ID NO: 71395 - DNA, 20 bp, Artificial Sequence
  Description of Artificial Sequence: Synthetic oligonucleotide
  Target: LAMA2; (-) strand; PAM type: NRG; PAM sequence: AAG
gaacaatctacttataaaat

SEQ ID NO: 71396 - DNA, 20 bp, Artificial Sequence
  Description of Artificial Sequence: Synthetic oligonucleotide
  Target: LAMA2; (-) strand; PAM type: NRG; PAM sequence: AAG
tcccttagtaatacgtatct

SEQ ID NO: 71397 - DNA, 20 bp, Artificial Sequence
  Description of Artificial Sequence: Synthetic oligonucleotide
  Target: LAMA2; (-) strand; PAM type: NRG; PAM sequence: TAG
gagaaaagttaataatccct

SEQ ID NO: 71398 - DNA, 20 bp, Artificial Sequence
  Description of Artificial Sequence: Synthetic oligonucleotide
  Target: LAMA2; (-) strand; PAM type: NRG; PAM sequence: AAG
atgagtaaatagaatgagaa

SEQ ID NO: 71399 - DNA, 20 bp, Artificial Sequence
  Description of Artificial Sequence: Synthetic oligonucleotide
  Target: LAMA2; (-) strand; PAM type: NRG; PAM sequence: GAG
atgctatgagtaaatagaat

SEQ ID NO: 71400 - DNA, 20 bp, Artificial Sequence
  Description of Artificial Sequence: Synthetic oligonucleotide
  Target: LAMA2; (-) strand; PAM type: NRG; PAM sequence: TAG
caaaatatgctatgagtaaa

SEQ ID NO: 71401 - DNA, 20 bp, Artificial Sequence
  Description of Artificial Sequence: Synthetic oligonucleotide
  Target: LAMA2; (-) strand; PAM type: NRG; PAM sequence: GAG
acttgctcaaaatatgctat

SEQ ID NO: 71402 - DNA, 20 bp, Artificial Sequence
  Description of Artificial Sequence: Synthetic oligonucleotide
  Target: LAMA2; (-) strand; PAM type: NRG; PAM sequence: CAG
ctaatctagaagttgaggca

SEQ ID NO: 71403 - DNA, 20 bp, Artificial Sequence
  Description of Artificial Sequence: Synthetic oligonucleotide
  Target: LAMA2; (-) strand; PAM type: NRG; PAM sequence: AGG
gtctgctaatctagaagttg

SEQ ID NO: 71404 - DNA, 20 bp, Artificial Sequence
  Description of Artificial Sequence: Synthetic oligonucleotide
  Target: LAMA2; (-) strand; PAM type: NRG; PAM sequence: GAG
agtctgctaatctagaagtt

SEQ ID NO: 71405 - DNA, 20 bp, Artificial Sequence
  Description of Artificial Sequence: Synthetic oligonucleotide
  Target: LAMA2; (-) strand; PAM type: NRG; PAM sequence: AAG
tatttagtctgctaatctag

SEQ ID NO: 71406 - DNA, 20 bp, Artificial Sequence
  Description of Artificial Sequence: Synthetic oligonucleotide
  Target: LAMA2; (-) strand; PAM type: NRG; PAM sequence: TAG
taatatttagtctgctaatc

SEQ ID NO: 71407 - DNA, 20 bp, Artificial Sequence
  Description of Artificial Sequence: Synthetic oligonucleotide
  Target: LAMA2; (-) strand; PAM type: NRG; PAM sequence: TAG
tgccaagatattgtaatatt

SEQ ID NO: 71408 - DNA, 20 bp, Artificial Sequence
  Description of Artificial Sequence: Synthetic oligonucleotide
  Target: LAMA2; (-) strand; PAM type: NRG; PAM sequence: AAG
attactttaattttcttgcc

SEQ ID NO: 71409 - DNA, 20 bp, Artificial Sequence
  Description of Artificial Sequence: Synthetic oligonucleotide
  Target: LAMA2; (-) strand; PAM type: NRG; PAM sequence: TAG
tgtaattgtgagatggaatt

SEQ ID NO: 71410 - DNA, 20 bp, Artificial Sequence
  Description of Artificial Sequence: Synthetic oligonucleotide
  Target: LAMA2; (-) strand; PAM type: NRG; PAM sequence: TGG
taatagctgtaattgtgaga

SEQ ID NO: 71411 - DNA, 20 bp, Artificial Sequence
  Description of Artificial Sequence: Synthetic oligonucleotide
  Target: LAMA2; (-) strand; PAM type: NRG; PAM sequence: GAG
cttttaatagctgtaattgt

SEQ ID NO: 71412 - DNA, 20 bp, Artificial Sequence
  Description of Artificial Sequence: Synthetic oligonucleotide
  Target: LAMA2; (-) strand; PAM type: NRG; PAM sequence: TAG
ctgactctagatccttttaa

SEQ ID NO: 71413 - DNA, 20 bp, Artificial Sequence
  Description of Artificial Sequence: Synthetic oligonucleotide
  Target: LAMA2; (-) strand; PAM type: NRG; PAM sequence: TAG
ctttaagttcatgctgactc

SEQ ID NO: 71414 - DNA, 20 bp, Artificial Sequence
  Description of Artificial Sequence: Synthetic oligonucleotide
  Target: LAMA2; (-) strand; PAM type: NRG; PAM sequence: AAG
gaacagttaagcttttcttt

SEQ ID NO: 71415 - DNA, 20 bp, Artificial Sequence
  Description of Artificial Sequence: Synthetic oligonucleotide
  Target: LAMA2; (-) strand; PAM type: NRG; PAM sequence: AAG
tacacgtcactggaacagtt

SEQ ID NO: 71416 - DNA, 20 bp, Artificial Sequence
  Description of Artificial Sequence: Synthetic oligonucleotide
  Target: LAMA2; (-) strand; PAM type: NRG; PAM sequence: CAG
ttatatacacgtcactggaa

SEQ ID NO: 71417 - DNA, 20 bp, Artificial Sequence
  Description of Artificial Sequence: Synthetic oligonucleotide
  Target: LAMA2; (-) strand; PAM type: NRG; PAM sequence: TGG
agtttttatatacacgtcac

SEQ ID NO: 71418 - DNA, 20 bp, Artificial Sequence
  Description of Artificial Sequence: Synthetic oligonucleotide
  Target: LAMA2; (-) strand; PAM type: NRG; PAM sequence: GAG
tttttgttcgcaattatatt

SEQ ID NO: 71419 - DNA, 20 bp, Artificial Sequence
  Description of Artificial Sequence: Synthetic oligonucleotide
  Target: LAMA2; (-) strand; PAM type: NRG; PAM sequence: GAG
tagacatcttattaacgttt

SEQ ID NO: 71420 - DNA, 20 bp, Artificial Sequence
  Description of Artificial Sequence: Synthetic oligonucleotide
  Target: LAMA2; (-) strand; PAM type: NRG; PAM sequence: TAG
aagactaaaatagaatgttt

SEQ ID NO: 71421 - DNA, 20 bp, Artificial Sequence
  Description of Artificial Sequence: Synthetic oligonucleotide
  Target: LAMA2; (-) strand; PAM type: NRG; PAM sequence: TAG
tggtaggaaaaagactaaaa

SEQ ID NO: 71422 - DNA, 20 bp, Artificial Sequence
  Description of Artificial Sequence: Synthetic oligonucleotide
  Target: LAMA2; (-) strand; PAM type: NRG; PAM sequence: AAG
tggtgaaatctggtaggaaa

SEQ ID NO: 71423 - DNA, 20 bp, Artificial Sequence
  Description of Artificial Sequence: Synthetic oligonucleotide
  Target: LAMA2; (-) strand; PAM type: NRG; PAM sequence: AGG
atattctggtgaaatctggt

SEQ ID NO: 71424 - DNA, 20 bp, Artificial Sequence
  Description of Artificial Sequence: Synthetic oligonucleotide
  Target: LAMA2; (-) strand; PAM type: NRG; PAM sequence: TAG
catattctggtgaaatctgg

SEQ ID NO: 71425 - DNA, 20 bp, Artificial Sequence
  Description of Artificial Sequence: Synthetic oligonucleotide
  Target: LAMA2; (-) strand; PAM type: NRG; PAM sequence: TGG
tgacatattctggtgaaatc

SEQ ID NO: 71426 - DNA, 20 bp, Artificial Sequence
  Description of Artificial Sequence: Synthetic oligonucleotide
  Target: LAMA2; (-) strand; PAM type: NRG; PAM sequence: TGG
tcagacataatgacatattc

SEQ ID NO: 71427 - DNA, 20 bp, Artificial Sequence
  Description of Artificial Sequence: Synthetic oligonucleotide
  Target: LAMA2; (-) strand; PAM type: NRG; PAM sequence: CAG
ttaaaagaaataaataaaat

SEQ ID NO: 71428 - DNA, 20 bp, Artificial Sequence
  Description of Artificial Sequence: Synthetic oligonucleotide
  Target: LAMA2; (-) strand; PAM type: NRG; PAM sequence: AAG
agataatggctagattttaa

SEQ ID NO: 71429 - DNA, 20 bp, Artificial Sequence
  Description of Artificial Sequence: Synthetic oligonucleotide
  Target: LAMA2; (-) strand; PAM type: NRG; PAM sequence: TAG
ggcatgacggagataatggc

SEQ ID NO: 71430 - DNA, 20 bp, Artificial Sequence
  Description of Artificial Sequence: Synthetic oligonucleotide
  Target: LAMA2; (-) strand; PAM type: NRG; PAM sequence: TGG
aaagggcatgacggagataa

SEQ ID NO: 71431 - DNA, 20 bp, Artificial Sequence
  Description of Artificial Sequence: Synthetic oligonucleotide
  Target: LAMA2; (-) strand; PAM type: NRG; PAM sequence: GAG
acaaatcaaagggcatgacg

SEQ ID NO: 71432 - DNA, 20 bp, Artificial Sequence
  Description of Artificial Sequence: Synthetic oligonucleotide
  Target: LAMA2; (-) strand; PAM type: NRG; PAM sequence: CGG
aaacaaatcaaagggcatga

SEQ ID NO: 71433 - DNA, 20 bp, Artificial Sequence
  Description of Artificial Sequence: Synthetic oligonucleotide
  Target: LAMA2; (-) strand; PAM type: NRG; PAM sequence: GGG
ttcttctgaaacaaatcaaa

SEQ ID NO: 71434 - DNA, 20 bp, Artificial Sequence
  Description of Artificial Sequence: Synthetic oligonucleotide
  Target: LAMA2; (-) strand; PAM type: NRG; PAM sequence: AGG
tttcttctgaaacaaatcaa

SEQ ID NO: 71435 - DNA, 20 bp, Artificial Sequence
  Description of Artificial Sequence: Synthetic oligonucleotide
  Target: LAMA2; (-) strand; PAM type: NRG; PAM sequence: AAG
ctttcttctgaaacaaatca

SEQ ID NO: 71436 - DNA, 20 bp, Artificial Sequence
  Description of Artificial Sequence: Synthetic oligonucleotide
  Target: LAMA2; (-) strand; PAM type: NRG; PAM sequence: CAG
gttttaccccgcctgccaat

SEQ ID NO: 71437 - DNA, 20 bp, Artificial Sequence
  Description of Artificial Sequence: Synthetic oligonucleotide
  Target: LAMA2; (-) strand; PAM type: NRG; PAM sequence: AAG
tgtttgaaaagtctactgaa

SEQ ID NO: 71438 - DNA, 20 bp, Artificial Sequence
  Description of Artificial Sequence: Synthetic oligonucleotide
  Target: LAMA2; (-) strand; PAM type: NRG; PAM sequence: AAG
cacctcaatatgtgtttgaa

SEQ ID NO: 71439 - DNA, 20 bp, Artificial Sequence
  Description of Artificial Sequence: Synthetic oligonucleotide
  Target: LAMA2; (-) strand; PAM type: NRG; PAM sequence: GAG
ttcctggattagccaggagt

SEQ ID NO: 71440 - DNA, 20 bp, Artificial Sequence
  Description of Artificial Sequence: Synthetic oligonucleotide
  Target: LAMA2; (-) strand; PAM type: NRG; PAM sequence: GAG
ggcattcctggattagccag

SEQ ID NO: 71441 - DNA, 20 bp, Artificial Sequence
  Description of Artificial Sequence: Synthetic oligonucleotide
  Target: LAMA2; (-) strand; PAM type: NRG; PAM sequence: AGG
atggcattcctggattagcc

SEQ ID NO: 71442 - DNA, 20 bp, Artificial Sequence
  Description of Artificial Sequence: Synthetic oligonucleotide
  Target: LAMA2; (-) strand; PAM type: NRG; PAM sequence: CAG
aatggcattcctggattagc

SEQ ID NO: 71443 - DNA, 20 bp, Artificial Sequence
  Description of Artificial Sequence: Synthetic oligonucleotide
  Target: LAMA2; (-) strand; PAM type: NRG; PAM sequence: TAG
aattaatggcattcctggat

SEQ ID NO: 71444 - DNA, 20 bp, Artificial Sequence
  Description of Artificial Sequence: Synthetic oligonucleotide
  Target: LAMA2; (-) strand; PAM type: NRG; PAM sequence: TGG
taactaattaatggcattcc

SEQ ID NO: 71445 - DNA, 20 bp, Artificial Sequence
  Description of Artificial Sequence: Synthetic oligonucleotide
  Target: LAMA2; (-) strand; PAM type: NRG; PAM sequence: TGG
acatgagcttaactaattaa

SEQ ID NO: 71446 - DNA, 20 bp, Artificial Sequence
  Description of Artificial Sequence: Synthetic oligonucleotide
  Target: LAMA2; (-) strand; PAM type: NRG; PAM sequence: GAG
aagactcctagttaagacat

SEQ ID NO: 71447 - DNA, 20 bp, Artificial Sequence
  Description of Artificial Sequence: Synthetic oligonucleotide
  Target: LAMA2; (-) strand; PAM type: NRG; PAM sequence: AAG
tgaggagaagactcctagtt

SEQ ID NO: 71448 - DNA, 20 bp, Artificial Sequence
  Description of Artificial Sequence: Synthetic oligonucleotide
  Target: LAMA2; (-) strand; PAM type: NRG; PAM sequence: TAG
cttattgaggagaagactcc

SEQ ID NO: 71449 - DNA, 20 bp, Artificial Sequence
  Description of Artificial Sequence: Synthetic oligonucleotide
  Target: LAMA2; (-) strand; PAM type: NRG; PAM sequence: AAG
gtgaattgcttattgaggag

SEQ ID NO: 71450 - DNA, 20 bp, Artificial Sequence
  Description of Artificial Sequence: Synthetic oligonucleotide
  Target: LAMA2; (-) strand; PAM type: NRG; PAM sequence: GAG
gaagtgaattgcttattgag

SEQ ID NO: 71451 - DNA, 20 bp, Artificial Sequence
  Description of Artificial Sequence: Synthetic oligonucleotide
  Target: LAMA2; (-) strand; PAM type: NRG; PAM sequence: AGG
gagaagtgaattgcttattg

SEQ ID NO: 71452 - DNA, 20 bp, Artificial Sequence
  Description of Artificial Sequence: Synthetic oligonucleotide
  Target: LAMA2; (-) strand; PAM type: NRG; PAM sequence: GAG
agagaagtgaattgcttatt

SEQ ID NO: 71453 - DNA, 20 bp, Artificial Sequence
  Description of Artificial Sequence: Synthetic oligonucleotide
  Target: LAMA2; (-) strand; PAM type: NRG; PAM sequence: AAG
gagggatagaccaggaagag

SEQ ID NO: 71454 - DNA, 20 bp, Artificial Sequence
  Description of Artificial Sequence: Synthetic oligonucleotide
  Target: LAMA2; (-) strand; PAM type: NRG; PAM sequence: GAG
tttgagggatagaccaggaa

SEQ ID NO: 71455 - DNA, 20 bp, Artificial Sequence
  Description of Artificial Sequence: Synthetic oligonucleotide
  Target: LAMA2; (-) strand; PAM type: NRG; PAM sequence: AAG
gttttgagggatagaccagg

SEQ ID NO: 71456 - DNA, 20 bp, Artificial Sequence
  Description of Artificial Sequence: Synthetic oligonucleotide
  Target: LAMA2; (-) strand; PAM type: NRG; PAM sequence: AGG
ttagttttgagggatagacc

SEQ ID NO: 71457 - DNA, 20 bp, Artificial Sequence
  Description of Artificial Sequence: Synthetic oligonucleotide
  Target: LAMA2; (-) strand; PAM type: NRG; PAM sequence: CAG
cttagttttgagggatagac

SEQ ID NO: 71458 - DNA, 20 bp, Artificial Sequence
  Description of Artificial Sequence: Synthetic oligonucleotide
  Target: LAMA2; (-) strand; PAM type: NRG; PAM sequence: TAG
gcattcttagttttgaggga

SEQ ID NO: 71459 - DNA, 20 bp, Artificial Sequence
  Description of Artificial Sequence: Synthetic oligonucleotide
  Target: LAMA2; (-) strand; PAM type: NRG; PAM sequence: GGG
aaacgcattcttagttttga

SEQ ID NO: 71460 - DNA, 20 bp, Artificial Sequence
  Description of Artificial Sequence: Synthetic oligonucleotide
  Target: LAMA2; (-) strand; PAM type: NRG; PAM sequence: AGG
taaacgcattcttagttttg

SEQ ID NO: 71461 - DNA, 20 bp, Artificial Sequence
  Description of Artificial Sequence: Synthetic oligonucleotide
  Target: LAMA2; (-) strand; PAM type: NRG; PAM sequence: GAG
gtaaacgcattcttagtttt

SEQ ID NO: 71462 - DNA, 20 bp, Artificial Sequence
  Description of Artificial Sequence: Synthetic oligonucleotide
  Target: LAMA2; (-) strand; PAM type: NRG; PAM sequence: TAG
ttgtttggtaaacgcattct

SEQ ID NO: 71463 - DNA, 20 bp, Artificial Sequence
  Description of Artificial Sequence: Synthetic oligonucleotide
  Target: LAMA2; (-) strand; PAM type: NRG; PAM sequence: TGG
agctgtaagataatcttgtt

SEQ ID NO: 71464 - DNA, 20 bp, Artificial Sequence
  Description of Artificial Sequence: Synthetic oligonucleotide
  Target: LAMA2; (-) strand; PAM type: NRG; PAM sequence: AAG
agtgtgatctctgtagctgt

SEQ ID NO: 71465 - DNA, 20 bp, Artificial Sequence
  Description of Artificial Sequence: Synthetic oligonucleotide
  Target: LAMA2; (-) strand; PAM type: NRG; PAM sequence: TAG
tatgtggagtgtgatctctg

SEQ ID NO: 71466 - DNA, 20 bp, Artificial Sequence
  Description of Artificial Sequence: Synthetic oligonucleotide
  Target: LAMA2; (-) strand; PAM type: NRG; PAM sequence: GAG
atttaggttaagaatatgtg

SEQ ID NO: 71467 - DNA, 20 bp, Artificial Sequence
  Description of Artificial Sequence: Synthetic oligonucleotide
  Target: LAMA2; (-) strand; PAM type: NRG; PAM sequence: TGG
atatttaggttaagaatatg

SEQ ID NO: 71468 - DNA, 20 bp, Artificial Sequence
  Description of Artificial Sequence: Synthetic oligonucleotide
  Target: LAMA2; (-) strand; PAM type: NRG; PAM sequence: AAG
gtgaataaaatatttaggtt

SEQ ID NO: 71469 - DNA, 20 bp, Artificial Sequence
  Description of Artificial Sequence: Synthetic oligonucleotide
  Target: LAMA2; (-) strand; PAM type: NRG; PAM sequence: AGG
gatcagtgaataaaatattt

SEQ ID NO: 71470 - DNA, 20 bp, Artificial Sequence
  Description of Artificial Sequence: Synthetic oligonucleotide
  Target: LAMA2; (-) strand; PAM type: NRG; PAM sequence: TAG
agatcagtgaataaaatatt

SEQ ID NO: 71471 - DNA, 20 bp, Artificial Sequence
  Description of Artificial Sequence: Synthetic oligonucleotide
  Target: LAMA2; (-) strand; PAM type: NRG; PAM sequence: CAG
caaatttttctctgcaagat

SEQ ID NO: 71472 - DNA, 20 bp, Artificial Sequence
  Description of Artificial Sequence: Synthetic oligonucleotide
  Target: LAMA2; (-) strand; PAM type: NRG; PAM sequence: AAG
ccaaacaaatttttctctgc

SEQ ID NO: 71473 - DNA, 20 bp, Artificial Sequence
  Description of Artificial Sequence: Synthetic oligonucleotide
  Target: LAMA2; (-) strand; PAM type: NRG; PAM sequence: CAG
tcctcctaaaacataaattc

SEQ ID NO: 71474 - DNA, 20 bp, Artificial Sequence
  Description of Artificial Sequence: Synthetic oligonucleotide
  Target: LAMA2; (-) strand; PAM type: NRG; PAM sequence: TAG
taatatttgcatagaaatag

SEQ ID NO: 71475 - DNA, 20 bp, Artificial Sequence
  Description of Artificial Sequence: Synthetic oligonucleotide
  Target: LAMA2; (-) strand; PAM type: NRG; PAM sequence: TAG
tagtaatatttgcatagaaa

SEQ ID NO: 71476 - DNA, 20 bp, Artificial Sequence
  Description of Artificial Sequence: Synthetic oligonucleotide
  Target: LAMA2; (-) strand; PAM type: NRG; PAM sequence: TAG
aaagtatagtaatatttgca

SEQ ID NO: 71477 - DNA, 20 bp, Artificial Sequence
  Description of Artificial Sequence: Synthetic oligonucleotide
  Target: LAMA2; (-) strand; PAM type: NRG; PAM sequence: TAG
tcacatggattctaaaagta

SEQ ID NO: 71478 - DNA, 20 bp, Artificial Sequence
  Description of Artificial Sequence: Synthetic oligonucleotide
  Target: LAMA2; (-) strand; PAM type: NRG; PAM sequence: AAG
actattcacatggattctaa

SEQ ID NO: 71479 - DNA, 20 bp, Artificial Sequence
  Description of Artificial Sequence: Synthetic oligonucleotide
  Target: LAMA2; (-) strand; PAM type: NRG; PAM sequence: TGG
atcattttatactattcaca

SEQ ID NO: 71480 - DNA, 20 bp, Artificial Sequence
  Description of Artificial Sequence: Synthetic oligonucleotide
  Target: LAMA2; (-) strand; PAM type: NRG; PAM sequence: GAG
attaatgattctaggcttta

SEQ ID NO: 71481 - DNA, 20 bp, Artificial Sequence
  Description of Artificial Sequence: Synthetic oligonucleotide
  Target: LAMA2; (-) strand; PAM type: NRG; PAM sequence: TAG
acattaatgattctaggctt

SEQ ID NO: 71482 - DNA, 20 bp, Artificial Sequence
  Description of Artificial Sequence: Synthetic oligonucleotide
  Target: LAMA2; (-) strand; PAM type: NRG; PAM sequence: AGG
accattacattaatgattct

SEQ ID NO: 71483 - DNA, 20 bp, Artificial Sequence
  Description of Artificial Sequence: Synthetic oligonucleotide
  Target: LAMA2; (-) strand; PAM type: NRG; PAM sequence: TAG
aaccattacattaatgattc

SEQ ID NO: 71484 - DNA, 20 bp, Artificial Sequence
  Description of Artificial Sequence: Synthetic oligonucleotide
  Target: LAMA2; (-) strand; PAM type: NRG; PAM sequence: CAG
tattttatgttttattattg

SEQ ID NO: 71485 - DNA, 20 bp, Artificial Sequence
  Description of Artificial Sequence: Synthetic oligonucleotide
  Target: LAMA2; (-) strand; PAM type: NRG; PAM sequence: AAG
tgttaaaacttgaatatata

SEQ ID NO: 71486 - DNA, 20 bp, Artificial Sequence
  Description of Artificial Sequence: Synthetic oligonucleotide
  Target: LAMA2; (-) strand; PAM type: NRG; PAM sequence: TGG
cttccttcaagactgaaaat

SEQ ID NO: 71487 - DNA, 20 bp, Artificial Sequence
  Description of Artificial Sequence: Synthetic oligonucleotide
  Target: LAMA2; (-) strand; PAM type: NRG; PAM sequence: AAG
aagaataatgaccttccttc

SEQ ID NO: 71488 - DNA, 20 bp, Artificial Sequence
  Description of Artificial Sequence: Synthetic oligonucleotide
  Target: LAMA2; (-) strand; PAM type: NRG; PAM sequence: AAG
tgaggaaagaattgacatga

SEQ ID NO: 71489 - DNA, 20 bp, Artificial Sequence
  Description of Artificial Sequence: Synthetic oligonucleotide
  Target: LAMA2; (-) strand; PAM type: NRG; PAM sequence: AAG
cagtaagaagagcatgagga

SEQ ID NO: 71490 - DNA, 20 bp, Artificial Sequence
  Description of Artificial Sequence: Synthetic oligonucleotide
  Target: LAMA2; (-) strand; PAM type: NRG; PAM sequence: AGG
gaatcagtaagaagagcatg

SEQ ID NO: 71491 - DNA, 20 bp, Artificial Sequence
  Description of Artificial Sequence: Synthetic oligonucleotide
  Target: LAMA2; (-) strand; PAM type: NRG; PAM sequence: GAG
ggaatcagtaagaagagcat

SEQ ID NO: 71492 - DNA, 20 bp, Artificial Sequence
  Description of Artificial Sequence: Synthetic oligonucleotide
  Target: LAMA2; (-) strand; PAM type: NRG; PAM sequence: GAG
taatcaggaatcagtaagaa

SEQ ID NO: 71493 - DNA, 20 bp, Artificial Sequence
  Description of Artificial Sequence: Synthetic oligonucleotide
  Target: LAMA2; (-) strand; PAM type: NRG; PAM sequence: AAG
agtaatcaggaatcagtaag

SEQ ID NO: 71494 - DNA, 20 bp, Artificial Sequence
  Description of Artificial Sequence: Synthetic oligonucleotide
  Target: LAMA2; (-) strand; PAM type: NRG; PAM sequence: AAG
atcagtaatcaggaatcagt

SEQ ID NO: 71495 - DNA, 20 bp, Artificial Sequence
  Description of Artificial Sequence: Synthetic oligonucleotide
  Target: LAMA2; (-) strand; PAM type: NRG; PAM sequence: CAG
tttaatcagtaatcaggaat

SEQ ID NO: 71496 - DNA, 20 bp, Artificial Sequence
  Description of Artificial Sequence: Synthetic oligonucleotide
  Target: LAMA2; (-) strand; PAM type: NRG; PAM sequence: AGG
acatcctttaatcagtaatc

SEQ ID NO: 71497 - DNA, 20 bp, Artificial Sequence
  Description of Artificial Sequence: Synthetic oligonucleotide
  Target: LAMA2; (-) strand; PAM type: NRG; PAM sequence: CAG
cacatcctttaatcagtaat

SEQ ID NO: 71498 - DNA, 20 bp, Artificial Sequence
  Description of Artificial Sequence: Synthetic oligonucleotide
  Target: LAMA2; (-) strand; PAM type: NRG; PAM sequence: CAG
tgtacaacacatcctttaat

SEQ ID NO: 71499 - DNA, 20 bp, Artificial Sequence
  Description of Artificial Sequence: Synthetic oligonucleotide
  Target: LAMA2; (-) strand; PAM type: NRG; PAM sequence: GAG
tttatccattggttgtttgg

SEQ ID NO: 71500 - DNA, 20 bp, Artificial Sequence
  Description of Artificial Sequence: Synthetic oligonucleotide
  Target: LAMA2; (-) strand; PAM type: NRG; PAM sequence: GGG
tctttatccattggttgttt

SEQ ID NO: 71501 - DNA, 20 bp, Artificial Sequence
  Description of Artificial Sequence: Synthetic oligonucleotide
  Target: LAMA2; (-) strand; PAM type: NRG; PAM sequence: TGG
ttctttatccattggttgtt

SEQ ID NO: 71502 - DNA, 20 bp, Artificial Sequence
  Description of Artificial Sequence: Synthetic oligonucleotide
  Target: LAMA2; (-) strand; PAM type: NRG; PAM sequence: TGG
ttaattttttctttatccat

SEQ ID NO: 71503 - DNA, 20 bp, Artificial Sequence
  Description of Artificial Sequence: Synthetic oligonucleotide
  Target: LAMA2; (-) strand; PAM type: NRG; PAM sequence: AAG
tgtccattctcatttgtctc

SEQ ID NO: 71504 - DNA, 20 bp, Artificial Sequence
  Description of Artificial Sequence: Synthetic oligonucleotide
  Target: LAMA2; (-) strand; PAM type: NRG; PAM sequence: TAG
ttgcttcttcttatcagtgt

SEQ ID NO: 71505 - DNA, 20 bp, Artificial Sequence
  Description of Artificial Sequence: Synthetic oligonucleotide
  Target: LAMA2; (-) strand; PAM type: NRG; PAM sequence: CAG
ctgcttttgcttcttcttat

SEQ ID NO: 71506 - DNA, 20 bp, Artificial Sequence
  Description of Artificial Sequence: Synthetic oligonucleotide
  Target: LAMA2; (-) strand; PAM type: NRG; PAM sequence: TAG
attactatagcctttcttct

SEQ ID NO: 71507 - DNA, 20 bp, Artificial Sequence
  Description of Artificial Sequence: Synthetic oligonucleotide
  Target: LAMA2; (-) strand; PAM type: NRG; PAM sequence: TAG
gacgtaggtatttattacta

SEQ ID NO: 71508 - DNA, 20 bp, Artificial Sequence
  Description of Artificial Sequence: Synthetic oligonucleotide
  Target: LAMA2; (-) strand; PAM type: NRG; PAM sequence: AGG
atctttcttctttttgacgt

SEQ ID NO: 71509 - DNA, 20 bp, Artificial Sequence
  Description of Artificial Sequence: Synthetic oligonucleotide
  Target: LAMA2; (-) strand; PAM type: NRG; PAM sequence: TAG
gatctttcttctttttgacg

SEQ ID NO: 71510 - DNA, 20 bp, Artificial Sequence
  Description of Artificial Sequence: Synthetic oligonucleotide
  Target: LAMA2; (-) strand; PAM type: NRG; PAM sequence: TAG
taaccttaggttgttaattt

SEQ ID NO: 71511 - DNA, 20 bp, Artificial Sequence
  Description of Artificial Sequence: Synthetic oligonucleotide
  Target: LAMA2; (-) strand; PAM type: NRG; PAM sequence: AGG
ctttcttgaaatgtaacctt

SEQ ID NO: 71512 - DNA, 20 bp, Artificial Sequence
  Description of Artificial Sequence: Synthetic oligonucleotide
  Target: LAMA2; (-) strand; PAM type: NRG; PAM sequence: TAG
gctttcttgaaatgtaacct

SEQ ID NO: 71513 - DNA, 20 bp, Artificial Sequence
  Description of Artificial Sequence: Synthetic oligonucleotide
  Target: LAMA2; (-) strand; PAM type: NRG; PAM sequence: TAG
ctttctgctacttctaggcc

SEQ ID NO: 71514 - DNA, 20 bp, Artificial Sequence
  Description of Artificial Sequence: Synthetic oligonucleotide
  Target: LAMA2; (-) strand; PAM type: NRG; PAM sequence: AGG
tccttctttctgctacttct

SEQ ID NO: 71515 - DNA, 20 bp, Artificial Sequence
  Description of Artificial Sequence: Synthetic oligonucleotide
  Target: LAMA2; (-) strand; PAM type: NRG; PAM sequence: TAG
ttccttctttctgctacttc

SEQ ID NO: 71516 - DNA, 20 bp, Artificial Sequence
  Description of Artificial Sequence: Synthetic oligonucleotide
  Target: LAMA2; (-) strand; PAM type: NRG; PAM sequence: CAG
ctatttcatttatttctacc

SEQ ID NO: 71517 - DNA, 20 bp, Artificial Sequence
  Description of Artificial Sequence: Synthetic oligonucleotide
  Target: LAMA2; (-) strand; PAM type: NRG; PAM sequence: TAG
aatctcttccattgtttccc

SEQ ID NO: 71518 - DNA, 20 bp, Artificial Sequence
  Description of Artificial Sequence: Synthetic oligonucleotide
  Target: LAMA2; (-) strand; PAM type: NRG; PAM sequence: CAG
attttccaaaacccaagtga

SEQ ID NO: 71519 - DNA, 20 bp, Artificial Sequence
  Description of Artificial Sequence: Synthetic oligonucleotide
  Target: LAMA2; (-) strand; PAM type: NRG; PAM sequence: AAG
gcttatattttccaaaaccc

SEQ ID NO: 71520 - DNA, 20 bp, Artificial Sequence
  Description of Artificial Sequence: Synthetic oligonucleotide
  Target: LAMA2; (-) strand; PAM type: NRG; PAM sequence: TAG
tagctaaacttttgtcaatt

SEQ ID NO: 71521 - DNA, 20 bp, Artificial Sequence
  Description of Artificial Sequence: Synthetic oligonucleotide
  Target: LAMA2; (-) strand; PAM type: NRG; PAM sequence: TAG
atcttttttcttagaaagtt

SEQ ID NO: 71522 - DNA, 20 bp, Artificial Sequence
  Description of Artificial Sequence: Synthetic oligonucleotide
  Target: LAMA2; (-) strand; PAM type: NRG; PAM sequence: AAG
ttctgatcttttttcttaga

SEQ ID NO: 71523 - DNA, 20 bp, Artificial Sequence
  Description of Artificial Sequence: Synthetic oligonucleotide
  Target: LAMA2; (-) strand; PAM type: NRG; PAM sequence: TAG
tcaattctgatcttttttct

SEQ ID NO: 71524 - DNA, 20 bp, Artificial Sequence
  Description of Artificial Sequence: Synthetic oligonucleotide
  Target: LAMA2; (-) strand; PAM type: NRG; PAM sequence: TAG
ttgtatttctgaagtatcag

SEQ ID NO: 71525 - DNA, 20 bp, Artificial Sequence
  Description of Artificial Sequence: Synthetic oligonucleotide
  Target: LAMA2; (-) strand; PAM type: NRG; PAM sequence: CAG
cctttgtatttctgaagtat

SEQ ID NO: 71526 - DNA, 20 bp, Artificial Sequence
  Description of Artificial Sequence: Synthetic oligonucleotide
  Target: LAMA2; (-) strand; PAM type: NRG; PAM sequence: AAG
tatgatcctttgtatttctg

SEQ ID NO: 71527 - DNA, 20 bp, Artificial Sequence
  Description of Artificial Sequence: Synthetic oligonucleotide
  Target: LAMA2; (-) strand; PAM type: NRG; PAM sequence: TAG
tggcatataattgttgagag

SEQ ID NO: 71528 - DNA, 20 bp, Artificial Sequence
  Description of Artificial Sequence: Synthetic oligonucleotide
  Target: LAMA2; (-) strand; PAM type: NRG; PAM sequence: GAG
tgttggcatataattgttga

SEQ ID NO: 71529 - DNA, 20 bp, Artificial Sequence
  Description of Artificial Sequence: Synthetic oligonucleotide
  Target: LAMA2; (-) strand; PAM type: NRG; PAM sequence: GAG
tttgttggcatataattgtt

SEQ ID NO: 71530 - DNA, 20 bp, Artificial Sequence
  Description of Artificial Sequence: Synthetic oligonucleotide
  Target: LAMA2; (-) strand; PAM type: NRG; PAM sequence: TGG
ttctaggttatccagtttgt

SEQ ID NO: 71531 - DNA, 20 bp, Artificial Sequence
  Description of Artificial Sequence: Synthetic oligonucleotide
  Target: LAMA2; (-) strand; PAM type: NRG; PAM sequence: CAG
tccattttttctaggttatc

SEQ ID NO: 71532 - DNA, 20 bp, Artificial Sequence
  Description of Artificial Sequence: Synthetic oligonucleotide
  Target: LAMA2; (-) strand; PAM type: NRG; PAM sequence: AGG
ggaatttttccattttttct

SEQ ID NO: 71533 - DNA, 20 bp, Artificial Sequence
  Description of Artificial Sequence: Synthetic oligonucleotide
  Target: LAMA2; (-) strand; PAM type: NRG; PAM sequence: TAG
aggaatttttccattttttc

SEQ ID NO: 71534 - DNA, 20 bp, Artificial Sequence
  Description of Artificial Sequence: Synthetic oligonucleotide
  Target: LAMA2; (-) strand; PAM type: NRG; PAM sequence: AGG
gattcagtgttagtaggtct

SEQ ID NO: 71535 - DNA, 20 bp, Artificial Sequence
  Description of Artificial Sequence: Synthetic oligonucleotide
  Target: LAMA2; (-) strand; PAM type: NRG; PAM sequence: TAG
tgattcagtgttagtaggtc

SEQ ID NO: 71536 - DNA, 20 bp, Artificial Sequence
  Description of Artificial Sequence: Synthetic oligonucleotide
  Target: LAMA2; (-) strand; PAM type: NRG; PAM sequence: AGG
cttcatgattcagtgttagt

SEQ ID NO: 71537 - DNA, 20 bp, Artificial Sequence
  Description of Artificial Sequence: Synthetic oligonucleotide
  Target: LAMA2; (-) strand; PAM type: NRG; PAM sequence: TAG
tcttcatgattcagtgttag

SEQ ID NO: 71538 - DNA, 20 bp, Artificial Sequence
  Description of Artificial Sequence: Synthetic oligonucleotide
  Target: LAMA2; (-) strand; PAM type: NRG; PAM sequence: TAG
atttcttcatgattcagtgt

SEQ ID NO: 71539 - DNA, 20 bp, Artificial Sequence
  Description of Artificial Sequence: Synthetic oligonucleotide
  Target: LAMA2; (-) strand; PAM type: NRG; PAM sequence: CAG
ttatctatttcttcatgatt

SEQ ID NO: 71540 - DNA, 20 bp, Artificial Sequence
  Description of Artificial Sequence: Synthetic oligonucleotide
  Target: LAMA2; (-) strand; PAM type: NRG; PAM sequence: GGG
ttctgggcttttctttgata

SEQ ID NO: 71541 - DNA, 20 bp, Artificial Sequence
  Description of Artificial Sequence: Synthetic oligonucleotide
  Target: LAMA2; (-) strand; PAM type: NRG; PAM sequence: AGG
gttctgggcttttctttgat

SEQ ID NO: 71542 - DNA, 20 bp, Artificial Sequence
  Description of Artificial Sequence: Synthetic oligonucleotide
  Target: LAMA2; (-) strand; PAM type: NRG; PAM sequence: TAG
ggttctgggcttttctttga

SEQ ID NO: 71543 - DNA, 20 bp, Artificial Sequence
  Description of Artificial Sequence: Synthetic oligonucleotide
  Target: LAMA2; (-) strand; PAM type: NRG; PAM sequence: GGG
cagtaaaaccatcaggttct

SEQ ID NO: 71544 - DNA, 20 bp, Artificial Sequence
  Description of Artificial Sequence: Synthetic oligonucleotide
  Target: LAMA2; (-) strand; PAM type: NRG; PAM sequence: TGG
gcagtaaaaccatcaggttc

SEQ ID NO: 71545 - DNA, 20 bp, Artificial Sequence
  Description of Artificial Sequence: Synthetic oligonucleotide
  Target: LAMA2; (-) strand; PAM type: NRG; PAM sequence: AGG
aattcagcagtaaaaccatc

SEQ ID NO: 71546 - DNA, 20 bp, Artificial Sequence
  Description of Artificial Sequence: Synthetic oligonucleotide
  Target: LAMA2; (-) strand; PAM type: NRG; PAM sequence: CAG
gaattcagcagtaaaaccat

SEQ ID NO: 71547 - DNA, 20 bp, Artificial Sequence
  Description of Artificial Sequence: Synthetic oligonucleotide
  Target: LAMA2; (-) strand; PAM type: NRG; PAM sequence: CAG
aaatgtttggtagaattcag

SEQ ID NO: 71548 - DNA, 20 bp, Artificial Sequence
  Description of Artificial Sequence: Synthetic oligonucleotide
  Target: LAMA2; (-) strand; PAM type: NRG; PAM sequence: CAG
cttaaatgtttggtagaatt

SEQ ID NO: 71549 - DNA, 20 bp, Artificial Sequence
  Description of Artificial Sequence: Synthetic oligonucleotide
  Target: LAMA2; (-) strand; PAM type: NRG; PAM sequence: TAG
ttagttccttaaatgtttgg

SEQ ID NO: 71550 - DNA, 20 bp, Artificial Sequence
  Description of Artificial Sequence: Synthetic oligonucleotide
  Target: LAMA2; (-) strand; PAM type: NRG; PAM sequence: TGG
gtattagttccttaaatgtt

SEQ ID NO: 71551 - DNA, 20 bp, Artificial Sequence
  Description of Artificial Sequence: Synthetic oligonucleotide
  Target: LAMA2; (-) strand; PAM type: NRG; PAM sequence: TAG
attttgagaaggattggtat

SEQ ID NO: 71552 - DNA, 20 bp, Artificial Sequence
  Description of Artificial Sequence: Synthetic oligonucleotide
  Target: LAMA2; (-) strand; PAM type: NRG; PAM sequence: TGG
tggaggattttgagaaggat

SEQ ID NO: 71553 - DNA, 20 bp, Artificial Sequence
  Description of Artificial Sequence: Synthetic oligonucleotide
  Target: LAMA2; (-) strand; PAM type: NRG; PAM sequence: AGG
ttatttggaggattttgaga

SEQ ID NO: 71554 - DNA, 20 bp, Artificial Sequence
  Description of Artificial Sequence: Synthetic oligonucleotide
  Target: LAMA2; (-) strand; PAM type: NRG; PAM sequence: AAG
gttatttggaggattttgag

SEQ ID NO: 71555 - DNA, 20 bp, Artificial Sequence
  Description of Artificial Sequence: Synthetic oligonucleotide
  Target: LAMA2; (-) strand; PAM type: NRG; PAM sequence: GAG
tcagttatttggaggatttt

SEQ ID NO: 71556 - DNA, 20 bp, Artificial Sequence
  Description of Artificial Sequence: Synthetic oligonucleotide
  Target: LAMA2; (-) strand; PAM type: NRG; PAM sequence: AGG
cctcatcttcagttatttgg

SEQ ID NO: 71557 - DNA, 20 bp, Artificial Sequence
  Description of Artificial Sequence: Synthetic oligonucleotide
  Target: LAMA2; (-) strand; PAM type: NRG; PAM sequence: GAG
ccctcatcttcagttatttg

SEQ ID NO: 71558 - DNA, 20 bp, Artificial Sequence
  Description of Artificial Sequence: Synthetic oligonucleotide
  Target: LAMA2; (-) strand; PAM type: NRG; PAM sequence: TGG
ctccctcatcttcagttatt

SEQ ID NO: 71559 - DNA, 20 bp, Artificial Sequence
  Description of Artificial Sequence: Synthetic oligonucleotide
  Target: LAMA2; (-) strand; PAM type: NRG; PAM sequence: CAG
tggaagtactccctcatctt

SEQ ID NO: 71560 - DNA, 20 bp, Artificial Sequence
  Description of Artificial Sequence: Synthetic oligonucleotide
  Target: LAMA2; (-) strand; PAM type: NRG; PAM sequence: AAG
gcctcataaaataagtttgg

SEQ ID NO: 71561 - DNA, 20 bp, Artificial Sequence
  Description of Artificial Sequence: Synthetic oligonucleotide
  Target: LAMA2; (-) strand; PAM type: NRG; PAM sequence: TGG
ctggcctcataaaataagtt

SEQ ID NO: 71562 - DNA, 20 bp, Artificial Sequence
  Description of Artificial Sequence: Synthetic oligonucleotide
  Target: LAMA2; (-) strand; PAM type: NRG; PAM sequence: AAG
aatggctggcctcataaaat

SEQ ID NO: 71563 - DNA, 20 bp, Artificial Sequence
  Description of Artificial Sequence: Synthetic oligonucleotide
  Target: LAMA2; (-) strand; PAM type: NRG; PAM sequence: TGG
tttggtatcaggctaatggc

SEQ ID NO: 71564 - DNA, 20 bp, Artificial Sequence
  Description of Artificial Sequence: Synthetic oligonucleotide
  Target: LAMA2; (-) strand; PAM type: NRG; PAM sequence: TGG
tggctttggtatcaggctaa

SEQ ID NO: 71565 - DNA, 20 bp, Artificial Sequence
  Description of Artificial Sequence: Synthetic oligonucleotide
  Target: LAMA2; (-) strand; PAM type: NRG; PAM sequence: AGG
gtgtctttggctttggtatc

SEQ ID NO: 71566 - DNA, 20 bp, Artificial Sequence
  Description of Artificial Sequence: Synthetic oligonucleotide
  Target: LAMA2; (-) strand; PAM type: NRG; PAM sequence: CAG
agtgtctttggctttggtat

SEQ ID NO: 71567 - DNA, 20 bp, Artificial Sequence
  Description of Artificial Sequence: Synthetic oligonucleotide
  Target: LAMA2; (-) strand; PAM type: NRG; PAM sequence: TGG
tcttgcagtgtctttggctt

SEQ ID NO: 71568 - DNA, 20 bp, Artificial Sequence
  Description of Artificial Sequence: Synthetic oligonucleotide
  Target: LAMA2; (-) strand; PAM type: NRG; PAM sequence: TGG
tacttttcttgcagtgtctt

SEQ ID NO: 71569 - DNA, 20 bp, Artificial Sequence
  Description of Artificial Sequence: Synthetic oligonucleotide
  Target: LAMA2; (-) strand; PAM type: NRG; PAM sequence: CAG
tctgtaatgtacttttcttg

SEQ ID NO: 71570 - DNA, 20 bp, Artificial Sequence
  Description of Artificial Sequence: Synthetic oligonucleotide
  Target: LAMA2; (-) strand; PAM type: NRG; PAM sequence: GAG
tttgttagtattttcttgag

SEQ ID NO: 71571 - DNA, 20 bp, Artificial Sequence
  Description of Artificial Sequence: Synthetic oligonucleotide
  Target: LAMA2; (-) strand; PAM type: NRG; PAM sequence: AGG
ggtttgttagtattttcttg

SEQ ID NO: 71572 - DNA, 20 bp, Artificial Sequence
  Description of Artificial Sequence: Synthetic oligonucleotide
  Target: LAMA2; (-) strand; PAM type: NRG; PAM sequence: GAG
tggtttgttagtattttctt

SEQ ID NO: 71573 - DNA, 20 bp, Artificial Sequence
  Description of Artificial Sequence: Synthetic oligonucleotide
  Target: LAMA2; (-) strand; PAM type: NRG; PAM sequence: TAG
tgctgctgaatttggtttgt

SEQ ID NO: 71574 - DNA, 20 bp, Artificial Sequence
  Description of Artificial Sequence: Synthetic oligonucleotide
  Target: LAMA2; (-) strand; PAM type: NRG; PAM sequence: TGG
ttttaatgtgctgctgaatt

SEQ ID NO: 71575 - DNA, 20 bp, Artificial Sequence
  Description of Artificial Sequence: Synthetic oligonucleotide
  Target: LAMA2; (-) strand; PAM type: NRG; PAM sequence: CAG
gtagtgatcccacttgatca

SEQ ID NO: 71576 - DNA, 20 bp, Artificial Sequence
  Description of Artificial Sequence: Synthetic oligonucleotide
  Target: LAMA2; (-) strand; PAM type: NRG; PAM sequence: TAG
ttaaaccatggcatccctgg

SEQ ID NO: 71577 - DNA, 20 bp, Artificial Sequence
  Description of Artificial Sequence: Synthetic oligonucleotide
  Target: LAMA2; (-) strand; PAM type: NRG; PAM sequence: TGG
aggttaaaccatggcatccc

SEQ ID NO: 71578 - DNA, 20 bp, Artificial Sequence
  Description of Artificial Sequence: Synthetic oligonucleotide
  Target: LAMA2; (-) strand; PAM type: NRG; PAM sequence: TGG
gatttgcaaaggttaaacca

SEQ ID NO: 71579 - DNA, 20 bp, Artificial Sequence
  Description of Artificial Sequence: Synthetic oligonucleotide
  Target: LAMA2; (-) strand; PAM type: NRG; PAM sequence: AGG
tcacatttatagatttgcaa

SEQ ID NO: 71580 - DNA, 20 bp, Artificial Sequence
  Description of Artificial Sequence: Synthetic oligonucleotide
  Target: LAMA2; (-) strand; PAM type: NRG; PAM sequence: AAG
atcacatttatagatttgca

SEQ ID NO: 71581 - DNA, 20 bp, Artificial Sequence
  Description of Artificial Sequence: Synthetic oligonucleotide
  Target: LAMA2; (-) strand; PAM type: NRG; PAM sequence: TAG
aatgtaaggtatcacattta

SEQ ID NO: 71582 - DNA, 20 bp, Artificial Sequence
  Description of Artificial Sequence: Synthetic oligonucleotide
  Target: LAMA2; (-) strand; PAM type: NRG; PAM sequence: AGG
tccttcattctactaatgta

SEQ ID NO: 71583 - DNA, 20 bp, Artificial Sequence
  Description of Artificial Sequence: Synthetic oligonucleotide
  Target: LAMA2; (-) strand; PAM type: NRG; PAM sequence: AAG
gtccttcattctactaatgt

SEQ ID NO: 71584 - DNA, 20 bp, Artificial Sequence
  Description of Artificial Sequence: Synthetic oligonucleotide
  Target: LAMA2; (-) strand; PAM type: NRG; PAM sequence: GAG
atgctttttctgcatctatt

SEQ ID NO: 71585 - DNA, 20 bp, Artificial Sequence
  Description of Artificial Sequence: Synthetic oligonucleotide
  Target: LAMA2; (-) strand; PAM type: NRG; PAM sequence: CAG
ttctatagctaatttgttga

SEQ ID NO: 71586 - DNA, 20 bp, Artificial Sequence
  Description of Artificial Sequence: Synthetic oligonucleotide
  Target: LAMA2; (-) strand; PAM type: NRG; PAM sequence: TAG
gttgacgtacattccttcta

SEQ ID NO: 71587 - DNA, 20 bp, Artificial Sequence
  Description of Artificial Sequence: Synthetic oligonucleotide
  Target: LAMA2; (-) strand; PAM type: NRG; PAM sequence: CAG
agctgaggatgtgtcatata

SEQ ID NO: 71588 - DNA, 20 bp, Artificial Sequence
  Description of Artificial Sequence: Synthetic oligonucleotide
  Target: LAMA2; (-) strand; PAM type: NRG; PAM sequence: AGG
attgagtatgatgttagctg

SEQ ID NO: 71589 - DNA, 20 bp, Artificial Sequence
  Description of Artificial Sequence: Synthetic oligonucleotide
  Target: LAMA2; (-) strand; PAM type: NRG; PAM sequence: GAG
tattgagtatgatgttagct

SEQ ID NO: 71590 - DNA, 20 bp, Artificial Sequence
  Description of Artificial Sequence: Synthetic oligonucleotide
  Target: LAMA2; (-) strand; PAM type: NRG; PAM sequence: TAG
ttcactattgagtatgatgt

SEQ ID NO: 71591 - DNA, 20 bp, Artificial Sequence
  Description of Artificial Sequence: Synthetic oligonucleotide
  Target: LAMA2; (-) strand; PAM type: NRG; PAM sequence: GAG
cctttcagcttttcactatt

SEQ ID NO: 71592 - DNA, 20 bp, Artificial Sequence
  Description of Artificial Sequence: Synthetic oligonucleotide
  Target: LAMA2; (-) strand; PAM type: NRG; PAM sequence: CAG
gatcttagagaaaaaccttt

SEQ ID NO: 71593 - DNA, 20 bp, Artificial Sequence
  Description of Artificial Sequence: Synthetic oligonucleotide
  Target: LAMA2; (-) strand; PAM type: NRG; PAM sequence: GAG
ttgtcttattcctgatctta

SEQ ID NO: 71594 - DNA, 20 bp, Artificial Sequence
  Description of Artificial Sequence: Synthetic oligonucleotide
  Target: LAMA2; (-) strand; PAM type: NRG; PAM sequence: TAG
ccttgtcttattcctgatct

SEQ ID NO: 71595 - DNA, 20 bp, Artificial Sequence
  Description of Artificial Sequence: Synthetic oligonucleotide
  Target: LAMA2; (-) strand; PAM type: NRG; PAM sequence: GGG
caaatagaagtggtgcaagt

SEQ ID NO: 71596 - DNA, 20 bp, Artificial Sequence
  Description of Artificial Sequence: Synthetic oligonucleotide
  Target: LAMA2; (-) strand; PAM type: NRG; PAM sequence: TGG
ccaaatagaagtggtgcaag

SEQ ID NO: 71597 - DNA, 20 bp, Artificial Sequence
  Description of Artificial Sequence: Synthetic oligonucleotide
  Target: LAMA2; (-) strand; PAM type: NRG; PAM sequence: AAG
atgccaaatagaagtggtgc

SEQ ID NO: 71598 - DNA, 20 bp, Artificial Sequence
  Description of Artificial Sequence: Synthetic oligonucleotide
  Target: LAMA2; (-) strand; PAM type: NRG; PAM sequence: TGG
agtattatgccaaatagaag

SEQ ID NO: 71599 - DNA, 20 bp, Artificial Sequence
  Description of Artificial Sequence: Synthetic oligonucleotide
  Target: LAMA2; (-) strand; PAM type: NRG; PAM sequence: AAG
tccagtattatgccaaatag

SEQ ID NO: 71600 - DNA, 20 bp, Artificial Sequence
  Description of Artificial Sequence: Synthetic oligonucleotide
  Target: LAMA2; (-) strand; PAM type: NRG; PAM sequence: TAG
tcttccagtattatgccaaa

SEQ ID NO: 71601 - DNA, 20 bp, Artificial Sequence
  Description of Artificial Sequence: Synthetic oligonucleotide
  Target: LAMA2; (-) strand; PAM type: NRG; PAM sequence: CAG
atttctctggctaggtcttc

SEQ ID NO: 71602 - DNA, 20 bp, Artificial Sequence
  Description of Artificial Sequence: Synthetic oligonucleotide
  Target: LAMA2; (-) strand; PAM type: NRG; PAM sequence: AGG
tttgcctgatttctctggct

SEQ ID NO: 71603 - DNA, 20 bp, Artificial Sequence
  Description of Artificial Sequence: Synthetic oligonucleotide
  Target: LAMA2; (-) strand; PAM type: NRG; PAM sequence: TAG
ttttgcctgatttctctggc

SEQ ID NO: 71604 - DNA, 20 bp, Artificial Sequence
  Description of Artificial Sequence: Synthetic oligonucleotide
  Target: LAMA2; (-) strand; PAM type: NRG; PAM sequence: TGG
ctttttttgcctgatttctc

SEQ ID NO: 71605 - DNA, 20 bp, Artificial Sequence
  Description of Artificial Sequence: Synthetic oligonucleotide
  Target: LAMA2; (-) strand; PAM type: NRG; PAM sequence: GAG
gattatgtcatctgcaaaaa

SEQ ID NO: 71606 - DNA, 20 bp, Artificial Sequence
  Description of Artificial Sequence: Synthetic oligonucleotide
  Target: LAMA2; (-) strand; PAM type: NRG; PAM sequence: AAG
aagattatgtcatctgcaaa

SEQ ID NO: 71607 - DNA, 20 bp, Artificial Sequence
  Description of Artificial Sequence: Synthetic oligonucleotide
  Target: LAMA2; (-) strand; PAM type: NRG; PAM sequence: AAG
agtcagggttttctatatgt

SEQ ID NO: 71608 - DNA, 20 bp, Artificial Sequence
  Description of Artificial Sequence: Synthetic oligonucleotide
  Target: LAMA2; (-) strand; PAM type: NRG; PAM sequence: GGG
cagttattttggtggagtca

SEQ ID NO: 71609 - DNA, 20 bp, Artificial Sequence
  Description of Artificial Sequence: Synthetic oligonucleotide
  Target: LAMA2; (-) strand; PAM type: NRG; PAM sequence: AGG
acagttattttggtggagtc

SEQ ID NO: 71610 - DNA, 20 bp, Artificial Sequence
  Description of Artificial Sequence: Synthetic oligonucleotide
  Target: LAMA2; (-) strand; PAM type: NRG; PAM sequence: CAG
aacagttattttggtggagt

SEQ ID NO: 71611 - DNA, 20 bp, Artificial Sequence
  Description of Artificial Sequence: Synthetic oligonucleotide
  Target: LAMA2; (-) strand; PAM type: NRG; PAM sequence: GAG
ttctaacagttattttggtg

SEQ ID NO: 71612 - DNA, 20 bp, Artificial Sequence
  Description of Artificial Sequence: Synthetic oligonucleotide
  Target: LAMA2; (-) strand; PAM type: NRG; PAM sequence: TGG
agttctaacagttattttgg

SEQ ID NO: 71613 - DNA, 20 bp, Artificial Sequence
  Description of Artificial Sequence: Synthetic oligonucleotide
  Target: LAMA2; (-) strand; PAM type: NRG; PAM sequence: TGG
attagttctaacagttattt

SEQ ID NO: 71614 - DNA, 20 bp, Artificial Sequence
  Description of Artificial Sequence: Synthetic oligonucleotide
  Target: LAMA2; (-) strand; PAM type: NRG; PAM sequence: CAG
aatttgtttattagttctaa

SEQ ID NO: 71615 - DNA, 20 bp, Artificial Sequence
  Description of Artificial Sequence: Synthetic oligonucleotide
  Target: LAMA2; (-) strand; PAM type: NRG; PAM sequence: TAG
aatttacagaatttgtttat

SEQ ID NO: 71616 - DNA, 20 bp, Artificial Sequence
  Description of Artificial Sequence: Synthetic oligonucleotide
  Target: LAMA2; (-) strand; PAM type: NRG; PAM sequence: CAG
ttttgtatcctgctaattta

SEQ ID NO: 71617 - DNA, 20 bp, Artificial Sequence
  Description of Artificial Sequence: Synthetic oligonucleotide
  Target: LAMA2; (-) strand; PAM type: NRG; PAM sequence: TAG
tatggaaatgttgctaattt

SEQ ID NO: 71618 - DNA, 20 bp, Artificial Sequence
  Description of Artificial Sequence: Synthetic oligonucleotide
  Target: LAMA2; (-) strand; PAM type: NRG; PAM sequence: TGG
gatagttcctcgttagttta

SEQ ID NO: 71619 - DNA, 20 bp, Artificial Sequence
  Description of Artificial Sequence: Synthetic oligonucleotide
  Target: LAMA2; (-) strand; PAM type: NRG; PAM sequence: TAG
ttttaaagatagttcctcgt

SEQ ID NO: 71620 - DNA, 20 bp, Artificial Sequence
  Description of Artificial Sequence: Synthetic oligonucleotide
  Target: LAMA2; (-) strand; PAM type: NRG; PAM sequence: TAG
tttattgatttttttaaaga

SEQ ID NO: 71621 - DNA, 20 bp, Artificial Sequence
  Description of Artificial Sequence: Synthetic oligonucleotide
  Target: LAMA2; (-) strand; PAM type: NRG; PAM sequence: AAG
ttattttattgattttttta

SEQ ID NO: 71622 - DNA, 20 bp, Artificial Sequence
  Description of Artificial Sequence: Synthetic oligonucleotide
  Target: LAMA2; (-) strand; PAM type: NRG; PAM sequence: GGG
ttcttttagctatggtgaat

SEQ ID NO: 71623 - DNA, 20 bp, Artificial Sequence
  Description of Artificial Sequence: Synthetic oligonucleotide
  Target: LAMA2; (-) strand; PAM type: NRG; PAM sequence: TGG
tttcttttagctatggtgaa

SEQ ID NO: 71624 - DNA, 20 bp, Artificial Sequence
  Description of Artificial Sequence: Synthetic oligonucleotide
  Target: LAMA2; (-) strand; PAM type: NRG; PAM sequence: TGG
ttttatttttcttttagcta

SEQ ID NO: 71625 - DNA, 20 bp, Artificial Sequence
  Description of Artificial Sequence: Synthetic oligonucleotide
  Target: LAMA2; (-) strand; PAM type: NRG; PAM sequence: TAG
caaattttttatttttcttt

SEQ ID NO: 71626 - DNA, 20 bp, Artificial Sequence
  Description of Artificial Sequence: Synthetic oligonucleotide
  Target: LAMA2; (-) strand; PAM type: NRG; PAM sequence: TGG
ccaaatcatagcaatcctct

SEQ ID NO: 71627 - DNA, 20 bp, Artificial Sequence
  Description of Artificial Sequence: Synthetic oligonucleotide
  Target: LAMA2; (-) strand; PAM type: NRG; PAM sequence: TAG
ggggacacagagccaaatca

SEQ ID NO: 71628 - DNA, 20 bp, Artificial Sequence
  Description of Artificial Sequence: Synthetic oligonucleotide
  Target: LAMA2; (-) strand; PAM type: NRG; PAM sequence: GAG
gaaatttgggtggggacaca

SEQ ID NO: 71629 - DNA, 20 bp, Artificial Sequence
  Description of Artificial Sequence: Synthetic oligonucleotide
  Target: LAMA2; (-) strand; PAM type: NRG; PAM sequence: CAG
atgaaatttgggtggggaca

SEQ ID NO: 71630 - DNA, 20 bp, Artificial Sequence
  Description of Artificial Sequence: Synthetic oligonucleotide
  Target: LAMA2; (-) strand; PAM type: NRG; PAM sequence: GGG
ttcaagatgaaatttgggtg

SEQ ID NO: 71631 - DNA, 20 bp, Artificial Sequence
  Description of Artificial Sequence: Synthetic oligonucleotide
  Target: LAMA2; (-) strand; PAM type: NRG; PAM sequence: GGG
attcaagatgaaatttgggt

SEQ ID NO: 71632 - DNA, 20 bp, Artificial Sequence
  Description of Artificial Sequence: Synthetic oligonucleotide
  Target: LAMA2; (-) strand; PAM type: NRG; PAM sequence: TGG
aattcaagatgaaatttggg

SEQ ID NO: 71633 - DNA, 20 bp, Artificial Sequence
  Description of Artificial Sequence: Synthetic oligonucleotide
  Target: LAMA2; (-) strand; PAM type: NRG; PAM sequence: GGG
tacaattcaagatgaaattt

SEQ ID NO: 71634 - DNA, 20 bp, Artificial Sequence
  Description of Artificial Sequence: Synthetic oligonucleotide
  Target: LAMA2; (-) strand; PAM type: NRG; PAM sequence: TGG
gtacaattcaagatgaaatt

SEQ ID NO: 71635 - DNA, 20 bp, Artificial Sequence
  Description of Artificial Sequence: Synthetic oligonucleotide
  Target: LAMA2; (-) strand; PAM type: NRG; PAM sequence: AAG
gaattattggagtacaattc

SEQ ID NO: 71636 - DNA, 20 bp, Artificial Sequence
  Description of Artificial Sequence: Synthetic oligonucleotide
  Target: LAMA2; (-) strand; PAM type: NRG; PAM sequence: GAG
acaacacatgggaattattg

SEQ ID NO: 71637 - DNA, 20 bp, Artificial Sequence
  Description of Artificial Sequence: Synthetic oligonucleotide
  Target: LAMA2; (-) strand; PAM type: NRG; PAM sequence: TGG
ccacaacacatgggaattat

SEQ ID NO: 71638 - DNA, 20 bp, Artificial Sequence
  Description of Artificial Sequence: Synthetic oligonucleotide
  Target: LAMA2; (-) strand; PAM type: NRG; PAM sequence: GGG
aggtccctcccacaacacat

SEQ ID NO: 71639 - DNA, 20 bp, Artificial Sequence
  Description of Artificial Sequence: Synthetic oligonucleotide
  Target: LAMA2; (-) strand; PAM type: NRG; PAM sequence: TGG
caggtccctcccacaacaca

SEQ ID NO: 71640 - DNA, 20 bp, Artificial Sequence
  Description of Artificial Sequence: Synthetic oligonucleotide
  Target: LAMA2; (-) strand; PAM type: NRG; PAM sequence: AGG
tgattcagccatctcccacc

SEQ ID NO: 71641 - DNA, 20 bp, Artificial Sequence
  Description of Artificial Sequence: Synthetic oligonucleotide
  Target: LAMA2; (-) strand; PAM type: NRG; PAM sequence: CAG
atgattcagccatctcccac

SEQ ID NO: 71642 - DNA, 20 bp, Artificial Sequence
  Description of Artificial Sequence: Synthetic oligonucleotide
  Target: LAMA2; (-) strand; PAM type: NRG; PAM sequence: CAG
gggaaaacactcccatgatt

SEQ ID NO: 71643 - DNA, 20 bp, Artificial Sequence
  Description of Artificial Sequence: Synthetic oligonucleotide
  Target: LAMA2; (-) strand; PAM type: NRG; PAM sequence: GGG
ctaccacgacaacagcatgg

SEQ ID NO: 71644 - DNA, 20 bp, Artificial Sequence
  Description of Artificial Sequence: Synthetic oligonucleotide
  Target: LAMA2; (-) strand; PAM type: NRG; PAM sequence: GGG
actaccacgacaacagcatg

SEQ ID NO: 71645 - DNA, 20 bp, Artificial Sequence
  Description of Artificial Sequence: Synthetic oligonucleotide
  Target: LAMA2; (-) strand; PAM type: NRG; PAM sequence: GGG
cactaccacgacaacagcat

SEQ ID NO: 71646 - DNA, 20 bp, Artificial Sequence
  Description of Artificial Sequence: Synthetic oligonucleotide
  Target: LAMA2; (-) strand; PAM type: NRG; PAM sequence: TGG
tcactaccacgacaacagca

SEQ ID NO: 71647 - DNA, 20 bp, Artificial Sequence
  Description of Artificial Sequence: Synthetic oligonucleotide
  Target: LAMA2; (-) strand; PAM type: NRG; PAM sequence: CAG
acttttcactaccacgacaa

SEQ ID NO: 71648 - DNA, 20 bp, Artificial Sequence
  Description of Artificial Sequence: Synthetic oligonucleotide
  Target: LAMA2; (-) strand; PAM type: NRG; PAM sequence: GAG
ataaaactaccagatctcat

SEQ ID NO: 71649 - DNA, 20 bp, Artificial Sequence
  Description of Artificial Sequence: Synthetic oligonucleotide
  Target: LAMA2; (-) strand; PAM type: NRG; PAM sequence: CAG
gaaacccctgataaaactac

SEQ ID NO: 71650 - DNA, 20 bp, Artificial Sequence
  Description of Artificial Sequence: Synthetic oligonucleotide
  Target: LAMA2; (-) strand; PAM type: NRG; PAM sequence: CGG
gaatgaggaaaatgcaaaag

SEQ ID NO: 71651 - DNA, 20 bp, Artificial Sequence
  Description of Artificial Sequence: Synthetic oligonucleotide
  Target: LAMA2; (-) strand; PAM type: NRG; PAM sequence: AAG
agagaatgaggaaaatgcaa

SEQ ID NO: 71652 - DNA, 20 bp, Artificial Sequence
  Description of Artificial Sequence: Synthetic oligonucleotide
  Target: LAMA2; (-) strand; PAM type: NRG; PAM sequence: AGG
cagcaggcaaggagagaatg

SEQ ID NO: 71653 - DNA, 20 bp, Artificial Sequence
  Description of Artificial Sequence: Synthetic oligonucleotide
  Target: LAMA2; (-) strand; PAM type: NRG; PAM sequence: GAG
gcagcaggcaaggagagaat

SEQ ID NO: 71654 - DNA, 20 bp, Artificial Sequence
  Description of Artificial Sequence: Synthetic oligonucleotide
  Target: LAMA2; (-) strand; PAM type: NRG; PAM sequence: GAG
tggatggcagcaggcaagga

SEQ ID NO: 71655 - DNA, 20 bp, Artificial Sequence
  Description of Artificial Sequence: Synthetic oligonucleotide
  Target: LAMA2; (-) strand; PAM type: NRG; PAM sequence: GAG
catggatggcagcaggcaag

SEQ ID NO: 71656 - DNA, 20 bp, Artificial Sequence
  Description of Artificial Sequence: Synthetic oligonucleotide
  Target: LAMA2; (-) strand; PAM type: NRG; PAM sequence: AGG
tacatggatggcagcaggca

SEQ ID NO: 71657 - DNA, 20 bp, Artificial Sequence
  Description of Artificial Sequence: Synthetic oligonucleotide
  Target: LAMA2; (-) strand; PAM type: NRG; PAM sequence: AAG
ttacatggatggcagcaggc

SEQ ID NO: 71658 - DNA, 20 bp, Artificial Sequence
  Description of Artificial Sequence: Synthetic oligonucleotide
  Target: LAMA2; (-) strand; PAM type: NRG; PAM sequence: AGG
tgtcttacatggatggcagc

SEQ ID NO: 71659 - DNA, 20 bp, Artificial Sequence
  Description of Artificial Sequence: Synthetic oligonucleotide
  Target: LAMA2; (-) strand; PAM type: NRG; PAM sequence: CAG
ctgtcttacatggatggcag

SEQ ID NO: 71660 - DNA, 20 bp, Artificial Sequence
  Description of Artificial Sequence: Synthetic oligonucleotide
  Target: LAMA2; (-) strand; PAM type: NRG; PAM sequence: CAG
gtcctgtcttacatggatgg

SEQ ID NO: 71661 - DNA, 20 bp, Artificial Sequence
  Description of Artificial Sequence: Synthetic oligonucleotide
  Target: LAMA2; (-) strand; PAM type: NRG; PAM sequence: TGG
ggagtcctgtcttacatgga

SEQ ID NO: 71662 - DNA, 20 bp, Artificial Sequence
  Description of Artificial Sequence: Synthetic oligonucleotide
  Target: LAMA2; (-) strand; PAM type: NRG; PAM sequence: TGG
aggaggagtcctgtcttaca

SEQ ID NO: 71663 - DNA, 20 bp, Artificial Sequence
  Description of Artificial Sequence: Synthetic oligonucleotide
  Target: LAMA2; (-) strand; PAM type: NRG; PAM sequence: GAG
tcatggtggaaggtaaggag

SEQ ID NO: 71664 - DNA, 20 bp, Artificial Sequence
  Description of Artificial Sequence: Synthetic oligonucleotide
  Target: LAMA2; (-) strand; PAM type: NRG; PAM sequence: AGG
aatcatggtggaaggtaagg

SEQ ID NO: 71665 - DNA, 20 bp, Artificial Sequence
  Description of Artificial Sequence: Synthetic oligonucleotide
  Target: LAMA2; (-) strand; PAM type: NRG; PAM sequence: GAG
caatcatggtggaaggtaag

SEQ ID NO: 71666 - DNA, 20 bp, Artificial Sequence
  Description of Artificial Sequence: Synthetic oligonucleotide
  Target: LAMA2; (-) strand; PAM type: NRG; PAM sequence: AGG
cacaatcatggtggaaggta

SEQ ID NO: 71667 - DNA, 20 bp, Artificial Sequence
  Description of Artificial Sequence: Synthetic oligonucleotide
  Target: LAMA2; (-) strand; PAM type: NRG; PAM sequence: AAG
tcacaatcatggtggaaggt

SEQ ID NO: 71668 - DNA, 20 bp, Artificial Sequence
  Description of Artificial Sequence: Synthetic oligonucleotide
  Target: LAMA2; (-) strand; PAM type: NRG; PAM sequence: AGG
agcctcacaatcatggtgga

SEQ ID NO: 71669 - DNA, 20 bp, Artificial Sequence
  Description of Artificial Sequence: Synthetic oligonucleotide
  Target: LAMA2; (-) strand; PAM type: NRG; PAM sequence: AAG
aagcctcacaatcatggtgg

SEQ ID NO: 71670 - DNA, 20 bp, Artificial Sequence
  Description of Artificial Sequence: Synthetic oligonucleotide
  Target: LAMA2; (-) strand; PAM type: NRG; PAM sequence: TGG
gggaagcctcacaatcatgg

SEQ ID NO: 71671 - DNA, 20 bp, Artificial Sequence
  Description of Artificial Sequence: Synthetic oligonucleotide
  Target: LAMA2; (-) strand; PAM type: NRG; PAM sequence: TGG
ctggggaagcctcacaatca

SEQ ID NO: 71672 - DNA, 20 bp, Artificial Sequence
  Description of Artificial Sequence: Synthetic oligonucleotide
  Target: LAMA2; (-) strand; PAM type: NRG; PAM sequence: AAG
atagttccatgtggctgggg

SEQ ID NO: 71673 - DNA, 20 bp, Artificial Sequence
  Description of Artificial Sequence: Synthetic oligonucleotide
  Target: LAMA2; (-) strand; PAM type: NRG; PAM sequence: GGG
cttatagttccatgtggctg

SEQ ID NO: 71674 - DNA, 20 bp, Artificial Sequence
  Description of Artificial Sequence: Synthetic oligonucleotide
  Target: LAMA2; (-) strand; PAM type: NRG; PAM sequence: GGG
acttatagttccatgtggct

SEQ ID NO: 71675 - DNA, 20 bp, Artificial Sequence
  Description of Artificial Sequence: Synthetic oligonucleotide
  Target: LAMA2; (-) strand; PAM type: NRG; PAM sequence: TGG
gacttatagttccatgtggc

SEQ ID NO: 71676 - DNA, 20 bp, Artificial Sequence
  Description of Artificial Sequence: Synthetic oligonucleotide
  Target: LAMA2; (-) strand; PAM type: NRG; PAM sequence: TGG
attggacttatagttccatg

SEQ ID NO: 71677 - DNA, 20 bp, Artificial Sequence
  Description of Artificial Sequence: Synthetic oligonucleotide
  Target: LAMA2; (-) strand; PAM type: NRG; PAM sequence: TAG
aagaggtttaattggactta

SEQ ID NO: 71678 - DNA, 20 bp, Artificial Sequence
  Description of Artificial Sequence: Synthetic oligonucleotide
  Target: LAMA2; (-) strand; PAM type: NRG; PAM sequence: TGG
acaaaagaaagaggtttaat

SEQ ID NO: 71679 - DNA, 20 bp, Artificial Sequence
  Description of Artificial Sequence: Synthetic oligonucleotide
  Target: LAMA2; (-) strand; PAM type: NRG; PAM sequence: AGG
gggcaatttacaaaagaaag

SEQ ID NO: 71680 - DNA, 20 bp, Artificial Sequence
  Description of Artificial Sequence: Synthetic oligonucleotide
  Target: LAMA2; (-) strand; PAM type: NRG; PAM sequence: GAG
tgggcaatttacaaaagaaa

SEQ ID NO: 71681 - DNA, 20 bp, Artificial Sequence
  Description of Artificial Sequence: Synthetic oligonucleotide
  Target: LAMA2; (-) strand; PAM type: NRG; PAM sequence: AAG
actgggcaatttacaaaaga

SEQ ID NO: 71682 - DNA, 20 bp, Artificial Sequence
  Description of Artificial Sequence: Synthetic oligonucleotide
  Target: LAMA2; (-) strand; PAM type: NRG; PAM sequence: AAG
tgagactgggcaatttacaa

SEQ ID NO: 71683 - DNA, 20 bp, Artificial Sequence
  Description of Artificial Sequence: Synthetic oligonucleotide
  Target: LAMA2; (-) strand; PAM type: NRG; PAM sequence: GGG
aaaaaaaaaaacctgagact

SEQ ID NO: 71684 - DNA, 20 bp, Artificial Sequence
  Description of Artificial Sequence: Synthetic oligonucleotide
  Target: LAMA2; (-) strand; PAM type: NRG; PAM sequence: TGG
aaaaaaaaaaaacctgagac

SEQ ID NO: 71685 - DNA, 20 bp, Artificial Sequence
  Description of Artificial Sequence: Synthetic oligonucleotide
  Target: LAMA2; (-) strand; PAM type: NRG; PAM sequence: GAG
aaaaaaaaaaaaaaaaacct

SEQ ID NO: 71686 - DNA, 20 bp, Artificial Sequence
  Description of Artificial Sequence: Synthetic oligonucleotide
  Target: LAMA2; (-) strand; PAM type: NRG; PAM sequence: GAG
tccagcctgggcgacagagc

SEQ ID NO: 71687 - DNA, 20 bp, Artificial Sequence
  Description of Artificial Sequence: Synthetic oligonucleotide
  Target: LAMA2; (-) strand; PAM type: NRG; PAM sequence: GAG
gcactccagcctgggcgaca

SEQ ID NO: 71688 - DNA, 20 bp, Artificial Sequence
  Description of Artificial Sequence: Synthetic oligonucleotide
  Target: LAMA2; (-) strand; PAM type: NRG; PAM sequence: CAG
ctgcactccagcctgggcga

SEQ ID NO: 71689 - DNA, 20 bp, Artificial Sequence
  Description of Artificial Sequence: Synthetic oligonucleotide
  Target: LAMA2; (-) strand; PAM type: NRG; PAM sequence: GGG
ccgccactgcactccagcct

SEQ ID NO: 71690 - DNA, 20 bp, Artificial Sequence
  Description of Artificial Sequence: Synthetic oligonucleotide
  Target: LAMA2; (-) strand; PAM type: NRG; PAM sequence: TGG
cccgccactgcactccagcc

SEQ ID NO: 71691 - DNA, 20 bp, Artificial Sequence
  Description of Artificial Sequence: Synthetic oligonucleotide
  Target: LAMA2; (-) strand; PAM type: NRG; PAM sequence: CAG
gagatcccgccactgcactc

SEQ ID NO: 71692 - DNA, 20 bp, Artificial Sequence
  Description of Artificial Sequence: Synthetic oligonucleotide
  Target: LAMA2; (-) strand; PAM type: NRG; PAM sequence: GAG
ggcggagcttgcagtgagcc

SEQ ID NO: 71693 - DNA, 20 bp, Artificial Sequence
  Description of Artificial Sequence: Synthetic oligonucleotide
  Target: LAMA2; (-) strand; PAM type: NRG; PAM sequence: GAG
cgggaggcggagcttgcagt

SEQ ID NO: 71694 - DNA, 20 bp, Artificial Sequence
  Description of Artificial Sequence: Synthetic oligonucleotide
  Target: LAMA2; (-) strand; PAM type: NRG; PAM sequence: CAG
aacccgggaggcggagcttg

SEQ ID NO: 71695 - DNA, 20 bp, Artificial Sequence
  Description of Artificial Sequence: Synthetic oligonucleotide
  Target: LAMA2; (-) strand; PAM type: NRG; PAM sequence: GAG
tggcatgaacccgggaggcg

SEQ ID NO: 71696 - DNA, 20 bp, Artificial Sequence
  Description of Artificial Sequence: Synthetic oligonucleotide
  Target: LAMA2; (-) strand; PAM type: NRG; PAM sequence: CGG
aatggcatgaacccgggagg

SEQ ID NO: 71697 - DNA, 20 bp, Artificial Sequence
  Description of Artificial Sequence: Synthetic oligonucleotide
  Target: LAMA2; (-) strand; PAM type: NRG; PAM sequence: AGG
gagaatggcatgaacccggg

SEQ ID NO: 71698 - DNA, 20 bp, Artificial Sequence
  Description of Artificial Sequence: Synthetic oligonucleotide
  Target: LAMA2; (-) strand; PAM type: NRG; PAM sequence: GAG
ggagaatggcatgaacccgg

SEQ ID NO: 71699 - DNA, 20 bp, Artificial Sequence
  Description of Artificial Sequence: Synthetic oligonucleotide
  Target: LAMA2; (-) strand; PAM type: NRG; PAM sequence: GGG
caggagaatggcatgaaccc

SEQ ID NO: 71700 - DNA, 20 bp, Artificial Sequence
  Description of Artificial Sequence: Synthetic oligonucleotide
  Target: LAMA2; (-) strand; PAM type: NRG; PAM sequence: CGG
gcaggagaatggcatgaacc

SEQ ID NO: 71701 - DNA, 20 bp, Artificial Sequence
  Description of Artificial Sequence: Synthetic oligonucleotide
  Target: LAMA2; (-) strand; PAM type: NRG; PAM sequence: TGG
gggaggctgaggcaggagaa

SEQ ID NO: 71702 - DNA, 20 bp, Artificial Sequence
  Description of Artificial Sequence: Synthetic oligonucleotide
  Target: LAMA2; (-) strand; PAM type: NRG; PAM sequence: GAG
tacttgggaggctgaggcag

SEQ ID NO: 71703 - DNA, 20 bp, Artificial Sequence
  Description of Artificial Sequence: Synthetic oligonucleotide
  Target: LAMA2; (-) strand; PAM type: NRG; PAM sequence: AGG
gctacttgggaggctgaggc

SEQ ID NO: 71704 - DNA, 20 bp, Artificial Sequence
  Description of Artificial Sequence: Synthetic oligonucleotide
  Target: LAMA2; (-) strand; PAM type: NRG; PAM sequence: CAG
agctacttgggaggctgagg

SEQ ID NO: 71705 - DNA, 20 bp, Artificial Sequence
  Description of Artificial Sequence: Synthetic oligonucleotide
  Target: LAMA2; (-) strand; PAM type: NRG; PAM sequence: AGG
cccagctacttgggaggctg

SEQ ID NO: 71706 - DNA, 20 bp, Artificial Sequence
  Description of Artificial Sequence: Synthetic oligonucleotide
  Target: LAMA2; (-) strand; PAM type: NRG; PAM sequence: GAG
tcccagctacttgggaggct

SEQ ID NO: 71707 - DNA, 20 bp, Artificial Sequence
  Description of Artificial Sequence: Synthetic oligonucleotide
  Target: LAMA2; (-) strand; PAM type: NRG; PAM sequence: AGG
tgtagtcccagctacttggg

SEQ ID NO: 71708 - DNA, 20 bp, Artificial Sequence
  Description of Artificial Sequence: Synthetic oligonucleotide
  Target: LAMA2; (-) strand; PAM type: NRG; PAM sequence: GAG
ctgtagtcccagctacttgg

SEQ ID NO: 71709 - DNA, 20 bp, Artificial Sequence
  Description of Artificial Sequence: Synthetic oligonucleotide
  Target: LAMA2; (-) strand; PAM type: NRG; PAM sequence: GGG
gcctgtagtcccagctactt

SEQ ID NO: 71710 - DNA, 20 bp, Artificial Sequence
  Description of Artificial Sequence: Synthetic oligonucleotide
  Target: LAMA2; (-) strand; PAM type: NRG; PAM sequence: TGG
cgcctgtagtcccagctact

SEQ ID NO: 71711 - DNA, 20 bp, Artificial Sequence
  Description of Artificial Sequence: Synthetic oligonucleotide
  Target: LAMA2; (-) strand; PAM type: NRG; PAM sequence: CAG
gtggcgggcgcctgtagtcc

SEQ ID NO: 71712 - DNA, 20 bp, Artificial Sequence
  Description of Artificial Sequence: Synthetic oligonucleotide
  Target: LAMA2; (-) strand; PAM type: NRG; PAM sequence: TAG
ggcgtagtggcgggcgcctg

SEQ ID NO: 71713 - DNA, 20 bp, Artificial Sequence
  Description of Artificial Sequence: Synthetic oligonucleotide
  Target: LAMA2; (-) strand; PAM type: NRG; PAM sequence: GGG
aattagccgggcgtagtggc

SEQ ID NO: 71714 - DNA, 20 bp, Artificial Sequence
  Description of Artificial Sequence: Synthetic oligonucleotide
  Target: LAMA2; (-) strand; PAM type: NRG; PAM sequence: CGG
aaattagccgggcgtagtgg

SEQ ID NO: 71715 - DNA, 20 bp, Artificial Sequence
  Description of Artificial Sequence: Synthetic oligonucleotide
  Target: LAMA2; (-) strand; PAM type: NRG; PAM sequence: TGG
aaaaaattagccgggcgtag

SEQ ID NO: 71716 - DNA, 20 bp, Artificial Sequence
  Description of Artificial Sequence: Synthetic oligonucleotide
  Target: LAMA2; (-) strand; PAM type: NRG; PAM sequence: TAG
tacaaaaaattagccgggcg

SEQ ID NO: 71717 - DNA, 20 bp, Artificial Sequence
  Description of Artificial Sequence: Synthetic oligonucleotide
  Target: LAMA2; (-) strand; PAM type: NRG; PAM sequence: GGG
aaaaatacaaaaaattagcc

SEQ ID NO: 71718 - DNA, 20 bp, Artificial Sequence
  Description of Artificial Sequence: Synthetic oligonucleotide
  Target: LAMA2; (-) strand; PAM type: NRG; PAM sequence: CGG
taaaaatacaaaaaattagc

SEQ ID NO: 71719 - DNA, 20 bp, Artificial Sequence
  Description of Artificial Sequence: Synthetic oligonucleotide
  Target: LAMA2; (-) strand; PAM type: NRG; PAM sequence: TAG
ctactaaaaatacaaaaaat

SEQ ID NO: 71720 - DNA, 20 bp, Artificial Sequence
  Description of Artificial Sequence: Synthetic oligonucleotide
  Target: LAMA2; (-) strand; PAM type: NRG; PAM sequence: CGG
cgagaccatcccggctaaaa

SEQ ID NO: 71721 - DNA, 20 bp, Artificial Sequence
  Description of Artificial Sequence: Synthetic oligonucleotide
  Target: LAMA2; (-) strand; PAM type: NRG; PAM sequence: CGG
tcaggagatcgagaccatcc

SEQ ID NO: 71722 - DNA, 20 bp, Artificial Sequence
  Description of Artificial Sequence: Synthetic oligonucleotide
  Target: LAMA2; (-) strand; PAM type: NRG; PAM sequence: GAG
gatcacgaggtcaggagatc

SEQ ID NO: 71723 - DNA, 20 bp, Artificial Sequence
  Description of Artificial Sequence: Synthetic oligonucleotide
  Target: LAMA2; (-) strand; PAM type: NRG; PAM sequence: GAG
cgggcggatcacgaggtcag

SEQ ID NO: 71724 - DNA, 20 bp, Artificial Sequence
  Description of Artificial Sequence: Synthetic oligonucleotide
  Target: LAMA2; (-) strand; PAM type: NRG; PAM sequence: AGG
ggcgggcggatcacgaggtc

SEQ ID NO: 71725 - DNA, 20 bp, Artificial Sequence
  Description of Artificial Sequence: Synthetic oligonucleotide
  Target: LAMA2; (-) strand; PAM type: NRG; PAM sequence: CAG
aggcgggcggatcacgaggt

SEQ ID NO: 71726 - DNA, 20 bp, Artificial Sequence
  Description of Artificial Sequence: Synthetic oligonucleotide
  Target: LAMA2; (-) strand; PAM type: NRG; PAM sequence: AGG
gccgaggcgggcggatcacg

SEQ ID NO: 71727 - DNA, 20 bp, Artificial Sequence
  Description of Artificial Sequence: Synthetic oligonucleotide
  Target: LAMA2; (-) strand; PAM type: NRG; PAM sequence: GAG
ggccgaggcgggcggatcac

SEQ ID NO: 71728 - DNA, 20 bp, Artificial Sequence
  Description of Artificial Sequence: Synthetic oligonucleotide
  Target: LAMA2; (-) strand; PAM type: NRG; PAM sequence: CGG
ctttgggaggccgaggcggg

SEQ ID NO: 71729 - DNA, 20 bp, Artificial Sequence
  Description of Artificial Sequence: Synthetic oligonucleotide
  Target: LAMA2; (-) strand; PAM type: NRG; PAM sequence: GGG
gcactttgggaggccgaggc

SEQ ID NO: 71730 - DNA, 20 bp, Artificial Sequence
  Description of Artificial Sequence: Synthetic oligonucleotide
  Target: LAMA2; (-) strand; PAM type: NRG; PAM sequence: CGG
agcactttgggaggccgagg

SEQ ID NO: 71731 - DNA, 20 bp, Artificial Sequence
  Description of Artificial Sequence: Synthetic oligonucleotide
  Target: LAMA2; (-) strand; PAM type: NRG; PAM sequence: AGG
cccagcactttgggaggccg

SEQ ID NO: 71732 - DNA, 20 bp, Artificial Sequence
  Description of Artificial Sequence: Synthetic oligonucleotide
  Target: LAMA2; (-) strand; PAM type: NRG; PAM sequence: GAG
tcccagcactttgggaggcc

SEQ ID NO: 71733 - DNA, 20 bp, Artificial Sequence
  Description of Artificial Sequence: Synthetic oligonucleotide
  Target: LAMA2; (-) strand; PAM type: NRG; PAM sequence: AGG
tgtaatcccagcactttggg

SEQ ID NO: 71734 - DNA, 20 bp, Artificial Sequence
  Description of Artificial Sequence: Synthetic oligonucleotide
  Target: LAMA2; (-) strand; PAM type: NRG; PAM sequence: GAG
ctgtaatcccagcactttgg

SEQ ID NO: 71735 - DNA, 20 bp, Artificial Sequence
  Description of Artificial Sequence: Synthetic oligonucleotide
  Target: LAMA2; (-) strand; PAM type: NRG; PAM sequence: GGG
gcctgtaatcccagcacttt

SEQ ID NO: 71736 - DNA, 20 bp, Artificial Sequence
  Description of Artificial Sequence: Synthetic oligonucleotide
  Target: LAMA2; (-) strand; PAM type: NRG; PAM sequence: TGG
cgcctgtaatcccagcactt

SEQ ID NO: 71737 - DNA, 20 bp, Artificial Sequence
  Description of Artificial Sequence: Synthetic oligonucleotide
  Target: LAMA2; (-) strand; PAM type: NRG; PAM sequence: CAG
gtggctcacgcctgtaatcc

SEQ ID NO: 71738 - DNA, 20 bp, Artificial Sequence
  Description of Artificial Sequence: Synthetic oligonucleotide
  Target: LAMA2; (-) strand; PAM type: NRG; PAM sequence: TGG
atacctgaggccgggcgcgg

SEQ ID NO: 71739 - DNA, 20 bp, Artificial Sequence
  Description of Artificial Sequence: Synthetic oligonucleotide
  Target: LAMA2; (-) strand; PAM type: NRG; PAM sequence: CGG
gacatacctgaggccgggcg

SEQ ID NO: 71740 - DNA, 20 bp, Artificial Sequence
  Description of Artificial Sequence: Synthetic oligonucleotide
  Target: LAMA2; (-) strand; PAM type: NRG; PAM sequence: GGG
ataaagacatacctgaggcc

SEQ ID NO: 71741 - DNA, 20 bp, Artificial Sequence
  Description of Artificial Sequence: Synthetic oligonucleotide
  Target: LAMA2; (-) strand; PAM type: NRG; PAM sequence: CGG
gataaagacatacctgaggc

SEQ ID NO: 71742 - DNA, 20 bp, Artificial Sequence
  Description of Artificial Sequence: Synthetic oligonucleotide
  Target: LAMA2; (-) strand; PAM type: NRG; PAM sequence: AGG
tgctgataaagacatacctg

SEQ ID NO: 71743 - DNA, 20 bp, Artificial Sequence
  Description of Artificial Sequence: Synthetic oligonucleotide
  Target: LAMA2; (-) strand; PAM type: NRG; PAM sequence: GAG
ctgctgataaagacatacct

SEQ ID NO: 71744 - DNA, 20 bp, Artificial Sequence
  Description of Artificial Sequence: Synthetic oligonucleotide
  Target: LAMA2; (-) strand; PAM type: NRG; PAM sequence: AAG
ctgtttttacactgctgata

SEQ ID NO: 71745 - DNA, 20 bp, Artificial Sequence
  Description of Artificial Sequence: Synthetic oligonucleotide
  Target: LAMA2; (-) strand; PAM type: NRG; PAM sequence: TAG
ccagtctttcatctctgtat

SEQ ID NO: 71746 - DNA, 20 bp, Artificial Sequence
  Description of Artificial Sequence: Synthetic oligonucleotide
  Target: LAMA2; (-) strand; PAM type: NRG; PAM sequence: CAG
ttttacagttttcagtgtac

SEQ ID NO: 71747 - DNA, 20 bp, Artificial Sequence
  Description of Artificial Sequence: Synthetic oligonucleotide
  Target: LAMA2; (-) strand; PAM type: NRG; PAM sequence: CAG
catcactgttttacagtttt

SEQ ID NO: 71748 - DNA, 20 bp, Artificial Sequence
  Description of Artificial Sequence: Synthetic oligonucleotide
  Target: LAMA2; (-) strand; PAM type: NRG; PAM sequence: CAG
tttatttcatcactgtttta

SEQ ID NO: 71749 - DNA, 20 bp, Artificial Sequence
  Description of Artificial Sequence: Synthetic oligonucleotide
  Target: LAMA2; (-) strand; PAM type: NRG; PAM sequence: AGG
ttagttattccacaaaacac

SEQ ID NO: 71750 - DNA, 20 bp, Artificial Sequence
  Description of Artificial Sequence: Synthetic oligonucleotide
  Target: LAMA2; (-) strand; PAM type: NRG; PAM sequence: CAG
attagttattccacaaaaca

SEQ ID NO: 71751 - DNA, 20 bp, Artificial Sequence
  Description of Artificial Sequence: Synthetic oligonucleotide
  Target: LAMA2; (-) strand; PAM type: NRG; PAM sequence: TAG
tatggacattttaataatat

SEQ ID NO: 71752 - DNA, 20 bp, Artificial Sequence
  Description of Artificial Sequence: Synthetic oligonucleotide
  Target: LAMA2; (-) strand; PAM type: NRG; PAM sequence: TGG
gtggatcacattgagtagta

SEQ ID NO: 71753 - DNA, 20 bp, Artificial Sequence
  Description of Artificial Sequence: Synthetic oligonucleotide
  Target: LAMA2; (-) strand; PAM type: NRG; PAM sequence: TAG
aatctgtggatcacattgag

SEQ ID NO: 71754 - DNA, 20 bp, Artificial Sequence
  Description of Artificial Sequence: Synthetic oligonucleotide
  Target: LAMA2; (-) strand; PAM type: NRG; PAM sequence: GAG
ctgaatctgtggatcacatt

SEQ ID NO: 71755 - DNA, 20 bp, Artificial Sequence
  Description of Artificial Sequence: Synthetic oligonucleotide
  Target: LAMA2; (-) strand; PAM type: NRG; PAM sequence: TGG
caagaattgcactgaatctg

SEQ ID NO: 71756 - DNA, 20 bp, Artificial Sequence
  Description of Artificial Sequence: Synthetic oligonucleotide
  Target: LAMA2; (-) strand; PAM type: NRG; PAM sequence: AAG
aacgtcattggaattttgac

SEQ ID NO: 71757 - DNA, 20 bp, Artificial Sequence
  Description of Artificial Sequence: Synthetic oligonucleotide
  Target: LAMA2; (-) strand; PAM type: NRG; PAM sequence: TGG
atttctgtgaaaaacgtcat

SEQ ID NO: 71758 - DNA, 20 bp, Artificial Sequence
  Description of Artificial Sequence: Synthetic oligonucleotide
  Target: LAMA2; (-) strand; PAM type: NRG; PAM sequence: AGG
tgtggttccataaaatattt

SEQ ID NO: 71759 - DNA, 20 bp, Artificial Sequence
  Description of Artificial Sequence: Synthetic oligonucleotide
  Target: LAMA2; (-) strand; PAM type: NRG; PAM sequence: TAG
ttgtggttccataaaatatt

SEQ ID NO: 71760 - DNA, 20 bp, Artificial Sequence
  Description of Artificial Sequence: Synthetic oligonucleotide
  Target: LAMA2; (-) strand; PAM type: NRG; PAM sequence: TGG
gattgctttagcaccttttg

SEQ ID NO: 71761 - DNA, 20 bp, Artificial Sequence
  Description of Artificial Sequence: Synthetic oligonucleotide
  Target: LAMA2; (-) strand; PAM type: NRG; PAM sequence: TAG
ctttttgctcaagattgctt

SEQ ID NO: 71762 - DNA, 20 bp, Artificial Sequence
  Description of Artificial Sequence: Synthetic oligonucleotide
  Target: LAMA2; (-) strand; PAM type: NRG; PAM sequence: AAG
cagctttgttctttttgctc

SEQ ID NO: 71763 - DNA, 20 bp, Artificial Sequence
  Description of Artificial Sequence: Synthetic oligonucleotide
  Target: LAMA2; (-) strand; PAM type: NRG; PAM sequence: CAG
gtcagatagtgtgatgcttc

SEQ ID NO: 71764 - DNA, 20 bp, Artificial Sequence
  Description of Artificial Sequence: Synthetic oligonucleotide
  Target: LAMA2; (-) strand; PAM type: NRG; PAM sequence: TAG
tagtatattttaaagtcaga

SEQ ID NO: 71765 - DNA, 20 bp, Artificial Sequence
  Description of Artificial Sequence: Synthetic oligonucleotide
  Target: LAMA2; (-) strand; PAM type: NRG; PAM sequence: CAG
tttgtagtatattttaaagt

SEQ ID NO: 71766 - DNA, 20 bp, Artificial Sequence
  Description of Artificial Sequence: Synthetic oligonucleotide
  Target: LAMA2; (-) strand; PAM type: NRG; PAM sequence: AAG
cagctttgtagtatatttta

SEQ ID NO: 71767 - DNA, 20 bp, Artificial Sequence
  Description of Artificial Sequence: Synthetic oligonucleotide
  Target: LAMA2; (-) strand; PAM type: NRG; PAM sequence: TAG
ttttgattactacagctttg

SEQ ID NO: 71768 - DNA, 20 bp, Artificial Sequence
  Description of Artificial Sequence: Synthetic oligonucleotide
  Target: LAMA2; (-) strand; PAM type: NRG; PAM sequence: CAG
gcatactgttttgattacta

SEQ ID NO: 71769 - DNA, 20 bp, Artificial Sequence
  Description of Artificial Sequence: Synthetic oligonucleotide
  Target: LAMA2; (-) strand; PAM type: NRG; PAM sequence: CAG
tgtatctgtttttaagttag

SEQ ID NO: 71770 - DNA, 20 bp, Artificial Sequence
  Description of Artificial Sequence: Synthetic oligonucleotide
  Target: LAMA2; (-) strand; PAM type: NRG; PAM sequence: TAG
ctatgtatctgtttttaagt

SEQ ID NO: 71771 - DNA, 20 bp, Artificial Sequence
  Description of Artificial Sequence: Synthetic oligonucleotide
  Target: LAMA2; (-) strand; PAM type: NRG; PAM sequence: AAG
tggtctatgtatctgttttt

SEQ ID NO: 71772 - DNA, 20 bp, Artificial Sequence
  Description of Artificial Sequence: Synthetic oligonucleotide
  Target: LAMA2; (-) strand; PAM type: NRG; PAM sequence: TGG
gggctcctattctattctgt

SEQ ID NO: 71773 - DNA, 20 bp, Artificial Sequence
  Description of Artificial Sequence: Synthetic oligonucleotide
  Target: LAMA2; (-) strand; PAM type: NRG; PAM sequence: GGG
aaatgcttagatttatttct

SEQ ID NO: 71774 - DNA, 20 bp, Artificial Sequence
  Description of Artificial Sequence: Synthetic oligonucleotide
  Target: LAMA2; (-) strand; PAM type: NRG; PAM sequence: TGG
taaatgcttagatttatttc

SEQ ID NO: 71775 - DNA, 20 bp, Artificial Sequence
  Description of Artificial Sequence: Synthetic oligonucleotide
  Target: LAMA2; (-) strand; PAM type: NRG; PAM sequence: TAG
atcaattgaccataaatgct

SEQ ID NO: 71776 - DNA, 20 bp, Artificial Sequence
  Description of Artificial Sequence: Synthetic oligonucleotide
  Target: LAMA2; (-) strand; PAM type: NRG; PAM sequence: TGG
tcaatcccattgtgtgttct

SEQ ID NO: 71777 - DNA, 20 bp, Artificial Sequence
  Description of Artificial Sequence: Synthetic oligonucleotide
  Target: LAMA2; (-) strand; PAM type: NRG; PAM sequence: CAG
aacacccttcactggacaga

SEQ ID NO: 71778 - DNA, 20 bp, Artificial Sequence
  Description of Artificial Sequence: Synthetic oligonucleotide
  Target: LAMA2; (-) strand; PAM type: NRG; PAM sequence: CAG
tccaaacacccttcactgga

SEQ ID NO: 71779 - DNA, 20 bp, Artificial Sequence
  Description of Artificial Sequence: Synthetic oligonucleotide
  Target: LAMA2; (-) strand; PAM type: NRG; PAM sequence: TGG
ctgctccaaacacccttcac

SEQ ID NO: 71780 - DNA, 20 bp, Artificial Sequence
  Description of Artificial Sequence: Synthetic oligonucleotide
  Target: LAMA2; (-) strand; PAM type: NRG; PAM sequence: TGG
tatactcattcttctgcatg

SEQ ID NO: 71781 - DNA, 20 bp, Artificial Sequence
  Description of Artificial Sequence: Synthetic oligonucleotide
  Target: LAMA2; (-) strand; PAM type: NRG; PAM sequence: GGG
ttttatatggcatgagataa

SEQ ID NO: 71782 - DNA, 20 bp, Artificial Sequence
  Description of Artificial Sequence: Synthetic oligonucleotide
  Target: LAMA2; (-) strand; PAM type: NRG; PAM sequence: AGG
tttttatatggcatgagata

SEQ ID NO: 71783 - DNA, 20 bp, Artificial Sequence
  Description of Artificial Sequence: Synthetic oligonucleotide
  Target: LAMA2; (-) strand; PAM type: NRG; PAM sequence: AAG
ttttttatatggcatgagat

SEQ ID NO: 71784 - DNA, 20 bp, Artificial Sequence
  Description of Artificial Sequence: Synthetic oligonucleotide
  Target: LAMA2; (-) strand; PAM type: NRG; PAM sequence: GAG
atggattttttatatggcat

SEQ ID NO: 71785 - DNA, 20 bp, Artificial Sequence
  Description of Artificial Sequence: Synthetic oligonucleotide
  Target: LAMA2; (-) strand; PAM type: NRG; PAM sequence: TGG
atttgaatggattttttata

SEQ ID NO: 71786 - DNA, 20 bp, Artificial Sequence
  Description of Artificial Sequence: Synthetic oligonucleotide
  Target: LAMA2; (-) strand; PAM type: NRG; PAM sequence: TGG
taattcatttagaatttgaa

SEQ ID NO: 71787 - DNA, 20 bp, Artificial Sequence
  Description of Artificial Sequence: Synthetic oligonucleotide
  Target: LAMA2; (-) strand; PAM type: NRG; PAM sequence: TAG
gtttcagtctttaattcatt

SEQ ID NO: 71788 - DNA, 20 bp, Artificial Sequence
  Description of Artificial Sequence: Synthetic oligonucleotide
  Target: LAMA2; (-) strand; PAM type: NRG; PAM sequence: CAG
tttcagtagttttacagttt

SEQ ID NO: 71789 - DNA, 20 bp, Artificial Sequence
  Description of Artificial Sequence: Synthetic oligonucleotide
  Target: LAMA2; (-) strand; PAM type: NRG; PAM sequence: CAG
gttttctttcagtagtttta

SEQ ID NO: 71790 - DNA, 20 bp, Artificial Sequence
  Description of Artificial Sequence: Synthetic oligonucleotide
  Target: LAMA2; (-) strand; PAM type: NRG; PAM sequence: TAG
tcccctgtgttttctttcag

SEQ ID NO: 71791 - DNA, 20 bp, Artificial Sequence
  Description of Artificial Sequence: Synthetic oligonucleotide
  Target: LAMA2; (-) strand; PAM type: NRG; PAM sequence: CAG
ttttcccctgtgttttcttt

SEQ ID NO: 71792 - DNA, 20 bp, Artificial Sequence
  Description of Artificial Sequence: Synthetic oligonucleotide
  Target: LAMA2; (-) strand; PAM type: NRG; PAM sequence: TGG
cattgcccagaccaatgtca

SEQ ID NO: 71793 - DNA, 20 bp, Artificial Sequence
  Description of Artificial Sequence: Synthetic oligonucleotide
  Target: LAMA2; (-) strand; PAM type: NRG; PAM sequence: CAG
atctttaaaaaatcattgcc

SEQ ID NO: 71794 - DNA, 20 bp, Artificial Sequence
  Description of Artificial Sequence: Synthetic oligonucleotide
  Target: LAMA2; (-) strand; PAM type: NRG; PAM sequence: GGG
attgtgtttcctgtgctttg

SEQ ID NO: 71795 - DNA, 20 bp, Artificial Sequence
  Description of Artificial Sequence: Synthetic oligonucleotide
  Target: LAMA2; (-) strand; PAM type: NRG; PAM sequence: GGG
tattgtgtttcctgtgcttt

SEQ ID NO: 71796 - DNA, 20 bp, Artificial Sequence
  Description of Artificial Sequence: Synthetic oligonucleotide
  Target: LAMA2; (-) strand; PAM type: NRG; PAM sequence: TGG
ttattgtgtttcctgtgctt

SEQ ID NO: 71797 - DNA, 20 bp, Artificial Sequence
  Description of Artificial Sequence: Synthetic oligonucleotide
  Target: LAMA2; (-) strand; PAM type: NRG; PAM sequence: CAG
ctggttatccagatgtgttt

SEQ ID NO: 71798 - DNA, 20 bp, Artificial Sequence
  Description of Artificial Sequence: Synthetic oligonucleotide
  Target: LAMA2; (-) strand; PAM type: NRG; PAM sequence: CAG
tgattgtttccctggttatc

SEQ ID NO: 71799 - DNA, 20 bp, Artificial Sequence
  Description of Artificial Sequence: Synthetic oligonucleotide
  Target: LAMA2; (-) strand; PAM type: NRG; PAM sequence: TGG
agccatgttgattgtttccc

SEQ ID NO: 71800 - DNA, 20 bp, Artificial Sequence
  Description of Artificial Sequence: Synthetic oligonucleotide
  Target: LAMA2; (-) strand; PAM type: NRG; PAM sequence: CAG
aaattcagtgatttgaagag

SEQ ID NO: 71801 - DNA, 20 bp, Artificial Sequence
  Description of Artificial Sequence: Synthetic oligonucleotide
  Target: LAMA2; (-) strand; PAM type: NRG; PAM sequence: GAG
aataaattcagtgatttgaa

SEQ ID NO: 71802 - DNA, 20 bp, Artificial Sequence
  Description of Artificial Sequence: Synthetic oligonucleotide
  Target: LAMA2; (-) strand; PAM type: NRG; PAM sequence: AAG
aaaataaattcagtgatttg

SEQ ID NO: 71803 - DNA, 20 bp, Artificial Sequence
  Description of Artificial Sequence: Synthetic oligonucleotide
  Target: LAMA2; (-) strand; PAM type: NRG; PAM sequence: CAG
tagtaccaacaaaataaatt

SEQ ID NO: 71804 - DNA, 20 bp, Artificial Sequence
  Description of Artificial Sequence: Synthetic oligonucleotide
  Target: LAMA2; (-) strand; PAM type: NRG; PAM sequence: TAG
caatttagcagtgacccaaa

SEQ ID NO: 71805 - DNA, 20 bp, Artificial Sequence
  Description of Artificial Sequence: Synthetic oligonucleotide
  Target: LAMA2; (-) strand; PAM type: NRG; PAM sequence: CAG
tttggtattcaccaatttag

SEQ ID NO: 71806 - DNA, 20 bp, Artificial Sequence
  Description of Artificial Sequence: Synthetic oligonucleotide
  Target: LAMA2; (-) strand; PAM type: NRG; PAM sequence: TAG
tagtttggtattcaccaatt

SEQ ID NO: 71807 - DNA, 20 bp, Artificial Sequence
  Description of Artificial Sequence: Synthetic oligonucleotide
  Target: LAMA2; (-) strand; PAM type: NRG; PAM sequence: TGG
taatctcttctgtgttagtt

SEQ ID NO: 71808 - DNA, 20 bp, Artificial Sequence
  Description of Artificial Sequence: Synthetic oligonucleotide
  Target: LAMA2; (-) strand; PAM type: NRG; PAM sequence: TAG
tattataatctcttctgtgt

SEQ ID NO: 71809 - DNA, 20 bp, Artificial Sequence
  Description of Artificial Sequence: Synthetic oligonucleotide
  Target: LAMA2; (-) strand; PAM type: NRG; PAM sequence: TGG
ggtaaggtataatctacatt

SEQ ID NO: 71810 - DNA, 20 bp, Artificial Sequence
  Description of Artificial Sequence: Synthetic oligonucleotide
  Target: LAMA2; (-) strand; PAM type: NRG; PAM sequence: AGG
acttaaggtatactcaggta

SEQ ID NO: 71811 - DNA, 20 bp, Artificial Sequence
  Description of Artificial Sequence: Synthetic oligonucleotide
  Target: LAMA2; (-) strand; PAM type: NRG; PAM sequence: AAG
tacttaaggtatactcaggt

SEQ ID NO: 71812 - DNA, 20 bp, Artificial Sequence
  Description of Artificial Sequence: Synthetic oligonucleotide
  Target: LAMA2; (-) strand; PAM type: NRG; PAM sequence: AGG
gttgtacttaaggtatactc

SEQ ID NO: 71813 - DNA, 20 bp, Artificial Sequence
  Description of Artificial Sequence: Synthetic oligonucleotide
  Target: LAMA2; (-) strand; PAM type: NRG; PAM sequence: CAG
tgttgtacttaaggtatact

SEQ ID NO: 71814 - DNA, 20 bp, Artificial Sequence
  Description of Artificial Sequence: Synthetic oligonucleotide
  Target: LAMA2; (-) strand; PAM type: NRG; PAM sequence: AGG
actatattctgttgtactta

SEQ ID NO: 71815 - DNA, 20 bp, Artificial Sequence
  Description of Artificial Sequence: Synthetic oligonucleotide
  Target: LAMA2; (-) strand; PAM type: NRG; PAM sequence: AAG
aactatattctgttgtactt

SEQ ID NO: 71816 - DNA, 20 bp, Artificial Sequence
  Description of Artificial Sequence: Synthetic oligonucleotide
  Target: LAMA2; (-) strand; PAM type: NRG; PAM sequence: AAG
atatacaattaaaacaggta

SEQ ID NO: 71817 - DNA, 20 bp, Artificial Sequence
  Description of Artificial Sequence: Synthetic oligonucleotide
  Target: LAMA2; (-) strand; PAM type: NRG; PAM sequence: AGG
aatctatatacaattaaaac

SEQ ID NO: 71818 - DNA, 20 bp, Artificial Sequence
  Description of Artificial Sequence: Synthetic oligonucleotide
  Target: LAMA2; (-) strand; PAM type: NRG; PAM sequence: CAG
aaatctatatacaattaaaa

SEQ ID NO: 71819 - DNA, 20 bp, Artificial Sequence
  Description of Artificial Sequence: Synthetic oligonucleotide
  Target: LAMA2; (-) strand; PAM type: NRG; PAM sequence: CAG
atatattttctaattaacca

SEQ ID NO: 71820 - DNA, 20 bp, Artificial Sequence
  Description of Artificial Sequence: Synthetic oligonucleotide
  Target: LAMA2; (-) strand; PAM type: NRG; PAM sequence: GGG
tcagcacaaattcatttaaa

SEQ ID NO: 71821 - DNA, 20 bp, Artificial Sequence
  Description of Artificial Sequence: Synthetic oligonucleotide
  Target: LAMA2; (-) strand; PAM type: NRG; PAM sequence: AGG
gtcagcacaaattcatttaa

SEQ ID NO: 71822 - DNA, 20 bp, Artificial Sequence
  Description of Artificial Sequence: Synthetic oligonucleotide
  Target: LAMA2; (-) strand; PAM type: NRG; PAM sequence: AAG
agtcagcacaaattcattta

SEQ ID NO: 71823 - DNA, 20 bp, Artificial Sequence
  Description of Artificial Sequence: Synthetic oligonucleotide
  Target: LAMA2; (-) strand; PAM type: NRG; PAM sequence: CAG
ttattaataattttaaaagt

SEQ ID NO: 71824 - DNA, 20 bp, Artificial Sequence
  Description of Artificial Sequence: Synthetic oligonucleotide
  Target: LAMA2; (-) strand; PAM type: NRG; PAM sequence: AAG
acctttattaataattttaa

SEQ ID NO: 71825 - DNA, 20 bp, Artificial Sequence
  Description of Artificial Sequence: Synthetic oligonucleotide
  Target: LAMA2; (-) strand; PAM type: NRG; PAM sequence: TAG
ttcaatatagacaccaaagc

SEQ ID NO: 71826 - DNA, 20 bp, Artificial Sequence
  Description of Artificial Sequence: Synthetic oligonucleotide
  Target: LAMA2; (-) strand; PAM type: NRG; PAM sequence: AAG
tttcttcaatatagacacca

SEQ ID NO: 71827 - DNA, 20 bp, Artificial Sequence
  Description of Artificial Sequence: Synthetic oligonucleotide
  Target: LAMA2; (-) strand; PAM type: NRG; PAM sequence: TAG
gatgaacattttcttcaata

SEQ ID NO: 71828 - DNA, 20 bp, Artificial Sequence
  Description of Artificial Sequence: Synthetic oligonucleotide
  Target: LAMA2; (-) strand; PAM type: NRG; PAM sequence: AGG
tagacaaacggaaaccaatt

SEQ ID NO: 71829 - DNA, 20 bp, Artificial Sequence
  Description of Artificial Sequence: Synthetic oligonucleotide
  Target: LAMA2; (-) strand; PAM type: NRG; PAM sequence: TAG
gtagacaaacggaaaccaat

SEQ ID NO: 71830 - DNA, 20 bp, Artificial Sequence
  Description of Artificial Sequence: Synthetic oligonucleotide
  Target: LAMA2; (-) strand; PAM type: NRG; PAM sequence: CGG
cagaccaaagggtagacaaa

SEQ ID NO: 71831 - DNA, 20 bp, Artificial Sequence
  Description of Artificial Sequence: Synthetic oligonucleotide
  Target: LAMA2; (-) strand; PAM type: NRG; PAM sequence: TAG
gttgaaagcagaccaaaggg

SEQ ID NO: 71832 - DNA, 20 bp, Artificial Sequence
  Description of Artificial Sequence: Synthetic oligonucleotide
  Target: LAMA2; (-) strand; PAM type: NRG; PAM sequence: GGG
tgtgttgaaagcagaccaaa

SEQ ID NO: 71833 - DNA, 20 bp, Artificial Sequence
  Description of Artificial Sequence: Synthetic oligonucleotide
  Target: LAMA2; (-) strand; PAM type: NRG; PAM sequence: AGG
ctgtgttgaaagcagaccaa

SEQ ID NO: 71834 - DNA, 20 bp, Artificial Sequence
  Description of Artificial Sequence: Synthetic oligonucleotide
  Target: LAMA2; (-) strand; PAM type: NRG; PAM sequence: AAG
gctgtgttgaaagcagacca

SEQ ID NO: 71835 - DNA, 20 bp, Artificial Sequence
  Description of Artificial Sequence: Synthetic oligonucleotide
  Target: LAMA2; (-) strand; PAM type: NRG; PAM sequence: CAG
tgtgactgctgtgttgaaag

SEQ ID NO: 71836 - DNA, 20 bp, Artificial Sequence
  Description of Artificial Sequence: Synthetic oligonucleotide
  Target: LAMA2; (-) strand; PAM type: NRG; PAM sequence: AAG
tgctgtgactgctgtgttga

SEQ ID NO: 71837 - DNA, 20 bp, Artificial Sequence
  Description of Artificial Sequence: Synthetic oligonucleotide
  Target: LAMA2; (-) strand; PAM type: NRG; PAM sequence: GAG
gttatgtgatctgtactaat

SEQ ID NO: 71838 - DNA, 20 bp, Artificial Sequence
  Description of Artificial Sequence: Synthetic oligonucleotide
  Target: LAMA2; (-) strand; PAM type: NRG; PAM sequence: AAG
agatttccacttttagtgga

SEQ ID NO: 71839 - DNA, 20 bp, Artificial Sequence
  Description of Artificial Sequence: Synthetic oligonucleotide
  Target: LAMA2; (-) strand; PAM type: NRG; PAM sequence: TGG
aataagatttccacttttag

SEQ ID NO: 71840 - DNA, 20 bp, Artificial Sequence
  Description of Artificial Sequence: Synthetic oligonucleotide
  Target: LAMA2; (-) strand; PAM type: NRG; PAM sequence: TAG
actaataagatttccacttt

SEQ ID NO: 71841 - DNA, 20 bp, Artificial Sequence
  Description of Artificial Sequence: Synthetic oligonucleotide
  Target: LAMA2; (-) strand; PAM type: NRG; PAM sequence: AAG
gttgtgtgatctgtactaat

SEQ ID NO: 71842 - DNA, 20 bp, Artificial Sequence
  Description of Artificial Sequence: Synthetic oligonucleotide
  Target: LAMA2; (-) strand; PAM type: NRG; PAM sequence: AAG
cagtagagacttttagtgga

SEQ ID NO: 71843 - DNA, 20 bp, Artificial Sequence
  Description of Artificial Sequence: Synthetic oligonucleotide
  Target: LAMA2; (-) strand; PAM type: NRG; PAM sequence: TGG
aaaccagtagagacttttag

SEQ ID NO: 71844 - DNA, 20 bp, Artificial Sequence
  Description of Artificial Sequence: Synthetic oligonucleotide
  Target: LAMA2; (-) strand; PAM type: NRG; PAM sequence: TAG
ggaaaaccagtagagacttt

SEQ ID NO: 71845 - DNA, 20 bp, Artificial Sequence
  Description of Artificial Sequence: Synthetic oligonucleotide
  Target: LAMA2; (-) strand; PAM type: NRG; PAM sequence: GAG
aatgtgatggaaaaccagta

SEQ ID NO: 71846 - DNA, 20 bp, Artificial Sequence
  Description of Artificial Sequence: Synthetic oligonucleotide
  Target: LAMA2; (-) strand; PAM type: NRG; PAM sequence: TAG
tgaatgtgatggaaaaccag

SEQ ID NO: 71847 - DNA, 20 bp, Artificial Sequence
  Description of Artificial Sequence: Synthetic oligonucleotide
  Target: LAMA2; (-) strand; PAM type: NRG; PAM sequence: CAG
cactgaatgtgatggaaaac

SEQ ID NO: 71848 - DNA, 20 bp, Artificial Sequence
  Description of Artificial Sequence: Synthetic oligonucleotide
  Target: LAMA2; (-) strand; PAM type: NRG; PAM sequence: TGG
gcttttcccactgaatgtga

SEQ ID NO: 71849 - DNA, 20 bp, Artificial Sequence
  Description of Artificial Sequence: Synthetic oligonucleotide
  Target: LAMA2; (-) strand; PAM type: NRG; PAM sequence: GGG
aaaggtccttaaggccttgt

SEQ ID NO: 71850 - DNA, 20 bp, Artificial Sequence
  Description of Artificial Sequence: Synthetic oligonucleotide
  Target: LAMA2; (-) strand; PAM type: NRG; PAM sequence: TGG
aaaaggtccttaaggccttg

SEQ ID NO: 71851 - DNA, 20 bp, Artificial Sequence
  Description of Artificial Sequence: Synthetic oligonucleotide
  Target: LAMA2; (-) strand; PAM type: NRG; PAM sequence: AGG
aggtgaggaaaaggtcctta

SEQ ID NO: 71852 - DNA, 20 bp, Artificial Sequence
  Description of Artificial Sequence: Synthetic oligonucleotide
  Target: LAMA2; (-) strand; PAM type: NRG; PAM sequence: AAG
gaggtgaggaaaaggtcctt

SEQ ID NO: 71853 - DNA, 20 bp, Artificial Sequence
  Description of Artificial Sequence: Synthetic oligonucleotide
  Target: LAMA2; (-) strand; PAM type: NRG; PAM sequence: AGG
gatgaaaagaggtgaggaaa

SEQ ID NO: 71854 - DNA, 20 bp, Artificial Sequence
  Description of Artificial Sequence: Synthetic oligonucleotide
  Target: LAMA2; (-) strand; PAM type: NRG; PAM sequence: AAG
agatgaaaagaggtgaggaa

SEQ ID NO: 71855 - DNA, 20 bp, Artificial Sequence
  Description of Artificial Sequence: Synthetic oligonucleotide
  Target: LAMA2; (-) strand; PAM type: NRG; PAM sequence: AGG
gccagagatgaaaagaggtg

SEQ ID NO: 71856 - DNA, 20 bp, Artificial Sequence
  Description of Artificial Sequence: Synthetic oligonucleotide
  Target: LAMA2; (-) strand; PAM type: NRG; PAM sequence: GAG
ggccagagatgaaaagaggt

SEQ ID NO: 71857 - DNA, 20 bp, Artificial Sequence
  Description of Artificial Sequence: Synthetic oligonucleotide
  Target: LAMA2; (-) strand; PAM type: NRG; PAM sequence: AGG
atgaggccagagatgaaaag

SEQ ID NO: 71858 - DNA, 20 bp, Artificial Sequence
  Description of Artificial Sequence: Synthetic oligonucleotide
  Target: LAMA2; (-) strand; PAM type: NRG; PAM sequence: GAG
gatgaggccagagatgaaaa

SEQ ID NO: 71859 - DNA, 20 bp, Artificial Sequence
  Description of Artificial Sequence: Synthetic oligonucleotide
  Target: LAMA2; (-) strand; PAM type: NRG; PAM sequence: AAG
cagatgaggccagagatgaa

SEQ ID NO: 71860 - DNA, 20 bp, Artificial Sequence
  Description of Artificial Sequence: Synthetic oligonucleotide
  Target: LAMA2; (-) strand; PAM type: NRG; PAM sequence: GAG
agagagatcagatgaggcca

SEQ ID NO: 71861 - DNA, 20 bp, Artificial Sequence
  Description of Artificial Sequence: Synthetic oligonucleotide
  Target: LAMA2; (-) strand; PAM type: NRG; PAM sequence: CAG
gaagagagatcagatgaggc

SEQ ID NO: 71862 - DNA, 20 bp, Artificial Sequence
  Description of Artificial Sequence: Synthetic oligonucleotide
  Target: LAMA2; (-) strand; PAM type: NRG; PAM sequence: AGG
tgaggaagagagatcagatg

SEQ ID NO: 71863 - DNA, 20 bp, Artificial Sequence
  Description of Artificial Sequence: Synthetic oligonucleotide
  Target: LAMA2; (-) strand; PAM type: NRG; PAM sequence: GAG
ctgaggaagagagatcagat

SEQ ID NO: 71864 - DNA, 20 bp, Artificial Sequence
  Description of Artificial Sequence: Synthetic oligonucleotide
  Target: LAMA2; (-) strand; PAM type: NRG; PAM sequence: CAG
ggcaactgaggaagagagat

SEQ ID NO: 71865 - DNA, 20 bp, Artificial Sequence
  Description of Artificial Sequence: Synthetic oligonucleotide
  Target: LAMA2; (-) strand; PAM type: NRG; PAM sequence: GAG
agctgggcaactgaggaaga

SEQ ID NO: 71866 - DNA, 20 bp, Artificial Sequence
  Description of Artificial Sequence: Synthetic oligonucleotide
  Target: LAMA2; (-) strand; PAM type: NRG; PAM sequence: GAG
ccagctgggcaactgaggaa

SEQ ID NO: 71867 - DNA, 20 bp, Artificial Sequence
  Description of Artificial Sequence: Synthetic oligonucleotide
  Target: LAMA2; (-) strand; PAM type: NRG; PAM sequence: AAG
gaccagctgggcaactgagg

SEQ ID NO: 71868 - DNA, 20 bp, Artificial Sequence
  Description of Artificial Sequence: Synthetic oligonucleotide
  Target: LAMA2; (-) strand; PAM type: NRG; PAM sequence: AGG
gatgaccagctgggcaactg

SEQ ID NO: 71869 - DNA, 20 bp, Artificial Sequence
  Description of Artificial Sequence: Synthetic oligonucleotide
  Target: LAMA2; (-) strand; PAM type: NRG; PAM sequence: GAG
ggatgaccagctgggcaact

SEQ ID NO: 71870 - DNA, 20 bp, Artificial Sequence
  Description of Artificial Sequence: Synthetic oligonucleotide
  Target: LAMA2; (-) strand; PAM type: NRG; PAM sequence: GGG
acatagcgggatgaccagct

SEQ ID NO: 71871 - DNA, 20 bp, Artificial Sequence
  Description of Artificial Sequence: Synthetic oligonucleotide
  Target: LAMA2; (-) strand; PAM type: NRG; PAM sequence: TGG
gacatagcgggatgaccagc

SEQ ID NO: 71872 - DNA, 20 bp, Artificial Sequence
  Description of Artificial Sequence: Synthetic oligonucleotide
  Target: LAMA2; (-) strand; PAM type: NRG; PAM sequence: CAG
tcaagacatagcgggatgac

SEQ ID NO: 71873 - DNA, 20 bp, Artificial Sequence
  Description of Artificial Sequence: Synthetic oligonucleotide
  Target: LAMA2; (-) strand; PAM type: NRG; PAM sequence: GGG
gtgagtgttcaagacatagc

SEQ ID NO: 71874 - DNA, 20 bp, Artificial Sequence
  Description of Artificial Sequence: Synthetic oligonucleotide
  Target: LAMA2; (-) strand; PAM type: NRG; PAM sequence: CGG
tgtgagtgttcaagacatag

SEQ ID NO: 71875 - DNA, 20 bp, Artificial Sequence
  Description of Artificial Sequence: Synthetic oligonucleotide
  Target: LAMA2; (-) strand; PAM type: NRG; PAM sequence: TAG
aggtgtgagtgttcaagaca

SEQ ID NO: 71876 - DNA, 20 bp, Artificial Sequence
  Description of Artificial Sequence: Synthetic oligonucleotide
  Target: LAMA2; (-) strand; PAM type: NRG; PAM sequence: AAG
tgaggcaggtgtgagtgttc

SEQ ID NO: 71877 - DNA, 20 bp, Artificial Sequence
  Description of Artificial Sequence: Synthetic oligonucleotide
  Target: LAMA2; (-) strand; PAM type: NRG; PAM sequence: GAG
aaaggccctgaggcaggtgt

SEQ ID NO: 71878 - DNA, 20 bp, Artificial Sequence
  Description of Artificial Sequence: Synthetic oligonucleotide
  Target: LAMA2; (-) strand; PAM type: NRG; PAM sequence: AGG
aagtgcaaaggccctgaggc

SEQ ID NO: 71879 - DNA, 20 bp, Artificial Sequence
  Description of Artificial Sequence: Synthetic oligonucleotide
  Target: LAMA2; (-) strand; PAM type: NRG; PAM sequence: CAG
caagtgcaaaggccctgagg

SEQ ID NO: 71880 - DNA, 20 bp, Artificial Sequence
  Description of Artificial Sequence: Synthetic oligonucleotide
  Target: LAMA2; (-) strand; PAM type: NRG; PAM sequence: AGG
tatcaagtgcaaaggccctg

SEQ ID NO: 71881 - DNA, 20 bp, Artificial Sequence
  Description of Artificial Sequence: Synthetic oligonucleotide
  Target: LAMA2; (-) strand; PAM type: NRG; PAM sequence: GAG
atatcaagtgcaaaggccct

SEQ ID NO: 71882 - DNA, 20 bp, Artificial Sequence
  Description of Artificial Sequence: Synthetic oligonucleotide
  Target: LAMA2; (-) strand; PAM type: NRG; PAM sequence: AGG
ataagaaatatcaagtgcaa

SEQ ID NO: 71883 - DNA, 20 bp, Artificial Sequence
  Description of Artificial Sequence: Synthetic oligonucleotide
  Target: LAMA2; (-) strand; PAM type: NRG; PAM sequence: AAG
cataagaaatatcaagtgca

SEQ ID NO: 71884 - DNA, 20 bp, Artificial Sequence
  Description of Artificial Sequence: Synthetic oligonucleotide
  Target: LAMA2; (-) strand; PAM type: NRG; PAM sequence: AAG
ttctagacataagaaatatc

SEQ ID NO: 71885 - DNA, 20 bp, Artificial Sequence
  Description of Artificial Sequence: Synthetic oligonucleotide
  Target: LAMA2; (-) strand; PAM type: NRG; PAM sequence: AAG
aagaaaataattctagacat

SEQ ID NO: 71886 - DNA, 20 bp, Artificial Sequence
  Description of Artificial Sequence: Synthetic oligonucleotide
  Target: LAMA2; (-) strand; PAM type: NRG; PAM sequence: TAG
gaaattgaagaaaataattc

SEQ ID NO: 71887 - DNA, 20 bp, Artificial Sequence
  Description of Artificial Sequence: Synthetic oligonucleotide
  Target: LAMA2; (-) strand; PAM type: NRG; PAM sequence: AAG
aacaagctacattgaaattg

SEQ ID NO: 71888 - DNA, 20 bp, Artificial Sequence
  Description of Artificial Sequence: Synthetic oligonucleotide
  Target: LAMA2; (-) strand; PAM type: NRG; PAM sequence: AAG
ccaaaaggaggtgaggaaac

SEQ ID NO: 71889 - DNA, 20 bp, Artificial Sequence
  Description of Artificial Sequence: Synthetic oligonucleotide
  Target: LAMA2; (-) strand; PAM type: NRG; PAM sequence: AGG
ataaaaaccaaaaggaggtg

SEQ ID NO: 71890 - DNA, 20 bp, Artificial Sequence
  Description of Artificial Sequence: Synthetic oligonucleotide
  Target: LAMA2; (-) strand; PAM type: NRG; PAM sequence: GAG
aataaaaaccaaaaggaggt

SEQ ID NO: 71891 - DNA, 20 bp, Artificial Sequence
  Description of Artificial Sequence: Synthetic oligonucleotide
  Target: LAMA2; (-) strand; PAM type: NRG; PAM sequence: AGG
cttgaataaaaaccaaaagg

SEQ ID NO: 71892 - DNA, 20 bp, Artificial Sequence
  Description of Artificial Sequence: Synthetic oligonucleotide
  Target: LAMA2; (-) strand; PAM type: NRG; PAM sequence: GAG
acttgaataaaaaccaaaag

SEQ ID NO: 71893 - DNA, 20 bp, Artificial Sequence
  Description of Artificial Sequence: Synthetic oligonucleotide
  Target: LAMA2; (-) strand; PAM type: NRG; PAM sequence: AGG
acacttgaataaaaaccaaa

SEQ ID NO: 71894 - DNA, 20 bp, Artificial Sequence
  Description of Artificial Sequence: Synthetic oligonucleotide
  Target: LAMA2; (-) strand; PAM type: NRG; PAM sequence: AAG
aacacttgaataaaaaccaa

SEQ ID NO: 71895 - DNA, 20 bp, Artificial Sequence
  Description of Artificial Sequence: Synthetic oligonucleotide
  Target: LAMA2; (-) strand; PAM type: NRG; PAM sequence: AGG
caaggaggcccttgttgaga

SEQ ID NO: 71896 - DNA, 20 bp, Artificial Sequence
  Description of Artificial Sequence: Synthetic oligonucleotide
  Target: LAMA2; (-) strand; PAM type: NRG; PAM sequence: AAG
tcaaggaggcccttgttgag

SEQ ID NO: 71897 - DNA, 20 bp, Artificial Sequence
  Description of Artificial Sequence: Synthetic oligonucleotide
  Target: LAMA2; (-) strand; PAM type: NRG; PAM sequence: GAG
ttgtcaaggaggcccttgtt

SEQ ID NO: 71898 - DNA, 20 bp, Artificial Sequence
  Description of Artificial Sequence: Synthetic oligonucleotide
  Target: LAMA2; (-) strand; PAM type: NRG; PAM sequence: AGG
tttaaatagagttgtcaagg

SEQ ID NO: 71899 - DNA, 20 bp, Artificial Sequence
  Description of Artificial Sequence: Synthetic oligonucleotide
  Target: LAMA2; (-) strand; PAM type: NRG; PAM sequence: GAG
ttttaaatagagttgtcaag

SEQ ID NO: 71900 - DNA, 20 bp, Artificial Sequence
  Description of Artificial Sequence: Synthetic oligonucleotide
  Target: LAMA2; (-) strand; PAM type: NRG; PAM sequence: AGG
aattttaaatagagttgtca

SEQ ID NO: 71901 - DNA, 20 bp, Artificial Sequence
  Description of Artificial Sequence: Synthetic oligonucleotide
  Target: LAMA2; (-) strand; PAM type: NRG; PAM sequence: AAG
caattttaaatagagttgtc

SEQ ID NO: 71902 - DNA, 20 bp, Artificial Sequence
  Description of Artificial Sequence: Synthetic oligonucleotide
  Target: LAMA2; (-) strand; PAM type: NRG; PAM sequence: GAG
gggagctgcaattttaaata

SEQ ID NO: 71903 - DNA, 20 bp, Artificial Sequence
  Description of Artificial Sequence: Synthetic oligonucleotide
  Target: LAMA2; (-) strand; PAM type: NRG; PAM sequence: TAG
ctgggagctgcaattttaaa

SEQ ID NO: 71904 - DNA, 20 bp, Artificial Sequence
  Description of Artificial Sequence: Synthetic oligonucleotide
  Target: LAMA2; (-) strand; PAM type: NRG; PAM sequence: GAG
ttaggaagtggacaggctgg

SEQ ID NO: 71905 - DNA, 20 bp, Artificial Sequence
  Description of Artificial Sequence: Synthetic oligonucleotide
  Target: LAMA2; (-) strand; PAM type: NRG; PAM sequence: GGG
gtttaggaagtggacaggct

SEQ ID NO: 71906 - DNA, 20 bp, Artificial Sequence
  Description of Artificial Sequence: Synthetic oligonucleotide
  Target: LAMA2; (-) strand; PAM type: NRG; PAM sequence: TGG
ggtttaggaagtggacaggc

SEQ ID NO: 71907 - DNA, 20 bp, Artificial Sequence
  Description of Artificial Sequence: Synthetic oligonucleotide
  Target: LAMA2; (-) strand; PAM type: NRG; PAM sequence: AGG
aagtggtttaggaagtggac

SEQ ID NO: 71908 - DNA, 20 bp, Artificial Sequence
  Description of Artificial Sequence: Synthetic oligonucleotide
  Target: LAMA2; (-) strand; PAM type: NRG; PAM sequence: CAG
aaagtggtttaggaagtgga

SEQ ID NO: 71909 - DNA, 20 bp, Artificial Sequence
  Description of Artificial Sequence: Synthetic oligonucleotide
  Target: LAMA2; (-) strand; PAM type: NRG; PAM sequence: TGG
caggaaagtggtttaggaag

SEQ ID NO: 71910 - DNA, 20 bp, Artificial Sequence
  Description of Artificial Sequence: Synthetic oligonucleotide
  Target: LAMA2; (-) strand; PAM type: NRG; PAM sequence: AAG
aagcaggaaagtggtttagg

SEQ ID NO: 71911 - DNA, 20 bp, Artificial Sequence
  Description of Artificial Sequence: Synthetic oligonucleotide
  Target: LAMA2; (-) strand; PAM type: NRG; PAM sequence: AGG
ataaagcaggaaagtggttt

SEQ ID NO: 71912 - DNA, 20 bp, Artificial Sequence
  Description of Artificial Sequence: Synthetic oligonucleotide
  Target: LAMA2; (-) strand; PAM type: NRG; PAM sequence: TAG
aataaagcaggaaagtggtt

SEQ ID NO: 71913 - DNA, 20 bp, Artificial Sequence
  Description of Artificial Sequence: Synthetic oligonucleotide
  Target: LAMA2; (-) strand; PAM type: NRG; PAM sequence: TGG
agaaaaataaagcaggaaag

SEQ ID NO: 71914 - DNA, 20 bp, Artificial Sequence
  Description of Artificial Sequence: Synthetic oligonucleotide
  Target: LAMA2; (-) strand; PAM type: NRG; PAM sequence: AAG
tggagaaaaataaagcagga

SEQ ID NO: 71915 - DNA, 20 bp, Artificial Sequence
  Description of Artificial Sequence: Synthetic oligonucleotide
  Target: LAMA2; (-) strand; PAM type: NRG; PAM sequence: AGG
tttatggagaaaaataaagc

SEQ ID NO: 71916 - DNA, 20 bp, Artificial Sequence
  Description of Artificial Sequence: Synthetic oligonucleotide
  Target: LAMA2; (-) strand; PAM type: NRG; PAM sequence: CAG
ttttatggagaaaaataaag

SEQ ID NO: 71917 - DNA, 20 bp, Artificial Sequence
  Description of Artificial Sequence: Synthetic oligonucleotide
  Target: LAMA2; (-) strand; PAM type: NRG; PAM sequence: AAG
atattttatggagaaaaata

SEQ ID NO: 71918 - DNA, 20 bp, Artificial Sequence
  Description of Artificial Sequence: Synthetic oligonucleotide
  Target: LAMA2; (-) strand; PAM type: NRG; PAM sequence: GAG
agatggtgatatattttatg

SEQ ID NO: 71919 - DNA, 20 bp, Artificial Sequence
  Description of Artificial Sequence: Synthetic oligonucleotide
  Target: LAMA2; (-) strand; PAM type: NRG; PAM sequence: TGG
ttagatggtgatatatttta

SEQ ID NO: 71920 - DNA, 20 bp, Artificial Sequence
  Description of Artificial Sequence: Synthetic oligonucleotide
  Target: LAMA2; (-) strand; PAM type: NRG; PAM sequence: TGG
catgtacatagtaagttaga

SEQ ID NO: 71921 - DNA, 20 bp, Artificial Sequence
  Description of Artificial Sequence: Synthetic oligonucleotide
  Target: LAMA2; (-) strand; PAM type: NRG; PAM sequence: TAG
gtaacatgtacatagtaagt

SEQ ID NO: 71922 - DNA, 20 bp, Artificial Sequence
  Description of Artificial Sequence: Synthetic oligonucleotide
  Target: LAMA2; (-) strand; PAM type: NRG; PAM sequence: AAG
aacagtaacatgtacatagt

SEQ ID NO: 71923 - DNA, 20 bp, Artificial Sequence
  Description of Artificial Sequence: Synthetic oligonucleotide
  Target: LAMA2; (-) strand; PAM type: NRG; PAM sequence: TAG
actgaacagtaacatgtaca

SEQ ID NO: 71924 - DNA, 20 bp, Artificial Sequence
  Description of Artificial Sequence: Synthetic oligonucleotide
  Target: LAMA2; (-) strand; PAM type: NRG; PAM sequence: CAG
aagataaatattcaactgaa

SEQ ID NO: 71925 - DNA, 20 bp, Artificial Sequence
  Description of Artificial Sequence: Synthetic oligonucleotide
  Target: LAMA2; (-) strand; PAM type: NRG; PAM sequence: AAG
acaaaaaaattgcatttaga

SEQ ID NO: 71926 - DNA, 20 bp, Artificial Sequence
  Description of Artificial Sequence: Synthetic oligonucleotide
  Target: LAMA2; (-) strand; PAM type: NRG; PAM sequence: TAG
acgcacaaaaaaattgcatt

SEQ ID NO: 71927 - DNA, 20 bp, Artificial Sequence
  Description of Artificial Sequence: Synthetic oligonucleotide
  Target: LAMA2; (-) strand; PAM type: NRG; PAM sequence: TAG
gcaatgattacaacaacaaa

SEQ ID NO: 71928 - DNA, 20 bp, Artificial Sequence
  Description of Artificial Sequence: Synthetic oligonucleotide
  Target: LAMA2; (-) strand; PAM type: NRG; PAM sequence: AAG
cactattctaagtgcttaga

SEQ ID NO: 71929 - DNA, 20 bp, Artificial Sequence
  Description of Artificial Sequence: Synthetic oligonucleotide
  Target: LAMA2; (-) strand; PAM type: NRG; PAM sequence: TAG
tgtgcactattctaagtgct

SEQ ID NO: 71930 - DNA, 20 bp, Artificial Sequence
  Description of Artificial Sequence: Synthetic oligonucleotide
  Target: LAMA2; (-) strand; PAM type: NRG; PAM sequence: AAG
tatatgttgtgcactattct

SEQ ID NO: 71931 - DNA, 20 bp, Artificial Sequence
  Description of Artificial Sequence: Synthetic oligonucleotide
  Target: LAMA2; (-) strand; PAM type: NRG; PAM sequence: CAG
gtttgtactagttattcatt

SEQ ID NO: 71932 - DNA, 20 bp, Artificial Sequence
  Description of Artificial Sequence: Synthetic oligonucleotide
  Target: LAMA2; (-) strand; PAM type: NRG; PAM sequence: TAG
tatggattggtggtttgtac

SEQ ID NO: 71933 - DNA, 20 bp, Artificial Sequence
  Description of Artificial Sequence: Synthetic oligonucleotide
  Target: LAMA2; (-) strand; PAM type: NRG; PAM sequence: TGG
attcttaaattatggattgg

SEQ ID NO: 71934 - DNA, 20 bp, Artificial Sequence
  Description of Artificial Sequence: Synthetic oligonucleotide
  Target: LAMA2; (-) strand; PAM type: NRG; PAM sequence: TGG
aagattcttaaattatggat

SEQ ID NO: 71935 - DNA, 20 bp, Artificial Sequence
  Description of Artificial Sequence: Synthetic oligonucleotide
  Target: LAMA2; (-) strand; PAM type: NRG; PAM sequence: TGG
tcaataagattcttaaatta

SEQ ID NO: 71936 - DNA, 20 bp, Artificial Sequence
  Description of Artificial Sequence: Synthetic oligonucleotide
  Target: LAMA2; (-) strand; PAM type: NRG; PAM sequence: AAG
ctttaattctcagattcaat

SEQ ID NO: 71937 - DNA, 20 bp, Artificial Sequence
  Description of Artificial Sequence: Synthetic oligonucleotide
  Target: LAMA2; (-) strand; PAM type: NRG; PAM sequence: CAG
tcacttaatcctttaattct

SEQ ID NO: 71938 - DNA, 20 bp, Artificial Sequence
  Description of Artificial Sequence: Synthetic oligonucleotide
  Target: LAMA2; (-) strand; PAM type: NRG; PAM sequence: CAG
gtgttttatcataagaagca

SEQ ID NO: 71939 - DNA, 20 bp, Artificial Sequence
  Description of Artificial Sequence: Synthetic oligonucleotide
  Target: LAMA2; (-) strand; PAM type: NRG; PAM sequence: AAG
gcagtgtgttttatcataag

SEQ ID NO: 71940 - DNA, 20 bp, Artificial Sequence
  Description of Artificial Sequence: Synthetic oligonucleotide
  Target: LAMA2; (-) strand; PAM type: NRG; PAM sequence: AAG
agtgcagtgtgttttatcat

SEQ ID NO: 71941 - DNA, 20 bp, Artificial Sequence
  Description of Artificial Sequence: Synthetic oligonucleotide
  Target: LAMA2; (-) strand; PAM type: NRG; PAM sequence: CAG
tttcataattagaaaaagtg

SEQ ID NO: 71942 - DNA, 20 bp, Artificial Sequence
  Description of Artificial Sequence: Synthetic oligonucleotide
  Target: LAMA2; (-) strand; PAM type: NRG; PAM sequence: AAG
ggaaatttcataattagaaa

SEQ ID NO: 71943 - DNA, 20 bp, Artificial Sequence
  Description of Artificial Sequence: Synthetic oligonucleotide
  Target: LAMA2; (-) strand; PAM type: NRG; PAM sequence: TAG
cttaaaggaaatttcataat

SEQ ID NO: 71944 - DNA, 20 bp, Artificial Sequence
  Description of Artificial Sequence: Synthetic oligonucleotide
  Target: LAMA2; (-) strand; PAM type: NRG; PAM sequence: AGG
acaatgccattcaaccttaa

SEQ ID NO: 71945 - DNA, 20 bp, Artificial Sequence
  Description of Artificial Sequence: Synthetic oligonucleotide
  Target: LAMA2; (-) strand; PAM type: NRG; PAM sequence: AAG
aacaatgccattcaacctta

SEQ ID NO: 71946 - DNA, 20 bp, Artificial Sequence
  Description of Artificial Sequence: Synthetic oligonucleotide
  Target: LAMA2; (-) strand; PAM type: NRG; PAM sequence: TAG
ctttgttataatagcccaaa

SEQ ID NO: 71947 - DNA, 20 bp, Artificial Sequence
  Description of Artificial Sequence: Synthetic oligonucleotide
  Target: LAMA2; (-) strand; PAM type: NRG; PAM sequence: TAG
catctggtactttgttataa

SEQ ID NO: 71948 - DNA, 20 bp, Artificial Sequence
  Description of Artificial Sequence: Synthetic oligonucleotide
  Target: LAMA2; (-) strand; PAM type: NRG; PAM sequence: TGG
agtttataagccacctcatc

SEQ ID NO: 71949 - DNA, 20 bp, Artificial Sequence
  Description of Artificial Sequence: Synthetic oligonucleotide
  Target: LAMA2; (-) strand; PAM type: NRG; PAM sequence: AAG
aataaattgctgcagtttat

SEQ ID NO: 71950 - DNA, 20 bp, Artificial Sequence
  Description of Artificial Sequence: Synthetic oligonucleotide
  Target: LAMA2; (-) strand; PAM type: NRG; PAM sequence: CAG
ctatgagaaataaattgctg

SEQ ID NO: 71951 - DNA, 20 bp, Artificial Sequence
  Description of Artificial Sequence: Synthetic oligonucleotide
  Target: LAMA2; (-) strand; PAM type: NRG; PAM sequence: GAG
cgtcaagcctccagaactat

SEQ ID NO: 71952 - DNA, 20 bp, Artificial Sequence
  Description of Artificial Sequence: Synthetic oligonucleotide
  Target: LAMA2; (-) strand; PAM type: NRG; PAM sequence: CAG
gatcttggacgtcaagcctc

SEQ ID NO: 71953 - DNA, 20 bp, Artificial Sequence
  Description of Artificial Sequence: Synthetic oligonucleotide
  Target: LAMA2; (-) strand; PAM type: NRG; PAM sequence: AAG
gtgctttgatcttggacgtc

SEQ ID NO: 71954 - DNA, 20 bp, Artificial Sequence
  Description of Artificial Sequence: Synthetic oligonucleotide
  Target: LAMA2; (-) strand; PAM type: NRG; PAM sequence: TGG
atctgccagtgctttgatct

SEQ ID NO: 71955 - DNA, 20 bp, Artificial Sequence
  Description of Artificial Sequence: Synthetic oligonucleotide
  Target: LAMA2; (-) strand; PAM type: NRG; PAM sequence: CAG
tcaccagacattgaatctgc

SEQ ID NO: 71956 - DNA, 20 bp, Artificial Sequence
  Description of Artificial Sequence: Synthetic oligonucleotide
  Target: LAMA2; (-) strand; PAM type: NRG; PAM sequence: CAG
accaggaagcagaccctcac

SEQ ID NO: 71957 - DNA, 20 bp, Artificial Sequence
  Description of Artificial Sequence: Synthetic oligonucleotide
  Target: LAMA2; (-) strand; PAM type: NRG; PAM sequence: CAG
gccatctatgaaccaggaag

SEQ ID NO: 71958 - DNA, 20 bp, Artificial Sequence
  Description of Artificial Sequence: Synthetic oligonucleotide
  Target: LAMA2; (-) strand; PAM type: NRG; PAM sequence: AAG
aaggccatctatgaaccagg

SEQ ID NO: 71959 - DNA, 20 bp, Artificial Sequence
  Description of Artificial Sequence: Synthetic oligonucleotide
  Target: LAMA2; (-) strand; PAM type: NRG; PAM sequence: AGG
aagaaggccatctatgaacc

SEQ ID NO: 71960 - DNA, 20 bp, Artificial Sequence
  Description of Artificial Sequence: Synthetic oligonucleotide
  Target: LAMA2; (-) strand; PAM type: NRG; PAM sequence: CAG
gaagaaggccatctatgaac

SEQ ID NO: 71961 - DNA, 20 bp, Artificial Sequence
  Description of Artificial Sequence: Synthetic oligonucleotide
  Target: LAMA2; (-) strand; PAM type: NRG; PAM sequence: AGG
gtgaggctacagcaagaaga

SEQ ID NO: 71962 - DNA, 20 bp, Artificial Sequence
  Description of Artificial Sequence: Synthetic oligonucleotide
  Target: LAMA2; (-) strand; PAM type: NRG; PAM sequence: AAG
tgtgaggctacagcaagaag

SEQ ID NO: 71963 - DNA, 20 bp, Artificial Sequence
  Description of Artificial Sequence: Synthetic oligonucleotide
  Target: LAMA2; (-) strand; PAM type: NRG; PAM sequence: AAG
ccatgtgaggctacagcaag

SEQ ID NO: 71964 - DNA, 20 bp, Artificial Sequence
  Description of Artificial Sequence: Synthetic oligonucleotide
  Target: LAMA2; (-) strand; PAM type: NRG; PAM sequence: AAG
ctgccatgtgaggctacagc

SEQ ID NO: 71965 - DNA, 20 bp, Artificial Sequence
  Description of Artificial Sequence: Synthetic oligonucleotide
  Target: LAMA2; (-) strand; PAM type: NRG; PAM sequence: CAG
ccttctgccatgtgaggcta

SEQ ID NO: 71966 - DNA, 20 bp, Artificial Sequence
  Description of Artificial Sequence: Synthetic oligonucleotide
  Target: LAMA2; (-) strand; PAM type: NRG; PAM sequence: AGG
tttgccccttctgccatgtg

SEQ ID NO: 71967 - DNA, 20 bp, Artificial Sequence
  Description of Artificial Sequence: Synthetic oligonucleotide
  Target: LAMA2; (-) strand; PAM type: NRG; PAM sequence: GAG
atttgccccttctgccatgt

SEQ ID NO: 71968 - DNA, 20 bp, Artificial Sequence
  Description of Artificial Sequence: Synthetic oligonucleotide
  Target: LAMA2; (-) strand; PAM type: NRG; PAM sequence: AAG
cttataaatgaaaccccaga

SEQ ID NO: 71969 - DNA, 20 bp, Artificial Sequence
  Description of Artificial Sequence: Synthetic oligonucleotide
  Target: LAMA2; (-) strand; PAM type: NRG; PAM sequence: CAG
tacccttataaatgaaaccc

SEQ ID NO: 71970 - DNA, 20 bp, Artificial Sequence
  Description of Artificial Sequence: Synthetic oligonucleotide
  Target: LAMA2; (-) strand; PAM type: NRG; PAM sequence: TAG
agagcccccaagaatggaat

SEQ ID NO: 71971 - DNA, 20 bp, Artificial Sequence
  Description of Artificial Sequence: Synthetic oligonucleotide
  Target: LAMA2; (-) strand; PAM type: NRG; PAM sequence: TGG
gaggacagagcccccaagaa

SEQ ID NO: 71972 - DNA, 20 bp, Artificial Sequence
  Description of Artificial Sequence: Synthetic oligonucleotide
  Target: LAMA2; (-) strand; PAM type: NRG; PAM sequence: AAG
gtcatgaggacagagccccc

SEQ ID NO: 71973 - DNA, 20 bp, Artificial Sequence
  Description of Artificial Sequence: Synthetic oligonucleotide
  Target: LAMA2; (-) strand; PAM type: NRG; PAM sequence: GAG
gtaattaggtcatgaggaca

SEQ ID NO: 71974 - DNA, 20 bp, Artificial Sequence
  Description of Artificial Sequence: Synthetic oligonucleotide
  Target: LAMA2; (-) strand; PAM type: NRG; PAM sequence: CAG
aggtaattaggtcatgagga

SEQ ID NO: 71975 - DNA, 20 bp, Artificial Sequence
  Description of Artificial Sequence: Synthetic oligonucleotide
  Target: LAMA2; (-) strand; PAM type: NRG; PAM sequence: AGG
ggggaggtaattaggtcatg

SEQ ID NO: 71976 - DNA, 20 bp, Artificial Sequence
  Description of Artificial Sequence: Synthetic oligonucleotide
  Target: LAMA2; (-) strand; PAM type: NRG; PAM sequence: GAG
tggggaggtaattaggtcat

SEQ ID NO: 71977 - DNA, 20 bp, Artificial Sequence
  Description of Artificial Sequence: Synthetic oligonucleotide
  Target: LAMA2; (-) strand; PAM type: NRG; PAM sequence: AGG
tggggattggggaggtaatt

SEQ ID NO: 71978 - DNA, 20 bp, Artificial Sequence
  Description of Artificial Sequence: Synthetic oligonucleotide
  Target: LAMA2; (-) strand; PAM type: NRG; PAM sequence: TAG
atggggattggggaggtaat

SEQ ID NO: 71979 - DNA, 20 bp, Artificial Sequence
  Description of Artificial Sequence: Synthetic oligonucleotide
  Target: LAMA2; (-) strand; PAM type: NRG; PAM sequence: AGG
ttaggtgatggggattgggg

SEQ ID NO: 71980 - DNA, 20 bp, Artificial Sequence
  Description of Artificial Sequence: Synthetic oligonucleotide
  Target: LAMA2; (-) strand; PAM type: NRG; PAM sequence: GAG
attaggtgatggggattggg

SEQ ID NO: 71981 - DNA, 20 bp, Artificial Sequence
  Description of Artificial Sequence: Synthetic oligonucleotide
  Target: LAMA2; (-) strand; PAM type: NRG; PAM sequence: GGG
gtattaggtgatggggattg

SEQ ID NO: 71982 - DNA, 20 bp, Artificial Sequence
  Description of Artificial Sequence: Synthetic oligonucleotide
  Target: LAMA2; (-) strand; PAM type: NRG; PAM sequence: GGG
ggtattaggtgatggggatt

SEQ ID NO: 71983 - DNA, 20 bp, Artificial Sequence
  Description of Artificial Sequence: Synthetic oligonucleotide
  Target: LAMA2; (-) strand; PAM type: NRG; PAM sequence: TGG
tggtattaggtgatggggat

SEQ ID NO: 71984 - DNA, 20 bp, Artificial Sequence
  Description of Artificial Sequence: Synthetic oligonucleotide
  Target: LAMA2; (-) strand; PAM type: NRG; PAM sequence: GGG
tgtgatggtattaggtgatg

SEQ ID NO: 71985 - DNA, 20 bp, Artificial Sequence
  Description of Artificial Sequence: Synthetic oligonucleotide
  Target: LAMA2; (-) strand; PAM type: NRG; PAM sequence: GGG
atgtgatggtattaggtgat

SEQ ID NO: 71986 - DNA, 20 bp, Artificial Sequence
  Description of Artificial Sequence: Synthetic oligonucleotide
  Target: LAMA2; (-) strand; PAM type: NRG; PAM sequence: TGG
aatgtgatggtattaggtga

SEQ ID NO: 71987 - DNA, 20 bp, Artificial Sequence
  Description of Artificial Sequence: Synthetic oligonucleotide
  Target: LAMA2; (-) strand; PAM type: NRG; PAM sequence: AGG
acccctaatgtgatggtatt

SEQ ID NO: 71988 - DNA, 20 bp, Artificial Sequence
  Description of Artificial Sequence: Synthetic oligonucleotide
  Target: LAMA2; (-) strand; PAM type: NRG; PAM sequence: TAG
aacccctaatgtgatggtat

SEQ ID NO: 71989 - DNA, 20 bp, Artificial Sequence
  Description of Artificial Sequence: Synthetic oligonucleotide
  Target: LAMA2; (-) strand; PAM type: NRG; PAM sequence: TGG
aatcctaacccctaatgtga

SEQ ID NO: 71990 - DNA, 20 bp, Artificial Sequence
  Description of Artificial Sequence: Synthetic oligonucleotide
  Target: LAMA2; (-) strand; PAM type: NRG; PAM sequence: TAG
aatttacttcacgctttcta

SEQ ID NO: 71991 - DNA, 20 bp, Artificial Sequence
  Description of Artificial Sequence: Synthetic oligonucleotide
  Target: LAMA2; (-) strand; PAM type: NRG; PAM sequence: AAG
agaacatgcataggaactgg

SEQ ID NO: 71992 - DNA, 20 bp, Artificial Sequence
  Description of Artificial Sequence: Synthetic oligonucleotide
  Target: LAMA2; (-) strand; PAM type: NRG; PAM sequence: TGG
gtaagaacatgcataggaac

SEQ ID NO: 71993 - DNA, 20 bp, Artificial Sequence
  Description of Artificial Sequence: Synthetic oligonucleotide
  Target: LAMA2; (-) strand; PAM type: NRG; PAM sequence: AGG
agcagagtaagaacatgcat

SEQ ID NO: 71994 - DNA, 20 bp, Artificial Sequence
  Description of Artificial Sequence: Synthetic oligonucleotide
  Target: LAMA2; (-) strand; PAM type: NRG; PAM sequence: TAG
aagcagagtaagaacatgca

SEQ ID NO: 71995 - DNA, 20 bp, Artificial Sequence
  Description of Artificial Sequence: Synthetic oligonucleotide
  Target: LAMA2; (-) strand; PAM type: NRG; PAM sequence: AAG
aatacgcttaaaagcagagt

SEQ ID NO: 71996 - DNA, 20 bp, Artificial Sequence
  Description of Artificial Sequence: Synthetic oligonucleotide
  Target: LAMA2; (-) strand; PAM type: NRG; PAM sequence: GAG
ttagaatacgcttaaaagca

SEQ ID NO: 71997 - DNA, 20 bp, Artificial Sequence
  Description of Artificial Sequence: Synthetic oligonucleotide
  Target: LAMA2; (-) strand; PAM type: NRG; PAM sequence: CAG
atttagaatacgcttaaaag

SEQ ID NO: 71998 - DNA, 20 bp, Artificial Sequence
  Description of Artificial Sequence: Synthetic oligonucleotide
  Target: LAMA2; (-) strand; PAM type: NRG; PAM sequence: AAG
gaaatttagaatacgcttaa

SEQ ID NO: 71999 - DNA, 20 bp, Artificial Sequence
  Description of Artificial Sequence: Synthetic oligonucleotide
  Target: LAMA2; (-) strand; PAM type: NRG; PAM sequence: TAG
tgacagatacaactgaaatt

SEQ ID NO: 72000 - DNA, 20 bp, Artificial Sequence
  Description of Artificial Sequence: Synthetic oligonucleotide
  Target: LAMA2; (-) strand; PAM type: NRG; PAM sequence: CAG
gtggtaaagtcacatagtga

SEQ ID NO: 72001 - DNA, 20 bp, Artificial Sequence
  Description of Artificial Sequence: Synthetic oligonucleotide
  Target: LAMA2; (-) strand; PAM type: NRG; PAM sequence: TAG
gtaagtgtggtaaagtcaca

SEQ ID NO: 72002 - DNA, 20 bp, Artificial Sequence
  Description of Artificial Sequence: Synthetic oligonucleotide
  Target: LAMA2; (-) strand; PAM type: NRG; PAM sequence: AAG
ataaagctgtaagtgtggta

SEQ ID NO: 72003 - DNA, 20 bp, Artificial Sequence
  Description of Artificial Sequence: Synthetic oligonucleotide
  Target: LAMA2; (-) strand; PAM type: NRG; PAM sequence: TGG
cctaaataaagctgtaagtg

SEQ ID NO: 72004 - DNA, 20 bp, Artificial Sequence
  Description of Artificial Sequence: Synthetic oligonucleotide
  Target: LAMA2; (-) strand; PAM type: NRG; PAM sequence: AAG
cttttcctaaataaagctgt

SEQ ID NO: 72005 - DNA, 20 bp, Artificial Sequence
  Description of Artificial Sequence: Synthetic oligonucleotide
  Target: LAMA2; (-) strand; PAM type: NRG; PAM sequence: AAG
aacatctcttttcctaaata

SEQ ID NO: 72006 - DNA, 20 bp, Artificial Sequence
  Description of Artificial Sequence: Synthetic oligonucleotide
  Target: LAMA2; (-) strand; PAM type: NRG; PAM sequence: GAG
acttctctgttacaaaagaa

SEQ ID NO: 72007 - DNA, 20 bp, Artificial Sequence
  Description of Artificial Sequence: Synthetic oligonucleotide
  Target: LAMA2; (-) strand; PAM type: NRG; PAM sequence: AAG
agacttctctgttacaaaag

SEQ ID NO: 72008 - DNA, 20 bp, Artificial Sequence
  Description of Artificial Sequence: Synthetic oligonucleotide
  Target: LAMA2; (-) strand; PAM type: NRG; PAM sequence: AAG
cccagacttctctgttacaa

SEQ ID NO: 72009 - DNA, 20 bp, Artificial Sequence
  Description of Artificial Sequence: Synthetic oligonucleotide
  Target: LAMA2; (-) strand; PAM type: NRG; PAM sequence: CAG
aaaacaaaaaatgacagtcc

SEQ ID NO: 72010 - DNA, 20 bp, Artificial Sequence
  Description of Artificial Sequence: Synthetic oligonucleotide
  Target: LAMA2; (-) strand; PAM type: NRG; PAM sequence: CAG
aagcaaaaaacaaaaaatga

SEQ ID NO: 72011 - DNA, 20 bp, Artificial Sequence
  Description of Artificial Sequence: Synthetic oligonucleotide
  Target: LAMA2; (-) strand; PAM type: NRG; PAM sequence: AAG
tgaggaaaaaatacaatgtc

SEQ ID NO: 72012 - DNA, 20 bp, Artificial Sequence
  Description of Artificial Sequence: Synthetic oligonucleotide
  Target: LAMA2; (-) strand; PAM type: NRG; PAM sequence: AGG
atactaacttttgttctatg

SEQ ID NO: 72013 - DNA, 20 bp, Artificial Sequence
  Description of Artificial Sequence: Synthetic oligonucleotide
  Target: LAMA2; (-) strand; PAM type: NRG; PAM sequence: GAG
tatactaacttttgttctat

SEQ ID NO: 72014 - DNA, 20 bp, Artificial Sequence
  Description of Artificial Sequence: Synthetic oligonucleotide
  Target: LAMA2; (-) strand; PAM type: NRG; PAM sequence: TGG
gtttaaacagcatcattgta

SEQ ID NO: 72015 - DNA, 20 bp, Artificial Sequence
  Description of Artificial Sequence: Synthetic oligonucleotide
  Target: LAMA2; (-) strand; PAM type: NRG; PAM sequence: CAG
catttacactcttgtttaaa

SEQ ID NO: 72016 - DNA, 20 bp, Artificial Sequence
  Description of Artificial Sequence: Synthetic oligonucleotide
  Target: LAMA2; (-) strand; PAM type: NRG; PAM sequence: TAG
aatttggtttatcaacattt

SEQ ID NO: 72017 - DNA, 20 bp, Artificial Sequence
  Description of Artificial Sequence: Synthetic oligonucleotide
  Target: LAMA2; (-) strand; PAM type: NRG; PAM sequence: TGG
ttcatggtattgctagaatt

SEQ ID NO: 72018 - DNA, 20 bp, Artificial Sequence
  Description of Artificial Sequence: Synthetic oligonucleotide
  Target: LAMA2; (-) strand; PAM type: NRG; PAM sequence: TAG
ttacattttcatggtattgc

SEQ ID NO: 72019 - DNA, 20 bp, Artificial Sequence
  Description of Artificial Sequence: Synthetic oligonucleotide
  Target: LAMA2; (-) strand; PAM type: NRG; PAM sequence: TGG
ccaaaatgtttacattttca

SEQ ID NO: 72020 - DNA, 20 bp, Artificial Sequence
  Description of Artificial Sequence: Synthetic oligonucleotide
  Target: LAMA2; (-) strand; PAM type: NRG; PAM sequence: GGG
ctctatttgaaataggatct

SEQ ID NO: 72021 - DNA, 20 bp, Artificial Sequence
  Description of Artificial Sequence: Synthetic oligonucleotide
  Target: LAMA2; (-) strand; PAM type: NRG; PAM sequence: TGG
actctatttgaaataggatc

SEQ ID NO: 72022 - DNA, 20 bp, Artificial Sequence
  Description of Artificial Sequence: Synthetic oligonucleotide
  Target: LAMA2; (-) strand; PAM type: NRG; PAM sequence: AGG
atcttgactctatttgaaat

SEQ ID NO: 72023 - DNA, 20 bp, Artificial Sequence
  Description of Artificial Sequence: Synthetic oligonucleotide
  Target: LAMA2; (-) strand; PAM type: NRG; PAM sequence: TAG
catcttgactctatttgaaa

SEQ ID NO: 72024 - DNA, 20 bp, Artificial Sequence
  Description of Artificial Sequence: Synthetic oligonucleotide
  Target: LAMA2; (-) strand; PAM type: NRG; PAM sequence: CAG
tcaagaagcattttctaggg

SEQ ID NO: 72025 - DNA, 20 bp, Artificial Sequence
  Description of Artificial Sequence: Synthetic oligonucleotide
  Target: LAMA2; (-) strand; PAM type: NRG; PAM sequence: GGG
acttcaagaagcattttcta

SEQ ID NO: 72026 - DNA, 20 bp, Artificial Sequence
  Description of Artificial Sequence: Synthetic oligonucleotide
  Target: LAMA2; (-) strand; PAM type: NRG; PAM sequence: AGG
gacttcaagaagcattttct

SEQ ID NO: 72027 - DNA, 20 bp, Artificial Sequence
  Description of Artificial Sequence: Synthetic oligonucleotide
  Target: LAMA2; (-) strand; PAM type: NRG; PAM sequence: TAG
tgacttcaagaagcattttc

SEQ ID NO: 72028 - DNA, 20 bp, Artificial Sequence
  Description of Artificial Sequence: Synthetic oligonucleotide
  Target: LAMA2; (-) strand; PAM type: NRG; PAM sequence: AAG
atttattccatgacttcaag

SEQ ID NO: 72029 - DNA, 20 bp, Artificial Sequence
  Description of Artificial Sequence: Synthetic oligonucleotide
  Target: LAMA2; (-) strand; PAM type: NRG; PAM sequence: AAG
ctaatttattccatgacttc

SEQ ID NO: 72030 - DNA, 20 bp, Artificial Sequence
  Description of Artificial Sequence: Synthetic oligonucleotide
  Target: LAMA2; (-) strand; PAM type: NRG; PAM sequence: CAG
tttcctcacagattttttaa

SEQ ID NO: 72031 - DNA, 20 bp, Artificial Sequence
  Description of Artificial Sequence: Synthetic oligonucleotide
  Target: LAMA2; (-) strand; PAM type: NRG; PAM sequence: CAG
ttttaacagctctttcctca

SEQ ID NO: 72032 - DNA, 20 bp, Artificial Sequence
  Description of Artificial Sequence: Synthetic oligonucleotide
  Target: LAMA2; (-) strand; PAM type: NRG; PAM sequence: CAG
atgtggtttcaacattttaa

SEQ ID NO: 72033 - DNA, 20 bp, Artificial Sequence
  Description of Artificial Sequence: Synthetic oligonucleotide
  Target: LAMA2; (-) strand; PAM type: NRG; PAM sequence: TGG
tttccataacagaattcatg

SEQ ID NO: 72034 - DNA, 20 bp, Artificial Sequence
  Description of Artificial Sequence: Synthetic oligonucleotide
  Target: LAMA2; (-) strand; PAM type: NRG; PAM sequence: CAG
cttgttcagactttccataa

SEQ ID NO: 72035 - DNA, 20 bp, Artificial Sequence
  Description of Artificial Sequence: Synthetic oligonucleotide
  Target: LAMA2; (-) strand; PAM type: NRG; PAM sequence: CAG
ctattttagaaagtcttgtt

SEQ ID NO: 72036 - DNA, 20 bp, Artificial Sequence
  Description of Artificial Sequence: Synthetic oligonucleotide
  Target: LAMA2; (-) strand; PAM type: NRG; PAM sequence: AAG
cacattcaatctattttaga

SEQ ID NO: 72037 - DNA, 20 bp, Artificial Sequence
  Description of Artificial Sequence: Synthetic oligonucleotide
  Target: LAMA2; (-) strand; PAM type: NRG; PAM sequence: TAG
tgcccacattcaatctattt

SEQ ID NO: 72038 - DNA, 20 bp, Artificial Sequence
  Description of Artificial Sequence: Synthetic oligonucleotide
  Target: LAMA2; (-) strand; PAM type: NRG; PAM sequence: CAG
tgtgtgtggaagtcatcagg

SEQ ID NO: 72039 - DNA, 20 bp, Artificial Sequence
  Description of Artificial Sequence: Synthetic oligonucleotide
  Target: LAMA2; (-) strand; PAM type: NRG; PAM sequence: AGG
ttttgtgtgtggaagtcatc

SEQ ID NO: 72040 - DNA, 20 bp, Artificial Sequence
  Description of Artificial Sequence: Synthetic oligonucleotide
  Target: LAMA2; (-) strand; PAM type: NRG; PAM sequence: CAG
gttttgtgtgtggaagtcat

SEQ ID NO: 72041 - DNA, 20 bp, Artificial Sequence
  Description of Artificial Sequence: Synthetic oligonucleotide
  Target: LAMA2; (-) strand; PAM type: NRG; PAM sequence: AAG
tgtggatgttttgtgtgtgg

SEQ ID NO: 72042 - DNA, 20 bp, Artificial Sequence
  Description of Artificial Sequence: Synthetic oligonucleotide
  Target: LAMA2; (-) strand; PAM type: NRG; PAM sequence: TGG
aaatgtggatgttttgtgtg

SEQ ID NO: 72043 - DNA, 20 bp, Artificial Sequence
  Description of Artificial Sequence: Synthetic oligonucleotide
  Target: LAMA2; (-) strand; PAM type: NRG; PAM sequence: TGG
tccaccaaaaggatgaaatg

SEQ ID NO: 72044 - DNA, 20 bp, Artificial Sequence
  Description of Artificial Sequence: Synthetic oligonucleotide
  Target: LAMA2; (-) strand; PAM type: NRG; PAM sequence: AGG
atacacagtattccaccaaa

SEQ ID NO: 72045 - DNA, 20 bp, Artificial Sequence
  Description of Artificial Sequence: Synthetic oligonucleotide
  Target: LAMA2; (-) strand; PAM type: NRG; PAM sequence: AAG
aatacacagtattccaccaa

SEQ ID NO: 72046 - DNA, 20 bp, Artificial Sequence
  Description of Artificial Sequence: Synthetic oligonucleotide
  Target: LAMA2; (-) strand; PAM type: NRG; PAM sequence: CAG
gaataaaattggaaaataca

SEQ ID NO: 72047 - DNA, 20 bp, Artificial Sequence
  Description of Artificial Sequence: Synthetic oligonucleotide
  Target: LAMA2; (-) strand; PAM type: NRG; PAM sequence: TGG
ttaaactctaagaataaaat

SEQ ID NO: 72048 - DNA, 20 bp, Artificial Sequence
  Description of Artificial Sequence: Synthetic oligonucleotide
  Target: LAMA2; (-) strand; PAM type: NRG; PAM sequence: AAG
taagtaaaaaattaaactct

SEQ ID NO: 72049 - DNA, 20 bp, Artificial Sequence
  Description of Artificial Sequence: Synthetic oligonucleotide
  Target: LAMA2; (-) strand; PAM type: NRG; PAM sequence: AAG
tatacataagcataatatgt

SEQ ID NO: 72050 - DNA, 20 bp, Artificial Sequence
  Description of Artificial Sequence: Synthetic oligonucleotide
  Target: LAMA2; (-) strand; PAM type: NRG; PAM sequence: AAG
ataacaaatatgatatacat

SEQ ID NO: 72051 - DNA, 20 bp, Artificial Sequence
  Description of Artificial Sequence: Synthetic oligonucleotide
  Target: LAMA2; (-) strand; PAM type: NRG; PAM sequence: TAG
taaataatataattgtatat

SEQ ID NO: 72052 - DNA, 20 bp, Artificial Sequence
  Description of Artificial Sequence: Synthetic oligonucleotide
  Target: LAMA2; (-) strand; PAM type: NRG; PAM sequence: CGG
ttcaagatctataataaata

SEQ ID NO: 72053 - DNA, 20 bp, Artificial Sequence
  Description of Artificial Sequence: Synthetic oligonucleotide
  Target: LAMA2; (-) strand; PAM type: NRG; PAM sequence: AAG
gggtttttagtcacagtttc

SEQ ID NO: 72054 - DNA, 20 bp, Artificial Sequence
  Description of Artificial Sequence: Synthetic oligonucleotide
  Target: LAMA2; (-) strand; PAM type: NRG; PAM sequence: CAG
gtgcatggggtttttagtca

SEQ ID NO: 72055 - DNA, 20 bp, Artificial Sequence
  Description of Artificial Sequence: Synthetic oligonucleotide
  Target: LAMA2; (-) strand; PAM type: NRG; PAM sequence: TAG
ttctctgtgcatggggtttt

SEQ ID NO: 72056 - DNA, 20 bp, Artificial Sequence
  Description of Artificial Sequence: Synthetic oligonucleotide
  Target: LAMA2; (-) strand; PAM type: NRG; PAM sequence: GGG
aagaattttctctgtgcatg

SEQ ID NO: 72057 - DNA, 20 bp, Artificial Sequence
  Description of Artificial Sequence: Synthetic oligonucleotide
  Target: LAMA2; (-) strand; PAM type: NRG; PAM sequence: GGG
caagaattttctctgtgcat

SEQ ID NO: 72058 - DNA, 20 bp, Artificial Sequence
  Description of Artificial Sequence: Synthetic oligonucleotide
  Target: LAMA2; (-) strand; PAM type: NRG; PAM sequence: TGG
tcaagaattttctctgtgca

SEQ ID NO: 72059 - DNA, 20 bp, Artificial Sequence
  Description of Artificial Sequence: Synthetic oligonucleotide
  Target: LAMA2; (-) strand; PAM type: NRG; PAM sequence: AAG
tcaatgaagccatttgactc

SEQ ID NO: 72060 - DNA, 20 bp, Artificial Sequence
  Description of Artificial Sequence: Synthetic oligonucleotide
  Target: LAMA2; (-) strand; PAM type: NRG; PAM sequence: AAG
ctaacttctattcatcaatg

SEQ ID NO: 72061 - DNA, 20 bp, Artificial Sequence
  Description of Artificial Sequence: Synthetic oligonucleotide
  Target: LAMA2; (-) strand; PAM type: NRG; PAM sequence: CAG
cctctccttgtaacaataac

SEQ ID NO: 72062 - DNA, 20 bp, Artificial Sequence
  Description of Artificial Sequence: Synthetic oligonucleotide
  Target: LAMA2; (-) strand; PAM type: NRG; PAM sequence: CAG
actttcctcataccctctcc

SEQ ID NO: 72063 - DNA, 20 bp, Artificial Sequence
  Description of Artificial Sequence: Synthetic oligonucleotide
  Target: LAMA2; (-) strand; PAM type: NRG; PAM sequence: AAG
acaattatataatcaaaaat

SEQ ID NO: 72064 - DNA, 20 bp, Artificial Sequence
  Description of Artificial Sequence: Synthetic oligonucleotide
  Target: LAMA2; (-) strand; PAM type: NRG; PAM sequence: TAG
acacttatttacaattatat

SEQ ID NO: 72065 - DNA, 20 bp, Artificial Sequence
  Description of Artificial Sequence: Synthetic oligonucleotide
  Target: LAMA2; (-) strand; PAM type: NRG; PAM sequence: TAG
aatacatatagctaatacat

SEQ ID NO: 72066 - DNA, 20 bp, Artificial Sequence
  Description of Artificial Sequence: Synthetic oligonucleotide
  Target: LAMA2; (-) strand; PAM type: NRG; PAM sequence: TAG
taggtacatataaatacata

SEQ ID NO: 72067 - DNA, 20 bp, Artificial Sequence
  Description of Artificial Sequence: Synthetic oligonucleotide
  Target: LAMA2; (-) strand; PAM type: NRG; PAM sequence: AGG
ctagaaaaagtcttatatat

SEQ ID NO: 72068 - DNA, 20 bp, Artificial Sequence
  Description of Artificial Sequence: Synthetic oligonucleotide
  Target: LAMA2; (-) strand; PAM type: NRG; PAM sequence: TAG
tctagaaaaagtcttatata

SEQ ID NO: 72069 - DNA, 20 bp, Artificial Sequence
  Description of Artificial Sequence: Synthetic oligonucleotide
  Target: LAMA2; (-) strand; PAM type: NRG; PAM sequence: AAG
atgtagtcaatttctagaaa

SEQ ID NO: 72070 - DNA, 20 bp, Artificial Sequence
  Description of Artificial Sequence: Synthetic oligonucleotide
  Target: LAMA2; (-) strand; PAM type: NRG; PAM sequence: TAG
tcaaatatgtagtcaatttc

SEQ ID NO: 72071 - DNA, 20 bp, Artificial Sequence
  Description of Artificial Sequence: Synthetic oligonucleotide
  Target: LAMA2; (-) strand; PAM type: NRG; PAM sequence: TAG
tgtctcacaattcaaatatg

SEQ ID NO: 72072 - DNA, 20 bp, Artificial Sequence
  Description of Artificial Sequence: Synthetic oligonucleotide
  Target: LAMA2; (-) strand; PAM type: NRG; PAM sequence: TGG
tttagagatatgggtaatat

SEQ ID NO: 72073 - DNA, 20 bp, Artificial Sequence
  Description of Artificial Sequence: Synthetic oligonucleotide
  Target: LAMA2; (-) strand; PAM type: NRG; PAM sequence: GGG
tgtttgtattttagagatat

SEQ ID NO: 72074 - DNA, 20 bp, Artificial Sequence
  Description of Artificial Sequence: Synthetic oligonucleotide
  Target: LAMA2; (-) strand; PAM type: NRG; PAM sequence: TGG
atgtttgtattttagagata

SEQ ID NO: 72075 - DNA, 20 bp, Artificial Sequence
  Description of Artificial Sequence: Synthetic oligonucleotide
  Target: LAMA2; (-) strand; PAM type: NRG; PAM sequence: GAG
tttgccatgtttgtatttta

SEQ ID NO: 72076 - DNA, 20 bp, Artificial Sequence
  Description of Artificial Sequence: Synthetic oligonucleotide
  Target: LAMA2; (-) strand; PAM type: NRG; PAM sequence: TAG
tttttgccatgtttgtattt

SEQ ID NO: 72077 - DNA, 20 bp, Artificial Sequence
  Description of Artificial Sequence: Synthetic oligonucleotide
  Target: LAMA2; (-) strand; PAM type: NRG; PAM sequence: CAG
ctttctccttagtctcactc

SEQ ID NO: 72078 - DNA, 20 bp, Artificial Sequence
  Description of Artificial Sequence: Synthetic oligonucleotide
  Target: LAMA2; (-) strand; PAM type: NRG; PAM sequence: TAG
tatagctcctcctttctcct

SEQ ID NO: 72079 - DNA, 20 bp, Artificial Sequence
  Description of Artificial Sequence: Synthetic oligonucleotide
  Target: LAMA2; (-) strand; PAM type: NRG; PAM sequence: TAG
atggaatctgggcacactta

SEQ ID NO: 72080 - DNA, 20 bp, Artificial Sequence
  Description of Artificial Sequence: Synthetic oligonucleotide
  Target: LAMA2; (-) strand; PAM type: NRG; PAM sequence: GGG
taggtaaagaaatggaatct

SEQ ID NO: 72081 - DNA, 20 bp, Artificial Sequence
  Description of Artificial Sequence: Synthetic oligonucleotide
  Target: LAMA2; (-) strand; PAM type: NRG; PAM sequence: TGG
ataggtaaagaaatggaatc

SEQ ID NO: 72082 - DNA, 20 bp, Artificial Sequence
  Description of Artificial Sequence: Synthetic oligonucleotide
  Target: LAMA2; (-) strand; PAM type: NRG; PAM sequence: TGG
ataagtcataggtaaagaaa

SEQ ID NO: 72083 - DNA, 20 bp, Artificial Sequence
  Description of Artificial Sequence: Synthetic oligonucleotide
  Target: LAMA2; (-) strand; PAM type: NRG; PAM sequence: AAG
caacgcataagtcataggta

SEQ ID NO: 72084 - DNA, 20 bp, Artificial Sequence
  Description of Artificial Sequence: Synthetic oligonucleotide
  Target: LAMA2; (-) strand; PAM type: NRG; PAM sequence: AGG
tgtaccaacgcataagtcat

SEQ ID NO: 72085 - DNA, 20 bp, Artificial Sequence
  Description of Artificial Sequence: Synthetic oligonucleotide
  Target: LAMA2; (-) strand; PAM type: NRG; PAM sequence: TAG
atgtaccaacgcataagtca

SEQ ID NO: 72086 - DNA, 20 bp, Artificial Sequence
  Description of Artificial Sequence: Synthetic oligonucleotide
  Target: LAMA2; (-) strand; PAM type: NRG; PAM sequence: AAG
aggtaaatgtaccaacgcat

SEQ ID NO: 72087 - DNA, 20 bp, Artificial Sequence
  Description of Artificial Sequence: Synthetic oligonucleotide
  Target: LAMA2; (-) strand; PAM type: NRG; PAM sequence: AGG
aaagtgggacaagttaccta

SEQ ID NO: 72088 - DNA, 20 bp, Artificial Sequence
  Description of Artificial Sequence: Synthetic oligonucleotide
  Target: LAMA2; (-) strand; PAM type: NRG; PAM sequence: AAG
aaaagtgggacaagttacct

SEQ ID NO: 72089 - DNA, 20 bp, Artificial Sequence
  Description of Artificial Sequence: Synthetic oligonucleotide
  Target: LAMA2; (-) strand; PAM type: NRG; PAM sequence: AAG
gaagagcataaaagtgggac

SEQ ID NO: 72090 - DNA, 20 bp, Artificial Sequence
  Description of Artificial Sequence: Synthetic oligonucleotide
  Target: LAMA2; (-) strand; PAM type: NRG; PAM sequence: GGG
aaattgaagagcataaaagt

SEQ ID NO: 72091 - DNA, 20 bp, Artificial Sequence
  Description of Artificial Sequence: Synthetic oligonucleotide
  Target: LAMA2; (-) strand; PAM type: NRG; PAM sequence: TGG
caaattgaagagcataaaag

SEQ ID NO: 72092 - DNA, 20 bp, Artificial Sequence
  Description of Artificial Sequence: Synthetic oligonucleotide
  Target: LAMA2; (-) strand; PAM type: NRG; PAM sequence: AAG
gaccaaattgaagagcataa

SEQ ID NO: 72093 - DNA, 20 bp, Artificial Sequence
  Description of Artificial Sequence: Synthetic oligonucleotide
  Target: LAMA2; (-) strand; PAM type: NRG; PAM sequence: GAG
ttacactagaccaaattgaa

SEQ ID NO: 72094 - DNA, 20 bp, Artificial Sequence
  Description of Artificial Sequence: Synthetic oligonucleotide
  Target: LAMA2; (-) strand; PAM type: NRG; PAM sequence: AAG
ttttacactagaccaaattg

SEQ ID NO: 72095 - DNA, 20 bp, Artificial Sequence
  Description of Artificial Sequence: Synthetic oligonucleotide
  Target: LAMA2; (-) strand; PAM type: NRG; PAM sequence: TAG
ctatttgctccattttacac

SEQ ID NO: 72096 - DNA, 20 bp, Artificial Sequence
  Description of Artificial Sequence: Synthetic oligonucleotide
  Target: LAMA2; (-) strand; PAM type: NRG; PAM sequence: GGG
atgcctcgtaataaggaagt

SEQ ID NO: 72097 - DNA, 20 bp, Artificial Sequence
  Description of Artificial Sequence: Synthetic oligonucleotide
  Target: LAMA2; (-) strand; PAM type: NRG; PAM sequence: TGG
tatgcctcgtaataaggaag

SEQ ID NO: 72098 - DNA, 20 bp, Artificial Sequence
  Description of Artificial Sequence: Synthetic oligonucleotide
  Target: LAMA2; (-) strand; PAM type: NRG; PAM sequence: AAG
taatatgcctcgtaataagg

SEQ ID NO: 72099 - DNA, 20 bp, Artificial Sequence
  Description of Artificial Sequence: Synthetic oligonucleotide
  Target: LAMA2; (-) strand; PAM type: NRG; PAM sequence: AGG
ttataatatgcctcgtaata

SEQ ID NO: 72100 - DNA, 20 bp, Artificial Sequence
  Description of Artificial Sequence: Synthetic oligonucleotide
  Target: LAMA2; (-) strand; PAM type: NRG; PAM sequence: AAG
cttataatatgcctcgtaat

SEQ ID NO: 72101 - DNA, 20 bp, Artificial Sequence
  Description of Artificial Sequence: Synthetic oligonucleotide
  Target: LAMA2; (-) strand; PAM type: NRG; PAM sequence: CAG
gagtatcacctaaagtgcag

SEQ ID NO: 72102 - DNA, 20 bp, Artificial Sequence
  Description of Artificial Sequence: Synthetic oligonucleotide
  Target: LAMA2; (-) strand; PAM type: NRG; PAM sequence: CAG
tctgagtatcacctaaagtg

SEQ ID NO: 72103 - DNA, 20 bp, Artificial Sequence
  Description of Artificial Sequence: Synthetic oligonucleotide
  Target: LAMA2; (-) strand; PAM type: NRG; PAM sequence: AAG
tattttctgagtatcaccta

SEQ ID NO: 72104 - DNA, 20 bp, Artificial Sequence
  Description of Artificial Sequence: Synthetic oligonucleotide
  Target: LAMA2; (-) strand; PAM type: NRG; PAM sequence: GAG
gaccaaaagtaatattttct

SEQ ID NO: 72105 - DNA, 20 bp, Artificial Sequence
  Description of Artificial Sequence: Synthetic oligonucleotide
  Target: LAMA2; (-) strand; PAM type: NRG; PAM sequence: AAG
ttttcaatgtggaagaccaa

SEQ ID NO: 72106 - DNA, 20 bp, Artificial Sequence
  Description of Artificial Sequence: Synthetic oligonucleotide
  Target: LAMA2; (-) strand; PAM type: NRG; PAM sequence: AAG
caccattattttcaatgtgg

SEQ ID NO: 72107 - DNA, 20 bp, Artificial Sequence
  Description of Artificial Sequence: Synthetic oligonucleotide
  Target: LAMA2; (-) strand; PAM type: NRG; PAM sequence: TGG
attcaccattattttcaatg

SEQ ID NO: 72108 - DNA, 20 bp, Artificial Sequence
  Description of Artificial Sequence: Synthetic oligonucleotide
  Target: LAMA2; (-) strand; PAM type: NRG; PAM sequence: TAG
ccatttttcacattacaact

SEQ ID NO: 72109 - DNA, 20 bp, Artificial Sequence
  Description of Artificial Sequence: Synthetic oligonucleotide
  Target: LAMA2; (-) strand; PAM type: NRG; PAM sequence: GAG
ccagtaattaaagcattttt

SEQ ID NO: 72110 - DNA, 20 bp, Artificial Sequence
  Description of Artificial Sequence: Synthetic oligonucleotide
  Target: LAMA2; (-) strand; PAM type: NRG; PAM sequence: AAG
atttcaatatccagtaatta

SEQ ID NO: 72111 - DNA, 20 bp, Artificial Sequence
  Description of Artificial Sequence: Synthetic oligonucleotide
  Target: LAMA2; (-) strand; PAM type: NRG; PAM sequence: CAG
ataggtatcatttcaatatc

SEQ ID NO: 72112 - DNA, 20 bp, Artificial Sequence
  Description of Artificial Sequence: Synthetic oligonucleotide
  Target: LAMA2; (-) strand; PAM type: NRG; PAM sequence: AGG
atatacaaagtgaacctcat

SEQ ID NO: 72113 - DNA, 20 bp, Artificial Sequence
  Description of Artificial Sequence: Synthetic oligonucleotide
  Target: LAMA2; (-) strand; PAM type: NRG; PAM sequence: TAG
gatatacaaagtgaacctca

SEQ ID NO: 72114 - DNA, 20 bp, Artificial Sequence
  Description of Artificial Sequence: Synthetic oligonucleotide
  Target: LAMA2; (-) strand; PAM type: NRG; PAM sequence: AAG
atattcttaggtgatataca

SEQ ID NO: 72115 - DNA, 20 bp, Artificial Sequence
  Description of Artificial Sequence: Synthetic oligonucleotide
  Target: LAMA2; (-) strand; PAM type: NRG; PAM sequence: AGG
ttgagtaaaataatattctt

SEQ ID NO: 72116 - DNA, 20 bp, Artificial Sequence
  Description of Artificial Sequence: Synthetic oligonucleotide
  Target: LAMA2; (-) strand; PAM type: NRG; PAM sequence: TAG
attgagtaaaataatattct

SEQ ID NO: 72117 - DNA, 20 bp, Artificial Sequence
  Description of Artificial Sequence: Synthetic oligonucleotide
  Target: LAMA2; (-) strand; PAM type: NRG; PAM sequence: GAG
taaagtgctaaaaatatatt

SEQ ID NO: 72118 - DNA, 20 bp, Artificial Sequence
  Description of Artificial Sequence: Synthetic oligonucleotide
  Target: LAMA2; (-) strand; PAM type: NRG; PAM sequence: AAG
tagaaatattaatgtccata

SEQ ID NO: 72119 - DNA, 20 bp, Artificial Sequence
  Description of Artificial Sequence: Synthetic oligonucleotide
  Target: LAMA2; (-) strand; PAM type: NRG; PAM sequence: TAG
cactttttaagctttctcca

SEQ ID NO: 72120 - DNA, 20 bp, Artificial Sequence
  Description of Artificial Sequence: Synthetic oligonucleotide
  Target: LAMA2; (-) strand; PAM type: NRG; PAM sequence: AAG
atgcacaagtgacacttttt

SEQ ID NO: 72121 - DNA, 20 bp, Artificial Sequence
  Description of Artificial Sequence: Synthetic oligonucleotide
  Target: LAMA2; (-) strand; PAM type: NRG; PAM sequence: AAG
acaaaagagtttcaatgcac

SEQ ID NO: 72122 - DNA, 20 bp, Artificial Sequence
  Description of Artificial Sequence: Synthetic oligonucleotide
  Target: LAMA2; (-) strand; PAM type: NRG; PAM sequence: GAG
gtaaagaagctgttacaaaa

SEQ ID NO: 72123 - DNA, 20 bp, Artificial Sequence
  Description of Artificial Sequence: Synthetic oligonucleotide
  Target: LAMA2; (-) strand; PAM type: NRG; PAM sequence: AAG
gagtaaagaagctgttacaa

SEQ ID NO: 72124 - DNA, 20 bp, Artificial Sequence
  Description of Artificial Sequence: Synthetic oligonucleotide
  Target: LAMA2; (-) strand; PAM type: NRG; PAM sequence: AAG
acaacaacagaagagtaaag

SEQ ID NO: 72125 - DNA, 20 bp, Artificial Sequence
  Description of Artificial Sequence: Synthetic oligonucleotide
  Target: LAMA2; (-) strand; PAM type: NRG; PAM sequence: AAG
atgacaacaacagaagagta

SEQ ID NO: 72126 - DNA, 20 bp, Artificial Sequence
  Description of Artificial Sequence: Synthetic oligonucleotide
  Target: LAMA2; (-) strand; PAM type: NRG; PAM sequence: GAG
atatcatgacaacaacagaa

SEQ ID NO: 72127 - DNA, 20 bp, Artificial Sequence
  Description of Artificial Sequence: Synthetic oligonucleotide
  Target: LAMA2; (-) strand; PAM type: NRG; PAM sequence: AAG
ggatatcatgacaacaacag

SEQ ID NO: 72128 - DNA, 20 bp, Artificial Sequence
  Description of Artificial Sequence: Synthetic oligonucleotide
  Target: LAMA2; (-) strand; PAM type: NRG; PAM sequence: CAG
ggaggatatcatgacaacaa

SEQ ID NO: 72129 - DNA, 20 bp, Artificial Sequence
  Description of Artificial Sequence: Synthetic oligonucleotide
  Target: LAMA2; (-) strand; PAM type: NRG; PAM sequence: AGG
taaaaatttaagtaatctgg

SEQ ID NO: 72130 - DNA, 20 bp, Artificial Sequence
  Description of Artificial Sequence: Synthetic oligonucleotide
  Target: LAMA2; (-) strand; PAM type: NRG; PAM sequence: GAG
ttaaaaatttaagtaatctg

SEQ ID NO: 72131 - DNA, 20 bp, Artificial Sequence
  Description of Artificial Sequence: Synthetic oligonucleotide
  Target: LAMA2; (-) strand; PAM type: NRG; PAM sequence: TGG
ggttaaaaatttaagtaatc

SEQ ID NO: 72132 - DNA, 20 bp, Artificial Sequence
  Description of Artificial Sequence: Synthetic oligonucleotide
  Target: LAMA2; (-) strand; PAM type: NRG; PAM sequence: AAG
tacttcttggttaaaaattt

SEQ ID NO: 72133 - DNA, 20 bp, Artificial Sequence
  Description of Artificial Sequence: Synthetic oligonucleotide
  Target: LAMA2; (-) strand; PAM type: NRG; PAM sequence: TGG
taataagtaaggttacttct

SEQ ID NO: 72134 - DNA, 20 bp, Artificial Sequence
  Description of Artificial Sequence: Synthetic oligonucleotide
  Target: LAMA2; (-) strand; PAM type: NRG; PAM sequence: AGG
gagcatactagtaataagta

SEQ ID NO: 72135 - DNA, 20 bp, Artificial Sequence
  Description of Artificial Sequence: Synthetic oligonucleotide
  Target: LAMA2; (-) strand; PAM type: NRG; PAM sequence: AAG
agagcatactagtaataagt

SEQ ID NO: 72136 - DNA, 20 bp, Artificial Sequence
  Description of Artificial Sequence: Synthetic oligonucleotide
  Target: LAMA2; (-) strand; PAM type: NRG; PAM sequence: AAG
ggaaagagcatactagtaat

SEQ ID NO: 72137 - DNA, 20 bp, Artificial Sequence
  Description of Artificial Sequence: Synthetic oligonucleotide
  Target: LAMA2; (-) strand; PAM type: NRG; PAM sequence: TAG
cttttaaggaaagagcatac

SEQ ID NO: 72138 - DNA, 20 bp, Artificial Sequence
  Description of Artificial Sequence: Synthetic oligonucleotide
  Target: LAMA2; (-) strand; PAM type: NRG; PAM sequence: GAG
cagaaaagcttttaaggaaa

SEQ ID NO: 72139 - DNA, 20 bp, Artificial Sequence
  Description of Artificial Sequence: Synthetic oligonucleotide
  Target: LAMA2; (-) strand; PAM type: NRG; PAM sequence: AAG
atcagaaaagcttttaagga

SEQ ID NO: 72140 - DNA, 20 bp, Artificial Sequence
  Description of Artificial Sequence: Synthetic oligonucleotide
  Target: LAMA2; (-) strand; PAM type: NRG; PAM sequence: AGG
ataaatcagaaaagctttta

SEQ ID NO: 72141 - DNA, 20 bp, Artificial Sequence
  Description of Artificial Sequence: Synthetic oligonucleotide
  Target: LAMA2; (-) strand; PAM type: NRG; PAM sequence: AAG
cataaatcagaaaagctttt

SEQ ID NO: 72142 - DNA, 20 bp, Artificial Sequence
  Description of Artificial Sequence: Synthetic oligonucleotide
  Target: LAMA2; (-) strand; PAM type: NRG; PAM sequence: AAG
taaaataacataaatcagaa

SEQ ID NO: 72143 - DNA, 20 bp, Artificial Sequence
  Description of Artificial Sequence: Synthetic oligonucleotide
  Target: LAMA2; (-) strand; PAM type: NRG; PAM sequence: CAG
ataattaaaataacataaat

SEQ ID NO: 72144 - DNA, 20 bp, Artificial Sequence
  Description of Artificial Sequence: Synthetic oligonucleotide
  Target: LAMA2; (-) strand; PAM type: NRG; PAM sequence: AAG
taaaaactgtacataataac

SEQ ID NO: 72145 - DNA, 20 bp, Artificial Sequence
  Description of Artificial Sequence: Synthetic oligonucleotide
  Target: LAMA2; (-) strand; PAM type: NRG; PAM sequence: AGG
taaaatggaaagttgcagaa

SEQ ID NO: 72146 - DNA, 20 bp, Artificial Sequence
  Description of Artificial Sequence: Synthetic oligonucleotide
  Target: LAMA2; (-) strand; PAM type: NRG; PAM sequence: AAG
ctaaaatggaaagttgcaga

SEQ ID NO: 72147 - DNA, 20 bp, Artificial Sequence
  Description of Artificial Sequence: Synthetic oligonucleotide
  Target: LAMA2; (-) strand; PAM type: NRG; PAM sequence: CAG
atatctaaaatggaaagttg

SEQ ID NO: 72148 - DNA, 20 bp, Artificial Sequence
  Description of Artificial Sequence: Synthetic oligonucleotide
  Target: LAMA2; (-) strand; PAM type: NRG; PAM sequence: AAG
tgagacatatctaaaatgga

SEQ ID NO: 72149 - DNA, 20 bp, Artificial Sequence
  Description of Artificial Sequence: Synthetic oligonucleotide
  Target: LAMA2; (-) strand; PAM type: NRG; PAM sequence: TGG
ttaatgagacatatctaaaa

SEQ ID NO: 72150 - DNA, 20 bp, Artificial Sequence
  Description of Artificial Sequence: Synthetic oligonucleotide
  Target: LAMA2; (-) strand; PAM type: NRG; PAM sequence: GAG
cttcactatatgccattaat

SEQ ID NO: 72151 - DNA, 20 bp, Artificial Sequence
  Description of Artificial Sequence: Synthetic oligonucleotide
  Target: LAMA2; (-) strand; PAM type: NRG; PAM sequence: TAG
aaagaccaacactgccaaac

SEQ ID NO: 72152 - DNA, 20 bp, Artificial Sequence
  Description of Artificial Sequence: Synthetic oligonucleotide
  Target: LAMA2; (-) strand; PAM type: NRG; PAM sequence: AAG
gaaaatgcatgtttcattaa

SEQ ID NO: 72153 - DNA, 20 bp, Artificial Sequence
  Description of Artificial Sequence: Synthetic oligonucleotide
  Target: LAMA2; (-) strand; PAM type: NRG; PAM sequence: CAG
atgcttcacttagatacaca

SEQ ID NO: 72154 - DNA, 20 bp, Artificial Sequence
  Description of Artificial Sequence: Synthetic oligonucleotide
  Target: LAMA2; (-) strand; PAM type: NRG; PAM sequence: TAG
ttctgtgtacatgcttcact

SEQ ID NO: 72155 - DNA, 20 bp, Artificial Sequence
  Description of Artificial Sequence: Synthetic oligonucleotide
  Target: LAMA2; (-) strand; PAM type: NRG; PAM sequence: CAG
tcatttagcaaaaattctct

SEQ ID NO: 72156 - DNA, 20 bp, Artificial Sequence
  Description of Artificial Sequence: Synthetic oligonucleotide
  Target: LAMA2; (-) strand; PAM type: NRG; PAM sequence: TAG
gttacttgggaaggttcatt

SEQ ID NO: 72157 - DNA, 20 bp, Artificial Sequence
  Description of Artificial Sequence: Synthetic oligonucleotide
  Target: LAMA2; (-) strand; PAM type: NRG; PAM sequence: AGG
tcagtagtagttacttggga

SEQ ID NO: 72158 - DNA, 20 bp, Artificial Sequence
  Description of Artificial Sequence: Synthetic oligonucleotide
  Target: LAMA2; (-) strand; PAM type: NRG; PAM sequence: AAG
ctcagtagtagttacttggg

SEQ ID NO: 72159 - DNA, 20 bp, Artificial Sequence
  Description of Artificial Sequence: Synthetic oligonucleotide
  Target: LAMA2; (-) strand; PAM type: NRG; PAM sequence: GGG
tgtctcagtagtagttactt

SEQ ID NO: 72160 - DNA, 20 bp, Artificial Sequence
  Description of Artificial Sequence: Synthetic oligonucleotide
  Target: LAMA2; (-) strand; PAM type: NRG; PAM sequence: TGG
ttgtctcagtagtagttact

SEQ ID NO: 72161 - DNA, 20 bp, Artificial Sequence
  Description of Artificial Sequence: Synthetic oligonucleotide
  Target: LAMA2; (-) strand; PAM type: NRG; PAM sequence: TAG
ggttatttttgtctcagtag

SEQ ID NO: 72162 - DNA, 20 bp, Artificial Sequence
  Description of Artificial Sequence: Synthetic oligonucleotide
  Target: LAMA2; (-) strand; PAM type: NRG; PAM sequence: TAG
gctggttatttttgtctcag

SEQ ID NO: 72163 - DNA, 20 bp, Artificial Sequence
  Description of Artificial Sequence: Synthetic oligonucleotide
  Target: LAMA2; (-) strand; PAM type: NRG; PAM sequence: CAG
gttgctggttatttttgtct

SEQ ID NO: 72164 - DNA, 20 bp, Artificial Sequence
  Description of Artificial Sequence: Synthetic oligonucleotide
  Target: LAMA2; (-) strand; PAM type: NRG; PAM sequence: TGG
gagggaagtttctgggttgc

SEQ ID NO: 72165 - DNA, 20 bp, Artificial Sequence
  Description of Artificial Sequence: Synthetic oligonucleotide
  Target: LAMA2; (-) strand; PAM type: NRG; PAM sequence: GGG
aaggcatgagggaagtttct

SEQ ID NO: 72166 - DNA, 20 bp, Artificial Sequence
  Description of Artificial Sequence: Synthetic oligonucleotide
  Target: LAMA2; (-) strand; PAM type: NRG; PAM sequence: TGG
aaaggcatgagggaagtttc

SEQ ID NO: 72167 - DNA, 20 bp, Artificial Sequence
  Description of Artificial Sequence: Synthetic oligonucleotide
  Target: LAMA2; (-) strand; PAM type: NRG; PAM sequence: AAG
gattggaaaaggcatgaggg

SEQ ID NO: 72168 - DNA, 20 bp, Artificial Sequence
  Description of Artificial Sequence: Synthetic oligonucleotide
  Target: LAMA2; (-) strand; PAM type: NRG; PAM sequence: GGG
agtgattggaaaaggcatga

SEQ ID NO: 72169 - DNA, 20 bp, Artificial Sequence
  Description of Artificial Sequence: Synthetic oligonucleotide
  Target: LAMA2; (-) strand; PAM type: NRG; PAM sequence: AGG
tagtgattggaaaaggcatg

SEQ ID NO: 72170 - DNA, 20 bp, Artificial Sequence
  Description of Artificial Sequence: Synthetic oligonucleotide
  Target: LAMA2; (-) strand; PAM type: NRG; PAM sequence: GAG
atagtgattggaaaaggcat

SEQ ID NO: 72171 - DNA, 20 bp, Artificial Sequence
  Description of Artificial Sequence: Synthetic oligonucleotide
  Target: LAMA2; (-) strand; PAM type: NRG; PAM sequence: AGG
ggcaagatagtgattggaaa

SEQ ID NO: 72172 - DNA, 20 bp, Artificial Sequence
  Description of Artificial Sequence: Synthetic oligonucleotide
  Target: LAMA2; (-) strand; PAM type: NRG; PAM sequence: AAG
aggcaagatagtgattggaa

SEQ ID NO: 72173 - DNA, 20 bp, Artificial Sequence
  Description of Artificial Sequence: Synthetic oligonucleotide
  Target: LAMA2; (-) strand; PAM type: NRG; PAM sequence: TGG
ggagaaggcaagatagtgat

SEQ ID NO: 72174 - DNA, 20 bp, Artificial Sequence
  Description of Artificial Sequence: Synthetic oligonucleotide
  Target: LAMA2; (-) strand; PAM type: NRG; PAM sequence: TAG
tattaggggagaaggcaaga

SEQ ID NO: 72175 - DNA, 20 bp, Artificial Sequence
  Description of Artificial Sequence: Synthetic oligonucleotide
  Target: LAMA2; (-) strand; PAM type: NRG; PAM sequence: AAG
ttactattaggggagaaggc

SEQ ID NO: 72176 - DNA, 20 bp, Artificial Sequence
  Description of Artificial Sequence: Synthetic oligonucleotide
  Target: LAMA2; (-) strand; PAM type: NRG; PAM sequence: AGG
ctggttactattaggggaga

SEQ ID NO: 72177 - DNA, 20 bp, Artificial Sequence
  Description of Artificial Sequence: Synthetic oligonucleotide
  Target: LAMA2; (-) strand; PAM type: NRG; PAM sequence: AAG
actggttactattaggggag

SEQ ID NO: 72178 - DNA, 20 bp, Artificial Sequence
  Description of Artificial Sequence: Synthetic oligonucleotide
  Target: LAMA2; (-) strand; PAM type: NRG; PAM sequence: GAG
aatactggttactattaggg

SEQ ID NO: 72179 - DNA, 20 bp, Artificial Sequence
  Description of Artificial Sequence: Synthetic oligonucleotide
  Target: LAMA2; (-) strand; PAM type: NRG; PAM sequence: GGG
agaatactggttactattag

SEQ ID NO: 72180 - DNA, 20 bp, Artificial Sequence
  Description of Artificial Sequence: Synthetic oligonucleotide
  Target: LAMA2; (-) strand; PAM type: NRG; PAM sequence: GGG
tagaatactggttactatta

SEQ ID NO: 72181 - DNA, 20 bp, Artificial Sequence
  Description of Artificial Sequence: Synthetic oligonucleotide
  Target: LAMA2; (-) strand; PAM type: NRG; PAM sequence: AGG
ttagaatactggttactatt

SEQ ID NO: 72182 - DNA, 20 bp, Artificial Sequence
  Description of Artificial Sequence: Synthetic oligonucleotide
  Target: LAMA2; (-) strand; PAM type: NRG; PAM sequence: TAG
gttagaatactggttactat

SEQ ID NO: 72183 - DNA, 20 bp, Artificial Sequence
  Description of Artificial Sequence: Synthetic oligonucleotide
  Target: LAMA2; (-) strand; PAM type: NRG; PAM sequence: TGG
gtgaatacaagttagaatac

SEQ ID NO: 72184 - DNA, 20 bp, Artificial Sequence
  Description of Artificial Sequence: Synthetic oligonucleotide
  Target: LAMA2; (-) strand; PAM type: NRG; PAM sequence: TAG
cttcactggtgaatacaagt

SEQ ID NO: 72185 - DNA, 20 bp, Artificial Sequence
  Description of Artificial Sequence: Synthetic oligonucleotide
  Target: LAMA2; (-) strand; PAM type: NRG; PAM sequence: AAG
atggcttcactggtgaatac

SEQ ID NO: 72186 - DNA, 20 bp, Artificial Sequence
  Description of Artificial Sequence: Synthetic oligonucleotide
  Target: LAMA2; (-) strand; PAM type: NRG; PAM sequence: TGG
cctagatcaaatggcttcac

SEQ ID NO: 72187 - DNA, 20 bp, Artificial Sequence
  Description of Artificial Sequence: Synthetic oligonucleotide
  Target: LAMA2; (-) strand; PAM type: NRG; PAM sequence: TGG
gagaaaactcctagatcaaa

SEQ ID NO: 72188 - DNA, 20 bp, Artificial Sequence
  Description of Artificial Sequence: Synthetic oligonucleotide
  Target: LAMA2; (-) strand; PAM type: NRG; PAM sequence: TAG
ccatgcacagagaaaactcc

SEQ ID NO: 72189 - DNA, 20 bp, Artificial Sequence
  Description of Artificial Sequence: Synthetic oligonucleotide
  Target: LAMA2; (-) strand; PAM type: NRG; PAM sequence: GAG
gtgactaaaacccatgcaca

SEQ ID NO: 72190 - DNA, 20 bp, Artificial Sequence
  Description of Artificial Sequence: Synthetic oligonucleotide
  Target: LAMA2; (-) strand; PAM type: NRG; PAM sequence: CAG
ctgtgactaaaacccatgca

SEQ ID NO: 72191 - DNA, 20 bp, Artificial Sequence
  Description of Artificial Sequence: Synthetic oligonucleotide
  Target: LAMA2; (-) strand; PAM type: NRG; PAM sequence: TGG
tcccacatttattatagata

SEQ ID NO: 72192 - DNA, 20 bp, Artificial Sequence
  Description of Artificial Sequence: Synthetic oligonucleotide
  Target: LAMA2; (-) strand; PAM type: NRG; PAM sequence: TAG
agtgagtcccacatttatta

SEQ ID NO: 72193 - DNA, 20 bp, Artificial Sequence
  Description of Artificial Sequence: Synthetic oligonucleotide
  Target: LAMA2; (-) strand; PAM type: NRG; PAM sequence: GAG
taagaaatgaaaactccagt

SEQ ID NO: 72194 - DNA, 20 bp, Artificial Sequence
  Description of Artificial Sequence: Synthetic oligonucleotide
  Target: LAMA2; (-) strand; PAM type: NRG; PAM sequence: CAG
aatataagaaatgaaaactc

SEQ ID NO: 72195 - DNA, 20 bp, Artificial Sequence
  Description of Artificial Sequence: Synthetic oligonucleotide
  Target: LAMA2; (-) strand; PAM type: NRG; PAM sequence: AAG
ctcaactaaactgaaaatat

SEQ ID NO: 72196 - DNA, 20 bp, Artificial Sequence
  Description of Artificial Sequence: Synthetic oligonucleotide
  Target: LAMA2; (-) strand; PAM type: NRG; PAM sequence: AAG
aagtggatcaatttcttgaa

SEQ ID NO: 72197 - DNA, 20 bp, Artificial Sequence
  Description of Artificial Sequence: Synthetic oligonucleotide
  Target: LAMA2; (-) strand; PAM type: NRG; PAM sequence: TGG
tatttgaaaaattaggtaag

SEQ ID NO: 72198 - DNA, 20 bp, Artificial Sequence
  Description of Artificial Sequence: Synthetic oligonucleotide
  Target: LAMA2; (-) strand; PAM type: NRG; PAM sequence: AAG
atatatttgaaaaattaggt

SEQ ID NO: 72199 - DNA, 20 bp, Artificial Sequence
  Description of Artificial Sequence: Synthetic oligonucleotide
  Target: LAMA2; (-) strand; PAM type: NRG; PAM sequence: AGG
gtcgatatatttgaaaaatt

SEQ ID NO: 72200 - DNA, 20 bp, Artificial Sequence
  Description of Artificial Sequence: Synthetic oligonucleotide
  Target: LAMA2; (-) strand; PAM type: NRG; PAM sequence: TAG
tgtcgatatatttgaaaaat

SEQ ID NO: 72201 - DNA, 20 bp, Artificial Sequence
  Description of Artificial Sequence: Synthetic oligonucleotide
  Target: LAMA2; (-) strand; PAM type: NRG; PAM sequence: AAG
tacagatcattgtaaattaa

SEQ ID NO: 72202 - DNA, 20 bp, Artificial Sequence
  Description of Artificial Sequence: Synthetic oligonucleotide
  Target: LAMA2; (-) strand; PAM type: NRG; PAM sequence: CAG
ataaaaaaagggcatcacta

SEQ ID NO: 72203 - DNA, 20 bp, Artificial Sequence
  Description of Artificial Sequence: Synthetic oligonucleotide
  Target: LAMA2; (-) strand; PAM type: NRG; PAM sequence: GGG
caatatctggaataaaaaaa

SEQ ID NO: 72204 - DNA, 20 bp, Artificial Sequence
  Description of Artificial Sequence: Synthetic oligonucleotide
  Target: LAMA2; (-) strand; PAM type: NRG; PAM sequence: AGG
acaatatctggaataaaaaa

SEQ ID NO: 72205 - DNA, 20 bp, Artificial Sequence
  Description of Artificial Sequence: Synthetic oligonucleotide
  Target: LAMA2; (-) strand; PAM type: NRG; PAM sequence: AAG
aacaatatctggaataaaaa

SEQ ID NO: 72206 - DNA, 20 bp, Artificial Sequence
  Description of Artificial Sequence: Synthetic oligonucleotide
  Target: LAMA2; (-) strand; PAM type: NRG; PAM sequence: TGG
aaaggttacacaacaatatc

SEQ ID NO: 72207 - DNA, 20 bp, Artificial Sequence
  Description of Artificial Sequence: Synthetic oligonucleotide
  Target: LAMA2; (-) strand; PAM type: NRG; PAM sequence: AGG
aagctgtaaaggaaaaacaa

SEQ ID NO: 72208 - DNA, 20 bp, Artificial Sequence
  Description of Artificial Sequence: Synthetic oligonucleotide
  Target: LAMA2; (-) strand; PAM type: NRG; PAM sequence: AAG
aaagctgtaaaggaaaaaca

SEQ ID NO: 72209 - DNA, 20 bp, Artificial Sequence
  Description of Artificial Sequence: Synthetic oligonucleotide
  Target: LAMA2; (-) strand; PAM type: NRG; PAM sequence: AGG
aagacctattaaagctgtaa

SEQ ID NO: 72210 - DNA, 20 bp, Artificial Sequence
  Description of Artificial Sequence: Synthetic oligonucleotide
  Target: LAMA2; (-) strand; PAM type: NRG; PAM sequence: AAG
gaagacctattaaagctgta

SEQ ID NO: 72211 - DNA, 20 bp, Artificial Sequence
  Description of Artificial Sequence: Synthetic oligonucleotide
  Target: LAMA2; (-) strand; PAM type: NRG; PAM sequence: AAG
gaaattatgaagacctatta

SEQ ID NO: 72212 - DNA, 20 bp, Artificial Sequence
  Description of Artificial Sequence: Synthetic oligonucleotide
  Target: LAMA2; (-) strand; PAM type: NRG; PAM sequence: AAG
aaaagactaatgaaattatg

SEQ ID NO: 72213 - DNA, 20 bp, Artificial Sequence
  Description of Artificial Sequence: Synthetic oligonucleotide
  Target: LAMA2; (-) strand; PAM type: NRG; PAM sequence: AAG
ccaaaactggctatttgaaa

SEQ ID NO: 72214 - DNA, 20 bp, Artificial Sequence
  Description of Artificial Sequence: Synthetic oligonucleotide
  Target: LAMA2; (-) strand; PAM type: NRG; PAM sequence: TGG
aaatcaatcaagcccaaaac

SEQ ID NO: 72215 - DNA, 20 bp, Artificial Sequence
  Description of Artificial Sequence: Synthetic oligonucleotide
  Target: LAMA2; (-) strand; PAM type: NRG; PAM sequence: AAG
cacgatagagaaaatcaatc

SEQ ID NO: 72216 - DNA, 20 bp, Artificial Sequence
  Description of Artificial Sequence: Synthetic oligonucleotide
  Target: LAMA2; (-) strand; PAM type: NRG; PAM sequence: GAG
aatataacaatttcacgata

SEQ ID NO: 72217 - DNA, 20 bp, Artificial Sequence
  Description of Artificial Sequence: Synthetic oligonucleotide
  Target: LAMA2; (-) strand; PAM type: NRG; PAM sequence: TAG
acaatataacaatttcacga

SEQ ID NO: 72218 - DNA, 20 bp, Artificial Sequence
  Description of Artificial Sequence: Synthetic oligonucleotide
  Target: LAMA2; (-) strand; PAM type: NRG; PAM sequence: AGG
aaaacaagacatataagagc

SEQ ID NO: 72219 - DNA, 20 bp, Artificial Sequence
  Description of Artificial Sequence: Synthetic oligonucleotide
  Target: LAMA2; (-) strand; PAM type: NRG; PAM sequence: CAG
aaaaacaagacatataagag

SEQ ID NO: 72220 - DNA, 20 bp, Artificial Sequence
  Description of Artificial Sequence: Synthetic oligonucleotide
  Target: LAMA2; (-) strand; PAM type: NRG; PAM sequence: GAG
gtaaaaaacaagacatataa

SEQ ID NO: 72221 - DNA, 20 bp, Artificial Sequence
  Description of Artificial Sequence: Synthetic oligonucleotide
  Target: LAMA2; (-) strand; PAM type: NRG; PAM sequence: AAG
aagtaaaaaacaagacatat

SEQ ID NO: 72222 - DNA, 20 bp, Artificial Sequence
  Description of Artificial Sequence: Synthetic oligonucleotide
  Target: LAMA2; (-) strand; PAM type: NRG; PAM sequence: AAG
aataacgagaagtaaaaaac

SEQ ID NO: 72223 - DNA, 20 bp, Artificial Sequence
  Description of Artificial Sequence: Synthetic oligonucleotide
  Target: LAMA2; (-) strand; PAM type: NRG; PAM sequence: AAG
ctaaaataaaaaataacgag

SEQ ID NO: 72224 - DNA, 20 bp, Artificial Sequence
  Description of Artificial Sequence: Synthetic oligonucleotide
  Target: LAMA2; (-) strand; PAM type: NRG; PAM sequence: GAG
aaactaaaataaaaaataac

SEQ ID NO: 72225 - DNA, 20 bp, Artificial Sequence
  Description of Artificial Sequence: Synthetic oligonucleotide
  Target: LAMA2; (-) strand; PAM type: NRG; PAM sequence: TAG
ttcaagaagctaagaaaatg

SEQ ID NO: 72226 - DNA, 20 bp, Artificial Sequence
  Description of Artificial Sequence: Synthetic oligonucleotide
  Target: LAMA2; (-) strand; PAM type: NRG; PAM sequence: AAG
ggtatccatttcaagaagct

SEQ ID NO: 72227 - DNA, 20 bp, Artificial Sequence
  Description of Artificial Sequence: Synthetic oligonucleotide
  Target: LAMA2; (-) strand; PAM type: NRG; PAM sequence: AAG
acataggtatccatttcaag

SEQ ID NO: 72228 - DNA, 20 bp, Artificial Sequence
  Description of Artificial Sequence: Synthetic oligonucleotide
  Target: LAMA2; (-) strand; PAM type: NRG; PAM sequence: AAG
ataacataggtatccatttc

SEQ ID NO: 72229 - DNA, 20 bp, Artificial Sequence
  Description of Artificial Sequence: Synthetic oligonucleotide
  Target: LAMA2; (-) strand; PAM type: NRG; PAM sequence: AGG
aactgaaatattaataacat

SEQ ID NO: 72230 - DNA, 20 bp, Artificial Sequence
  Description of Artificial Sequence: Synthetic oligonucleotide
  Target: LAMA2; (-) strand; PAM type: NRG; PAM sequence: TAG
gaactgaaatattaataaca

SEQ ID NO: 72231 - DNA, 20 bp, Artificial Sequence
  Description of Artificial Sequence: Synthetic oligonucleotide
  Target: LAMA2; (-) strand; PAM type: NRG; PAM sequence: AAG
taataaatatattaggaaaa

SEQ ID NO: 72232 - DNA, 20 bp, Artificial Sequence
  Description of Artificial Sequence: Synthetic oligonucleotide
  Target: LAMA2; (-) strand; PAM type: NRG; PAM sequence: AGG
taggcgttaataaatatatt

SEQ ID NO: 72233 - DNA, 20 bp, Artificial Sequence
  Description of Artificial Sequence: Synthetic oligonucleotide
  Target: LAMA2; (-) strand; PAM type: NRG; PAM sequence: TAG
gtaggcgttaataaatatat

SEQ ID NO: 72234 - DNA, 20 bp, Artificial Sequence
  Description of Artificial Sequence: Synthetic oligonucleotide
  Target: LAMA2; (-) strand; PAM type: NRG; PAM sequence: AGG
cctatgtagaggcaaattgt

SEQ ID NO: 72235 - DNA, 20 bp, Artificial Sequence
  Description of Artificial Sequence: Synthetic oligonucleotide
  Target: LAMA2; (-) strand; PAM type: NRG; PAM sequence: TAG
ccctatgtagaggcaaattg

SEQ ID NO: 72236 - DNA, 20 bp, Artificial Sequence
  Description of Artificial Sequence: Synthetic oligonucleotide
  Target: LAMA2; (-) strand; PAM type: NRG; PAM sequence: AGG
gcaactaaagccctatgtag

SEQ ID NO: 72237 - DNA, 20 bp, Artificial Sequence
  Description of Artificial Sequence: Synthetic oligonucleotide
  Target: LAMA2; (-) strand; PAM type: NRG; PAM sequence: GAG
ggcaactaaagccctatgta

SEQ ID NO: 72238 - DNA, 20 bp, Artificial Sequence
  Description of Artificial Sequence: Synthetic oligonucleotide
  Target: LAMA2; (-) strand; PAM type: NRG; PAM sequence: TAG
gaggcaactaaagccctatg

SEQ ID NO: 72239 - DNA, 20 bp, Artificial Sequence
  Description of Artificial Sequence: Synthetic oligonucleotide
  Target: LAMA2; (-) strand; PAM type: NRG; PAM sequence: AAG
aaacttgtaggaggcaacta

SEQ ID NO: 72240 - DNA, 20 bp, Artificial Sequence
  Description of Artificial Sequence: Synthetic oligonucleotide
  Target: LAMA2; (-) strand; PAM type: NRG; PAM sequence: AGG
caatatatcaaacttgtagg

SEQ ID NO: 72241 - DNA, 20 bp, Artificial Sequence
  Description of Artificial Sequence: Synthetic oligonucleotide
  Target: LAMA2; (-) strand; PAM type: NRG; PAM sequence: GAG
acaatatatcaaacttgtag

SEQ ID NO: 72242 - DNA, 20 bp, Artificial Sequence
  Description of Artificial Sequence: Synthetic oligonucleotide
  Target: LAMA2; (-) strand; PAM type: NRG; PAM sequence: AGG
atacaatatatcaaacttgt

SEQ ID NO: 72243 - DNA, 20 bp, Artificial Sequence
  Description of Artificial Sequence: Synthetic oligonucleotide
  Target: LAMA2; (-) strand; PAM type: NRG; PAM sequence: TAG
aatacaatatatcaaacttg

SEQ ID NO: 72244 - DNA, 20 bp, Artificial Sequence
  Description of Artificial Sequence: Synthetic oligonucleotide
  Target: LAMA2; (-) strand; PAM type: NRG; PAM sequence: TAG
gaaaaatttactatgaaaat

SEQ ID NO: 72245 - DNA, 20 bp, Artificial Sequence
  Description of Artificial Sequence: Synthetic oligonucleotide
  Target: LAMA2; (-) strand; PAM type: NRG; PAM sequence: CAG
tctatataactcagaggcca

SEQ ID NO: 72246 - DNA, 20 bp, Artificial Sequence
  Description of Artificial Sequence: Synthetic oligonucleotide
  Target: LAMA2; (-) strand; PAM type: NRG; PAM sequence: AGG
ttcacttctatataactcag

SEQ ID NO: 72247 - DNA, 20 bp, Artificial Sequence
  Description of Artificial Sequence: Synthetic oligonucleotide
  Target: LAMA2; (-) strand; PAM type: NRG; PAM sequence: GAG
cttcacttctatataactca

SEQ ID NO: 72248 - DNA, 20 bp, Artificial Sequence
  Description of Artificial Sequence: Synthetic oligonucleotide
  Target: LAMA2; (-) strand; PAM type: NRG; PAM sequence: CAG
cacttcacttctatataact

SEQ ID NO: 72249 - DNA, 20 bp, Artificial Sequence
  Description of Artificial Sequence: Synthetic oligonucleotide
  Target: LAMA2; (-) strand; PAM type: NRG; PAM sequence: AAG
tactcaattgttcagaaatt

SEQ ID NO: 72250 - DNA, 20 bp, Artificial Sequence
  Description of Artificial Sequence: Synthetic oligonucleotide
  Target: LAMA2; (-) strand; PAM type: NRG; PAM sequence: CAG
tagaaaaatactcaattgtt

SEQ ID NO: 72251 - DNA, 20 bp, Artificial Sequence
  Description of Artificial Sequence: Synthetic oligonucleotide
  Target: LAMA2; (-) strand; PAM type: NRG; PAM sequence: TAG
aacaacaaaaacaaaacgat

SEQ ID NO: 72252 - DNA, 20 bp, Artificial Sequence
  Description of Artificial Sequence: Synthetic oligonucleotide
  Target: LAMA2; (-) strand; PAM type: NRG; PAM sequence: AGG
atagtggaattagtgaggaa

SEQ ID NO: 72253 - DNA, 20 bp, Artificial Sequence
  Description of Artificial Sequence: Synthetic oligonucleotide
  Target: LAMA2; (-) strand; PAM type: NRG; PAM sequence: AAG
catagtggaattagtgagga

SEQ ID NO: 72254 - DNA, 20 bp, Artificial Sequence
  Description of Artificial Sequence: Synthetic oligonucleotide
  Target: LAMA2; (-) strand; PAM type: NRG; PAM sequence: AGG
tgaccatagtggaattagtg

SEQ ID NO: 72255 - DNA, 20 bp, Artificial Sequence
  Description of Artificial Sequence: Synthetic oligonucleotide
  Target: LAMA2; (-) strand; PAM type: NRG; PAM sequence: GAG
ctgaccatagtggaattagt

SEQ ID NO: 72256 - DNA, 20 bp, Artificial Sequence
  Description of Artificial Sequence: Synthetic oligonucleotide
  Target: LAMA2; (-) strand; PAM type: NRG; PAM sequence: TAG
tacactgaccatagtggaat

SEQ ID NO: 72257 - DNA, 20 bp, Artificial Sequence
  Description of Artificial Sequence: Synthetic oligonucleotide
  Target: LAMA2; (-) strand; PAM type: NRG; PAM sequence: TGG
tgaaaatacactgaccatag

SEQ ID NO: 72258 - DNA, 20 bp, Artificial Sequence
  Description of Artificial Sequence: Synthetic oligonucleotide
  Target: LAMA2; (-) strand; PAM type: NRG; PAM sequence: TAG
aattgaaaatacactgacca

SEQ ID NO: 72259 - DNA, 20 bp, Artificial Sequence
  Description of Artificial Sequence: Synthetic oligonucleotide
  Target: LAMA2; (-) strand; PAM type: NRG; PAM sequence: AAG
tctcaaaaagtttagtctca

SEQ ID NO: 72260 - DNA, 20 bp, Artificial Sequence
  Description of Artificial Sequence: Synthetic oligonucleotide
  Target: LAMA2; (-) strand; PAM type: NRG; PAM sequence: TAG
aaaacaagtctcaaaaagtt

SEQ ID NO: 72261 - DNA, 20 bp, Artificial Sequence
  Description of Artificial Sequence: Synthetic oligonucleotide
  Target: LAMA2; (-) strand; PAM type: NRG; PAM sequence: AAG
ggataaaaacaagtctcaaa

SEQ ID NO: 72262 - DNA, 20 bp, Artificial Sequence
  Description of Artificial Sequence: Synthetic oligonucleotide
  Target: LAMA2; (-) strand; PAM type: NRG; PAM sequence: AAG
gccatatgttggataaaaac

SEQ ID NO: 72263 - DNA, 20 bp, Artificial Sequence
  Description of Artificial Sequence: Synthetic oligonucleotide
  Target: LAMA2; (-) strand; PAM type: NRG; PAM sequence: TGG
ttcaagtcactgccatatgt

SEQ ID NO: 72264 - DNA, 20 bp, Artificial Sequence
  Description of Artificial Sequence: Synthetic oligonucleotide
  Target: LAMA2; (-) strand; PAM type: NRG; PAM sequence: AAG
aactggtccacattgttttc

SEQ ID NO: 72265 - DNA, 20 bp, Artificial Sequence
  Description of Artificial Sequence: Synthetic oligonucleotide
  Target: LAMA2; (-) strand; PAM type: NRG; PAM sequence: TGG
caggagtgagccagggcaac

SEQ ID NO: 72266 - DNA, 20 bp, Artificial Sequence
  Description of Artificial Sequence: Synthetic oligonucleotide
  Target: LAMA2; (-) strand; PAM type: NRG; PAM sequence: GGG
gggattacaggagtgagcca

SEQ ID NO: 72267 - DNA, 20 bp, Artificial Sequence
  Description of Artificial Sequence: Synthetic oligonucleotide
  Target: LAMA2; (-) strand; PAM type: NRG; PAM sequence: AGG
tgggattacaggagtgagcc

SEQ ID NO: 72268 - DNA, 20 bp, Artificial Sequence
  Description of Artificial Sequence: Synthetic oligonucleotide
  Target: LAMA2; (-) strand; PAM type: NRG; PAM sequence: CAG
ctgggattacaggagtgagc

SEQ ID NO: 72269 - DNA, 20 bp, Artificial Sequence
  Description of Artificial Sequence: Synthetic oligonucleotide
  Target: LAMA2; (-) strand; PAM type: NRG; PAM sequence: GAG
agtgctgggattacaggagt

SEQ ID NO: 72270 - DNA, 20 bp, Artificial Sequence
  Description of Artificial Sequence: Synthetic oligonucleotide
  Target: LAMA2; (-) strand; PAM type: NRG; PAM sequence: GAG
ccaaagtgctgggattacag

SEQ ID NO: 72271 - DNA, 20 bp, Artificial Sequence
  Description of Artificial Sequence: Synthetic oligonucleotide
  Target: LAMA2; (-) strand; PAM type: NRG; PAM sequence: AGG
tcccaaagtgctgggattac

SEQ ID NO: 72272 - DNA, 20 bp, Artificial Sequence
  Description of Artificial Sequence: Synthetic oligonucleotide
  Target: LAMA2; (-) strand; PAM type: NRG; PAM sequence: CAG
ctcccaaagtgctgggatta

SEQ ID NO: 72273 - DNA, 20 bp, Artificial Sequence
  Description of Artificial Sequence: Synthetic oligonucleotide
  Target: LAMA2; (-) strand; PAM type: NRG; PAM sequence: GGG
ccttggcctcccaaagtgct

SEQ ID NO: 72274 - DNA, 20 bp, Artificial Sequence
  Description of Artificial Sequence: Synthetic oligonucleotide
  Target: LAMA2; (-) strand; PAM type: NRG; PAM sequence: TGG
gccttggcctcccaaagtgc

SEQ ID NO: 72275 - DNA, 20 bp, Artificial Sequence
  Description of Artificial Sequence: Synthetic oligonucleotide
  Target: LAMA2; (-) strand; PAM type: NRG; PAM sequence: AAG
ccgcctgccttggcctccca

SEQ ID NO: 72276 - DNA, 20 bp, Artificial Sequence
  Description of Artificial Sequence: Synthetic oligonucleotide
  Target: LAMA2; (-) strand; PAM type: NRG; PAM sequence: TGG
ctcaagccatccgcctgcct

SEQ ID NO: 72277 - DNA, 20 bp, Artificial Sequence
  Description of Artificial Sequence: Synthetic oligonucleotide
  Target: LAMA2; (-) strand; PAM type: NRG; PAM sequence: AAG
ggtcttgaacttctgggctc

SEQ ID NO: 72278 - DNA, 20 bp, Artificial Sequence
  Description of Artificial Sequence: Synthetic oligonucleotide
  Target: LAMA2; (-) strand; PAM type: NRG; PAM sequence: GGG
cacactggtcttgaacttct

SEQ ID NO: 72279 - DNA, 20 bp, Artificial Sequence
  Description of Artificial Sequence: Synthetic oligonucleotide
  Target: LAMA2; (-) strand; PAM type: NRG; PAM sequence: TGG
ccacactggtcttgaacttc

SEQ ID NO: 72280 - DNA, 20 bp, Artificial Sequence
  Description of Artificial Sequence: Synthetic oligonucleotide
  Target: LAMA2; (-) strand; PAM type: NRG; PAM sequence: TGG
tttcaccacgttgcccacac

SEQ ID NO: 72281 - DNA, 20 bp, Artificial Sequence
  Description of Artificial Sequence: Synthetic oligonucleotide
  Target: LAMA2; (-) strand; PAM type: NRG; PAM sequence: AGG
tgttttgtttggtagagatg

SEQ ID NO: 72282 - DNA, 20 bp, Artificial Sequence
  Description of Artificial Sequence: Synthetic oligonucleotide
  Target: LAMA2; (-) strand; PAM type: NRG; PAM sequence: GAG
ttgttttgtttggtagagat

SEQ ID NO: 72283 - DNA, 20 bp, Artificial Sequence
  Description of Artificial Sequence: Synthetic oligonucleotide
  Target: LAMA2; (-) strand; PAM type: NRG; PAM sequence: GAG
ttgttttgttttgtttggta

SEQ ID NO: 72284 - DNA, 20 bp, Artificial Sequence
  Description of Artificial Sequence: Synthetic oligonucleotide
  Target: LAMA2; (-) strand; PAM type: NRG; PAM sequence: TAG
ttttgttttgttttgtttgg

SEQ ID NO: 72285 - DNA, 20 bp, Artificial Sequence
  Description of Artificial Sequence: Synthetic oligonucleotide
  Target: LAMA2; (-) strand; PAM type: NRG; PAM sequence: TGG
ttgttttgttttgttttgtt

SEQ ID NO: 72286 - DNA, 20 bp, Artificial Sequence
  Description of Artificial Sequence: Synthetic oligonucleotide
  Target: LAMA2; (-) strand; PAM type: NRG; PAM sequence: GGG
cacccagctaatttgttttg

SEQ ID NO: 72287 - DNA, 20 bp, Artificial Sequence
  Description of Artificial Sequence: Synthetic oligonucleotide
  Target: LAMA2; (-) strand; PAM type: NRG; PAM sequence: GGG
acacccagctaatttgtttt

SEQ ID NO: 72288 - DNA, 20 bp, Artificial Sequence
  Description of Artificial Sequence: Synthetic oligonucleotide
  Target: LAMA2; (-) strand; PAM type: NRG; PAM sequence: TGG
cacacccagctaatttgttt

SEQ ID NO: 72289 - DNA, 20 bp, Artificial Sequence
  Description of Artificial Sequence: Synthetic oligonucleotide
  Target: LAMA2; (-) strand; PAM type: NRG; PAM sequence: CAG
tgggactacaggcacacacc

SEQ ID NO: 72290 - DNA, 20 bp, Artificial Sequence
  Description of Artificial Sequence: Synthetic oligonucleotide
  Target: LAMA2; (-) strand; PAM type: NRG; PAM sequence: AGG
tccagaatagctgggactac

SEQ ID NO: 72291 - DNA, 20 bp, Artificial Sequence
  Description of Artificial Sequence: Synthetic oligonucleotide
  Target: LAMA2; (-) strand; PAM type: NRG; PAM sequence: CAG
ctccagaatagctgggacta

SEQ ID NO: 72292 - DNA, 20 bp, Artificial Sequence
  Description of Artificial Sequence: Synthetic oligonucleotide
  Target: LAMA2; (-) strand; PAM type: NRG; PAM sequence: GGG
cctcagactccagaatagct

SEQ ID NO: 72293 - DNA, 20 bp, Artificial Sequence
  Description of Artificial Sequence: Synthetic oligonucleotide
  Target: LAMA2; (-) strand; PAM type: NRG; PAM sequence: TGG
acctcagactccagaatagc

SEQ ID NO: 72294 - DNA, 20 bp, Artificial Sequence
  Description of Artificial Sequence: Synthetic oligonucleotide
  Target: LAMA2; (-) strand; PAM type: NRG; PAM sequence: TAG
tcccacctcagactccagaa

SEQ ID NO: 72295 - DNA, 20 bp, Artificial Sequence
  Description of Artificial Sequence: Synthetic oligonucleotide
  Target: LAMA2; (-) strand; PAM type: NRG; PAM sequence: CAG
gattctcccacctcagactc

SEQ ID NO: 72296 - DNA, 20 bp, Artificial Sequence
  Description of Artificial Sequence: Synthetic oligonucleotide
  Target: LAMA2; (-) strand; PAM type: NRG; PAM sequence: CAG
ttgaagtgattctcccacct

SEQ ID NO: 72297 - DNA, 20 bp, Artificial Sequence
  Description of Artificial Sequence: Synthetic oligonucleotide
  Target: LAMA2; (-) strand; PAM type: NRG; PAM sequence: AAG
aacctctacctcctgggttg

SEQ ID NO: 72298 - DNA, 20 bp, Artificial Sequence
  Description of Artificial Sequence: Synthetic oligonucleotide
  Target: LAMA2; (-) strand; PAM type: NRG; PAM sequence: GGG
caccacaacctctacctcct

SEQ ID NO: 72299 - DNA, 20 bp, Artificial Sequence
  Description of Artificial Sequence: Synthetic oligonucleotide
  Target: LAMA2; (-) strand; PAM type: NRG; PAM sequence: TGG
tcaccacaacctctacctcc

SEQ ID NO: 72300 - DNA, 20 bp, Artificial Sequence
  Description of Artificial Sequence: Synthetic oligonucleotide
  Target: LAMA2; (-) strand; PAM type: NRG; PAM sequence: CGG
ggagtgcagtggcgtaatct

SEQ ID NO: 72301 - DNA, 20 bp, Artificial Sequence
  Description of Artificial Sequence: Synthetic oligonucleotide
  Target: LAMA2; (-) strand; PAM type: NRG; PAM sequence: TGG
tcacccaggctggagtgcag

SEQ ID NO: 72302 - DNA, 20 bp, Artificial Sequence
  Description of Artificial Sequence: Synthetic oligonucleotide
  Target: LAMA2; (-) strand; PAM type: NRG; PAM sequence: CAG
ctgtcacccaggctggagtg

SEQ ID NO: 72303 - DNA, 20 bp, Artificial Sequence
  Description of Artificial Sequence: Synthetic oligonucleotide
  Target: LAMA2; (-) strand; PAM type: NRG; PAM sequence: GAG
cagctctgtcacccaggctg

SEQ ID NO: 72304 - DNA, 20 bp, Artificial Sequence
  Description of Artificial Sequence: Synthetic oligonucleotide
  Target: LAMA2; (-) strand; PAM type: NRG; PAM sequence: TGG
tccagctctgtcacccaggc

SEQ ID NO: 72305 - DNA, 20 bp, Artificial Sequence
  Description of Artificial Sequence: Synthetic oligonucleotide
  Target: LAMA2; (-) strand; PAM type: NRG; PAM sequence: AGG
gatgtccagctctgtcaccc

SEQ ID NO: 72306 - DNA, 20 bp, Artificial Sequence
  Description of Artificial Sequence: Synthetic oligonucleotide
  Target: LAMA2; (-) strand; PAM type: NRG; PAM sequence: CAG
tgatgtccagctctgtcacc

SEQ ID NO: 72307 - DNA, 20 bp, Artificial Sequence
  Description of Artificial Sequence: Synthetic oligonucleotide
  Target: LAMA2; (-) strand; PAM type: NRG; PAM sequence: CAG
tttagacagggtctgatgtc

SEQ ID NO: 72308 - DNA, 20 bp, Artificial Sequence
  Description of Artificial Sequence: Synthetic oligonucleotide
  Target: LAMA2; (-) strand; PAM type: NRG; PAM sequence: GGG
tctttgcttttttttagaca

SEQ ID NO: 72309 - DNA, 20 bp, Artificial Sequence
  Description of Artificial Sequence: Synthetic oligonucleotide
  Target: LAMA2; (-) strand; PAM type: NRG; PAM sequence: AGG
ttctttgcttttttttagac

SEQ ID NO: 72310 - DNA, 20 bp, Artificial Sequence
  Description of Artificial Sequence: Synthetic oligonucleotide
  Target: LAMA2; (-) strand; PAM type: NRG; PAM sequence: CAG
tttctttgcttttttttaga

SEQ ID NO: 72311 - DNA, 20 bp, Artificial Sequence
  Description of Artificial Sequence: Synthetic oligonucleotide
  Target: LAMA2; (-) strand; PAM type: NRG; PAM sequence: TAG
ttcttttctttgcttttttt

SEQ ID NO: 72312 - DNA, 20 bp, Artificial Sequence
  Description of Artificial Sequence: Synthetic oligonucleotide
  Target: LAMA2; (-) strand; PAM type: NRG; PAM sequence: TAG
agtactgcaaccaacaacta

SEQ ID NO: 72313 - DNA, 20 bp, Artificial Sequence
  Description of Artificial Sequence: Synthetic oligonucleotide
  Target: LAMA2; (-) strand; PAM type: NRG; PAM sequence: TAG
ataactcactgatatatttg

SEQ ID NO: 72314 - DNA, 20 bp, Artificial Sequence
  Description of Artificial Sequence: Synthetic oligonucleotide
  Target: LAMA2; (-) strand; PAM type: NRG; PAM sequence: AAG
tttgtatgtctctaatttaa

SEQ ID NO: 72315 - DNA, 20 bp, Artificial Sequence
  Description of Artificial Sequence: Synthetic oligonucleotide
  Target: LAMA2; (-) strand; PAM type: NRG; PAM sequence: GAG
aaaaggtggttaatacaaaa

SEQ ID NO: 72316 - DNA, 20 bp, Artificial Sequence
  Description of Artificial Sequence: Synthetic oligonucleotide
  Target: LAMA2; (-) strand; PAM type: NRG; PAM sequence: AAG
taaaaaggtggttaatacaa

SEQ ID NO: 72317 - DNA, 20 bp, Artificial Sequence
  Description of Artificial Sequence: Synthetic oligonucleotide
  Target: LAMA2; (-) strand; PAM type: NRG; PAM sequence: TGG
tggcagtagtattaaaaagg

SEQ ID NO: 72318 - DNA, 20 bp, Artificial Sequence
  Description of Artificial Sequence: Synthetic oligonucleotide
  Target: LAMA2; (-) strand; PAM type: NRG; PAM sequence: AGG
tgctggcagtagtattaaaa

SEQ ID NO: 72319 - DNA, 20 bp, Artificial Sequence
  Description of Artificial Sequence: Synthetic oligonucleotide
  Target: LAMA2; (-) strand; PAM type: NRG; PAM sequence: AAG
ctgctggcagtagtattaaa

SEQ ID NO: 72320 - DNA, 20 bp, Artificial Sequence
  Description of Artificial Sequence: Synthetic oligonucleotide
  Target: LAMA2; (-) strand; PAM type: NRG; PAM sequence: TAG
gatagaagtactgctggcag

SEQ ID NO: 72321 - DNA, 20 bp, Artificial Sequence
  Description of Artificial Sequence: Synthetic oligonucleotide
  Target: LAMA2; (-) strand; PAM type: NRG; PAM sequence: CAG
aaagatagaagtactgctgg

SEQ ID NO: 72322 - DNA, 20 bp, Artificial Sequence
  Description of Artificial Sequence: Synthetic oligonucleotide
  Target: LAMA2; (-) strand; PAM type: NRG; PAM sequence: TGG
tctaaagatagaagtactgc

SEQ ID NO: 72323 - DNA, 20 bp, Artificial Sequence
  Description of Artificial Sequence: Synthetic oligonucleotide
  Target: LAMA2; (-) strand; PAM type: NRG; PAM sequence: AAG
aaagtacactctaaagatag

SEQ ID NO: 72324 - DNA, 20 bp, Artificial Sequence
  Description of Artificial Sequence: Synthetic oligonucleotide
  Target: LAMA2; (-) strand; PAM type: NRG; PAM sequence: TAG
acaaaagtacactctaaaga

SEQ ID NO: 72325 - DNA, 20 bp, Artificial Sequence
  Description of Artificial Sequence: Synthetic oligonucleotide
  Target: LAMA2; (-) strand; PAM type: NRG; PAM sequence: AAG
acatacaaaagtacactcta

SEQ ID NO: 72326 - DNA, 20 bp, Artificial Sequence
  Description of Artificial Sequence: Synthetic oligonucleotide
  Target: LAMA2; (-) strand; PAM type: NRG; PAM sequence: AAG
gctagtgaatctacatacaa

SEQ ID NO: 72327 - DNA, 20 bp, Artificial Sequence
  Description of Artificial Sequence: Synthetic oligonucleotide
  Target: LAMA2; (-) strand; PAM type: NRG; PAM sequence: TAG
acacagagaaaaaaggaagc

SEQ ID NO: 72328 - DNA, 20 bp, Artificial Sequence
  Description of Artificial Sequence: Synthetic oligonucleotide
  Target: LAMA2; (-) strand; PAM type: NRG; PAM sequence: AAG
gcaaacacagagaaaaaagg

SEQ ID NO: 72329 - DNA, 20 bp, Artificial Sequence
  Description of Artificial Sequence: Synthetic oligonucleotide
  Target: LAMA2; (-) strand; PAM type: NRG; PAM sequence: AGG
cacgcaaacacagagaaaaa

SEQ ID NO: 72330 - DNA, 20 bp, Artificial Sequence
  Description of Artificial Sequence: Synthetic oligonucleotide
  Target: LAMA2; (-) strand; PAM type: NRG; PAM sequence: AAG
tcacgcaaacacagagaaaa

SEQ ID NO: 72331 - DNA, 20 bp, Artificial Sequence
  Description of Artificial Sequence: Synthetic oligonucleotide
  Target: LAMA2; (-) strand; PAM type: NRG; PAM sequence: GAG
acctatatcacgcaaacaca

SEQ ID NO: 72332 - DNA, 20 bp, Artificial Sequence
  Description of Artificial Sequence: Synthetic oligonucleotide
  Target: LAMA2; (-) strand; PAM type: NRG; PAM sequence: CAG
aaacctatatcacgcaaaca

SEQ ID NO: 72333 - DNA, 20 bp, Artificial Sequence
  Description of Artificial Sequence: Synthetic oligonucleotide
  Target: LAMA2; (-) strand; PAM type: NRG; PAM sequence: GAG
tataagtacactcaacatat

SEQ ID NO: 72334 - DNA, 20 bp, Artificial Sequence
  Description of Artificial Sequence: Synthetic oligonucleotide
  Target: LAMA2; (-) strand; PAM type: NRG; PAM sequence: AAG
agaagatacaccttaaatat

SEQ ID NO: 72335 - DNA, 20 bp, Artificial Sequence
  Description of Artificial Sequence: Synthetic oligonucleotide
  Target: LAMA2; (-) strand; PAM type: NRG; PAM sequence: AAG
caaatttatgctgctcacag

SEQ ID NO: 72336 - DNA, 20 bp, Artificial Sequence
  Description of Artificial Sequence: Synthetic oligonucleotide
  Target: LAMA2; (-) strand; PAM type: NRG; PAM sequence: CAG
attcaaatttatgctgctca

SEQ ID NO: 72337 - DNA, 20 bp, Artificial Sequence
  Description of Artificial Sequence: Synthetic oligonucleotide
  Target: LAMA2; (-) strand; PAM type: NRG; PAM sequence: TAG
aaaggaaaagattatcagat

SEQ ID NO: 72338 - DNA, 20 bp, Artificial Sequence
  Description of Artificial Sequence: Synthetic oligonucleotide
  Target: LAMA2; (-) strand; PAM type: NRG; PAM sequence: CAG
aatttaaaggaaaagattat

SEQ ID NO: 72339 - DNA, 20 bp, Artificial Sequence
  Description of Artificial Sequence: Synthetic oligonucleotide
  Target: LAMA2; (-) strand; PAM type: NRG; PAM sequence: AAG
aagtatccaatttaaaggaa

SEQ ID NO: 72340 - DNA, 20 bp, Artificial Sequence
  Description of Artificial Sequence: Synthetic oligonucleotide
  Target: LAMA2; (-) strand; PAM type: NRG; PAM sequence: AGG
gaattaagtatccaatttaa

SEQ ID NO: 72341 - DNA, 20 bp, Artificial Sequence
  Description of Artificial Sequence: Synthetic oligonucleotide
  Target: LAMA2; (-) strand; PAM type: NRG; PAM sequence: AAG
tgaattaagtatccaattta

SEQ ID NO: 72342 - DNA, 20 bp, Artificial Sequence
  Description of Artificial Sequence: Synthetic oligonucleotide
  Target: LAMA2; (-) strand; PAM type: NRG; PAM sequence: AAG
acactaaatgtaaatgaatt

SEQ ID NO: 72343 - DNA, 20 bp, Artificial Sequence
  Description of Artificial Sequence: Synthetic oligonucleotide
  Target: LAMA2; (-) strand; PAM type: NRG; PAM sequence: TAG
tttgaacccatatatcagta

SEQ ID NO: 72344 - DNA, 20 bp, Artificial Sequence
  Description of Artificial Sequence: Synthetic oligonucleotide
  Target: LAMA2; (-) strand; PAM type: NRG; PAM sequence: CAG
ggtaatttgaacccatatat

SEQ ID NO: 72345 - DNA, 20 bp, Artificial Sequence
  Description of Artificial Sequence: Synthetic oligonucleotide
  Target: LAMA2; (-) strand; PAM type: NRG; PAM sequence: TGG
acagaaaacagatgagaata

SEQ ID NO: 72346 - DNA, 20 bp, Artificial Sequence
  Description of Artificial Sequence: Synthetic oligonucleotide
  Target: LAMA2; (-) strand; PAM type: NRG; PAM sequence: GAG
aagacaaacagaaaacagat

SEQ ID NO: 72347 - DNA, 20 bp, Artificial Sequence
  Description of Artificial Sequence: Synthetic oligonucleotide
  Target: LAMA2; (-) strand; PAM type: NRG; PAM sequence: CAG
aagataagacaaacagaaaa

SEQ ID NO: 72348 - DNA, 20 bp, Artificial Sequence
  Description of Artificial Sequence: Synthetic oligonucleotide
  Target: LAMA2; (-) strand; PAM type: NRG; PAM sequence: CAG
ttagcaaaagataagacaaa

SEQ ID NO: 72349 - DNA, 20 bp, Artificial Sequence
  Description of Artificial Sequence: Synthetic oligonucleotide
  Target: LAMA2; (-) strand; PAM type: NRG; PAM sequence: AAG
aagaaaaattagcaaaagat

SEQ ID NO: 72350 - DNA, 20 bp, Artificial Sequence
  Description of Artificial Sequence: Synthetic oligonucleotide
  Target: LAMA2; (-) strand; PAM type: NRG; PAM sequence: AAG
tgaggaagaaaaattagcaa

SEQ ID NO: 72351 - DNA, 20 bp, Artificial Sequence
  Description of Artificial Sequence: Synthetic oligonucleotide
  Target: LAMA2; (-) strand; PAM type: NRG; PAM sequence: TAG
aagttatgaggaagaaaaat

SEQ ID NO: 72352 - DNA, 20 bp, Artificial Sequence
  Description of Artificial Sequence: Synthetic oligonucleotide
  Target: LAMA2; (-) strand; PAM type: NRG; PAM sequence: AAG
aaagtaagaaagttatgagg

SEQ ID NO: 72353 - DNA, 20 bp, Artificial Sequence
  Description of Artificial Sequence: Synthetic oligonucleotide
  Target: LAMA2; (-) strand; PAM type: NRG; PAM sequence: AGG
ccaaaagtaagaaagttatg

SEQ ID NO: 72354 - DNA, 20 bp, Artificial Sequence
  Description of Artificial Sequence: Synthetic oligonucleotide
  Target: LAMA2; (-) strand; PAM type: NRG; PAM sequence: GAG
tccaaaagtaagaaagttat

SEQ ID NO: 72355 - DNA, 20 bp, Artificial Sequence
  Description of Artificial Sequence: Synthetic oligonucleotide
  Target: LAMA2; (-) strand; PAM type: NRG; PAM sequence: AAG
tcagtattccaaaagtaaga

SEQ ID NO: 72356 - DNA, 20 bp, Artificial Sequence
  Description of Artificial Sequence: Synthetic oligonucleotide
  Target: LAMA2; (-) strand; PAM type: NRG; PAM sequence: AAG
accttcagtattccaaaagt

SEQ ID NO: 72357 - DNA, 20 bp, Artificial Sequence
  Description of Artificial Sequence: Synthetic oligonucleotide
  Target: LAMA2; (-) strand; PAM type: NRG; PAM sequence: AAG
aaaaaccttcagtattccaa

SEQ ID NO: 72358 - DNA, 20 bp, Artificial Sequence
  Description of Artificial Sequence: Synthetic oligonucleotide
  Target: LAMA2; (-) strand; PAM type: NRG; PAM sequence: CAG
attaaatagggaaaaacctt

SEQ ID NO: 72359 - DNA, 20 bp, Artificial Sequence
  Description of Artificial Sequence: Synthetic oligonucleotide
  Target: LAMA2; (-) strand; PAM type: NRG; PAM sequence: GGG
agaaatggaataattaaata

SEQ ID NO: 72360 - DNA, 20 bp, Artificial Sequence
  Description of Artificial Sequence: Synthetic oligonucleotide
  Target: LAMA2; (-) strand; PAM type: NRG; PAM sequence: AGG
aagaaatggaataattaaat

SEQ ID NO: 72361 - DNA, 20 bp, Artificial Sequence
  Description of Artificial Sequence: Synthetic oligonucleotide
  Target: LAMA2; (-) strand; PAM type: NRG; PAM sequence: TAG
gaagaaatggaataattaaa

SEQ ID NO: 72362 - DNA, 20 bp, Artificial Sequence
  Description of Artificial Sequence: Synthetic oligonucleotide
  Target: LAMA2; (-) strand; PAM type: NRG; PAM sequence: TGG
caagctaatgaaagaagaaa

SEQ ID NO: 72363 - DNA, 20 bp, Artificial Sequence
  Description of Artificial Sequence: Synthetic oligonucleotide
  Target: LAMA2; (-) strand; PAM type: NRG; PAM sequence: AAG
agaagacaagctaatgaaag

SEQ ID NO: 72364 - DNA, 20 bp, Artificial Sequence
  Description of Artificial Sequence: Synthetic oligonucleotide
  Target: LAMA2; (-) strand; PAM type: NRG; PAM sequence: AAG
cacagaagacaagctaatga

SEQ ID NO: 72365 - DNA, 20 bp, Artificial Sequence
  Description of Artificial Sequence: Synthetic oligonucleotide
  Target: LAMA2; (-) strand; PAM type: NRG; PAM sequence: AAG
taaaagacttcacagaagac

SEQ ID NO: 72366 - DNA, 20 bp, Artificial Sequence
  Description of Artificial Sequence: Synthetic oligonucleotide
  Target: LAMA2; (-) strand; PAM type: NRG; PAM sequence: AAG
agtaataaaagacttcacag

SEQ ID NO: 72367 - DNA, 20 bp, Artificial Sequence
  Description of Artificial Sequence: Synthetic oligonucleotide
  Target: LAMA2; (-) strand; PAM type: NRG; PAM sequence: CAG
atgagtaataaaagacttca

SEQ ID NO: 72368 - DNA, 20 bp, Artificial Sequence
  Description of Artificial Sequence: Synthetic oligonucleotide
  Target: LAMA2; (-) strand; PAM type: NRG; PAM sequence: AAG
gtaattagtatgagtaataa

SEQ ID NO: 72369 - DNA, 20 bp, Artificial Sequence
  Description of Artificial Sequence: Synthetic oligonucleotide
  Target: LAMA2; (-) strand; PAM type: NRG; PAM sequence: GAG
atatttatggtaattagtat

SEQ ID NO: 72370 - DNA, 20 bp, Artificial Sequence
  Description of Artificial Sequence: Synthetic oligonucleotide
  Target: LAMA2; (-) strand; PAM type: NRG; PAM sequence: TAG
gttaccatatttatggtaat

SEQ ID NO: 72371 - DNA, 20 bp, Artificial Sequence
  Description of Artificial Sequence: Synthetic oligonucleotide
  Target: LAMA2; (-) strand; PAM type: NRG; PAM sequence: TGG
gacgcaagttaccatattta

SEQ ID NO: 72372 - DNA, 20 bp, Artificial Sequence
  Description of Artificial Sequence: Synthetic oligonucleotide
  Target: LAMA2; (-) strand; PAM type: NRG; PAM sequence: AAG
ttctgataaatgaaggacgc

SEQ ID NO: 72373 - DNA, 20 bp, Artificial Sequence
  Description of Artificial Sequence: Synthetic oligonucleotide
  Target: LAMA2; (-) strand; PAM type: NRG; PAM sequence: AGG
tacaaagttctgataaatga

SEQ ID NO: 72374 - DNA, 20 bp, Artificial Sequence
  Description of Artificial Sequence: Synthetic oligonucleotide
  Target: LAMA2; (-) strand; PAM type: NRG; PAM sequence: AAG
ttacaaagttctgataaatg

SEQ ID NO: 72375 - DNA, 20 bp, Artificial Sequence
  Description of Artificial Sequence: Synthetic oligonucleotide
  Target: LAMA2; (-) strand; PAM type: NRG; PAM sequence: AAG
gactgaggtaaaatattaca

SEQ ID NO: 72376 - DNA, 20 bp, Artificial Sequence
  Description of Artificial Sequence: Synthetic oligonucleotide
  Target: LAMA2; (-) strand; PAM type: NRG; PAM sequence: AGG
ctgatggggaggtgggactg

SEQ ID NO: 72377 - DNA, 20 bp, Artificial Sequence
  Description of Artificial Sequence: Synthetic oligonucleotide
  Target: LAMA2; (-) strand; PAM type: NRG; PAM sequence: GAG
tctgatggggaggtgggact

SEQ ID NO: 72378 - DNA, 20 bp, Artificial Sequence
  Description of Artificial Sequence: Synthetic oligonucleotide
  Target: LAMA2; (-) strand; PAM type: NRG; PAM sequence: GGG
attaaatctgatggggaggt

SEQ ID NO: 72379 - DNA, 20 bp, Artificial Sequence
  Description of Artificial Sequence: Synthetic oligonucleotide
  Target: LAMA2; (-) strand; PAM type: NRG; PAM sequence: TGG
aattaaatctgatggggagg

SEQ ID NO: 72380 - DNA, 20 bp, Artificial Sequence
  Description of Artificial Sequence: Synthetic oligonucleotide
  Target: LAMA2; (-) strand; PAM type: NRG; PAM sequence: AGG
tagaattaaatctgatgggg

SEQ ID NO: 72381 - DNA, 20 bp, Artificial Sequence
  Description of Artificial Sequence: Synthetic oligonucleotide
  Target: LAMA2; (-) strand; PAM type: NRG; PAM sequence: GAG
atagaattaaatctgatggg

SEQ ID NO: 72382 - DNA, 20 bp, Artificial Sequence
  Description of Artificial Sequence: Synthetic oligonucleotide
  Target: LAMA2; (-) strand; PAM type: NRG; PAM sequence: GGG
ctatagaattaaatctgatg

SEQ ID NO: 72383 - DNA, 20 bp, Artificial Sequence
  Description of Artificial Sequence: Synthetic oligonucleotide
  Target: LAMA2; (-) strand; PAM type: NRG; PAM sequence: GGG
actatagaattaaatctgat

SEQ ID NO: 72384 - DNA, 20 bp, Artificial Sequence
  Description of Artificial Sequence: Synthetic oligonucleotide
  Target: LAMA2; (-) strand; PAM type: NRG; PAM sequence: TGG
aactatagaattaaatctga

SEQ ID NO: 72385 - DNA, 20 bp, Artificial Sequence
  Description of Artificial Sequence: Synthetic oligonucleotide
  Target: LAMA2; (-) strand; PAM type: NRG; PAM sequence: TAG
aattaaacatatgagaacta

SEQ ID NO: 72386 - DNA, 20 bp, Artificial Sequence
  Description of Artificial Sequence: Synthetic oligonucleotide
  Target: LAMA2; (-) strand; PAM type: NRG; PAM sequence: GAG
atacatagaattaaacatat

SEQ ID NO: 72387 - DNA, 20 bp, Artificial Sequence
  Description of Artificial Sequence: Synthetic oligonucleotide
  Target: LAMA2; (-) strand; PAM type: NRG; PAM sequence: TAG
tatggagtttaatatataca

SEQ ID NO: 72388 - DNA, 20 bp, Artificial Sequence
  Description of Artificial Sequence: Synthetic oligonucleotide
  Target: LAMA2; (-) strand; PAM type: NRG; PAM sequence: GAG
ggtaacaattacttcctatg

SEQ ID NO: 72389 - DNA, 20 bp, Artificial Sequence
  Description of Artificial Sequence: Synthetic oligonucleotide
  Target: LAMA2; (-) strand; PAM type: NRG; PAM sequence: TGG
atggtaacaattacttccta

SEQ ID NO: 72390 - DNA, 20 bp, Artificial Sequence
  Description of Artificial Sequence: Synthetic oligonucleotide
  Target: LAMA2; (-) strand; PAM type: NRG; PAM sequence: TGG
tgaaaactgcatgtttatga

SEQ ID NO: 72391 - DNA, 20 bp, Artificial Sequence
  Description of Artificial Sequence: Synthetic oligonucleotide
  Target: LAMA2; (-) strand; PAM type: NRG; PAM sequence: TAG
aagttaaaggtgtttaaaat

SEQ ID NO: 72392 - DNA, 20 bp, Artificial Sequence
  Description of Artificial Sequence: Synthetic oligonucleotide
  Target: LAMA2; (-) strand; PAM type: NRG; PAM sequence: AGG
aaaataaacaaaaaagttaa

SEQ ID NO: 72393 - DNA, 20 bp, Artificial Sequence
  Description of Artificial Sequence: Synthetic oligonucleotide
  Target: LAMA2; (-) strand; PAM type: NRG; PAM sequence: AAG
aaaaataaacaaaaaagtta

SEQ ID NO: 72394 - DNA, 20 bp, Artificial Sequence
  Description of Artificial Sequence: Synthetic oligonucleotide
  Target: LAMA2; (-) strand; PAM type: NRG; PAM sequence: AAG
ctaacaaaaaataaacaaaa

SEQ ID NO: 72395 - DNA, 20 bp, Artificial Sequence
  Description of Artificial Sequence: Synthetic oligonucleotide
  Target: LAMA2; (-) strand; PAM type: NRG; PAM sequence: AAG
cagaaataaataaataaaca

SEQ ID NO: 72396 - DNA, 20 bp, Artificial Sequence
  Description of Artificial Sequence: Synthetic oligonucleotide
  Target: LAMA2; (-) strand; PAM type: NRG; PAM sequence: CAG
tcttgatggaagtttactaa

SEQ ID NO: 72397 - DNA, 20 bp, Artificial Sequence
  Description of Artificial Sequence: Synthetic oligonucleotide
  Target: LAMA2; (-) strand; PAM type: NRG; PAM sequence: AAG
atgggatactttcttgatgg

SEQ ID NO: 72398 - DNA, 20 bp, Artificial Sequence
  Description of Artificial Sequence: Synthetic oligonucleotide
  Target: LAMA2; (-) strand; PAM type: NRG; PAM sequence: TGG
gaaatgggatactttcttga

SEQ ID NO: 72399 - DNA, 20 bp, Artificial Sequence
  Description of Artificial Sequence: Synthetic oligonucleotide
  Target: LAMA2; (-) strand; PAM type: NRG; PAM sequence: GGG
aaaaaaggcagaaaagaaat

SEQ ID NO: 72400 - DNA, 20 bp, Artificial Sequence
  Description of Artificial Sequence: Synthetic oligonucleotide
  Target: LAMA2; (-) strand; PAM type: NRG; PAM sequence: TGG
taaaaaaggcagaaaagaaa

SEQ ID NO: 72401 - DNA, 20 bp, Artificial Sequence
  Description of Artificial Sequence: Synthetic oligonucleotide
  Target: LAMA2; (-) strand; PAM type: NRG; PAM sequence: AAG
ttcatttaaaaaaggcagaa

SEQ ID NO: 72402 - DNA, 20 bp, Artificial Sequence
  Description of Artificial Sequence: Synthetic oligonucleotide
  Target: LAMA2; (-) strand; PAM type: NRG; PAM sequence: CAG
aggctttcatttaaaaaagg

SEQ ID NO: 72403 - DNA, 20 bp, Artificial Sequence
  Description of Artificial Sequence: Synthetic oligonucleotide
  Target: LAMA2; (-) strand; PAM type: NRG; PAM sequence: AGG
agcaggctttcatttaaaaa

SEQ ID NO: 72404 - DNA, 20 bp, Artificial Sequence
  Description of Artificial Sequence: Synthetic oligonucleotide
  Target: LAMA2; (-) strand; PAM type: NRG; PAM sequence: AAG
tagcaggctttcatttaaaa

SEQ ID NO: 72405 - DNA, 20 bp, Artificial Sequence
  Description of Artificial Sequence: Synthetic oligonucleotide
  Target: LAMA2; (-) strand; PAM type: NRG; PAM sequence: AGG
atgagagatttatcactagc

SEQ ID NO: 72406 - DNA, 20 bp, Artificial Sequence
  Description of Artificial Sequence: Synthetic oligonucleotide
  Target: LAMA2; (-) strand; PAM type: NRG; PAM sequence: CAG
gatgagagatttatcactag

SEQ ID NO: 72407 - DNA, 20 bp, Artificial Sequence
  Description of Artificial Sequence: Synthetic oligonucleotide
  Target: LAMA2; (-) strand; PAM type: NRG; PAM sequence: TAG
aaagatgagagatttatcac

SEQ ID NO: 72408 - DNA, 20 bp, Artificial Sequence
  Description of Artificial Sequence: Synthetic oligonucleotide
  Target: LAMA2; (-) strand; PAM type: NRG; PAM sequence: GAG
aaaaaacaaacaaaagatga

SEQ ID NO: 72409 - DNA, 20 bp, Artificial Sequence
  Description of Artificial Sequence: Synthetic oligonucleotide
  Target: LAMA2; (-) strand; PAM type: NRG; PAM sequence: GAG
tgaaaaaacaaacaaaagat

SEQ ID NO: 72410 - DNA, 20 bp, Artificial Sequence
  Description of Artificial Sequence: Synthetic oligonucleotide
  Target: LAMA2; (-) strand; PAM type: NRG; PAM sequence: AAG
aaaagtgaaaaaacaaacaa

SEQ ID NO: 72411 - DNA, 20 bp, Artificial Sequence
  Description of Artificial Sequence: Synthetic oligonucleotide
  Target: LAMA2; (-) strand; PAM type: NRG; PAM sequence: AAG
taagtctcaaaagtaaagaa

SEQ ID NO: 72412 - DNA, 20 bp, Artificial Sequence
  Description of Artificial Sequence: Synthetic oligonucleotide
  Target: LAMA2; (-) strand; PAM type: NRG; PAM sequence: AAG
gaaaataagtctcaaaagta

SEQ ID NO: 72413 - DNA, 20 bp, Artificial Sequence
  Description of Artificial Sequence: Synthetic oligonucleotide
  Target: LAMA2; (-) strand; PAM type: NRG; PAM sequence: AAG
tggtggaaaataagtctcaa

SEQ ID NO: 72414 - DNA, 20 bp, Artificial Sequence
  Description of Artificial Sequence: Synthetic oligonucleotide
  Target: LAMA2; (-) strand; PAM type: NRG; PAM sequence: AAG
ctttatacttggtggaaaat

SEQ ID NO: 72415 - DNA, 20 bp, Artificial Sequence
  Description of Artificial Sequence: Synthetic oligonucleotide
  Target: LAMA2; (-) strand; PAM type: NRG; PAM sequence: TGG
aaattctactttatacttgg

SEQ ID NO: 72416 - DNA, 20 bp, Artificial Sequence
  Description of Artificial Sequence: Synthetic oligonucleotide
  Target: LAMA2; (-) strand; PAM type: NRG; PAM sequence: TGG
aagaaattctactttatact

SEQ ID NO: 72417 - DNA, 20 bp, Artificial Sequence
  Description of Artificial Sequence: Synthetic oligonucleotide
  Target: LAMA2; (-) strand; PAM type: NRG; PAM sequence: AAG
aaacaaaattccaaccaggc

SEQ ID NO: 72418 - DNA, 20 bp, Artificial Sequence
  Description of Artificial Sequence: Synthetic oligonucleotide
  Target: LAMA2; (-) strand; PAM type: NRG; PAM sequence: AGG
aacaaaacaaaattccaacc

SEQ ID NO: 72419 - DNA, 20 bp, Artificial Sequence
  Description of Artificial Sequence: Synthetic oligonucleotide
  Target: LAMA2; (-) strand; PAM type: NRG; PAM sequence: CAG
aaacaaaacaaaattccaac

SEQ ID NO: 72420 - DNA, 20 bp, Artificial Sequence
  Description of Artificial Sequence: Synthetic oligonucleotide
  Target: LAMA2; (-) strand; PAM type: NRG; PAM sequence: TGG
ataggatatatttagagtgc

SEQ ID NO: 72421 - DNA, 20 bp, Artificial Sequence
  Description of Artificial Sequence: Synthetic oligonucleotide
  Target: LAMA2; (-) strand; PAM type: NRG; PAM sequence: GAG
ataatgataggatatattta

SEQ ID NO: 72422 - DNA, 20 bp, Artificial Sequence
  Description of Artificial Sequence: Synthetic oligonucleotide
  Target: LAMA2; (-) strand; PAM type: NRG; PAM sequence: TAG
taataatgataggatatatt

SEQ ID NO: 72423 - DNA, 20 bp, Artificial Sequence
  Description of Artificial Sequence: Synthetic oligonucleotide
  Target: LAMA2; (-) strand; PAM type: NRG; PAM sequence: AGG
gaaaaacaagtaataatgat

SEQ ID NO: 72424 - DNA, 20 bp, Artificial Sequence
  Description of Artificial Sequence: Synthetic oligonucleotide
  Target: LAMA2; (-) strand; PAM type: NRG; PAM sequence: TAG
tgaaaaacaagtaataatga

SEQ ID NO: 72425 - DNA, 20 bp, Artificial Sequence
  Description of Artificial Sequence: Synthetic oligonucleotide
  Target: LAMA2; (-) strand; PAM type: NRG; PAM sequence: AAG
tgatagaaataatgaaaaac

SEQ ID NO: 72426 - DNA, 20 bp, Artificial Sequence
  Description of Artificial Sequence: Synthetic oligonucleotide
  Target: LAMA2; (-) strand; PAM type: NRG; PAM sequence: TAG
actttccgcttacttcatga

SEQ ID NO: 72427 - DNA, 20 bp, Artificial Sequence
  Description of Artificial Sequence: Synthetic oligonucleotide
  Target: LAMA2; (-) strand; PAM type: NRG; PAM sequence: AAG
tgtttccaagaaccagcaat

SEQ ID NO: 72428 - DNA, 20 bp, Artificial Sequence
  Description of Artificial Sequence: Synthetic oligonucleotide
  Target: LAMA2; (-) strand; PAM type: NRG; PAM sequence: CAG
atgatcttgtttccaagaac

SEQ ID NO: 72429 - DNA, 20 bp, Artificial Sequence
  Description of Artificial Sequence: Synthetic oligonucleotide
  Target: LAMA2; (-) strand; PAM type: NRG; PAM sequence: AAG
ggaaaaatgatcttgtttcc

SEQ ID NO: 72430 - DNA, 20 bp, Artificial Sequence
  Description of Artificial Sequence: Synthetic oligonucleotide
  Target: LAMA2; (-) strand; PAM type: NRG; PAM sequence: AGG
atagccttcaatggagtgaa

SEQ ID NO: 72431 - DNA, 20 bp, Artificial Sequence
  Description of Artificial Sequence: Synthetic oligonucleotide
  Target: LAMA2; (-) strand; PAM type: NRG; PAM sequence: AAG
aatagccttcaatggagtga

SEQ ID NO: 72432 - DNA, 20 bp, Artificial Sequence
  Description of Artificial Sequence: Synthetic oligonucleotide
  Target: LAMA2; (-) strand; PAM type: NRG; PAM sequence: GAG
aaaaaaaatagccttcaatg

SEQ ID NO: 72433 - DNA, 20 bp, Artificial Sequence
  Description of Artificial Sequence: Synthetic oligonucleotide
  Target: LAMA2; (-) strand; PAM type: NRG; PAM sequence: TGG
ttaaaaaaaatagccttcaa

SEQ ID NO: 72434 - DNA, 20 bp, Artificial Sequence
  Description of Artificial Sequence: Synthetic oligonucleotide
  Target: LAMA2; (-) strand; PAM type: NRG; PAM sequence: TAG
aaaagcaaaattaaaaaaaa

SEQ ID NO: 72435 - DNA, 20 bp, Artificial Sequence
  Description of Artificial Sequence: Synthetic oligonucleotide
  Target: LAMA2; (-) strand; PAM type: NRG; PAM sequence: AAG
ggtaaacccctgaacaccaa

SEQ ID NO: 72436 - DNA, 20 bp, Artificial Sequence
  Description of Artificial Sequence: Synthetic oligonucleotide
  Target: LAMA2; (-) strand; PAM type: NRG; PAM sequence: TGG
aatcattcctaagtacattg

SEQ ID NO: 72437 - DNA, 20 bp, Artificial Sequence
  Description of Artificial Sequence: Synthetic oligonucleotide
  Target: LAMA2; (-) strand; PAM type: NRG; PAM sequence: AAG
ataccaataaaatcattcct

SEQ ID NO: 72438 - DNA, 20 bp, Artificial Sequence
  Description of Artificial Sequence: Synthetic oligonucleotide
  Target: LAMA2; (-) strand; PAM type: NRG; PAM sequence: TAG
agaagcttttgaatcccaaa

SEQ ID NO: 72439 - DNA, 20 bp, Artificial Sequence
  Description of Artificial Sequence: Synthetic oligonucleotide
  Target: LAMA2; (-) strand; PAM type: NRG; PAM sequence: AAG
cattgatccacagaatctag

SEQ ID NO: 72440 - DNA, 20 bp, Artificial Sequence
  Description of Artificial Sequence: Synthetic oligonucleotide
  Target: LAMA2; (-) strand; PAM type: NRG; PAM sequence: TAG
agacattgatccacagaatc

SEQ ID NO: 72441 - DNA, 20 bp, Artificial Sequence
  Description of Artificial Sequence: Synthetic oligonucleotide
  Target: LAMA2; (-) strand; PAM type: NRG; PAM sequence: CAG
tggtgaaagacattgatcca

SEQ ID NO: 72442 - DNA, 20 bp, Artificial Sequence
  Description of Artificial Sequence: Synthetic oligonucleotide
  Target: LAMA2; (-) strand; PAM type: NRG; PAM sequence: AAG
gaattttaccaaattggtga

SEQ ID NO: 72443 - DNA, 20 bp, Artificial Sequence
  Description of Artificial Sequence: Synthetic oligonucleotide
  Target: LAMA2; (-) strand; PAM type: NRG; PAM sequence: TGG
ggctaagaattttaccaaat

SEQ ID NO: 72444 - DNA, 20 bp, Artificial Sequence
  Description of Artificial Sequence: Synthetic oligonucleotide
  Target: LAMA2; (-) strand; PAM type: NRG; PAM sequence: AAG
cattcgagaaaatatcggct

SEQ ID NO: 72445 - DNA, 20 bp, Artificial Sequence
  Description of Artificial Sequence: Synthetic oligonucleotide
  Target: LAMA2; (-) strand; PAM type: NRG; PAM sequence: CGG
aacaacattcgagaaaatat

SEQ ID NO: 72446 - DNA, 20 bp, Artificial Sequence
  Description of Artificial Sequence: Synthetic oligonucleotide
  Target: LAMA2; (-) strand; PAM type: NRG; PAM sequence: GAG
aatggacagtaacaacattc

SEQ ID NO: 72447 - DNA, 20 bp, Artificial Sequence
  Description of Artificial Sequence: Synthetic oligonucleotide
  Target: LAMA2; (-) strand; PAM type: NRG; PAM sequence: CAG
gagtggagagaaagaatgga

SEQ ID NO: 72448 - DNA, 20 bp, Artificial Sequence
  Description of Artificial Sequence: Synthetic oligonucleotide
  Target: LAMA2; (-) strand; PAM type: NRG; PAM sequence: TGG
gggagagtggagagaaagaa

SEQ ID NO: 72449 - DNA, 20 bp, Artificial Sequence
  Description of Artificial Sequence: Synthetic oligonucleotide
  Target: LAMA2; (-) strand; PAM type: NRG; PAM sequence: AAG
tctcagggagagtggagaga

SEQ ID NO: 72450 - DNA, 20 bp, Artificial Sequence
  Description of Artificial Sequence: Synthetic oligonucleotide
  Target: LAMA2; (-) strand; PAM type: NRG; PAM sequence: GAG
gaagtctcagggagagtgga

SEQ ID NO: 72451 - DNA, 20 bp, Artificial Sequence
  Description of Artificial Sequence: Synthetic oligonucleotide
  Target: LAMA2; (-) strand; PAM type: NRG; PAM sequence: GAG
ctgaagtctcagggagagtg

SEQ ID NO: 72452 - DNA, 20 bp, Artificial Sequence
  Description of Artificial Sequence: Synthetic oligonucleotide
  Target: LAMA2; (-) strand; PAM type: NRG; PAM sequence: TGG
gactgaagtctcagggagag

SEQ ID NO: 72453 - DNA, 20 bp, Artificial Sequence
  Description of Artificial Sequence: Synthetic oligonucleotide
  Target: LAMA2; (-) strand; PAM type: NRG; PAM sequence: GAG
tgtgactgaagtctcaggga

SEQ ID NO: 72454 - DNA, 20 bp, Artificial Sequence
  Description of Artificial Sequence: Synthetic oligonucleotide
  Target: LAMA2; (-) strand; PAM type: NRG; PAM sequence: GAG
gatgtgactgaagtctcagg

SEQ ID NO: 72455 - DNA, 20 bp, Artificial Sequence
  Description of Artificial Sequence: Synthetic oligonucleotide
  Target: LAMA2; (-) strand; PAM type: NRG; PAM sequence: GGG
gggatgtgactgaagtctca

SEQ ID NO: 72456 - DNA, 20 bp, Artificial Sequence
  Description of Artificial Sequence: Synthetic oligonucleotide
  Target: LAMA2; (-) strand; PAM type: NRG; PAM sequence: AGG
agggatgtgactgaagtctc

SEQ ID NO: 72457 - DNA, 20 bp, Artificial Sequence
  Description of Artificial Sequence: Synthetic oligonucleotide
  Target: LAMA2; (-) strand; PAM type: NRG; PAM sequence: CAG
cagggatgtgactgaagtct

SEQ ID NO: 72458 - DNA, 20 bp, Artificial Sequence
  Description of Artificial Sequence: Synthetic oligonucleotide
  Target: LAMA2; (-) strand; PAM type: NRG; PAM sequence: AAG
gtctagcagggatgtgactg

SEQ ID NO: 72459 - DNA, 20 bp, Artificial Sequence
  Description of Artificial Sequence: Synthetic oligonucleotide
  Target: LAMA2; (-) strand; PAM type: NRG; PAM sequence: GGG
gcacggcaaacggtctagca

SEQ ID NO: 72460 - DNA, 20 bp, Artificial Sequence
  Description of Artificial Sequence: Synthetic oligonucleotide
  Target: LAMA2; (-) strand; PAM type: NRG; PAM sequence: AGG
agcacggcaaacggtctagc

SEQ ID NO: 72461 - DNA, 20 bp, Artificial Sequence
  Description of Artificial Sequence: Synthetic oligonucleotide
  Target: LAMA2; (-) strand; PAM type: NRG; PAM sequence: CAG
gagcacggcaaacggtctag

SEQ ID NO: 72462 - DNA, 20 bp, Artificial Sequence
  Description of Artificial Sequence: Synthetic oligonucleotide
  Target: LAMA2; (-) strand; PAM type: NRG; PAM sequence: TAG
aatgagcacggcaaacggtc

SEQ ID NO: 72463 - DNA, 20 bp, Artificial Sequence
  Description of Artificial Sequence: Synthetic oligonucleotide
  Target: LAMA2; (-) strand; PAM type: NRG; PAM sequence: CGG
tacataatgagcacggcaaa

SEQ ID NO: 72464 - DNA, 20 bp, Artificial Sequence
  Description of Artificial Sequence: Synthetic oligonucleotide
  Target: LAMA2; (-) strand; PAM type: NRG; PAM sequence: CGG
catagaatacataatgagca

SEQ ID NO: 72465 - DNA, 20 bp, Artificial Sequence
  Description of Artificial Sequence: Synthetic oligonucleotide
  Target: LAMA2; (-) strand; PAM type: NRG; PAM sequence: GAG
gaagccatagaatacataat

SEQ ID NO: 72466 - DNA, 20 bp, Artificial Sequence
  Description of Artificial Sequence: Synthetic oligonucleotide
  Target: LAMA2; (-) strand; PAM type: NRG; PAM sequence: TAG
agacaaatgaaaagaagcca

SEQ ID NO: 72467 - DNA, 20 bp, Artificial Sequence
  Description of Artificial Sequence: Synthetic oligonucleotide
  Target: LAMA2; (-) strand; PAM type: NRG; PAM sequence: AAG
aagagaagacaaatgaaaag

SEQ ID NO: 72468 - DNA, 20 bp, Artificial Sequence
  Description of Artificial Sequence: Synthetic oligonucleotide
  Target: LAMA2; (-) strand; PAM type: NRG; PAM sequence: AAG
aagaagagaagacaaatgaa

SEQ ID NO: 72469 - DNA, 20 bp, Artificial Sequence
  Description of Artificial Sequence: Synthetic oligonucleotide
  Target: LAMA2; (-) strand; PAM type: NRG; PAM sequence: AAG
gagaaacctcaaaagaagag

SEQ ID NO: 72470 - DNA, 20 bp, Artificial Sequence
  Description of Artificial Sequence: Synthetic oligonucleotide
  Target: LAMA2; (-) strand; PAM type: NRG; PAM sequence: GAG
actgagaaacctcaaaagaa

SEQ ID NO: 72471 - DNA, 20 bp, Artificial Sequence
  Description of Artificial Sequence: Synthetic oligonucleotide
  Target: LAMA2; (-) strand; PAM type: NRG; PAM sequence: AAG
agactgagaaacctcaaaag

SEQ ID NO: 72472 - DNA, 20 bp, Artificial Sequence
  Description of Artificial Sequence: Synthetic oligonucleotide
  Target: LAMA2; (-) strand; PAM type: NRG; PAM sequence: AAG
tacagactgagaaacctcaa

SEQ ID NO: 72473 - DNA, 20 bp, Artificial Sequence
  Description of Artificial Sequence: Synthetic oligonucleotide
  Target: LAMA2; (-) strand; PAM type: NRG; PAM sequence: GAG
acccagaaaatgtacagact

SEQ ID NO: 72474 - DNA, 20 bp, Artificial Sequence
  Description of Artificial Sequence: Synthetic oligonucleotide
  Target: LAMA2; (-) strand; PAM type: NRG; PAM sequence: CAG
caggtcacccagaaaatgta

SEQ ID NO: 72475 - DNA, 20 bp, Artificial Sequence
  Description of Artificial Sequence: Synthetic oligonucleotide
  Target: LAMA2; (-) strand; PAM type: NRG; PAM sequence: CAG
ataccaaacaacaggtcacc

SEQ ID NO: 72476 - DNA, 20 bp, Artificial Sequence
  Description of Artificial Sequence: Synthetic oligonucleotide
  Target: LAMA2; (-) strand; PAM type: NRG; PAM sequence: AGG
gattatttataccaaacaac

SEQ ID NO: 72477 - DNA, 20 bp, Artificial Sequence
  Description of Artificial Sequence: Synthetic oligonucleotide
  Target: LAMA2; (-) strand; PAM type: NRG; PAM sequence: CAG
ggattatttataccaaacaa

SEQ ID NO: 72478 - DNA, 20 bp, Artificial Sequence
  Description of Artificial Sequence: Synthetic oligonucleotide
  Target: LAMA2; (-) strand; PAM type: NRG; PAM sequence: GGG
attgaatccagcagaaaaaa

SEQ ID NO: 72479 - DNA, 20 bp, Artificial Sequence
  Description of Artificial Sequence: Synthetic oligonucleotide
  Target: LAMA2; (-) strand; PAM type: NRG; PAM sequence: AGG
gattgaatccagcagaaaaa

SEQ ID NO: 72480 - DNA, 20 bp, Artificial Sequence
  Description of Artificial Sequence: Synthetic oligonucleotide
  Target: LAMA2; (-) strand; PAM type: NRG; PAM sequence: AAG
agattgaatccagcagaaaa

SEQ ID NO: 72481 - DNA, 20 bp, Artificial Sequence
  Description of Artificial Sequence: Synthetic oligonucleotide
  Target: LAMA2; (-) strand; PAM type: NRG; PAM sequence: CAG
taatagaagattgaatccag

SEQ ID NO: 72482 - DNA, 20 bp, Artificial Sequence
  Description of Artificial Sequence: Synthetic oligonucleotide
  Target: LAMA2; (-) strand; PAM type: NRG; PAM sequence: CAG
atgtaatagaagattgaatc

SEQ ID NO: 72483 - DNA, 20 bp, Artificial Sequence
  Description of Artificial Sequence: Synthetic oligonucleotide
  Target: LAMA2; (-) strand; PAM type: NRG; PAM sequence: AAG
ccagtaaatgtatgtaatag

SEQ ID NO: 72484 - DNA, 20 bp, Artificial Sequence
  Description of Artificial Sequence: Synthetic oligonucleotide
  Target: LAMA2; (-) strand; PAM type: NRG; PAM sequence: TAG
aatccagtaaatgtatgtaa

SEQ ID NO: 72485 - DNA, 20 bp, Artificial Sequence
  Description of Artificial Sequence: Synthetic oligonucleotide
  Target: LAMA2; (-) strand; PAM type: NRG; PAM sequence: CAG
aaatacaaaaattaaaaatc

SEQ ID NO: 72486 - DNA, 20 bp, Artificial Sequence
  Description of Artificial Sequence: Synthetic oligonucleotide
  Target: LAMA2; (-) strand; PAM type: NRG; PAM sequence: TGG
aatttttttaaagtatcaaa

SEQ ID NO: 72487 - DNA, 20 bp, Artificial Sequence
  Description of Artificial Sequence: Synthetic oligonucleotide
  Target: LAMA2; (-) strand; PAM type: NRG; PAM sequence: AAG
tttggagtctaattttttta

SEQ ID NO: 72488 - DNA, 20 bp, Artificial Sequence
  Description of Artificial Sequence: Synthetic oligonucleotide
  Target: LAMA2; (-) strand; PAM type: NRG; PAM sequence: GAG
actaagtggagagatatttg

SEQ ID NO: 72489 - DNA, 20 bp, Artificial Sequence
  Description of Artificial Sequence: Synthetic oligonucleotide
  Target: LAMA2; (-) strand; PAM type: NRG; PAM sequence: TGG
tgactaagtggagagatatt

SEQ ID NO: 72490 - DNA, 20 bp, Artificial Sequence
  Description of Artificial Sequence: Synthetic oligonucleotide
  Target: LAMA2; (-) strand; PAM type: NRG; PAM sequence: GAG
gttccagatgactaagtgga

SEQ ID NO: 72491 - DNA, 20 bp, Artificial Sequence
  Description of Artificial Sequence: Synthetic oligonucleotide
  Target: LAMA2; (-) strand; PAM type: NRG; PAM sequence: GAG
atgttccagatgactaagtg

SEQ ID NO: 72492 - DNA, 20 bp, Artificial Sequence
  Description of Artificial Sequence: Synthetic oligonucleotide
  Target: LAMA2; (-) strand; PAM type: NRG; PAM sequence: TGG
atatgttccagatgactaag

SEQ ID NO: 72493 - DNA, 20 bp, Artificial Sequence
  Description of Artificial Sequence: Synthetic oligonucleotide
  Target: LAMA2; (-) strand; PAM type: NRG; PAM sequence: AAG
ttaatatgttccagatgact

SEQ ID NO: 72494 - DNA, 20 bp, Artificial Sequence
  Description of Artificial Sequence: Synthetic oligonucleotide
  Target: LAMA2; (-) strand; PAM type: NRG; PAM sequence: CAG
taactgttattaatatgttc

SEQ ID NO: 72495 - DNA, 20 bp, Artificial Sequence
  Description of Artificial Sequence: Synthetic oligonucleotide
  Target: LAMA2; (-) strand; PAM type: NRG; PAM sequence: CAG
gtttccaacgtcagagttat

SEQ ID NO: 72496 - DNA, 20 bp, Artificial Sequence
  Description of Artificial Sequence: Synthetic oligonucleotide
  Target: LAMA2; (-) strand; PAM type: NRG; PAM sequence: GAG
cccagttgtttccaacgtca

SEQ ID NO: 72497 - DNA, 20 bp, Artificial Sequence
  Description of Artificial Sequence: Synthetic oligonucleotide
  Target: LAMA2; (-) strand; PAM type: NRG; PAM sequence: CAG
ctcccagttgtttccaacgt

SEQ ID NO: 72498 - DNA, 20 bp, Artificial Sequence
  Description of Artificial Sequence: Synthetic oligonucleotide
  Target: LAMA2; (-) strand; PAM type: NRG; PAM sequence: CAG
agacaatagaaacagactcc

SEQ ID NO: 72499 - DNA, 20 bp, Artificial Sequence
  Description of Artificial Sequence: Synthetic oligonucleotide
  Target: LAMA2; (-) strand; PAM type: NRG; PAM sequence: CAG
gcatgaaaagacaatagaaa

SEQ ID NO: 72500 - DNA, 20 bp, Artificial Sequence
  Description of Artificial Sequence: Synthetic oligonucleotide
  Target: LAMA2; (-) strand; PAM type: NRG; PAM sequence: TAG
aggaatgcatgaaaagacaa

SEQ ID NO: 72501 - DNA, 20 bp, Artificial Sequence
  Description of Artificial Sequence: Synthetic oligonucleotide
  Target: LAMA2; (-) strand; PAM type: NRG; PAM sequence: AAG
ataaaacaggaatgcatgaa

SEQ ID NO: 72502 - DNA, 20 bp, Artificial Sequence
  Description of Artificial Sequence: Synthetic oligonucleotide
  Target: LAMA2; (-) strand; PAM type: NRG; PAM sequence: AGG
gaccaagcttgtcataaaac

SEQ ID NO: 72503 - DNA, 20 bp, Artificial Sequence
  Description of Artificial Sequence: Synthetic oligonucleotide
  Target: LAMA2; (-) strand; PAM type: NRG; PAM sequence: CAG
cgaccaagcttgtcataaaa

SEQ ID NO: 72504 - DNA, 20 bp, Artificial Sequence
  Description of Artificial Sequence: Synthetic oligonucleotide
  Target: LAMA2; (-) strand; PAM type: NRG; PAM sequence: AAG
ttatttaatcaaaaacgacc

SEQ ID NO: 72505 - DNA, 20 bp, Artificial Sequence
  Description of Artificial Sequence: Synthetic oligonucleotide
  Target: LAMA2; (-) strand; PAM type: NRG; PAM sequence: CAG
ccagaatttttatacatttt

SEQ ID NO: 72506 - DNA, 20 bp, Artificial Sequence
  Description of Artificial Sequence: Synthetic oligonucleotide
  Target: LAMA2; (-) strand; PAM type: NRG; PAM sequence: CAG
aagagaaaaataacatcttc

SEQ ID NO: 72507 - DNA, 20 bp, Artificial Sequence
  Description of Artificial Sequence: Synthetic oligonucleotide
  Target: LAMA2; (-) strand; PAM type: NRG; PAM sequence: GAG
atgaaaataaatcattttaa

SEQ ID NO: 72508 - DNA, 20 bp, Artificial Sequence
  Description of Artificial Sequence: Synthetic oligonucleotide
  Target: LAMA2; (-) strand; PAM type: NRG; PAM sequence: AAG
gaatgaaaataaatcatttt

SEQ ID NO: 72509 - DNA, 20 bp, Artificial Sequence
  Description of Artificial Sequence: Synthetic oligonucleotide
  Target: LAMA2; (-) strand; PAM type: NRG; PAM sequence: CAG
gcctctacactaactcttga

SEQ ID NO: 72510 - DNA, 20 bp, Artificial Sequence
  Description of Artificial Sequence: Synthetic oligonucleotide
  Target: LAMA2; (-) strand; PAM type: NRG; PAM sequence: AAG
ttgagttgctgactgaagca

SEQ ID NO: 72511 - DNA, 20 bp, Artificial Sequence
  Description of Artificial Sequence: Synthetic oligonucleotide
  Target: LAMA2; (-) strand; PAM type: NRG; PAM sequence: AAG
aacatttgagttgctgactg

SEQ ID NO: 72512 - DNA, 20 bp, Artificial Sequence
  Description of Artificial Sequence: Synthetic oligonucleotide
  Target: LAMA2; (-) strand; PAM type: NRG; PAM sequence: GAG
aactaagctacaaaacattt

SEQ ID NO: 72513 - DNA, 20 bp, Artificial Sequence
  Description of Artificial Sequence: Synthetic oligonucleotide
  Target: LAMA2; (-) strand; PAM type: NRG; PAM sequence: AAG
aaccatcagaatctctaact

SEQ ID NO: 72514 - DNA, 20 bp, Artificial Sequence
  Description of Artificial Sequence: Synthetic oligonucleotide
  Target: LAMA2; (-) strand; PAM type: NRG; PAM sequence: CAG
agtaaactagaaacaaccat

SEQ ID NO: 72515 - DNA, 20 bp, Artificial Sequence
  Description of Artificial Sequence: Synthetic oligonucleotide
  Target: LAMA2; (-) strand; PAM type: NRG; PAM sequence: TAG
ccctagaactaagagtaaac

SEQ ID NO: 72516 - DNA, 20 bp, Artificial Sequence
  Description of Artificial Sequence: Synthetic oligonucleotide
  Target: LAMA2; (-) strand; PAM type: NRG; PAM sequence: GAG
aagtctatccctagaactaa

SEQ ID NO: 72517 - DNA, 20 bp, Artificial Sequence
  Description of Artificial Sequence: Synthetic oligonucleotide
  Target: LAMA2; (-) strand; PAM type: NRG; PAM sequence: AAG
gaaagtctatccctagaact

SEQ ID NO: 72518 - DNA, 20 bp, Artificial Sequence
  Description of Artificial Sequence: Synthetic oligonucleotide
  Target: LAMA2; (-) strand; PAM type: NRG; PAM sequence: TAG
gagtcctgaaagtctatccc

SEQ ID NO: 72519 - DNA, 20 bp, Artificial Sequence
  Description of Artificial Sequence: Synthetic oligonucleotide
  Target: LAMA2; (-) strand; PAM type: NRG; PAM sequence: AAG
ggtttccactggagtcctga

SEQ ID NO: 72520 - DNA, 20 bp, Artificial Sequence
  Description of Artificial Sequence: Synthetic oligonucleotide
  Target: LAMA2; (-) strand; PAM type: NRG; PAM sequence: GAG
acaagtcggggtttccactg

SEQ ID NO: 72521 - DNA, 20 bp, Artificial Sequence
  Description of Artificial Sequence: Synthetic oligonucleotide
  Target: LAMA2; (-) strand; PAM type: NRG; PAM sequence: TGG
aaacaagtcggggtttccac

SEQ ID NO: 72522 - DNA, 20 bp, Artificial Sequence
  Description of Artificial Sequence: Synthetic oligonucleotide
  Target: LAMA2; (-) strand; PAM type: NRG; PAM sequence: GGG
agagtgtggtaaacaagtcg

SEQ ID NO: 72523 - DNA, 20 bp, Artificial Sequence
  Description of Artificial Sequence: Synthetic oligonucleotide
  Target: LAMA2; (-) strand; PAM type: NRG; PAM sequence: GGG
aagagtgtggtaaacaagtc

SEQ ID NO: 72524 - DNA, 20 bp, Artificial Sequence
  Description of Artificial Sequence: Synthetic oligonucleotide
  Target: LAMA2; (-) strand; PAM type: NRG; PAM sequence: CGG
aaagagtgtggtaaacaagt

SEQ ID NO: 72525 - DNA, 20 bp, Artificial Sequence
  Description of Artificial Sequence: Synthetic oligonucleotide
  Target: LAMA2; (-) strand; PAM type: NRG; PAM sequence: AAG
aaggaaagagtgtggtaaac

SEQ ID NO: 72526 - DNA, 20 bp, Artificial Sequence
  Description of Artificial Sequence: Synthetic oligonucleotide
  Target: LAMA2; (-) strand; PAM type: NRG; PAM sequence: TGG
cagccaagaaggaaagagtg

SEQ ID NO: 72527 - DNA, 20 bp, Artificial Sequence
  Description of Artificial Sequence: Synthetic oligonucleotide
  Target: LAMA2; (-) strand; PAM type: NRG; PAM sequence: GAG
agagtcagccaagaaggaaa

SEQ ID NO: 72528 - DNA, 20 bp, Artificial Sequence
  Description of Artificial Sequence: Synthetic oligonucleotide
  Target: LAMA2; (-) strand; PAM type: NRG; PAM sequence: AAG
taagagtcagccaagaagga

SEQ ID NO: 72529 - DNA, 20 bp, Artificial Sequence
  Description of Artificial Sequence: Synthetic oligonucleotide
  Target: LAMA2; (-) strand; PAM type: NRG; PAM sequence: AGG
gagttaagagtcagccaaga

SEQ ID NO: 72530 - DNA, 20 bp, Artificial Sequence
  Description of Artificial Sequence: Synthetic oligonucleotide
  Target: LAMA2; (-) strand; PAM type: NRG; PAM sequence: AAG
ggagttaagagtcagccaag

SEQ ID NO: 72531 - DNA, 20 bp, Artificial Sequence
  Description of Artificial Sequence: Synthetic oligonucleotide
  Target: LAMA2; (-) strand; PAM type: NRG; PAM sequence: AAG
tttggagttaagagtcagcc

SEQ ID NO: 72532 - DNA, 20 bp, Artificial Sequence
  Description of Artificial Sequence: Synthetic oligonucleotide
  Target: LAMA2; (-) strand; PAM type: NRG; PAM sequence: CAG
caaactttggagttaagagt

SEQ ID NO: 72533 - DNA, 20 bp, Artificial Sequence
  Description of Artificial Sequence: Synthetic oligonucleotide
  Target: LAMA2; (-) strand; PAM type: NRG; PAM sequence: GAG
aagacaaactttggagttaa

SEQ ID NO: 72534 - DNA, 20 bp, Artificial Sequence
  Description of Artificial Sequence: Synthetic oligonucleotide
  Target: LAMA2; (-) strand; PAM type: NRG; PAM sequence: AAG
ggaagacaaactttggagtt

SEQ ID NO: 72535 - DNA, 20 bp, Artificial Sequence
  Description of Artificial Sequence: Synthetic oligonucleotide
  Target: LAMA2; (-) strand; PAM type: NRG; PAM sequence: GAG
agttgggaagacaaactttg

SEQ ID NO: 72536 - DNA, 20 bp, Artificial Sequence
  Description of Artificial Sequence: Synthetic oligonucleotide
  Target: LAMA2; (-) strand; PAM type: NRG; PAM sequence: TGG
agagttgggaagacaaactt

SEQ ID NO: 72537 - DNA, 20 bp, Artificial Sequence
  Description of Artificial Sequence: Synthetic oligonucleotide
  Target: LAMA2; (-) strand; PAM type: NRG; PAM sequence: AAG
ggaagtctcccagagttggg

SEQ ID NO: 72538 - DNA, 20 bp, Artificial Sequence
  Description of Artificial Sequence: Synthetic oligonucleotide
  Target: LAMA2; (-) strand; PAM type: NRG; PAM sequence: GGG
ttgggaagtctcccagagtt

SEQ ID NO: 72539 - DNA, 20 bp, Artificial Sequence
  Description of Artificial Sequence: Synthetic oligonucleotide
  Target: LAMA2; (-) strand; PAM type: NRG; PAM sequence: TGG
cttgggaagtctcccagagt

SEQ ID NO: 72540 - DNA, 20 bp, Artificial Sequence
  Description of Artificial Sequence: Synthetic oligonucleotide
  Target: LAMA2; (-) strand; PAM type: NRG; PAM sequence: GAG
gatccttgggaagtctccca

SEQ ID NO: 72541 - DNA, 20 bp, Artificial Sequence
  Description of Artificial Sequence: Synthetic oligonucleotide
  Target: LAMA2; (-) strand; PAM type: NRG; PAM sequence: CAG
aagatccttgggaagtctcc

SEQ ID NO: 72542 - DNA, 20 bp, Artificial Sequence
  Description of Artificial Sequence: Synthetic oligonucleotide
  Target: LAMA2; (-) strand; PAM type: NRG; PAM sequence: AAG
aaactaagaagatccttggg

SEQ ID NO: 72543 - DNA, 20 bp, Artificial Sequence
  Description of Artificial Sequence: Synthetic oligonucleotide
  Target: LAMA2; (-) strand; PAM type: NRG; PAM sequence: GGG
gaaaaactaagaagatcctt

SEQ ID NO: 72544 - DNA, 20 bp, Artificial Sequence
  Description of Artificial Sequence: Synthetic oligonucleotide
  Target: LAMA2; (-) strand; PAM type: NRG; PAM sequence: TGG
tgaaaaactaagaagatcct

SEQ ID NO: 72545 - DNA, 20 bp, Artificial Sequence
  Description of Artificial Sequence: Synthetic oligonucleotide
  Target: LAMA2; (-) strand; PAM type: NRG; PAM sequence: AAG
atgagaagtgaaaaactaag

SEQ ID NO: 72546 - DNA, 20 bp, Artificial Sequence
  Description of Artificial Sequence: Synthetic oligonucleotide
  Target: LAMA2; (-) strand; PAM type: NRG; PAM sequence: AAG
ctcatgagaagtgaaaaact

SEQ ID NO: 72547 - DNA, 20 bp, Artificial Sequence
  Description of Artificial Sequence: Synthetic oligonucleotide
  Target: LAMA2; (-) strand; PAM type: NRG; PAM sequence: AAG
tgcaaaaatgaactcatgag

SEQ ID NO: 72548 - DNA, 20 bp, Artificial Sequence
  Description of Artificial Sequence: Synthetic oligonucleotide
  Target: LAMA2; (-) strand; PAM type: NRG; PAM sequence: GAG
tcatgcaaaaatgaactcat

SEQ ID NO: 72549 - DNA, 20 bp, Artificial Sequence
  Description of Artificial Sequence: Synthetic oligonucleotide
  Target: LAMA2; (-) strand; PAM type: NRG; PAM sequence: AAG
ctaagtggtgaaggagccag

SEQ ID NO: 72550 - DNA, 20 bp, Artificial Sequence
  Description of Artificial Sequence: Synthetic oligonucleotide
  Target: LAMA2; (-) strand; PAM type: NRG; PAM sequence: CAG
tttctaagtggtgaaggagc

SEQ ID NO: 72551 - DNA, 20 bp, Artificial Sequence
  Description of Artificial Sequence: Synthetic oligonucleotide
  Target: LAMA2; (-) strand; PAM type: NRG; PAM sequence: GAG
ccaatttctaagtggtgaag

SEQ ID NO: 72552 - DNA, 20 bp, Artificial Sequence
  Description of Artificial Sequence: Synthetic oligonucleotide
  Target: LAMA2; (-) strand; PAM type: NRG; PAM sequence: AGG
tgccaatttctaagtggtga

SEQ ID NO: 72553 - DNA, 20 bp, Artificial Sequence
  Description of Artificial Sequence: Synthetic oligonucleotide
  Target: LAMA2; (-) strand; PAM type: NRG; PAM sequence: AAG
ttgccaatttctaagtggtg

SEQ ID NO: 72554 - DNA, 20 bp, Artificial Sequence
  Description of Artificial Sequence: Synthetic oligonucleotide
  Target: LAMA2; (-) strand; PAM type: NRG; PAM sequence: TGG
gagatttgccaatttctaag

SEQ ID NO: 72555 - DNA, 20 bp, Artificial Sequence
  Description of Artificial Sequence: Synthetic oligonucleotide
  Target: LAMA2; (-) strand; PAM type: NRG; PAM sequence: AAG
caagagatttgccaatttct

SEQ ID NO: 72556 - DNA, 20 bp, Artificial Sequence
  Description of Artificial Sequence: Synthetic oligonucleotide
  Target: LAMA2; (-) strand; PAM type: NRG; PAM sequence: GAG
ttcacagcttttgccttcaa

SEQ ID NO: 72557 - DNA, 20 bp, Artificial Sequence
  Description of Artificial Sequence: Synthetic oligonucleotide
  Target: LAMA2; (-) strand; PAM type: NRG; PAM sequence: AAG
tcttcacagcttttgccttc

SEQ ID NO: 72558 - DNA, 20 bp, Artificial Sequence
  Description of Artificial Sequence: Synthetic oligonucleotide
  Target: LAMA2; (-) strand; PAM type: NRG; PAM sequence: CAG
aatgagacctacattcttca

SEQ ID NO: 72559 - DNA, 20 bp, Artificial Sequence
  Description of Artificial Sequence: Synthetic oligonucleotide
  Target: LAMA2; (-) strand; PAM type: NRG; PAM sequence: GAG
accataattcatagagaaat

SEQ ID NO: 72560 - DNA, 20 bp, Artificial Sequence
  Description of Artificial Sequence: Synthetic oligonucleotide
  Target: LAMA2; (-) strand; PAM type: NRG; PAM sequence: GAG
gtgagggaccataattcata

SEQ ID NO: 72561 - DNA, 20 bp, Artificial Sequence
  Description of Artificial Sequence: Synthetic oligonucleotide
  Target: LAMA2; (-) strand; PAM type: NRG; PAM sequence: TAG
atgtgagggaccataattca

SEQ ID NO: 72562 - DNA, 20 bp, Artificial Sequence
  Description of Artificial Sequence: Synthetic oligonucleotide
  Target: LAMA2; (-) strand; PAM type: NRG; PAM sequence: GGG
tgaagtcagctaggatgtga

SEQ ID NO: 72563 - DNA, 20 bp, Artificial Sequence
  Description of Artificial Sequence: Synthetic oligonucleotide
  Target: LAMA2; (-) strand; PAM type: NRG; PAM sequence: AGG
atgaagtcagctaggatgtg

SEQ ID NO: 72564 - DNA, 20 bp, Artificial Sequence
  Description of Artificial Sequence: Synthetic oligonucleotide
  Target: LAMA2; (-) strand; PAM type: NRG; PAM sequence: GAG
tatgaagtcagctaggatgt

SEQ ID NO: 72565 - DNA, 20 bp, Artificial Sequence
  Description of Artificial Sequence: Synthetic oligonucleotide
  Target: LAMA2; (-) strand; PAM type: NRG; PAM sequence: AGG
tcagggctatgaagtcagct

SEQ ID NO: 72566 - DNA, 20 bp, Artificial Sequence
  Description of Artificial Sequence: Synthetic oligonucleotide
  Target: LAMA2; (-) strand; PAM type: NRG; PAM sequence: TAG
ttcagggctatgaagtcagc

SEQ ID NO: 72567 - DNA, 20 bp, Artificial Sequence
  Description of Artificial Sequence: Synthetic oligonucleotide
  Target: LAMA2; (-) strand; PAM type: NRG; PAM sequence: CAG
agaattcagggctatgaagt

SEQ ID NO: 72568 - DNA, 20 bp, Artificial Sequence
  Description of Artificial Sequence: Synthetic oligonucleotide
  Target: LAMA2; (-) strand; PAM type: NRG; PAM sequence: AAG
cattagaattcagggctatg

SEQ ID NO: 72569 - DNA, 20 bp, Artificial Sequence
  Description of Artificial Sequence: Synthetic oligonucleotide
  Target: LAMA2; (-) strand; PAM type: NRG; PAM sequence: GGG
aagataaacattagaattca

SEQ ID NO: 72570 - DNA, 20 bp, Artificial Sequence
  Description of Artificial Sequence: Synthetic oligonucleotide
  Target: LAMA2; (-) strand; PAM type: NRG; PAM sequence: AGG
gaagataaacattagaattc

SEQ ID NO: 72571 - DNA, 20 bp, Artificial Sequence
  Description of Artificial Sequence: Synthetic oligonucleotide
  Target: LAMA2; (-) strand; PAM type: NRG; PAM sequence: CAG
agaagataaacattagaatt

SEQ ID NO: 72572 - DNA, 20 bp, Artificial Sequence
  Description of Artificial Sequence: Synthetic oligonucleotide
  Target: LAMA2; (-) strand; PAM type: NRG; PAM sequence: TAG
caggataagaagataaacat

SEQ ID NO: 72573 - DNA, 20 bp, Artificial Sequence
  Description of Artificial Sequence: Synthetic oligonucleotide
  Target: LAMA2; (-) strand; PAM type: NRG; PAM sequence: AAG
cagcaatctcacaggataag

SEQ ID NO: 72574 - DNA, 20 bp, Artificial Sequence
  Description of Artificial Sequence: Synthetic oligonucleotide
  Target: LAMA2; (-) strand; PAM type: NRG; PAM sequence: AAG
gttcagcaatctcacaggat

SEQ ID NO: 72575 - DNA, 20 bp, Artificial Sequence
  Description of Artificial Sequence: Synthetic oligonucleotide
  Target: LAMA2; (-) strand; PAM type: NRG; PAM sequence: AGG
agtgtgttcagcaatctcac

SEQ ID NO: 72576 - DNA, 20 bp, Artificial Sequence
  Description of Artificial Sequence: Synthetic oligonucleotide
  Target: LAMA2; (-) strand; PAM type: NRG; PAM sequence: CAG
tagtgtgttcagcaatctca

SEQ ID NO: 72577 - DNA, 20 bp, Artificial Sequence
  Description of Artificial Sequence: Synthetic oligonucleotide
  Target: LAMA2; (-) strand; PAM type: NRG; PAM sequence: CAG
aagctacatcttagtgtgtt

SEQ ID NO: 72578 - DNA, 20 bp, Artificial Sequence
  Description of Artificial Sequence: Synthetic oligonucleotide
  Target: LAMA2; (-) strand; PAM type: NRG; PAM sequence: TAG
ttatagagaaagctacatct

SEQ ID NO: 72579 - DNA, 20 bp, Artificial Sequence
  Description of Artificial Sequence: Synthetic oligonucleotide
  Target: LAMA2; (-) strand; PAM type: NRG; PAM sequence: AAG
tgaataggaggttatagaga

SEQ ID NO: 72580 - DNA, 20 bp, Artificial Sequence
  Description of Artificial Sequence: Synthetic oligonucleotide
  Target: LAMA2; (-) strand; PAM type: NRG; PAM sequence: GAG
cagttgaataggaggttata

SEQ ID NO: 72581 - DNA, 20 bp, Artificial Sequence
  Description of Artificial Sequence: Synthetic oligonucleotide
  Target: LAMA2; (-) strand; PAM type: NRG; PAM sequence: TAG
gacagttgaataggaggtta

SEQ ID NO: 72582 - DNA, 20 bp, Artificial Sequence
  Description of Artificial Sequence: Synthetic oligonucleotide
  Target: LAMA2; (-) strand; PAM type: NRG; PAM sequence: AGG
tttgctgacagttgaatagg

SEQ ID NO: 72583 - DNA, 20 bp, Artificial Sequence
  Description of Artificial Sequence: Synthetic oligonucleotide
  Target: LAMA2; (-) strand; PAM type: NRG; PAM sequence: GAG
atttgctgacagttgaatag

SEQ ID NO: 72584 - DNA, 20 bp, Artificial Sequence
  Description of Artificial Sequence: Synthetic oligonucleotide
  Target: LAMA2; (-) strand; PAM type: NRG; PAM sequence: AGG
tgatttgctgacagttgaat

SEQ ID NO: 72585 - DNA, 20 bp, Artificial Sequence
  Description of Artificial Sequence: Synthetic oligonucleotide
  Target: LAMA2; (-) strand; PAM type: NRG; PAM sequence: TAG
ttgatttgctgacagttgaa

SEQ ID NO: 72586 - DNA, 20 bp, Artificial Sequence
  Description of Artificial Sequence: Synthetic oligonucleotide
  Target: LAMA2; (-) strand; PAM type: NRG; PAM sequence: CAG
tacttttattgatttgctga

SEQ ID NO: 72587 - DNA, 20 bp, Artificial Sequence
  Description of Artificial Sequence: Synthetic oligonucleotide
  Target: LAMA2; (-) strand; PAM type: NRG; PAM sequence: GGG
agctagccattttcctctca

SEQ ID NO: 72588 - DNA, 20 bp, Artificial Sequence
  Description of Artificial Sequence: Synthetic oligonucleotide
  Target: LAMA2; (-) strand; PAM type: NRG; PAM sequence: AGG
aagctagccattttcctctc

SEQ ID NO: 72589 - DNA, 20 bp, Artificial Sequence
  Description of Artificial Sequence: Synthetic oligonucleotide
  Target: LAMA2; (-) strand; PAM type: NRG; PAM sequence: CAG
taagctagccattttcctct

SEQ ID NO: 72590 - DNA, 20 bp, Artificial Sequence
  Description of Artificial Sequence: Synthetic oligonucleotide
  Target: LAMA2; (-) strand; PAM type: NRG; PAM sequence: TAG
ggaagcaaattaaggtaagc

SEQ ID NO: 72591 - DNA, 20 bp, Artificial Sequence
  Description of Artificial Sequence: Synthetic oligonucleotide
  Target: LAMA2; (-) strand; PAM type: NRG; PAM sequence: AAG
aaagggaagcaaattaaggt

SEQ ID NO: 72592 - DNA, 20 bp, Artificial Sequence
  Description of Artificial Sequence: Synthetic oligonucleotide
  Target: LAMA2; (-) strand; PAM type: NRG; PAM sequence: AGG
aagtaaagggaagcaaatta

SEQ ID NO: 72593 - DNA, 20 bp, Artificial Sequence
  Description of Artificial Sequence: Synthetic oligonucleotide
  Target: LAMA2; (-) strand; PAM type: NRG; PAM sequence: AAG
taagtaaagggaagcaaatt

SEQ ID NO: 72594 - DNA, 20 bp, Artificial Sequence
  Description of Artificial Sequence: Synthetic oligonucleotide
  Target: LAMA2; (-) strand; PAM type: NRG; PAM sequence: AAG
agccagacttaagtaaaggg

SEQ ID NO: 72595 - DNA, 20 bp, Artificial Sequence
  Description of Artificial Sequence: Synthetic oligonucleotide
  Target: LAMA2; (-) strand; PAM type: NRG; PAM sequence: GGG
ggcagccagacttaagtaaa

SEQ ID NO: 72596 - DNA, 20 bp, Artificial Sequence
  Description of Artificial Sequence: Synthetic oligonucleotide
  Target: LAMA2; (-) strand; PAM type: NRG; PAM sequence: AGG
aggcagccagacttaagtaa

SEQ ID NO: 72597 - DNA, 20 bp, Artificial Sequence
  Description of Artificial Sequence: Synthetic oligonucleotide
  Target: LAMA2; (-) strand; PAM type: NRG; PAM sequence: AAG
aaggcagccagacttaagta

SEQ ID NO: 72598 - DNA, 20 bp, Artificial Sequence
  Description of Artificial Sequence: Synthetic oligonucleotide
  Target: LAMA2; (-) strand; PAM type: NRG; PAM sequence: AAG
caaccaaggcagccagactt

SEQ ID NO: 72599 - DNA, 20 bp, Artificial Sequence
  Description of Artificial Sequence: Synthetic oligonucleotide
  Target: LAMA2; (-) strand; PAM type: NRG; PAM sequence: CAG
cagcaagcaaccaaggcagc

SEQ ID NO: 72600 - DNA, 20 bp, Artificial Sequence
  Description of Artificial Sequence: Synthetic oligonucleotide
  Target: LAMA2; (-) strand; PAM type: NRG; PAM sequence: CAG
gcatcagcaagcaaccaagg

SEQ ID NO: 72601 - DNA, 20 bp, Artificial Sequence
  Description of Artificial Sequence: Synthetic oligonucleotide
  Target: LAMA2; (-) strand; PAM type: NRG; PAM sequence: AGG
aaggcatcagcaagcaacca

SEQ ID NO: 72602 - DNA, 20 bp, Artificial Sequence
  Description of Artificial Sequence: Synthetic oligonucleotide
  Target: LAMA2; (-) strand; PAM type: NRG; PAM sequence: AAG
gaaggcatcagcaagcaacc

SEQ ID NO: 72603 - DNA, 20 bp, Artificial Sequence
  Description of Artificial Sequence: Synthetic oligonucleotide
  Target: LAMA2; (-) strand; PAM type: NRG; PAM sequence: AAG
agcagtttgaaggcatcagc

SEQ ID NO: 72604 - DNA, 20 bp, Artificial Sequence
  Description of Artificial Sequence: Synthetic oligonucleotide
  Target: LAMA2; (-) strand; PAM type: NRG; PAM sequence: CAG
aaacagcagtttgaaggcat

SEQ ID NO: 72605 - DNA, 20 bp, Artificial Sequence
  Description of Artificial Sequence: Synthetic oligonucleotide
  Target: LAMA2; (-) strand; PAM type: NRG; PAM sequence: AGG
tactaaaaacagcagtttga

SEQ ID NO: 72606 - DNA, 20 bp, Artificial Sequence
  Description of Artificial Sequence: Synthetic oligonucleotide
  Target: LAMA2; (-) strand; PAM type: NRG; PAM sequence: AAG
atactaaaaacagcagtttg

SEQ ID NO: 72607 - DNA, 20 bp, Artificial Sequence
  Description of Artificial Sequence: Synthetic oligonucleotide
  Target: LAMA2; (-) strand; PAM type: NRG; PAM sequence: CAG
ggataaaatactaaaaacag

SEQ ID NO: 72608 - DNA, 20 bp, Artificial Sequence
  Description of Artificial Sequence: Synthetic oligonucleotide
  Target: LAMA2; (-) strand; PAM type: NRG; PAM sequence: CAG
gctggataaaatactaaaaa

SEQ ID NO: 72609 - DNA, 20 bp, Artificial Sequence
  Description of Artificial Sequence: Synthetic oligonucleotide
  Target: LAMA2; (-) strand; PAM type: NRG; PAM sequence: TGG
aagacaacaaccataaaagc

SEQ ID NO: 72610 - DNA, 20 bp, Artificial Sequence
  Description of Artificial Sequence: Synthetic oligonucleotide
  Target: LAMA2; (-) strand; PAM type: NRG; PAM sequence: AAG
ctcaaagacaacaaccataa

SEQ ID NO: 72611 - DNA, 20 bp, Artificial Sequence
  Description of Artificial Sequence: Synthetic oligonucleotide
  Target: LAMA2; (-) strand; PAM type: NRG; PAM sequence: AAG
tccctttccattttctctca

SEQ ID NO: 72612 - DNA, 20 bp, Artificial Sequence
  Description of Artificial Sequence: Synthetic oligonucleotide
  Target: LAMA2; (-) strand; PAM type: NRG; PAM sequence: CAG
aaaagcaataataattttat

SEQ ID NO: 72613 - DNA, 20 bp, Artificial Sequence
  Description of Artificial Sequence: Synthetic oligonucleotide
  Target: LAMA2; (-) strand; PAM type: NRG; PAM sequence: AAG
acattccttaaattcacaaa

SEQ ID NO: 72614 - DNA, 20 bp, Artificial Sequence
  Description of Artificial Sequence: Synthetic oligonucleotide
  Target: LAMA2; (-) strand; PAM type: NRG; PAM sequence: CAG
ttaatattgaagcaataatt

SEQ ID NO: 72615 - DNA, 20 bp, Artificial Sequence
  Description of Artificial Sequence: Synthetic oligonucleotide
  Target: LAMA2; (-) strand; PAM type: NRG; PAM sequence: AAG
taattattgttttaatattg

SEQ ID NO: 72616 - DNA, 20 bp, Artificial Sequence
  Description of Artificial Sequence: Synthetic oligonucleotide
  Target: LAMA2; (-) strand; PAM type: NRG; PAM sequence: CAG
tatgccaatttcatgcatac

SEQ ID NO: 72617 - DNA, 20 bp, Artificial Sequence
  Description of Artificial Sequence: Synthetic oligonucleotide
  Target: LAMA2; (-) strand; PAM type: NRG; PAM sequence: AGG
gaatagcacctgctttgttt

SEQ ID NO: 72618 - DNA, 20 bp, Artificial Sequence
  Description of Artificial Sequence: Synthetic oligonucleotide
  Target: LAMA2; (-) strand; PAM type: NRG; PAM sequence: TAG
agaatagcacctgctttgtt

SEQ ID NO: 72619 - DNA, 20 bp, Artificial Sequence
  Description of Artificial Sequence: Synthetic oligonucleotide
  Target: LAMA2; (-) strand; PAM type: NRG; PAM sequence: TAG
atgaagcttcttactaagaa

SEQ ID NO: 72620 - DNA, 20 bp, Artificial Sequence
  Description of Artificial Sequence: Synthetic oligonucleotide
  Target: LAMA2; (-) strand; PAM type: NRG; PAM sequence: AAG
ggggcatgaagcttcttact

SEQ ID NO: 72621 - DNA, 20 bp, Artificial Sequence
  Description of Artificial Sequence: Synthetic oligonucleotide
  Target: LAMA2; (-) strand; PAM type: NRG; PAM sequence: AAG
gatatgccataaggggcatg

SEQ ID NO: 72622 - DNA, 20 bp, Artificial Sequence
  Description of Artificial Sequence: Synthetic oligonucleotide
  Target: LAMA2; (-) strand; PAM type: NRG; PAM sequence: GGG
cagggcagatatgccataag

SEQ ID NO: 72623 - DNA, 20 bp, Artificial Sequence
  Description of Artificial Sequence: Synthetic oligonucleotide
  Target: LAMA2; (-) strand; PAM type: NRG; PAM sequence: GGG
tcagggcagatatgccataa

SEQ ID NO: 72624 - DNA, 20 bp, Artificial Sequence
  Description of Artificial Sequence: Synthetic oligonucleotide
  Target: LAMA2; (-) strand; PAM type: NRG; PAM sequence: AGG
ttcagggcagatatgccata

SEQ ID NO: 72625 - DNA, 20 bp, Artificial Sequence
  Description of Artificial Sequence: Synthetic oligonucleotide
  Target: LAMA2; (-) strand; PAM type: NRG; PAM sequence: AAG
attcagggcagatatgccat

SEQ ID NO: 72626 - DNA, 20 bp, Artificial Sequence
  Description of Artificial Sequence: Synthetic oligonucleotide
  Target: LAMA2; (-) strand; PAM type: NRG; PAM sequence: CAG
tctttatgtattattcaggg

SEQ ID NO: 72627 - DNA, 20 bp, Artificial Sequence
  Description of Artificial Sequence: Synthetic oligonucleotide
  Target: LAMA2; (-) strand; PAM type: NRG; PAM sequence: GGG
ttttctttatgtattattca

SEQ ID NO: 72628 - DNA, 20 bp, Artificial Sequence
  Description of Artificial Sequence: Synthetic oligonucleotide
  Target: LAMA2; (-) strand; PAM type: NRG; PAM sequence: AGG
attttctttatgtattattc

SEQ ID NO: 72629 - DNA, 20 bp, Artificial Sequence
  Description of Artificial Sequence: Synthetic oligonucleotide
  Target: LAMA2; (-) strand; PAM type: NRG; PAM sequence: CAG
tattttctttatgtattatt

SEQ ID NO: 72630 - DNA, 20 bp, Artificial Sequence
  Description of Artificial Sequence: Synthetic oligonucleotide
  Target: LAMA2; (-) strand; PAM type: NRG; PAM sequence: TAG
gaacactgcttaaaaaacag

SEQ ID NO: 72631 - DNA, 20 bp, Artificial Sequence
  Description of Artificial Sequence: Synthetic oligonucleotide
  Target: LAMA2; (-) strand; PAM type: NRG; PAM sequence: CAG
ttagaacactgcttaaaaaa

SEQ ID NO: 72632 - DNA, 20 bp, Artificial Sequence
  Description of Artificial Sequence: Synthetic oligonucleotide
  Target: LAMA2; (-) strand; PAM type: NRG; PAM sequence: TAG
catggacagacctacaggct

SEQ ID NO: 72633 - DNA, 20 bp, Artificial Sequence
  Description of Artificial Sequence: Synthetic oligonucleotide
  Target: LAMA2; (-) strand; PAM type: NRG; PAM sequence: AGG
tccttcatggacagacctac

SEQ ID NO: 72634 - DNA, 20 bp, Artificial Sequence
  Description of Artificial Sequence: Synthetic oligonucleotide
  Target: LAMA2; (-) strand; PAM type: NRG; PAM sequence: CAG
ctccttcatggacagaccta

SEQ ID NO: 72635 - DNA, 20 bp, Artificial Sequence
  Description of Artificial Sequence: Synthetic oligonucleotide
  Target: LAMA2; (-) strand; PAM type: NRG; PAM sequence: CAG
actcctgtctccttcatgga

SEQ ID NO: 72636 - DNA, 20 bp, Artificial Sequence
  Description of Artificial Sequence: Synthetic oligonucleotide
  Target: LAMA2; (-) strand; PAM type: NRG; PAM sequence: TGG
aaggactcctgtctccttca

SEQ ID NO: 72637 - DNA, 20 bp, Artificial Sequence
  Description of Artificial Sequence: Synthetic oligonucleotide
  Target: LAMA2; (-) strand; PAM type: NRG; PAM sequence: AGG
cttgaaaaccctggaatgca

SEQ ID NO: 72638 - DNA, 20 bp, Artificial Sequence
  Description of Artificial Sequence: Synthetic oligonucleotide
  Target: LAMA2; (-) strand; PAM type: NRG; PAM sequence: AAG
acttgaaaaccctggaatgc

SEQ ID NO: 72639 - DNA, 20 bp, Artificial Sequence
  Description of Artificial Sequence: Synthetic oligonucleotide
  Target: LAMA2; (-) strand; PAM type: NRG; PAM sequence: TGG
aattgtttacttgaaaaccc

SEQ ID NO: 72640 - DNA, 20 bp, Artificial Sequence
  Description of Artificial Sequence: Synthetic oligonucleotide
  Target: LAMA2; (-) strand; PAM type: NRG; PAM sequence: TAG
catagaacatacatgtaaat

SEQ ID NO: 72641 - DNA, 20 bp, Artificial Sequence
  Description of Artificial Sequence: Synthetic oligonucleotide
  Target: LAMA2; (-) strand; PAM type: NRG; PAM sequence: TAG
cttcctgaaaaatgcataca

SEQ ID NO: 72642 - DNA, 20 bp, Artificial Sequence
  Description of Artificial Sequence: Synthetic oligonucleotide
  Target: LAMA2; (-) strand; PAM type: NRG; PAM sequence: CAG
attttctggtttttaattct

SEQ ID NO: 72643 - DNA, 20 bp, Artificial Sequence
  Description of Artificial Sequence: Synthetic oligonucleotide
  Target: LAMA2; (-) strand; PAM type: NRG; PAM sequence: TGG
tttctatgactggtattttc

SEQ ID NO: 72644 - DNA, 20 bp, Artificial Sequence
  Description of Artificial Sequence: Synthetic oligonucleotide
  Target: LAMA2; (-) strand; PAM type: NRG; PAM sequence: TGG
tacccagatttttctatgac

SEQ ID NO: 72645 - DNA, 20 bp, Artificial Sequence
  Description of Artificial Sequence: Synthetic oligonucleotide
  Target: LAMA2; (-) strand; PAM type: NRG; PAM sequence: CAG
tgctggtaataaactctacc

SEQ ID NO: 72646 - DNA, 20 bp, Artificial Sequence
  Description of Artificial Sequence: Synthetic oligonucleotide
  Target: LAMA2; (-) strand; PAM type: NRG; PAM sequence: TGG
caccccacatttattcctgc

SEQ ID NO: 72647 - DNA, 20 bp, Artificial Sequence
  Description of Artificial Sequence: Synthetic oligonucleotide
  Target: LAMA2; (-) strand; PAM type: NRG; PAM sequence: CAG
ttggccttctttcctttcct

SEQ ID NO: 72648 - DNA, 20 bp, Artificial Sequence
  Description of Artificial Sequence: Synthetic oligonucleotide
  Target: LAMA2; (-) strand; PAM type: NRG; PAM sequence: TGG
tcactaggttccagccacat

SEQ ID NO: 72649 - DNA, 20 bp, Artificial Sequence
  Description of Artificial Sequence: Synthetic oligonucleotide
  Target: LAMA2; (-) strand; PAM type: NRG; PAM sequence: CAG
tgctcttgatcactaggttc

SEQ ID NO: 72650 - DNA, 20 bp, Artificial Sequence
  Description of Artificial Sequence: Synthetic oligonucleotide
  Target: LAMA2; (-) strand; PAM type: NRG; PAM sequence: AGG
cacctttgctcttgatcact

SEQ ID NO: 72651 - DNA, 20 bp, Artificial Sequence
  Description of Artificial Sequence: Synthetic oligonucleotide
  Target: LAMA2; (-) strand; PAM type: NRG; PAM sequence: TAG
ccacctttgctcttgatcac

SEQ ID NO: 72652 - DNA, 20 bp, Artificial Sequence
  Description of Artificial Sequence: Synthetic oligonucleotide
  Target: LAMA2; (-) strand; PAM type: NRG; PAM sequence: CAG
agacctggagacctccgtga

SEQ ID NO: 72653 - DNA, 20 bp, Artificial Sequence
  Description of Artificial Sequence: Synthetic oligonucleotide
  Target: LAMA2; (-) strand; PAM type: NRG; PAM sequence: GAG
tcaggagctaagaagacctg

SEQ ID NO: 72654 - DNA, 20 bp, Artificial Sequence
  Description of Artificial Sequence: Synthetic oligonucleotide
  Target: LAMA2; (-) strand; PAM type: NRG; PAM sequence: TGG
cttcaggagctaagaagacc

SEQ ID NO: 72655 - DNA, 20 bp, Artificial Sequence
  Description of Artificial Sequence: Synthetic oligonucleotide
  Target: LAMA2; (-) strand; PAM type: NRG; PAM sequence: AAG
tactcccttcaggagctaag

SEQ ID NO: 72656 - DNA, 20 bp, Artificial Sequence
  Description of Artificial Sequence: Synthetic oligonucleotide
  Target: LAMA2; (-) strand; PAM type: NRG; PAM sequence: AAG
gactactcccttcaggagct

SEQ ID NO: 72657 - DNA, 20 bp, Artificial Sequence
  Description of Artificial Sequence: Synthetic oligonucleotide
  Target: LAMA2; (-) strand; PAM type: NRG; PAM sequence: GAG
tgactgactactcccttcag

SEQ ID NO: 72658 - DNA, 20 bp, Artificial Sequence
  Description of Artificial Sequence: Synthetic oligonucleotide
  Target: LAMA2; (-) strand; PAM type: NRG; PAM sequence: AGG
catgactgactactcccttc

SEQ ID NO: 72659 - DNA, 20 bp, Artificial Sequence
  Description of Artificial Sequence: Synthetic oligonucleotide
  Target: LAMA2; (-) strand; PAM type: NRG; PAM sequence: CAG
tcatgactgactactccctt

SEQ ID NO: 72660 - DNA, 20 bp, Artificial Sequence
  Description of Artificial Sequence: Synthetic oligonucleotide
  Target: LAMA2; (-) strand; PAM type: NRG; PAM sequence: CAG
tgcgggtttctcattatacc

SEQ ID NO: 72661 - DNA, 20 bp, Artificial Sequence
  Description of Artificial Sequence: Synthetic oligonucleotide
  Target: LAMA2; (-) strand; PAM type: NRG; PAM sequence: GGG
acctgcttaaataccactgc

SEQ ID NO: 72662 - DNA, 20 bp, Artificial Sequence
  Description of Artificial Sequence: Synthetic oligonucleotide
  Target: LAMA2; (-) strand; PAM type: NRG; PAM sequence: CGG
cacctgcttaaataccactg

SEQ ID NO: 72663 - DNA, 20 bp, Artificial Sequence
  Description of Artificial Sequence: Synthetic oligonucleotide
  Target: LAMA2; (-) strand; PAM type: NRG; PAM sequence: AGG
tgttacttctaatgagataa

SEQ ID NO: 72664 - DNA, 20 bp, Artificial Sequence
  Description of Artificial Sequence: Synthetic oligonucleotide
  Target: LAMA2; (-) strand; PAM type: NRG; PAM sequence: AAG
atgttacttctaatgagata

SEQ ID NO: 72665 - DNA, 20 bp, Artificial Sequence
  Description of Artificial Sequence: Synthetic oligonucleotide
  Target: LAMA2; (-) strand; PAM type: NRG; PAM sequence: GAG
agcagaatgttacttctaat

SEQ ID NO: 72666 - DNA, 20 bp, Artificial Sequence
  Description of Artificial Sequence: Synthetic oligonucleotide
  Target: LAMA2; (-) strand; PAM type: NRG; PAM sequence: CAG
tataatcattctccatttag

SEQ ID NO: 72667 - DNA, 20 bp, Artificial Sequence
  Description of Artificial Sequence: Synthetic oligonucleotide
  Target: LAMA2; (-) strand; PAM type: NRG; PAM sequence: TAG
cactataatcattctccatt

SEQ ID NO: 72668 - DNA, 20 bp, Artificial Sequence
  Description of Artificial Sequence: Synthetic oligonucleotide
  Target: LAMA2; (-) strand; PAM type: NRG; PAM sequence: TAG
atggtttcctgactgccacc

SEQ ID NO: 72669 - DNA, 20 bp, Artificial Sequence
  Description of Artificial Sequence: Synthetic oligonucleotide
  Target: LAMA2; (-) strand; PAM type: NRG; PAM sequence: TGG
tctttgctaaaaaagtacta

SEQ ID NO: 72670 - DNA, 20 bp, Artificial Sequence
  Description of Artificial Sequence: Synthetic oligonucleotide
  Target: LAMA2; (-) strand; PAM type: NRG; PAM sequence: AAG
ccatcatctctttgctaaaa

SEQ ID NO: 72671 - DNA, 20 bp, Artificial Sequence
  Description of Artificial Sequence: Synthetic oligonucleotide
  Target: LAMA2; (-) strand; PAM type: NRG; PAM sequence: AAG
tgctactaccactctattcc

SEQ ID NO: 72672 - DNA, 20 bp, Artificial Sequence
  Description of Artificial Sequence: Synthetic oligonucleotide
  Target: LAMA2; (-) strand; PAM type: NRG; PAM sequence: CAG
gccgaactccagataaatct

SEQ ID NO: 72673 - DNA, 20 bp, Artificial Sequence
  Description of Artificial Sequence: Synthetic oligonucleotide
  Target: LAMA2; (-) strand; PAM type: NRG; PAM sequence: CAG
attcgggtgatgccgaactc

SEQ ID NO: 72674 - DNA, 20 bp, Artificial Sequence
  Description of Artificial Sequence: Synthetic oligonucleotide
  Target: LAMA2; (-) strand; PAM type: NRG; PAM sequence: GGG
atttgttccaccatcaattc

SEQ ID NO: 72675 - DNA, 20 bp, Artificial Sequence
  Description of Artificial Sequence: Synthetic oligonucleotide
  Target: LAMA2; (-) strand; PAM type: NRG; PAM sequence: CGG
catttgttccaccatcaatt

SEQ ID NO: 72676 - DNA, 20 bp, Artificial Sequence
  Description of Artificial Sequence: Synthetic oligonucleotide
  Target: LAMA2; (-) strand; PAM type: NRG; PAM sequence: TGG
actcctaggagtcaacattt

SEQ ID NO: 72677 - DNA, 20 bp, Artificial Sequence
  Description of Artificial Sequence: Synthetic oligonucleotide
  Target: LAMA2; (-) strand; PAM type: NRG; PAM sequence: GAG
tcttcaggccaaactcctag

SEQ ID NO: 72678 - DNA, 20 bp, Artificial Sequence
  Description of Artificial Sequence: Synthetic oligonucleotide
  Target: LAMA2; (-) strand; PAM type: NRG; PAM sequence: AGG
tttcttcaggccaaactcct

SEQ ID NO: 72679 - DNA, 20 bp, Artificial Sequence
  Description of Artificial Sequence: Synthetic oligonucleotide
  Target: LAMA2; (-) strand; PAM type: NRG; PAM sequence: TAG
atttcttcaggccaaactcc

SEQ ID NO: 72680 - DNA, 20 bp, Artificial Sequence
  Description of Artificial Sequence: Synthetic oligonucleotide
  Target: LAMA2; (-) strand; PAM type: NRG; PAM sequence: AGG
tatttcaggaaaatttcttc

SEQ ID NO: 72681 - DNA, 20 bp, Artificial Sequence
  Description of Artificial Sequence: Synthetic oligonucleotide
  Target: LAMA2; (-) strand; PAM type: NRG; PAM sequence: CAG
ctatttcaggaaaatttctt

SEQ ID NO: 72682 - DNA, 20 bp, Artificial Sequence
  Description of Artificial Sequence: Synthetic oligonucleotide
  Target: LAMA2; (-) strand; PAM type: NRG; PAM sequence: AGG
cctttaatccatactatttc

SEQ ID NO: 72683 - DNA, 20 bp, Artificial Sequence
  Description of Artificial Sequence: Synthetic oligonucleotide
  Target: LAMA2; (-) strand; PAM type: NRG; PAM sequence: CAG
tcctttaatccatactattt

SEQ ID NO: 72684 - DNA, 20 bp, Artificial Sequence
  Description of Artificial Sequence: Synthetic oligonucleotide
  Target: LAMA2; (-) strand; PAM type: NRG; PAM sequence: CAG
acagacccttaattgccacc

SEQ ID NO: 72685 - DNA, 20 bp, Artificial Sequence
  Description of Artificial Sequence: Synthetic oligonucleotide
  Target: LAMA2; (-) strand; PAM type: NRG; PAM sequence: CAG
tcaaagataacacgttaaaa

SEQ ID NO: 72686 - DNA, 20 bp, Artificial Sequence
  Description of Artificial Sequence: Synthetic oligonucleotide
  Target: LAMA2; (-) strand; PAM type: NRG; PAM sequence: AAG
ggcaccactcgaatgcttca

SEQ ID NO: 72687 - DNA, 20 bp, Artificial Sequence
  Description of Artificial Sequence: Synthetic oligonucleotide
  Target: LAMA2; (-) strand; PAM type: NRG; PAM sequence: TGG
caggagtgagccaccatgcc

SEQ ID NO: 72688 - DNA, 20 bp, Artificial Sequence
  Description of Artificial Sequence: Synthetic oligonucleotide
  Target: LAMA2; (-) strand; PAM type: NRG; PAM sequence: GAG
agtgctgggcttacaggagt

SEQ ID NO: 72689 - DNA, 20 bp, Artificial Sequence
  Description of Artificial Sequence: Synthetic oligonucleotide
  Target: LAMA2; (-) strand; PAM type: NRG; PAM sequence: GAG
ccaaagtgctgggcttacag

SEQ ID NO: 72690 - DNA, 20 bp, Artificial Sequence
  Description of Artificial Sequence: Synthetic oligonucleotide
  Target: LAMA2; (-) strand; PAM type: NRG; PAM sequence: AGG
tcccaaagtgctgggcttac

SEQ ID NO: 72691 - DNA, 20 bp, Artificial Sequence
  Description of Artificial Sequence: Synthetic oligonucleotide
  Target: LAMA2; (-) strand; PAM type: NRG; PAM sequence: CAG
ctcccaaagtgctgggctta

SEQ ID NO: 72692 - DNA, 20 bp, Artificial Sequence
  Description of Artificial Sequence: Synthetic oligonucleotide
  Target: LAMA2; (-) strand; PAM type: NRG; PAM sequence: GGG
cctcaacctcccaaagtgct

SEQ ID NO: 72693 - DNA, 20 bp, Artificial Sequence
  Description of Artificial Sequence: Synthetic oligonucleotide
  Target: LAMA2; (-) strand; PAM type: NRG; PAM sequence: TGG
acctcaacctcccaaagtgc

SEQ ID NO: 72694 - DNA, 20 bp, Artificial Sequence
  Description of Artificial Sequence: Synthetic oligonucleotide
  Target: LAMA2; (-) strand; PAM type: NRG; PAM sequence: AAG
cctcccacctcaacctccca

SEQ ID NO: 72695 - DNA, 20 bp, Artificial Sequence
  Description of Artificial Sequence: Synthetic oligonucleotide
  Target: LAMA2; (-) strand; PAM type: NRG; PAM sequence: AAG
ggtctcgaatacctgggctt

SEQ ID NO: 72696 - DNA, 20 bp, Artificial Sequence
  Description of Artificial Sequence: Synthetic oligonucleotide
  Target: LAMA2; (-) strand; PAM type: NRG; PAM sequence: GGG
gttgctggtctcgaatacct

SEQ ID NO: 72697 - DNA, 20 bp, Artificial Sequence
  Description of Artificial Sequence: Synthetic oligonucleotide
  Target: LAMA2; (-) strand; PAM type: NRG; PAM sequence: TGG
ggttgctggtctcgaatacc

SEQ ID NO: 72698 - DNA, 20 bp, Artificial Sequence
  Description of Artificial Sequence: Synthetic oligonucleotide
  Target: LAMA2; (-) strand; PAM type: NRG; PAM sequence: TGG
ttgttgcccgggctggttgc

SEQ ID NO: 72699 - DNA, 20 bp, Artificial Sequence
  Description of Artificial Sequence: Synthetic oligonucleotide
  Target: LAMA2; (-) strand; PAM type: NRG; PAM sequence: TGG
tctcactttgttgcccgggc

SEQ ID NO: 72700 - DNA, 20 bp, Artificial Sequence
  Description of Artificial Sequence: Synthetic oligonucleotide
  Target: LAMA2; (-) strand; PAM type: NRG; PAM sequence: GGG
ggggtctcactttgttgccc

SEQ ID NO: 72701 - DNA, 20 bp, Artificial Sequence
  Description of Artificial Sequence: Synthetic oligonucleotide
  Target: LAMA2; (-) strand; PAM type: NRG; PAM sequence: CGG
aggggtctcactttgttgcc

SEQ ID NO: 72702 - DNA, 20 bp, Artificial Sequence
  Description of Artificial Sequence: Synthetic oligonucleotide
  Target: LAMA2; (-) strand; PAM type: NRG; PAM sequence: GGG
gcttttttttgtagagatag

SEQ ID NO: 72703 - DNA, 20 bp, Artificial Sequence
  Description of Artificial Sequence: Synthetic oligonucleotide
  Target: LAMA2; (-) strand; PAM type: NRG; PAM sequence: GGG
tgcttttttttgtagagata

SEQ ID NO: 72704 - DNA, 20 bp, Artificial Sequence
  Description of Artificial Sequence: Synthetic oligonucleotide
  Target: LAMA2; (-) strand; PAM type: NRG; PAM sequence: AGG
ttgcttttttttgtagagat

SEQ ID NO: 72705 - DNA, 20 bp, Artificial Sequence
  Description of Artificial Sequence: Synthetic oligonucleotide
  Target: LAMA2; (-) strand; PAM type: NRG; PAM sequence: TAG
tttgcttttttttgtagaga

SEQ ID NO: 72706 - DNA, 20 bp, Artificial Sequence
  Description of Artificial Sequence: Synthetic oligonucleotide
  Target: LAMA2; (-) strand; PAM type: NRG; PAM sequence: GAG
attttttgcttttttttgta

SEQ ID NO: 72707 - DNA, 20 bp, Artificial Sequence
  Description of Artificial Sequence: Synthetic oligonucleotide
  Target: LAMA2; (-) strand; PAM type: NRG; PAM sequence: TAG
taattttttgcttttttttg

SEQ ID NO: 72708 - DNA, 20 bp, Artificial Sequence
  Description of Artificial Sequence: Synthetic oligonucleotide
  Target: LAMA2; (-) strand; PAM type: NRG; PAM sequence: TGG
gtagctgggactactatgcc

SEQ ID NO: 72709 - DNA, 20 bp, Artificial Sequence
  Description of Artificial Sequence: Synthetic oligonucleotide
  Target: LAMA2; (-) strand; PAM type: NRG; PAM sequence: GGG
cctcaacctcctgagtagct

SEQ ID NO: 72710 - DNA, 20 bp, Artificial Sequence
  Description of Artificial Sequence: Synthetic oligonucleotide
  Target: LAMA2; (-) strand; PAM type: NRG; PAM sequence: TGG
gcctcaacctcctgagtagc

SEQ ID NO: 72711 - DNA, 20 bp, Artificial Sequence
  Description of Artificial Sequence: Synthetic oligonucleotide
  Target: LAMA2; (-) strand; PAM type: NRG; PAM sequence: TAG
tcctgcctcaacctcctgag

SEQ ID NO: 72712 - DNA, 20 bp, Artificial Sequence
  Description of Artificial Sequence: Synthetic oligonucleotide
  Target: LAMA2; (-) strand; PAM type: NRG; PAM sequence: GAG
ttctcctgcctcaacctcct

SEQ ID NO: 72713 - DNA, 20 bp, Artificial Sequence
  Description of Artificial Sequence: Synthetic oligonucleotide
  Target: LAMA2; (-) strand; PAM type: NRG; PAM sequence: AAG
agccttgacctcctggaccc

SEQ ID NO: 72714 - DNA, 20 bp, Artificial Sequence
  Description of Artificial Sequence: Synthetic oligonucleotide
  Target: LAMA2; (-) strand; PAM type: NRG; PAM sequence: TGG
tcactgcagccttgacctcc

SEQ ID NO: 72715 - DNA, 20 bp, Artificial Sequence
  Description of Artificial Sequence: Synthetic oligonucleotide
  Target: LAMA2; (-) strand; PAM type: NRG; PAM sequence: CAG
gacatgaatatggctcactg

SEQ ID NO: 72716 - DNA, 20 bp, Artificial Sequence
  Description of Artificial Sequence: Synthetic oligonucleotide
  Target: LAMA2; (-) strand; PAM type: NRG; PAM sequence: TGG
ggagtgcagagacatgaata

SEQ ID NO: 72717 - DNA, 20 bp, Artificial Sequence
  Description of Artificial Sequence: Synthetic oligonucleotide
  Target: LAMA2; (-) strand; PAM type: NRG; PAM sequence: GAG
gtctcccaggctggagtgca

SEQ ID NO: 72718 - DNA, 20 bp, Artificial Sequence
  Description of Artificial Sequence: Synthetic oligonucleotide
  Target: LAMA2; (-) strand; PAM type: NRG; PAM sequence: CAG
ctgtctcccaggctggagtg

SEQ ID NO: 72719 - DNA, 20 bp, Artificial Sequence
  Description of Artificial Sequence: Synthetic oligonucleotide
  Target: LAMA2; (-) strand; PAM type: NRG; PAM sequence: GAG
ttgctctgtctcccaggctg

SEQ ID NO: 72720 - DNA, 20 bp, Artificial Sequence
  Description of Artificial Sequence: Synthetic oligonucleotide
  Target: LAMA2; (-) strand; PAM type: NRG; PAM sequence: TGG
tcttgctctgtctcccaggc

SEQ ID NO: 72721 - DNA, 20 bp, Artificial Sequence
  Description of Artificial Sequence: Synthetic oligonucleotide
  Target: LAMA2; (-) strand; PAM type: NRG; PAM sequence: AGG
agcgtcttgctctgtctccc

SEQ ID NO: 72722 - DNA, 20 bp, Artificial Sequence
  Description of Artificial Sequence: Synthetic oligonucleotide
  Target: LAMA2; (-) strand; PAM type: NRG; PAM sequence: CAG
cagcgtcttgctctgtctcc

SEQ ID NO: 72723 - DNA, 20 bp, Artificial Sequence
  Description of Artificial Sequence: Synthetic oligonucleotide
  Target: LAMA2; (-) strand; PAM type: NRG; PAM sequence: CAG
ttttttgttttgttttgaga

SEQ ID NO: 72724 - DNA, 20 bp, Artificial Sequence
  Description of Artificial Sequence: Synthetic oligonucleotide
  Target: LAMA2; (-) strand; PAM type: NRG; PAM sequence: GAG
taatttttttgttttgtttt

SEQ ID NO: 72725 - DNA, 20 bp, Artificial Sequence
  Description of Artificial Sequence: Synthetic oligonucleotide
  Target: LAMA2; (-) strand; PAM type: NRG; PAM sequence: CAG
cagtgcacatcactcaactc

SEQ ID NO: 72726 - DNA, 20 bp, Artificial Sequence
  Description of Artificial Sequence: Synthetic oligonucleotide
  Target: LAMA2; (-) strand; PAM type: NRG; PAM sequence: CAG
gttaagtacagtctctttcc

SEQ ID NO: 72727 - DNA, 20 bp, Artificial Sequence
  Description of Artificial Sequence: Synthetic oligonucleotide
  Target: LAMA2; (-) strand; PAM type: NRG; PAM sequence: CAG
caggcctttactgttaagta

SEQ ID NO: 72728 - DNA, 20 bp, Artificial Sequence
  Description of Artificial Sequence: Synthetic oligonucleotide
  Target: LAMA2; (-) strand; PAM type: NRG; PAM sequence: AAG
ttaaacaggcctttactgtt

SEQ ID NO: 72729 - DNA, 20 bp, Artificial Sequence
  Description of Artificial Sequence: Synthetic oligonucleotide
  Target: LAMA2; (-) strand; PAM type: NRG; PAM sequence: AGG
ctttctaaatgatcttaaac

SEQ ID NO: 72730 - DNA, 20 bp, Artificial Sequence
  Description of Artificial Sequence: Synthetic oligonucleotide
  Target: LAMA2; (-) strand; PAM type: NRG; PAM sequence: CAG
gctttctaaatgatcttaaa

SEQ ID NO: 72731 - DNA, 20 bp, Artificial Sequence
  Description of Artificial Sequence: Synthetic oligonucleotide
  Target: LAMA2; (-) strand; PAM type: NRG; PAM sequence: AGG
agtgcctaggattcaattat

SEQ ID NO: 72732 - DNA, 20 bp, Artificial Sequence
  Description of Artificial Sequence: Synthetic oligonucleotide
  Target: LAMA2; (-) strand; PAM type: NRG; PAM sequence: TAG
aagtgcctaggattcaatta

SEQ ID NO: 72733 - DNA, 20 bp, Artificial Sequence
  Description of Artificial Sequence: Synthetic oligonucleotide
  Target: LAMA2; (-) strand; PAM type: NRG; PAM sequence: AGG
cctttaaatttgaagtgcct

SEQ ID NO: 72734 - DNA, 20 bp, Artificial Sequence
  Description of Artificial Sequence: Synthetic oligonucleotide
  Target: LAMA2; (-) strand; PAM type: NRG; PAM sequence: TAG
acctttaaatttgaagtgcc

SEQ ID NO: 72735 - DNA, 20 bp, Artificial Sequence
  Description of Artificial Sequence: Synthetic oligonucleotide
  Target: LAMA2; (-) strand; PAM type: NRG; PAM sequence: AAG
tcttaccacctttaaatttg

SEQ ID NO: 72736 - DNA, 20 bp, Artificial Sequence
  Description of Artificial Sequence: Synthetic oligonucleotide
  Target: LAMA2; (-) strand; PAM type: NRG; PAM sequence: AAG
catctgcattgccatagctg

SEQ ID NO: 72737 - DNA, 20 bp, Artificial Sequence
  Description of Artificial Sequence: Synthetic oligonucleotide
  Target: LAMA2; (-) strand; PAM type: NRG; PAM sequence: TAG
tcacagcatctgcattgcca

SEQ ID NO: 72738 - DNA, 20 bp, Artificial Sequence
  Description of Artificial Sequence: Synthetic oligonucleotide
  Target: LAMA2; (-) strand; PAM type: NRG; PAM sequence: CAG
gtggtttaatttgtacctca

SEQ ID NO: 72739 - DNA, 20 bp, Artificial Sequence
  Description of Artificial Sequence: Synthetic oligonucleotide
  Target: LAMA2; (-) strand; PAM type: NRG; PAM sequence: TGG
aggtatttccaagacctgag

SEQ ID NO: 72740 - DNA, 20 bp, Artificial Sequence
  Description of Artificial Sequence: Synthetic oligonucleotide
  Target: LAMA2; (-) strand; PAM type: NRG; PAM sequence: GAG
tttaggtatttccaagacct

SEQ ID NO: 72741 - DNA, 20 bp, Artificial Sequence
  Description of Artificial Sequence: Synthetic oligonucleotide
  Target: LAMA2; (-) strand; PAM type: NRG; PAM sequence: AAG
ccctatgtttaggtatttcc

SEQ ID NO: 72742 - DNA, 20 bp, Artificial Sequence
  Description of Artificial Sequence: Synthetic oligonucleotide
  Target: LAMA2; (-) strand; PAM type: NRG; PAM sequence: AGG
tgttttttccccctatgttt

SEQ ID NO: 72743 - DNA, 20 bp, Artificial Sequence
  Description of Artificial Sequence: Synthetic oligonucleotide
  Target: LAMA2; (-) strand; PAM type: NRG; PAM sequence: TAG
gtgttttttccccctatgtt

SEQ ID NO: 72744 - DNA, 20 bp, Artificial Sequence
  Description of Artificial Sequence: Synthetic oligonucleotide
  Target: LAMA2; (-) strand; PAM type: NRG; PAM sequence: AGG
acatatactcattacaattt

SEQ ID NO: 72745 - DNA, 20 bp, Artificial Sequence
  Description of Artificial Sequence: Synthetic oligonucleotide
  Target: LAMA2; (-) strand; PAM type: NRG; PAM sequence: TAG
cacatatactcattacaatt

SEQ ID NO: 72746 - DNA, 20 bp, Artificial Sequence
  Description of Artificial Sequence: Synthetic oligonucleotide
  Target: LAMA2; (-) strand; PAM type: NRG; PAM sequence: AAG
tatatttatatataatatat

SEQ ID NO: 72747 - DNA, 20 bp, Artificial Sequence
  Description of Artificial Sequence: Synthetic oligonucleotide
  Target: LAMA2; (-) strand; PAM type: NRG; PAM sequence: AAG
gagccattcacctcttatta

SEQ ID NO: 72748 - DNA, 20 bp, Artificial Sequence
  Description of Artificial Sequence: Synthetic oligonucleotide
  Target: LAMA2; (-) strand; PAM type: NRG; PAM sequence: GAG
ccaaattaaatctgtgtttg

SEQ ID NO: 72749 - DNA, 20 bp, Artificial Sequence
  Description of Artificial Sequence: Synthetic oligonucleotide
  Target: LAMA2; (-) strand; PAM type: NRG; PAM sequence: TGG
ttccaaattaaatctgtgtt

SEQ ID NO: 72750 - DNA, 20 bp, Artificial Sequence
  Description of Artificial Sequence: Synthetic oligonucleotide
  Target: LAMA2; (-) strand; PAM type: NRG; PAM sequence: GAG
agtaggtattgctagggtgg

SEQ ID NO: 72751 - DNA, 20 bp, Artificial Sequence
  Description of Artificial Sequence: Synthetic oligonucleotide
  Target: LAMA2; (-) strand; PAM type: NRG; PAM sequence: GGG
ccagtaggtattgctagggt

SEQ ID NO: 72752 - DNA, 20 bp, Artificial Sequence
  Description of Artificial Sequence: Synthetic oligonucleotide
  Target: LAMA2; (-) strand; PAM type: NRG; PAM sequence: TGG
accagtaggtattgctaggg

SEQ ID NO: 72753 - DNA, 20 bp, Artificial Sequence
  Description of Artificial Sequence: Synthetic oligonucleotide
  Target: LAMA2; (-) strand; PAM type: NRG; PAM sequence: GGG
aacaccagtaggtattgcta

SEQ ID NO: 72754 - DNA, 20 bp, Artificial Sequence
  Description of Artificial Sequence: Synthetic oligonucleotide
  Target: LAMA2; (-) strand; PAM type: NRG; PAM sequence: AGG
gaacaccagtaggtattgct

SEQ ID NO: 72755 - DNA, 20 bp, Artificial Sequence
  Description of Artificial Sequence: Synthetic oligonucleotide
  Target: LAMA2; (-) strand; PAM type: NRG; PAM sequence: TAG
tgaacaccagtaggtattgc

SEQ ID NO: 72756 - DNA, 20 bp, Artificial Sequence
  Description of Artificial Sequence: Synthetic oligonucleotide
  Target: LAMA2; (-) strand; PAM type: NRG; PAM sequence: AGG
taaataaaatgaacaccagt

SEQ ID NO: 72757 - DNA, 20 bp, Artificial Sequence
  Description of Artificial Sequence: Synthetic oligonucleotide
  Target: LAMA2; (-) strand; PAM type: NRG; PAM sequence: TAG
ataaataaaatgaacaccag

SEQ ID NO: 72758 - DNA, 20 bp, Artificial Sequence
  Description of Artificial Sequence: Synthetic oligonucleotide
  Target: LAMA2; (-) strand; PAM type: NRG; PAM sequence: CAG
tacataaataaaatgaacac

SEQ ID NO: 72759 - DNA, 20 bp, Artificial Sequence
  Description of Artificial Sequence: Synthetic oligonucleotide
  Target: LAMA2; (-) strand; PAM type: NRG; PAM sequence: TAG
tccttaattgaaaaattaca

SEQ ID NO: 72760 - DNA, 20 bp, Artificial Sequence
  Description of Artificial Sequence: Synthetic oligonucleotide
  Target: LAMA2; (-) strand; PAM type: NRG; PAM sequence: TGG
ttttttccacacaattttat

SEQ ID NO: 72761 - DNA, 20 bp, Artificial Sequence
  Description of Artificial Sequence: Synthetic oligonucleotide
  Target: LAMA2; (-) strand; PAM type: NRG; PAM sequence: AAG
acaatctctttagtaagtaa

SEQ ID NO: 72762 - DNA, 20 bp, Artificial Sequence
  Description of Artificial Sequence: Synthetic oligonucleotide
  Target: LAMA2; (-) strand; PAM type: NRG; PAM sequence: AAG
ttagacacaatctctttagt

SEQ ID NO: 72763 - DNA, 20 bp, Artificial Sequence
  Description of Artificial Sequence: Synthetic oligonucleotide
  Target: LAMA2; (-) strand; PAM type: NRG; PAM sequence: TAG
atatttagacacaatctctt

SEQ ID NO: 72764 - DNA, 20 bp, Artificial Sequence
  Description of Artificial Sequence: Synthetic oligonucleotide
  Target: LAMA2; (-) strand; PAM type: NRG; PAM sequence: TAG
aatgtattacttttaatatt

SEQ ID NO: 72765 - DNA, 20 bp, Artificial Sequence
  Description of Artificial Sequence: Synthetic oligonucleotide
  Target: LAMA2; (-) strand; PAM type: NRG; PAM sequence: GGG
aaaatgaagtgttttgacaa

SEQ ID NO: 72766 - DNA, 20 bp, Artificial Sequence
  Description of Artificial Sequence: Synthetic oligonucleotide
  Target: LAMA2; (-) strand; PAM type: NRG; PAM sequence: AGG
aaaaatgaagtgttttgaca

SEQ ID NO: 72767 - DNA, 20 bp, Artificial Sequence
  Description of Artificial Sequence: Synthetic oligonucleotide
  Target: LAMA2; (-) strand; PAM type: NRG; PAM sequence: AAG
caaaaatgaagtgttttgac

SEQ ID NO: 72768 - DNA, 20 bp, Artificial Sequence
  Description of Artificial Sequence: Synthetic oligonucleotide
  Target: LAMA2; (-) strand; PAM type: NRG; PAM sequence: AAG
tgtgaaaacaaacaaaaatg

SEQ ID NO: 72769 - DNA, 20 bp, Artificial Sequence
  Description of Artificial Sequence: Synthetic oligonucleotide
  Target: LAMA2; (-) strand; PAM type: NRG; PAM sequence: CAG
aatctaccatgaccttccta

SEQ ID NO: 72770 - DNA, 20 bp, Artificial Sequence
  Description of Artificial Sequence: Synthetic oligonucleotide
  Target: LAMA2; (-) strand; PAM type: NRG; PAM sequence: CAG
tttcattgtgtttattgttt

SEQ ID NO: 72771 - DNA, 20 bp, Artificial Sequence
  Description of Artificial Sequence: Synthetic oligonucleotide
  Target: LAMA2; (-) strand; PAM type: NRG; PAM sequence: AGG
cttagttgtactgtcttaca

SEQ ID NO: 72772 - DNA, 20 bp, Artificial Sequence
  Description of Artificial Sequence: Synthetic oligonucleotide
  Target: LAMA2; (-) strand; PAM type: NRG; PAM sequence: AAG
ccttagttgtactgtcttac

SEQ ID NO: 72773 - DNA, 20 bp, Artificial Sequence
  Description of Artificial Sequence: Synthetic oligonucleotide
  Target: LAMA2; (-) strand; PAM type: NRG; PAM sequence: TAG
gtgttttaaactgatctcct

SEQ ID NO: 72774 - DNA, 20 bp, Artificial Sequence
  Description of Artificial Sequence: Synthetic oligonucleotide
  Target: LAMA2; (-) strand; PAM type: NRG; PAM sequence: TAG
gctgagaggcaactcctcat

SEQ ID NO: 72775 - DNA, 20 bp, Artificial Sequence
  Description of Artificial Sequence: Synthetic oligonucleotide
  Target: LAMA2; (-) strand; PAM type: NRG; PAM sequence: AGG
cataatgacccagtgctgag

SEQ ID NO: 72776 - DNA, 20 bp, Artificial Sequence
  Description of Artificial Sequence: Synthetic oligonucleotide
  Target: LAMA2; (-) strand; PAM type: NRG; PAM sequence: GAG
tcataatgacccagtgctga

SEQ ID NO: 72777 - DNA, 20 bp, Artificial Sequence
  Description of Artificial Sequence: Synthetic oligonucleotide
  Target: LAMA2; (-) strand; PAM type: NRG; PAM sequence: GAG
aatcataatgacccagtgct

SEQ ID NO: 72778 - DNA, 20 bp, Artificial Sequence
  Description of Artificial Sequence: Synthetic oligonucleotide
  Target: LAMA2; (-) strand; PAM type: NRG; PAM sequence: CAG
ttagtataatcataatgacc

SEQ ID NO: 72779 - DNA, 20 bp, Artificial Sequence
  Description of Artificial Sequence: Synthetic oligonucleotide
  Target: LAMA2; (-) strand; PAM type: NRG; PAM sequence: TAG
ctgaacctaacttattatat

SEQ ID NO: 72780 - DNA, 20 bp, Artificial Sequence
  Description of Artificial Sequence: Synthetic oligonucleotide
  Target: LAMA2; (-) strand; PAM type: NRG; PAM sequence: AAG
actatttactgtgccttttg

SEQ ID NO: 72781 - DNA, 20 bp, Artificial Sequence
  Description of Artificial Sequence: Synthetic oligonucleotide
  Target: LAMA2; (-) strand; PAM type: NRG; PAM sequence: TAG
aatagtaaatattatgaagg

SEQ ID NO: 72782 - DNA, 20 bp, Artificial Sequence
  Description of Artificial Sequence: Synthetic oligonucleotide
  Target: LAMA2; (-) strand; PAM type: NRG; PAM sequence: AGG
ggaaatagtaaatattatga

SEQ ID NO: 72783 - DNA, 20 bp, Artificial Sequence
  Description of Artificial Sequence: Synthetic oligonucleotide
  Target: LAMA2; (-) strand; PAM type: NRG; PAM sequence: AAG
tggaaatagtaaatattatg

SEQ ID NO: 72784 - DNA, 20 bp, Artificial Sequence
  Description of Artificial Sequence: Synthetic oligonucleotide
  Target: LAMA2; (-) strand; PAM type: NRG; PAM sequence: TAG
gtaagcttttagtatggaaa

SEQ ID NO: 72785 - DNA, 20 bp, Artificial Sequence
  Description of Artificial Sequence: Synthetic oligonucleotide
  Target: LAMA2; (-) strand; PAM type: NRG; PAM sequence: TGG
acaactgtaagcttttagta

SEQ ID NO: 72786 - DNA, 20 bp, Artificial Sequence
  Description of Artificial Sequence: Synthetic oligonucleotide
  Target: LAMA2; (-) strand; PAM type: NRG; PAM sequence: TAG
agcccacaactgtaagcttt

SEQ ID NO: 72787 - DNA, 20 bp, Artificial Sequence
  Description of Artificial Sequence: Synthetic oligonucleotide
  Target: LAMA2; (-) strand; PAM type: NRG; PAM sequence: AAG
atattctagcccacaactgt

SEQ ID NO: 72788 - DNA, 20 bp, Artificial Sequence
  Description of Artificial Sequence: Synthetic oligonucleotide
  Target: LAMA2; (-) strand; PAM type: NRG; PAM sequence: TAG
tacgtgaatatcatatattc

SEQ ID NO: 72789 - DNA, 20 bp, Artificial Sequence
  Description of Artificial Sequence: Synthetic oligonucleotide
  Target: LAMA2; (-) strand; PAM type: NRG; PAM sequence: AAG
tagaggtaaggataatgaag

SEQ ID NO: 72790 - DNA, 20 bp, Artificial Sequence
  Description of Artificial Sequence: Synthetic oligonucleotide
  Target: LAMA2; (-) strand; PAM type: NRG; PAM sequence: AAG
gggtagaggtaaggataatg

SEQ ID NO: 72791 - DNA, 20 bp, Artificial Sequence
  Description of Artificial Sequence: Synthetic oligonucleotide
  Target: LAMA2; (-) strand; PAM type: NRG; PAM sequence: AGG
tattgaggagggtagaggta

SEQ ID NO: 72792 - DNA, 20 bp, Artificial Sequence
  Description of Artificial Sequence: Synthetic oligonucleotide
  Target: LAMA2; (-) strand; PAM type: NRG; PAM sequence: AAG
ttattgaggagggtagaggt

SEQ ID NO: 72793 - DNA, 20 bp, Artificial Sequence
  Description of Artificial Sequence: Synthetic oligonucleotide
  Target: LAMA2; (-) strand; PAM type: NRG; PAM sequence: AGG
gaatttattgaggagggtag

SEQ ID NO: 72794 - DNA, 20 bp, Artificial Sequence
  Description of Artificial Sequence: Synthetic oligonucleotide
  Target: LAMA2; (-) strand; PAM type: NRG; PAM sequence: GAG
tgaatttattgaggagggta

SEQ ID NO: 72795 - DNA, 20 bp, Artificial Sequence
  Description of Artificial Sequence: Synthetic oligonucleotide
  Target: LAMA2; (-) strand; PAM type: NRG; PAM sequence: TAG
gatgaatttattgaggaggg

SEQ ID NO: 72796 - DNA, 20 bp, Artificial Sequence
  Description of Artificial Sequence: Synthetic oligonucleotide
  Target: LAMA2; (-) strand; PAM type: NRG; PAM sequence: GGG
tgagatgaatttattgagga

SEQ ID NO: 72797 - DNA, 20 bp, Artificial Sequence
  Description of Artificial Sequence: Synthetic oligonucleotide
  Target: LAMA2; (-) strand; PAM type: NRG; PAM sequence: AGG
ttgagatgaatttattgagg

SEQ ID NO: 72798 - DNA, 20 bp, Artificial Sequence
  Description of Artificial Sequence: Synthetic oligonucleotide
  Target: LAMA2; (-) strand; PAM type: NRG; PAM sequence: GAG
tttgagatgaatttattgag

SEQ ID NO: 72799 - DNA, 20 bp, Artificial Sequence
  Description of Artificial Sequence: Synthetic oligonucleotide
  Target: LAMA2; (-) strand; PAM type: NRG; PAM sequence: AGG
catttgagatgaatttattg

SEQ ID NO: 72800 - DNA, 20 bp, Artificial Sequence
  Description of Artificial Sequence: Synthetic oligonucleotide
  Target: LAMA2; (-) strand; PAM type: NRG; PAM sequence: GAG
tcatttgagatgaatttatt

SEQ ID NO: 72801 - DNA, 20 bp, Artificial Sequence
  Description of Artificial Sequence: Synthetic oligonucleotide
  Target: LAMA2; (-) strand; PAM type: NRG; PAM sequence: GAG
gatggaaaatcttatcattt

SEQ ID NO: 72802 - DNA, 20 bp, Artificial Sequence
  Description of Artificial Sequence: Synthetic oligonucleotide
  Target: LAMA2; (-) strand; PAM type: NRG; PAM sequence: TGG
ttattcttcacaatgatgga

SEQ ID NO: 72803 - DNA, 20 bp, Artificial Sequence
  Description of Artificial Sequence: Synthetic oligonucleotide
  Target: LAMA2; (-) strand; PAM type: NRG; PAM sequence: TGG
taaattattcttcacaatga

SEQ ID NO: 72804 - DNA, 20 bp, Artificial Sequence
  Description of Artificial Sequence: Synthetic oligonucleotide
  Target: LAMA2; (-) strand; PAM type: NRG; PAM sequence: AAG
cccatatttccagaatcatt

SEQ ID NO: 72805 - DNA, 20 bp, Artificial Sequence
  Description of Artificial Sequence: Synthetic oligonucleotide
  Target: LAMA2; (-) strand; PAM type: NRG; PAM sequence: CAG
tataaacattcccatatttc

SEQ ID NO: 72806 - DNA, 20 bp, Artificial Sequence
  Description of Artificial Sequence: Synthetic oligonucleotide
  Target: LAMA2; (-) strand; PAM type: NRG; PAM sequence: GGG
gagtatattctaaaatcagt

SEQ ID NO: 72807 - DNA, 20 bp, Artificial Sequence
  Description of Artificial Sequence: Synthetic oligonucleotide
  Target: LAMA2; (-) strand; PAM type: NRG; PAM sequence: TGG
tgagtatattctaaaatcag

SEQ ID NO: 72808 - DNA, 20 bp, Artificial Sequence
  Description of Artificial Sequence: Synthetic oligonucleotide
  Target: LAMA2; (-) strand; PAM type: NRG; PAM sequence: CAG
tcttgagtatattctaaaat

SEQ ID NO: 72809 - DNA, 20 bp, Artificial Sequence
  Description of Artificial Sequence: Synthetic oligonucleotide
  Target: LAMA2; (-) strand; PAM type: NRG; PAM sequence: GAG
gtcactagtttaattttctt

SEQ ID NO: 72810 - DNA, 20 bp, Artificial Sequence
  Description of Artificial Sequence: Synthetic oligonucleotide
  Target: LAMA2; (-) strand; PAM type: NRG; PAM sequence: TAG
aaataaatctattttgtcac

SEQ ID NO: 72811 - DNA, 20 bp, Artificial Sequence
  Description of Artificial Sequence: Synthetic oligonucleotide
  Target: LAMA2; (-) strand; PAM type: NRG; PAM sequence: AAG
taatttatgaattagcttat

SEQ ID NO: 72812 - DNA, 20 bp, Artificial Sequence
  Description of Artificial Sequence: Synthetic oligonucleotide
  Target: LAMA2; (-) strand; PAM type: NRG; PAM sequence: TAG
tttgccattaatttatgaat

SEQ ID NO: 72813 - DNA, 20 bp, Artificial Sequence
  Description of Artificial Sequence: Synthetic oligonucleotide
  Target: LAMA2; (-) strand; PAM type: NRG; PAM sequence: CAG
caaaaaaatctgcaaagtct

SEQ ID NO: 72814 - DNA, 20 bp, Artificial Sequence
  Description of Artificial Sequence: Synthetic oligonucleotide
  Target: LAMA2; (-) strand; PAM type: NRG; PAM sequence: AAG
tatttacaaaaaaatctgca

SEQ ID NO: 72815 - DNA, 20 bp, Artificial Sequence
  Description of Artificial Sequence: Synthetic oligonucleotide
  Target: LAMA2; (-) strand; PAM type: NRG; PAM sequence: CAG
tggagatctgttaattgtat

SEQ ID NO: 72816 - DNA, 20 bp, Artificial Sequence
  Description of Artificial Sequence: Synthetic oligonucleotide
  Target: LAMA2; (-) strand; PAM type: NRG; PAM sequence: GAG
gaaatctaatgcagctgatg

SEQ ID NO: 72817 - DNA, 20 bp, Artificial Sequence
  Description of Artificial Sequence: Synthetic oligonucleotide
  Target: LAMA2; (-) strand; PAM type: NRG; PAM sequence: TGG
ttgaaatctaatgcagctga

SEQ ID NO: 72818 - DNA, 20 bp, Artificial Sequence
  Description of Artificial Sequence: Synthetic oligonucleotide
  Target: LAMA2; (-) strand; PAM type: NRG; PAM sequence: CAG
gggcaacttgaaatctaatg

SEQ ID NO: 72819 - DNA, 20 bp, Artificial Sequence
  Description of Artificial Sequence: Synthetic oligonucleotide
  Target: LAMA2; (-) strand; PAM type: NRG; PAM sequence: GGG
gcatatatacagtggtagca

SEQ ID NO: 72820 - DNA, 20 bp, Artificial Sequence
  Description of Artificial Sequence: Synthetic oligonucleotide
  Target: LAMA2; (-) strand; PAM type: NRG; PAM sequence: AGG
tgcatatatacagtggtagc

SEQ ID NO: 72821 - DNA, 20 bp, Artificial Sequence
  Description of Artificial Sequence: Synthetic oligonucleotide
  Target: LAMA2; (-) strand; PAM type: NRG; PAM sequence: CAG
gtgcatatatacagtggtag

SEQ ID NO: 72822 - DNA, 20 bp, Artificial Sequence
  Description of Artificial Sequence: Synthetic oligonucleotide
  Target: LAMA2; (-) strand; PAM type: NRG; PAM sequence: TAG
tatgtgcatatatacagtgg

SEQ ID NO: 72823 - DNA, 20 bp, Artificial Sequence
  Description of Artificial Sequence: Synthetic oligonucleotide
  Target: LAMA2; (-) strand; PAM type: NRG; PAM sequence: TGG
atctatgtgcatatatacag

SEQ ID NO: 72824 - DNA, 20 bp, Artificial Sequence
  Description of Artificial Sequence: Synthetic oligonucleotide
  Target: LAMA2; (-) strand; PAM type: NRG; PAM sequence: CAG
tttatctatgtgcatatata

SEQ ID NO: 72825 - DNA, 20 bp, Artificial Sequence
  Description of Artificial Sequence: Synthetic oligonucleotide
  Target: LAMA2; (-) strand; PAM type: NRG; PAM sequence: GGG
aaggtgctatacagcacata

SEQ ID NO: 72826 - DNA, 20 bp, Artificial Sequence
  Description of Artificial Sequence: Synthetic oligonucleotide
  Target: LAMA2; (-) strand; PAM type: NRG; PAM sequence: AGG
taaggtgctatacagcacat

SEQ ID NO: 72827 - DNA, 20 bp, Artificial Sequence
  Description of Artificial Sequence: Synthetic oligonucleotide
  Target: LAMA2; (-) strand; PAM type: NRG; PAM sequence: TAG
ataaggtgctatacagcaca

SEQ ID NO: 72828 - DNA, 20 bp, Artificial Sequence
  Description of Artificial Sequence: Synthetic oligonucleotide
  Target: LAMA2; (-) strand; PAM type: NRG; PAM sequence: CAG
aagatatataaggtgctata

SEQ ID NO: 72829 - DNA, 20 bp, Artificial Sequence
  Description of Artificial Sequence: Synthetic oligonucleotide
  Target: LAMA2; (-) strand; PAM type: NRG; PAM sequence: AGG
tcttaaaagaaagatatata

SEQ ID NO: 72830 - DNA, 20 bp, Artificial Sequence
  Description of Artificial Sequence: Synthetic oligonucleotide
  Target: LAMA2; (-) strand; PAM type: NRG; PAM sequence: AAG
ctcttaaaagaaagatatat

SEQ ID NO: 72831 - DNA, 20 bp, Artificial Sequence
  Description of Artificial Sequence: Synthetic oligonucleotide
  Target: LAMA2; (-) strand; PAM type: NRG; PAM sequence: AAG
tatgaggttctcttaaaaga

SEQ ID NO: 72832 - DNA, 20 bp, Artificial Sequence
  Description of Artificial Sequence: Synthetic oligonucleotide
  Target: LAMA2; (-) strand; PAM type: NRG; PAM sequence: AAG
gtcctatgaggttctcttaa

SEQ ID NO: 72833 - DNA, 20 bp, Artificial Sequence
  Description of Artificial Sequence: Synthetic oligonucleotide
  Target: LAMA2; (-) strand; PAM type: NRG; PAM sequence: AGG
aagaatttggaagtcctatg

SEQ ID NO: 72834 - DNA, 20 bp, Artificial Sequence
  Description of Artificial Sequence: Synthetic oligonucleotide
  Target: LAMA2; (-) strand; PAM type: NRG; PAM sequence: GAG
gaagaatttggaagtcctat

SEQ ID NO: 72835 - DNA, 20 bp, Artificial Sequence
  Description of Artificial Sequence: Synthetic oligonucleotide
  Target: LAMA2; (-) strand; PAM type: NRG; PAM sequence: AAG
tatttcagtgaagaatttgg

SEQ ID NO: 72836 - DNA, 20 bp, Artificial Sequence
  Description of Artificial Sequence: Synthetic oligonucleotide
  Target: LAMA2; (-) strand; PAM type: NRG; PAM sequence: TGG
agctatttcagtgaagaatt

SEQ ID NO: 72837 - DNA, 20 bp, Artificial Sequence
  Description of Artificial Sequence: Synthetic oligonucleotide
  Target: LAMA2; (-) strand; PAM type: NRG; PAM sequence: AAG
aagtaggagctatttcagtg

SEQ ID NO: 72838 - DNA, 20 bp, Artificial Sequence
  Description of Artificial Sequence: Synthetic oligonucleotide
  Target: LAMA2; (-) strand; PAM type: NRG; PAM sequence: CAG
ataagaagtaggagctattt

SEQ ID NO: 72839 - DNA, 20 bp, Artificial Sequence
  Description of Artificial Sequence: Synthetic oligonucleotide
  Target: LAMA2; (-) strand; PAM type: NRG; PAM sequence: GAG
aaaggtaatataagaagtag

SEQ ID NO: 72840 - DNA, 20 bp, Artificial Sequence
  Description of Artificial Sequence: Synthetic oligonucleotide
  Target: LAMA2; (-) strand; PAM type: NRG; PAM sequence: AGG
cgaaaggtaatataagaagt

SEQ ID NO: 72841 - DNA, 20 bp, Artificial Sequence
  Description of Artificial Sequence: Synthetic oligonucleotide
  Target: LAMA2; (-) strand; PAM type: NRG; PAM sequence: TAG
tcgaaaggtaatataagaag

SEQ ID NO: 72842 - DNA, 20 bp, Artificial Sequence
  Description of Artificial Sequence: Synthetic oligonucleotide
  Target: LAMA2; (-) strand; PAM type: NRG; PAM sequence: AAG
atatcgaaaggtaatataag

SEQ ID NO: 72843 - DNA, 20 bp, Artificial Sequence
  Description of Artificial Sequence: Synthetic oligonucleotide
  Target: LAMA2; (-) strand; PAM type: NRG; PAM sequence: AAG
gacatatcgaaaggtaatat

SEQ ID NO: 72844 - DNA, 20 bp, Artificial Sequence
  Description of Artificial Sequence: Synthetic oligonucleotide
  Target: LAMA2; (-) strand; PAM type: NRG; PAM sequence: AGG
aatctttctgacatatcgaa

SEQ ID NO: 72845 - DNA, 20 bp, Artificial Sequence
  Description of Artificial Sequence: Synthetic oligonucleotide
  Target: LAMA2; (-) strand; PAM type: NRG; PAM sequence: AAG
gaatctttctgacatatcga

SEQ ID NO: 72846 - DNA, 20 bp, Artificial Sequence
  Description of Artificial Sequence: Synthetic oligonucleotide
  Target: LAMA2; (-) strand; PAM type: NRG; PAM sequence: AAG
agaacaacagcttccagaaa

SEQ ID NO: 72847 - DNA, 20 bp, Artificial Sequence
  Description of Artificial Sequence: Synthetic oligonucleotide
  Target: LAMA2; (-) strand; PAM type: NRG; PAM sequence: CAG
tggatgagaacaacagcttc

SEQ ID NO: 72848 - DNA, 20 bp, Artificial Sequence
  Description of Artificial Sequence: Synthetic oligonucleotide
  Target: LAMA2; (-) strand; PAM type: NRG; PAM sequence: CAG
aatgatgtggatgagaacaa

SEQ ID NO: 72849 - DNA, 20 bp, Artificial Sequence
  Description of Artificial Sequence: Synthetic oligonucleotide
  Target: LAMA2; (-) strand; PAM type: NRG; PAM sequence: GAG
gcctgtgcaatgatgtggat

SEQ ID NO: 72850 - DNA, 20 bp, Artificial Sequence
  Description of Artificial Sequence: Synthetic oligonucleotide
  Target: LAMA2; (-) strand; PAM type: NRG; PAM sequence: TGG
tgtcagcctgtgcaatgatg

SEQ ID NO: 72851 - DNA, 20 bp, Artificial Sequence
  Description of Artificial Sequence: Synthetic oligonucleotide
  Target: LAMA2; (-) strand; PAM type: NRG; PAM sequence: CAG
agaaatagtgtcttgattgt

SEQ ID NO: 72852 - DNA, 20 bp, Artificial Sequence
  Description of Artificial Sequence: Synthetic oligonucleotide
  Target: LAMA2; (-) strand; PAM type: NRG; PAM sequence: TAG
gttttaaagaaagtgagaaa

SEQ ID NO: 72853 - DNA, 20 bp, Artificial Sequence
  Description of Artificial Sequence: Synthetic oligonucleotide
  Target: LAMA2; (-) strand; PAM type: NRG; PAM sequence: GAG
gatttagttttaaagaaagt

SEQ ID NO: 72854 - DNA, 20 bp, Artificial Sequence
  Description of Artificial Sequence: Synthetic oligonucleotide
  Target: LAMA2; (-) strand; PAM type: NRG; PAM sequence: AAG
tcctgatttagttttaaaga

SEQ ID NO: 72855 - DNA, 20 bp, Artificial Sequence
  Description of Artificial Sequence: Synthetic oligonucleotide
  Target: LAMA2; (-) strand; PAM type: NRG; PAM sequence: AAG
caaatcctgatttagtttta

SEQ ID NO: 72856 - DNA, 20 bp, Artificial Sequence
  Description of Artificial Sequence: Synthetic oligonucleotide
  Target: LAMA2; (-) strand; PAM type: NRG; PAM sequence: TAG
cactccctcaaatcctgatt

SEQ ID NO: 72857 - DNA, 20 bp, Artificial Sequence
  Description of Artificial Sequence: Synthetic oligonucleotide
  Target: LAMA2; (-) strand; PAM type: NRG; PAM sequence: TAG
aaaaatccttttgctctgcc

SEQ ID NO: 72858 - DNA, 20 bp, Artificial Sequence
  Description of Artificial Sequence: Synthetic oligonucleotide
  Target: LAMA2; (-) strand; PAM type: NRG; PAM sequence: GAG
catcattatactatcctaca

SEQ ID NO: 72859 - DNA, 20 bp, Artificial Sequence
  Description of Artificial Sequence: Synthetic oligonucleotide
  Target: LAMA2; (-) strand; PAM type: NRG; PAM sequence: CAG
cccatcattatactatccta

SEQ ID NO: 72860 - DNA, 20 bp, Artificial Sequence
  Description of Artificial Sequence: Synthetic oligonucleotide
  Target: LAMA2; (-) strand; PAM type: NRG; PAM sequence: TGG
ccttgcacgtcctgcgggtt

SEQ ID NO: 72861 - DNA, 20 bp, Artificial Sequence
  Description of Artificial Sequence: Synthetic oligonucleotide
  Target: LAMA2; (-) strand; PAM type: NRG; PAM sequence: GGG
cttggccttgcacgtcctgc

SEQ ID NO: 72862 - DNA, 20 bp, Artificial Sequence
  Description of Artificial Sequence: Synthetic oligonucleotide
  Target: LAMA2; (-) strand; PAM type: NRG; PAM sequence: CGG
tcttggccttgcacgtcctg

SEQ ID NO: 72863 - DNA, 20 bp, Artificial Sequence
  Description of Artificial Sequence: Synthetic oligonucleotide
  Target: LAMA2; (-) strand; PAM type: NRG; PAM sequence: TGG
tttacattcggcttcactct

SEQ ID NO: 72864 - DNA, 20 bp, Artificial Sequence
  Description of Artificial Sequence: Synthetic oligonucleotide
  Target: LAMA2; (-) strand; PAM type: NRG; PAM sequence: CGG
caaagcctatagtttacatt

SEQ ID NO: 72865 - DNA, 20 bp, Artificial Sequence
  Description of Artificial Sequence: Synthetic oligonucleotide
  Target: LAMA2; (-) strand; PAM type: NRG; PAM sequence: TAG
tcaaaattacccaaagccta

SEQ ID NO: 72866 - DNA, 20 bp, Artificial Sequence
  Description of Artificial Sequence: Synthetic oligonucleotide
  Target: LAMA2; (-) strand; PAM type: NRG; PAM sequence: AAG
tgacacgtcaaaattaccca

SEQ ID NO: 72867 - DNA, 20 bp, Artificial Sequence
  Description of Artificial Sequence: Synthetic oligonucleotide
  Target: LAMA2; (-) strand; PAM type: NRG; PAM sequence: TAG
atcactatcccccagtagag

SEQ ID NO: 72868 - DNA, 20 bp, Artificial Sequence
  Description of Artificial Sequence: Synthetic oligonucleotide
  Target: LAMA2; (-) strand; PAM type: NRG; PAM sequence: GAG
attatcactatcccccagta

SEQ ID NO: 72869 - DNA, 20 bp, Artificial Sequence
  Description of Artificial Sequence: Synthetic oligonucleotide
  Target: LAMA2; (-) strand; PAM type: NRG; PAM sequence: TAG
ctattatcactatcccccag

SEQ ID NO: 72870 - DNA, 20 bp, Artificial Sequence
  Description of Artificial Sequence: Synthetic oligonucleotide
  Target: LAMA2; (-) strand; PAM type: NRG; PAM sequence: CAG
cccctattatcactatcccc

SEQ ID NO: 72871 - DNA, 20 bp, Artificial Sequence
  Description of Artificial Sequence: Synthetic oligonucleotide
  Target: LAMA2; (-) strand; PAM type: NRG; PAM sequence: GAG
aagaaaaaaaaaaaaataca

SEQ ID NO: 72872 - DNA, 20 bp, Artificial Sequence
  Description of Artificial Sequence: Synthetic oligonucleotide
  Target: LAMA2; (-) strand; PAM type: NRG; PAM sequence: CAG
aaaagaaaaaaaaaaaaata

SEQ ID NO: 72873 - DNA, 20 bp, Artificial Sequence
  Description of Artificial Sequence: Synthetic oligonucleotide
  Target: LAMA2; (-) strand; PAM type: NRG; PAM sequence: AAG
agcaagactttgtctcaaaa

SEQ ID NO: 72874 - DNA, 20 bp, Artificial Sequence
  Description of Artificial Sequence: Synthetic oligonucleotide
  Target: LAMA2; (-) strand; PAM type: NRG; PAM sequence: AAG
tccagtctgagcgacacagc

SEQ ID NO: 72875 - DNA, 20 bp, Artificial Sequence
  Description of Artificial Sequence: Synthetic oligonucleotide
  Target: LAMA2; (-) strand; PAM type: NRG; PAM sequence: CAG
gcactccagtctgagcgaca

SEQ ID NO: 72876 - DNA, 20 bp, Artificial Sequence
  Description of Artificial Sequence: Synthetic oligonucleotide
  Target: LAMA2; (-) strand; PAM type: NRG; PAM sequence: GAG
gtgccactgcactccagtct

SEQ ID NO: 72877 - DNA, 20 bp, Artificial Sequence
  Description of Artificial Sequence: Synthetic oligonucleotide
  Target: LAMA2; (-) strand; PAM type: NRG; PAM sequence: CAG
gacattgtgccactgcactc

SEQ ID NO: 72878 - DNA, 20 bp, Artificial Sequence
  Description of Artificial Sequence: Synthetic oligonucleotide
  Target: LAMA2; (-) strand; PAM type: NRG; PAM sequence: GAG
ctagaggcggaggctgcagt

SEQ ID NO: 72879 - DNA, 20 bp, Artificial Sequence
  Description of Artificial Sequence: Synthetic oligonucleotide
  Target: LAMA2; (-) strand; PAM type: NRG; PAM sequence: CAG
aatgctagaggcggaggctg

SEQ ID NO: 72880 - DNA, 20 bp, Artificial Sequence
  Description of Artificial Sequence: Synthetic oligonucleotide
  Target: LAMA2; (-) strand; PAM type: NRG; PAM sequence: AGG
cgcttgaatgctagaggcgg

SEQ ID NO: 72881 - DNA, 20 bp, Artificial Sequence
  Description of Artificial Sequence: Synthetic oligonucleotide
  Target: LAMA2; (-) strand; PAM type: NRG; PAM sequence: GAG
tcgcttgaatgctagaggcg

SEQ ID NO: 72882 - DNA, 20 bp, Artificial Sequence
  Description of Artificial Sequence: Synthetic oligonucleotide
  Target: LAMA2; (-) strand; PAM type: NRG; PAM sequence: CGG
aatcgcttgaatgctagagg

SEQ ID NO: 72883 - DNA, 20 bp, Artificial Sequence
  Description of Artificial Sequence: Synthetic oligonucleotide
  Target: LAMA2; (-) strand; PAM type: NRG; PAM sequence: AGG
gagaatcgcttgaatgctag

SEQ ID NO: 72884 - DNA, 20 bp, Artificial Sequence
  Description of Artificial Sequence: Synthetic oligonucleotide
  Target: LAMA2; (-) strand; PAM type: NRG; PAM sequence: GAG
ggagaatcgcttgaatgcta

SEQ ID NO: 72885 - DNA, 20 bp, Artificial Sequence
  Description of Artificial Sequence: Synthetic oligonucleotide
  Target: LAMA2; (-) strand; PAM type: NRG; PAM sequence: TAG
caggagaatcgcttgaatgc

SEQ ID NO: 72886 - DNA, 20 bp, Artificial Sequence
  Description of Artificial Sequence: Synthetic oligonucleotide
  Target: LAMA2; (-) strand; PAM type: NRG; PAM sequence: GAG
tactcaggaagccgaggcag

SEQ ID NO: 72887 - DNA, 20 bp, Artificial Sequence
  Description of Artificial Sequence: Synthetic oligonucleotide
  Target: LAMA2; (-) strand; PAM type: NRG; PAM sequence: AGG
ggtactcaggaagccgaggc

SEQ ID NO: 72888 - DNA, 20 bp, Artificial Sequence
  Description of Artificial Sequence: Synthetic oligonucleotide
  Target: LAMA2; (-) strand; PAM type: NRG; PAM sequence: CAG
aggtactcaggaagccgagg

SEQ ID NO: 72889 - DNA, 20 bp, Artificial Sequence
  Description of Artificial Sequence: Synthetic oligonucleotide
  Target: LAMA2; (-) strand; PAM type: NRG; PAM sequence: AGG
tccaggtactcaggaagccg

SEQ ID NO: 72890 - DNA, 20 bp, Artificial Sequence
  Description of Artificial Sequence: Synthetic oligonucleotide
  Target: LAMA2; (-) strand; PAM type: NRG; PAM sequence: GAG
ttccaggtactcaggaagcc

SEQ ID NO: 72891 - DNA, 20 bp, Artificial Sequence
  Description of Artificial Sequence: Synthetic oligonucleotide
  Target: LAMA2; (-) strand; PAM type: NRG; PAM sequence: AAG
tgtagttccaggtactcagg

SEQ ID NO: 72892 - DNA, 20 bp, Artificial Sequence
  Description of Artificial Sequence: Synthetic oligonucleotide
  Target: LAMA2; (-) strand; PAM type: NRG; PAM sequence: AGG
acctgtagttccaggtactc

SEQ ID NO: 72893 - DNA, 20 bp, Artificial Sequence
  Description of Artificial Sequence: Synthetic oligonucleotide
  Target: LAMA2; (-) strand; PAM type: NRG; PAM sequence: CAG
cacctgtagttccaggtact

SEQ ID NO: 72894 - DNA, 20 bp, Artificial Sequence
  Description of Artificial Sequence: Synthetic oligonucleotide
  Target: LAMA2; (-) strand; PAM type: NRG; PAM sequence: AGG
tggcgcgcacctgtagttcc

SEQ ID NO: 72895 - DNA, 20 bp, Artificial Sequence
  Description of Artificial Sequence: Synthetic oligonucleotide
  Target: LAMA2; (-) strand; PAM type: NRG; PAM sequence: CAG
gtggcgcgcacctgtagttc

SEQ ID NO: 72896 - DNA, 20 bp, Artificial Sequence
  Description of Artificial Sequence: Synthetic oligonucleotide
  Target: LAMA2; (-) strand; PAM type: NRG; PAM sequence: TAG
ggtatagtggcgcgcacctg

SEQ ID NO: 72897 - DNA, 20 bp, Artificial Sequence
  Description of Artificial Sequence: Synthetic oligonucleotide
  Target: LAMA2; (-) strand; PAM type: NRG; PAM sequence: TGG
caaaaattagcggggtatag

SEQ ID NO: 72898 - DNA, 20 bp, Artificial Sequence
  Description of Artificial Sequence: Synthetic oligonucleotide
  Target: LAMA2; (-) strand; PAM type: NRG; PAM sequence: TAG
acacaaaaattagcggggta

SEQ ID NO: 72899 - DNA, 20 bp, Artificial Sequence
  Description of Artificial Sequence: Synthetic oligonucleotide
  Target: LAMA2; (-) strand; PAM type: NRG; PAM sequence: GGG
taaaaacacaaaaattagcg

SEQ ID NO: 72900 - DNA, 20 bp, Artificial Sequence
  Description of Artificial Sequence: Synthetic oligonucleotide
  Target: LAMA2; (-) strand; PAM type: NRG; PAM sequence: GGG
ctaaaaacacaaaaattagc

SEQ ID NO: 72901 - DNA, 20 bp, Artificial Sequence
  Description of Artificial Sequence: Synthetic oligonucleotide
  Target: LAMA2; (-) strand; PAM type: NRG; PAM sequence: CGG
actaaaaacacaaaaattag

SEQ ID NO: 72902 - DNA, 20 bp, Artificial Sequence
  Description of Artificial Sequence: Synthetic oligonucleotide
  Target: LAMA2; (-) strand; PAM type: NRG; PAM sequence: TAG
tctactaaaaacacaaaaat

SEQ ID NO: 72903 - DNA, 20 bp, Artificial Sequence
  Description of Artificial Sequence: Synthetic oligonucleotide
  Target: LAMA2; (-) strand; PAM type: NRG; PAM sequence: TGG
caagaccagcctgggcaaca

SEQ ID NO: 72904 - DNA, 20 bp, Artificial Sequence
  Description of Artificial Sequence: Synthetic oligonucleotide
  Target: LAMA2; (-) strand; PAM type: NRG; PAM sequence: GGG
caggagttcaagaccagcct

SEQ ID NO: 72905 - DNA, 20 bp, Artificial Sequence
  Description of Artificial Sequence: Synthetic oligonucleotide
  Target: LAMA2; (-) strand; PAM type: NRG; PAM sequence: TGG
tcaggagttcaagaccagcc

SEQ ID NO: 72906 - DNA, 20 bp, Artificial Sequence
  Description of Artificial Sequence: Synthetic oligonucleotide
  Target: LAMA2; (-) strand; PAM type: NRG; PAM sequence: CAG
taaggtcaggagttcaagac

SEQ ID NO: 72907 - DNA, 20 bp, Artificial Sequence
  Description of Artificial Sequence: Synthetic oligonucleotide
  Target: LAMA2; (-) strand; PAM type: NRG; PAM sequence: AAG
ccacttaaggtcaggagttc

SEQ ID NO: 72908 - DNA, 20 bp, Artificial Sequence
  Description of Artificial Sequence: Synthetic oligonucleotide
  Target: LAMA2; (-) strand; PAM type: NRG; PAM sequence: GAG
ggcagaccacttaaggtcag

SEQ ID NO: 72909 - DNA, 20 bp, Artificial Sequence
  Description of Artificial Sequence: Synthetic oligonucleotide
  Target: LAMA2; (-) strand; PAM type: NRG; PAM sequence: AGG
tgggcagaccacttaaggtc

SEQ ID NO: 72910 - DNA, 20 bp, Artificial Sequence
  Description of Artificial Sequence: Synthetic oligonucleotide
  Target: LAMA2; (-) strand; PAM type: NRG; PAM sequence: CAG
atgggcagaccacttaaggt

SEQ ID NO: 72911 - DNA, 20 bp, Artificial Sequence
  Description of Artificial Sequence: Synthetic oligonucleotide
  Target: LAMA2; (-) strand; PAM type: NRG; PAM sequence: AGG
tgacatgggcagaccactta

SEQ ID NO: 72912 - DNA, 20 bp, Artificial Sequence
  Description of Artificial Sequence: Synthetic oligonucleotide
  Target: LAMA2; (-) strand; PAM type: NRG; PAM sequence: AAG
ctgacatgggcagaccactt

SEQ ID NO: 72913 - DNA, 20 bp, Artificial Sequence
  Description of Artificial Sequence: Synthetic oligonucleotide
  Target: LAMA2; (-) strand; PAM type: NRG; PAM sequence: CAG
ctttgggaggctgacatggg

SEQ ID NO: 72914 - DNA, 20 bp, Artificial Sequence
  Description of Artificial Sequence: Synthetic oligonucleotide
  Target: LAMA2; (-) strand; PAM type: NRG; PAM sequence: GGG
gcactttgggaggctgacat

SEQ ID NO: 72915 - DNA, 20 bp, Artificial Sequence
  Description of Artificial Sequence: Synthetic oligonucleotide
  Target: LAMA2; (-) strand; PAM type: NRG; PAM sequence: TGG
agcactttgggaggctgaca

SEQ ID NO: 72916 - DNA, 20 bp, Artificial Sequence
  Description of Artificial Sequence: Synthetic oligonucleotide
  Target: LAMA2; (-) strand; PAM type: NRG; PAM sequence: AGG
tgtaatcctagcactttggg

SEQ ID NO: 72917 - DNA, 20 bp, Artificial Sequence
  Description of Artificial Sequence: Synthetic oligonucleotide
  Target: LAMA2; (-) strand; PAM type: NRG; PAM sequence: GAG
ctgtaatcctagcactttgg

SEQ ID NO: 72918 - DNA, 20 bp, Artificial Sequence
  Description of Artificial Sequence: Synthetic oligonucleotide
  Target: LAMA2; (-) strand; PAM type: NRG; PAM sequence: GGG
acctgtaatcctagcacttt

SEQ ID NO: 72919 - DNA, 20 bp, Artificial Sequence
  Description of Artificial Sequence: Synthetic oligonucleotide
  Target: LAMA2; (-) strand; PAM type: NRG; PAM sequence: TGG
tacctgtaatcctagcactt

SEQ ID NO: 72920 - DNA, 20 bp, Artificial Sequence
  Description of Artificial Sequence: Synthetic oligonucleotide
  Target: LAMA2; (-) strand; PAM type: NRG; PAM sequence: TAG
gtggctcatacctgtaatcc

SEQ ID NO: 72921 - DNA, 20 bp, Artificial Sequence
  Description of Artificial Sequence: Synthetic oligonucleotide
  Target: LAMA2; (-) strand; PAM type: NRG; PAM sequence: TGG
gagattttggccaggtgcag

SEQ ID NO: 72922 - DNA, 20 bp, Artificial Sequence
  Description of Artificial Sequence: Synthetic oligonucleotide
  Target: LAMA2; (-) strand; PAM type: NRG; PAM sequence: CAG
acagagattttggccaggtg

SEQ ID NO: 72923 - DNA, 20 bp, Artificial Sequence
  Description of Artificial Sequence: Synthetic oligonucleotide
  Target: LAMA2; (-) strand; PAM type: NRG; PAM sequence: AGG
aagatacagagattttggcc

SEQ ID NO: 72924 - DNA, 20 bp, Artificial Sequence
  Description of Artificial Sequence: Synthetic oligonucleotide
  Target: LAMA2; (-) strand; PAM type: NRG; PAM sequence: CAG
gaagatacagagattttggc

SEQ ID NO: 72925 - DNA, 20 bp, Artificial Sequence
  Description of Artificial Sequence: Synthetic oligonucleotide
  Target: LAMA2; (-) strand; PAM type: NRG; PAM sequence: TGG
aaaggaagatacagagattt

SEQ ID NO: 72926 - DNA, 20 bp, Artificial Sequence
  Description of Artificial Sequence: Synthetic oligonucleotide
  Target: LAMA2; (-) strand; PAM type: NRG; PAM sequence: GAG
aaaattgaaaggaagataca

SEQ ID NO: 72927 - DNA, 20 bp, Artificial Sequence
  Description of Artificial Sequence: Synthetic oligonucleotide
  Target: LAMA2; (-) strand; PAM type: NRG; PAM sequence: CAG
gcaaaattgaaaggaagata

SEQ ID NO: 72928 - DNA, 20 bp, Artificial Sequence
  Description of Artificial Sequence: Synthetic oligonucleotide
  Target: LAMA2; (-) strand; PAM type: NRG; PAM sequence: AAG
ttcaaagcaaaattgaaagg

SEQ ID NO: 72929 - DNA, 20 bp, Artificial Sequence
  Description of Artificial Sequence: Synthetic oligonucleotide
  Target: LAMA2; (-) strand; PAM type: NRG; PAM sequence: AGG
aggttcaaagcaaaattgaa

SEQ ID NO: 72930 - DNA, 20 bp, Artificial Sequence
  Description of Artificial Sequence: Synthetic oligonucleotide
  Target: LAMA2; (-) strand; PAM type: NRG; PAM sequence: AAG
taggttcaaagcaaaattga

SEQ ID NO: 72931 - DNA, 20 bp, Artificial Sequence
  Description of Artificial Sequence: Synthetic oligonucleotide
  Target: LAMA2; (-) strand; PAM type: NRG; PAM sequence: AAG
tagggagaattttaggttca

SEQ ID NO: 72932 - DNA, 20 bp, Artificial Sequence
  Description of Artificial Sequence: Synthetic oligonucleotide
  Target: LAMA2; (-) strand; PAM type: NRG; PAM sequence: AGG
tattttttagggagaatttt

SEQ ID NO: 72933 - DNA, 20 bp, Artificial Sequence
  Description of Artificial Sequence: Synthetic oligonucleotide
  Target: LAMA2; (-) strand; PAM type: NRG; PAM sequence: TAG
ttattttttagggagaattt

SEQ ID NO: 72934 - DNA, 20 bp, Artificial Sequence
  Description of Artificial Sequence: Synthetic oligonucleotide
  Target: LAMA2; (-) strand; PAM type: NRG; PAM sequence: GAG
ttaatattttattttttagg

SEQ ID NO: 72935 - DNA, 20 bp, Artificial Sequence
  Description of Artificial Sequence: Synthetic oligonucleotide
  Target: LAMA2; (-) strand; PAM type: NRG; PAM sequence: GGG
ttttaatattttatttttta

SEQ ID NO: 72936 - DNA, 20 bp, Artificial Sequence
  Description of Artificial Sequence: Synthetic oligonucleotide
  Target: LAMA2; (-) strand; PAM type: NRG; PAM sequence: AGG
tttttaatattttatttttt

SEQ ID NO: 72937 - DNA, 20 bp, Artificial Sequence
  Description of Artificial Sequence: Synthetic oligonucleotide
  Target: LAMA2; (-) strand; PAM type: NRG; PAM sequence: TAG
ttttttaatattttattttt

SEQ ID NO: 72938 - DNA, 20 bp, Artificial Sequence
  Description of Artificial Sequence: Synthetic oligonucleotide
  Target: LAMA2; (-) strand; PAM type: NRG; PAM sequence: GAG
aagagtcagtagggtacata

SEQ ID NO: 72939 - DNA, 20 bp, Artificial Sequence
  Description of Artificial Sequence: Synthetic oligonucleotide
  Target: LAMA2; (-) strand; PAM type: NRG; PAM sequence: TAG
caaagagtcagtagggtaca

SEQ ID NO: 72940 - DNA, 20 bp, Artificial Sequence
  Description of Artificial Sequence: Synthetic oligonucleotide
  Target: LAMA2; (-) strand; PAM type: NRG; PAM sequence: GGG
tctttgacaaagagtcagta

SEQ ID NO: 72941 - DNA, 20 bp, Artificial Sequence
  Description of Artificial Sequence: Synthetic oligonucleotide
  Target: LAMA2; (-) strand; PAM type: NRG; PAM sequence: AGG
atctttgacaaagagtcagt

SEQ ID NO: 72942 - DNA, 20 bp, Artificial Sequence
  Description of Artificial Sequence: Synthetic oligonucleotide
  Target: LAMA2; (-) strand; PAM type: NRG; PAM sequence: TAG
aatctttgacaaagagtcag

SEQ ID NO: 72943 - DNA, 20 bp, Artificial Sequence
  Description of Artificial Sequence: Synthetic oligonucleotide
  Target: LAMA2; (-) strand; PAM type: NRG; PAM sequence: CAG
gataatctttgacaaagagt

SEQ ID NO: 72944 - DNA, 20 bp, Artificial Sequence
  Description of Artificial Sequence: Synthetic oligonucleotide
  Target: LAMA2; (-) strand; PAM type: NRG; PAM sequence: GAG
aatagataatctttgacaaa

SEQ ID NO: 72945 - DNA, 20 bp, Artificial Sequence
  Description of Artificial Sequence: Synthetic oligonucleotide
  Target: LAMA2; (-) strand; PAM type: NRG; PAM sequence: AAG
aaaatagataatctttgaca

SEQ ID NO: 72946 - DNA, 20 bp, Artificial Sequence
  Description of Artificial Sequence: Synthetic oligonucleotide
  Target: LAMA2; (-) strand; PAM type: NRG; PAM sequence: TAG
gcatgagttgagaaaaaaaa

SEQ ID NO: 72947 - DNA, 20 bp, Artificial Sequence
  Description of Artificial Sequence: Synthetic oligonucleotide
  Target: LAMA2; (-) strand; PAM type: NRG; PAM sequence: GAG
tgttaaacattgcatgagtt

SEQ ID NO: 72948 - DNA, 20 bp, Artificial Sequence
  Description of Artificial Sequence: Synthetic oligonucleotide
  Target: LAMA2; (-) strand; PAM type: NRG; PAM sequence: GAG
caaagtgttaaacattgcat

SEQ ID NO: 72949 - DNA, 20 bp, Artificial Sequence
  Description of Artificial Sequence: Synthetic oligonucleotide
  Target: LAMA2; (-) strand; PAM type: NRG; PAM sequence: AAG
ataagtgataatatggtcca

SEQ ID NO: 72950 - DNA, 20 bp, Artificial Sequence
  Description of Artificial Sequence: Synthetic oligonucleotide
  Target: LAMA2; (-) strand; PAM type: NRG; PAM sequence: TGG
gctaaccataagtgataata

SEQ ID NO: 72951 - DNA, 20 bp, Artificial Sequence
  Description of Artificial Sequence: Synthetic oligonucleotide
  Target: LAMA2; (-) strand; PAM type: NRG; PAM sequence: AAG
tattataagaggctaaccat

SEQ ID NO: 72952 - DNA, 20 bp, Artificial Sequence
  Description of Artificial Sequence: Synthetic oligonucleotide
  Target: LAMA2; (-) strand; PAM type: NRG; PAM sequence: AGG
tagccataccatattataag

SEQ ID NO: 72953 - DNA, 20 bp, Artificial Sequence
  Description of Artificial Sequence: Synthetic oligonucleotide
  Target: LAMA2; (-) strand; PAM type: NRG; PAM sequence: GAG
atagccataccatattataa

SEQ ID NO: 72954 - DNA, 20 bp, Artificial Sequence
  Description of Artificial Sequence: Synthetic oligonucleotide
  Target: LAMA2; (-) strand; PAM type: NRG; PAM sequence: AAG
aaatagccataccatattat

SEQ ID NO: 72955 - DNA, 20 bp, Artificial Sequence
  Description of Artificial Sequence: Synthetic oligonucleotide
  Target: LAMA2; (-) strand; PAM type: NRG; PAM sequence: TAG
accatgactttttaaaaaaa

SEQ ID NO: 72956 - DNA, 20 bp, Artificial Sequence
  Description of Artificial Sequence: Synthetic oligonucleotide
  Target: LAMA2; (-) strand; PAM type: NRG; PAM sequence: AAG
atgtacacttaaaagtggct

SEQ ID NO: 72957 - DNA, 20 bp, Artificial Sequence
  Description of Artificial Sequence: Synthetic oligonucleotide
  Target: LAMA2; (-) strand; PAM type: NRG; PAM sequence: TGG
caacaatgtacacttaaaag

SEQ ID NO: 72958 - DNA, 20 bp, Artificial Sequence
  Description of Artificial Sequence: Synthetic oligonucleotide
  Target: LAMA2; (-) strand; PAM type: NRG; PAM sequence: AAG
gcacaacaatgtacacttaa

SEQ ID NO: 72959 - DNA, 20 bp, Artificial Sequence
  Description of Artificial Sequence: Synthetic oligonucleotide
  Target: LAMA2; (-) strand; PAM type: NRG; PAM sequence: TGG
gtagagctgaatggtgatga

SEQ ID NO: 72960 - DNA, 20 bp, Artificial Sequence
  Description of Artificial Sequence: Synthetic oligonucleotide
  Target: LAMA2; (-) strand; PAM type: NRG; PAM sequence: TGG
aaaagcattgtagagctgaa

SEQ ID NO: 72961 - DNA, 20 bp, Artificial Sequence
  Description of Artificial Sequence: Synthetic oligonucleotide
  Target: LAMA2; (-) strand; PAM type: NRG; PAM sequence: GAG
acaagatgaaaagcattgta

SEQ ID NO: 72962 - DNA, 20 bp, Artificial Sequence
  Description of Artificial Sequence: Synthetic oligonucleotide
  Target: LAMA2; (-) strand; PAM type: NRG; PAM sequence: TAG
ttacaagatgaaaagcattg

SEQ ID NO: 72963 - DNA, 20 bp, Artificial Sequence
  Description of Artificial Sequence: Synthetic oligonucleotide
  Target: LAMA2; (-) strand; PAM type: NRG; PAM sequence: AAG
ttcaaattttacaagatgaa

SEQ ID NO: 72964 - DNA, 20 bp, Artificial Sequence
  Description of Artificial Sequence: Synthetic oligonucleotide
  Target: LAMA2; (-) strand; PAM type: NRG; PAM sequence: AAG
tgcagtatttcaaattttac

SEQ ID NO: 72965 - DNA, 20 bp, Artificial Sequence
  Description of Artificial Sequence: Synthetic oligonucleotide
  Target: LAMA2; (-) strand; PAM type: NRG; PAM sequence: CAG
gagttattatttaatgggtg

SEQ ID NO: 72966 - DNA, 20 bp, Artificial Sequence
  Description of Artificial Sequence: Synthetic oligonucleotide
  Target: LAMA2; (-) strand; PAM type: NRG; PAM sequence: GGG
atggggagttattatttaat

SEQ ID NO: 72967 - DNA, 20 bp, Artificial Sequence
  Description of Artificial Sequence: Synthetic oligonucleotide
  Target: LAMA2; (-) strand; PAM type: NRG; PAM sequence: TGG
aatggggagttattatttaa

SEQ ID NO: 72968 - DNA, 20 bp, Artificial Sequence
  Description of Artificial Sequence: Synthetic oligonucleotide
  Target: LAMA2; (-) strand; PAM type: NRG; PAM sequence: GAG
actgggggagagagaatggg

SEQ ID NO: 72969 - DNA, 20 bp, Artificial Sequence
  Description of Artificial Sequence: Synthetic oligonucleotide
  Target: LAMA2; (-) strand; PAM type: NRG; PAM sequence: GGG
ggactgggggagagagaatg

SEQ ID NO: 72970 - DNA, 20 bp, Artificial Sequence
  Description of Artificial Sequence: Synthetic oligonucleotide
  Target: LAMA2; (-) strand; PAM type: NRG; PAM sequence: GGG
gggactgggggagagagaat

SEQ ID NO: 72971 - DNA, 20 bp, Artificial Sequence
  Description of Artificial Sequence: Synthetic oligonucleotide
  Target: LAMA2; (-) strand; PAM type: NRG; PAM sequence: TGG
agggactgggggagagagaa

SEQ ID NO: 72972 - DNA, 20 bp, Artificial Sequence
  Description of Artificial Sequence: Synthetic oligonucleotide
  Target: LAMA2; (-) strand; PAM type: NRG; PAM sequence: GAG
ttgccagggactgggggaga

SEQ ID NO: 72973 - DNA, 20 bp, Artificial Sequence
  Description of Artificial Sequence: Synthetic oligonucleotide
  Target: LAMA2; (-) strand; PAM type: NRG; PAM sequence: GAG
gtttgccagggactggggga

SEQ ID NO: 72974 - DNA, 20 bp, Artificial Sequence
  Description of Artificial Sequence: Synthetic oligonucleotide
  Target: LAMA2; (-) strand; PAM type: NRG; PAM sequence: GAG
gtgtttgccagggactgggg

SEQ ID NO: 72975 - DNA, 20 bp, Artificial Sequence
  Description of Artificial Sequence: Synthetic oligonucleotide
  Target: LAMA2; (-) strand; PAM type: NRG; PAM sequence: GGG
tagtgtttgccagggactgg

SEQ ID NO: 72976 - DNA, 20 bp, Artificial Sequence
  Description of Artificial Sequence: Synthetic oligonucleotide
  Target: LAMA2; (-) strand; PAM type: NRG; PAM sequence: GGG
atagtgtttgccagggactg

SEQ ID NO: 72977 - DNA, 20 bp, Artificial Sequence
  Description of Artificial Sequence: Synthetic oligonucleotide
  Target: LAMA2; (-) strand; PAM type: NRG; PAM sequence: GGG
aatagtgtttgccagggact

SEQ ID NO: 72978 - DNA, 20 bp, Artificial Sequence
  Description of Artificial Sequence: Synthetic oligonucleotide
  Target: LAMA2; (-) strand; PAM type: NRG; PAM sequence: TGG
gaatagtgtttgccagggac

SEQ ID NO: 72979 - DNA, 20 bp, Artificial Sequence
  Description of Artificial Sequence: Synthetic oligonucleotide
  Target: LAMA2; (-) strand; PAM type: NRG; PAM sequence: GGG
aggtagaatagtgtttgcca

SEQ ID NO: 72980 - DNA, 20 bp, Artificial Sequence
  Description of Artificial Sequence: Synthetic oligonucleotide
  Target: LAMA2; (-) strand; PAM type: NRG; PAM sequence: AGG
aaggtagaatagtgtttgcc

SEQ ID NO: 72981 - DNA, 20 bp, Artificial Sequence
  Description of Artificial Sequence: Synthetic oligonucleotide
  Target: LAMA2; (-) strand; PAM type: NRG; PAM sequence: CAG
gaaggtagaatagtgtttgc

SEQ ID NO: 72982 - DNA, 20 bp, Artificial Sequence
  Description of Artificial Sequence: Synthetic oligonucleotide
  Target: LAMA2; (-) strand; PAM type: NRG; PAM sequence: TAG
tatagagacagaaggtagaa

SEQ ID NO: 72983 - DNA, 20 bp, Artificial Sequence
  Description of Artificial Sequence: Synthetic oligonucleotide
  Target: LAMA2; (-) strand; PAM type: NRG; PAM sequence: TAG
aaatttatagagacagaagg

SEQ ID NO: 72984 - DNA, 20 bp, Artificial Sequence
  Description of Artificial Sequence: Synthetic oligonucleotide
  Target: LAMA2; (-) strand; PAM type: NRG; PAM sequence: AGG
atcaaatttatagagacaga

SEQ ID NO: 72985 - DNA, 20 bp, Artificial Sequence
  Description of Artificial Sequence: Synthetic oligonucleotide
  Target: LAMA2; (-) strand; PAM type: NRG; PAM sequence: AAG
gatcaaatttatagagacag

SEQ ID NO: 72986 - DNA, 20 bp, Artificial Sequence
  Description of Artificial Sequence: Synthetic oligonucleotide
  Target: LAMA2; (-) strand; PAM type: NRG; PAM sequence: CAG
aatgatcaaatttatagaga

SEQ ID NO: 72987 - DNA, 20 bp, Artificial Sequence
  Description of Artificial Sequence: Synthetic oligonucleotide
  Target: LAMA2; (-) strand; PAM type: NRG; PAM sequence: GAG
ccagaatgatcaaatttata

SEQ ID NO: 72988 - DNA, 20 bp, Artificial Sequence
  Description of Artificial Sequence: Synthetic oligonucleotide
  Target: LAMA2; (-) strand; PAM type: NRG; PAM sequence: TAG
gcccagaatgatcaaattta

SEQ ID NO: 72989 - DNA, 20 bp, Artificial Sequence
  Description of Artificial Sequence: Synthetic oligonucleotide
  Target: LAMA2; (-) strand; PAM type: NRG; PAM sequence: CAG
ttccacttatatgacgtgcc

SEQ ID NO: 72990 - DNA, 20 bp, Artificial Sequence
  Description of Artificial Sequence: Synthetic oligonucleotide
  Target: LAMA2; (-) strand; PAM type: NRG; PAM sequence: TGG
acaaaaggacaaatactgtg

SEQ ID NO: 72991 - DNA, 20 bp, Artificial Sequence
  Description of Artificial Sequence: Synthetic oligonucleotide
  Target: LAMA2; (-) strand; PAM type: NRG; PAM sequence: AGG
tgaaataagccagttacaaa

SEQ ID NO: 72992 - DNA, 20 bp, Artificial Sequence
  Description of Artificial Sequence: Synthetic oligonucleotide
  Target: LAMA2; (-) strand; PAM type: NRG; PAM sequence: AAG
atgaaataagccagttacaa

SEQ ID NO: 72993 - DNA, 20 bp, Artificial Sequence
  Description of Artificial Sequence: Synthetic oligonucleotide
  Target: LAMA2; (-) strand; PAM type: NRG; PAM sequence: CAG
ctatgttgaatgaaataagc

SEQ ID NO: 72994 - DNA, 20 bp, Artificial Sequence
  Description of Artificial Sequence: Synthetic oligonucleotide
  Target: LAMA2; (-) strand; PAM type: NRG; PAM sequence: AAG
gacactatgttgaatgaaat

SEQ ID NO: 72995 - DNA, 20 bp, Artificial Sequence
  Description of Artificial Sequence: Synthetic oligonucleotide
  Target: LAMA2; (-) strand; PAM type: NRG; PAM sequence: AAG
tacaacgtggaagaatctcg

SEQ ID NO: 72996 - DNA, 20 bp, Artificial Sequence
  Description of Artificial Sequence: Synthetic oligonucleotide
  Target: LAMA2; (-) strand; PAM type: NRG; PAM sequence: AAG
tgatatatgctacaacgtgg

SEQ ID NO: 72997 - DNA, 20 bp, Artificial Sequence
  Description of Artificial Sequence: Synthetic oligonucleotide
  Target: LAMA2; (-) strand; PAM type: NRG; PAM sequence: TGG
ctctgatatatgctacaacg

SEQ ID NO: 72998 - DNA, 20 bp, Artificial Sequence
  Description of Artificial Sequence: Synthetic oligonucleotide
  Target: LAMA2; (-) strand; PAM type: NRG; PAM sequence: AGG
ttattcagccttaaaaatga

SEQ ID NO: 72999 - DNA, 20 bp, Artificial Sequence
  Description of Artificial Sequence: Synthetic oligonucleotide
  Target: LAMA2; (-) strand; PAM type: NRG; PAM sequence: AAG
attattcagccttaaaaatg

SEQ ID NO: 73000 - DNA, 20 bp, Artificial Sequence
  Description of Artificial Sequence: Synthetic oligonucleotide
  Target: LAMA2; (-) strand; PAM type: NRG; PAM sequence: CAG
atagacattggaatattatt

SEQ ID NO: 73001 - DNA, 20 bp, Artificial Sequence
  Description of Artificial Sequence: Synthetic oligonucleotide
  Target: LAMA2; (-) strand; PAM type: NRG; PAM sequence: TGG
gtctacttatacatagacat

SEQ ID NO: 73002 - DNA, 20 bp, Artificial Sequence
  Description of Artificial Sequence: Synthetic oligonucleotide
  Target: LAMA2; (-) strand; PAM type: NRG; PAM sequence: TAG
tgtgtgagtctacttataca

SEQ ID NO: 73003 - DNA, 20 bp, Artificial Sequence
  Description of Artificial Sequence: Synthetic oligonucleotide
  Target: LAMA2; (-) strand; PAM type: NRG; PAM sequence: GAG
ccatatatgtacgtgtgtgt

SEQ ID NO: 73004 - DNA, 20 bp, Artificial Sequence
  Description of Artificial Sequence: Synthetic oligonucleotide
  Target: LAMA2; (-) strand; PAM type: NRG; PAM sequence: TGG
tgtgttcatcaatggattaa

SEQ ID NO: 73005 - DNA, 20 bp, Artificial Sequence
  Description of Artificial Sequence: Synthetic oligonucleotide
  Target: LAMA2; (-) strand; PAM type: NRG; PAM sequence: TGG
aattaacctgtgttcatcaa

SEQ ID NO: 73006 - DNA, 20 bp, Artificial Sequence
  Description of Artificial Sequence: Synthetic oligonucleotide
  Target: LAMA2; (-) strand; PAM type: NRG; PAM sequence: TGG
taagaacaatagccagaagg

SEQ ID NO: 73007 - DNA, 20 bp, Artificial Sequence
  Description of Artificial Sequence: Synthetic oligonucleotide
  Target: LAMA2; (-) strand; PAM type: NRG; PAM sequence: AGG
cattaagaacaatagccaga

SEQ ID NO: 73008 - DNA, 20 bp, Artificial Sequence
  Description of Artificial Sequence: Synthetic oligonucleotide
  Target: LAMA2; (-) strand; PAM type: NRG; PAM sequence: AAG
gcattaagaacaatagccag

SEQ ID NO: 73009 - DNA, 20 bp, Artificial Sequence
  Description of Artificial Sequence: Synthetic oligonucleotide
  Target: LAMA2; (-) strand; PAM type: NRG; PAM sequence: CAG
atagcattaagaacaatagc

SEQ ID NO: 73010 - DNA, 20 bp, Artificial Sequence
  Description of Artificial Sequence: Synthetic oligonucleotide
  Target: LAMA2; (-) strand; PAM type: NRG; PAM sequence: TAG
gttcatagcattaagaacaa

SEQ ID NO: 73011 - DNA, 20 bp, Artificial Sequence
  Description of Artificial Sequence: Synthetic oligonucleotide
  Target: LAMA2; (-) strand; PAM type: NRG; PAM sequence: AAG
atgcccatgttcatagcatt

SEQ ID NO: 73012 - DNA, 20 bp, Artificial Sequence
  Description of Artificial Sequence: Synthetic oligonucleotide
  Target: LAMA2; (-) strand; PAM type: NRG; PAM sequence: TAG
agcccatatgcccatgttca

SEQ ID NO: 73013 - DNA, 20 bp, Artificial Sequence
  Description of Artificial Sequence: Synthetic oligonucleotide
  Target: LAMA2; (-) strand; PAM type: NRG; PAM sequence: AAG
aactgaaaccttaaagattg

SEQ ID NO: 73014 - DNA, 20 bp, Artificial Sequence
  Description of Artificial Sequence: Synthetic oligonucleotide
  Target: LAMA2; (-) strand; PAM type: NRG; PAM sequence: AAG
catgagtaactgaaacctta

SEQ ID NO: 73015 - DNA, 20 bp, Artificial Sequence
  Description of Artificial Sequence: Synthetic oligonucleotide
  Target: LAMA2; (-) strand; PAM type: NRG; PAM sequence: GAG
ttcagacttcagtttaccat

SEQ ID NO: 73016 - DNA, 20 bp, Artificial Sequence
  Description of Artificial Sequence: Synthetic oligonucleotide
  Target: LAMA2; (-) strand; PAM type: NRG; PAM sequence: CAG
tatgtaatattttcagactt

SEQ ID NO: 73017 - DNA, 20 bp, Artificial Sequence
  Description of Artificial Sequence: Synthetic oligonucleotide
  Target: LAMA2; (-) strand; PAM type: NRG; PAM sequence: CAG
gtttttgtatgtaatatttt

SEQ ID NO: 73018 - DNA, 20 bp, Artificial Sequence
  Description of Artificial Sequence: Synthetic oligonucleotide
  Target: LAMA2; (-) strand; PAM type: NRG; PAM sequence: TAG
taataaaagttatgtgaatg

SEQ ID NO: 73019 - DNA, 20 bp, Artificial Sequence
  Description of Artificial Sequence: Synthetic oligonucleotide
  Target: LAMA2; (-) strand; PAM type: NRG; PAM sequence: AAG
acaacaatataatataataa

SEQ ID NO: 73020 - DNA, 20 bp, Artificial Sequence
  Description of Artificial Sequence: Synthetic oligonucleotide
  Target: LAMA2; (-) strand; PAM type: NRG; PAM sequence: GAG
ttataaaataggcacagtaa

SEQ ID NO: 73021 - DNA, 20 bp, Artificial Sequence
  Description of Artificial Sequence: Synthetic oligonucleotide
  Target: LAMA2; (-) strand; PAM type: NRG; PAM sequence: AAG
atttataaaataggcacagt

SEQ ID NO: 73022 - DNA, 20 bp, Artificial Sequence
  Description of Artificial Sequence: Synthetic oligonucleotide
  Target: LAMA2; (-) strand; PAM type: NRG; PAM sequence: CAG
tttaatttataaaataggca

SEQ ID NO: 73023 - DNA, 20 bp, Artificial Sequence
  Description of Artificial Sequence: Synthetic oligonucleotide
  Target: LAMA2; (-) strand; PAM type: NRG; PAM sequence: AGG
tgaagtttaatttataaaat

SEQ ID NO: 73024 - DNA, 20 bp, Artificial Sequence
  Description of Artificial Sequence: Synthetic oligonucleotide
  Target: LAMA2; (-) strand; PAM type: NRG; PAM sequence: TAG
atgaagtttaatttataaaa

SEQ ID NO: 73025 - DNA, 20 bp, Artificial Sequence
  Description of Artificial Sequence: Synthetic oligonucleotide
  Target: LAMA2; (-) strand; PAM type: NRG; PAM sequence: AAG
atacacacacatctttgatg

SEQ ID NO: 73026 - DNA, 20 bp, Artificial Sequence
  Description of Artificial Sequence: Synthetic oligonucleotide
  Target: LAMA2; (-) strand; PAM type: NRG; PAM sequence: AAG
agaccctcattcaatgcgtg

SEQ ID NO: 73027 - DNA, 20 bp, Artificial Sequence
  Description of Artificial Sequence: Synthetic oligonucleotide
  Target: LAMA2; (-) strand; PAM type: NRG; PAM sequence: AAG
atcctcaggggatacatcct

SEQ ID NO: 73028 - DNA, 20 bp, Artificial Sequence
  Description of Artificial Sequence: Synthetic oligonucleotide
  Target: LAMA2; (-) strand; PAM type: NRG; PAM sequence: GGG
tagtccctccttatcctcag

SEQ ID NO: 73029 - DNA, 20 bp, Artificial Sequence
  Description of Artificial Sequence: Synthetic oligonucleotide
  Target: LAMA2; (-) strand; PAM type: NRG; PAM sequence: GGG
gtagtccctccttatcctca

SEQ ID NO: 73030 - DNA, 20 bp, Artificial Sequence
  Description of Artificial Sequence: Synthetic oligonucleotide
  Target: LAMA2; (-) strand; PAM type: NRG; PAM sequence: AGG
agtagtccctccttatcctc

SEQ ID NO: 73031 - DNA, 20 bp, Artificial Sequence
  Description of Artificial Sequence: Synthetic oligonucleotide
  Target: LAMA2; (-) strand; PAM type: NRG; PAM sequence: CAG
tagtagtccctccttatcct

SEQ ID NO: 73032 - DNA, 20 bp, Artificial Sequence
  Description of Artificial Sequence: Synthetic oligonucleotide
  Target: LAMA2; (-) strand; PAM type: NRG; PAM sequence: TAG
aattaacagtagaattatag

SEQ ID NO: 73033 - DNA, 20 bp, Artificial Sequence
  Description of Artificial Sequence: Synthetic oligonucleotide
  Target: LAMA2; (-) strand; PAM type: NRG; PAM sequence: TAG
aagaattaacagtagaatta

SEQ ID NO: 73034 - DNA, 20 bp, Artificial Sequence
  Description of Artificial Sequence: Synthetic oligonucleotide
  Target: LAMA2; (-) strand; PAM type: NRG; PAM sequence: TAG
gttcctcaaagaattaacag

SEQ ID NO: 73035 - DNA, 20 bp, Artificial Sequence
  Description of Artificial Sequence: Synthetic oligonucleotide
  Target: LAMA2; (-) strand; PAM type: NRG; PAM sequence: CAG
gtggttcctcaaagaattaa

SEQ ID NO: 73036 - DNA, 20 bp, Artificial Sequence
  Description of Artificial Sequence: Synthetic oligonucleotide
  Target: LAMA2; (-) strand; PAM type: NRG; PAM sequence: AAG
aacaatatagtggttcctca

SEQ ID NO: 73037 - DNA, 20 bp, Artificial Sequence
  Description of Artificial Sequence: Synthetic oligonucleotide
  Target: LAMA2; (-) strand; PAM type: NRG; PAM sequence: TGG
cactatggaaaacaatatag

SEQ ID NO: 73038 - DNA, 20 bp, Artificial Sequence
  Description of Artificial Sequence: Synthetic oligonucleotide
  Target: LAMA2; (-) strand; PAM type: NRG; PAM sequence: TAG
agccactatggaaaacaata

SEQ ID NO: 73039 - DNA, 20 bp, Artificial Sequence
  Description of Artificial Sequence: Synthetic oligonucleotide
  Target: LAMA2; (-) strand; PAM type: NRG; PAM sequence: TGG
gtaaaatggtgcagccacta

SEQ ID NO: 73040 - DNA, 20 bp, Artificial Sequence
  Description of Artificial Sequence: Synthetic oligonucleotide
  Target: LAMA2; (-) strand; PAM type: NRG; PAM sequence: CAG
gatgggaatgtaaaatggtg

SEQ ID NO: 73041 - DNA, 20 bp, Artificial Sequence
  Description of Artificial Sequence: Synthetic oligonucleotide
  Target: LAMA2; (-) strand; PAM type: NRG; PAM sequence: TGG
tggccgatgggaatgtaaaa

SEQ ID NO: 73042 - DNA, 20 bp, Artificial Sequence
  Description of Artificial Sequence: Synthetic oligonucleotide
  Target: LAMA2; (-) strand; PAM type: NRG; PAM sequence: GGG
aatccttgtgtatggccgat

SEQ ID NO: 73043 - DNA, 20 bp, Artificial Sequence
  Description of Artificial Sequence: Synthetic oligonucleotide
  Target: LAMA2; (-) strand; PAM type: NRG; PAM sequence: TGG
gaatccttgtgtatggccga

SEQ ID NO: 73044 - DNA, 20 bp, Artificial Sequence
  Description of Artificial Sequence: Synthetic oligonucleotide
  Target: LAMA2; (-) strand; PAM type: NRG; PAM sequence: TGG
gaaattagaatccttgtgta

SEQ ID NO: 73045 - DNA, 20 bp, Artificial Sequence
  Description of Artificial Sequence: Synthetic oligonucleotide
  Target: LAMA2; (-) strand; PAM type: NRG; PAM sequence: TAG
tggcaagggtgtggagaaat

SEQ ID NO: 73046 - DNA, 20 bp, Artificial Sequence
  Description of Artificial Sequence: Synthetic oligonucleotide
  Target: LAMA2; (-) strand; PAM type: NRG; PAM sequence: GAG
gaagtgttggcaagggtgtg

SEQ ID NO: 73047 - DNA, 20 bp, Artificial Sequence
  Description of Artificial Sequence: Synthetic oligonucleotide
  Target: LAMA2; (-) strand; PAM type: NRG; PAM sequence: TGG
aagaagtgttggcaagggtg

SEQ ID NO: 73048 - DNA, 20 bp, Artificial Sequence
  Description of Artificial Sequence: Synthetic oligonucleotide
  Target: LAMA2; (-) strand; PAM type: NRG; PAM sequence: GGG
agaaaaagaagtgttggcaa

SEQ ID NO: 73049 - DNA, 20 bp, Artificial Sequence
  Description of Artificial Sequence: Synthetic oligonucleotide
  Target: LAMA2; (-) strand; PAM type: NRG; PAM sequence: AGG
cagaaaaagaagtgttggca

SEQ ID NO: 73050 - DNA, 20 bp, Artificial Sequence
  Description of Artificial Sequence: Synthetic oligonucleotide
  Target: LAMA2; (-) strand; PAM type: NRG; PAM sequence: AAG
acagaaaaagaagtgttggc

SEQ ID NO: 73051 - DNA, 20 bp, Artificial Sequence
  Description of Artificial Sequence: Synthetic oligonucleotide
  Target: LAMA2; (-) strand; PAM type: NRG; PAM sequence: TGG
aaaaacagaaaaagaagtgt

SEQ ID NO: 73052 - DNA, 20 bp, Artificial Sequence
  Description of Artificial Sequence: Synthetic oligonucleotide
  Target: LAMA2; (-) strand; PAM type: NRG; PAM sequence: AAG
aaaaaaaaaaacagaaaaag

SEQ ID NO: 73053 - DNA, 20 bp, Artificial Sequence
  Description of Artificial Sequence: Synthetic oligonucleotide
  Target: LAMA2; (-) strand; PAM type: NRG; PAM sequence: AAG
gaaaaaaaaaaaaacagaaa

SEQ ID NO: 73054 - DNA, 20 bp, Artificial Sequence
  Description of Artificial Sequence: Synthetic oligonucleotide
  Target: LAMA2; (-) strand; PAM type: NRG; PAM sequence: CAG
taaaaagaaaaaaaaaaaaa

SEQ ID NO: 73055 - DNA, 20 bp, Artificial Sequence
  Description of Artificial Sequence: Synthetic oligonucleotide
  Target: LAMA2; (-) strand; PAM type: NRG; PAM sequence: AAG
tttgatgctaactatttaaa

SEQ ID NO: 73056 - DNA, 20 bp, Artificial Sequence
  Description of Artificial Sequence: Synthetic oligonucleotide
  Target: LAMA2; (-) strand; PAM type: NRG; PAM sequence: GGG
aaattgtctcaagaaatact

SEQ ID NO: 73057 - DNA, 20 bp, Artificial Sequence
  Description of Artificial Sequence: Synthetic oligonucleotide
  Target: LAMA2; (-) strand; PAM type: NRG; PAM sequence: TGG
aaaattgtctcaagaaatac

SEQ ID NO: 73058 - DNA, 20 bp, Artificial Sequence
  Description of Artificial Sequence: Synthetic oligonucleotide
  Target: LAMA2; (-) strand; PAM type: NRG; PAM sequence: AAG
caatatttcaaaattgtctc

SEQ ID NO: 73059 - DNA, 20 bp, Artificial Sequence
  Description of Artificial Sequence: Synthetic oligonucleotide
  Target: LAMA2; (-) strand; PAM type: NRG; PAM sequence: AAG
tgctattctttccaacatca

SEQ ID NO: 73060 - DNA, 20 bp, Artificial Sequence
  Description of Artificial Sequence: Synthetic oligonucleotide
  Target: LAMA2; (-) strand; PAM type: NRG; PAM sequence: GGG
aagattctcaaattttacat

SEQ ID NO: 73061 - DNA, 20 bp, Artificial Sequence
  Description of Artificial Sequence: Synthetic oligonucleotide
  Target: LAMA2; (-) strand; PAM type: NRG; PAM sequence: TGG
caagattctcaaattttaca

SEQ ID NO: 73062 - DNA, 20 bp, Artificial Sequence
  Description of Artificial Sequence: Synthetic oligonucleotide
  Target: LAMA2; (-) strand; PAM type: NRG; PAM sequence: AAG
tgttgtatctgtcatgtttc

SEQ ID NO: 73063 - DNA, 20 bp, Artificial Sequence
  Description of Artificial Sequence: Synthetic oligonucleotide
  Target: LAMA2; (-) strand; PAM type: NRG; PAM sequence: AGG
caagctaagcaaaattgtcc

SEQ ID NO: 73064 - DNA, 20 bp, Artificial Sequence
  Description of Artificial Sequence: Synthetic oligonucleotide
  Target: LAMA2; (-) strand; PAM type: NRG; PAM sequence: CAG
acaagctaagcaaaattgtc

SEQ ID NO: 73065 - DNA, 20 bp, Artificial Sequence
  Description of Artificial Sequence: Synthetic oligonucleotide
  Target: LAMA2; (-) strand; PAM type: NRG; PAM sequence: AAG
tgtatatgtacttacaagct

SEQ ID NO: 73066 - DNA, 20 bp, Artificial Sequence
  Description of Artificial Sequence: Synthetic oligonucleotide
  Target: LAMA2; (-) strand; PAM type: NRG; PAM sequence: AAG
tgtgttgtatatgtacttac

SEQ ID NO: 73067 - DNA, 20 bp, Artificial Sequence
  Description of Artificial Sequence: Synthetic oligonucleotide
  Target: LAMA2; (-) strand; PAM type: NRG; PAM sequence: AGG
tatattttatatgtacttat

SEQ ID NO: 73068 - DNA, 20 bp, Artificial Sequence
  Description of Artificial Sequence: Synthetic oligonucleotide
  Target: LAMA2; (-) strand; PAM type: NRG; PAM sequence: TAG
atatattttatatgtactta

SEQ ID NO: 73069 - DNA, 20 bp, Artificial Sequence
  Description of Artificial Sequence: Synthetic oligonucleotide
  Target: LAMA2; (-) strand; PAM type: NRG; PAM sequence: AGG
caatatagccaaatttagaa

SEQ ID NO: 73070 - DNA, 20 bp, Artificial Sequence
  Description of Artificial Sequence: Synthetic oligonucleotide
  Target: LAMA2; (-) strand; PAM type: NRG; PAM sequence: AAG
acaatatagccaaatttaga

SEQ ID NO: 73071 - DNA, 20 bp, Artificial Sequence
  Description of Artificial Sequence: Synthetic oligonucleotide
  Target: LAMA2; (-) strand; PAM type: NRG; PAM sequence: TAG
tctgacaatatagccaaatt

SEQ ID NO: 73072 - DNA, 20 bp, Artificial Sequence
  Description of Artificial Sequence: Synthetic oligonucleotide
  Target: LAMA2; (-) strand; PAM type: NRG; PAM sequence: TAG
ttctcaggtatctgacaata

SEQ ID NO: 73073 - DNA, 20 bp, Artificial Sequence
  Description of Artificial Sequence: Synthetic oligonucleotide
  Target: LAMA2; (-) strand; PAM type: NRG; PAM sequence: AGG
ataaagataataattttctc

SEQ ID NO: 73074 - DNA, 20 bp, Artificial Sequence
  Description of Artificial Sequence: Synthetic oligonucleotide
  Target: LAMA2; (-) strand; PAM type: NRG; PAM sequence: CAG
tataaagataataattttct

SEQ ID NO: 73075 - DNA, 20 bp, Artificial Sequence
  Description of Artificial Sequence: Synthetic oligonucleotide
  Target: LAMA2; (-) strand; PAM type: NRG; PAM sequence: AAG
gacatatcacagaggctata

SEQ ID NO: 73076 - DNA, 20 bp, Artificial Sequence
  Description of Artificial Sequence: Synthetic oligonucleotide
  Target: LAMA2; (-) strand; PAM type: NRG; PAM sequence: AGG
gcattggcgacatatcacag

SEQ ID NO: 73077 - DNA, 20 bp, Artificial Sequence
  Description of Artificial Sequence: Synthetic oligonucleotide
  Target: LAMA2; (-) strand; PAM type: NRG; PAM sequence: GAG
tgcattggcgacatatcaca

SEQ ID NO: 73078 - DNA, 20 bp, Artificial Sequence
  Description of Artificial Sequence: Synthetic oligonucleotide
  Target: LAMA2; (-) strand; PAM type: NRG; PAM sequence: CAG
cttgcattggcgacatatca

SEQ ID NO: 73079 - DNA, 20 bp, Artificial Sequence
  Description of Artificial Sequence: Synthetic oligonucleotide
  Target: LAMA2; (-) strand; PAM type: NRG; PAM sequence: TGG
agttttcatgggccttgcat

SEQ ID NO: 73080 - DNA, 20 bp, Artificial Sequence
  Description of Artificial Sequence: Synthetic oligonucleotide
  Target: LAMA2; (-) strand; PAM type: NRG; PAM sequence: GGG
gactctttttgagttttcat

SEQ ID NO: 73081 - DNA, 20 bp, Artificial Sequence
  Description of Artificial Sequence: Synthetic oligonucleotide
  Target: LAMA2; (-) strand; PAM type: NRG; PAM sequence: TGG
tgactctttttgagttttca

SEQ ID NO: 73082 - DNA, 20 bp, Artificial Sequence
  Description of Artificial Sequence: Synthetic oligonucleotide
  Target: LAMA2; (-) strand; PAM type: NRG; PAM sequence: GAG
tttactaactgactcttttt

SEQ ID NO: 73083 - DNA, 20 bp, Artificial Sequence
  Description of Artificial Sequence: Synthetic oligonucleotide
  Target: LAMA2; (-) strand; PAM type: NRG; PAM sequence: GAG
aatttatacaaataataaaa

SEQ ID NO: 73084 - DNA, 20 bp, Artificial Sequence
  Description of Artificial Sequence: Synthetic oligonucleotide
  Target: LAMA2; (-) strand; PAM type: NRG; PAM sequence: AAG
ataatttatacaaataataa

SEQ ID NO: 73085 - DNA, 20 bp, Artificial Sequence
  Description of Artificial Sequence: Synthetic oligonucleotide
  Target: LAMA2; (-) strand; PAM type: NRG; PAM sequence: AAG
tctattgtaattccagacac

SEQ ID NO: 73086 - DNA, 20 bp, Artificial Sequence
  Description of Artificial Sequence: Synthetic oligonucleotide
  Target: LAMA2; (-) strand; PAM type: NRG; PAM sequence: CAG
aaatgtgtctattgtaattc

SEQ ID NO: 73087 - DNA, 20 bp, Artificial Sequence
  Description of Artificial Sequence: Synthetic oligonucleotide
  Target: LAMA2; (-) strand; PAM type: NRG; PAM sequence: GAG
gtgccagtagtaactctctg

SEQ ID NO: 73088 - DNA, 20 bp, Artificial Sequence
  Description of Artificial Sequence: Synthetic oligonucleotide
  Target: LAMA2; (-) strand; PAM type: NRG; PAM sequence: TGG
aagtgccagtagtaactctc

SEQ ID NO: 73089 - DNA, 20 bp, Artificial Sequence
  Description of Artificial Sequence: Synthetic oligonucleotide
  Target: LAMA2; (-) strand; PAM type: NRG; PAM sequence: TAG
aggatttcaaaaagtgccag

SEQ ID NO: 73090 - DNA, 20 bp, Artificial Sequence
  Description of Artificial Sequence: Synthetic oligonucleotide
  Target: LAMA2; (-) strand; PAM type: NRG; PAM sequence: CAG
aacaggatttcaaaaagtgc

SEQ ID NO: 73091 - DNA, 20 bp, Artificial Sequence
  Description of Artificial Sequence: Synthetic oligonucleotide
  Target: LAMA2; (-) strand; PAM type: NRG; PAM sequence: AAG
ggacaaaacaggatttcaaa

SEQ ID NO: 73092 - DNA, 20 bp, Artificial Sequence
  Description of Artificial Sequence: Synthetic oligonucleotide
  Target: LAMA2; (-) strand; PAM type: NRG; PAM sequence: AGG
tccagtgtctaggacaaaac

SEQ ID NO: 73093 - DNA, 20 bp, Artificial Sequence
  Description of Artificial Sequence: Synthetic oligonucleotide
  Target: LAMA2; (-) strand; PAM type: NRG; PAM sequence: CAG
gtccagtgtctaggacaaaa

SEQ ID NO: 73094 - DNA, 20 bp, Artificial Sequence
  Description of Artificial Sequence: Synthetic oligonucleotide
  Target: LAMA2; (-) strand; PAM type: NRG; PAM sequence: AGG
aaatattttgtccagtgtct

SEQ ID NO: 73095 - DNA, 20 bp, Artificial Sequence
  Description of Artificial Sequence: Synthetic oligonucleotide
  Target: LAMA2; (-) strand; PAM type: NRG; PAM sequence: TAG
aaaatattttgtccagtgtc

SEQ ID NO: 73096 - DNA, 20 bp, Artificial Sequence
  Description of Artificial Sequence: Synthetic oligonucleotide
  Target: LAMA2; (-) strand; PAM type: NRG; PAM sequence: CAG
tttatgtaaaatattttgtc

SEQ ID NO: 73097 - DNA, 20 bp, Artificial Sequence
  Description of Artificial Sequence: Synthetic oligonucleotide
  Target: LAMA2; (-) strand; PAM type: NRG; PAM sequence: AAG
acggagttgaaaagttctat

SEQ ID NO: 73098 - DNA, 20 bp, Artificial Sequence
  Description of Artificial Sequence: Synthetic oligonucleotide
  Target: LAMA2; (-) strand; PAM type: NRG; PAM sequence: AAG
atctttcttacggagttgaa

SEQ ID NO: 73099 - DNA, 20 bp, Artificial Sequence
  Description of Artificial Sequence: Synthetic oligonucleotide
  Target: LAMA2; (-) strand; PAM type: NRG; PAM sequence: GAG
ataatagtatctttcttacg

SEQ ID NO: 73100 - DNA, 20 bp, Artificial Sequence
  Description of Artificial Sequence: Synthetic oligonucleotide
  Target: LAMA2; (-) strand; PAM type: NRG; PAM sequence: CGG
ttataatagtatctttctta

SEQ ID NO: 73101 - DNA, 20 bp, Artificial Sequence
  Description of Artificial Sequence: Synthetic oligonucleotide
  Target: LAMA2; (-) strand; PAM type: NRG; PAM sequence: TAG
acaaaatgtactaattataa

SEQ ID NO: 73102 - DNA, 20 bp, Artificial Sequence
  Description of Artificial Sequence: Synthetic oligonucleotide
  Target: LAMA2; (-) strand; PAM type: NRG; PAM sequence: AAG
ctaactgtgtcattttgagg

SEQ ID NO: 73103 - DNA, 20 bp, Artificial Sequence
  Description of Artificial Sequence: Synthetic oligonucleotide
  Target: LAMA2; (-) strand; PAM type: NRG; PAM sequence: AGG
tttctaactgtgtcattttg

SEQ ID NO: 73104 - DNA, 20 bp, Artificial Sequence
  Description of Artificial Sequence: Synthetic oligonucleotide
  Target: LAMA2; (-) strand; PAM type: NRG; PAM sequence: GAG
ttttctaactgtgtcatttt

SEQ ID NO: 73105 - DNA, 20 bp, Artificial Sequence
  Description of Artificial Sequence: Synthetic oligonucleotide
  Target: LAMA2; (-) strand; PAM type: NRG; PAM sequence: TGG
gctttgacatcagaaagaac

SEQ ID NO: 73106 - DNA, 20 bp, Artificial Sequence
  Description of Artificial Sequence: Synthetic oligonucleotide
  Target: LAMA2; (-) strand; PAM type: NRG; PAM sequence: AAG
cggcaggctttgacatcaga

SEQ ID NO: 73107 - DNA, 20 bp, Artificial Sequence
  Description of Artificial Sequence: Synthetic oligonucleotide
  Target: LAMA2; (-) strand; PAM type: NRG; PAM sequence: CAG
tacacggcaggctttgacat

SEQ ID NO: 73108 - DNA, 20 bp, Artificial Sequence
  Description of Artificial Sequence: Synthetic oligonucleotide
  Target: LAMA2; (-) strand; PAM type: NRG; PAM sequence: AGG
tcatctggagtatacacggc

SEQ ID NO: 73109 - DNA, 20 bp, Artificial Sequence
  Description of Artificial Sequence: Synthetic oligonucleotide
  Target: LAMA2; (-) strand; PAM type: NRG; PAM sequence: CAG
gtcatctggagtatacacgg

SEQ ID NO: 73110 - DNA, 20 bp, Artificial Sequence
  Description of Artificial Sequence: Synthetic oligonucleotide
  Target: LAMA2; (-) strand; PAM type: NRG; PAM sequence: CGG
caggtcatctggagtataca

SEQ ID NO: 73111 - DNA, 20 bp, Artificial Sequence
  Description of Artificial Sequence: Synthetic oligonucleotide
  Target: LAMA2; (-) strand; PAM type: NRG; PAM sequence: GAG
tctaaggttcaggtcatctg

SEQ ID NO: 73112 - DNA, 20 bp, Artificial Sequence
  Description of Artificial Sequence: Synthetic oligonucleotide
  Target: LAMA2; (-) strand; PAM type: NRG; PAM sequence: TGG
actctaaggttcaggtcatc

SEQ ID NO: 73113 - DNA, 20 bp, Artificial Sequence
  Description of Artificial Sequence: Synthetic oligonucleotide
  Target: LAMA2; (-) strand; PAM type: NRG; PAM sequence: AGG
ttttagttactctaaggttc

SEQ ID NO: 73114 - DNA, 20 bp, Artificial Sequence
  Description of Artificial Sequence: Synthetic oligonucleotide
  Target: LAMA2; (-) strand; PAM type: NRG; PAM sequence: CAG
cttttagttactctaaggtt

SEQ ID NO: 73115 - DNA, 20 bp, Artificial Sequence
  Description of Artificial Sequence: Synthetic oligonucleotide
  Target: LAMA2; (-) strand; PAM type: NRG; PAM sequence: AGG
tgatgcttttagttactcta

SEQ ID NO: 73116 - DNA, 20 bp, Artificial Sequence
  Description of Artificial Sequence: Synthetic oligonucleotide
  Target: LAMA2; (-) strand; PAM type: NRG; PAM sequence: AAG
ctgatgcttttagttactct

SEQ ID NO: 73117 - DNA, 20 bp, Artificial Sequence
  Description of Artificial Sequence: Synthetic oligonucleotide
  Target: LAMA2; (-) strand; PAM type: NRG; PAM sequence: TAG
cagagaagccctgatgcttt

SEQ ID NO: 73118 - DNA, 20 bp, Artificial Sequence
  Description of Artificial Sequence: Synthetic oligonucleotide
  Target: LAMA2; (-) strand; PAM type: NRG; PAM sequence: AAG
ctcacaattatatatcagag

SEQ ID NO: 73119 - DNA, 20 bp, Artificial Sequence
  Description of Artificial Sequence: Synthetic oligonucleotide
  Target: LAMA2; (-) strand; PAM type: NRG; PAM sequence: GAG
attctcacaattatatatca

SEQ ID NO: 73120 - DNA, 20 bp, Artificial Sequence
  Description of Artificial Sequence: Synthetic oligonucleotide
  Target: LAMA2; (-) strand; PAM type: NRG; PAM sequence: CAG
agattctcacaattatatat

SEQ ID NO: 73121 - DNA, 20 bp, Artificial Sequence
  Description of Artificial Sequence: Synthetic oligonucleotide
  Target: LAMA2; (-) strand; PAM type: NRG; PAM sequence: GAG
aatttaatcttgtttttagt

SEQ ID NO: 73122 - DNA, 20 bp, Artificial Sequence
  Description of Artificial Sequence: Synthetic oligonucleotide
  Target: LAMA2; (-) strand; PAM type: NRG; PAM sequence: TAG
tagtaatttaatcttgtttt

SEQ ID NO: 73123 - DNA, 20 bp, Artificial Sequence
  Description of Artificial Sequence: Synthetic oligonucleotide
  Target: LAMA2; (-) strand; PAM type: NRG; PAM sequence: TAG
taaattctaagactcctctg

SEQ ID NO: 73124 - DNA, 20 bp, Artificial Sequence
  Description of Artificial Sequence: Synthetic oligonucleotide
  Target: LAMA2; (-) strand; PAM type: NRG; PAM sequence: AAG
tttttagagttttaaattct

SEQ ID NO: 73125 - DNA, 20 bp, Artificial Sequence
  Description of Artificial Sequence: Synthetic oligonucleotide
  Target: LAMA2; (-) strand; PAM type: NRG; PAM sequence: GAG
atcctaagtttcacttttta

SEQ ID NO: 73126 - DNA, 20 bp, Artificial Sequence
  Description of Artificial Sequence: Synthetic oligonucleotide
  Target: LAMA2; (-) strand; PAM type: NRG; PAM sequence: TAG
aaatcctaagtttcactttt

SEQ ID NO: 73127 - DNA, 20 bp, Artificial Sequence
  Description of Artificial Sequence: Synthetic oligonucleotide
  Target: LAMA2; (-) strand; PAM type: NRG; PAM sequence: AAG
aaacatttttggtaaatcct

SEQ ID NO: 73128 - DNA, 20 bp, Artificial Sequence
  Description of Artificial Sequence: Synthetic oligonucleotide
  Target: LAMA2; (-) strand; PAM type: NRG; PAM sequence: TGG
tgagaagttagaaacatttt

SEQ ID NO: 73129 - DNA, 20 bp, Artificial Sequence
  Description of Artificial Sequence: Synthetic oligonucleotide
  Target: LAMA2; (-) strand; PAM type: NRG; PAM sequence: TAG
catacatgtatatgagaagt

SEQ ID NO: 73130 - DNA, 20 bp, Artificial Sequence
  Description of Artificial Sequence: Synthetic oligonucleotide
  Target: LAMA2; (-) strand; PAM type: NRG; PAM sequence: AAG
catccatacatgtatatgag

SEQ ID NO: 73131 - DNA, 20 bp, Artificial Sequence
  Description of Artificial Sequence: Synthetic oligonucleotide
  Target: LAMA2; (-) strand; PAM type: NRG; PAM sequence: GAG
ttacatccatacatgtatat

SEQ ID NO: 73132 - DNA, 20 bp, Artificial Sequence
  Description of Artificial Sequence: Synthetic oligonucleotide
  Target: LAMA2; (-) strand; PAM type: NRG; PAM sequence: AGG
aataatcaacccagcatttc

SEQ ID NO: 73133 - DNA, 20 bp, Artificial Sequence
  Description of Artificial Sequence: Synthetic oligonucleotide
  Target: LAMA2; (-) strand; PAM type: NRG; PAM sequence: CAG
caataatcaacccagcattt

SEQ ID NO: 73134 - DNA, 20 bp, Artificial Sequence
  Description of Artificial Sequence: Synthetic oligonucleotide
  Target: LAMA2; (-) strand; PAM type: NRG; PAM sequence: CAG
ggacatttcaataatcaacc

SEQ ID NO: 73135 - DNA, 20 bp, Artificial Sequence
  Description of Artificial Sequence: Synthetic oligonucleotide
  Target: LAMA2; (-) strand; PAM type: NRG; PAM sequence: TGG
ggtaaatttgtaagttcata

SEQ ID NO: 73136 - DNA, 20 bp, Artificial Sequence
  Description of Artificial Sequence: Synthetic oligonucleotide
  Target: LAMA2; (-) strand; PAM type: NRG; PAM sequence: AAG
tttttttctggtaaatttgt

SEQ ID NO: 73137 - DNA, 20 bp, Artificial Sequence
  Description of Artificial Sequence: Synthetic oligonucleotide
  Target: LAMA2; (-) strand; PAM type: NRG; PAM sequence: TGG
ggggtagtttgatttttttc

SEQ ID NO: 73138 - DNA, 20 bp, Artificial Sequence
  Description of Artificial Sequence: Synthetic oligonucleotide
  Target: LAMA2; (-) strand; PAM type: NRG; PAM sequence: TAG
ttgcccactttttgatgggg

SEQ ID NO: 73139 - DNA, 20 bp, Artificial Sequence
  Description of Artificial Sequence: Synthetic oligonucleotide
  Target: LAMA2; (-) strand; PAM type: NRG; PAM sequence: GGG
cctttgcccactttttgatg

SEQ ID NO: 73140 - DNA, 20 bp, Artificial Sequence
  Description of Artificial Sequence: Synthetic oligonucleotide
  Target: LAMA2; (-) strand; PAM type: NRG; PAM sequence: GGG
tcctttgcccactttttgat

SEQ ID NO: 73141 - DNA, 20 bp, Artificial Sequence
  Description of Artificial Sequence: Synthetic oligonucleotide
  Target: LAMA2; (-) strand; PAM type: NRG; PAM sequence: TGG
atcctttgcccactttttga

SEQ ID NO: 73142 - DNA, 20 bp, Artificial Sequence
  Description of Artificial Sequence: Synthetic oligonucleotide
  Target: LAMA2; (-) strand; PAM type: NRG; PAM sequence: AAG
cataaatgtcttcttttgag

SEQ ID NO: 73143 - DNA, 20 bp, Artificial Sequence
  Description of Artificial Sequence: Synthetic oligonucleotide
  Target: LAMA2; (-) strand; PAM type: NRG; PAM sequence: GAG
ctgcataaatgtcttctttt

SEQ ID NO: 73144 - DNA, 20 bp, Artificial Sequence
  Description of Artificial Sequence: Synthetic oligonucleotide
  Target: LAMA2; (-) strand; PAM type: NRG; PAM sequence: TGG
gcattttttcatgtgtctgt

SEQ ID NO: 73145 - DNA, 20 bp, Artificial Sequence
  Description of Artificial Sequence: Synthetic oligonucleotide
  Target: LAMA2; (-) strand; PAM type: NRG; PAM sequence: GAG
ctctgaaggccagtgatgac

SEQ ID NO: 73146 - DNA, 20 bp, Artificial Sequence
  Description of Artificial Sequence: Synthetic oligonucleotide
  Target: LAMA2; (-) strand; PAM type: NRG; PAM sequence: CAG
atttgcatttctctgaaggc

SEQ ID NO: 73147 - DNA, 20 bp, Artificial Sequence
  Description of Artificial Sequence: Synthetic oligonucleotide
  Target: LAMA2; (-) strand; PAM type: NRG; PAM sequence: AGG
tttgatttgcatttctctga

SEQ ID NO: 73148 - DNA, 20 bp, Artificial Sequence
  Description of Artificial Sequence: Synthetic oligonucleotide
  Target: LAMA2; (-) strand; PAM type: NRG; PAM sequence: AAG
ttttgatttgcatttctctg

SEQ ID NO: 73149 - DNA, 20 bp, Artificial Sequence
  Description of Artificial Sequence: Synthetic oligonucleotide
  Target: LAMA2; (-) strand; PAM type: NRG; PAM sequence: TGG
tgtgggatggtatctctttg

SEQ ID NO: 73150 - DNA, 20 bp, Artificial Sequence
  Description of Artificial Sequence: Synthetic oligonucleotide
  Target: LAMA2; (-) strand; PAM type: NRG; PAM sequence: TGG
ccattctaactggtgtggga

SEQ ID NO: 73151 - DNA, 20 bp, Artificial Sequence
  Description of Artificial Sequence: Synthetic oligonucleotide
  Target: LAMA2; (-) strand; PAM type: NRG; PAM sequence: GGG
atcgccattctaactggtgt

SEQ ID NO: 73152 - DNA, 20 bp, Artificial Sequence
  Description of Artificial Sequence: Synthetic oligonucleotide
  Target: LAMA2; (-) strand; PAM type: NRG; PAM sequence: TGG
gatcgccattctaactggtg

SEQ ID NO: 73153 - DNA, 20 bp, Artificial Sequence
  Description of Artificial Sequence: Synthetic oligonucleotide
  Target: LAMA2; (-) strand; PAM type: NRG; PAM sequence: TGG
ttaatgatcgccattctaac

SEQ ID NO: 73154 - DNA, 20 bp, Artificial Sequence
  Description of Artificial Sequence: Synthetic oligonucleotide
  Target: LAMA2; (-) strand; PAM type: NRG; PAM sequence: CAG
ctatttctccacatcctctc

SEQ ID NO: 73155 - DNA, 20 bp, Artificial Sequence
  Description of Artificial Sequence: Synthetic oligonucleotide
  Target: LAMA2; (-) strand; PAM type: NRG; PAM sequence: AAG
cagtcccgccaacggtgtaa

SEQ ID NO: 73156 - DNA, 20 bp, Artificial Sequence
  Description of Artificial Sequence: Synthetic oligonucleotide
  Target: LAMA2; (-) strand; PAM type: NRG; PAM sequence: CGG
ctagtttacagtcccgccaa

SEQ ID NO: 73157 - DNA, 20 bp, Artificial Sequence
  Description of Artificial Sequence: Synthetic oligonucleotide
  Target: LAMA2; (-) strand; PAM type: NRG; PAM sequence: CAG
acaatggtttaactagttta

SEQ ID NO: 73158 - DNA, 20 bp, Artificial Sequence
  Description of Artificial Sequence: Synthetic oligonucleotide
  Target: LAMA2; (-) strand; PAM type: NRG; PAM sequence: TAG
gtcttccacaatggtttaac

SEQ ID NO: 73159 - DNA, 20 bp, Artificial Sequence
  Description of Artificial Sequence: Synthetic oligonucleotide
  Target: LAMA2; (-) strand; PAM type: NRG; PAM sequence: TGG
cgccacactgtcttccacaa

SEQ ID NO: 73160 - DNA, 20 bp, Artificial Sequence
  Description of Artificial Sequence: Synthetic oligonucleotide
  Target: LAMA2; (-) strand; PAM type: NRG; PAM sequence: AGG
tttctagttctagatccttg

SEQ ID NO: 73161 - DNA, 20 bp, Artificial Sequence
  Description of Artificial Sequence: Synthetic oligonucleotide
  Target: LAMA2; (-) strand; PAM type: NRG; PAM sequence: GAG
atttctagttctagatcctt

SEQ ID NO: 73162 - DNA, 20 bp, Artificial Sequence
  Description of Artificial Sequence: Synthetic oligonucleotide
  Target: LAMA2; (-) strand; PAM type: NRG; PAM sequence: TAG
tcaaatggtatttctagttc

SEQ ID NO: 73163 - DNA, 20 bp, Artificial Sequence
  Description of Artificial Sequence: Synthetic oligonucleotide
  Target: LAMA2; (-) strand; PAM type: NRG; PAM sequence: TAG
gctgggtcaaatggtatttc

SEQ ID NO: 73164 - DNA, 20 bp, Artificial Sequence
  Description of Artificial Sequence: Synthetic oligonucleotide
  Target: LAMA2; (-) strand; PAM type: NRG; PAM sequence: TGG
aatgggatggctgggtcaaa

SEQ ID NO: 73165 - DNA, 20 bp, Artificial Sequence
  Description of Artificial Sequence: Synthetic oligonucleotide
  Target: LAMA2; (-) strand; PAM type: NRG; PAM sequence: GGG
tacccagtaatgggatggct

SEQ ID NO: 73166 - DNA, 20 bp, Artificial Sequence
  Description of Artificial Sequence: Synthetic oligonucleotide
  Target: LAMA2; (-) strand; PAM type: NRG; PAM sequence: TGG
atacccagtaatgggatggc

SEQ ID NO: 73167 - DNA, 20 bp, Artificial Sequence
  Description of Artificial Sequence: Synthetic oligonucleotide
  Target: LAMA2; (-) strand; PAM type: NRG; PAM sequence: TGG
gtatatacccagtaatggga

SEQ ID NO: 73168 - DNA, 20 bp, Artificial Sequence
  Description of Artificial Sequence: Synthetic oligonucleotide
  Target: LAMA2; (-) strand; PAM type: NRG; PAM sequence: GGG
ttgggtatatacccagtaat

SEQ ID NO: 73169 - DNA, 20 bp, Artificial Sequence
  Description of Artificial Sequence: Synthetic oligonucleotide
  Target: LAMA2; (-) strand; PAM type: NRG; PAM sequence: TGG
tttgggtatatacccagtaa

SEQ ID NO: 73170 - DNA, 20 bp, Artificial Sequence
  Description of Artificial Sequence: Synthetic oligonucleotide
  Target: LAMA2; (-) strand; PAM type: NRG; PAM sequence: CAG
taatcctttgggtatatacc

SEQ ID NO: 73171 - DNA, 20 bp, Artificial Sequence
  Description of Artificial Sequence: Synthetic oligonucleotide
  Target: LAMA2; (-) strand; PAM type: NRG; PAM sequence: GGG
agcatgatttataatccttt

SEQ ID NO: 73172 - DNA, 20 bp, Artificial Sequence
  Description of Artificial Sequence: Synthetic oligonucleotide
  Target: LAMA2; (-) strand; PAM type: NRG; PAM sequence: TGG
cagcatgatttataatcctt

SEQ ID NO: 73173 - DNA, 20 bp, Artificial Sequence
  Description of Artificial Sequence: Synthetic oligonucleotide
  Target: LAMA2; (-) strand; PAM type: NRG; PAM sequence: CAG
gtgtgcatgtgtctttatag

SEQ ID NO: 73174 - DNA, 20 bp, Artificial Sequence
  Description of Artificial Sequence: Synthetic oligonucleotide
  Target: LAMA2; (-) strand; PAM type: NRG; PAM sequence: TAG
tatgtgtgcatgtgtcttta

SEQ ID NO: 73175 - DNA, 20 bp, Artificial Sequence
  Description of Artificial Sequence: Synthetic oligonucleotide
  Target: LAMA2; (-) strand; PAM type: NRG; PAM sequence: TAG
caagtctttgctattgtgaa

SEQ ID NO: 73176 - DNA, 20 bp, Artificial Sequence
  Description of Artificial Sequence: Synthetic oligonucleotide
  Target: LAMA2; (-) strand; PAM type: NRG; PAM sequence: AAG
tggacatttgggttggttcc

SEQ ID NO: 73177 - DNA, 20 bp, Artificial Sequence
  Description of Artificial Sequence: Synthetic oligonucleotide
  Target: LAMA2; (-) strand; PAM type: NRG; PAM sequence: TGG
tcattgatggacatttgggt

SEQ ID NO: 73178 - DNA, 20 bp, Artificial Sequence
  Description of Artificial Sequence: Synthetic oligonucleotide
  Target: LAMA2; (-) strand; PAM type: NRG; PAM sequence: GGG
tctatcattgatggacattt

SEQ ID NO: 73179 - DNA, 20 bp, Artificial Sequence
  Description of Artificial Sequence: Synthetic oligonucleotide
  Target: LAMA2; (-) strand; PAM type: NRG; PAM sequence: TGG
gtctatcattgatggacatt

SEQ ID NO: 73180 - DNA, 20 bp, Artificial Sequence
  Description of Artificial Sequence: Synthetic oligonucleotide
  Target: LAMA2; (-) strand; PAM type: NRG; PAM sequence: TGG
ttaaaccagtctatcattga

SEQ ID NO: 73181 - DNA, 20 bp, Artificial Sequence
  Description of Artificial Sequence: Synthetic oligonucleotide
  Target: LAMA2; (-) strand; PAM type: NRG; PAM sequence: CAG
tgtgccacattttcttaaac

SEQ ID NO: 73182 - DNA, 20 bp, Artificial Sequence
  Description of Artificial Sequence: Synthetic oligonucleotide
  Target: LAMA2; (-) strand; PAM type: NRG; PAM sequence: TGG
tatggctacatagtattcca

SEQ ID NO: 73183 - DNA, 20 bp, Artificial Sequence
  Description of Artificial Sequence: Synthetic oligonucleotide
  Target: LAMA2; (-) strand; PAM type: NRG; PAM sequence: TAG
cttcattttttatggctaca

SEQ ID NO: 73184 - DNA, 20 bp, Artificial Sequence
  Description of Artificial Sequence: Synthetic oligonucleotide
  Target: LAMA2; (-) strand; PAM type: NRG; PAM sequence: TGG
catgaactcttcatttttta

SEQ ID NO: 73185 - DNA, 20 bp, Artificial Sequence
  Description of Artificial Sequence: Synthetic oligonucleotide
  Target: LAMA2; (-) strand; PAM type: NRG; PAM sequence: AGG
cttcatccatatccctacaa

SEQ ID NO: 73186 - DNA, 20 bp, Artificial Sequence
  Description of Artificial Sequence: Synthetic oligonucleotide
  Target: LAMA2; (-) strand; PAM type: NRG; PAM sequence: AAG
gcttcatccatatccctaca

SEQ ID NO: 73187 - DNA, 20 bp, Artificial Sequence
  Description of Artificial Sequence: Synthetic oligonucleotide
  Target: LAMA2; (-) strand; PAM type: NRG; PAM sequence: CAG
ttgctgagaatgatggtttc

SEQ ID NO: 73188 - DNA, 20 bp, Artificial Sequence
  Description of Artificial Sequence: Synthetic oligonucleotide
  Target: LAMA2; (-) strand; PAM type: NRG; PAM sequence: TGG
ctatagtttgctgagaatga

SEQ ID NO: 73189 - DNA, 20 bp, Artificial Sequence
  Description of Artificial Sequence: Synthetic oligonucleotide
  Target: LAMA2; (-) strand; PAM type: NRG; PAM sequence: GAG
tgtccttgctatagtttgct

SEQ ID NO: 73190 - DNA, 20 bp, Artificial Sequence
  Description of Artificial Sequence: Synthetic oligonucleotide
  Target: LAMA2; (-) strand; PAM type: NRG; PAM sequence: TAG
ttggtttcctgtccttgcta

SEQ ID NO: 73191 - DNA, 20 bp, Artificial Sequence
  Description of Artificial Sequence: Synthetic oligonucleotide
  Target: LAMA2; (-) strand; PAM type: NRG; PAM sequence: TGG
gagtgagaacatgcggtgtt

SEQ ID NO: 73192 - DNA, 20 bp, Artificial Sequence
  Description of Artificial Sequence: Synthetic oligonucleotide
  Target: LAMA2; (-) strand; PAM type: NRG; PAM sequence: CGG
cacctatgagtgagaacatg

SEQ ID NO: 73193 - DNA, 20 bp, Artificial Sequence
  Description of Artificial Sequence: Synthetic oligonucleotide
  Target: LAMA2; (-) strand; PAM type: NRG; PAM sequence: GAG
ttcgtttcccacctatgagt

SEQ ID NO: 73194 - DNA, 20 bp, Artificial Sequence
  Description of Artificial Sequence: Synthetic oligonucleotide
  Target: LAMA2; (-) strand; PAM type: NRG; PAM sequence: GAG
attgttcgtttcccacctat

SEQ ID NO: 73195 - DNA, 20 bp, Artificial Sequence
  Description of Artificial Sequence: Synthetic oligonucleotide
  Target: LAMA2; (-) strand; PAM type: NRG; PAM sequence: AAG
atgttacccaccctgtgtcc

SEQ ID NO: 73196 - DNA, 20 bp, Artificial Sequence
  Description of Artificial Sequence: Synthetic oligonucleotide
  Target: LAMA2; (-) strand; PAM type: NRG; PAM sequence: CGG
ccccaccccacaacaggccc

SEQ ID NO: 73197 - DNA, 20 bp, Artificial Sequence
  Description of Artificial Sequence: Synthetic oligonucleotide
  Target: LAMA2; (-) strand; PAM type: NRG; PAM sequence: AGG
ccctcaccccaccccacaac

SEQ ID NO: 73198 - DNA, 20 bp, Artificial Sequence
  Description of Artificial Sequence: Synthetic oligonucleotide
  Target: LAMA2; (-) strand; PAM type: NRG; PAM sequence: CAG
cccctcaccccaccccacaa

SEQ ID NO: 73199 - DNA, 20 bp, Artificial Sequence
  Description of Artificial Sequence: Synthetic oligonucleotide
  Target: LAMA2; (-) strand; PAM type: NRG; PAM sequence: AGG
attaactcgtcatttacatt

SEQ ID NO: 73200 - DNA, 20 bp, Artificial Sequence
  Description of Artificial Sequence: Synthetic oligonucleotide
  Target: LAMA2; (-) strand; PAM type: NRG; PAM sequence: TAG
cattaactcgtcatttacat

SEQ ID NO: 73201 - DNA, 20 bp, Artificial Sequence
  Description of Artificial Sequence: Synthetic oligonucleotide
  Target: LAMA2; (-) strand; PAM type: NRG; PAM sequence: TGG
tatgtatacatgtgccatgt

SEQ ID NO: 73202 - DNA, 20 bp, Artificial Sequence
  Description of Artificial Sequence: Synthetic oligonucleotide
  Target: LAMA2; (-) strand; PAM type: NRG; PAM sequence: AGG
gatacatgtgcacaatgtgc

SEQ ID NO: 73203 - DNA, 20 bp, Artificial Sequence
  Description of Artificial Sequence: Synthetic oligonucleotide
  Target: LAMA2; (-) strand; PAM type: NRG; PAM sequence: CAG
ggatacatgtgcacaatgtg

SEQ ID NO: 73204 - DNA, 20 bp, Artificial Sequence
  Description of Artificial Sequence: Synthetic oligonucleotide
  Target: LAMA2; (-) strand; PAM type: NRG; PAM sequence: AGG
attattatgctttaagttat

SEQ ID NO: 73205 - DNA, 20 bp, Artificial Sequence
  Description of Artificial Sequence: Synthetic oligonucleotide
  Target: LAMA2; (-) strand; PAM type: NRG; PAM sequence: TAG
tattattatgctttaagtta

SEQ ID NO: 73206 - DNA, 20 bp, Artificial Sequence
  Description of Artificial Sequence: Synthetic oligonucleotide
  Target: LAMA2; (-) strand; PAM type: NRG; PAM sequence: AAG
tttttttattattatgcttt

SEQ ID NO: 73207 - DNA, 20 bp, Artificial Sequence
  Description of Artificial Sequence: Synthetic oligonucleotide
  Target: LAMA2; (-) strand; PAM type: NRG; PAM sequence: AAG
acggacatttcatttttttt

SEQ ID NO: 73208 - DNA, 20 bp, Artificial Sequence
  Description of Artificial Sequence: Synthetic oligonucleotide
  Target: LAMA2; (-) strand; PAM type: NRG; PAM sequence: CGG
gaaaaaatcaagaaaatata

SEQ ID NO: 73209 - DNA, 20 bp, Artificial Sequence
  Description of Artificial Sequence: Synthetic oligonucleotide
  Target: LAMA2; (-) strand; PAM type: NRG; PAM sequence: AAG
caaaacatttggaaaaaatc

SEQ ID NO: 73210 - DNA, 20 bp, Artificial Sequence
  Description of Artificial Sequence: Synthetic oligonucleotide
  Target: LAMA2; (-) strand; PAM type: NRG; PAM sequence: TGG
aaaactttcttcaaaacatt

SEQ ID NO: 73211 - DNA, 20 bp, Artificial Sequence
  Description of Artificial Sequence: Synthetic oligonucleotide
  Target: LAMA2; (-) strand; PAM type: NRG; PAM sequence: TAG
tacttaaattgaccaatgaa

SEQ ID NO: 73212 - DNA, 20 bp, Artificial Sequence
  Description of Artificial Sequence: Synthetic oligonucleotide
  Target: LAMA2; (-) strand; PAM type: NRG; PAM sequence: AAG
tctgaatgatttcttaaaag

SEQ ID NO: 73213 - DNA, 20 bp, Artificial Sequence
  Description of Artificial Sequence: Synthetic oligonucleotide
  Target: LAMA2; (-) strand; PAM type: NRG; PAM sequence: AAG
atttctgaatgatttcttaa

SEQ ID NO: 73214 - DNA, 20 bp, Artificial Sequence
  Description of Artificial Sequence: Synthetic oligonucleotide
  Target: LAMA2; (-) strand; PAM type: NRG; PAM sequence: AGG
cccaaaaagaattacgatca

SEQ ID NO: 73215 - DNA, 20 bp, Artificial Sequence
  Description of Artificial Sequence: Synthetic oligonucleotide
  Target: LAMA2; (-) strand; PAM type: NRG; PAM sequence: AAG
acccaaaaagaattacgatc

SEQ ID NO: 73216 - DNA, 20 bp, Artificial Sequence
  Description of Artificial Sequence: Synthetic oligonucleotide
  Target: LAMA2; (-) strand; PAM type: NRG; PAM sequence: AAG
tgcaattgaaattacccaaa

SEQ ID NO: 73217 - DNA, 20 bp, Artificial Sequence
  Description of Artificial Sequence: Synthetic oligonucleotide
  Target: LAMA2; (-) strand; PAM type: NRG; PAM sequence: CAG
ctttctcaaatcttccagca

SEQ ID NO: 73218 - DNA, 20 bp, Artificial Sequence
  Description of Artificial Sequence: Synthetic oligonucleotide
  Target: LAMA2; (-) strand; PAM type: NRG; PAM sequence: CAG
ataatctttctcaaatcttc

SEQ ID NO: 73219 - DNA, 20 bp, Artificial Sequence
  Description of Artificial Sequence: Synthetic oligonucleotide
  Target: LAMA2; (-) strand; PAM type: NRG; PAM sequence: TGG
tggaaatgattttgacaaaa

SEQ ID NO: 73220 - DNA, 20 bp, Artificial Sequence
  Description of Artificial Sequence: Synthetic oligonucleotide
  Target: LAMA2; (-) strand; PAM type: NRG; PAM sequence: TGG
gaaaaaaggacttaaacttc

SEQ ID NO: 73221 - DNA, 20 bp, Artificial Sequence
  Description of Artificial Sequence: Synthetic oligonucleotide
  Target: LAMA2; (-) strand; PAM type: NRG; PAM sequence: AGG
acactaaaaatgaagaaaaa

SEQ ID NO: 73222 - DNA, 20 bp, Artificial Sequence
  Description of Artificial Sequence: Synthetic oligonucleotide
  Target: LAMA2; (-) strand; PAM type: NRG; PAM sequence: AAG
cacactaaaaatgaagaaaa

SEQ ID NO: 73223 - DNA, 20 bp, Artificial Sequence
  Description of Artificial Sequence: Synthetic oligonucleotide
  Target: LAMA2; (-) strand; PAM type: NRG; PAM sequence: AAG
aatgaatcacactaaaaatg

SEQ ID NO: 73224 - DNA, 20 bp, Artificial Sequence
  Description of Artificial Sequence: Synthetic oligonucleotide
  Target: LAMA2; (-) strand; PAM type: NRG; PAM sequence: AGG
gaagttaaatgttcttcctt

SEQ ID NO: 73225 - DNA, 20 bp, Artificial Sequence
  Description of Artificial Sequence: Synthetic oligonucleotide
  Target: LAMA2; (-) strand; PAM type: NRG; PAM sequence: TAG
agaagttaaatgttcttcct

SEQ ID NO: 73226 - DNA, 20 bp, Artificial Sequence
  Description of Artificial Sequence: Synthetic oligonucleotide
  Target: LAMA2; (-) strand; PAM type: NRG; PAM sequence: AAG
ttccttgtgaatactgagag

SEQ ID NO: 73227 - DNA, 20 bp, Artificial Sequence
  Description of Artificial Sequence: Synthetic oligonucleotide
  Target: LAMA2; (-) strand; PAM type: NRG; PAM sequence: GAG
gtattccttgtgaatactga

SEQ ID NO: 73228 - DNA, 20 bp, Artificial Sequence
  Description of Artificial Sequence: Synthetic oligonucleotide
  Target: LAMA2; (-) strand; PAM type: NRG; PAM sequence: GAG
aggtattccttgtgaatact

SEQ ID NO: 73229 - DNA, 20 bp, Artificial Sequence
  Description of Artificial Sequence: Synthetic oligonucleotide
  Target: LAMA2; (-) strand; PAM type: NRG; PAM sequence: AGG
tggtacttaaacattcaagc

SEQ ID NO: 73230 - DNA, 20 bp, Artificial Sequence
  Description of Artificial Sequence: Synthetic oligonucleotide
  Target: LAMA2; (-) strand; PAM type: NRG; PAM sequence: CAG
ttggtacttaaacattcaag

SEQ ID NO: 73231 - DNA, 20 bp, Artificial Sequence
  Description of Artificial Sequence: Synthetic oligonucleotide
  Target: LAMA2; (-) strand; PAM type: NRG; PAM sequence: AAG
ctgttggtacttaaacattc

SEQ ID NO: 73232 - DNA, 20 bp, Artificial Sequence
  Description of Artificial Sequence: Synthetic oligonucleotide
  Target: LAMA2; (-) strand; PAM type: NRG; PAM sequence: TGG
aagaactttaaatcctctgt

SEQ ID NO: 73233 - DNA, 20 bp, Artificial Sequence
  Description of Artificial Sequence: Synthetic oligonucleotide
  Target: LAMA2; (-) strand; PAM type: NRG; PAM sequence: AAG
atttaatgctcataagtaat

SEQ ID NO: 73234 - DNA, 20 bp, Artificial Sequence
  Description of Artificial Sequence: Synthetic oligonucleotide
  Target: LAMA2; (-) strand; PAM type: NRG; PAM sequence: AAG
tgaattcatttaatgctcat

SEQ ID NO: 73235 - DNA, 20 bp, Artificial Sequence
  Description of Artificial Sequence: Synthetic oligonucleotide
  Target: LAMA2; (-) strand; PAM type: NRG; PAM sequence: GAG
tgcttcttctataaaatttg

SEQ ID NO: 73236 - DNA, 20 bp, Artificial Sequence
  Description of Artificial Sequence: Synthetic oligonucleotide
  Target: LAMA2; (-) strand; PAM type: NRG; PAM sequence: TGG
aatgcttcttctataaaatt

SEQ ID NO: 73237 - DNA, 20 bp, Artificial Sequence
  Description of Artificial Sequence: Synthetic oligonucleotide
  Target: LAMA2; (-) strand; PAM type: NRG; PAM sequence: CAG
ttatccttattttctatctt

SEQ ID NO: 73238 - DNA, 20 bp, Artificial Sequence
  Description of Artificial Sequence: Synthetic oligonucleotide
  Target: LAMA2; (-) strand; PAM type: NRG; PAM sequence: AAG
cacattgataatgatatgaa

SEQ ID NO: 73239 - DNA, 20 bp, Artificial Sequence
  Description of Artificial Sequence: Synthetic oligonucleotide
  Target: LAMA2; (-) strand; PAM type: NRG; PAM sequence: TAG
tttttaatagcaagttgttt

SEQ ID NO: 73240 - DNA, 20 bp, Artificial Sequence
  Description of Artificial Sequence: Synthetic oligonucleotide
  Target: LAMA2; (-) strand; PAM type: NRG; PAM sequence: AAG
gataaatggtttttaatagc

SEQ ID NO: 73241 - DNA, 20 bp, Artificial Sequence
  Description of Artificial Sequence: Synthetic oligonucleotide
  Target: LAMA2; (-) strand; PAM type: NRG; PAM sequence: TAG
ttctgataaatggtttttaa

SEQ ID NO: 73242 - DNA, 20 bp, Artificial Sequence
  Description of Artificial Sequence: Synthetic oligonucleotide
  Target: LAMA2; (-) strand; PAM type: NRG; PAM sequence: TGG
ttaaacaagtttctgataaa

SEQ ID NO: 73243 - DNA, 20 bp, Artificial Sequence
  Description of Artificial Sequence: Synthetic oligonucleotide
  Target: LAMA2; (-) strand; PAM type: NRG; PAM sequence: AAG
atttgacatattaattaaac

SEQ ID NO: 73244 - DNA, 20 bp, Artificial Sequence
  Description of Artificial Sequence: Synthetic oligonucleotide
  Target: LAMA2; (-) strand; PAM type: NRG; PAM sequence: CAG
ttatacatgatttaaaaacc

SEQ ID NO: 73245 - DNA, 20 bp, Artificial Sequence
  Description of Artificial Sequence: Synthetic oligonucleotide
  Target: LAMA2; (-) strand; PAM type: NRG; PAM sequence: AGG
aaagttctcaatatgttttt

SEQ ID NO: 73246 - DNA, 20 bp, Artificial Sequence
  Description of Artificial Sequence: Synthetic oligonucleotide
  Target: LAMA2; (-) strand; PAM type: NRG; PAM sequence: TAG
taaagttctcaatatgtttt

SEQ ID NO: 73247 - DNA, 20 bp, Artificial Sequence
  Description of Artificial Sequence: Synthetic oligonucleotide
  Target: LAMA2; (-) strand; PAM type: NRG; PAM sequence: AAG
aactgtaaaatgttttgtta

SEQ ID NO: 73248 - DNA, 20 bp, Artificial Sequence
  Description of Artificial Sequence: Synthetic oligonucleotide
  Target: LAMA2; (-) strand; PAM type: NRG; PAM sequence: CAG
tggcttttaatccaatcatc

SEQ ID NO: 73249 - DNA, 20 bp, Artificial Sequence
  Description of Artificial Sequence: Synthetic oligonucleotide
  Target: LAMA2; (-) strand; PAM type: NRG; PAM sequence: TGG
ggataatatataatttctac

SEQ ID NO: 73250 - DNA, 20 bp, Artificial Sequence
  Description of Artificial Sequence: Synthetic oligonucleotide
  Target: LAMA2; (-) strand; PAM type: NRG; PAM sequence: AGG
atatagtcctacatttaaat

SEQ ID NO: 73251 - DNA, 20 bp, Artificial Sequence
  Description of Artificial Sequence: Synthetic oligonucleotide
  Target: LAMA2; (-) strand; PAM type: NRG; PAM sequence: TAG
tatatagtcctacatttaaa

SEQ ID NO: 73252 - DNA, 20 bp, Artificial Sequence
  Description of Artificial Sequence: Synthetic oligonucleotide
  Target: LAMA2; (-) strand; PAM type: NRG; PAM sequence: TAG
aggattaccaataacttata

SEQ ID NO: 73253 - DNA, 20 bp, Artificial Sequence
  Description of Artificial Sequence: Synthetic oligonucleotide
  Target: LAMA2; (-) strand; PAM type: NRG; PAM sequence: AGG
aagtaataaaattacgaaaa

SEQ ID NO: 73254 - DNA, 20 bp, Artificial Sequence
  Description of Artificial Sequence: Synthetic oligonucleotide
  Target: LAMA2; (-) strand; PAM type: NRG; PAM sequence: AAG
aaagtaataaaattacgaaa

SEQ ID NO: 73255 - DNA, 20 bp, Artificial Sequence
  Description of Artificial Sequence: Synthetic oligonucleotide
  Target: LAMA2; (-) strand; PAM type: NRG; PAM sequence: AAG
atccacttaggtactggaaa

SEQ ID NO: 73256 - DNA, 20 bp, Artificial Sequence
  Description of Artificial Sequence: Synthetic oligonucleotide
  Target: LAMA2; (-) strand; PAM type: NRG; PAM sequence: TGG
accagtatccacttaggtac

SEQ ID NO: 73257 - DNA, 20 bp, Artificial Sequence
  Description of Artificial Sequence: Synthetic oligonucleotide
  Target: LAMA2; (-) strand; PAM type: NRG; PAM sequence: AGG
ccagtcaccagtatccactt

SEQ ID NO: 73258 - DNA, 20 bp, Artificial Sequence
  Description of Artificial Sequence: Synthetic oligonucleotide
  Target: LAMA2; (-) strand; PAM type: NRG; PAM sequence: TAG
accagtcaccagtatccact

SEQ ID NO: 73259 - DNA, 20 bp, Artificial Sequence
  Description of Artificial Sequence: Synthetic oligonucleotide
  Target: LAMA2; (-) strand; PAM type: NRG; PAM sequence: CAG
acttattatataccagtcac

SEQ ID NO: 73260 - DNA, 20 bp, Artificial Sequence
  Description of Artificial Sequence: Synthetic oligonucleotide
  Target: LAMA2; (-) strand; PAM type: NRG; PAM sequence: CAG
attggttacttattatatac

SEQ ID NO: 73261 - DNA, 20 bp, Artificial Sequence
  Description of Artificial Sequence: Synthetic oligonucleotide
  Target: LAMA2; (-) strand; PAM type: NRG; PAM sequence: TGG
attattcaatatctattcat

SEQ ID NO: 73262 - DNA, 20 bp, Artificial Sequence
  Description of Artificial Sequence: Synthetic oligonucleotide
  Target: LAMA2; (-) strand; PAM type: NRG; PAM sequence: AAG
agagatgagaaaattgagca

SEQ ID NO: 73263 - DNA, 20 bp, Artificial Sequence
  Description of Artificial Sequence: Synthetic oligonucleotide
  Target: LAMA2; (-) strand; PAM type: NRG; PAM sequence: GAG
agctcagagatgagaaaatt

SEQ ID NO: 73264 - DNA, 20 bp, Artificial Sequence
  Description of Artificial Sequence: Synthetic oligonucleotide
  Target: LAMA2; (-) strand; PAM type: NRG; PAM sequence: GAG
agacaggaaagctcagagat

SEQ ID NO: 73265 - DNA, 20 bp, Artificial Sequence
  Description of Artificial Sequence: Synthetic oligonucleotide
  Target: LAMA2; (-) strand; PAM type: NRG; PAM sequence: GAG
agcacagacaggaaagctca

SEQ ID NO: 73266 - DNA, 20 bp, Artificial Sequence
  Description of Artificial Sequence: Synthetic oligonucleotide
  Target: LAMA2; (-) strand; PAM type: NRG; PAM sequence: CAG
gtagcacagacaggaaagct

SEQ ID NO: 73267 - DNA, 20 bp, Artificial Sequence
  Description of Artificial Sequence: Synthetic oligonucleotide
  Target: LAMA2; (-) strand; PAM type: NRG; PAM sequence: AAG
ttgcagtagcacagacagga

SEQ ID NO: 73268 - DNA, 20 bp, Artificial Sequence
  Description of Artificial Sequence: Synthetic oligonucleotide
  Target: LAMA2; (-) strand; PAM type: NRG; PAM sequence: AGG
aatgttgcagtagcacagac

SEQ ID NO: 73269 - DNA, 20 bp, Artificial Sequence
  Description of Artificial Sequence: Synthetic oligonucleotide
  Target: LAMA2; (-) strand; PAM type: NRG; PAM sequence: CAG
taatgttgcagtagcacaga

SEQ ID NO: 73270 - DNA, 20 bp, Artificial Sequence
  Description of Artificial Sequence: Synthetic oligonucleotide
  Target: LAMA2; (-) strand; PAM type: NRG; PAM sequence: CAG
aaagtaatgttgcagtagca

SEQ ID NO: 73271 - DNA, 20 bp, Artificial Sequence
  Description of Artificial Sequence: Synthetic oligonucleotide
  Target: LAMA2; (-) strand; PAM type: NRG; PAM sequence: TAG
ttaagaaagtaatgttgcag

SEQ ID NO: 73272 - DNA, 20 bp, Artificial Sequence
  Description of Artificial Sequence: Synthetic oligonucleotide
  Target: LAMA2; (-) strand; PAM type: NRG; PAM sequence: CAG
taattaagaaagtaatgttg

SEQ ID NO: 73273 - DNA, 20 bp, Artificial Sequence
  Description of Artificial Sequence: Synthetic oligonucleotide
  Target: LAMA2; (-) strand; PAM type: NRG; PAM sequence: AAG
gtgagagaatataattaaga

SEQ ID NO: 73274 - DNA, 20 bp, Artificial Sequence
  Description of Artificial Sequence: Synthetic oligonucleotide
  Target: LAMA2; (-) strand; PAM type: NRG; PAM sequence: AAG
tggagtgagagaatataatt

SEQ ID NO: 73275 - DNA, 20 bp, Artificial Sequence
  Description of Artificial Sequence: Synthetic oligonucleotide
  Target: LAMA2; (-) strand; PAM type: NRG; PAM sequence: GAG
atattattgcagtggagtga

SEQ ID NO: 73276 - DNA, 20 bp, Artificial Sequence
  Description of Artificial Sequence: Synthetic oligonucleotide
  Target: LAMA2; (-) strand; PAM type: NRG; PAM sequence: GAG
taatattattgcagtggagt

SEQ ID NO: 73277 - DNA, 20 bp, Artificial Sequence
  Description of Artificial Sequence: Synthetic oligonucleotide
  Target: LAMA2; (-) strand; PAM type: NRG; PAM sequence: GAG
tctgtaatattattgcagtg

SEQ ID NO: 73278 - DNA, 20 bp, Artificial Sequence
  Description of Artificial Sequence: Synthetic oligonucleotide
  Target: LAMA2; (-) strand; PAM type: NRG; PAM sequence: TGG
catctgtaatattattgcag

SEQ ID NO: 73279 - DNA, 20 bp, Artificial Sequence
  Description of Artificial Sequence: Synthetic oligonucleotide
  Target: LAMA2; (-) strand; PAM type: NRG; PAM sequence: CAG
taacatctgtaatattattg

SEQ ID NO: 73280 - DNA, 20 bp, Artificial Sequence
  Description of Artificial Sequence: Synthetic oligonucleotide
  Target: LAMA2; (-) strand; PAM type: NRG; PAM sequence: GGG
atttatactattcttaatca

SEQ ID NO: 73281 - DNA, 20 bp, Artificial Sequence
  Description of Artificial Sequence: Synthetic oligonucleotide
  Target: LAMA2; (-) strand; PAM type: NRG; PAM sequence: AGG
aatttatactattcttaatc

SEQ ID NO: 73282 - DNA, 20 bp, Artificial Sequence
  Description of Artificial Sequence: Synthetic oligonucleotide
  Target: LAMA2; (-) strand; PAM type: NRG; PAM sequence: CAG
caatttatactattcttaat

SEQ ID NO: 73283 - DNA, 20 bp, Artificial Sequence
  Description of Artificial Sequence: Synthetic oligonucleotide
  Target: LAMA2; (-) strand; PAM type: NRG; PAM sequence: TGG
aaaaatttcatttgaggggt

SEQ ID NO: 73284 - DNA, 20 bp, Artificial Sequence
  Description of Artificial Sequence: Synthetic oligonucleotide
  Target: LAMA2; (-) strand; PAM type: NRG; PAM sequence: GGG
accaaaaaatttcatttgag

SEQ ID NO: 73285 - DNA, 20 bp, Artificial Sequence
  Description of Artificial Sequence: Synthetic oligonucleotide
  Target: LAMA2; (-) strand; PAM type: NRG; PAM sequence: GGG
caccaaaaaatttcatttga

SEQ ID NO: 73286 - DNA, 20 bp, Artificial Sequence
  Description of Artificial Sequence: Synthetic oligonucleotide
  Target: LAMA2; (-) strand; PAM type: NRG; PAM sequence: AGG
tcaccaaaaaatttcatttg

SEQ ID NO: 73287 - DNA, 20 bp, Artificial Sequence
  Description of Artificial Sequence: Synthetic oligonucleotide
  Target: LAMA2; (-) strand; PAM type: NRG; PAM sequence: GAG
atcaccaaaaaatttcattt

SEQ ID NO: 73288 - DNA, 20 bp, Artificial Sequence
  Description of Artificial Sequence: Synthetic oligonucleotide
  Target: LAMA2; (-) strand; PAM type: NRG; PAM sequence: TGG
tattggatgtttaaaacgtt

SEQ ID NO: 73289 - DNA, 20 bp, Artificial Sequence
  Description of Artificial Sequence: Synthetic oligonucleotide
  Target: LAMA2; (-) strand; PAM type: NRG; PAM sequence: TGG
ctagcatgttatatctttat

SEQ ID NO: 73290 - DNA, 20 bp, Artificial Sequence
  Description of Artificial Sequence: Synthetic oligonucleotide
  Target: LAMA2; (-) strand; PAM type: NRG; PAM sequence: TAG
atgggtgcctactagagaac

SEQ ID NO: 73291 - DNA, 20 bp, Artificial Sequence
  Description of Artificial Sequence: Synthetic oligonucleotide
  Target: LAMA2; (-) strand; PAM type: NRG; PAM sequence: GAG
ctggaaatgggtgcctacta

SEQ ID NO: 73292 - DNA, 20 bp, Artificial Sequence
  Description of Artificial Sequence: Synthetic oligonucleotide
  Target: LAMA2; (-) strand; PAM type: NRG; PAM sequence: TAG
acctggaaatgggtgcctac

SEQ ID NO: 73293 - DNA, 20 bp, Artificial Sequence
  Description of Artificial Sequence: Synthetic oligonucleotide
  Target: LAMA2; (-) strand; PAM type: NRG; PAM sequence: GGG
acgtttggaaacctggaaat

SEQ ID NO: 73294 - DNA, 20 bp, Artificial Sequence
  Description of Artificial Sequence: Synthetic oligonucleotide
  Target: LAMA2; (-) strand; PAM type: NRG; PAM sequence: TGG
aacgtttggaaacctggaaa

SEQ ID NO: 73295 - DNA, 20 bp, Artificial Sequence
  Description of Artificial Sequence: Synthetic oligonucleotide
  Target: LAMA2; (-) strand; PAM type: NRG; PAM sequence: TGG
tgttgaaacgtttggaaacc

SEQ ID NO: 73296 - DNA, 20 bp, Artificial Sequence
  Description of Artificial Sequence: Synthetic oligonucleotide
  Target: LAMA2; (-) strand; PAM type: NRG; PAM sequence: TGG
aatgtttttgttgaaacgtt

SEQ ID NO: 73297 - DNA, 20 bp, Artificial Sequence
  Description of Artificial Sequence: Synthetic oligonucleotide
  Target: LAMA2; (-) strand; PAM type: NRG; PAM sequence: GAG
tccacattatgcaatcaata

SEQ ID NO: 73298 - DNA, 20 bp, Artificial Sequence
  Description of Artificial Sequence: Synthetic oligonucleotide
  Target: LAMA2; (-) strand; PAM type: NRG; PAM sequence: TAG
tctccacattatgcaatcaa

SEQ ID NO: 73299 - DNA, 20 bp, Artificial Sequence
  Description of Artificial Sequence: Synthetic oligonucleotide
  Target: LAMA2; (-) strand; PAM type: NRG; PAM sequence: CAG
ctttatgtgcattctcaaaa

SEQ ID NO: 73300 - DNA, 20 bp, Artificial Sequence
  Description of Artificial Sequence: Synthetic oligonucleotide
  Target: LAMA2; (-) strand; PAM type: NRG; PAM sequence: CAG
agtctcattttgttacagtt

SEQ ID NO: 73301 - DNA, 20 bp, Artificial Sequence
  Description of Artificial Sequence: Synthetic oligonucleotide
  Target: LAMA2; (-) strand; PAM type: NRG; PAM sequence: CAG
attagagtctcattttgtta

SEQ ID NO: 73302 - DNA, 20 bp, Artificial Sequence
  Description of Artificial Sequence: Synthetic oligonucleotide
  Target: LAMA2; (-) strand; PAM type: NRG; PAM sequence: GAG
aaaggactgtgaataaatta

SEQ ID NO: 73303 - DNA, 20 bp, Artificial Sequence
  Description of Artificial Sequence: Synthetic oligonucleotide
  Target: LAMA2; (-) strand; PAM type: NRG; PAM sequence: TAG
aaaaaggactgtgaataaat

SEQ ID NO: 73304 - DNA, 20 bp, Artificial Sequence
  Description of Artificial Sequence: Synthetic oligonucleotide
  Target: LAMA2; (-) strand; PAM type: NRG; PAM sequence: AGG
aaatacagacaaatttaaaa

SEQ ID NO: 73305 - DNA, 20 bp, Artificial Sequence
  Description of Artificial Sequence: Synthetic oligonucleotide
  Target: LAMA2; (-) strand; PAM type: NRG; PAM sequence: AAG
aaaatacagacaaatttaaa

SEQ ID NO: 73306 - DNA, 20 bp, Artificial Sequence
  Description of Artificial Sequence: Synthetic oligonucleotide
  Target: LAMA2; (-) strand; PAM type: NRG; PAM sequence: CAG
ttctcaggaaaacaaaaata

SEQ ID NO: 73307 - DNA, 20 bp, Artificial Sequence
  Description of Artificial Sequence: Synthetic oligonucleotide
  Target: LAMA2; (-) strand; PAM type: NRG; PAM sequence: AGG
ataaagataagatttttctc

SEQ ID NO: 73308 - DNA, 20 bp, Artificial Sequence
  Description of Artificial Sequence: Synthetic oligonucleotide
  Target: LAMA2; (-) strand; PAM type: NRG; PAM sequence: CAG
tataaagataagatttttct

SEQ ID NO: 73309 - DNA, 20 bp, Artificial Sequence
  Description of Artificial Sequence: Synthetic oligonucleotide
  Target: LAMA2; (-) strand; PAM type: NRG; PAM sequence: AAG
tccagagaggctataaagat

SEQ ID NO: 73310 - DNA, 20 bp, Artificial Sequence
  Description of Artificial Sequence: Synthetic oligonucleotide
  Target: LAMA2; (-) strand; PAM type: NRG; PAM sequence: AAG
caatatccagagaggctata

SEQ ID NO: 73311 - DNA, 20 bp, Artificial Sequence
  Description of Artificial Sequence: Synthetic oligonucleotide
  Target: LAMA2; (-) strand; PAM type: NRG; PAM sequence: AGG
aagatattcaatatccagag

SEQ ID NO: 73312 - DNA, 20 bp, Artificial Sequence
  Description of Artificial Sequence: Synthetic oligonucleotide
  Target: LAMA2; (-) strand; PAM type: NRG; PAM sequence: GAG
caagatattcaatatccaga

SEQ ID NO: 73313 - DNA, 20 bp, Artificial Sequence
  Description of Artificial Sequence: Synthetic oligonucleotide
  Target: LAMA2; (-) strand; PAM type: NRG; PAM sequence: GAG
ctcaagatattcaatatcca

SEQ ID NO: 73314 - DNA, 20 bp, Artificial Sequence
  Description of Artificial Sequence: Synthetic oligonucleotide
  Target: LAMA2; (-) strand; PAM type: NRG; PAM sequence: CAG
gtctcaagatattcaatatc

SEQ ID NO: 73315 - DNA, 20 bp, Artificial Sequence
  Description of Artificial Sequence: Synthetic oligonucleotide
  Target: LAMA2; (-) strand; PAM type: NRG; PAM sequence: AAG
agagaattaaagctagtctc

SEQ ID NO: 73316 - DNA, 20 bp, Artificial Sequence
  Description of Artificial Sequence: Synthetic oligonucleotide
  Target: LAMA2; (-) strand; PAM type: NRG; PAM sequence: TAG
aaaatcaagagaattaaagc

SEQ ID NO: 73317 - DNA, 20 bp, Artificial Sequence
  Description of Artificial Sequence: Synthetic oligonucleotide
  Target: LAMA2; (-) strand; PAM type: NRG; PAM sequence: AAG
aataaaaatcaagagaatta

SEQ ID NO: 73318 - DNA, 20 bp, Artificial Sequence
  Description of Artificial Sequence: Synthetic oligonucleotide
  Target: LAMA2; (-) strand; PAM type: NRG; PAM sequence: GAG
gaagttttaataaaaatcaa

SEQ ID NO: 73319 - DNA, 20 bp, Artificial Sequence
  Description of Artificial Sequence: Synthetic oligonucleotide
  Target: LAMA2; (-) strand; PAM type: NRG; PAM sequence: AAG
tagaagttttaataaaaatc

SEQ ID NO: 73320 - DNA, 20 bp, Artificial Sequence
  Description of Artificial Sequence: Synthetic oligonucleotide
  Target: LAMA2; (-) strand; PAM type: NRG; PAM sequence: AAG
acgaataaagttggaattag

SEQ ID NO: 73321 - DNA, 20 bp, Artificial Sequence
  Description of Artificial Sequence: Synthetic oligonucleotide
  Target: LAMA2; (-) strand; PAM type: NRG; PAM sequence: TAG
ttcacgaataaagttggaat

SEQ ID NO: 73322 - DNA, 20 bp, Artificial Sequence
  Description of Artificial Sequence: Synthetic oligonucleotide
  Target: LAMA2; (-) strand; PAM type: NRG; PAM sequence: TGG
atgtagttcacgaataaagt

SEQ ID NO: 73323 - DNA, 20 bp, Artificial Sequence
  Description of Artificial Sequence: Synthetic oligonucleotide
  Target: LAMA2; (-) strand; PAM type: NRG; PAM sequence: AAG
aagcatgtagttcacgaata

SEQ ID NO: 73324 - DNA, 20 bp, Artificial Sequence
  Description of Artificial Sequence: Synthetic oligonucleotide
  Target: LAMA2; (-) strand; PAM type: NRG; PAM sequence: TAG
cgtacttttatataagcatg

SEQ ID NO: 73325 - DNA, 20 bp, Artificial Sequence
  Description of Artificial Sequence: Synthetic oligonucleotide
  Target: LAMA2; (-) strand; PAM type: NRG; PAM sequence: AAG
gatgaaacgtacttttatat

SEQ ID NO: 73326 - DNA, 20 bp, Artificial Sequence
  Description of Artificial Sequence: Synthetic oligonucleotide
  Target: LAMA2; (-) strand; PAM type: NRG; PAM sequence: AAG
attttaaagagataaagaga

SEQ ID NO: 73327 - DNA, 20 bp, Artificial Sequence
  Description of Artificial Sequence: Synthetic oligonucleotide
  Target: LAMA2; (-) strand; PAM type: NRG; PAM sequence: GAG
aatgattttaaagagataaa

SEQ ID NO: 73328 - DNA, 20 bp, Artificial Sequence
  Description of Artificial Sequence: Synthetic oligonucleotide
  Target: LAMA2; (-) strand; PAM type: NRG; PAM sequence: AAG
gtaatgattttaaagagata

SEQ ID NO: 73329 - DNA, 20 bp, Artificial Sequence
  Description of Artificial Sequence: Synthetic oligonucleotide
  Target: LAMA2; (-) strand; PAM type: NRG; PAM sequence: GAG
taaaaggtaatgattttaaa

SEQ ID NO: 73330 - DNA, 20 bp, Artificial Sequence
  Description of Artificial Sequence: Synthetic oligonucleotide
  Target: LAMA2; (-) strand; PAM type: NRG; PAM sequence: AAG
aataaaaggtaatgatttta

SEQ ID NO: 73331 - DNA, 20 bp, Artificial Sequence
  Description of Artificial Sequence: Synthetic oligonucleotide
  Target: LAMA2; (-) strand; PAM type: NRG; PAM sequence: AGG
agcatactgaaaataataaa

SEQ ID NO: 73332 - DNA, 20 bp, Artificial Sequence
  Description of Artificial Sequence: Synthetic oligonucleotide
  Target: LAMA2; (-) strand; PAM type: NRG; PAM sequence: AAG
aagcatactgaaaataataa

SEQ ID NO: 73333 - DNA, 20 bp, Artificial Sequence
  Description of Artificial Sequence: Synthetic oligonucleotide
  Target: LAMA2; (-) strand; PAM type: NRG; PAM sequence: AAG
aataaaattttaaagcatta

SEQ ID NO: 73334 - DNA, 20 bp, Artificial Sequence
  Description of Artificial Sequence: Synthetic oligonucleotide
  Target: LAMA2; (-) strand; PAM type: NRG; PAM sequence: AAG
gtttcaagaataaaatttta

SEQ ID NO: 73335 - DNA, 20 bp, Artificial Sequence
  Description of Artificial Sequence: Synthetic oligonucleotide
  Target: LAMA2; (-) strand; PAM type: NRG; PAM sequence: AAG
atggaaaaaccaaatgtttc

SEQ ID NO: 73336 - DNA, 20 bp, Artificial Sequence
  Description of Artificial Sequence: Synthetic oligonucleotide
  Target: LAMA2; (-) strand; PAM type: NRG; PAM sequence: TGG
aatcaataggaaagtagcaa

SEQ ID NO: 73337 - DNA, 20 bp, Artificial Sequence
  Description of Artificial Sequence: Synthetic oligonucleotide
  Target: LAMA2; (-) strand; PAM type: NRG; PAM sequence: TAG
gaaaacaatcaataggaaag

SEQ ID NO: 73338 - DNA, 20 bp, Artificial Sequence
  Description of Artificial Sequence: Synthetic oligonucleotide
  Target: LAMA2; (-) strand; PAM type: NRG; PAM sequence: AAG
gaggaaaacaatcaatagga

SEQ ID NO: 73339 - DNA, 20 bp, Artificial Sequence
  Description of Artificial Sequence: Synthetic oligonucleotide
  Target: LAMA2; (-) strand; PAM type: NRG; PAM sequence: AGG
atatgaggaaaacaatcaat

SEQ ID NO: 73340 - DNA, 20 bp, Artificial Sequence
  Description of Artificial Sequence: Synthetic oligonucleotide
  Target: LAMA2; (-) strand; PAM type: NRG; PAM sequence: TAG
catatgaggaaaacaatcaa

SEQ ID NO: 73341 - DNA, 20 bp, Artificial Sequence
  Description of Artificial Sequence: Synthetic oligonucleotide
  Target: LAMA2; (-) strand; PAM type: NRG; PAM sequence: AGG
aaaatctcaagatacatatg

SEQ ID NO: 73342 - DNA, 20 bp, Artificial Sequence
  Description of Artificial Sequence: Synthetic oligonucleotide
  Target: LAMA2; (-) strand; PAM type: NRG; PAM sequence: GAG
taaaatctcaagatacatat

SEQ ID NO: 73343 - DNA, 20 bp, Artificial Sequence
  Description of Artificial Sequence: Synthetic oligonucleotide
  Target: LAMA2; (-) strand; PAM type: NRG; PAM sequence: AAG
aaaacctagactaaaatctc

SEQ ID NO: 73344 - DNA, 20 bp, Artificial Sequence
  Description of Artificial Sequence: Synthetic oligonucleotide
  Target: LAMA2; (-) strand; PAM type: NRG; PAM sequence: TAG
gctatgcttgttataaaacc

SEQ ID NO: 73345 - DNA, 20 bp, Artificial Sequence
  Description of Artificial Sequence: Synthetic oligonucleotide
  Target: LAMA2; (-) strand; PAM type: NRG; PAM sequence: TAG
agaaaaaatatctgtaaata

SEQ ID NO: 73346 - DNA, 20 bp, Artificial Sequence
  Description of Artificial Sequence: Synthetic oligonucleotide
  Target: LAMA2; (-) strand; PAM type: NRG; PAM sequence: TAG
aatctatattgaaaacttta

SEQ ID NO: 73347 - DNA, 20 bp, Artificial Sequence
  Description of Artificial Sequence: Synthetic oligonucleotide
  Target: LAMA2; (-) strand; PAM type: NRG; PAM sequence: CAG
tttttataagataaaaaaat

SEQ ID NO: 73348 - DNA, 20 bp, Artificial Sequence
  Description of Artificial Sequence: Synthetic oligonucleotide
  Target: LAMA2; (-) strand; PAM type: NRG; PAM sequence: AAG
tggtgttaactattttttat

SEQ ID NO: 73349 - DNA, 20 bp, Artificial Sequence
  Description of Artificial Sequence: Synthetic oligonucleotide
  Target: LAMA2; (-) strand; PAM type: NRG; PAM sequence: TGG
gaaataaatccaaacgttaa

SEQ ID NO: 73350 - DNA, 20 bp, Artificial Sequence
  Description of Artificial Sequence: Synthetic oligonucleotide
  Target: LAMA2; (-) strand; PAM type: NRG; PAM sequence: CAG
gtgagcagaggagaactaga

SEQ ID NO: 73351 - DNA, 20 bp, Artificial Sequence
  Description of Artificial Sequence: Synthetic oligonucleotide
  Target: LAMA2; (-) strand; PAM type: NRG; PAM sequence: TAG
gtgtgtgagcagaggagaac

SEQ ID NO: 73352 - DNA, 20 bp, Artificial Sequence
  Description of Artificial Sequence: Synthetic oligonucleotide
  Target: LAMA2; (-) strand; PAM type: NRG; PAM sequence: GAG
gtgtgtgtgtgtgagcagag

SEQ ID NO: 73353 - DNA, 20 bp, Artificial Sequence
  Description of Artificial Sequence: Synthetic oligonucleotide
  Target: LAMA2; (-) strand; PAM type: NRG; PAM sequence: AGG
gtgtgtgtgtgtgtgagcag

SEQ ID NO: 73354 - DNA, 20 bp, Artificial Sequence
  Description of Artificial Sequence: Synthetic oligonucleotide
  Target: LAMA2; (-) strand; PAM type: NRG; PAM sequence: GAG
tgtgtgtgtgtgtgtgagca

SEQ ID NO: 73355 - DNA, 20 bp, Artificial Sequence
  Description of Artificial Sequence: Synthetic oligonucleotide
  Target: LAMA2; (-) strand; PAM type: NRG; PAM sequence: CAG
tgtgtgtgtgtgtgtgtgag

SEQ ID NO: 73356 - DNA, 20 bp, Artificial Sequence
  Description of Artificial Sequence: Synthetic oligonucleotide
  Target: LAMA2; (-) strand; PAM type: NRG; PAM sequence: GAG
gtgtgtgtgtgtgtgtgtgt

SEQ ID NO: 73357 - DNA, 20 bp, Artificial Sequence
  Description of Artificial Sequence: Synthetic oligonucleotide
  Target: LAMA2; (-) strand; PAM type: NRG; PAM sequence: TAG
aagtttatttttatctttat

SEQ ID NO: 73358 - DNA, 20 bp, Artificial Sequence
  Description of Artificial Sequence: Synthetic oligonucleotide
  Target: LAMA2; (-) strand; PAM type: NRG; PAM sequence: AAG
acaaaatgtaaaactttata

SEQ ID NO: 73359 - DNA, 20 bp, Artificial Sequence
  Description of Artificial Sequence: Synthetic oligonucleotide
  Target: LAMA2; (-) strand; PAM type: NRG; PAM sequence: CAG
gatgttcacaatataatatc

SEQ ID NO: 73360 - DNA, 20 bp, Artificial Sequence
  Description of Artificial Sequence: Synthetic oligonucleotide
  Target: LAMA2; (-) strand; PAM type: NRG; PAM sequence: GGG
aaatactacacagttacatg

SEQ ID NO: 73361 - DNA, 20 bp, Artificial Sequence
  Description of Artificial Sequence: Synthetic oligonucleotide
  Target: LAMA2; (-) strand; PAM type: NRG; PAM sequence: GGG
caaatactacacagttacat

SEQ ID NO: 73362 - DNA, 20 bp, Artificial Sequence
  Description of Artificial Sequence: Synthetic oligonucleotide
  Target: LAMA2; (-) strand; PAM type: NRG; PAM sequence: TGG
tcaaatactacacagttaca

SEQ ID NO: 73363 - DNA, 20 bp, Artificial Sequence
  Description of Artificial Sequence: Synthetic oligonucleotide
  Target: LAMA2; (-) strand; PAM type: NRG; PAM sequence: CAG
actaagtttcaaatactaca

SEQ ID NO: 73364 - DNA, 20 bp, Artificial Sequence
  Description of Artificial Sequence: Synthetic oligonucleotide
  Target: LAMA2; (-) strand; PAM type: NRG; PAM sequence: AAG
aatttaatttttaaataact

SEQ ID NO: 73365 - DNA, 20 bp, Artificial Sequence
  Description of Artificial Sequence: Synthetic oligonucleotide
  Target: LAMA2; (-) strand; PAM type: NRG; PAM sequence: AAG
gaagcaggaaaatagtctat

SEQ ID NO: 73366 - DNA, 20 bp, Artificial Sequence
  Description of Artificial Sequence: Synthetic oligonucleotide
  Target: LAMA2; (-) strand; PAM type: NRG; PAM sequence: TAG
aagtcttggaagcaggaaaa

SEQ ID NO: 73367 - DNA, 20 bp, Artificial Sequence
  Description of Artificial Sequence: Synthetic oligonucleotide
  Target: LAMA2; (-) strand; PAM type: NRG; PAM sequence: AGG
tccaaagaagtcttggaagc

SEQ ID NO: 73368 - DNA, 20 bp, Artificial Sequence
  Description of Artificial Sequence: Synthetic oligonucleotide
  Target: LAMA2; (-) strand; PAM type: NRG; PAM sequence: CAG
ttccaaagaagtcttggaag

SEQ ID NO: 73369 - DNA, 20 bp, Artificial Sequence
  Description of Artificial Sequence: Synthetic oligonucleotide
  Target: LAMA2; (-) strand; PAM type: NRG; PAM sequence: AAG
cagttccaaagaagtcttgg

SEQ ID NO: 73370 - DNA, 20 bp, Artificial Sequence
  Description of Artificial Sequence: Synthetic oligonucleotide
  Target: LAMA2; (-) strand; PAM type: NRG; PAM sequence: TGG
ccacagttccaaagaagtct

SEQ ID NO: 73371 - DNA, 20 bp, Artificial Sequence
  Description of Artificial Sequence: Synthetic oligonucleotide
  Target: LAMA2; (-) strand; PAM type: NRG; PAM sequence: AAG
gggagtccacagttccaaag

SEQ ID NO: 73372 - DNA, 20 bp, Artificial Sequence
  Description of Artificial Sequence: Synthetic oligonucleotide
  Target: LAMA2; (-) strand; PAM type: NRG; PAM sequence: AAG
tcagggagtccacagttcca

SEQ ID NO: 73373 - DNA, 20 bp, Artificial Sequence
  Description of Artificial Sequence: Synthetic oligonucleotide
  Target: LAMA2; (-) strand; PAM type: NRG; PAM sequence: CAG
ctggcatttcagggagtcca

SEQ ID NO: 73374 - DNA, 20 bp, Artificial Sequence
  Description of Artificial Sequence: Synthetic oligonucleotide
  Target: LAMA2; (-) strand; PAM type: NRG; PAM sequence: GAG
tgttaccctggcatttcagg

SEQ ID NO: 73375 - DNA, 20 bp, Artificial Sequence
  Description of Artificial Sequence: Synthetic oligonucleotide
  Target: LAMA2; (-) strand; PAM type: NRG; PAM sequence: GGG
tatgttaccctggcatttca

SEQ ID NO: 73376 - DNA, 20 bp, Artificial Sequence
  Description of Artificial Sequence: Synthetic oligonucleotide
  Target: LAMA2; (-) strand; PAM type: NRG; PAM sequence: AGG
ttatgttaccctggcatttc

SEQ ID NO: 73377 - DNA, 20 bp, Artificial Sequence
  Description of Artificial Sequence: Synthetic oligonucleotide
  Target: LAMA2; (-) strand; PAM type: NRG; PAM sequence: CAG
cttatgttaccctggcattt

SEQ ID NO: 73378 - DNA, 20 bp, Artificial Sequence
  Description of Artificial Sequence: Synthetic oligonucleotide
  Target: LAMA2; (-) strand; PAM type: NRG; PAM sequence: TGG
ctgtctcgcttatgttaccc

SEQ ID NO: 73379 - DNA, 20 bp, Artificial Sequence
  Description of Artificial Sequence: Synthetic oligonucleotide
  Target: LAMA2; (-) strand; PAM type: NRG; PAM sequence: TAG
ggtattccctgaggttctgc

SEQ ID NO: 73380 - DNA, 20 bp, Artificial Sequence
  Description of Artificial Sequence: Synthetic oligonucleotide
  Target: LAMA2; (-) strand; PAM type: NRG; PAM sequence: AGG
aaagtcagtggtattccctg

SEQ ID NO: 73381 - DNA, 20 bp, Artificial Sequence
  Description of Artificial Sequence: Synthetic oligonucleotide
  Target: LAMA2; (-) strand; PAM type: NRG; PAM sequence: GAG
taaagtcagtggtattccct

SEQ ID NO: 73382 - DNA, 20 bp, Artificial Sequence
  Description of Artificial Sequence: Synthetic oligonucleotide
  Target: LAMA2; (-) strand; PAM type: NRG; PAM sequence: TGG
ggctgacaccataaagtcag

SEQ ID NO: 73383 - DNA, 20 bp, Artificial Sequence
  Description of Artificial Sequence: Synthetic oligonucleotide
  Target: LAMA2; (-) strand; PAM type: NRG; PAM sequence: CAG
actggctgacaccataaagt

SEQ ID NO: 73384 - DNA, 20 bp, Artificial Sequence
  Description of Artificial Sequence: Synthetic oligonucleotide
  Target: LAMA2; (-) strand; PAM type: NRG; PAM sequence: AAG
tgatactggctgacaccata

SEQ ID NO: 73385 - DNA, 20 bp, Artificial Sequence
  Description of Artificial Sequence: Synthetic oligonucleotide
  Target: LAMA2; (-) strand; PAM type: NRG; PAM sequence: TGG
attgtgggctctcatgatac

SEQ ID NO: 73386 - DNA, 20 bp, Artificial Sequence
  Description of Artificial Sequence: Synthetic oligonucleotide
  Target: LAMA2; (-) strand; PAM type: NRG; PAM sequence: GGG
ggtttgaaaggcaacattgt

SEQ ID NO: 73387 - DNA, 20 bp, Artificial Sequence
  Description of Artificial Sequence: Synthetic oligonucleotide
  Target: LAMA2; (-) strand; PAM type: NRG; PAM sequence: TGG
tggtttgaaaggcaacattg

SEQ ID NO: 73388 - DNA, 20 bp, Artificial Sequence
  Description of Artificial Sequence: Synthetic oligonucleotide
  Target: LAMA2; (-) strand; PAM type: NRG; PAM sequence: AGG
aatgtatcacttggtttgaa

SEQ ID NO: 73389 - DNA, 20 bp, Artificial Sequence
  Description of Artificial Sequence: Synthetic oligonucleotide
  Target: LAMA2; (-) strand; PAM type: NRG; PAM sequence: AAG
aaatgtatcacttggtttga

SEQ ID NO: 73390 - DNA, 20 bp, Artificial Sequence
  Description of Artificial Sequence: Synthetic oligonucleotide
  Target: LAMA2; (-) strand; PAM type: NRG; PAM sequence: TGG
attgatagaaatgtatcact

SEQ ID NO: 73391 - DNA, 20 bp, Artificial Sequence
  Description of Artificial Sequence: Synthetic oligonucleotide
  Target: LAMA2; (-) strand; PAM type: NRG; PAM sequence: TAG
caaatttatttaattattga

SEQ ID NO: 73392 - DNA, 20 bp, Artificial Sequence
  Description of Artificial Sequence: Synthetic oligonucleotide
  Target: LAMA2; (-) strand; PAM type: NRG; PAM sequence: CAG
gaagattgcaaatgcaatgg

SEQ ID NO: 73393 - DNA, 20 bp, Artificial Sequence
  Description of Artificial Sequence: Synthetic oligonucleotide
  Target: LAMA2; (-) strand; PAM type: NRG; PAM sequence: TGG
aaagaagattgcaaatgcaa

SEQ ID NO: 73394 - DNA, 20 bp, Artificial Sequence
  Description of Artificial Sequence: Synthetic oligonucleotide
  Target: LAMA2; (-) strand; PAM type: NRG; PAM sequence: AAG
tgaataaagaacaaagaaag

SEQ ID NO: 73395 - DNA, 20 bp, Artificial Sequence
  Description of Artificial Sequence: Synthetic oligonucleotide
  Target: LAMA2; (-) strand; PAM type: NRG; PAM sequence: AAG
caatgaataaagaacaaaga

SEQ ID NO: 73396 - DNA, 20 bp, Artificial Sequence
  Description of Artificial Sequence: Synthetic oligonucleotide
  Target: LAMA2; (-) strand; PAM type: NRG; PAM sequence: AAG
attgcaatgaataaagaaca

SEQ ID NO: 73397 - DNA, 20 bp, Artificial Sequence
  Description of Artificial Sequence: Synthetic oligonucleotide
  Target: LAMA2; (-) strand; PAM type: NRG; PAM sequence: AAG
ttttattattgcaatgaata

SEQ ID NO: 73398 - DNA, 20 bp, Artificial Sequence
  Description of Artificial Sequence: Synthetic oligonucleotide
  Target: LAMA2; (-) strand; PAM type: NRG; PAM sequence: TGG
ccatcaacagtcatttgatt

SEQ ID NO: 73399 - DNA, 20 bp, Artificial Sequence
  Description of Artificial Sequence: Synthetic oligonucleotide
  Target: LAMA2; (-) strand; PAM type: NRG; PAM sequence: CAG
tcttataattcccccatcaa

SEQ ID NO: 73400 - DNA, 20 bp, Artificial Sequence
  Description of Artificial Sequence: Synthetic oligonucleotide
  Target: LAMA2; (-) strand; PAM type: NRG; PAM sequence: GGG
gttggaggtaaagtcagctt

SEQ ID NO: 73401 - DNA, 20 bp, Artificial Sequence
  Description of Artificial Sequence: Synthetic oligonucleotide
  Target: LAMA2; (-) strand; PAM type: NRG; PAM sequence: TGG
agttggaggtaaagtcagct

SEQ ID NO: 73402 - DNA, 20 bp, Artificial Sequence
  Description of Artificial Sequence: Synthetic oligonucleotide
  Target: LAMA2; (-) strand; PAM type: NRG; PAM sequence: CAG
ctttgagttggaggtaaagt

SEQ ID NO: 73403 - DNA, 20 bp, Artificial Sequence
  Description of Artificial Sequence: Synthetic oligonucleotide
  Target: LAMA2; (-) strand; PAM type: NRG; PAM sequence: AAG
aaatctttgagttggaggta

SEQ ID NO: 73404 - DNA, 20 bp, Artificial Sequence
  Description of Artificial Sequence: Synthetic oligonucleotide
  Target: LAMA2; (-) strand; PAM type: NRG; PAM sequence: AGG
gacaaaaatctttgagttgg

SEQ ID NO: 73405 - DNA, 20 bp, Artificial Sequence
  Description of Artificial Sequence: Synthetic oligonucleotide
  Target: LAMA2; (-) strand; PAM type: NRG; PAM sequence: GAG
ggacaaaaatctttgagttg

SEQ ID NO: 73406 - DNA, 20 bp, Artificial Sequence
  Description of Artificial Sequence: Synthetic oligonucleotide
  Target: LAMA2; (-) strand; PAM type: NRG; PAM sequence: TGG
gtggacaaaaatctttgagt

SEQ ID NO: 73407 - DNA, 20 bp, Artificial Sequence
  Description of Artificial Sequence: Synthetic oligonucleotide
  Target: LAMA2; (-) strand; PAM type: NRG; PAM sequence: GAG
attagtggacaaaaatcttt

SEQ ID NO: 73408 - DNA, 20 bp, Artificial Sequence
  Description of Artificial Sequence: Synthetic oligonucleotide
  Target: LAMA2; (-) strand; PAM type: NRG; PAM sequence: TGG
agaaagagaaattagattag

SEQ ID NO: 73409 - DNA, 20 bp, Artificial Sequence
  Description of Artificial Sequence: Synthetic oligonucleotide
  Target: LAMA2; (-) strand; PAM type: NRG; PAM sequence: TAG
gagagaaagagaaattagat

SEQ ID NO: 73410 - DNA, 20 bp, Artificial Sequence
  Description of Artificial Sequence: Synthetic oligonucleotide
  Target: LAMA2; (-) strand; PAM type: NRG; PAM sequence: TAG
acacagagagaaagagaaat

SEQ ID NO: 73411 - DNA, 20 bp, Artificial Sequence
  Description of Artificial Sequence: Synthetic oligonucleotide
  Target: LAMA2; (-) strand; PAM type: NRG; PAM sequence: GAG
ttaacaaacacagagagaaa

SEQ ID NO: 73412 - DNA, 20 bp, Artificial Sequence
  Description of Artificial Sequence: Synthetic oligonucleotide
  Target: LAMA2; (-) strand; PAM type: NRG; PAM sequence: AAG
ttttaacaaacacagagaga

SEQ ID NO: 73413 - DNA, 20 bp, Artificial Sequence
  Description of Artificial Sequence: Synthetic oligonucleotide
  Target: LAMA2; (-) strand; PAM type: NRG; PAM sequence: GAG
aaacttttaacaaacacaga

SEQ ID NO: 73414 - DNA, 20 bp, Artificial Sequence
  Description of Artificial Sequence: Synthetic oligonucleotide
  Target: LAMA2; (-) strand; PAM type: NRG; PAM sequence: GAG
tgaaacttttaacaaacaca

SEQ ID NO: 73415 - DNA, 20 bp, Artificial Sequence
  Description of Artificial Sequence: Synthetic oligonucleotide
  Target: LAMA2; (-) strand; PAM type: NRG; PAM sequence: CAG
tttgaaacttttaacaaaca

SEQ ID NO: 73416 - DNA, 20 bp, Artificial Sequence
  Description of Artificial Sequence: Synthetic oligonucleotide
  Target: LAMA2; (-) strand; PAM type: NRG; PAM sequence: GAG
cacgagtatcaacttggcaa

SEQ ID NO: 73417 - DNA, 20 bp, Artificial Sequence
  Description of Artificial Sequence: Synthetic oligonucleotide
  Target: LAMA2; (-) strand; PAM type: NRG; PAM sequence: AAG
aacacgagtatcaacttggc

SEQ ID NO: 73418 - DNA, 20 bp, Artificial Sequence
  Description of Artificial Sequence: Synthetic oligonucleotide
  Target: LAMA2; (-) strand; PAM type: NRG; PAM sequence: TGG
aaagaacacgagtatcaact

SEQ ID NO: 73419 - DNA, 20 bp, Artificial Sequence
  Description of Artificial Sequence: Synthetic oligonucleotide
  Target: LAMA2; (-) strand; PAM type: NRG; PAM sequence: GAG
tcttgaaaaggaaagaacac

SEQ ID NO: 73420 - DNA, 20 bp, Artificial Sequence
  Description of Artificial Sequence: Synthetic oligonucleotide
  Target: LAMA2; (-) strand; PAM type: NRG; PAM sequence: AAG
ttatgtaatcttgaaaagga

SEQ ID NO: 73421 - DNA, 20 bp, Artificial Sequence
  Description of Artificial Sequence: Synthetic oligonucleotide
  Target: LAMA2; (-) strand; PAM type: NRG; PAM sequence: AGG
ctttttatgtaatcttgaaa

SEQ ID NO: 73422 - DNA, 20 bp, Artificial Sequence
  Description of Artificial Sequence: Synthetic oligonucleotide
  Target: LAMA2; (-) strand; PAM type: NRG; PAM sequence: AAG
actttttatgtaatcttgaa

SEQ ID NO: 73423 - DNA, 20 bp, Artificial Sequence
  Description of Artificial Sequence: Synthetic oligonucleotide
  Target: LAMA2; (-) strand; PAM type: NRG; PAM sequence: AAG
caggttgatacgttggatct

SEQ ID NO: 73424 - DNA, 20 bp, Artificial Sequence
  Description of Artificial Sequence: Synthetic oligonucleotide
  Target: LAMA2; (-) strand; PAM type: NRG; PAM sequence: TGG
cctattccaggttgatacgt

SEQ ID NO: 73425 - DNA, 20 bp, Artificial Sequence
  Description of Artificial Sequence: Synthetic oligonucleotide
  Target: LAMA2; (-) strand; PAM type: NRG; PAM sequence: AGG
gtgatattttcacctattcc

SEQ ID NO: 73426 - DNA, 20 bp, Artificial Sequence
  Description of Artificial Sequence: Synthetic oligonucleotide
  Target: LAMA2; (-) strand; PAM type: NRG; PAM sequence: CAG
agtgatattttcacctattc

SEQ ID NO: 73427 - DNA, 20 bp, Artificial Sequence
  Description of Artificial Sequence: Synthetic oligonucleotide
  Target: LAMA2; (-) strand; PAM type: NRG; PAM sequence: TAG
taaatactagttataatcaa

SEQ ID NO: 73428 - DNA, 20 bp, Artificial Sequence
  Description of Artificial Sequence: Synthetic oligonucleotide
  Target: LAMA2; (-) strand; PAM type: NRG; PAM sequence: TAG
tattaagcctcgttaaatac

SEQ ID NO: 73429 - DNA, 20 bp, Artificial Sequence
  Description of Artificial Sequence: Synthetic oligonucleotide
  Target: LAMA2; (-) strand; PAM type: NRG; PAM sequence: AAG
atcagtgtttggtccatatt

SEQ ID NO: 73430 - DNA, 20 bp, Artificial Sequence
  Description of Artificial Sequence: Synthetic oligonucleotide
  Target: LAMA2; (-) strand; PAM type: NRG; PAM sequence: TGG
gaaatacctagatcagtgtt

SEQ ID NO: 73431 - DNA, 20 bp, Artificial Sequence
  Description of Artificial Sequence: Synthetic oligonucleotide
  Target: LAMA2; (-) strand; PAM type: NRG; PAM sequence: CAG
tacatgtgaaatacctagat

SEQ ID NO: 73432 - DNA, 20 bp, Artificial Sequence
  Description of Artificial Sequence: Synthetic oligonucleotide
  Target: LAMA2; (-) strand; PAM type: NRG; PAM sequence: TAG
cataatacatgtgaaatacc

SEQ ID NO: 73433 - DNA, 20 bp, Artificial Sequence
  Description of Artificial Sequence: Synthetic oligonucleotide
  Target: LAMA2; (-) strand; PAM type: NRG; PAM sequence: AGG
acttccttcataaagttgtg

SEQ ID NO: 73434 - DNA, 20 bp, Artificial Sequence
  Description of Artificial Sequence: Synthetic oligonucleotide
  Target: LAMA2; (-) strand; PAM type: NRG; PAM sequence: GAG
tacttccttcataaagttgt

SEQ ID NO: 73435 - DNA, 20 bp, Artificial Sequence
  Description of Artificial Sequence: Synthetic oligonucleotide
  Target: LAMA2; (-) strand; PAM type: NRG; PAM sequence: AAG
acacatatacttccttcata

SEQ ID NO: 73436 - DNA, 20 bp, Artificial Sequence
  Description of Artificial Sequence: Synthetic oligonucleotide
  Target: LAMA2; (-) strand; PAM type: NRG; PAM sequence: TGG
acctgcggtgcagtttgcac

SEQ ID NO: 73437 - DNA, 20 bp, Artificial Sequence
  Description of Artificial Sequence: Synthetic oligonucleotide
  Target: LAMA2; (-) strand; PAM type: NRG; PAM sequence: CAG
caggcaatacacctgcggtg

SEQ ID NO: 73438 - DNA, 20 bp, Artificial Sequence
  Description of Artificial Sequence: Synthetic oligonucleotide
  Target: LAMA2; (-) strand; PAM type: NRG; PAM sequence: CGG
ttgaacaggcaatacacctg

SEQ ID NO: 73439 - DNA, 20 bp, Artificial Sequence
  Description of Artificial Sequence: Synthetic oligonucleotide
  Target: LAMA2; (-) strand; PAM type: NRG; PAM sequence: AGG
tggtaaagaaaaatttgaac

SEQ ID NO: 73440 - DNA, 20 bp, Artificial Sequence
  Description of Artificial Sequence: Synthetic oligonucleotide
  Target: LAMA2; (-) strand; PAM type: NRG; PAM sequence: CAG
gtggtaaagaaaaatttgaa

SEQ ID NO: 73441 - DNA, 20 bp, Artificial Sequence
  Description of Artificial Sequence: Synthetic oligonucleotide
  Target: LAMA2; (-) strand; PAM type: NRG; PAM sequence: AAG
ggtgttaatatagagtggta

SEQ ID NO: 73442 - DNA, 20 bp, Artificial Sequence
  Description of Artificial Sequence: Synthetic oligonucleotide
  Target: LAMA2; (-) strand; PAM type: NRG; PAM sequence: TGG
acttaggtgttaatatagag

SEQ ID NO: 73443 - DNA, 20 bp, Artificial Sequence
  Description of Artificial Sequence: Synthetic oligonucleotide
  Target: LAMA2; (-) strand; PAM type: NRG; PAM sequence: GAG
ttaacttaggtgttaatata

SEQ ID NO: 73444 - DNA, 20 bp, Artificial Sequence
  Description of Artificial Sequence: Synthetic oligonucleotide
  Target: LAMA2; (-) strand; PAM type: NRG; PAM sequence: TAG
ctttaacttaggtgttaata

SEQ ID NO: 73445 - DNA, 20 bp, Artificial Sequence
  Description of Artificial Sequence: Synthetic oligonucleotide
  Target: LAMA2; (-) strand; PAM type: NRG; PAM sequence: AGG
attgtgccggcctttaactt

SEQ ID NO: 73446 - DNA, 20 bp, Artificial Sequence
  Description of Artificial Sequence: Synthetic oligonucleotide
  Target: LAMA2; (-) strand; PAM type: NRG; PAM sequence: TAG
tattgtgccggcctttaact

SEQ ID NO: 73447 - DNA, 20 bp, Artificial Sequence
  Description of Artificial Sequence: Synthetic oligonucleotide
  Target: LAMA2; (-) strand; PAM type: NRG; PAM sequence: CGG
caacacattgcttattgtgc

SEQ ID NO: 73448 - DNA, 20 bp, Artificial Sequence
  Description of Artificial Sequence: Synthetic oligonucleotide
  Target: LAMA2; (-) strand; PAM type: NRG; PAM sequence: AAG
tttgttttacaaatattatc

SEQ ID NO: 73449 - DNA, 20 bp, Artificial Sequence
  Description of Artificial Sequence: Synthetic oligonucleotide
  Target: LAMA2; (-) strand; PAM type: NRG; PAM sequence: GAG
tatatattttaaagaccaca

SEQ ID NO: 73450 - DNA, 20 bp, Artificial Sequence
  Description of Artificial Sequence: Synthetic oligonucleotide
  Target: LAMA2; (-) strand; PAM type: NRG; PAM sequence: CAG
catatatattttaaagacca

SEQ ID NO: 73451 - DNA, 20 bp, Artificial Sequence
  Description of Artificial Sequence: Synthetic oligonucleotide
  Target: LAMA2; (-) strand; PAM type: NRG; PAM sequence: AAG
gcatttccatatatatttta

SEQ ID NO: 73452 - DNA, 20 bp, Artificial Sequence
  Description of Artificial Sequence: Synthetic oligonucleotide
  Target: LAMA2; (-) strand; PAM type: NRG; PAM sequence: CAG
gtttttcaaaatatgtattg

SEQ ID NO: 73453 - DNA, 20 bp, Artificial Sequence
  Description of Artificial Sequence: Synthetic oligonucleotide
  Target: LAMA2; (-) strand; PAM type: NRG; PAM sequence: TAG
gcagtcaaacctgctttggc

SEQ ID NO: 73454 - DNA, 20 bp, Artificial Sequence
  Description of Artificial Sequence: Synthetic oligonucleotide
  Target: LAMA2; (-) strand; PAM type: NRG; PAM sequence: TGG
gcctgcagtcaaacctgctt

SEQ ID NO: 73455 - DNA, 20 bp, Artificial Sequence
  Description of Artificial Sequence: Synthetic oligonucleotide
  Target: LAMA2; (-) strand; PAM type: NRG; PAM sequence: CAG
gggaaggacagttgtgcctg

SEQ ID NO: 73456 - DNA, 20 bp, Artificial Sequence
  Description of Artificial Sequence: Synthetic oligonucleotide
  Target: LAMA2; (-) strand; PAM type: NRG; PAM sequence: CAG
attaagaagagtgggaagga

SEQ ID NO: 73457 - DNA, 20 bp, Artificial Sequence
  Description of Artificial Sequence: Synthetic oligonucleotide
  Target: LAMA2; (-) strand; PAM type: NRG; PAM sequence: AGG
ttcaattaagaagagtggga

SEQ ID NO: 73458 - DNA, 20 bp, Artificial Sequence
  Description of Artificial Sequence: Synthetic oligonucleotide
  Target: LAMA2; (-) strand; PAM type: NRG; PAM sequence: AAG
cttcaattaagaagagtggg

SEQ ID NO: 73459 - DNA, 20 bp, Artificial Sequence
  Description of Artificial Sequence: Synthetic oligonucleotide
  Target: LAMA2; (-) strand; PAM type: NRG; PAM sequence: GGG
actcttcaattaagaagagt

SEQ ID NO: 73460 - DNA, 20 bp, Artificial Sequence
  Description of Artificial Sequence: Synthetic oligonucleotide
  Target: LAMA2; (-) strand; PAM type: NRG; PAM sequence: TGG
gactcttcaattaagaagag

SEQ ID NO: 73461 - DNA, 20 bp, Artificial Sequence
  Description of Artificial Sequence: Synthetic oligonucleotide
  Target: LAMA2; (-) strand; PAM type: NRG; PAM sequence: GAG
ggtgactcttcaattaagaa

SEQ ID NO: 73462 - DNA, 20 bp, Artificial Sequence
  Description of Artificial Sequence: Synthetic oligonucleotide
  Target: LAMA2; (-) strand; PAM type: NRG; PAM sequence: AAG
gaggtgactcttcaattaag

SEQ ID NO: 73463 - DNA, 20 bp, Artificial Sequence
  Description of Artificial Sequence: Synthetic oligonucleotide
  Target: LAMA2; (-) strand; PAM type: NRG; PAM sequence: AAG
attgaggtgactcttcaatt

SEQ ID NO: 73464 - DNA, 20 bp, Artificial Sequence
  Description of Artificial Sequence: Synthetic oligonucleotide
  Target: LAMA2; (-) strand; PAM type: NRG; PAM sequence: AGG
gaacattcaaatggggattg

SEQ ID NO: 73465 - DNA, 20 bp, Artificial Sequence
  Description of Artificial Sequence: Synthetic oligonucleotide
  Target: LAMA2; (-) strand; PAM type: NRG; PAM sequence: GAG
agaacattcaaatggggatt

SEQ ID NO: 73466 - DNA, 20 bp, Artificial Sequence
  Description of Artificial Sequence: Synthetic oligonucleotide
  Target: LAMA2; (-) strand; PAM type: NRG; PAM sequence: GGG
gaaaagagaacattcaaatg

SEQ ID NO: 73467 - DNA, 20 bp, Artificial Sequence
  Description of Artificial Sequence: Synthetic oligonucleotide
  Target: LAMA2; (-) strand; PAM type: NRG; PAM sequence: GGG
tgaaaagagaacattcaaat

SEQ ID NO: 73468 - DNA, 20 bp, Artificial Sequence
  Description of Artificial Sequence: Synthetic oligonucleotide
  Target: LAMA2; (-) strand; PAM type: NRG; PAM sequence: TGG
ttgaaaagagaacattcaaa

SEQ ID NO: 73469 - DNA, 20 bp, Artificial Sequence
  Description of Artificial Sequence: Synthetic oligonucleotide
  Target: LAMA2; (-) strand; PAM type: NRG; PAM sequence: GAG
tctttttaggaggttgaaaa

SEQ ID NO: 73470 - DNA, 20 bp, Artificial Sequence
  Description of Artificial Sequence: Synthetic oligonucleotide
  Target: LAMA2; (-) strand; PAM type: NRG; PAM sequence: AAG
aatctttttaggaggttgaa

SEQ ID NO: 73471 - DNA, 20 bp, Artificial Sequence
  Description of Artificial Sequence: Synthetic oligonucleotide
  Target: LAMA2; (-) strand; PAM type: NRG; PAM sequence: AGG
ttctcagtaatctttttagg

SEQ ID NO: 73472 - DNA, 20 bp, Artificial Sequence
  Description of Artificial Sequence: Synthetic oligonucleotide
  Target: LAMA2; (-) strand; PAM type: NRG; PAM sequence: GAG
attctcagtaatctttttag

SEQ ID NO: 73473 - DNA, 20 bp, Artificial Sequence
  Description of Artificial Sequence: Synthetic oligonucleotide
  Target: LAMA2; (-) strand; PAM type: NRG; PAM sequence: AGG
acattctcagtaatcttttt

SEQ ID NO: 73474 - DNA, 20 bp, Artificial Sequence
  Description of Artificial Sequence: Synthetic oligonucleotide
  Target: LAMA2; (-) strand; PAM type: NRG; PAM sequence: TAG
tacattctcagtaatctttt

SEQ ID NO: 73475 - DNA, 20 bp, Artificial Sequence
  Description of Artificial Sequence: Synthetic oligonucleotide
  Target: LAMA2; (-) strand; PAM type: NRG; PAM sequence: CAG
catttaaatatctacattct

SEQ ID NO: 73476 - DNA, 20 bp, Artificial Sequence
  Description of Artificial Sequence: Synthetic oligonucleotide
  Target: LAMA2; (-) strand; PAM type: NRG; PAM sequence: CAG
tgaaattatttaaagatgaa

SEQ ID NO: 73477 - DNA, 20 bp, Artificial Sequence
  Description of Artificial Sequence: Synthetic oligonucleotide
  Target: LAMA2; (-) strand; PAM type: NRG; PAM sequence: AAG
aacataaatgaaattattta

SEQ ID NO: 73478 - DNA, 20 bp, Artificial Sequence
  Description of Artificial Sequence: Synthetic oligonucleotide
  Target: LAMA2; (-) strand; PAM type: NRG; PAM sequence: CAG
taacttcagatcaatttttg

SEQ ID NO: 73479 - DNA, 20 bp, Artificial Sequence
  Description of Artificial Sequence: Synthetic oligonucleotide
  Target: LAMA2; (-) strand; PAM type: NRG; PAM sequence: CAG
acaatataccagactaactt

SEQ ID NO: 73480 - DNA, 20 bp, Artificial Sequence
  Description of Artificial Sequence: Synthetic oligonucleotide
  Target: LAMA2; (-) strand; PAM type: NRG; PAM sequence: CAG
gcttaaagtacacaatatac

SEQ ID NO: 73481 - DNA, 20 bp, Artificial Sequence
  Description of Artificial Sequence: Synthetic oligonucleotide
  Target: LAMA2; (-) strand; PAM type: NRG; PAM sequence: AAG
agaaatgtatcacatgctta

SEQ ID NO: 73482 - DNA, 20 bp, Artificial Sequence
  Description of Artificial Sequence: Synthetic oligonucleotide
  Target: LAMA2; (-) strand; PAM type: NRG; PAM sequence: TAG
tcttgacatgaacaacattt

SEQ ID NO: 73483 - DNA, 20 bp, Artificial Sequence
  Description of Artificial Sequence: Synthetic oligonucleotide
  Target: LAMA2; (-) strand; PAM type: NRG; PAM sequence: TAG
gaaggtcatgatttgaattg

SEQ ID NO: 73484 - DNA, 20 bp, Artificial Sequence
  Description of Artificial Sequence: Synthetic oligonucleotide
  Target: LAMA2; (-) strand; PAM type: NRG; PAM sequence: AGG
ttagaatacaagccaaaaga

SEQ ID NO: 73485 - DNA, 20 bp, Artificial Sequence
  Description of Artificial Sequence: Synthetic oligonucleotide
  Target: LAMA2; (-) strand; PAM type: NRG; PAM sequence: AAG
attagaatacaagccaaaag

SEQ ID NO: 73486 - DNA, 20 bp, Artificial Sequence
  Description of Artificial Sequence: Synthetic oligonucleotide
  Target: LAMA2; (-) strand; PAM type: NRG; PAM sequence: AAG
aaaattagaatacaagccaa

SEQ ID NO: 73487 - DNA, 20 bp, Artificial Sequence
  Description of Artificial Sequence: Synthetic oligonucleotide
  Target: LAMA2; (-) strand; PAM type: NRG; PAM sequence: AAG
aaacttcaaaattagaatac

SEQ ID NO: 73488 - DNA, 20 bp, Artificial Sequence
  Description of Artificial Sequence: Synthetic oligonucleotide
  Target: LAMA2; (-) strand; PAM type: NRG; PAM sequence: TAG
taggtcagaaacttcaaaat

SEQ ID NO: 73489 - DNA, 20 bp, Artificial Sequence
  Description of Artificial Sequence: Synthetic oligonucleotide
  Target: LAMA2; (-) strand; PAM type: NRG; PAM sequence: CAG
aatcatttttgtgtctaggt

SEQ ID NO: 73490 - DNA, 20 bp, Artificial Sequence
  Description of Artificial Sequence: Synthetic oligonucleotide
  Target: LAMA2; (-) strand; PAM type: NRG; PAM sequence: AGG
agttaatcatttttgtgtct

SEQ ID NO: 73491 - DNA, 20 bp, Artificial Sequence
  Description of Artificial Sequence: Synthetic oligonucleotide
  Target: LAMA2; (-) strand; PAM type: NRG; PAM sequence: TAG
cagttaatcatttttgtgtc

SEQ ID NO: 73492 - DNA, 20 bp, Artificial Sequence
  Description of Artificial Sequence: Synthetic oligonucleotide
  Target: LAMA2; (-) strand; PAM type: NRG; PAM sequence: CAG
gtacaactattaaaattctt

SEQ ID NO: 73493 - DNA, 20 bp, Artificial Sequence
  Description of Artificial Sequence: Synthetic oligonucleotide
  Target: LAMA2; (-) strand; PAM type: NRG; PAM sequence: CAG
ctgatagaagtgaagaacaa

SEQ ID NO: 73494 - DNA, 20 bp, Artificial Sequence
  Description of Artificial Sequence: Synthetic oligonucleotide
  Target: LAMA2; (-) strand; PAM type: NRG; PAM sequence: AAG
tatcatcactgatagaagtg

SEQ ID NO: 73495 - DNA, 20 bp, Artificial Sequence
  Description of Artificial Sequence: Synthetic oligonucleotide
  Target: LAMA2; (-) strand; PAM type: NRG; PAM sequence: AAG
tcaaatatcatcactgatag

SEQ ID NO: 73496 - DNA, 20 bp, Artificial Sequence
  Description of Artificial Sequence: Synthetic oligonucleotide
  Target: LAMA2; (-) strand; PAM type: NRG; PAM sequence: TAG
ctatcaaatatcatcactga

SEQ ID NO: 73497 - DNA, 20 bp, Artificial Sequence
  Description of Artificial Sequence: Synthetic oligonucleotide
  Target: LAMA2; (-) strand; PAM type: NRG; PAM sequence: CAG
tttttcattgtttgcctgct

SEQ ID NO: 73498 - DNA, 20 bp, Artificial Sequence
  Description of Artificial Sequence: Synthetic oligonucleotide
  Target: LAMA2; (-) strand; PAM type: NRG; PAM sequence: GGG
tacatacattttgcatggag

SEQ ID NO: 73499 - DNA, 20 bp, Artificial Sequence
  Description of Artificial Sequence: Synthetic oligonucleotide
  Target: LAMA2; (-) strand; PAM type: NRG; PAM sequence: GGG
ttacatacattttgcatgga

SEQ ID NO: 73500 - DNA, 20 bp, Artificial Sequence
  Description of Artificial Sequence: Synthetic oligonucleotide
  Target: LAMA2; (-) strand; PAM type: NRG; PAM sequence: AGG
tttacatacattttgcatgg

SEQ ID NO: 73501 - DNA, 20 bp, Artificial Sequence
  Description of Artificial Sequence: Synthetic oligonucleotide
  Target: LAMA2; (-) strand; PAM type: NRG; PAM sequence: GAG
ttttacatacattttgcatg

SEQ ID NO: 73502 - DNA, 20 bp, Artificial Sequence
  Description of Artificial Sequence: Synthetic oligonucleotide
  Target: LAMA2; (-) strand; PAM type: NRG; PAM sequence: TGG
gattttacatacattttgca

SEQ ID NO: 73503 - DNA, 20 bp, Artificial Sequence
  Description of Artificial Sequence: Synthetic oligonucleotide
  Target: LAMA2; (-) strand; PAM type: NRG; PAM sequence: AAG
aaatactgttcacttattga

SEQ ID NO: 73504 - DNA, 20 bp, Artificial Sequence
  Description of Artificial Sequence: Synthetic oligonucleotide
  Target: LAMA2; (-) strand; PAM type: NRG; PAM sequence: TAG
tggtgaaaaggaacagcagg

SEQ ID NO: 73505 - DNA, 20 bp, Artificial Sequence
  Description of Artificial Sequence: Synthetic oligonucleotide
  Target: LAMA2; (-) strand; PAM type: NRG; PAM sequence: AGG
aaatggtgaaaaggaacagc

SEQ ID NO: 73506 - DNA, 20 bp, Artificial Sequence
  Description of Artificial Sequence: Synthetic oligonucleotide
  Target: LAMA2; (-) strand; PAM type: NRG; PAM sequence: CAG
caaatggtgaaaaggaacag

SEQ ID NO: 73507 - DNA, 20 bp, Artificial Sequence
  Description of Artificial Sequence: Synthetic oligonucleotide
  Target: LAMA2; (-) strand; PAM type: NRG; PAM sequence: CAG
ctgcaaatggtgaaaaggaa

SEQ ID NO: 73508 - DNA, 20 bp, Artificial Sequence
  Description of Artificial Sequence: Synthetic oligonucleotide
  Target: LAMA2; (-) strand; PAM type: NRG; PAM sequence: AGG
tggtactgcaaatggtgaaa

SEQ ID NO: 73509 - DNA, 20 bp, Artificial Sequence
  Description of Artificial Sequence: Synthetic oligonucleotide
  Target: LAMA2; (-) strand; PAM type: NRG; PAM sequence: AAG
atggtactgcaaatggtgaa

SEQ ID NO: 73510 - DNA, 20 bp, Artificial Sequence
  Description of Artificial Sequence: Synthetic oligonucleotide
  Target: LAMA2; (-) strand; PAM type: NRG; PAM sequence: TGG
tctaagaatggtactgcaaa

SEQ ID NO: 73511 - DNA, 20 bp, Artificial Sequence
  Description of Artificial Sequence: Synthetic oligonucleotide
  Target: LAMA2; (-) strand; PAM type: NRG; PAM sequence: TGG
gcctgcagtgagtctaagaa

SEQ ID NO: 73512 - DNA, 20 bp, Artificial Sequence
  Description of Artificial Sequence: Synthetic oligonucleotide
  Target: LAMA2; (-) strand; PAM type: NRG; PAM sequence: AAG
tttatgcctgcagtgagtct

SEQ ID NO: 73513 - DNA, 20 bp, Artificial Sequence
  Description of Artificial Sequence: Synthetic oligonucleotide
  Target: LAMA2; (-) strand; PAM type: NRG; PAM sequence: GAG
ccagggtttatgcctgcagt

SEQ ID NO: 73514 - DNA, 20 bp, Artificial Sequence
  Description of Artificial Sequence: Synthetic oligonucleotide
  Target: LAMA2; (-) strand; PAM type: NRG; PAM sequence: CAG
tatcccagggtttatgcctg

SEQ ID NO: 73515 - DNA, 20 bp, Artificial Sequence
  Description of Artificial Sequence: Synthetic oligonucleotide
  Target: LAMA2; (-) strand; PAM type: NRG; PAM sequence: GGG
cttaacttttccttatccca

SEQ ID NO: 73516 - DNA, 20 bp, Artificial Sequence
  Description of Artificial Sequence: Synthetic oligonucleotide
  Target: LAMA2; (-) strand; PAM type: NRG; PAM sequence: AGG
gcttaacttttccttatccc

SEQ ID NO: 73517 - DNA, 20 bp, Artificial Sequence
  Description of Artificial Sequence: Synthetic oligonucleotide
  Target: LAMA2; (-) strand; PAM type: NRG; PAM sequence: CAG
ggcttaacttttccttatcc

SEQ ID NO: 73518 - DNA, 20 bp, Artificial Sequence
  Description of Artificial Sequence: Synthetic oligonucleotide
  Target: LAMA2; (-) strand; PAM type: NRG; PAM sequence: AGG
attagaggtatgaagaatgg

SEQ ID NO: 73519 - DNA, 20 bp, Artificial Sequence
  Description of Artificial Sequence: Synthetic oligonucleotide
  Target: LAMA2; (-) strand; PAM type: NRG; PAM sequence: GAG
tattagaggtatgaagaatg

SEQ ID NO: 73520 - DNA, 20 bp, Artificial Sequence
  Description of Artificial Sequence: Synthetic oligonucleotide
  Target: LAMA2; (-) strand; PAM type: NRG; PAM sequence: TGG
cttattagaggtatgaagaa

SEQ ID NO: 73521 - DNA, 20 bp, Artificial Sequence
  Description of Artificial Sequence: Synthetic oligonucleotide
  Target: LAMA2; (-) strand; PAM type: NRG; PAM sequence: AAG
aaagccttattagaggtatg

SEQ ID NO: 73522 - DNA, 20 bp, Artificial Sequence
  Description of Artificial Sequence: Synthetic oligonucleotide
  Target: LAMA2; (-) strand; PAM type: NRG; PAM sequence: AGG
cattggcaaagccttattag

SEQ ID NO: 73523 - DNA, 20 bp, Artificial Sequence
  Description of Artificial Sequence: Synthetic oligonucleotide
  Target: LAMA2; (-) strand; PAM type: NRG; PAM sequence: GAG
ccattggcaaagccttatta

SEQ ID NO: 73524 - DNA, 20 bp, Artificial Sequence
  Description of Artificial Sequence: Synthetic oligonucleotide
  Target: LAMA2; (-) strand; PAM type: NRG; PAM sequence: TAG
agccattggcaaagccttat

SEQ ID NO: 73525 - DNA, 20 bp, Artificial Sequence
  Description of Artificial Sequence: Synthetic oligonucleotide
  Target: LAMA2; (-) strand; PAM type: NRG; PAM sequence: AAG
aatgattgcagccattggca

SEQ ID NO: 73526 - DNA, 20 bp, Artificial Sequence
  Description of Artificial Sequence: Synthetic oligonucleotide
  Target: LAMA2; (-) strand; PAM type: NRG; PAM sequence: TGG
tgtaaaatgattgcagccat

SEQ ID NO: 73527 - DNA, 20 bp, Artificial Sequence
  Description of Artificial Sequence: Synthetic oligonucleotide
  Target: LAMA2; (-) strand; PAM type: NRG; PAM sequence: CAG
ggatggttgtaaaatgattg

SEQ ID NO: 73528 - DNA, 20 bp, Artificial Sequence
  Description of Artificial Sequence: Synthetic oligonucleotide
  Target: LAMA2; (-) strand; PAM type: NRG; PAM sequence: TGG
taaacctaaacataagtgga

SEQ ID NO: 73529 - DNA, 20 bp, Artificial Sequence
  Description of Artificial Sequence: Synthetic oligonucleotide
  Target: LAMA2; (-) strand; PAM type: NRG; PAM sequence: TGG
ctgttaaacctaaacataag

SEQ ID NO: 73530 - DNA, 20 bp, Artificial Sequence
  Description of Artificial Sequence: Synthetic oligonucleotide
  Target: LAMA2; (-) strand; PAM type: NRG; PAM sequence: AAG
actctgttaaacctaaacat

SEQ ID NO: 73531 - DNA, 20 bp, Artificial Sequence
  Description of Artificial Sequence: Synthetic oligonucleotide
  Target: LAMA2; (-) strand; PAM type: NRG; PAM sequence: AAG
aagtatttcattatgaagcc

SEQ ID NO: 73532 - DNA, 20 bp, Artificial Sequence
  Description of Artificial Sequence: Synthetic oligonucleotide
  Target: LAMA2; (-) strand; PAM type: NRG; PAM sequence: AAG
taatgaagtatttcattatg

SEQ ID NO: 73533 - DNA, 20 bp, Artificial Sequence
  Description of Artificial Sequence: Synthetic oligonucleotide
  Target: LAMA2; (-) strand; PAM type: NRG; PAM sequence: AAG
atcataaaaatactttaatg

SEQ ID NO: 73534 - DNA, 20 bp, Artificial Sequence
  Description of Artificial Sequence: Synthetic oligonucleotide
  Target: LAMA2; (-) strand; PAM type: NRG; PAM sequence: CAG
actatgaacatatgtgtaaa

SEQ ID NO: 73535 - DNA, 20 bp, Artificial Sequence
  Description of Artificial Sequence: Synthetic oligonucleotide
  Target: LAMA2; (-) strand; PAM type: NRG; PAM sequence: CAG
gaatggcaaagactggataa

SEQ ID NO: 73536 - DNA, 20 bp, Artificial Sequence
  Description of Artificial Sequence: Synthetic oligonucleotide
  Target: LAMA2; (-) strand; PAM type: NRG; PAM sequence: TGG
tccatgtgaatggcaaagac

SEQ ID NO: 73537 - DNA, 20 bp, Artificial Sequence
  Description of Artificial Sequence: Synthetic oligonucleotide
  Target: LAMA2; (-) strand; PAM type: NRG; PAM sequence: AAG
ctgagtccatgtgaatggca

SEQ ID NO: 73538 - DNA, 20 bp, Artificial Sequence
  Description of Artificial Sequence: Synthetic oligonucleotide
  Target: LAMA2; (-) strand; PAM type: NRG; PAM sequence: TGG
ataaactgagtccatgtgaa

SEQ ID NO: 73539 - DNA, 20 bp, Artificial Sequence
  Description of Artificial Sequence: Synthetic oligonucleotide
  Target: LAMA2; (-) strand; PAM type: NRG; PAM sequence: GAG
ataaccagacactataaact

SEQ ID NO: 73540 - DNA, 20 bp, Artificial Sequence
  Description of Artificial Sequence: Synthetic oligonucleotide
  Target: LAMA2; (-) strand; PAM type: NRG; PAM sequence: CAG
aagatcttcagtagcataac

SEQ ID NO: 73541 - DNA, 20 bp, Artificial Sequence
  Description of Artificial Sequence: Synthetic oligonucleotide
  Target: LAMA2; (-) strand; PAM type: NRG; PAM sequence: TAG
taaagcaggaagatcttcag

SEQ ID NO: 73542 - DNA, 20 bp, Artificial Sequence
  Description of Artificial Sequence: Synthetic oligonucleotide
  Target: LAMA2; (-) strand; PAM type: NRG; PAM sequence: CAG
tggtaaagcaggaagatctt

SEQ ID NO: 73543 - DNA, 20 bp, Artificial Sequence
  Description of Artificial Sequence: Synthetic oligonucleotide
  Target: LAMA2; (-) strand; PAM type: NRG; PAM sequence: AAG
acagcaaatggtaaagcagg

SEQ ID NO: 73544 - DNA, 20 bp, Artificial Sequence
  Description of Artificial Sequence: Synthetic oligonucleotide
  Target: LAMA2; (-) strand; PAM type: NRG; PAM sequence: AGG
ttaacagcaaatggtaaagc

SEQ ID NO: 73545 - DNA, 20 bp, Artificial Sequence
  Description of Artificial Sequence: Synthetic oligonucleotide
  Target: LAMA2; (-) strand; PAM type: NRG; PAM sequence: CAG
cttaacagcaaatggtaaag

SEQ ID NO: 73546 - DNA, 20 bp, Artificial Sequence
  Description of Artificial Sequence: Synthetic oligonucleotide
  Target: LAMA2; (-) strand; PAM type: NRG; PAM sequence: AAG
ttacttaacagcaaatggta

SEQ ID NO: 73547 - DNA, 20 bp, Artificial Sequence
  Description of Artificial Sequence: Synthetic oligonucleotide
  Target: LAMA2; (-) strand; PAM type: NRG; PAM sequence: TGG
tacaattacttaacagcaaa

SEQ ID NO: 73548 - DNA, 20 bp, Artificial Sequence
  Description of Artificial Sequence: Synthetic oligonucleotide
  Target: LAMA2; (-) strand; PAM type: NRG; PAM sequence: CAG
gtctgactacaattacttaa

SEQ ID NO: 73549 - DNA, 20 bp, Artificial Sequence
  Description of Artificial Sequence: Synthetic oligonucleotide
  Target: LAMA2; (-) strand; PAM type: NRG; PAM sequence: CAG
agtccatggggcttcctggg

SEQ ID NO: 73550 - DNA, 20 bp, Artificial Sequence
  Description of Artificial Sequence: Synthetic oligonucleotide
  Target: LAMA2; (-) strand; PAM type: NRG; PAM sequence: GGG
ctgagtccatggggcttcct

SEQ ID NO: 73551 - DNA, 20 bp, Artificial Sequence
  Description of Artificial Sequence: Synthetic oligonucleotide
  Target: LAMA2; (-) strand; PAM type: NRG; PAM sequence: TGG
actgagtccatggggcttcc

SEQ ID NO: 73552 - DNA, 20 bp, Artificial Sequence
  Description of Artificial Sequence: Synthetic oligonucleotide
  Target: LAMA2; (-) strand; PAM type: NRG; PAM sequence: GGG
gggataaaactgagtccatg

SEQ ID NO: 73553 - DNA, 20 bp, Artificial Sequence
  Description of Artificial Sequence: Synthetic oligonucleotide
  Target: LAMA2; (-) strand; PAM type: NRG; PAM sequence: GGG
agggataaaactgagtccat

SEQ ID NO: 73554 - DNA, 20 bp, Artificial Sequence
  Description of Artificial Sequence: Synthetic oligonucleotide
  Target: LAMA2; (-) strand; PAM type: NRG; PAM sequence: TGG
aagggataaaactgagtcca

SEQ ID NO: 73555 - DNA, 20 bp, Artificial Sequence
  Description of Artificial Sequence: Synthetic oligonucleotide
  Target: LAMA2; (-) strand; PAM type: NRG; PAM sequence: GAG
gatacccaagggataaaact

SEQ ID NO: 73556 - DNA, 20 bp, Artificial Sequence
  Description of Artificial Sequence: Synthetic oligonucleotide
  Target: LAMA2; (-) strand; PAM type: NRG; PAM sequence: GGG
tcctcatttgtgatacccaa

SEQ ID NO: 73557 - DNA, 20 bp, Artificial Sequence
  Description of Artificial Sequence: Synthetic oligonucleotide
  Target: LAMA2; (-) strand; PAM type: NRG; PAM sequence: AGG
ttcctcatttgtgataccca

SEQ ID NO: 73558 - DNA, 20 bp, Artificial Sequence
  Description of Artificial Sequence: Synthetic oligonucleotide
  Target: LAMA2; (-) strand; PAM type: NRG; PAM sequence: AAG
cttcctcatttgtgataccc

SEQ ID NO: 73559 - DNA, 20 bp, Artificial Sequence
  Description of Artificial Sequence: Synthetic oligonucleotide
  Target: LAMA2; (-) strand; PAM type: NRG; PAM sequence: TGG
gaagtagtatttcaccaata

SEQ ID NO: 73560 - DNA, 20 bp, Artificial Sequence
  Description of Artificial Sequence: Synthetic oligonucleotide
  Target: LAMA2; (-) strand; PAM type: NRG; PAM sequence: TAG
atatctttaggaaacagaag

SEQ ID NO: 73561 - DNA, 20 bp, Artificial Sequence
  Description of Artificial Sequence: Synthetic oligonucleotide
  Target: LAMA2; (-) strand; PAM type: NRG; PAM sequence: AAG
aacatatctttaggaaacag

SEQ ID NO: 73562 - DNA, 20 bp, Artificial Sequence
  Description of Artificial Sequence: Synthetic oligonucleotide
  Target: LAMA2; (-) strand; PAM type: NRG; PAM sequence: CAG
aacaacatatctttaggaaa

SEQ ID NO: 73563 - DNA, 20 bp, Artificial Sequence
  Description of Artificial Sequence: Synthetic oligonucleotide
  Target: LAMA2; (-) strand; PAM type: NRG; PAM sequence: AGG
ttagaaaacaacatatcttt

SEQ ID NO: 73564 - DNA, 20 bp, Artificial Sequence
  Description of Artificial Sequence: Synthetic oligonucleotide
  Target: LAMA2; (-) strand; PAM type: NRG; PAM sequence: TAG
cttagaaaacaacatatctt

SEQ ID NO: 73565 - DNA, 20 bp, Artificial Sequence
  Description of Artificial Sequence: Synthetic oligonucleotide
  Target: LAMA2; (-) strand; PAM type: NRG; PAM sequence: TAG
caaaatctagaagcaaatct

SEQ ID NO: 73566 - DNA, 20 bp, Artificial Sequence
  Description of Artificial Sequence: Synthetic oligonucleotide
  Target: LAMA2; (-) strand; PAM type: NRG; PAM sequence: AAG
catttaatcacaaaatctag

SEQ ID NO: 73567 - DNA, 20 bp, Artificial Sequence
  Description of Artificial Sequence: Synthetic oligonucleotide
  Target: LAMA2; (-) strand; PAM type: NRG; PAM sequence: TAG
aaacatttaatcacaaaatc

SEQ ID NO: 73568 - DNA, 20 bp, Artificial Sequence
  Description of Artificial Sequence: Synthetic oligonucleotide
  Target: LAMA2; (-) strand; PAM type: NRG; PAM sequence: AGG
tagacatttccatttaaagt

SEQ ID NO: 73569 - DNA, 20 bp, Artificial Sequence
  Description of Artificial Sequence: Synthetic oligonucleotide
  Target: LAMA2; (-) strand; PAM type: NRG; PAM sequence: TAG
atagacatttccatttaaag

SEQ ID NO: 73570 - DNA, 20 bp, Artificial Sequence
  Description of Artificial Sequence: Synthetic oligonucleotide
  Target: LAMA2; (-) strand; PAM type: NRG; PAM sequence: AAG
tctatagacatttccattta

SEQ ID NO: 73571 - DNA, 20 bp, Artificial Sequence
  Description of Artificial Sequence: Synthetic oligonucleotide
  Target: LAMA2; (-) strand; PAM type: NRG; PAM sequence: TAG
gccttcactagaaaagtcta

SEQ ID NO: 73572 - DNA, 20 bp, Artificial Sequence
  Description of Artificial Sequence: Synthetic oligonucleotide
  Target: LAMA2; (-) strand; PAM type: NRG; PAM sequence: AAG
tgtaaaagccttcactagaa

SEQ ID NO: 73573 - DNA, 20 bp, Artificial Sequence
  Description of Artificial Sequence: Synthetic oligonucleotide
  Target: LAMA2; (-) strand; PAM type: NRG; PAM sequence: TAG
acatttgtaaaagccttcac

SEQ ID NO: 73574 - DNA, 20 bp, Artificial Sequence
  Description of Artificial Sequence: Synthetic oligonucleotide
  Target: LAMA2; (-) strand; PAM type: NRG; PAM sequence: AAG
tcatcccttaacatttgtaa

SEQ ID NO: 73575 - DNA, 20 bp, Artificial Sequence
  Description of Artificial Sequence: Synthetic oligonucleotide
  Target: LAMA2; (-) strand; PAM type: NRG; PAM sequence: GAG
aatgccatgtgtcctgctgt

SEQ ID NO: 73576 - DNA, 20 bp, Artificial Sequence
  Description of Artificial Sequence: Synthetic oligonucleotide
  Target: LAMA2; (-) strand; PAM type: NRG; PAM sequence: GAG
caaaaggatgaataattttg

SEQ ID NO: 73577 - DNA, 20 bp, Artificial Sequence
  Description of Artificial Sequence: Synthetic oligonucleotide
  Target: LAMA2; (-) strand; PAM type: NRG; PAM sequence: TGG
cccaaaaggatgaataattt

SEQ ID NO: 73578 - DNA, 20 bp, Artificial Sequence
  Description of Artificial Sequence: Synthetic oligonucleotide
  Target: LAMA2; (-) strand; PAM type: NRG; PAM sequence: AGG
tggttatagttgtccccaaa

SEQ ID NO: 73579 - DNA, 20 bp, Artificial Sequence
  Description of Artificial Sequence: Synthetic oligonucleotide
  Target: LAMA2; (-) strand; PAM type: NRG; PAM sequence: AAG
atggttatagttgtccccaa

SEQ ID NO: 73580 - DNA, 20 bp, Artificial Sequence
  Description of Artificial Sequence: Synthetic oligonucleotide
  Target: LAMA2; (-) strand; PAM type: NRG; PAM sequence: TAG
gtcacaaaaaatcatggtta

SEQ ID NO: 73581 - DNA, 20 bp, Artificial Sequence
  Description of Artificial Sequence: Synthetic oligonucleotide
  Target: LAMA2; (-) strand; PAM type: NRG; PAM sequence: TGG
atgagtgtcacaaaaaatca

SEQ ID NO: 73582 - DNA, 20 bp, Artificial Sequence
  Description of Artificial Sequence: Synthetic oligonucleotide
  Target: LAMA2; (-) strand; PAM type: NRG; PAM sequence: GAG
tttccaattcaacaggttat

SEQ ID NO: 73583 - DNA, 20 bp, Artificial Sequence
  Description of Artificial Sequence: Synthetic oligonucleotide
  Target: LAMA2; (-) strand; PAM type: NRG; PAM sequence: AGG
taatatttttccaattcaac

SEQ ID NO: 73584 - DNA, 20 bp, Artificial Sequence
  Description of Artificial Sequence: Synthetic oligonucleotide
  Target: LAMA2; (-) strand; PAM type: NRG; PAM sequence: CAG
ttaatatttttccaattcaa

SEQ ID NO: 73585 - DNA, 20 bp, Artificial Sequence
  Description of Artificial Sequence: Synthetic oligonucleotide
  Target: LAMA2; (-) strand; PAM type: NRG; PAM sequence: CAG
ttttaaaagtgacatgagaa

SEQ ID NO: 73586 - DNA, 20 bp, Artificial Sequence
  Description of Artificial Sequence: Synthetic oligonucleotide
  Target: LAMA2; (-) strand; PAM type: NRG; PAM sequence: GAG
aagaattttaaaagtgacat

SEQ ID NO: 73587 - DNA, 20 bp, Artificial Sequence
  Description of Artificial Sequence: Synthetic oligonucleotide
  Target: LAMA2; (-) strand; PAM type: NRG; PAM sequence: AAG
aaaaaggagaagaattttaa

SEQ ID NO: 73588 - DNA, 20 bp, Artificial Sequence
  Description of Artificial Sequence: Synthetic oligonucleotide
  Target: LAMA2; (-) strand; PAM type: NRG; PAM sequence: AAG
tacaggaggcaaaaaaggag

SEQ ID NO: 73589 - DNA, 20 bp, Artificial Sequence
  Description of Artificial Sequence: Synthetic oligonucleotide
  Target: LAMA2; (-) strand; PAM type: NRG; PAM sequence: GAG
tgctacaggaggcaaaaaag

SEQ ID NO: 73590 - DNA, 20 bp, Artificial Sequence
  Description of Artificial Sequence: Synthetic oligonucleotide
  Target: LAMA2; (-) strand; PAM type: NRG; PAM sequence: AGG
catgctacaggaggcaaaaa

SEQ ID NO: 73591 - DNA, 20 bp, Artificial Sequence
  Description of Artificial Sequence: Synthetic oligonucleotide
  Target: LAMA2; (-) strand; PAM type: NRG; PAM sequence: AAG
tcatgctacaggaggcaaaa

SEQ ID NO: 73592 - DNA, 20 bp, Artificial Sequence
  Description of Artificial Sequence: Synthetic oligonucleotide
  Target: LAMA2; (-) strand; PAM type: NRG; PAM sequence: AGG
actaggactcatgctacagg

SEQ ID NO: 73593 - DNA, 20 bp, Artificial Sequence
  Description of Artificial Sequence: Synthetic oligonucleotide
  Target: LAMA2; (-) strand; PAM type: NRG; PAM sequence: GAG
aactaggactcatgctacag

SEQ ID NO: 73594 - DNA, 20 bp, Artificial Sequence
  Description of Artificial Sequence: Synthetic oligonucleotide
  Target: LAMA2; (-) strand; PAM type: NRG; PAM sequence: AGG
caaactaggactcatgctac

SEQ ID NO: 73595 - DNA, 20 bp, Artificial Sequence
  Description of Artificial Sequence: Synthetic oligonucleotide
  Target: LAMA2; (-) strand; PAM type: NRG; PAM sequence: CAG
tcaaactaggactcatgcta

SEQ ID NO: 73596 - DNA, 20 bp, Artificial Sequence
  Description of Artificial Sequence: Synthetic oligonucleotide
  Target: LAMA2; (-) strand; PAM type: NRG; PAM sequence: AGG
gtgtctagtttaatcaaact

SEQ ID NO: 73597 - DNA, 20 bp, Artificial Sequence
  Description of Artificial Sequence: Synthetic oligonucleotide
  Target: LAMA2; (-) strand; PAM type: NRG; PAM sequence: TAG
agtgtctagtttaatcaaac

SEQ ID NO: 73598 - DNA, 20 bp, Artificial Sequence
  Description of Artificial Sequence: Synthetic oligonucleotide
  Target: LAMA2; (-) strand; PAM type: NRG; PAM sequence: TAG
attggagaaaatcaagtgtc

SEQ ID NO: 73599 - DNA, 20 bp, Artificial Sequence
  Description of Artificial Sequence: Synthetic oligonucleotide
  Target: LAMA2; (-) strand; PAM type: NRG; PAM sequence: AAG
tgttaccattggagaaaatc

SEQ ID NO: 73600 - DNA, 20 bp, Artificial Sequence
  Description of Artificial Sequence: Synthetic oligonucleotide
  Target: LAMA2; (-) strand; PAM type: NRG; PAM sequence: GAG
ttaaaaacatgttaccattg

SEQ ID NO: 73601 - DNA, 20 bp, Artificial Sequence
  Description of Artificial Sequence: Synthetic oligonucleotide
  Target: LAMA2; (-) strand; PAM type: NRG; PAM sequence: TGG
ttttaaaaacatgttaccat

SEQ ID NO: 73602 - DNA, 20 bp, Artificial Sequence
  Description of Artificial Sequence: Synthetic oligonucleotide
  Target: LAMA2; (-) strand; PAM type: NRG; PAM sequence: AAG
aattggttccaacagagtaa

SEQ ID NO: 73603 - DNA, 20 bp, Artificial Sequence
  Description of Artificial Sequence: Synthetic oligonucleotide
  Target: LAMA2; (-) strand; PAM type: NRG; PAM sequence: GAG
tggcctaattggttccaaca

SEQ ID NO: 73604 - DNA, 20 bp, Artificial Sequence
  Description of Artificial Sequence: Synthetic oligonucleotide
  Target: LAMA2; (-) strand; PAM type: NRG; PAM sequence: CAG
attggcctaattggttccaa

SEQ ID NO: 73605 - DNA, 20 bp, Artificial Sequence
  Description of Artificial Sequence: Synthetic oligonucleotide
  Target: LAMA2; (-) strand; PAM type: NRG; PAM sequence: TGG
gttcctcacattggcctaat

SEQ ID NO: 73606 - DNA, 20 bp, Artificial Sequence
  Description of Artificial Sequence: Synthetic oligonucleotide
  Target: LAMA2; (-) strand; PAM type: NRG; PAM sequence: TGG
ccttccaaagttcctcacat

SEQ ID NO: 73607 - DNA, 20 bp, Artificial Sequence
  Description of Artificial Sequence: Synthetic oligonucleotide
  Target: LAMA2; (-) strand; PAM type: NRG; PAM sequence: AAG
ggctgctcatgttccttcca

SEQ ID NO: 73608 - DNA, 20 bp, Artificial Sequence
  Description of Artificial Sequence: Synthetic oligonucleotide
  Target: LAMA2; (-) strand; PAM type: NRG; PAM sequence: TGG
cgttttgctgttagcaagtt

SEQ ID NO: 73609 - DNA, 20 bp, Artificial Sequence
  Description of Artificial Sequence: Synthetic oligonucleotide
  Target: LAMA2; (-) strand; PAM type: NRG; PAM sequence: AAG
aaatacgttttgctgttagc

SEQ ID NO: 73610 - DNA, 20 bp, Artificial Sequence
  Description of Artificial Sequence: Synthetic oligonucleotide
  Target: LAMA2; (-) strand; PAM type: NRG; PAM sequence: TAG
agaaaaatacgttttgctgt

SEQ ID NO: 73611 - DNA, 20 bp, Artificial Sequence
  Description of Artificial Sequence: Synthetic oligonucleotide
  Target: LAMA2; (-) strand; PAM type: NRG; PAM sequence: CAG
cgtccttttcatgctgcctt

SEQ ID NO: 73612 - DNA, 20 bp, Artificial Sequence
  Description of Artificial Sequence: Synthetic oligonucleotide
  Target: LAMA2; (-) strand; PAM type: NRG; PAM sequence: GAG
cgtggaactcacagtcctta

SEQ ID NO: 73613 - DNA, 20 bp, Artificial Sequence
  Description of Artificial Sequence: Synthetic oligonucleotide
  Target: LAMA2; (-) strand; PAM type: NRG; PAM sequence: TAG
cccgtggaactcacagtcct

SEQ ID NO: 73614 - DNA, 20 bp, Artificial Sequence
  Description of Artificial Sequence: Synthetic oligonucleotide
  Target: LAMA2; (-) strand; PAM type: NRG; PAM sequence: CAG
aaaaggacccgtggaactca

SEQ ID NO: 73615 - DNA, 20 bp, Artificial Sequence
  Description of Artificial Sequence: Synthetic oligonucleotide
  Target: LAMA2; (-) strand; PAM type: NRG; PAM sequence: TGG
ctgaagctcaaaaggacccg

SEQ ID NO: 73616 - DNA, 20 bp, Artificial Sequence
  Description of Artificial Sequence: Synthetic oligonucleotide
  Target: LAMA2; (-) strand; PAM type: NRG; PAM sequence: AGG
ctggatttctgaagctcaaa

SEQ ID NO: 73617 - DNA, 20 bp, Artificial Sequence
  Description of Artificial Sequence: Synthetic oligonucleotide
  Target: LAMA2; (-) strand; PAM type: NRG; PAM sequence: AAG
gctggatttctgaagctcaa

SEQ ID NO: 73618 - DNA, 20 bp, Artificial Sequence
  Description of Artificial Sequence: Synthetic oligonucleotide
  Target: LAMA2; (-) strand; PAM type: NRG; PAM sequence: AAG
tgctgagagctggatttctg

SEQ ID NO: 73619 - DNA, 20 bp, Artificial Sequence
  Description of Artificial Sequence: Synthetic oligonucleotide
  Target: LAMA2; (-) strand; PAM type: NRG; PAM sequence: TGG
atttatgaagtgctgagagc

SEQ ID NO: 73620 - DNA, 20 bp, Artificial Sequence
  Description of Artificial Sequence: Synthetic oligonucleotide
  Target: LAMA2; (-) strand; PAM type: NRG; PAM sequence: GAG
aatgatttatgaagtgctga

SEQ ID NO: 73621 - DNA, 20 bp, Artificial Sequence
  Description of Artificial Sequence: Synthetic oligonucleotide
  Target: LAMA2; (-) strand; PAM type: NRG; PAM sequence: GAG
gaaatgatttatgaagtgct

SEQ ID NO: 73622 - DNA, 20 bp, Artificial Sequence
  Description of Artificial Sequence: Synthetic oligonucleotide
  Target: LAMA2; (-) strand; PAM type: NRG; PAM sequence: AAG
caggtcagaaatgatttatg

SEQ ID NO: 73623 - DNA, 20 bp, Artificial Sequence
  Description of Artificial Sequence: Synthetic oligonucleotide
  Target: LAMA2; (-) strand; PAM type: NRG; PAM sequence: CAG
caacttcagtgacatcaggt

SEQ ID NO: 73624 - DNA, 20 bp, Artificial Sequence
  Description of Artificial Sequence: Synthetic oligonucleotide
  Target: LAMA2; (-) strand; PAM type: NRG; PAM sequence: AGG
aatacaacttcagtgacatc

SEQ ID NO: 73625 - DNA, 20 bp, Artificial Sequence
  Description of Artificial Sequence: Synthetic oligonucleotide
  Target: LAMA2; (-) strand; PAM type: NRG; PAM sequence: CAG
taatacaacttcagtgacat

SEQ ID NO: 73626 - DNA, 20 bp, Artificial Sequence
  Description of Artificial Sequence: Synthetic oligonucleotide
  Target: LAMA2; (-) strand; PAM type: NRG; PAM sequence: CAG
accacataataatacaactt

SEQ ID NO: 73627 - DNA, 20 bp, Artificial Sequence
  Description of Artificial Sequence: Synthetic oligonucleotide
  Target: LAMA2; (-) strand; PAM type: NRG; PAM sequence: AGG
gaaaagctaccatttttaag

SEQ ID NO: 73628 - DNA, 20 bp, Artificial Sequence
  Description of Artificial Sequence: Synthetic oligonucleotide
  Target: LAMA2; (-) strand; PAM type: NRG; PAM sequence: GAG
tgaaaagctaccatttttaa

SEQ ID NO: 73629 - DNA, 20 bp, Artificial Sequence
  Description of Artificial Sequence: Synthetic oligonucleotide
  Target: LAMA2; (-) strand; PAM type: NRG; PAM sequence: AAG
tctgaaaagctaccattttt

SEQ ID NO: 73630 - DNA, 20 bp, Artificial Sequence
  Description of Artificial Sequence: Synthetic oligonucleotide
  Target: LAMA2; (-) strand; PAM type: NRG; PAM sequence: AAG
agttaacaaaagtttctgaa

SEQ ID NO: 73631 - DNA, 20 bp, Artificial Sequence
  Description of Artificial Sequence: Synthetic oligonucleotide
  Target: LAMA2; (-) strand; PAM type: NRG; PAM sequence: AAG
gaatgcaaagcagttaacaa

SEQ ID NO: 73632 - DNA, 20 bp, Artificial Sequence
  Description of Artificial Sequence: Synthetic oligonucleotide
  Target: LAMA2; (-) strand; PAM type: NRG; PAM sequence: CAG
tctcaagatggaatgcaaag

SEQ ID NO: 73633 - DNA, 20 bp, Artificial Sequence
  Description of Artificial Sequence: Synthetic oligonucleotide
  Target: LAMA2; (-) strand; PAM type: NRG; PAM sequence: AAG
ttttctcaagatggaatgca

SEQ ID NO: 73634 - DNA, 20 bp, Artificial Sequence
  Description of Artificial Sequence: Synthetic oligonucleotide
  Target: LAMA2; (-) strand; PAM type: NRG; PAM sequence: TGG
atacagacattttctcaaga

SEQ ID NO: 73635 - DNA, 20 bp, Artificial Sequence
  Description of Artificial Sequence: Synthetic oligonucleotide
  Target: LAMA2; (-) strand; PAM type: NRG; PAM sequence: AAG
aactatacagacattttctc

SEQ ID NO: 73636 - DNA, 20 bp, Artificial Sequence
  Description of Artificial Sequence: Synthetic oligonucleotide
  Target: LAMA2; (-) strand; PAM type: NRG; PAM sequence: CAG
atgatgctcatctaactata

SEQ ID NO: 73637 - DNA, 20 bp, Artificial Sequence
  Description of Artificial Sequence: Synthetic oligonucleotide
  Target: LAMA2; (-) strand; PAM type: NRG; PAM sequence: GAG
tgatttaaaaacaaggagag

SEQ ID NO: 73638 - DNA, 20 bp, Artificial Sequence
  Description of Artificial Sequence: Synthetic oligonucleotide
  Target: LAMA2; (-) strand; PAM type: NRG; PAM sequence: AGG
tgtgatttaaaaacaaggag

SEQ ID NO: 73639 - DNA, 20 bp, Artificial Sequence
  Description of Artificial Sequence: Synthetic oligonucleotide
  Target: LAMA2; (-) strand; PAM type: NRG; PAM sequence: GAG
atgtgatttaaaaacaagga

SEQ ID NO: 73640 - DNA, 20 bp, Artificial Sequence
  Description of Artificial Sequence: Synthetic oligonucleotide
  Target: LAMA2; (-) strand; PAM type: NRG; PAM sequence: GAG
ggatgtgatttaaaaacaag

SEQ ID NO: 73641 - DNA, 20 bp, Artificial Sequence
  Description of Artificial Sequence: Synthetic oligonucleotide
  Target: LAMA2; (-) strand; PAM type: NRG; PAM sequence: AGG
ttggatgtgatttaaaaaca

SEQ ID NO: 73642 - DNA, 20 bp, Artificial Sequence
  Description of Artificial Sequence: Synthetic oligonucleotide
  Target: LAMA2; (-) strand; PAM type: NRG; PAM sequence: AAG
tttggatgtgatttaaaaac

SEQ ID NO: 73643 - DNA, 20 bp, Artificial Sequence
  Description of Artificial Sequence: Synthetic oligonucleotide
  Target: LAMA2; (-) strand; PAM type: NRG; PAM sequence: TGG
ctgcaagcctgatgtcattt

SEQ ID NO: 73644 - DNA, 20 bp, Artificial Sequence
  Description of Artificial Sequence: Synthetic oligonucleotide
  Target: LAMA2; (-) strand; PAM type: NRG; PAM sequence: AAG
ggaaaaaatgagacggctgc

SEQ ID NO: 73645 - DNA, 20 bp, Artificial Sequence
  Description of Artificial Sequence: Synthetic oligonucleotide
  Target: LAMA2; (-) strand; PAM type: NRG; PAM sequence: CGG
aataaaaggaaaaaatgaga

SEQ ID NO: 73646 - DNA, 20 bp, Artificial Sequence
  Description of Artificial Sequence: Synthetic oligonucleotide
  Target: LAMA2; (-) strand; PAM type: NRG; PAM sequence: GAG
tgtaaataaaaggaaaaaat

SEQ ID NO: 73647 - DNA, 20 bp, Artificial Sequence
  Description of Artificial Sequence: Synthetic oligonucleotide
  Target: LAMA2; (-) strand; PAM type: NRG; PAM sequence: AGG
gtgtgaagagtgtaaataaa

SEQ ID NO: 73648 - DNA, 20 bp, Artificial Sequence
  Description of Artificial Sequence: Synthetic oligonucleotide
  Target: LAMA2; (-) strand; PAM type: NRG; PAM sequence: AAG
agtgtgaagagtgtaaataa

SEQ ID NO: 73649 - DNA, 20 bp, Artificial Sequence
  Description of Artificial Sequence: Synthetic oligonucleotide
  Target: LAMA2; (-) strand; PAM type: NRG; PAM sequence: GAG
aattgccaatgaagtgtgaa

SEQ ID NO: 73650 - DNA, 20 bp, Artificial Sequence
  Description of Artificial Sequence: Synthetic oligonucleotide
  Target: LAMA2; (-) strand; PAM type: NRG; PAM sequence: AAG
tcaattgccaatgaagtgtg

SEQ ID NO: 73651 - DNA, 20 bp, Artificial Sequence
  Description of Artificial Sequence: Synthetic oligonucleotide
  Target: LAMA2; (-) strand; PAM type: NRG; PAM sequence: AAG
ggtgacctcaattgccaatg

SEQ ID NO: 73652 - DNA, 20 bp, Artificial Sequence
  Description of Artificial Sequence: Synthetic oligonucleotide
  Target: LAMA2; (-) strand; PAM type: NRG; PAM sequence: TGG
cttcaccctaaattttaaag

SEQ ID NO: 73653 - DNA, 20 bp, Artificial Sequence
  Description of Artificial Sequence: Synthetic oligonucleotide
  Target: LAMA2; (-) strand; PAM type: NRG; PAM sequence: AAG
agccttcaccctaaatttta

SEQ ID NO: 73654 - DNA, 20 bp, Artificial Sequence
  Description of Artificial Sequence: Synthetic oligonucleotide
  Target: LAMA2; (-) strand; PAM type: NRG; PAM sequence: TAG
cagtttgtcaagctggtctt

SEQ ID NO: 73655 - DNA, 20 bp, Artificial Sequence
  Description of Artificial Sequence: Synthetic oligonucleotide
  Target: LAMA2; (-) strand; PAM type: NRG; PAM sequence: TGG
ccgccaacagtttgtcaagc

SEQ ID NO: 73656 - DNA, 20 bp, Artificial Sequence
  Description of Artificial Sequence: Synthetic oligonucleotide
  Target: LAMA2; (-) strand; PAM type: NRG; PAM sequence: AAG
cattccgccaacagtttgtc

SEQ ID NO: 73657 - DNA, 20 bp, Artificial Sequence
  Description of Artificial Sequence: Synthetic oligonucleotide
  Target: LAMA2; (-) strand; PAM type: NRG; PAM sequence: CAG
aaaagagagcattccgccaa

SEQ ID NO: 73658 - DNA, 20 bp, Artificial Sequence
  Description of Artificial Sequence: Synthetic oligonucleotide
  Target: LAMA2; (-) strand; PAM type: NRG; PAM sequence: GAG
aaacgaagacttgcaaaaga

SEQ ID NO: 73659 - DNA, 20 bp, Artificial Sequence
  Description of Artificial Sequence: Synthetic oligonucleotide
  Target: LAMA2; (-) strand; PAM type: NRG; PAM sequence: GAG
caaaacgaagacttgcaaaa

SEQ ID NO: 73660 - DNA, 20 bp, Artificial Sequence
  Description of Artificial Sequence: Synthetic oligonucleotide
  Target: LAMA2; (-) strand; PAM type: NRG; PAM sequence: AAG
ttcaaaacgaagacttgcaa

SEQ ID NO: 73661 - DNA, 20 bp, Artificial Sequence
  Description of Artificial Sequence: Synthetic oligonucleotide
  Target: LAMA2; (-) strand; PAM type: NRG; PAM sequence: AAG
cacattctttcttcaaaacg

SEQ ID NO: 73662 - DNA, 20 bp, Artificial Sequence
  Description of Artificial Sequence: Synthetic oligonucleotide
  Target: LAMA2; (-) strand; PAM type: NRG; PAM sequence: AAG
accctgcattgatagatgag

SEQ ID NO: 73663 - DNA, 20 bp, Artificial Sequence
  Description of Artificial Sequence: Synthetic oligonucleotide
  Target: LAMA2; (-) strand; PAM type: NRG; PAM sequence: GAG
tgcaccctgcattgatagat

SEQ ID NO: 73664 - DNA, 20 bp, Artificial Sequence
  Description of Artificial Sequence: Synthetic oligonucleotide
  Target: LAMA2; (-) strand; PAM type: NRG; PAM sequence: TAG
gatgctgcaccctgcattga

SEQ ID NO: 73665 - DNA, 20 bp, Artificial Sequence
  Description of Artificial Sequence: Synthetic oligonucleotide
  Target: LAMA2; (-) strand; PAM type: NRG; PAM sequence: GGG
caacacaacattaataaata

SEQ ID NO: 73666 - DNA, 20 bp, Artificial Sequence
  Description of Artificial Sequence: Synthetic oligonucleotide
  Target: LAMA2; (-) strand; PAM type: NRG; PAM sequence: AGG
ccaacacaacattaataaat

SEQ ID NO: 73667 - DNA, 20 bp, Artificial Sequence
  Description of Artificial Sequence: Synthetic oligonucleotide
  Target: LAMA2; (-) strand; PAM type: NRG; PAM sequence: TAG
accaacacaacattaataaa

SEQ ID NO: 73668 - DNA, 20 bp, Artificial Sequence
  Description of Artificial Sequence: Synthetic oligonucleotide
  Target: LAMA2; (-) strand; PAM type: NRG; PAM sequence: GGG
tacctctgcacgtacctaat

SEQ ID NO: 73669 - DNA, 20 bp, Artificial Sequence
  Description of Artificial Sequence: Synthetic oligonucleotide
  Target: LAMA2; (-) strand; PAM type: NRG; PAM sequence: TGG
gtacctctgcacgtacctaa

SEQ ID NO: 73670 - DNA, 20 bp, Artificial Sequence
  Description of Artificial Sequence: Synthetic oligonucleotide
  Target: LAMA2; (-) strand; PAM type: NRG; PAM sequence: AGG
accacctctcagatggtttc

SEQ ID NO: 73671 - DNA, 20 bp, Artificial Sequence
  Description of Artificial Sequence: Synthetic oligonucleotide
  Target: LAMA2; (-) strand; PAM type: NRG; PAM sequence: CAG
taccacctctcagatggttt

SEQ ID NO: 73672 - DNA, 20 bp, Artificial Sequence
  Description of Artificial Sequence: Synthetic oligonucleotide
  Target: LAMA2; (-) strand; PAM type: NRG; PAM sequence: TGG
atgggataccacctctcaga

SEQ ID NO: 73673 - DNA, 20 bp, Artificial Sequence
  Description of Artificial Sequence: Synthetic oligonucleotide
  Target: LAMA2; (-) strand; PAM type: NRG; PAM sequence: CAG
aaaaatgggataccacctct

SEQ ID NO: 73674 - DNA, 20 bp, Artificial Sequence
  Description of Artificial Sequence: Synthetic oligonucleotide
  Target: LAMA2; (-) strand; PAM type: NRG; PAM sequence: GGG
ttgaatagattatgaaaaat

SEQ ID NO: 73675 - DNA, 20 bp, Artificial Sequence
  Description of Artificial Sequence: Synthetic oligonucleotide
  Target: LAMA2; (-) strand; PAM type: NRG; PAM sequence: TGG
attgaatagattatgaaaaa

SEQ ID NO: 73676 - DNA, 20 bp, Artificial Sequence
  Description of Artificial Sequence: Synthetic oligonucleotide
  Target: LAMA2; (-) strand; PAM type: NRG; PAM sequence: TAG
atttttaaagttcaattgaa

SEQ ID NO: 73677 - DNA, 20 bp, Artificial Sequence
  Description of Artificial Sequence: Synthetic oligonucleotide
  Target: LAMA2; (-) strand; PAM type: NRG; PAM sequence: AAG
aagatgctcagttattttta

SEQ ID NO: 73678 - DNA, 20 bp, Artificial Sequence
  Description of Artificial Sequence: Synthetic oligonucleotide
  Target: LAMA2; (-) strand; PAM type: NRG; PAM sequence: CAG
tcttgtatataaaagatgct

SEQ ID NO: 73679 - DNA, 20 bp, Artificial Sequence
  Description of Artificial Sequence: Synthetic oligonucleotide
  Target: LAMA2; (-) strand; PAM type: NRG; PAM sequence: AAG
tgttaatgtcttgtatataa

SEQ ID NO: 73680 - DNA, 20 bp, Artificial Sequence
  Description of Artificial Sequence: Synthetic oligonucleotide
  Target: LAMA2; (-) strand; PAM type: NRG; PAM sequence: TAG
gttgctagcagtagatacca

SEQ ID NO: 73681 - DNA, 20 bp, Artificial Sequence
  Description of Artificial Sequence: Synthetic oligonucleotide
  Target: LAMA2; (-) strand; PAM type: NRG; PAM sequence: TAG
ctgttataagttgctagcag

SEQ ID NO: 73682 - DNA, 20 bp, Artificial Sequence
  Description of Artificial Sequence: Synthetic oligonucleotide
  Target: LAMA2; (-) strand; PAM type: NRG; PAM sequence: CAG
aaactgttataagttgctag

SEQ ID NO: 73683 - DNA, 20 bp, Artificial Sequence
  Description of Artificial Sequence: Synthetic oligonucleotide
  Target: LAMA2; (-) strand; PAM type: NRG; PAM sequence: TAG
ccaaaactgttataagttgc

SEQ ID NO: 73684 - DNA, 20 bp, Artificial Sequence
  Description of Artificial Sequence: Synthetic oligonucleotide
  Target: LAMA2; (-) strand; PAM type: NRG; PAM sequence: AAG
tttaccaccaaaactgttat

SEQ ID NO: 73685 - DNA, 20 bp, Artificial Sequence
  Description of Artificial Sequence: Synthetic oligonucleotide
  Target: LAMA2; (-) strand; PAM type: NRG; PAM sequence: AAG
attttgttttgttatgaagc

SEQ ID NO: 73686 - DNA, 20 bp, Artificial Sequence
  Description of Artificial Sequence: Synthetic oligonucleotide
  Target: LAMA2; (-) strand; PAM type: NRG; PAM sequence: AAG
tttaattttgttttgttatg

SEQ ID NO: 73687 - DNA, 20 bp, Artificial Sequence
  Description of Artificial Sequence: Synthetic oligonucleotide
  Target: LAMA2; (-) strand; PAM type: NRG; PAM sequence: GAG
tatattttaaattaacaact

SEQ ID NO: 73688 - DNA, 20 bp, Artificial Sequence
  Description of Artificial Sequence: Synthetic oligonucleotide
  Target: LAMA2; (-) strand; PAM type: NRG; PAM sequence: AGG
acatctgaatttctaaccta

SEQ ID NO: 73689 - DNA, 20 bp, Artificial Sequence
  Description of Artificial Sequence: Synthetic oligonucleotide
  Target: LAMA2; (-) strand; PAM type: NRG; PAM sequence: AAG
tacatctgaatttctaacct

SEQ ID NO: 73690 - DNA, 20 bp, Artificial Sequence
  Description of Artificial Sequence: Synthetic oligonucleotide
  Target: LAMA2; (-) strand; PAM type: NRG; PAM sequence: CAG
tttcaactaacttctttata

SEQ ID NO: 73691 - DNA, 20 bp, Artificial Sequence
  Description of Artificial Sequence: Synthetic oligonucleotide
  Target: LAMA2; (-) strand; PAM type: NRG; PAM sequence: GAG
aaaatacctttcatgcctat

SEQ ID NO: 73692 - DNA, 20 bp, Artificial Sequence
  Description of Artificial Sequence: Synthetic oligonucleotide
  Target: LAMA2; (-) strand; PAM type: NRG; PAM sequence: CAG
atggagcaacttcatagatc

SEQ ID NO: 73693 - DNA, 20 bp, Artificial Sequence
  Description of Artificial Sequence: Synthetic oligonucleotide
  Target: LAMA2; (-) strand; PAM type: NRG; PAM sequence: TAG
tacattatggagcaacttca

SEQ ID NO: 73694 - DNA, 20 bp, Artificial Sequence
  Description of Artificial Sequence: Synthetic oligonucleotide
  Target: LAMA2; (-) strand; PAM type: NRG; PAM sequence: GAG
cacctgactagtacattatg

SEQ ID NO: 73695 - DNA, 20 bp, Artificial Sequence
  Description of Artificial Sequence: Synthetic oligonucleotide
  Target: LAMA2; (-) strand; PAM type: NRG; PAM sequence: TGG
ttcacctgactagtacatta

SEQ ID NO: 73696 - DNA, 20 bp, Artificial Sequence
  Description of Artificial Sequence: Synthetic oligonucleotide
  Target: LAMA2; (-) strand; PAM type: NRG; PAM sequence: TAG
tttgtgctacttcacctgac

SEQ ID NO: 73697 - DNA, 20 bp, Artificial Sequence
  Description of Artificial Sequence: Synthetic oligonucleotide
  Target: LAMA2; (-) strand; PAM type: NRG; PAM sequence: AGG
caaaagaaaactgatacact

SEQ ID NO: 73698 - DNA, 20 bp, Artificial Sequence
  Description of Artificial Sequence: Synthetic oligonucleotide
  Target: LAMA2; (-) strand; PAM type: NRG; PAM sequence: TAG
acaaaagaaaactgatacac

SEQ ID NO: 73699 - DNA, 20 bp, Artificial Sequence
  Description of Artificial Sequence: Synthetic oligonucleotide
  Target: LAMA2; (-) strand; PAM type: NRG; PAM sequence: AAG
gtaatatgttgtgttaacaa

SEQ ID NO: 73700 - DNA, 20 bp, Artificial Sequence
  Description of Artificial Sequence: Synthetic oligonucleotide
  Target: LAMA2; (-) strand; PAM type: NRG; PAM sequence: TGG
gttttaagccattaagtttg

SEQ ID NO: 73701 - DNA, 20 bp, Artificial Sequence
  Description of Artificial Sequence: Synthetic oligonucleotide
  Target: LAMA2; (-) strand; PAM type: NRG; PAM sequence: AAG
ttgtgaggttttaagccatt

SEQ ID NO: 73702 - DNA, 20 bp, Artificial Sequence
  Description of Artificial Sequence: Synthetic oligonucleotide
  Target: LAMA2; (-) strand; PAM type: NRG; PAM sequence: AAG
agataaatttgtgaggtttt

SEQ ID NO: 73703 - DNA, 20 bp, Artificial Sequence
  Description of Artificial Sequence: Synthetic oligonucleotide
  Target: LAMA2; (-) strand; PAM type: NRG; PAM sequence: AGG
aactgtgagataaatttgtg

SEQ ID NO: 73704 - DNA, 20 bp, Artificial Sequence
  Description of Artificial Sequence: Synthetic oligonucleotide
  Target: LAMA2; (-) strand; PAM type: NRG; PAM sequence: GAG
aaactgtgagataaatttgt

SEQ ID NO: 73705 - DNA, 20 bp, Artificial Sequence
  Description of Artificial Sequence: Synthetic oligonucleotide
  Target: LAMA2; (-) strand; PAM type: NRG; PAM sequence: GAG
ctactaacctattaaactgt

SEQ ID NO: 73706 - DNA, 20 bp, Artificial Sequence
  Description of Artificial Sequence: Synthetic oligonucleotide
  Target: LAMA2; (-) strand; PAM type: NRG; PAM sequence: CAG
tagctcagtgagacttgtgt

SEQ ID NO: 73707 - DNA, 20 bp, Artificial Sequence
  Description of Artificial Sequence: Synthetic oligonucleotide
  Target: LAMA2; (-) strand; PAM type: NRG; PAM sequence: GAG
cacctggactttagctcagt

SEQ ID NO: 73708 - DNA, 20 bp, Artificial Sequence
  Description of Artificial Sequence: Synthetic oligonucleotide
  Target: LAMA2; (-) strand; PAM type: NRG; PAM sequence: CAG
cccacacctggactttagct

SEQ ID NO: 73709 - DNA, 20 bp, Artificial Sequence
  Description of Artificial Sequence: Synthetic oligonucleotide
  Target: LAMA2; (-) strand; PAM type: NRG; PAM sequence: TAG
tactacccacacctggactt

SEQ ID NO: 73710 - DNA, 20 bp, Artificial Sequence
  Description of Artificial Sequence: Synthetic oligonucleotide
  Target: LAMA2; (-) strand; PAM type: NRG; PAM sequence: TGG
aatgcaatactacccacacc

SEQ ID NO: 73711 - DNA, 20 bp, Artificial Sequence
  Description of Artificial Sequence: Synthetic oligonucleotide
  Target: LAMA2; (-) strand; PAM type: NRG; PAM sequence: AAG
tctaccttagagcctccaga

SEQ ID NO: 73712 - DNA, 20 bp, Artificial Sequence
  Description of Artificial Sequence: Synthetic oligonucleotide
  Target: LAMA2; (-) strand; PAM type: NRG; PAM sequence: CAG
gaattctaccttagagcctc

SEQ ID NO: 73713 - DNA, 20 bp, Artificial Sequence
  Description of Artificial Sequence: Synthetic oligonucleotide
  Target: LAMA2; (-) strand; PAM type: NRG; PAM sequence: GAG
agaaaatgaattctacctta

SEQ ID NO: 73714 - DNA, 20 bp, Artificial Sequence
  Description of Artificial Sequence: Synthetic oligonucleotide
  Target: LAMA2; (-) strand; PAM type: NRG; PAM sequence: TAG
ttagaaaatgaattctacct

SEQ ID NO: 73715 - DNA, 20 bp, Artificial Sequence
  Description of Artificial Sequence: Synthetic oligonucleotide
  Target: LAMA2; (-) strand; PAM type: NRG; PAM sequence: TAG
tatcctaaatgaatgaattt

SEQ ID NO: 73716 - DNA, 20 bp, Artificial Sequence
  Description of Artificial Sequence: Synthetic oligonucleotide
  Target: LAMA2; (-) strand; PAM type: NRG; PAM sequence: CAG
cctgtagaaactgattcttt

SEQ ID NO: 73717 - DNA, 20 bp, Artificial Sequence
  Description of Artificial Sequence: Synthetic oligonucleotide
  Target: LAMA2; (-) strand; PAM type: NRG; PAM sequence: TAG
caaaggatgcaggtagcctg

SEQ ID NO: 73718 - DNA, 20 bp, Artificial Sequence
  Description of Artificial Sequence: Synthetic oligonucleotide
  Target: LAMA2; (-) strand; PAM type: NRG; PAM sequence: TAG
catgagccaaaggatgcagg

SEQ ID NO: 73719 - DNA, 20 bp, Artificial Sequence
  Description of Artificial Sequence: Synthetic oligonucleotide
  Target: LAMA2; (-) strand; PAM type: NRG; PAM sequence: AGG
ggtcatgagccaaaggatgc

SEQ ID NO: 73720 - DNA, 20 bp, Artificial Sequence
  Description of Artificial Sequence: Synthetic oligonucleotide
  Target: LAMA2; (-) strand; PAM type: NRG; PAM sequence: CAG
gggtcatgagccaaaggatg

SEQ ID NO: 73721 - DNA, 20 bp, Artificial Sequence
  Description of Artificial Sequence: Synthetic oligonucleotide
  Target: LAMA2; (-) strand; PAM type: NRG; PAM sequence: AGG
aggaaggggtcatgagccaa

SEQ ID NO: 73722 - DNA, 20 bp, Artificial Sequence
  Description of Artificial Sequence: Synthetic oligonucleotide
  Target: LAMA2; (-) strand; PAM type: NRG; PAM sequence: AAG
gaggaaggggtcatgagcca

SEQ ID NO: 73723 - DNA, 20 bp, Artificial Sequence
  Description of Artificial Sequence: Synthetic oligonucleotide
  Target: LAMA2; (-) strand; PAM type: NRG; PAM sequence: GAG
aagatggaggaaggggtcat

SEQ ID NO: 73724 - DNA, 20 bp, Artificial Sequence
  Description of Artificial Sequence: Synthetic oligonucleotide
  Target: LAMA2; (-) strand; PAM type: NRG; PAM sequence: GGG
ggctttgaagatggaggaag

SEQ ID NO: 73725 - DNA, 20 bp, Artificial Sequence
  Description of Artificial Sequence: Synthetic oligonucleotide
  Target: LAMA2; (-) strand; PAM type: NRG; PAM sequence: GGG
tggctttgaagatggaggaa

SEQ ID NO: 73726 - DNA, 20 bp, Artificial Sequence
  Description of Artificial Sequence: Synthetic oligonucleotide
  Target: LAMA2; (-) strand; PAM type: NRG; PAM sequence: AGG
ctggctttgaagatggagga

SEQ ID NO: 73727 - DNA, 20 bp, Artificial Sequence
  Description of Artificial Sequence: Synthetic oligonucleotide
  Target: LAMA2; (-) strand; PAM type: NRG; PAM sequence: AAG
cctggctttgaagatggagg

SEQ ID NO: 73728 - DNA, 20 bp, Artificial Sequence
  Description of Artificial Sequence: Synthetic oligonucleotide
  Target: LAMA2; (-) strand; PAM type: NRG; PAM sequence: AGG
gttcctggctttgaagatgg

SEQ ID NO: 73729 - DNA, 20 bp, Artificial Sequence
  Description of Artificial Sequence: Synthetic oligonucleotide
  Target: LAMA2; (-) strand; PAM type: NRG; PAM sequence: GAG
tgttcctggctttgaagatg

SEQ ID NO: 73730 - DNA, 20 bp, Artificial Sequence
  Description of Artificial Sequence: Synthetic oligonucleotide
  Target: LAMA2; (-) strand; PAM type: NRG; PAM sequence: TGG
cctgttcctggctttgaaga

SEQ ID NO: 73731 - DNA, 20 bp, Artificial Sequence
  Description of Artificial Sequence: Synthetic oligonucleotide
  Target: LAMA2; (-) strand; PAM type: NRG; PAM sequence: AAG
tcaacctgttcctggctttg

SEQ ID NO: 73732 - DNA, 20 bp, Artificial Sequence
  Description of Artificial Sequence: Synthetic oligonucleotide
  Target: LAMA2; (-) strand; PAM type: NRG; PAM sequence: TGG
cgaaggattcaacctgttcc

SEQ ID NO: 73733 - DNA, 20 bp, Artificial Sequence
  Description of Artificial Sequence: Synthetic oligonucleotide
  Target: LAMA2; (-) strand; PAM type: NRG; PAM sequence: AGG
aggttagggtggtacaacga

SEQ ID NO: 73734 - DNA, 20 bp, Artificial Sequence
  Description of Artificial Sequence: Synthetic oligonucleotide
  Target: LAMA2; (-) strand; PAM type: NRG; PAM sequence: AAG
gaggttagggtggtacaacg

SEQ ID NO: 73735 - DNA, 20 bp, Artificial Sequence
  Description of Artificial Sequence: Synthetic oligonucleotide
  Target: LAMA2; (-) strand; PAM type: NRG; PAM sequence: TGG
ggcaaaagaagaggttaggg

SEQ ID NO: 73736 - DNA, 20 bp, Artificial Sequence
  Description of Artificial Sequence: Synthetic oligonucleotide
  Target: LAMA2; (-) strand; PAM type: NRG; PAM sequence: GGG
ggaggcaaaagaagaggtta

SEQ ID NO: 73737 - DNA, 20 bp, Artificial Sequence
  Description of Artificial Sequence: Synthetic oligonucleotide
  Target: LAMA2; (-) strand; PAM type: NRG; PAM sequence: AGG
gggaggcaaaagaagaggtt

SEQ ID NO: 73738 - DNA, 20 bp, Artificial Sequence
  Description of Artificial Sequence: Synthetic oligonucleotide
  Target: LAMA2; (-) strand; PAM type: NRG; PAM sequence: TAG
agggaggcaaaagaagaggt

SEQ ID NO: 73739 - DNA, 20 bp, Artificial Sequence
  Description of Artificial Sequence: Synthetic oligonucleotide
  Target: LAMA2; (-) strand; PAM type: NRG; PAM sequence: AGG
taagagggaggcaaaagaag

SEQ ID NO: 73740 - DNA, 20 bp, Artificial Sequence
  Description of Artificial Sequence: Synthetic oligonucleotide
  Target: LAMA2; (-) strand; PAM type: NRG; PAM sequence: GAG
ataagagggaggcaaaagaa

SEQ ID NO: 73741 - DNA, 20 bp, Artificial Sequence
  Description of Artificial Sequence: Synthetic oligonucleotide
  Target: LAMA2; (-) strand; PAM type: NRG; PAM sequence: AAG
gtataagagggaggcaaaag

SEQ ID NO: 73742 - DNA, 20 bp, Artificial Sequence
  Description of Artificial Sequence: Synthetic oligonucleotide
  Target: LAMA2; (-) strand; PAM type: NRG; PAM sequence: AAG
aaagtataagagggaggcaa

SEQ ID NO: 73743 - DNA, 20 bp, Artificial Sequence
  Description of Artificial Sequence: Synthetic oligonucleotide
  Target: LAMA2; (-) strand; PAM type: NRG; PAM sequence: AGG
tcctgaaaagtataagaggg

SEQ ID NO: 73744 - DNA, 20 bp, Artificial Sequence
  Description of Artificial Sequence: Synthetic oligonucleotide
  Target: LAMA2; (-) strand; PAM type: NRG; PAM sequence: GAG
gtcctgaaaagtataagagg

SEQ ID NO: 73745 - DNA, 20 bp, Artificial Sequence
  Description of Artificial Sequence: Synthetic oligonucleotide
  Target: LAMA2; (-) strand; PAM type: NRG; PAM sequence: GGG
gggtcctgaaaagtataaga

SEQ ID NO: 73746 - DNA, 20 bp, Artificial Sequence
  Description of Artificial Sequence: Synthetic oligonucleotide
  Target: LAMA2; (-) strand; PAM type: NRG; PAM sequence: AGG
agggtcctgaaaagtataag

SEQ ID NO: 73747 - DNA, 20 bp, Artificial Sequence
  Description of Artificial Sequence: Synthetic oligonucleotide
  Target: LAMA2; (-) strand; PAM type: NRG; PAM sequence: GAG
aagggtcctgaaaagtataa

SEQ ID NO: 73748 - DNA, 20 bp, Artificial Sequence
  Description of Artificial Sequence: Synthetic oligonucleotide
  Target: LAMA2; (-) strand; PAM type: NRG; PAM sequence: AAG
ataagggtcctgaaaagtat

SEQ ID NO: 73749 - DNA, 20 bp, Artificial Sequence
  Description of Artificial Sequence: Synthetic oligonucleotide
  Target: LAMA2; (-) strand; PAM type: NRG; PAM sequence: AAG
gtaatcataagggtcctgaa

SEQ ID NO: 73750 - DNA, 20 bp, Artificial Sequence
  Description of Artificial Sequence: Synthetic oligonucleotide
  Target: LAMA2; (-) strand; PAM type: NRG; PAM sequence: GGG
tgggctcaatgtaatcataa

SEQ ID NO: 73751 - DNA, 20 bp, Artificial Sequence
  Description of Artificial Sequence: Synthetic oligonucleotide
  Target: LAMA2; (-) strand; PAM type: NRG; PAM sequence: AGG
ctgggctcaatgtaatcata

SEQ ID NO: 73752 - DNA, 20 bp, Artificial Sequence
  Description of Artificial Sequence: Synthetic oligonucleotide
  Target: LAMA2; (-) strand; PAM type: NRG; PAM sequence: AAG
actgggctcaatgtaatcat

SEQ ID NO: 73753 - DNA, 20 bp, Artificial Sequence
  Description of Artificial Sequence: Synthetic oligonucleotide
  Target: LAMA2; (-) strand; PAM type: NRG; PAM sequence: GGG
atcaccctggataatccact

SEQ ID NO: 73754 - DNA, 20 bp, Artificial Sequence
  Description of Artificial Sequence: Synthetic oligonucleotide
  Target: LAMA2; (-) strand; PAM type: NRG; PAM sequence: TGG
gatcaccctggataatccac

SEQ ID NO: 73755 - DNA, 20 bp, Artificial Sequence
  Description of Artificial Sequence: Synthetic oligonucleotide
  Target: LAMA2; (-) strand; PAM type: NRG; PAM sequence: TGG
ttgagatgaaaggatcaccc

SEQ ID NO: 73756 - DNA, 20 bp, Artificial Sequence
  Description of Artificial Sequence: Synthetic oligonucleotide
  Target: LAMA2; (-) strand; PAM type: NRG; PAM sequence: AGG
gttaaagaccttgagatgaa

SEQ ID NO: 73757 - DNA, 20 bp, Artificial Sequence
  Description of Artificial Sequence: Synthetic oligonucleotide
  Target: LAMA2; (-) strand; PAM type: NRG; PAM sequence: AAG
agttaaagaccttgagatga

SEQ ID NO: 73758 - DNA, 20 bp, Artificial Sequence
  Description of Artificial Sequence: Synthetic oligonucleotide
  Target: LAMA2; (-) strand; PAM type: NRG; PAM sequence: GAG
atgattcagttaaagacctt

SEQ ID NO: 73759 - DNA, 20 bp, Artificial Sequence
  Description of Artificial Sequence: Synthetic oligonucleotide
  Target: LAMA2; (-) strand; PAM type: NRG; PAM sequence: AAG
ttgtagatatgattcagtta

SEQ ID NO: 73760 - DNA, 20 bp, Artificial Sequence
  Description of Artificial Sequence: Synthetic oligonucleotide
  Target: LAMA2; (-) strand; PAM type: NRG; PAM sequence: CAG
ggaactttgtagatatgatt

SEQ ID NO: 73761 - DNA, 20 bp, Artificial Sequence
  Description of Artificial Sequence: Synthetic oligonucleotide
  Target: LAMA2; (-) strand; PAM type: NRG; PAM sequence: TAG
ttatggcaaagggaactttg

SEQ ID NO: 73762 - DNA, 20 bp, Artificial Sequence
  Description of Artificial Sequence: Synthetic oligonucleotide
  Target: LAMA2; (-) strand; PAM type: NRG; PAM sequence: GGG
atgaccctttttatggcaaa

SEQ ID NO: 73763 - DNA, 20 bp, Artificial Sequence
  Description of Artificial Sequence: Synthetic oligonucleotide
  Target: LAMA2; (-) strand; PAM type: NRG; PAM sequence: AGG
tatgaccctttttatggcaa

SEQ ID NO: 73764 - DNA, 20 bp, Artificial Sequence
  Description of Artificial Sequence: Synthetic oligonucleotide
  Target: LAMA2; (-) strand; PAM type: NRG; PAM sequence: AAG
atatgaccctttttatggca

SEQ ID NO: 73765 - DNA, 20 bp, Artificial Sequence
  Description of Artificial Sequence: Synthetic oligonucleotide
  Target: LAMA2; (-) strand; PAM type: NRG; PAM sequence: TGG
tgtgaatatgacccttttta

SEQ ID NO: 73766 - DNA, 20 bp, Artificial Sequence
  Description of Artificial Sequence: Synthetic oligonucleotide
  Target: LAMA2; (-) strand; PAM type: NRG; PAM sequence: TGG
agacgtctatatttaattct

SEQ ID NO: 73767 - DNA, 20 bp, Artificial Sequence
  Description of Artificial Sequence: Synthetic oligonucleotide
  Target: LAMA2; (-) strand; PAM type: NRG; PAM sequence: AAG
gagtaaacagtggtccctca

SEQ ID NO: 73768 - DNA, 20 bp, Artificial Sequence
  Description of Artificial Sequence: Synthetic oligonucleotide
  Target: LAMA2; (-) strand; PAM type: NRG; PAM sequence: TGG
agttatggtagagtaaacag

SEQ ID NO: 73769 - DNA, 20 bp, Artificial Sequence
  Description of Artificial Sequence: Synthetic oligonucleotide
  Target: LAMA2; (-) strand; PAM type: NRG; PAM sequence: CAG
gctagttatggtagagtaaa

SEQ ID NO: 73770 - DNA, 20 bp, Artificial Sequence
  Description of Artificial Sequence: Synthetic oligonucleotide
  Target: LAMA2; (-) strand; PAM type: NRG; PAM sequence: GAG
gagataggctagttatggta

SEQ ID NO: 73771 - DNA, 20 bp, Artificial Sequence
  Description of Artificial Sequence: Synthetic oligonucleotide
  Target: LAMA2; (-) strand; PAM type: NRG; PAM sequence: TAG
atgagataggctagttatgg

SEQ ID NO: 73772 - DNA, 20 bp, Artificial Sequence
  Description of Artificial Sequence: Synthetic oligonucleotide
  Target: LAMA2; (-) strand; PAM type: NRG; PAM sequence: TGG
gaaatgagataggctagtta

SEQ ID NO: 73773 - DNA, 20 bp, Artificial Sequence
  Description of Artificial Sequence: Synthetic oligonucleotide
  Target: LAMA2; (-) strand; PAM type: NRG; PAM sequence: TAG
aaaattgaaatgagataggc

SEQ ID NO: 73774 - DNA, 20 bp, Artificial Sequence
  Description of Artificial Sequence: Synthetic oligonucleotide
  Target: LAMA2; (-) strand; PAM type: NRG; PAM sequence: AGG
ttagaaaattgaaatgagat

SEQ ID NO: 73775 - DNA, 20 bp, Artificial Sequence
  Description of Artificial Sequence: Synthetic oligonucleotide
  Target: LAMA2; (-) strand; PAM type: NRG; PAM sequence: TAG
attagaaaattgaaatgaga

SEQ ID NO: 73776 - DNA, 20 bp, Artificial Sequence
  Description of Artificial Sequence: Synthetic oligonucleotide
  Target: LAMA2; (-) strand; PAM type: NRG; PAM sequence: GAG
actgattagaaaattgaaat

SEQ ID NO: 73777 - DNA, 20 bp, Artificial Sequence
  Description of Artificial Sequence: Synthetic oligonucleotide
  Target: LAMA2; (-) strand; PAM type: NRG; PAM sequence: TAG
agagacaggtagtaactgat

SEQ ID NO: 73778 - DNA, 20 bp, Artificial Sequence
  Description of Artificial Sequence: Synthetic oligonucleotide
  Target: LAMA2; (-) strand; PAM type: NRG; PAM sequence: TAG
caagaactctaagagacagg

SEQ ID NO: 73779 - DNA, 20 bp, Artificial Sequence
  Description of Artificial Sequence: Synthetic oligonucleotide
  Target: LAMA2; (-) strand; PAM type: NRG; PAM sequence: AGG
taacaagaactctaagagac

SEQ ID NO: 73780 - DNA, 20 bp, Artificial Sequence
  Description of Artificial Sequence: Synthetic oligonucleotide
  Target: LAMA2; (-) strand; PAM type: NRG; PAM sequence: CAG
ctaacaagaactctaagaga

SEQ ID NO: 73781 - DNA, 20 bp, Artificial Sequence
  Description of Artificial Sequence: Synthetic oligonucleotide
  Target: LAMA2; (-) strand; PAM type: NRG; PAM sequence: GAG
tctgctaacaagaactctaa

SEQ ID NO: 73782 - DNA, 20 bp, Artificial Sequence
  Description of Artificial Sequence: Synthetic oligonucleotide
  Target: LAMA2; (-) strand; PAM type: NRG; PAM sequence: AAG
tttctgctaacaagaactct

SEQ ID NO: 73783 - DNA, 20 bp, Artificial Sequence
  Description of Artificial Sequence: Synthetic oligonucleotide
  Target: LAMA2; (-) strand; PAM type: NRG; PAM sequence: AAG
agaaatttgtttctgctaac

SEQ ID NO: 73784 - DNA, 20 bp, Artificial Sequence
  Description of Artificial Sequence: Synthetic oligonucleotide
  Target: LAMA2; (-) strand; PAM type: NRG; PAM sequence: CAG
ttgccaggcactttattaca

SEQ ID NO: 73785 - DNA, 20 bp, Artificial Sequence
  Description of Artificial Sequence: Synthetic oligonucleotide
  Target: LAMA2; (-) strand; PAM type: NRG; PAM sequence: AGG
tttaggacctactttttgcc

SEQ ID NO: 73786 - DNA, 20 bp, Artificial Sequence
  Description of Artificial Sequence: Synthetic oligonucleotide
  Target: LAMA2; (-) strand; PAM type: NRG; PAM sequence: CAG
atttaggacctactttttgc

SEQ ID NO: 73787 - DNA, 20 bp, Artificial Sequence
  Description of Artificial Sequence: Synthetic oligonucleotide
  Target: LAMA2; (-) strand; PAM type: NRG; PAM sequence: AGG
gggaaaataacattttattt

SEQ ID NO: 73788 - DNA, 20 bp, Artificial Sequence
  Description of Artificial Sequence: Synthetic oligonucleotide
  Target: LAMA2; (-) strand; PAM type: NRG; PAM sequence: TAG
ggggaaaataacattttatt

SEQ ID NO: 73789 - DNA, 20 bp, Artificial Sequence
  Description of Artificial Sequence: Synthetic oligonucleotide
  Target: LAMA2; (-) strand; PAM type: NRG; PAM sequence: GGG
tcctaataatctttcccttg

SEQ ID NO: 73790 - DNA, 20 bp, Artificial Sequence
  Description of Artificial Sequence: Synthetic oligonucleotide
  Target: LAMA2; (-) strand; PAM type: NRG; PAM sequence: GGG
ttcctaataatctttccctt

SEQ ID NO: 73791 - DNA, 20 bp, Artificial Sequence
  Description of Artificial Sequence: Synthetic oligonucleotide
  Target: LAMA2; (-) strand; PAM type: NRG; PAM sequence: TGG
attcctaataatctttccct

SEQ ID NO: 73792 - DNA, 20 bp, Artificial Sequence
  Description of Artificial Sequence: Synthetic oligonucleotide
  Target: LAMA2; (-) strand; PAM type: NRG; PAM sequence: AGG
aattagagctttttaaacaa

SEQ ID NO: 73793 - DNA, 20 bp, Artificial Sequence
  Description of Artificial Sequence: Synthetic oligonucleotide
  Target: LAMA2; (-) strand; PAM type: NRG; PAM sequence: AAG
taattagagctttttaaaca

SEQ ID NO: 73794 - DNA, 20 bp, Artificial Sequence
  Description of Artificial Sequence: Synthetic oligonucleotide
  Target: LAMA2; (-) strand; PAM type: NRG; PAM sequence: GAG
gctgtggttcttgttaatta

SEQ ID NO: 73795 - DNA, 20 bp, Artificial Sequence
  Description of Artificial Sequence: Synthetic oligonucleotide
  Target: LAMA2; (-) strand; PAM type: NRG; PAM sequence: TAG
ctgctgtggttcttgttaat

SEQ ID NO: 73796 - DNA, 20 bp, Artificial Sequence
  Description of Artificial Sequence: Synthetic oligonucleotide
  Target: LAMA2; (-) strand; PAM type: NRG; PAM sequence: TGG
ctgtatgtgcgcccctgctg

SEQ ID NO: 73797 - DNA, 20 bp, Artificial Sequence
  Description of Artificial Sequence: Synthetic oligonucleotide
  Target: LAMA2; (-) strand; PAM type: NRG; PAM sequence: CAG
tagaaggagtgtccagaaga

SEQ ID NO: 73798 - DNA, 20 bp, Artificial Sequence
  Description of Artificial Sequence: Synthetic oligonucleotide
  Target: LAMA2; (-) strand; PAM type: NRG; PAM sequence: AAG
aagatagaaggagtgtccag

SEQ ID NO: 73799 - DNA, 20 bp, Artificial Sequence
  Description of Artificial Sequence: Synthetic oligonucleotide
  Target: LAMA2; (-) strand; PAM type: NRG; PAM sequence: CAG
atgaagatagaaggagtgtc

SEQ ID NO: 73800 - DNA, 20 bp, Artificial Sequence
  Description of Artificial Sequence: Synthetic oligonucleotide
  Target: LAMA2; (-) strand; PAM type: NRG; PAM sequence: GAG
ggagagaatgaagatagaag

SEQ ID NO: 73801 - DNA, 20 bp, Artificial Sequence
  Description of Artificial Sequence: Synthetic oligonucleotide
  Target: LAMA2; (-) strand; PAM type: NRG; PAM sequence: AGG
gaggagagaatgaagataga

SEQ ID NO: 73802 - DNA, 20 bp, Artificial Sequence
  Description of Artificial Sequence: Synthetic oligonucleotide
  Target: LAMA2; (-) strand; PAM type: NRG; PAM sequence: AAG
agaggagagaatgaagatag

SEQ ID NO: 73803 - DNA, 20 bp, Artificial Sequence
  Description of Artificial Sequence: Synthetic oligonucleotide
  Target: LAMA2; (-) strand; PAM type: NRG; PAM sequence: TAG
ggcagaggagagaatgaaga

SEQ ID NO: 73804 - DNA, 20 bp, Artificial Sequence
  Description of Artificial Sequence: Synthetic oligonucleotide
  Target: LAMA2; (-) strand; PAM type: NRG; PAM sequence: AAG
caatggcagaggagagaatg

SEQ ID NO: 73805 - DNA, 20 bp, Artificial Sequence
  Description of Artificial Sequence: Synthetic oligonucleotide
  Target: LAMA2; (-) strand; PAM type: NRG; PAM sequence: GAG
aggttaacaatggcagagga

SEQ ID NO: 73806 - DNA, 20 bp, Artificial Sequence
  Description of Artificial Sequence: Synthetic oligonucleotide
  Target: LAMA2; (-) strand; PAM type: NRG; PAM sequence: GAG
gaaggttaacaatggcagag

SEQ ID NO: 73807 - DNA, 20 bp, Artificial Sequence
  Description of Artificial Sequence: Synthetic oligonucleotide
  Target: LAMA2; (-) strand; PAM type: NRG; PAM sequence: AGG
tggaaggttaacaatggcag

SEQ ID NO: 73808 - DNA, 20 bp, Artificial Sequence
  Description of Artificial Sequence: Synthetic oligonucleotide
  Target: LAMA2; (-) strand; PAM type: NRG; PAM sequence: GAG
atggaaggttaacaatggca

SEQ ID NO: 73809 - DNA, 20 bp, Artificial Sequence
  Description of Artificial Sequence: Synthetic oligonucleotide
  Target: LAMA2; (-) strand; PAM type: NRG; PAM sequence: CAG
aaatggaaggttaacaatgg

SEQ ID NO: 73810 - DNA, 20 bp, Artificial Sequence
  Description of Artificial Sequence: Synthetic oligonucleotide
  Target: LAMA2; (-) strand; PAM type: NRG; PAM sequence: TGG
ctaaaatggaaggttaacaa

SEQ ID NO: 73811 - DNA, 20 bp, Artificial Sequence
  Description of Artificial Sequence: Synthetic oligonucleotide
  Target: LAMA2; (-) strand; PAM type: NRG; PAM sequence: AGG
agctccttgcctaaaatgga

SEQ ID NO: 73812 - DNA, 20 bp, Artificial Sequence
  Description of Artificial Sequence: Synthetic oligonucleotide
  Target: LAMA2; (-) strand; PAM type: NRG; PAM sequence: AAG
cagctccttgcctaaaatgg

SEQ ID NO: 73813 - DNA, 20 bp, Artificial Sequence
  Description of Artificial Sequence: Synthetic oligonucleotide
  Target: LAMA2; (-) strand; PAM type: NRG; PAM sequence: TGG
atacagctccttgcctaaaa

SEQ ID NO: 73814 - DNA, 20 bp, Artificial Sequence
  Description of Artificial Sequence: Synthetic oligonucleotide
  Target: LAMA2; (-) strand; PAM type: NRG; PAM sequence: CAG
gaaaccacattttcctaata

SEQ ID NO: 73815 - DNA, 20 bp, Artificial Sequence
  Description of Artificial Sequence: Synthetic oligonucleotide
  Target: LAMA2; (-) strand; PAM type: NRG; PAM sequence: AGG
agagattttcttttaataaa

SEQ ID NO: 73816 - DNA, 20 bp, Artificial Sequence
  Description of Artificial Sequence: Synthetic oligonucleotide
  Target: LAMA2; (-) strand; PAM type: NRG; PAM sequence: AAG
tagagattttcttttaataa

SEQ ID NO: 73817 - DNA, 20 bp, Artificial Sequence
  Description of Artificial Sequence: Synthetic oligonucleotide
  Target: LAMA2; (-) strand; PAM type: NRG; PAM sequence: GAG
taatatctattaataattta

SEQ ID NO: 73818 - DNA, 20 bp, Artificial Sequence
  Description of Artificial Sequence: Synthetic oligonucleotide
  Target: LAMA2; (-) strand; PAM type: NRG; PAM sequence: TAG
agtaatatctattaataatt

SEQ ID NO: 73819 - DNA, 20 bp, Artificial Sequence
  Description of Artificial Sequence: Synthetic oligonucleotide
  Target: LAMA2; (-) strand; PAM type: NRG; PAM sequence: AAG
ttctgaaattttctttggaa

SEQ ID NO: 73820 - DNA, 20 bp, Artificial Sequence
  Description of Artificial Sequence: Synthetic oligonucleotide
  Target: LAMA2; (-) strand; PAM type: NRG; PAM sequence: TGG
ctcctttctgaaattttctt

SEQ ID NO: 73821 - DNA, 20 bp, Artificial Sequence
  Description of Artificial Sequence: Synthetic oligonucleotide
  Target: LAMA2; (-) strand; PAM type: NRG; PAM sequence: CAG
ccttatctttaaagtgtcca

SEQ ID NO: 73822 - DNA, 20 bp, Artificial Sequence
  Description of Artificial Sequence: Synthetic oligonucleotide
  Target: LAMA2; (-) strand; PAM type: NRG; PAM sequence: AAG
ctccatcatccttatcttta

SEQ ID NO: 73823 - DNA, 20 bp, Artificial Sequence
  Description of Artificial Sequence: Synthetic oligonucleotide
  Target: LAMA2; (-) strand; PAM type: NRG; PAM sequence: CAG
tataacctgcttgcaaaatt

SEQ ID NO: 73824 - DNA, 20 bp, Artificial Sequence
  Description of Artificial Sequence: Synthetic oligonucleotide
  Target: LAMA2; (-) strand; PAM type: NRG; PAM sequence: GAG
cctattacaatcactctcag

SEQ ID NO: 73825 - DNA, 20 bp, Artificial Sequence
  Description of Artificial Sequence: Synthetic oligonucleotide
  Target: LAMA2; (-) strand; PAM type: NRG; PAM sequence: AGG
accctattacaatcactctc

SEQ ID NO: 73826 - DNA, 20 bp, Artificial Sequence
  Description of Artificial Sequence: Synthetic oligonucleotide
  Target: LAMA2; (-) strand; PAM type: NRG; PAM sequence: CAG
caccctattacaatcactct

SEQ ID NO: 73827 - DNA, 20 bp, Artificial Sequence
  Description of Artificial Sequence: Synthetic oligonucleotide
  Target: LAMA2; (-) strand; PAM type: NRG; PAM sequence: TAG
cttttctacttgatcccttg

SEQ ID NO: 73828 - DNA, 20 bp, Artificial Sequence
  Description of Artificial Sequence: Synthetic oligonucleotide
  Target: LAMA2; (-) strand; PAM type: NRG; PAM sequence: TAG
tctagggactttcttaagag

SEQ ID NO: 73829 - DNA, 20 bp, Artificial Sequence
  Description of Artificial Sequence: Synthetic oligonucleotide
  Target: LAMA2; (-) strand; PAM type: NRG; PAM sequence: GAG
ttctctagggactttcttaa

SEQ ID NO: 73830 - DNA, 20 bp, Artificial Sequence
  Description of Artificial Sequence: Synthetic oligonucleotide
  Target: LAMA2; (-) strand; PAM type: NRG; PAM sequence: AAG
ccttctctagggactttctt

SEQ ID NO: 73831 - DNA, 20 bp, Artificial Sequence
  Description of Artificial Sequence: Synthetic oligonucleotide
  Target: LAMA2; (-) strand; PAM type: NRG; PAM sequence: GGG
cattttcttatccttctcta

SEQ ID NO: 73832 - DNA, 20 bp, Artificial Sequence
  Description of Artificial Sequence: Synthetic oligonucleotide
  Target: LAMA2; (-) strand; PAM type: NRG; PAM sequence: AGG
ccattttcttatccttctct

SEQ ID NO: 73833 - DNA, 20 bp, Artificial Sequence
  Description of Artificial Sequence: Synthetic oligonucleotide
  Target: LAMA2; (-) strand; PAM type: NRG; PAM sequence: TAG
cccattttcttatccttctc

SEQ ID NO: 73834 - DNA, 20 bp, Artificial Sequence
  Description of Artificial Sequence: Synthetic oligonucleotide
  Target: LAMA2; (-) strand; PAM type: NRG; PAM sequence: AAG
aaatatcatcatctatttcc

SEQ ID NO: 73835 - DNA, 20 bp, Artificial Sequence
  Description of Artificial Sequence: Synthetic oligonucleotide
  Target: LAMA2; (-) strand; PAM type: NRG; PAM sequence: AAG
taaaattaaattaaaaaaaa

SEQ ID NO: 73836 - DNA, 20 bp, Artificial Sequence
  Description of Artificial Sequence: Synthetic oligonucleotide
  Target: LAMA2; (-) strand; PAM type: NRG; PAM sequence: AAG
cccctctgtgagaaacaccc

SEQ ID NO: 73837 - DNA, 20 bp, Artificial Sequence
  Description of Artificial Sequence: Synthetic oligonucleotide
  Target: LAMA2; (-) strand; PAM type: NRG; PAM sequence: GAG
cctgccaaatccccctctgt

SEQ ID NO: 73838 - DNA, 20 bp, Artificial Sequence
  Description of Artificial Sequence: Synthetic oligonucleotide
  Target: LAMA2; (-) strand; PAM type: NRG; PAM sequence: GAG
tcctctgcctaggaaaacca

SEQ ID NO: 73839 - DNA, 20 bp, Artificial Sequence
  Description of Artificial Sequence: Synthetic oligonucleotide
  Target: LAMA2; (-) strand; PAM type: NRG; PAM sequence: CAG
ggtcctctgcctaggaaaac

SEQ ID NO: 73840 - DNA, 20 bp, Artificial Sequence
  Description of Artificial Sequence: Synthetic oligonucleotide
  Target: LAMA2; (-) strand; PAM type: NRG; PAM sequence: AGG
ggccgcagggtcctctgcct

SEQ ID NO: 73841 - DNA, 20 bp, Artificial Sequence
  Description of Artificial Sequence: Synthetic oligonucleotide
  Target: LAMA2; (-) strand; PAM type: NRG; PAM sequence: TAG
aggccgcagggtcctctgcc

SEQ ID NO: 73842 - DNA, 20 bp, Artificial Sequence
  Description of Artificial Sequence: Synthetic oligonucleotide
  Target: LAMA2; (-) strand; PAM type: NRG; PAM sequence: GGG
aaacacggcggaaggccgca

SEQ ID NO: 73843 - DNA, 20 bp, Artificial Sequence
  Description of Artificial Sequence: Synthetic oligonucleotide
  Target: LAMA2; (-) strand; PAM type: NRG; PAM sequence: AGG
caaacacggcggaaggccgc

SEQ ID NO: 73844 - DNA, 20 bp, Artificial Sequence
  Description of Artificial Sequence: Synthetic oligonucleotide
  Target: LAMA2; (-) strand; PAM type: NRG; PAM sequence: CAG
acaaacacggcggaaggccg

SEQ ID NO: 73845 - DNA, 20 bp, Artificial Sequence
  Description of Artificial Sequence: Synthetic oligonucleotide
  Target: LAMA2; (-) strand; PAM type: NRG; PAM sequence: AGG
agggacacaaacacggcgga

SEQ ID NO: 73846 - DNA, 20 bp, Artificial Sequence
  Description of Artificial Sequence: Synthetic oligonucleotide
  Target: LAMA2; (-) strand; PAM type: NRG; PAM sequence: AAG
cagggacacaaacacggcgg

SEQ ID NO: 73847 - DNA, 20 bp, Artificial Sequence
  Description of Artificial Sequence: Synthetic oligonucleotide
  Target: LAMA2; (-) strand; PAM type: NRG; PAM sequence: CGG
acccagggacacaaacacgg

SEQ ID NO: 73848 - DNA, 20 bp, Artificial Sequence
  Description of Artificial Sequence: Synthetic oligonucleotide
  Target: LAMA2; (-) strand; PAM type: NRG; PAM sequence: CGG
agtacccagggacacaaaca

SEQ ID NO: 73849 - DNA, 20 bp, Artificial Sequence
  Description of Artificial Sequence: Synthetic oligonucleotide
  Target: LAMA2; (-) strand; PAM type: NRG; PAM sequence: GGG
tccctgatctcaagtaccca

SEQ ID NO: 73850 - DNA, 20 bp, Artificial Sequence
  Description of Artificial Sequence: Synthetic oligonucleotide
  Target: LAMA2; (-) strand; PAM type: NRG; PAM sequence: AGG
ctccctgatctcaagtaccc

SEQ ID NO: 73851 - DNA, 20 bp, Artificial Sequence
  Description of Artificial Sequence: Synthetic oligonucleotide
  Target: LAMA2; (-) strand; PAM type: NRG; PAM sequence: CAG
actccctgatctcaagtacc

SEQ ID NO: 73852 - DNA, 20 bp, Artificial Sequence
  Description of Artificial Sequence: Synthetic oligonucleotide
  Target: LAMA2; (-) strand; PAM type: NRG; PAM sequence: AAG
catcaggactccctgatctc

SEQ ID NO: 73853 - DNA, 20 bp, Artificial Sequence
  Description of Artificial Sequence: Synthetic oligonucleotide
  Target: LAMA2; (-) strand; PAM type: NRG; PAM sequence: AGG
catgcgcgttaagagtcatc

SEQ ID NO: 73854 - DNA, 20 bp, Artificial Sequence
  Description of Artificial Sequence: Synthetic oligonucleotide
  Target: LAMA2; (-) strand; PAM type: NRG; PAM sequence: CAG
gcatgcgcgttaagagtcat

SEQ ID NO: 73855 - DNA, 20 bp, Artificial Sequence
  Description of Artificial Sequence: Synthetic oligonucleotide
  Target: LAMA2; (-) strand; PAM type: NRG; PAM sequence: GAG
taaggcagcatgcgcgttaa

SEQ ID NO: 73856 - DNA, 20 bp, Artificial Sequence
  Description of Artificial Sequence: Synthetic oligonucleotide
  Target: LAMA2; (-) strand; PAM type: NRG; PAM sequence: AAG
tttaaggcagcatgcgcgtt

SEQ ID NO: 73857 - DNA, 20 bp, Artificial Sequence
  Description of Artificial Sequence: Synthetic oligonucleotide
  Target: LAMA2; (-) strand; PAM type: NRG; PAM sequence: CAG
gttaaacagatgctttaagg

SEQ ID NO: 73858 - DNA, 20 bp, Artificial Sequence
  Description of Artificial Sequence: Synthetic oligonucleotide
  Target: LAMA2; (-) strand; PAM type: NRG; PAM sequence: AGG
tttgttaaacagatgcttta

SEQ ID NO: 73859 - DNA, 20 bp, Artificial Sequence
  Description of Artificial Sequence: Synthetic oligonucleotide
  Target: LAMA2; (-) strand; PAM type: NRG; PAM sequence: AAG
ctttgttaaacagatgcttt

SEQ ID NO: 73860 - DNA, 20 bp, Artificial Sequence
  Description of Artificial Sequence: Synthetic oligonucleotide
  Target: LAMA2; (-) strand; PAM type: NRG; PAM sequence: CAG
acaagatgtgctttgttaaa

SEQ ID NO: 73861 - DNA, 20 bp, Artificial Sequence
  Description of Artificial Sequence: Synthetic oligonucleotide
  Target: LAMA2; (-) strand; PAM type: NRG; PAM sequence: AAG
gaatggattaagggcggtac

SEQ ID NO: 73862 - DNA, 20 bp, Artificial Sequence
  Description of Artificial Sequence: Synthetic oligonucleotide
  Target: LAMA2; (-) strand; PAM type: NRG; PAM sequence: CGG
agggttgaatggattaaggg

SEQ ID NO: 73863 - DNA, 20 bp, Artificial Sequence
  Description of Artificial Sequence: Synthetic oligonucleotide
  Target: LAMA2; (-) strand; PAM type: NRG; PAM sequence: GGG
ctcagggttgaatggattaa

SEQ ID NO: 73864 - DNA, 20 bp, Artificial Sequence
  Description of Artificial Sequence: Synthetic oligonucleotide
  Target: LAMA2; (-) strand; PAM type: NRG; PAM sequence: AGG
actcagggttgaatggatta

SEQ ID NO: 73865 - DNA, 20 bp, Artificial Sequence
  Description of Artificial Sequence: Synthetic oligonucleotide
  Target: LAMA2; (-) strand; PAM type: NRG; PAM sequence: AAG
cactcagggttgaatggatt

SEQ ID NO: 73866 - DNA, 20 bp, Artificial Sequence
  Description of Artificial Sequence: Synthetic oligonucleotide
  Target: LAMA2; (-) strand; PAM type: NRG; PAM sequence: TGG
tgtgtccactcagggttgaa

SEQ ID NO: 73867 - DNA, 20 bp, Artificial Sequence
  Description of Artificial Sequence: Synthetic oligonucleotide
  Target: LAMA2; (-) strand; PAM type: NRG; PAM sequence: GGG
acatgtgctgtgtccactca

SEQ ID NO: 73868 - DNA, 20 bp, Artificial Sequence
  Description of Artificial Sequence: Synthetic oligonucleotide
  Target: LAMA2; (-) strand; PAM type: NRG; PAM sequence: AGG
aacatgtgctgtgtccactc

SEQ ID NO: 73869 - DNA, 20 bp, Artificial Sequence
  Description of Artificial Sequence: Synthetic oligonucleotide
  Target: LAMA2; (-) strand; PAM type: NRG; PAM sequence: CAG
aaacatgtgctgtgtccact

SEQ ID NO: 73870 - DNA, 20 bp, Artificial Sequence
  Description of Artificial Sequence: Synthetic oligonucleotide
  Target: LAMA2; (-) strand; PAM type: NRG; PAM sequence: GGG
aagaaagattcttctgcctt

SEQ ID NO: 73871 - DNA, 20 bp, Artificial Sequence
  Description of Artificial Sequence: Synthetic oligonucleotide
  Target: LAMA2; (-) strand; PAM type: NRG; PAM sequence: TGG
taagaaagattcttctgcct

SEQ ID NO: 73872 - DNA, 20 bp, Artificial Sequence
  Description of Artificial Sequence: Synthetic oligonucleotide
  Target: LAMA2; (-) strand; PAM type: NRG; PAM sequence: AAG
cattttgttctgtactaaga

SEQ ID NO: 73873 - DNA, 20 bp, Artificial Sequence
  Description of Artificial Sequence: Synthetic oligonucleotide
  Target: LAMA2; (-) strand; PAM type: NRG; PAM sequence: AAG
actccattttgttctgtact

SEQ ID NO: 73874 - DNA, 20 bp, Artificial Sequence
  Description of Artificial Sequence: Synthetic oligonucleotide
  Target: LAMA2; (-) strand; PAM type: NRG; PAM sequence: GAG
gtagaaagaagtagacatag

SEQ ID NO: 73875 - DNA, 20 bp, Artificial Sequence
  Description of Artificial Sequence: Synthetic oligonucleotide
  Target: LAMA2; (-) strand; PAM type: NRG; PAM sequence: AGG
gtgtagaaagaagtagacat

SEQ ID NO: 73876 - DNA, 20 bp, Artificial Sequence
  Description of Artificial Sequence: Synthetic oligonucleotide
  Target: LAMA2; (-) strand; PAM type: NRG; PAM sequence: TAG
tgtgtagaaagaagtagaca

SEQ ID NO: 73877 - DNA, 20 bp, Artificial Sequence
  Description of Artificial Sequence: Synthetic oligonucleotide
  Target: LAMA2; (-) strand; PAM type: NRG; PAM sequence: TAG
tgtgtctgtgtagaaagaag

SEQ ID NO: 73878 - DNA, 20 bp, Artificial Sequence
  Description of Artificial Sequence: Synthetic oligonucleotide
  Target: LAMA2; (-) strand; PAM type: NRG; PAM sequence: AAG
tgctgtgtctgtgtagaaag

SEQ ID NO: 73879 - DNA, 20 bp, Artificial Sequence
  Description of Artificial Sequence: Synthetic oligonucleotide
  Target: LAMA2; (-) strand; PAM type: NRG; PAM sequence: AAG
tgttgctgtgtctgtgtaga

SEQ ID NO: 73880 - DNA, 20 bp, Artificial Sequence
  Description of Artificial Sequence: Synthetic oligonucleotide
  Target: LAMA2; (-) strand; PAM type: NRG; PAM sequence: TAG
agattgttgctgtgtctgtg

SEQ ID NO: 73881 - DNA, 20 bp, Artificial Sequence
  Description of Artificial Sequence: Synthetic oligonucleotide
  Target: LAMA2; (-) strand; PAM type: NRG; PAM sequence: CAG
tggggaaaagatagagaaat

SEQ ID NO: 73882 - DNA, 20 bp, Artificial Sequence
  Description of Artificial Sequence: Synthetic oligonucleotide
  Target: LAMA2; (-) strand; PAM type: NRG; PAM sequence: GAG
ggaaatgtggggaaaagata

SEQ ID NO: 73883 - DNA, 20 bp, Artificial Sequence
  Description of Artificial Sequence: Synthetic oligonucleotide
  Target: LAMA2; (-) strand; PAM type: NRG; PAM sequence: TAG
ggggaaatgtggggaaaaga

SEQ ID NO: 73884 - DNA, 20 bp, Artificial Sequence
  Description of Artificial Sequence: Synthetic oligonucleotide
  Target: LAMA2; (-) strand; PAM type: NRG; PAM sequence: AAG
aaagggggaaatgtggggaa

SEQ ID NO: 73885 - DNA, 20 bp, Artificial Sequence
  Description of Artificial Sequence: Synthetic oligonucleotide
  Target: LAMA2; (-) strand; PAM type: NRG; PAM sequence: GGG
atagaaaagggggaaatgtg

SEQ ID NO: 73886 - DNA, 20 bp, Artificial Sequence
  Description of Artificial Sequence: Synthetic oligonucleotide
  Target: LAMA2; (-) strand; PAM type: NRG; PAM sequence: GGG
aatagaaaagggggaaatgt

SEQ ID NO: 73887 - DNA, 20 bp, Artificial Sequence
  Description of Artificial Sequence: Synthetic oligonucleotide
  Target: LAMA2; (-) strand; PAM type: NRG; PAM sequence: TGG
gaatagaaaagggggaaatg

SEQ ID NO: 73888 - DNA, 20 bp, Artificial Sequence
  Description of Artificial Sequence: Synthetic oligonucleotide
  Target: LAMA2; (-) strand; PAM type: NRG; PAM sequence: GGG
gttttgtggaatagaaaagg

SEQ ID NO: 73889 - DNA, 20 bp, Artificial Sequence
  Description of Artificial Sequence: Synthetic oligonucleotide
  Target: LAMA2; (-) strand; PAM type: NRG; PAM sequence: GGG
ggttttgtggaatagaaaag

SEQ ID NO: 73890 - DNA, 20 bp, Artificial Sequence
  Description of Artificial Sequence: Synthetic oligonucleotide
  Target: LAMA2; (-) strand; PAM type: NRG; PAM sequence: GGG
tggttttgtggaatagaaaa

SEQ ID NO: 73891 - DNA, 20 bp, Artificial Sequence
  Description of Artificial Sequence: Synthetic oligonucleotide
  Target: LAMA2; (-) strand; PAM type: NRG; PAM sequence: AGG
gtggttttgtggaatagaaa

SEQ ID NO: 73892 - DNA, 20 bp, Artificial Sequence
  Description of Artificial Sequence: Synthetic oligonucleotide
  Target: LAMA2; (-) strand; PAM type: NRG; PAM sequence: AAG
ggtggttttgtggaatagaa

SEQ ID NO: 73893 - DNA, 20 bp, Artificial Sequence
  Description of Artificial Sequence: Synthetic oligonucleotide
  Target: LAMA2; (-) strand; PAM type: NRG; PAM sequence: TAG
atgatggtggttttgtggaa

SEQ ID NO: 73894 - DNA, 20 bp, Artificial Sequence
  Description of Artificial Sequence: Synthetic oligonucleotide
  Target: LAMA2; (-) strand; PAM type: NRG; PAM sequence: TGG
tgatgatgatggtggttttg

SEQ ID NO: 73895 - DNA, 20 bp, Artificial Sequence
  Description of Artificial Sequence: Synthetic oligonucleotide
  Target: LAMA2; (-) strand; PAM type: NRG; PAM sequence: TGG
acgggccatgatgatgatgg

SEQ ID NO: 73896 - DNA, 20 bp, Artificial Sequence
  Description of Artificial Sequence: Synthetic oligonucleotide
  Target: LAMA2; (-) strand; PAM type: NRG; PAM sequence: TGG
agaacgggccatgatgatga

SEQ ID NO: 73897 - DNA, 20 bp, Artificial Sequence
  Description of Artificial Sequence: Synthetic oligonucleotide
  Target: LAMA2; (-) strand; PAM type: NRG; PAM sequence: GGG
cccagcagctcattgagaac

SEQ ID NO: 73898 - DNA, 20 bp, Artificial Sequence
  Description of Artificial Sequence: Synthetic oligonucleotide
  Target: LAMA2; (-) strand; PAM type: NRG; PAM sequence: CGG
acccagcagctcattgagaa

SEQ ID NO: 73899 - DNA, 20 bp, Artificial Sequence
  Description of Artificial Sequence: Synthetic oligonucleotide
  Target: LAMA2; (-) strand; PAM type: NRG; PAM sequence: GAG
ggtgtacccagcagctcatt

SEQ ID NO: 73900 - DNA, 20 bp, Artificial Sequence
  Description of Artificial Sequence: Synthetic oligonucleotide
  Target: LAMA2; (-) strand; PAM type: NRG; PAM sequence: CAG
catctgggaggtgtacccag

SEQ ID NO: 73901 - DNA, 20 bp, Artificial Sequence
  Description of Artificial Sequence: Synthetic oligonucleotide
  Target: LAMA2; (-) strand; PAM type: NRG; PAM sequence: CAG
ccccatctgggaggtgtacc

SEQ ID NO: 73902 - DNA, 20 bp, Artificial Sequence
  Description of Artificial Sequence: Synthetic oligonucleotide
  Target: LAMA2; (-) strand; PAM type: NRG; PAM sequence: AGG
cagccgccaccccatctggg

SEQ ID NO: 73903 - DNA, 20 bp, Artificial Sequence
  Description of Artificial Sequence: Synthetic oligonucleotide
  Target: LAMA2; (-) strand; PAM type: NRG; PAM sequence: GAG
ccagccgccaccccatctgg

SEQ ID NO: 73904 - DNA, 20 bp, Artificial Sequence
  Description of Artificial Sequence: Synthetic oligonucleotide
  Target: LAMA2; (-) strand; PAM type: NRG; PAM sequence: GGG
gcccagccgccaccccatct

SEQ ID NO: 73905 - DNA, 20 bp, Artificial Sequence
  Description of Artificial Sequence: Synthetic oligonucleotide
  Target: LAMA2; (-) strand; PAM type: NRG; PAM sequence: TGG
tgcccagccgccaccccatc

SEQ ID NO: 73906 - DNA, 20 bp, Artificial Sequence
  Description of Artificial Sequence: Synthetic oligonucleotide
  Target: LAMA2; (-) strand; PAM type: NRG; PAM sequence: CAG
aagtgaggagcccctctgcc

SEQ ID NO: 73907 - DNA, 20 bp, Artificial Sequence
  Description of Artificial Sequence: Synthetic oligonucleotide
  Target: LAMA2; (-) strand; PAM type: NRG; PAM sequence: GAG
caccccttctgggaagtgag

SEQ ID NO: 73908 - DNA, 20 bp, Artificial Sequence
  Description of Artificial Sequence: Synthetic oligonucleotide
  Target: LAMA2; (-) strand; PAM type: NRG; PAM sequence: AGG
gccaccccttctgggaagtg

SEQ ID NO: 73909 - DNA, 20 bp, Artificial Sequence
  Description of Artificial Sequence: Synthetic oligonucleotide
  Target: LAMA2; (-) strand; PAM type: NRG; PAM sequence: GAG
ggccaccccttctgggaagt

SEQ ID NO: 73910 - DNA, 20 bp, Artificial Sequence
  Description of Artificial Sequence: Synthetic oligonucleotide
  Target: LAMA2; (-) strand; PAM type: NRG; PAM sequence: AAG
taccggccaccccttctggg

SEQ ID NO: 73911 - DNA, 20 bp, Artificial Sequence
  Description of Artificial Sequence: Synthetic oligonucleotide
  Target: LAMA2; (-) strand; PAM type: NRG; PAM sequence: GGG
ctctaccggccaccccttct

SEQ ID NO: 73912 - DNA, 20 bp, Artificial Sequence
  Description of Artificial Sequence: Synthetic oligonucleotide
  Target: LAMA2; (-) strand; PAM type: NRG; PAM sequence: TGG
cctctaccggccaccccttc

SEQ ID NO: 73913 - DNA, 20 bp, Artificial Sequence
  Description of Artificial Sequence: Synthetic oligonucleotide
  Target: LAMA2; (-) strand; PAM type: NRG; PAM sequence: CGG
gaggtggggggcgcctctac

SEQ ID NO: 73914 - DNA, 20 bp, Artificial Sequence
  Description of Artificial Sequence: Synthetic oligonucleotide
  Target: LAMA2; (-) strand; PAM type: NRG; PAM sequence: GGG
ccgtctgggagggaggtggg

SEQ ID NO: 73915 - DNA, 20 bp, Artificial Sequence
  Description of Artificial Sequence: Synthetic oligonucleotide
  Target: LAMA2; (-) strand; PAM type: NRG; PAM sequence: GGG
cccgtctgggagggaggtgg

SEQ ID NO: 73916 - DNA, 20 bp, Artificial Sequence
  Description of Artificial Sequence: Synthetic oligonucleotide
  Target: LAMA2; (-) strand; PAM type: NRG; PAM sequence: GGG
ccccgtctgggagggaggtg

SEQ ID NO: 73917 - DNA, 20 bp, Artificial Sequence
  Description of Artificial Sequence: Synthetic oligonucleotide
  Target: LAMA2; (-) strand; PAM type: NRG; PAM sequence: GGG
accccgtctgggagggaggt

SEQ ID NO: 73918 - DNA, 20 bp, Artificial Sequence
  Description of Artificial Sequence: Synthetic oligonucleotide
  Target: LAMA2; (-) strand; PAM type: NRG; PAM sequence: TGG
caccccgtctgggagggagg

SEQ ID NO: 73919 - DNA, 20 bp, Artificial Sequence
  Description of Artificial Sequence: Synthetic oligonucleotide
  Target: LAMA2; (-) strand; PAM type: NRG; PAM sequence: AGG
agccaccccgtctgggaggg

SEQ ID NO: 73920 - DNA, 20 bp, Artificial Sequence
  Description of Artificial Sequence: Synthetic oligonucleotide
  Target: LAMA2; (-) strand; PAM type: NRG; PAM sequence: GAG
cagccaccccgtctgggagg

SEQ ID NO: 73921 - DNA, 20 bp, Artificial Sequence
  Description of Artificial Sequence: Synthetic oligonucleotide
  Target: LAMA2; (-) strand; PAM type: NRG; PAM sequence: GGG
gccagccaccccgtctggga

SEQ ID NO: 73922 - DNA, 20 bp, Artificial Sequence
  Description of Artificial Sequence: Synthetic oligonucleotide
  Target: LAMA2; (-) strand; PAM type: NRG; PAM sequence: AGG
ggccagccaccccgtctggg

SEQ ID NO: 73923 - DNA, 20 bp, Artificial Sequence
  Description of Artificial Sequence: Synthetic oligonucleotide
  Target: LAMA2; (-) strand; PAM type: NRG; PAM sequence: GAG
tggccagccaccccgtctgg

SEQ ID NO: 73924 - DNA, 20 bp, Artificial Sequence
  Description of Artificial Sequence: Synthetic oligonucleotide
  Target: LAMA2; (-) strand; PAM type: NRG; PAM sequence: GGG
cctggccagccaccccgtct

SEQ ID NO: 73925 - DNA, 20 bp, Artificial Sequence
  Description of Artificial Sequence: Synthetic oligonucleotide
  Target: LAMA2; (-) strand; PAM type: NRG; PAM sequence: TGG
gcctggccagccaccccgtc

SEQ ID NO: 73926 - DNA, 20 bp, Artificial Sequence
  Description of Artificial Sequence: Synthetic oligonucleotide
  Target: LAMA2; (-) strand; PAM type: NRG; PAM sequence: CAG
gggggcagcccccgcctggc

SEQ ID NO: 73927 - DNA, 20 bp, Artificial Sequence
  Description of Artificial Sequence: Synthetic oligonucleotide
  Target: LAMA2; (-) strand; PAM type: NRG; PAM sequence: TGG
ggtagggggcagcccccgcc

SEQ ID NO: 73928 - DNA, 20 bp, Artificial Sequence
  Description of Artificial Sequence: Synthetic oligonucleotide
  Target: LAMA2; (-) strand; PAM type: NRG; PAM sequence: CAG
tccaggagggaggtaggggg

SEQ ID NO: 73929 - DNA, 20 bp, Artificial Sequence
  Description of Artificial Sequence: Synthetic oligonucleotide
  Target: LAMA2; (-) strand; PAM type: NRG; PAM sequence: GGG
ccgtccaggagggaggtagg

SEQ ID NO: 73930 - DNA, 20 bp, Artificial Sequence
  Description of Artificial Sequence: Synthetic oligonucleotide
  Target: LAMA2; (-) strand; PAM type: NRG; PAM sequence: GGG
cccgtccaggagggaggtag

SEQ ID NO: 73931 - DNA, 20 bp, Artificial Sequence
  Description of Artificial Sequence: Synthetic oligonucleotide
  Target: LAMA2; (-) strand; PAM type: NRG; PAM sequence: GGG
ccccgtccaggagggaggta

SEQ ID NO: 73932 - DNA, 20 bp, Artificial Sequence
  Description of Artificial Sequence: Synthetic oligonucleotide
  Target: LAMA2; (-) strand; PAM type: NRG; PAM sequence: AGG
gccccgtccaggagggaggt

SEQ ID NO: 73933 - DNA, 20 bp, Artificial Sequence
  Description of Artificial Sequence: Synthetic oligonucleotide
  Target: LAMA2; (-) strand; PAM type: NRG; PAM sequence: TAG
cgccccgtccaggagggagg

SEQ ID NO: 73934 - DNA, 20 bp, Artificial Sequence
  Description of Artificial Sequence: Synthetic oligonucleotide
  Target: LAMA2; (-) strand; PAM type: NRG; PAM sequence: AGG
agccgccccgtccaggaggg

SEQ ID NO: 73935 - DNA, 20 bp, Artificial Sequence
  Description of Artificial Sequence: Synthetic oligonucleotide
  Target: LAMA2; (-) strand; PAM type: NRG; PAM sequence: GAG
cagccgccccgtccaggagg

SEQ ID NO: 73936 - DNA, 20 bp, Artificial Sequence
  Description of Artificial Sequence: Synthetic oligonucleotide
  Target: LAMA2; (-) strand; PAM type: NRG; PAM sequence: GGG
gccagccgccccgtccagga

SEQ ID NO: 73937 - DNA, 20 bp, Artificial Sequence
  Description of Artificial Sequence: Synthetic oligonucleotide
  Target: LAMA2; (-) strand; PAM type: NRG; PAM sequence: AGG
tgccagccgccccgtccagg

SEQ ID NO: 73938 - DNA, 20 bp, Artificial Sequence
  Description of Artificial Sequence: Synthetic oligonucleotide
  Target: LAMA2; (-) strand; PAM type: NRG; PAM sequence: GAG
ctgccagccgccccgtccag

SEQ ID NO: 73939 - DNA, 20 bp, Artificial Sequence
  Description of Artificial Sequence: Synthetic oligonucleotide
  Target: LAMA2; (-) strand; PAM type: NRG; PAM sequence: AGG
ccctgccagccgccccgtcc

SEQ ID NO: 73940 - DNA, 20 bp, Artificial Sequence
  Description of Artificial Sequence: Synthetic oligonucleotide
  Target: LAMA2; (-) strand; PAM type: NRG; PAM sequence: CAG
accctgccagccgccccgtc

SEQ ID NO: 73941 - DNA, 20 bp, Artificial Sequence
  Description of Artificial Sequence: Synthetic oligonucleotide
  Target: LAMA2; (-) strand; PAM type: NRG; PAM sequence: CAG
gggggcagcccccaccctgc

SEQ ID NO: 73942 - DNA, 20 bp, Artificial Sequence
  Description of Artificial Sequence: Synthetic oligonucleotide
  Target: LAMA2; (-) strand; PAM type: NRG; PAM sequence: CAG
gtccgggagggaggtggggg

SEQ ID NO: 73943 - DNA, 20 bp, Artificial Sequence
  Description of Artificial Sequence: Synthetic oligonucleotide
  Target: LAMA2; (-) strand; PAM type: NRG; PAM sequence: GGG
cccgtccgggagggaggtgg

SEQ ID NO: 73944 - DNA, 20 bp, Artificial Sequence
  Description of Artificial Sequence: Synthetic oligonucleotide
  Target: LAMA2; (-) strand; PAM type: NRG; PAM sequence: GGG
ccccgtccgggagggaggtg

SEQ ID NO: 73945 - DNA, 20 bp, Artificial Sequence
  Description of Artificial Sequence: Synthetic oligonucleotide
  Target: LAMA2; (-) strand; PAM type: NRG; PAM sequence: GGG
accccgtccgggagggaggt

SEQ ID NO: 73946 - DNA, 20 bp, Artificial Sequence
  Description of Artificial Sequence: Synthetic oligonucleotide
  Target: LAMA2; (-) strand; PAM type: NRG; PAM sequence: TGG
caccccgtccgggagggagg

SEQ ID NO: 73947 - DNA, 20 bp, Artificial Sequence
  Description of Artificial Sequence: Synthetic oligonucleotide
  Target: LAMA2; (-) strand; PAM type: NRG; PAM sequence: AGG
agccaccccgtccgggaggg

SEQ ID NO: 73948 - DNA, 20 bp, Artificial Sequence
  Description of Artificial Sequence: Synthetic oligonucleotide
  Target: LAMA2; (-) strand; PAM type: NRG; PAM sequence: GAG
cagccaccccgtccgggagg

SEQ ID NO: 73949 - DNA, 20 bp, Artificial Sequence
  Description of Artificial Sequence: Synthetic oligonucleotide
  Target: LAMA2; (-) strand; PAM type: NRG; PAM sequence: GGG
ggcagccaccccgtccggga

SEQ ID NO: 73950 - DNA, 20 bp, Artificial Sequence
  Description of Artificial Sequence: Synthetic oligonucleotide
  Target: LAMA2; (-) strand; PAM type: NRG; PAM sequence: AGG
cggcagccaccccgtccggg

SEQ ID NO: 73951 - DNA, 20 bp, Artificial Sequence
  Description of Artificial Sequence: Synthetic oligonucleotide
  Target: LAMA2; (-) strand; PAM type: NRG; PAM sequence: GAG
ccggcagccaccccgtccgg

SEQ ID NO: 73952 - DNA, 20 bp, Artificial Sequence
  Description of Artificial Sequence: Synthetic oligonucleotide
  Target: LAMA2; (-) strand; PAM type: NRG; PAM sequence: GGG
gcccggcagccaccccgtcc

SEQ ID NO: 73953 - DNA, 20 bp, Artificial Sequence
  Description of Artificial Sequence: Synthetic oligonucleotide
  Target: LAMA2; (-) strand; PAM type: NRG; PAM sequence: CGG
cgcccggcagccaccccgtc

SEQ ID NO: 73954 - DNA, 20 bp, Artificial Sequence
  Description of Artificial Sequence: Synthetic oligonucleotide
  Target: LAMA2; (-) strand; PAM type: NRG; PAM sequence: CAG
tgaggagcgtctccgcccgg

SEQ ID NO: 73955 - DNA, 20 bp, Artificial Sequence
  Description of Artificial Sequence: Synthetic oligonucleotide
  Target: LAMA2; (-) strand; PAM type: NRG; PAM sequence: CGG
aagtgaggagcgtctccgcc

SEQ ID NO: 73956 - DNA, 20 bp, Artificial Sequence
  Description of Artificial Sequence: Synthetic oligonucleotide
  Target: LAMA2; (-) strand; PAM type: NRG; PAM sequence: GAG
taccccatctgggaagtgag

SEQ ID NO: 73957 - DNA, 20 bp, Artificial Sequence
  Description of Artificial Sequence: Synthetic oligonucleotide
  Target: LAMA2; (-) strand; PAM type: NRG; PAM sequence: AGG
gctaccccatctgggaagtg

SEQ ID NO: 73958 - DNA, 20 bp, Artificial Sequence
  Description of Artificial Sequence: Synthetic oligonucleotide
  Target: LAMA2; (-) strand; PAM type: NRG; PAM sequence: GAG
agctaccccatctgggaagt

SEQ ID NO: 73959 - DNA, 20 bp, Artificial Sequence
  Description of Artificial Sequence: Synthetic oligonucleotide
  Target: LAMA2; (-) strand; PAM type: NRG; PAM sequence: AAG
cggcagctaccccatctggg

SEQ ID NO: 73960 - DNA, 20 bp, Artificial Sequence
  Description of Artificial Sequence: Synthetic oligonucleotide
  Target: LAMA2; (-) strand; PAM type: NRG; PAM sequence: GGG
gcccggcagctaccccatct

SEQ ID NO: 73961 - DNA, 20 bp, Artificial Sequence
  Description of Artificial Sequence: Synthetic oligonucleotide
  Target: LAMA2; (-) strand; PAM type: NRG; PAM sequence: TGG
cgcccggcagctaccccatc

SEQ ID NO: 73962 - DNA, 20 bp, Artificial Sequence
  Description of Artificial Sequence: Synthetic oligonucleotide
  Target: LAMA2; (-) strand; PAM type: NRG; PAM sequence: CAG
tgaggagcccctccgcccgg

SEQ ID NO: 73963 - DNA, 20 bp, Artificial Sequence
  Description of Artificial Sequence: Synthetic oligonucleotide
  Target: LAMA2; (-) strand; PAM type: NRG; PAM sequence: CGG
aagtgaggagcccctccgcc

SEQ ID NO: 73964 - DNA, 20 bp, Artificial Sequence
  Description of Artificial Sequence: Synthetic oligonucleotide
  Target: LAMA2; (-) strand; PAM type: NRG; PAM sequence: GAG
cgccccgtctgagaagtgag

SEQ ID NO: 73965 - DNA, 20 bp, Artificial Sequence
  Description of Artificial Sequence: Synthetic oligonucleotide
  Target: LAMA2; (-) strand; PAM type: NRG; PAM sequence: AGG
gccgccccgtctgagaagtg

SEQ ID NO: 73966 - DNA, 20 bp, Artificial Sequence
  Description of Artificial Sequence: Synthetic oligonucleotide
  Target: LAMA2; (-) strand; PAM type: NRG; PAM sequence: GAG
agccgccccgtctgagaagt

SEQ ID NO: 73967 - DNA, 20 bp, Artificial Sequence
  Description of Artificial Sequence: Synthetic oligonucleotide
  Target: LAMA2; (-) strand; PAM type: NRG; PAM sequence: AAG
cggcagccgccccgtctgag

SEQ ID NO: 73968 - DNA, 20 bp, Artificial Sequence
  Description of Artificial Sequence: Synthetic oligonucleotide
  Target: LAMA2; (-) strand; PAM type: NRG; PAM sequence: GAG
gcccggcagccgccccgtct

SEQ ID NO: 73969 - DNA, 20 bp, Artificial Sequence
  Description of Artificial Sequence: Synthetic oligonucleotide
  Target: LAMA2; (-) strand; PAM type: NRG; PAM sequence: CAG
tgaggaacccctccgcccgg

SEQ ID NO: 73970 - DNA, 20 bp, Artificial Sequence
  Description of Artificial Sequence: Synthetic oligonucleotide
  Target: LAMA2; (-) strand; PAM type: NRG; PAM sequence: CGG
aagtgaggaacccctccgcc

SEQ ID NO: 73971 - DNA, 20 bp, Artificial Sequence
  Description of Artificial Sequence: Synthetic oligonucleotide
  Target: LAMA2; (-) strand; PAM type: NRG; PAM sequence: AGG
gccgccccatctgagaagtg

SEQ ID NO: 73972 - DNA, 20 bp, Artificial Sequence
  Description of Artificial Sequence: Synthetic oligonucleotide
  Target: LAMA2; (-) strand; PAM type: NRG; PAM sequence: GAG
agccgccccatctgagaagt

SEQ ID NO: 73973 - DNA, 20 bp, Artificial Sequence
  Description of Artificial Sequence: Synthetic oligonucleotide
  Target: LAMA2; (-) strand; PAM type: NRG; PAM sequence: AAG
cggcagccgccccatctgag

SEQ ID NO: 73974 - DNA, 20 bp, Artificial Sequence
  Description of Artificial Sequence: Synthetic oligonucleotide
  Target: LAMA2; (-) strand; PAM type: NRG; PAM sequence: GAG
gcccggcagccgccccatct

SEQ ID NO: 73975 - DNA, 20 bp, Artificial Sequence
  Description of Artificial Sequence: Synthetic oligonucleotide
  Target: LAMA2; (-) strand; PAM type: NRG; PAM sequence: CAG
tgaggagcccctctgcccgg

SEQ ID NO: 73976 - DNA, 20 bp, Artificial Sequence
  Description of Artificial Sequence: Synthetic oligonucleotide
  Target: LAMA2; (-) strand; PAM type: NRG; PAM sequence: CGG
aagtgaggagcccctctgcc

SEQ ID NO: 73977 - DNA, 20 bp, Artificial Sequence
  Description of Artificial Sequence: Synthetic oligonucleotide
  Target: LAMA2; (-) strand; PAM type: NRG; PAM sequence: GAG
cgctgcgtctgagaagtgag

SEQ ID NO: 73978 - DNA, 20 bp, Artificial Sequence
  Description of Artificial Sequence: Synthetic oligonucleotide
  Target: LAMA2; (-) strand; PAM type: NRG; PAM sequence: AGG
gccgctgcgtctgagaagtg

SEQ ID NO: 73979 - DNA, 20 bp, Artificial Sequence
  Description of Artificial Sequence: Synthetic oligonucleotide
  Target: LAMA2; (-) strand; PAM type: NRG; PAM sequence: GAG
ggccgctgcgtctgagaagt

SEQ ID NO: 73980 - DNA, 20 bp, Artificial Sequence
  Description of Artificial Sequence: Synthetic oligonucleotide
  Target: LAMA2; (-) strand; PAM type: NRG; PAM sequence: AAG
gcccggccgctgcgtctgag

SEQ ID NO: 73981 - DNA, 20 bp, Artificial Sequence
  Description of Artificial Sequence: Synthetic oligonucleotide
  Target: LAMA2; (-) strand; PAM type: NRG; PAM sequence: GAG
tctgcccggccgctgcgtct

SEQ ID NO: 73982 - DNA, 20 bp, Artificial Sequence
  Description of Artificial Sequence: Synthetic oligonucleotide
  Target: LAMA2; (-) strand; PAM type: NRG; PAM sequence: CGG
aagtgaggagcgtctctgcc

SEQ ID NO: 73983 - DNA, 20 bp, Artificial Sequence
  Description of Artificial Sequence: Synthetic oligonucleotide
  Target: LAMA2; (-) strand; PAM type: NRG; PAM sequence: GAG
catcccgtctaggaagtgag

SEQ ID NO: 73984 - DNA, 20 bp, Artificial Sequence
  Description of Artificial Sequence: Synthetic oligonucleotide
  Target: LAMA2; (-) strand; PAM type: NRG; PAM sequence: AGG
gccatcccgtctaggaagtg

SEQ ID NO: 73985 - DNA, 20 bp, Artificial Sequence
  Description of Artificial Sequence: Synthetic oligonucleotide
  Target: LAMA2; (-) strand; PAM type: NRG; PAM sequence: GAG
cgccatcccgtctaggaagt

SEQ ID NO: 73986 - DNA, 20 bp, Artificial Sequence
  Description of Artificial Sequence: Synthetic oligonucleotide
  Target: LAMA2; (-) strand; PAM type: NRG; PAM sequence: AAG
ggaccgccatcccgtctagg

SEQ ID NO: 73987 - DNA, 20 bp, Artificial Sequence
  Description of Artificial Sequence: Synthetic oligonucleotide
  Target: LAMA2; (-) strand; PAM type: NRG; PAM sequence: AGG
tccggaccgccatcccgtct

SEQ ID NO: 73988 - DNA, 20 bp, Artificial Sequence
  Description of Artificial Sequence: Synthetic oligonucleotide
  Target: LAMA2; (-) strand; PAM type: NRG; PAM sequence: TAG
ttccggaccgccatcccgtc

SEQ ID NO: 73989 - DNA, 20 bp, Artificial Sequence
  Description of Artificial Sequence: Synthetic oligonucleotide
  Target: LAMA2; (-) strand; PAM type: NRG; PAM sequence: CGG
gaagtgaggagtgcctcttc

SEQ ID NO: 73990 - DNA, 20 bp, Artificial Sequence
  Description of Artificial Sequence: Synthetic oligonucleotide
  Target: LAMA2; (-) strand; PAM type: NRG; PAM sequence: GAG
tacccagtctgggaagtgag

SEQ ID NO: 73991 - DNA, 20 bp, Artificial Sequence
  Description of Artificial Sequence: Synthetic oligonucleotide
  Target: LAMA2; (-) strand; PAM type: NRG; PAM sequence: AGG
gctacccagtctgggaagtg

SEQ ID NO: 73992 - DNA, 20 bp, Artificial Sequence
  Description of Artificial Sequence: Synthetic oligonucleotide
  Target: LAMA2; (-) strand; PAM type: NRG; PAM sequence: GAG
ggctacccagtctgggaagt

SEQ ID NO: 73993 - DNA, 20 bp, Artificial Sequence
  Description of Artificial Sequence: Synthetic oligonucleotide
  Target: LAMA2; (-) strand; PAM type: NRG; PAM sequence: AAG
gcctggctacccagtctggg

SEQ ID NO: 73994 - DNA, 20 bp, Artificial Sequence
  Description of Artificial Sequence: Synthetic oligonucleotide
  Target: LAMA2; (-) strand; PAM type: NRG; PAM sequence: GGG
tctgcctggctacccagtct

SEQ ID NO: 73995 - DNA, 20 bp, Artificial Sequence
  Description of Artificial Sequence: Synthetic oligonucleotide
  Target: LAMA2; (-) strand; PAM type: NRG; PAM sequence: TGG
ctctgcctggctacccagtc

SEQ ID NO: 73996 - DNA, 20 bp, Artificial Sequence
  Description of Artificial Sequence: Synthetic oligonucleotide
  Target: LAMA2; (-) strand; PAM type: NRG; PAM sequence: CAG
agcccctctgcctggctacc

SEQ ID NO: 73997 - DNA, 20 bp, Artificial Sequence
  Description of Artificial Sequence: Synthetic oligonucleotide
  Target: LAMA2; (-) strand; PAM type: NRG; PAM sequence: TGG
atgtaaggagcccctctgcc

SEQ ID NO: 73998 - DNA, 20 bp, Artificial Sequence
  Description of Artificial Sequence: Synthetic oligonucleotide
  Target: LAMA2; (-) strand; PAM type: NRG; PAM sequence: GAG
cccatcgtctgggatgtaag

SEQ ID NO: 73999 - DNA, 20 bp, Artificial Sequence
  Description of Artificial Sequence: Synthetic oligonucleotide
  Target: LAMA2; (-) strand; PAM type: NRG; PAM sequence: AGG
cgcccatcgtctgggatgta

SEQ ID NO: 74000 - DNA, 20 bp, Artificial Sequence
  Description of Artificial Sequence: Synthetic oligonucleotide
  Target: LAMA2; (-) strand; PAM type: NRG; PAM sequence: AAG
ccgcccatcgtctgggatgt

SEQ ID NO: 74001 - DNA, 20 bp, Artificial Sequence
  Description of Artificial Sequence: Synthetic oligonucleotide
  Target: LAMA2; (-) strand; PAM type: NRG; PAM sequence: GGG
tgcctggccgcccatcgtct

SEQ ID NO: 74002 - DNA, 20 bp, Artificial Sequence
  Description of Artificial Sequence: Synthetic oligonucleotide
  Target: LAMA2; (-) strand; PAM type: NRG; PAM sequence: TGG
ctgcctggccgcccatcgtc

SEQ ID NO: 74003 - DNA, 20 bp, Artificial Sequence
  Description of Artificial Sequence: Synthetic oligonucleotide
  Target: LAMA2; (-) strand; PAM type: NRG; PAM sequence: TGG
aagtgaggagcgtctctgcc

SEQ ID NO: 74004 - DNA, 20 bp, Artificial Sequence
  Description of Artificial Sequence: Synthetic oligonucleotide
  Target: LAMA2; (-) strand; PAM type: NRG; PAM sequence: GAG
caccccgtctgggaagtgag

SEQ ID NO: 74005 - DNA, 20 bp, Artificial Sequence
  Description of Artificial Sequence: Synthetic oligonucleotide
  Target: LAMA2; (-) strand; PAM type: NRG; PAM sequence: AGG
gccaccccgtctgggaagtg

SEQ ID NO: 74006 - DNA, 20 bp, Artificial Sequence
  Description of Artificial Sequence: Synthetic oligonucleotide
  Target: LAMA2; (-) strand; PAM type: NRG; PAM sequence: GAG
cgccaccccgtctgggaagt

SEQ ID NO: 74007 - DNA, 20 bp, Artificial Sequence
  Description of Artificial Sequence: Synthetic oligonucleotide
  Target: LAMA2; (-) strand; PAM type: NRG; PAM sequence: AAG
cggccgccaccccgtctggg

SEQ ID NO: 74008 - DNA, 20 bp, Artificial Sequence
  Description of Artificial Sequence: Synthetic oligonucleotide
  Target: LAMA2; (-) strand; PAM type: NRG; PAM sequence: GGG
gcccggccgccaccccgtct

SEQ ID NO: 74009 - DNA, 20 bp, Artificial Sequence
  Description of Artificial Sequence: Synthetic oligonucleotide
  Target: LAMA2; (-) strand; PAM type: NRG; PAM sequence: TGG
tgcccggccgccaccccgtc

SEQ ID NO: 74010 - DNA, 20 bp, Artificial Sequence
  Description of Artificial Sequence: Synthetic oligonucleotide
  Target: LAMA2; (-) strand; PAM type: NRG; PAM sequence: CGG
ccgagtttgcagcctctgcc

SEQ ID NO: 74011 - DNA, 20 bp, Artificial Sequence
  Description of Artificial Sequence: Synthetic oligonucleotide
  Target: LAMA2; (-) strand; PAM type: NRG; PAM sequence: CAG
ctcccaaagtgccgagtttg

SEQ ID NO: 74012 - DNA, 20 bp, Artificial Sequence
  Description of Artificial Sequence: Synthetic oligonucleotide
  Target: LAMA2; (-) strand; PAM type: NRG; PAM sequence: GAG
ccttggcctcccaaagtgcc

SEQ ID NO: 74013 - DNA, 20 bp, Artificial Sequence
  Description of Artificial Sequence: Synthetic oligonucleotide
  Target: LAMA2; (-) strand; PAM type: NRG; PAM sequence: AAG
ccgcctgccttggcctccca

SEQ ID NO: 74014 - DNA, 20 bp, Artificial Sequence
  Description of Artificial Sequence: Synthetic oligonucleotide
  Target: LAMA2; (-) strand; PAM type: NRG; PAM sequence: TGG
cacctcccagccgcctgcct

SEQ ID NO: 74015 - DNA, 20 bp, Artificial Sequence
  Description of Artificial Sequence: Synthetic oligonucleotide
  Target: LAMA2; (-) strand; PAM type: NRG; PAM sequence: CAG
tagctacaacctccacctcc

SEQ ID NO: 74016 - DNA, 20 bp, Artificial Sequence
  Description of Artificial Sequence: Synthetic oligonucleotide
  Target: LAMA2; (-) strand; PAM type: NRG; PAM sequence: TAG
tgcagtggtgtgatctcggc

SEQ ID NO: 74017 - DNA, 20 bp, Artificial Sequence
  Description of Artificial Sequence: Synthetic oligonucleotide
  Target: LAMA2; (-) strand; PAM type: NRG; PAM sequence: CGG
ggagtgcagtggtgtgatct

SEQ ID NO: 74018 - DNA, 20 bp, Artificial Sequence
  Description of Artificial Sequence: Synthetic oligonucleotide
  Target: LAMA2; (-) strand; PAM type: NRG; PAM sequence: TGG
ttgcccaggctggagtgcag

SEQ ID NO: 74019 - DNA, 20 bp, Artificial Sequence
  Description of Artificial Sequence: Synthetic oligonucleotide
  Target: LAMA2; (-) strand; PAM type: NRG; PAM sequence: CAG
atgttgcccaggctggagtg

SEQ ID NO: 74020 - DNA, 20 bp, Artificial Sequence
  Description of Artificial Sequence: Synthetic oligonucleotide
  Target: LAMA2; (-) strand; PAM type: NRG; PAM sequence: GAG
gctcaatgttgcccaggctg

SEQ ID NO: 74021 - DNA, 20 bp, Artificial Sequence
  Description of Artificial Sequence: Synthetic oligonucleotide
  Target: LAMA2; (-) strand; PAM type: NRG; PAM sequence: TGG
gtgctcaatgttgcccaggc

SEQ ID NO: 74022 - DNA, 20 bp, Artificial Sequence
  Description of Artificial Sequence: Synthetic oligonucleotide
  Target: LAMA2; (-) strand; PAM type: NRG; PAM sequence: AGG
ctcagtgctcaatgttgccc

SEQ ID NO: 74023 - DNA, 20 bp, Artificial Sequence
  Description of Artificial Sequence: Synthetic oligonucleotide
  Target: LAMA2; (-) strand; PAM type: NRG; PAM sequence: CAG
actcagtgctcaatgttgcc

SEQ ID NO: 74024 - DNA, 20 bp, Artificial Sequence
  Description of Artificial Sequence: Synthetic oligonucleotide
  Target: LAMA2; (-) strand; PAM type: NRG; PAM sequence: CAG
cagacggagtctcgttcact

SEQ ID NO: 74025 - DNA, 20 bp, Artificial Sequence
  Description of Artificial Sequence: Synthetic oligonucleotide
  Target: LAMA2; (-) strand; PAM type: NRG; PAM sequence: GAG
aggtgccgagattgcagacg

SEQ ID NO: 74026 - DNA, 20 bp, Artificial Sequence
  Description of Artificial Sequence: Synthetic oligonucleotide
  Target: LAMA2; (-) strand; PAM type: NRG; PAM sequence: CGG
cgaggtgccgagattgcaga

SEQ ID NO: 74027 - DNA, 20 bp, Artificial Sequence
  Description of Artificial Sequence: Synthetic oligonucleotide
  Target: LAMA2; (-) strand; PAM type: NRG; PAM sequence: CAG
ctcccgaggtgccgagattg

SEQ ID NO: 74028 - DNA, 20 bp, Artificial Sequence
  Description of Artificial Sequence: Synthetic oligonucleotide
  Target: LAMA2; (-) strand; PAM type: NRG; PAM sequence: GAG
cctcggcctcccgaggtgcc

SEQ ID NO: 74029 - DNA, 20 bp, Artificial Sequence
  Description of Artificial Sequence: Synthetic oligonucleotide
  Target: LAMA2; (-) strand; PAM type: NRG; PAM sequence: AGG
ctgccagcctcggcctcccg

SEQ ID NO: 74030 - DNA, 20 bp, Artificial Sequence
  Description of Artificial Sequence: Synthetic oligonucleotide
  Target: LAMA2; (-) strand; PAM type: NRG; PAM sequence: GAG
tctgccagcctcggcctccc

SEQ ID NO: 74031 - DNA, 20 bp, Artificial Sequence
  Description of Artificial Sequence: Synthetic oligonucleotide
  Target: LAMA2; (-) strand; PAM type: NRG; PAM sequence: CGG
cgcgagtgatctgccagcct

SEQ ID NO: 74032 - DNA, 20 bp, Artificial Sequence
  Description of Artificial Sequence: Synthetic oligonucleotide
  Target: LAMA2; (-) strand; PAM type: NRG; PAM sequence: CAG
cctaaccgcgagtgatctgc

SEQ ID NO: 74033 - DNA, 20 bp, Artificial Sequence
  Description of Artificial Sequence: Synthetic oligonucleotide
  Target: LAMA2; (-) strand; PAM type: NRG; PAM sequence: GAG
ggtctccagctcctaaccgc

SEQ ID NO: 74034 - DNA, 20 bp, Artificial Sequence
  Description of Artificial Sequence: Synthetic oligonucleotide
  Target: LAMA2; (-) strand; PAM type: NRG; PAM sequence: CAG
tcatctaccgggctggtctc

SEQ ID NO: 74035 - DNA, 20 bp, Artificial Sequence
  Description of Artificial Sequence: Synthetic oligonucleotide
  Target: LAMA2; (-) strand; PAM type: NRG; PAM sequence: TGG
aatatcatcatctaccgggc

SEQ ID NO: 74036 - DNA, 20 bp, Artificial Sequence
  Description of Artificial Sequence: Synthetic oligonucleotide
  Target: LAMA2; (-) strand; PAM type: NRG; PAM sequence: GGG
atgaaatatcatcatctacc

SEQ ID NO: 74037 - DNA, 20 bp, Artificial Sequence
  Description of Artificial Sequence: Synthetic oligonucleotide
  Target: LAMA2; (-) strand; PAM type: NRG; PAM sequence: CGG
aatgaaatatcatcatctac

SEQ ID NO: 74038 - DNA, 20 bp, Artificial Sequence
  Description of Artificial Sequence: Synthetic oligonucleotide
  Target: LAMA2; (-) strand; PAM type: NRG; PAM sequence: TAG
acttaacacttagtcaattt

SEQ ID NO: 74039 - DNA, 20 bp, Artificial Sequence
  Description of Artificial Sequence: Synthetic oligonucleotide
  Target: LAMA2; (-) strand; PAM type: NRG; PAM sequence: TAG
gatcagagtcacttaacact

SEQ ID NO: 74040 - DNA, 20 bp, Artificial Sequence
  Description of Artificial Sequence: Synthetic oligonucleotide
  Target: LAMA2; (-) strand; PAM type: NRG; PAM sequence: GAG
tgaattctttcaacagatca

SEQ ID NO: 74041 - DNA, 20 bp, Artificial Sequence
  Description of Artificial Sequence: Synthetic oligonucleotide
  Target: LAMA2; (-) strand; PAM type: NRG; PAM sequence: CAG
catgaattctttcaacagat

SEQ ID NO: 74042 - DNA, 20 bp, Artificial Sequence
  Description of Artificial Sequence: Synthetic oligonucleotide
  Target: LAMA2; (-) strand; PAM type: NRG; PAM sequence: CAG
tggttcatgaattctttcaa

SEQ ID NO: 74043 - DNA, 20 bp, Artificial Sequence
  Description of Artificial Sequence: Synthetic oligonucleotide
  Target: LAMA2; (-) strand; PAM type: NRG; PAM sequence: TGG
cagaagaaagtttctgatct

SEQ ID NO: 74044 - DNA, 20 bp, Artificial Sequence
  Description of Artificial Sequence: Synthetic oligonucleotide
  Target: LAMA2; (-) strand; PAM type: NRG; PAM sequence: AAG
aacaaatcaaagacagaaga

SEQ ID NO: 74045 - DNA, 20 bp, Artificial Sequence
  Description of Artificial Sequence: Synthetic oligonucleotide
  Target: LAMA2; (-) strand; PAM type: NRG; PAM sequence: AAG
gaataacaaatcaaagacag

SEQ ID NO: 74046 - DNA, 20 bp, Artificial Sequence
  Description of Artificial Sequence: Synthetic oligonucleotide
  Target: LAMA2; (-) strand; PAM type: NRG; PAM sequence: CAG
gtagaataacaaatcaaaga

SEQ ID NO: 74047 - DNA, 20 bp, Artificial Sequence
  Description of Artificial Sequence: Synthetic oligonucleotide
  Target: LAMA2; (-) strand; PAM type: NRG; PAM sequence: AAG
cagagtagaataacaaatca

SEQ ID NO: 74048 - DNA, 20 bp, Artificial Sequence
  Description of Artificial Sequence: Synthetic oligonucleotide
  Target: LAMA2; (-) strand; PAM type: NRG; PAM sequence: TAG
gaagtataatgttaacagag

SEQ ID NO: 74049 - DNA, 20 bp, Artificial Sequence
  Description of Artificial Sequence: Synthetic oligonucleotide
  Target: LAMA2; (-) strand; PAM type: NRG; PAM sequence: GAG
ttagaagtataatgttaaca

SEQ ID NO: 74050 - DNA, 20 bp, Artificial Sequence
  Description of Artificial Sequence: Synthetic oligonucleotide
  Target: LAMA2; (-) strand; PAM type: NRG; PAM sequence: CAG
tgttagaagtataatgttaa

SEQ ID NO: 74051 - DNA, 20 bp, Artificial Sequence
  Description of Artificial Sequence: Synthetic oligonucleotide
  Target: LAMA2; (-) strand; PAM type: NRG; PAM sequence: AAG
gtagtgatgggaagtgttag

SEQ ID NO: 74052 - DNA, 20 bp, Artificial Sequence
  Description of Artificial Sequence: Synthetic oligonucleotide
  Target: LAMA2; (-) strand; PAM type: NRG; PAM sequence: TAG
tttgtagtgatgggaagtgt

SEQ ID NO: 74053 - DNA, 20 bp, Artificial Sequence
  Description of Artificial Sequence: Synthetic oligonucleotide
  Target: LAMA2; (-) strand; PAM type: NRG; PAM sequence: AAG
caaagatttgtagtgatggg

SEQ ID NO: 74054 - DNA, 20 bp, Artificial Sequence
  Description of Artificial Sequence: Synthetic oligonucleotide
  Target: LAMA2; (-) strand; PAM type: NRG; PAM sequence: GGG
tagcaaagatttgtagtgat

SEQ ID NO: 74055 - DNA, 20 bp, Artificial Sequence
  Description of Artificial Sequence: Synthetic oligonucleotide
  Target: LAMA2; (-) strand; PAM type: NRG; PAM sequence: TGG
atagcaaagatttgtagtga

SEQ ID NO: 74056 - DNA, 20 bp, Artificial Sequence
  Description of Artificial Sequence: Synthetic oligonucleotide
  Target: LAMA2; (-) strand; PAM type: NRG; PAM sequence: TAG
ggactaatagcaaagatttg

SEQ ID NO: 74057 - DNA, 20 bp, Artificial Sequence
  Description of Artificial Sequence: Synthetic oligonucleotide
  Target: LAMA2; (-) strand; PAM type: NRG; PAM sequence: AAG
gcatttggggactaatagca

SEQ ID NO: 74058 - DNA, 20 bp, Artificial Sequence
  Description of Artificial Sequence: Synthetic oligonucleotide
  Target: LAMA2; (-) strand; PAM type: NRG; PAM sequence: TAG
tcaaagcatttggggactaa

SEQ ID NO: 74059 - DNA, 20 bp, Artificial Sequence
  Description of Artificial Sequence: Synthetic oligonucleotide
  Target: LAMA2; (-) strand; PAM type: NRG; PAM sequence: GGG
actctagttcaaagcatttg

SEQ ID NO: 74060 - DNA, 20 bp, Artificial Sequence
  Description of Artificial Sequence: Synthetic oligonucleotide
  Target: LAMA2; (-) strand; PAM type: NRG; PAM sequence: GGG
cactctagttcaaagcattt

SEQ ID NO: 74061 - DNA, 20 bp, Artificial Sequence
  Description of Artificial Sequence: Synthetic oligonucleotide
  Target: LAMA2; (-) strand; PAM type: NRG; PAM sequence: TGG
tcactctagttcaaagcatt

SEQ ID NO: 74062 - DNA, 20 bp, Artificial Sequence
  Description of Artificial Sequence: Synthetic oligonucleotide
  Target: LAMA2; (-) strand; PAM type: NRG; PAM sequence: AAG
aaatgaatcactctagttca

SEQ ID NO: 74063 - DNA, 20 bp, Artificial Sequence
  Description of Artificial Sequence: Synthetic oligonucleotide
  Target: LAMA2; (-) strand; PAM type: NRG; PAM sequence: TAG
cacacataaatgaatcactc

SEQ ID NO: 74064 - DNA, 20 bp, Artificial Sequence
  Description of Artificial Sequence: Synthetic oligonucleotide
  Target: LAMA2; (-) strand; PAM type: NRG; PAM sequence: AAG
gcttctgtatttaccaaggt

SEQ ID NO: 74065 - DNA, 20 bp, Artificial Sequence
  Description of Artificial Sequence: Synthetic oligonucleotide
  Target: LAMA2; (-) strand; PAM type: NRG; PAM sequence: AGG
ttgtgcttctgtatttacca

SEQ ID NO: 74066 - DNA, 20 bp, Artificial Sequence
  Description of Artificial Sequence: Synthetic oligonucleotide
  Target: LAMA2; (-) strand; PAM type: NRG; PAM sequence: AAG
tttgtgcttctgtatttacc

SEQ ID NO: 74067 - DNA, 20 bp, Artificial Sequence
  Description of Artificial Sequence: Synthetic oligonucleotide
  Target: LAMA2; (-) strand; PAM type: NRG; PAM sequence: TGG
attcaccctggagaaatacc

SEQ ID NO: 74068 - DNA, 20 bp, Artificial Sequence
  Description of Artificial Sequence: Synthetic oligonucleotide
  Target: LAMA2; (-) strand; PAM type: NRG; PAM sequence: GAG
tctaaaatttattcaccctg

SEQ ID NO: 74069 - DNA, 20 bp, Artificial Sequence
  Description of Artificial Sequence: Synthetic oligonucleotide
  Target: LAMA2; (-) strand; PAM type: NRG; PAM sequence: TGG
cttctaaaatttattcaccc

SEQ ID NO: 74070 - DNA, 20 bp, Artificial Sequence
  Description of Artificial Sequence: Synthetic oligonucleotide
  Target: LAMA2; (-) strand; PAM type: NRG; PAM sequence: CAG
acaggcaatcagaaatatga

SEQ ID NO: 74071 - DNA, 20 bp, Artificial Sequence
  Description of Artificial Sequence: Synthetic oligonucleotide
  Target: LAMA2; (-) strand; PAM type: NRG; PAM sequence: CAG
tggtgtgaatcacaggcaat

SEQ ID NO: 74072 - DNA, 20 bp, Artificial Sequence
  Description of Artificial Sequence: Synthetic oligonucleotide
  Target: LAMA2; (-) strand; PAM type: NRG; PAM sequence: AGG
acaacaatggtgtgaatcac

SEQ ID NO: 74073 - DNA, 20 bp, Artificial Sequence
  Description of Artificial Sequence: Synthetic oligonucleotide
  Target: LAMA2; (-) strand; PAM type: NRG; PAM sequence: CAG
tacaacaatggtgtgaatca

SEQ ID NO: 74074 - DNA, 20 bp, Artificial Sequence
  Description of Artificial Sequence: Synthetic oligonucleotide
  Target: LAMA2; (-) strand; PAM type: NRG; PAM sequence: TGG
actgtcacagagtacaacaa

SEQ ID NO: 74075 - DNA, 20 bp, Artificial Sequence
  Description of Artificial Sequence: Synthetic oligonucleotide
  Target: LAMA2; (-) strand; PAM type: NRG; PAM sequence: GAG
ctttcaatgaaactgtcaca

SEQ ID NO: 74076 - DNA, 20 bp, Artificial Sequence
  Description of Artificial Sequence: Synthetic oligonucleotide
  Target: LAMA2; (-) strand; PAM type: NRG; PAM sequence: CAG
tcctttcaatgaaactgtca

SEQ ID NO: 74077 - DNA, 20 bp, Artificial Sequence
  Description of Artificial Sequence: Synthetic oligonucleotide
  Target: LAMA2; (-) strand; PAM type: NRG; PAM sequence: CAG
gagttcctcatggaacatga

SEQ ID NO: 74078 - DNA, 20 bp, Artificial Sequence
  Description of Artificial Sequence: Synthetic oligonucleotide
  Target: LAMA2; (-) strand; PAM type: NRG; PAM sequence: TGG
caggtaggctgagttcctca

SEQ ID NO: 74079 - DNA, 20 bp, Artificial Sequence
  Description of Artificial Sequence: Synthetic oligonucleotide
  Target: LAMA2; (-) strand; PAM type: NRG; PAM sequence: GAG
ggtaaaagagcaggtaggct

SEQ ID NO: 74080 - DNA, 20 bp, Artificial Sequence
  Description of Artificial Sequence: Synthetic oligonucleotide
  Target: LAMA2; (-) strand; PAM type: NRG; PAM sequence: AGG
ctactggtaaaagagcaggt

SEQ ID NO: 74081 - DNA, 20 bp, Artificial Sequence
  Description of Artificial Sequence: Synthetic oligonucleotide
  Target: LAMA2; (-) strand; PAM type: NRG; PAM sequence: TAG
gctactggtaaaagagcagg

SEQ ID NO: 74082 - DNA, 20 bp, Artificial Sequence
  Description of Artificial Sequence: Synthetic oligonucleotide
  Target: LAMA2; (-) strand; PAM type: NRG; PAM sequence: AGG
ccagctactggtaaaagagc

SEQ ID NO: 74083 - DNA, 20 bp, Artificial Sequence
  Description of Artificial Sequence: Synthetic oligonucleotide
  Target: LAMA2; (-) strand; PAM type: NRG; PAM sequence: CAG
accagctactggtaaaagag

SEQ ID NO: 74084 - DNA, 20 bp, Artificial Sequence
  Description of Artificial Sequence: Synthetic oligonucleotide
  Target: LAMA2; (-) strand; PAM type: NRG; PAM sequence: GAG
cccaccagctactggtaaaa

SEQ ID NO: 74085 - DNA, 20 bp, Artificial Sequence
  Description of Artificial Sequence: Synthetic oligonucleotide
  Target: LAMA2; (-) strand; PAM type: NRG; PAM sequence: AAG
ttcccaccagctactggtaa

SEQ ID NO: 74086 - DNA, 20 bp, Artificial Sequence
  Description of Artificial Sequence: Synthetic oligonucleotide
  Target: LAMA2; (-) strand; PAM type: NRG; PAM sequence: TGG
atggctttcccaccagctac

SEQ ID NO: 74087 - DNA, 20 bp, Artificial Sequence
  Description of Artificial Sequence: Synthetic oligonucleotide
  Target: LAMA2; (-) strand; PAM type: NRG; PAM sequence: CAG
gcacagcatggctttcccac

SEQ ID NO: 74088 - DNA, 20 bp, Artificial Sequence
  Description of Artificial Sequence: Synthetic oligonucleotide
  Target: LAMA2; (-) strand; PAM type: NRG; PAM sequence: TGG
aataagtcattggcacagca

SEQ ID NO: 74089 - DNA, 20 bp, Artificial Sequence
  Description of Artificial Sequence: Synthetic oligonucleotide
  Target: LAMA2; (-) strand; PAM type: NRG; PAM sequence: CAG
ctgtgaataagtcattggca

SEQ ID NO: 74090 - DNA, 20 bp, Artificial Sequence
  Description of Artificial Sequence: Synthetic oligonucleotide
  Target: LAMA2; (-) strand; PAM type: NRG; PAM sequence: TGG
gcctcctgtgaataagtcat

SEQ ID NO: 74091 - DNA, 20 bp, Artificial Sequence
  Description of Artificial Sequence: Synthetic oligonucleotide
  Target: LAMA2; (-) strand; PAM type: NRG; PAM sequence: AAG
ttgacctgcctcctgtgaat

SEQ ID NO: 74092 - DNA, 20 bp, Artificial Sequence
  Description of Artificial Sequence: Synthetic oligonucleotide
  Target: LAMA2; (-) strand; PAM type: NRG; PAM sequence: AAG
gaaacaatctgtggtttcaa

SEQ ID NO: 74093 - DNA, 20 bp, Artificial Sequence
  Description of Artificial Sequence: Synthetic oligonucleotide
  Target: LAMA2; (-) strand; PAM type: NRG; PAM sequence: TGG
ctctcatttgaaacaatctg

SEQ ID NO: 74094 - DNA, 20 bp, Artificial Sequence
  Description of Artificial Sequence: Synthetic oligonucleotide
  Target: LAMA2; (-) strand; PAM type: NRG; PAM sequence: TAG
gcaagcattttccttgtctt

SEQ ID NO: 74095 - DNA, 20 bp, Artificial Sequence
  Description of Artificial Sequence: Synthetic oligonucleotide
  Target: LAMA2; (-) strand; PAM type: NRG; PAM sequence: AAG
gctgcagggaaaacccaggc

SEQ ID NO: 74096 - DNA, 20 bp, Artificial Sequence
  Description of Artificial Sequence: Synthetic oligonucleotide
  Target: LAMA2; (-) strand; PAM type: NRG; PAM sequence: AGG
gtcagctgcagggaaaaccc

SEQ ID NO: 74097 - DNA, 20 bp, Artificial Sequence
  Description of Artificial Sequence: Synthetic oligonucleotide
  Target: LAMA2; (-) strand; PAM type: NRG; PAM sequence: CAG
cgtcagctgcagggaaaacc

SEQ ID NO: 74098 - DNA, 20 bp, Artificial Sequence
  Description of Artificial Sequence: Synthetic oligonucleotide
  Target: LAMA2; (-) strand; PAM type: NRG; PAM sequence: GGG
ttttaacaacgtcagctgca

SEQ ID NO: 74099 - DNA, 20 bp, Artificial Sequence
  Description of Artificial Sequence: Synthetic oligonucleotide
  Target: LAMA2; (-) strand; PAM type: NRG; PAM sequence: AGG
tttttaacaacgtcagctgc

SEQ ID NO: 74100 - DNA, 20 bp, Artificial Sequence
  Description of Artificial Sequence: Synthetic oligonucleotide
  Target: LAMA2; (-) strand; PAM type: NRG; PAM sequence: CAG
atttttaacaacgtcagctg

SEQ ID NO: 74101 - DNA, 20 bp, Artificial Sequence
  Description of Artificial Sequence: Synthetic oligonucleotide
  Target: LAMA2; (-) strand; PAM type: NRG; PAM sequence: CAG
gctatcatttttaacaacgt

SEQ ID NO: 74102 - DNA, 20 bp, Artificial Sequence
  Description of Artificial Sequence: Synthetic oligonucleotide
  Target: LAMA2; (-) strand; PAM type: NRG; PAM sequence: AAG
ttagtacgccatgcttcatt

SEQ ID NO: 74103 - DNA, 20 bp, Artificial Sequence
  Description of Artificial Sequence: Synthetic oligonucleotide
  Target: LAMA2; (-) strand; PAM type: NRG; PAM sequence: TAG
cctcagcttattaatgcatt

SEQ ID NO: 74104 - DNA, 20 bp, Artificial Sequence
  Description of Artificial Sequence: Synthetic oligonucleotide
  Target: LAMA2; (-) strand; PAM type: NRG; PAM sequence: CAG
gaatgaataaggtcctccct

SEQ ID NO: 74105 - DNA, 20 bp, Artificial Sequence
  Description of Artificial Sequence: Synthetic oligonucleotide
  Target: LAMA2; (-) strand; PAM type: NRG; PAM sequence: AGG
agtccaaattggaatgaata

SEQ ID NO: 74106 - DNA, 20 bp, Artificial Sequence
  Description of Artificial Sequence: Synthetic oligonucleotide
  Target: LAMA2; (-) strand; PAM type: NRG; PAM sequence: AAG
gagtccaaattggaatgaat

SEQ ID NO: 74107 - DNA, 20 bp, Artificial Sequence
  Description of Artificial Sequence: Synthetic oligonucleotide
  Target: LAMA2; (-) strand; PAM type: NRG; PAM sequence: TGG
cgagtgagcagagtccaaat

SEQ ID NO: 74108 - DNA, 20 bp, Artificial Sequence
  Description of Artificial Sequence: Synthetic oligonucleotide
  Target: LAMA2; (-) strand; PAM type: NRG; PAM sequence: GAG
acgagtaacacgagtgagca

SEQ ID NO: 74109 - DNA, 20 bp, Artificial Sequence
  Description of Artificial Sequence: Synthetic oligonucleotide
  Target: LAMA2; (-) strand; PAM type: NRG; PAM sequence: CAG
aaacgagtaacacgagtgag

SEQ ID NO: 74110 - DNA, 20 bp, Artificial Sequence
  Description of Artificial Sequence: Synthetic oligonucleotide
  Target: LAMA2; (-) strand; PAM type: NRG; PAM sequence: GAG
agaaaacgagtaacacgagt

SEQ ID NO: 74111 - DNA, 20 bp, Artificial Sequence
  Description of Artificial Sequence: Synthetic oligonucleotide
  Target: LAMA2; (-) strand; PAM type: NRG; PAM sequence: GAG
cttaagaaaacgagtaacac

SEQ ID NO: 74112 - DNA, 20 bp, Artificial Sequence
  Description of Artificial Sequence: Synthetic oligonucleotide
  Target: LAMA2; (-) strand; PAM type: NRG; PAM sequence: GAG
tagtccagtcttaagaaaac

SEQ ID NO: 74113 - DNA, 20 bp, Artificial Sequence
  Description of Artificial Sequence: Synthetic oligonucleotide
  Target: LAMA2; (-) strand; PAM type: NRG; PAM sequence: AAG
cacaattttagtccagtctt

SEQ ID NO: 74114 - DNA, 20 bp, Artificial Sequence
  Description of Artificial Sequence: Synthetic oligonucleotide
  Target: LAMA2; (-) strand; PAM type: NRG; PAM sequence: CAG
aaggtctcacaattttagtc

SEQ ID NO: 74115 - DNA, 20 bp, Artificial Sequence
  Description of Artificial Sequence: Synthetic oligonucleotide
  Target: LAMA2; (-) strand; PAM type: NRG; PAM sequence: TAG
cccataaggtctcacaattt

SEQ ID NO: 74116 - DNA, 20 bp, Artificial Sequence
  Description of Artificial Sequence: Synthetic oligonucleotide
  Target: LAMA2; (-) strand; PAM type: NRG; PAM sequence: AGG
aagggtatcgttggcccata

SEQ ID NO: 74117 - DNA, 20 bp, Artificial Sequence
  Description of Artificial Sequence: Synthetic oligonucleotide
  Target: LAMA2; (-) strand; PAM type: NRG; PAM sequence: AAG
aaagggtatcgttggcccat

SEQ ID NO: 74118 - DNA, 20 bp, Artificial Sequence
  Description of Artificial Sequence: Synthetic oligonucleotide
  Target: LAMA2; (-) strand; PAM type: NRG; PAM sequence: TGG
tcagctctaaagggtatcgt

SEQ ID NO: 74119 - DNA, 20 bp, Artificial Sequence
  Description of Artificial Sequence: Synthetic oligonucleotide
  Target: LAMA2; (-) strand; PAM type: NRG; PAM sequence: GGG
aattaattatcagctctaaa

SEQ ID NO: 74120 - DNA, 20 bp, Artificial Sequence
  Description of Artificial Sequence: Synthetic oligonucleotide
  Target: LAMA2; (-) strand; PAM type: NRG; PAM sequence: AGG
aaattaattatcagctctaa

SEQ ID NO: 74121 - DNA, 20 bp, Artificial Sequence
  Description of Artificial Sequence: Synthetic oligonucleotide
  Target: LAMA2; (-) strand; PAM type: NRG; PAM sequence: AAG
caaattaattatcagctcta

SEQ ID NO: 74122 - DNA, 20 bp, Artificial Sequence
  Description of Artificial Sequence: Synthetic oligonucleotide
  Target: LAMA2; (-) strand; PAM type: NRG; PAM sequence: CAG
aattctttcaaattaattat

SEQ ID NO: 74123 - DNA, 20 bp, Artificial Sequence
  Description of Artificial Sequence: Synthetic oligonucleotide
  Target: LAMA2; (-) strand; PAM type: NRG; PAM sequence: AAG
atacactgcattcttagctc

SEQ ID NO: 74124 - DNA, 20 bp, Artificial Sequence
  Description of Artificial Sequence: Synthetic oligonucleotide
  Target: LAMA2; (-) strand; PAM type: NRG; PAM sequence: TAG
ctgtgaatacactgcattct

SEQ ID NO: 74125 - DNA, 20 bp, Artificial Sequence
  Description of Artificial Sequence: Synthetic oligonucleotide
  Target: LAMA2; (-) strand; PAM type: NRG; PAM sequence: TGG
ttcttaattatcttgataaa

SEQ ID NO: 74126 - DNA, 20 bp, Artificial Sequence
  Description of Artificial Sequence: Synthetic oligonucleotide
  Target: LAMA2; (-) strand; PAM type: NRG; PAM sequence: GAG
atttagtgcttgctcttacg

SEQ ID NO: 74127 - DNA, 20 bp, Artificial Sequence
  Description of Artificial Sequence: Synthetic oligonucleotide
  Target: LAMA2; (-) strand; PAM type: NRG; PAM sequence: CGG
taatttagtgcttgctctta

SEQ ID NO: 74128 - DNA, 20 bp, Artificial Sequence
  Description of Artificial Sequence: Synthetic oligonucleotide
  Target: LAMA2; (-) strand; PAM type: NRG; PAM sequence: TAG
tattactactactggtaatt

SEQ ID NO: 74129 - DNA, 20 bp, Artificial Sequence
  Description of Artificial Sequence: Synthetic oligonucleotide
  Target: LAMA2; (-) strand; PAM type: NRG; PAM sequence: TGG
cataataatattactactac

SEQ ID NO: 74130 - DNA, 20 bp, Artificial Sequence
  Description of Artificial Sequence: Synthetic oligonucleotide
  Target: LAMA2; (-) strand; PAM type: NRG; PAM sequence: TAG
cttgctaatgcatctcattt

SEQ ID NO: 74131 - DNA, 20 bp, Artificial Sequence
  Description of Artificial Sequence: Synthetic oligonucleotide
  Target: LAMA2; (-) strand; PAM type: NRG; PAM sequence: AAG
atttttatatcagaataaaa

SEQ ID NO: 74132 - DNA, 20 bp, Artificial Sequence
  Description of Artificial Sequence: Synthetic oligonucleotide
  Target: LAMA2; (-) strand; PAM type: NRG; PAM sequence: CAG
atatttgaaaatttttatat

SEQ ID NO: 74133 - DNA, 20 bp, Artificial Sequence
  Description of Artificial Sequence: Synthetic oligonucleotide
  Target: LAMA2; (-) strand; PAM type: NRG; PAM sequence: CGG
gttgggtacatttgagtcca

SEQ ID NO: 74134 - DNA, 20 bp, Artificial Sequence
  Description of Artificial Sequence: Synthetic oligonucleotide
  Target: LAMA2; (-) strand; PAM type: NRG; PAM sequence: GAG
gatgggtgttgggtacattt

SEQ ID NO: 74135 - DNA, 20 bp, Artificial Sequence
  Description of Artificial Sequence: Synthetic oligonucleotide
  Target: LAMA2; (-) strand; PAM type: NRG; PAM sequence: GGG
aatacttatggatgggtgtt

SEQ ID NO: 74136 - DNA, 20 bp, Artificial Sequence
  Description of Artificial Sequence: Synthetic oligonucleotide
  Target: LAMA2; (-) strand; PAM type: NRG; PAM sequence: TGG
taatacttatggatgggtgt

SEQ ID NO: 74137 - DNA, 20 bp, Artificial Sequence
  Description of Artificial Sequence: Synthetic oligonucleotide
  Target: LAMA2; (-) strand; PAM type: NRG; PAM sequence: GGG
ctgagttaatacttatggat

SEQ ID NO: 74138 - DNA, 20 bp, Artificial Sequence
  Description of Artificial Sequence: Synthetic oligonucleotide
  Target: LAMA2; (-) strand; PAM type: NRG; PAM sequence: TGG
cctgagttaatacttatgga

SEQ ID NO: 74139 - DNA, 20 bp, Artificial Sequence
  Description of Artificial Sequence: Synthetic oligonucleotide
  Target: LAMA2; (-) strand; PAM type: NRG; PAM sequence: TGG
gggtcctgagttaatactta

SEQ ID NO: 74140 - DNA, 20 bp, Artificial Sequence
  Description of Artificial Sequence: Synthetic oligonucleotide
  Target: LAMA2; (-) strand; PAM type: NRG; PAM sequence: GAG
actgatacaagaggggtcct

SEQ ID NO: 74141 - DNA, 20 bp, Artificial Sequence
  Description of Artificial Sequence: Synthetic oligonucleotide
  Target: LAMA2; (-) strand; PAM type: NRG; PAM sequence: GGG
gttgaaaactgatacaagag

SEQ ID NO: 74142 - DNA, 20 bp, Artificial Sequence
  Description of Artificial Sequence: Synthetic oligonucleotide
  Target: LAMA2; (-) strand; PAM type: NRG; PAM sequence: GGG
ggttgaaaactgatacaaga

SEQ ID NO: 74143 - DNA, 20 bp, Artificial Sequence
  Description of Artificial Sequence: Synthetic oligonucleotide
  Target: LAMA2; (-) strand; PAM type: NRG; PAM sequence: AGG
gggttgaaaactgatacaag

SEQ ID NO: 74144 - DNA, 20 bp, Artificial Sequence
  Description of Artificial Sequence: Synthetic oligonucleotide
  Target: LAMA2; (-) strand; PAM type: NRG; PAM sequence: GAG
tgggttgaaaactgatacaa

SEQ ID NO: 74145 - DNA, 20 bp, Artificial Sequence
  Description of Artificial Sequence: Synthetic oligonucleotide
  Target: LAMA2; (-) strand; PAM type: NRG; PAM sequence: AAG
gatgggttgaaaactgatac

SEQ ID NO: 74146 - DNA, 20 bp, Artificial Sequence
  Description of Artificial Sequence: Synthetic oligonucleotide
  Target: LAMA2; (-) strand; PAM type: NRG; PAM sequence: GGG
gggtggagtaggatgtggat

SEQ ID NO: 74147 - DNA, 20 bp, Artificial Sequence
  Description of Artificial Sequence: Synthetic oligonucleotide
  Target: LAMA2; (-) strand; PAM type: NRG; PAM sequence: TGG
ggggtggagtaggatgtgga

SEQ ID NO: 74148 - DNA, 20 bp, Artificial Sequence
  Description of Artificial Sequence: Synthetic oligonucleotide
  Target: LAMA2; (-) strand; PAM type: NRG; PAM sequence: TGG
tggaggggtggagtaggatg

SEQ ID NO: 74149 - DNA, 20 bp, Artificial Sequence
  Description of Artificial Sequence: Synthetic oligonucleotide
  Target: LAMA2; (-) strand; PAM type: NRG; PAM sequence: AGG
ataatctggaggggtggagt

SEQ ID NO: 74150 - DNA, 20 bp, Artificial Sequence
  Description of Artificial Sequence: Synthetic oligonucleotide
  Target: LAMA2; (-) strand; PAM type: NRG; PAM sequence: TAG
aataatctggaggggtggag

SEQ ID NO: 74151 - DNA, 20 bp, Artificial Sequence
  Description of Artificial Sequence: Synthetic oligonucleotide
  Target: LAMA2; (-) strand; PAM type: NRG; PAM sequence: GAG
cccaataatctggaggggtg

SEQ ID NO: 74152 - DNA, 20 bp, Artificial Sequence
  Description of Artificial Sequence: Synthetic oligonucleotide
  Target: LAMA2; (-) strand; PAM type: NRG; PAM sequence: TGG
ttcccaataatctggagggg

SEQ ID NO: 74153 - DNA, 20 bp, Artificial Sequence
  Description of Artificial Sequence: Synthetic oligonucleotide
  Target: LAMA2; (-) strand; PAM type: NRG; PAM sequence: GGG
tgcttcccaataatctggag

SEQ ID NO: 74154 - DNA, 20 bp, Artificial Sequence
  Description of Artificial Sequence: Synthetic oligonucleotide
  Target: LAMA2; (-) strand; PAM type: NRG; PAM sequence: GGG
ttgcttcccaataatctgga

SEQ ID NO: 74155 - DNA, 20 bp, Artificial Sequence
  Description of Artificial Sequence: Synthetic oligonucleotide
  Target: LAMA2; (-) strand; PAM type: NRG; PAM sequence: AGG
tttgcttcccaataatctgg

SEQ ID NO: 74156 - DNA, 20 bp, Artificial Sequence
  Description of Artificial Sequence: Synthetic oligonucleotide
  Target: LAMA2; (-) strand; PAM type: NRG; PAM sequence: GAG
atttgcttcccaataatctg

SEQ ID NO: 74157 - DNA, 20 bp, Artificial Sequence
  Description of Artificial Sequence: Synthetic oligonucleotide
  Target: LAMA2; (-) strand; PAM type: NRG; PAM sequence: TGG
gaatttgcttcccaataatc

SEQ ID NO: 74158 - DNA, 20 bp, Artificial Sequence
  Description of Artificial Sequence: Synthetic oligonucleotide
  Target: LAMA2; (-) strand; PAM type: NRG; PAM sequence: TGG
tacaaagcgagtaatacata

SEQ ID NO: 74159 - DNA, 20 bp, Artificial Sequence
  Description of Artificial Sequence: Synthetic oligonucleotide
  Target: LAMA2; (-) strand; PAM type: NRG; PAM sequence: GAG
taatgaagtagttacaaagc

SEQ ID NO: 74160 - DNA, 20 bp, Artificial Sequence
  Description of Artificial Sequence: Synthetic oligonucleotide
  Target: LAMA2; (-) strand; PAM type: NRG; PAM sequence: AAG
tacataatgaagtagttaca

SEQ ID NO: 74161 - DNA, 20 bp, Artificial Sequence
  Description of Artificial Sequence: Synthetic oligonucleotide
  Target: LAMA2; (-) strand; PAM type: NRG; PAM sequence: TAG
ttcagagatacataatgaag

SEQ ID NO: 74162 - DNA, 20 bp, Artificial Sequence
  Description of Artificial Sequence: Synthetic oligonucleotide
  Target: LAMA2; (-) strand; PAM type: NRG; PAM sequence: AAG
tccttcagagatacataatg

SEQ ID NO: 74163 - DNA, 20 bp, Artificial Sequence
  Description of Artificial Sequence: Synthetic oligonucleotide
  Target: LAMA2; (-) strand; PAM type: NRG; PAM sequence: GAG
taaaagagtcttatccttca

SEQ ID NO: 74164 - DNA, 20 bp, Artificial Sequence
  Description of Artificial Sequence: Synthetic oligonucleotide
  Target: LAMA2; (-) strand; PAM type: NRG; PAM sequence: CAG
tataaaagagtcttatcctt

SEQ ID NO: 74165 - DNA, 20 bp, Artificial Sequence
  Description of Artificial Sequence: Synthetic oligonucleotide
  Target: LAMA2; (-) strand; PAM type: NRG; PAM sequence: GAG
caatggtttcctttataaaa

SEQ ID NO: 74166 - DNA, 20 bp, Artificial Sequence
  Description of Artificial Sequence: Synthetic oligonucleotide
  Target: LAMA2; (-) strand; PAM type: NRG; PAM sequence: AAG
gacaatggtttcctttataa

SEQ ID NO: 74167 - DNA, 20 bp, Artificial Sequence
  Description of Artificial Sequence: Synthetic oligonucleotide
  Target: LAMA2; (-) strand; PAM type: NRG; PAM sequence: TGG
ttaatttttagatgtgacaa

SEQ ID NO: 74168 - DNA, 20 bp, Artificial Sequence
  Description of Artificial Sequence: Synthetic oligonucleotide
  Target: LAMA2; (-) strand; PAM type: NRG; PAM sequence: TAG
agtataatagtattaatttt

SEQ ID NO: 74169 - DNA, 20 bp, Artificial Sequence
  Description of Artificial Sequence: Synthetic oligonucleotide
  Target: LAMA2; (-) strand; PAM type: NRG; PAM sequence: TAG
atattaaagaatcagtataa

SEQ ID NO: 74170 - DNA, 20 bp, Artificial Sequence
  Description of Artificial Sequence: Synthetic oligonucleotide
  Target: LAMA2; (-) strand; PAM type: NRG; PAM sequence: CAG
atttgttaatattaaagaat

SEQ ID NO: 74171 - DNA, 20 bp, Artificial Sequence
  Description of Artificial Sequence: Synthetic oligonucleotide
  Target: LAMA2; (-) strand; PAM type: NRG; PAM sequence: AAG
gtaaatatttgttaatatta

SEQ ID NO: 74172 - DNA, 20 bp, Artificial Sequence
  Description of Artificial Sequence: Synthetic oligonucleotide
  Target: LAMA2; (-) strand; PAM type: NRG; PAM sequence: GAG
gtgtgatgaatttgaatact

SEQ ID NO: 74173 - DNA, 20 bp, Artificial Sequence
  Description of Artificial Sequence: Synthetic oligonucleotide
  Target: LAMA2; (-) strand; PAM type: NRG; PAM sequence: AGG
tttttaaaaaacttggaagc

SEQ ID NO: 74174 - DNA, 20 bp, Artificial Sequence
  Description of Artificial Sequence: Synthetic oligonucleotide
  Target: LAMA2; (-) strand; PAM type: NRG; PAM sequence: CAG
gtttttaaaaaacttggaag

SEQ ID NO: 74175 - DNA, 20 bp, Artificial Sequence
  Description of Artificial Sequence: Synthetic oligonucleotide
  Target: LAMA2; (-) strand; PAM type: NRG; PAM sequence: AAG
actgtttttaaaaaacttgg

SEQ ID NO: 74176 - DNA, 20 bp, Artificial Sequence
  Description of Artificial Sequence: Synthetic oligonucleotide
  Target: LAMA2; (-) strand; PAM type: NRG; PAM sequence: TGG
tcaactgtttttaaaaaact

SEQ ID NO: 74177 - DNA, 20 bp, Artificial Sequence
  Description of Artificial Sequence: Synthetic oligonucleotide
  Target: LAMA2; (-) strand; PAM type: NRG; PAM sequence: CAG
ctagatatatcgaacaaatg

SEQ ID NO: 74178 - DNA, 20 bp, Artificial Sequence
  Description of Artificial Sequence: Synthetic oligonucleotide
  Target: LAMA2; (-) strand; PAM type: NRG; PAM sequence: TAG
atgttattgattgagagacc

SEQ ID NO: 74179 - DNA, 20 bp, Artificial Sequence
  Description of Artificial Sequence: Synthetic oligonucleotide
  Target: LAMA2; (-) strand; PAM type: NRG; PAM sequence: GAG
gttaaaatgttattgattga

SEQ ID NO: 74180 - DNA, 20 bp, Artificial Sequence
  Description of Artificial Sequence: Synthetic oligonucleotide
  Target: LAMA2; (-) strand; PAM type: NRG; PAM sequence: GAG
aagttaaaatgttattgatt

SEQ ID NO: 74181 - DNA, 20 bp, Artificial Sequence
  Description of Artificial Sequence: Synthetic oligonucleotide
  Target: LAMA2; (-) strand; PAM type: NRG; PAM sequence: AAG
caaaaaaataagttgcaagg

SEQ ID NO: 74182 - DNA, 20 bp, Artificial Sequence
  Description of Artificial Sequence: Synthetic oligonucleotide
  Target: LAMA2; (-) strand; PAM type: NRG; PAM sequence: AGG
cttcaaaaaaataagttgca

SEQ ID NO: 74183 - DNA, 20 bp, Artificial Sequence
  Description of Artificial Sequence: Synthetic oligonucleotide
  Target: LAMA2; (-) strand; PAM type: NRG; PAM sequence: AAG
tcttcaaaaaaataagttgc

SEQ ID NO: 74184 - DNA, 20 bp, Artificial Sequence
  Description of Artificial Sequence: Synthetic oligonucleotide
  Target: LAMA2; (-) strand; PAM type: NRG; PAM sequence: AAG
cgtggtttcttcaaaaaaat

SEQ ID NO: 74185 - DNA, 20 bp, Artificial Sequence
  Description of Artificial Sequence: Synthetic oligonucleotide
  Target: LAMA2; (-) strand; PAM type: NRG; PAM sequence: TGG
acactactggacacacaacg

SEQ ID NO: 74186 - DNA, 20 bp, Artificial Sequence
  Description of Artificial Sequence: Synthetic oligonucleotide
  Target: LAMA2; (-) strand; PAM type: NRG; PAM sequence: TGG
caggatgtaagaaacactac

SEQ ID NO: 74187 - DNA, 20 bp, Artificial Sequence
  Description of Artificial Sequence: Synthetic oligonucleotide
  Target: LAMA2; (-) strand; PAM type: NRG; PAM sequence: AAG
agtagcaaaatgcaggatgt

SEQ ID NO: 74188 - DNA, 20 bp, Artificial Sequence
  Description of Artificial Sequence: Synthetic oligonucleotide
  Target: LAMA2; (-) strand; PAM type: NRG; PAM sequence: AGG
aaccctaagtagcaaaatgc

SEQ ID NO: 74189 - DNA, 20 bp, Artificial Sequence
  Description of Artificial Sequence: Synthetic oligonucleotide
  Target: LAMA2; (-) strand; PAM type: NRG; PAM sequence: CAG
gaaccctaagtagcaaaatg

SEQ ID NO: 74190 - DNA, 20 bp, Artificial Sequence
  Description of Artificial Sequence: Synthetic oligonucleotide
  Target: LAMA2; (-) strand; PAM type: NRG; PAM sequence: TAG
agtactacaggaaccctaag

SEQ ID NO: 74191 - DNA, 20 bp, Artificial Sequence
  Description of Artificial Sequence: Synthetic oligonucleotide
  Target: LAMA2; (-) strand; PAM type: NRG; PAM sequence: AAG
aacagtactacaggaaccct

SEQ ID NO: 74192 - DNA, 20 bp, Artificial Sequence
  Description of Artificial Sequence: Synthetic oligonucleotide
  Target: LAMA2; (-) strand; PAM type: NRG; PAM sequence: AGG
aaatatgcaaacagtactac

SEQ ID NO: 74193 - DNA, 20 bp, Artificial Sequence
  Description of Artificial Sequence: Synthetic oligonucleotide
  Target: LAMA2; (-) strand; PAM type: NRG; PAM sequence: CAG
gaaatatgcaaacagtacta

SEQ ID NO: 74194 - DNA, 20 bp, Artificial Sequence
  Description of Artificial Sequence: Synthetic oligonucleotide
  Target: LAMA2; (-) strand; PAM type: NRG; PAM sequence: CAG
gtagtagagaaatatgcaaa

SEQ ID NO: 74195 - DNA, 20 bp, Artificial Sequence
  Description of Artificial Sequence: Synthetic oligonucleotide
  Target: LAMA2; (-) strand; PAM type: NRG; PAM sequence: GAG
tttcaggaaatatagtagta

SEQ ID NO: 74196 - DNA, 20 bp, Artificial Sequence
  Description of Artificial Sequence: Synthetic oligonucleotide
  Target: LAMA2; (-) strand; PAM type: NRG; PAM sequence: TAG
gttttcaggaaatatagtag

SEQ ID NO: 74197 - DNA, 20 bp, Artificial Sequence
  Description of Artificial Sequence: Synthetic oligonucleotide
  Target: LAMA2; (-) strand; PAM type: NRG; PAM sequence: TAG
tcagttttcaggaaatatag

SEQ ID NO: 74198 - DNA, 20 bp, Artificial Sequence
  Description of Artificial Sequence: Synthetic oligonucleotide
  Target: LAMA2; (-) strand; PAM type: NRG; PAM sequence: TAG
ctatcagttttcaggaaata

SEQ ID NO: 74199 - DNA, 20 bp, Artificial Sequence
  Description of Artificial Sequence: Synthetic oligonucleotide
  Target: LAMA2; (-) strand; PAM type: NRG; PAM sequence: AGG
aaatttatctatcagttttc

SEQ ID NO: 74200 - DNA, 20 bp, Artificial Sequence
  Description of Artificial Sequence: Synthetic oligonucleotide
  Target: LAMA2; (-) strand; PAM type: NRG; PAM sequence: CAG
taaatttatctatcagtttt

SEQ ID NO: 74201 - DNA, 20 bp, Artificial Sequence
  Description of Artificial Sequence: Synthetic oligonucleotide
  Target: LAMA2; (-) strand; PAM type: NRG; PAM sequence: CAG
aactctctaaatttatctat

SEQ ID NO: 74202 - DNA, 20 bp, Artificial Sequence
  Description of Artificial Sequence: Synthetic oligonucleotide
  Target: LAMA2; (-) strand; PAM type: NRG; PAM sequence: GAG
aaaatatgaaccctgaatca

SEQ ID NO: 74203 - DNA, 20 bp, Artificial Sequence
  Description of Artificial Sequence: Synthetic oligonucleotide
  Target: LAMA2; (-) strand; PAM type: NRG; PAM sequence: CAG
caaaaatatgaaccctgaat

SEQ ID NO: 74204 - DNA, 20 bp, Artificial Sequence
  Description of Artificial Sequence: Synthetic oligonucleotide
  Target: LAMA2; (-) strand; PAM type: NRG; PAM sequence: TGG
acatagcacaatctataaag

SEQ ID NO: 74205 - DNA, 20 bp, Artificial Sequence
  Description of Artificial Sequence: Synthetic oligonucleotide
  Target: LAMA2; (-) strand; PAM type: NRG; PAM sequence: AAG
agcacatagcacaatctata

SEQ ID NO: 74206 - DNA, 20 bp, Artificial Sequence
  Description of Artificial Sequence: Synthetic oligonucleotide
  Target: LAMA2; (-) strand; PAM type: NRG; PAM sequence: TAG
tgcagtgtgatggaagcaca

SEQ ID NO: 74207 - DNA, 20 bp, Artificial Sequence
  Description of Artificial Sequence: Synthetic oligonucleotide
  Target: LAMA2; (-) strand; PAM type: NRG; PAM sequence: AAG
tattttctgcagtgtgatgg

SEQ ID NO: 74208 - DNA, 20 bp, Artificial Sequence
  Description of Artificial Sequence: Synthetic oligonucleotide
  Target: LAMA2; (-) strand; PAM type: NRG; PAM sequence: TGG
agatattttctgcagtgtga

SEQ ID NO: 74209 - DNA, 20 bp, Artificial Sequence
  Description of Artificial Sequence: Synthetic oligonucleotide
  Target: LAMA2; (-) strand; PAM type: NRG; PAM sequence: CAG
agacacccagatattttctg

SEQ ID NO: 74210 - DNA, 20 bp, Artificial Sequence
  Description of Artificial Sequence: Synthetic oligonucleotide
  Target: LAMA2; (-) strand; PAM type: NRG; PAM sequence: CAG
atccccaaaaaagagacacc

SEQ ID NO: 74211 - DNA, 20 bp, Artificial Sequence
  Description of Artificial Sequence: Synthetic oligonucleotide
  Target: LAMA2; (-) strand; PAM type: NRG; PAM sequence: GAG
ccagaaacatccccaaaaaa

SEQ ID NO: 74212 - DNA, 20 bp, Artificial Sequence
  Description of Artificial Sequence: Synthetic oligonucleotide
  Target: LAMA2; (-) strand; PAM type: NRG; PAM sequence: AAG
gaccagaaacatccccaaaa

SEQ ID NO: 74213 - DNA, 20 bp, Artificial Sequence
  Description of Artificial Sequence: Synthetic oligonucleotide
  Target: LAMA2; (-) strand; PAM type: NRG; PAM sequence: CAG
cattaatgctgatcaatgac

SEQ ID NO: 74214 - DNA, 20 bp, Artificial Sequence
  Description of Artificial Sequence: Synthetic oligonucleotide
  Target: LAMA2; (-) strand; PAM type: NRG; PAM sequence: TGG
cccataaaatgatggacctg

SEQ ID NO: 74215 - DNA, 20 bp, Artificial Sequence
  Description of Artificial Sequence: Synthetic oligonucleotide
  Target: LAMA2; (-) strand; PAM type: NRG; PAM sequence: TGG
agggagcccccataaaatga

SEQ ID NO: 74216 - DNA, 20 bp, Artificial Sequence
  Description of Artificial Sequence: Synthetic oligonucleotide
  Target: LAMA2; (-) strand; PAM type: NRG; PAM sequence: GAG
tgtgcagtttactatgaagg

SEQ ID NO: 74217 - DNA, 20 bp, Artificial Sequence
  Description of Artificial Sequence: Synthetic oligonucleotide
  Target: LAMA2; (-) strand; PAM type: NRG; PAM sequence: GGG
actgtgcagtttactatgaa

SEQ ID NO: 74218 - DNA, 20 bp, Artificial Sequence
  Description of Artificial Sequence: Synthetic oligonucleotide
  Target: LAMA2; (-) strand; PAM type: NRG; PAM sequence: AGG
tactgtgcagtttactatga

SEQ ID NO: 74219 - DNA, 20 bp, Artificial Sequence
  Description of Artificial Sequence: Synthetic oligonucleotide
  Target: LAMA2; (-) strand; PAM type: NRG; PAM sequence: AAG
ttactgtgcagtttactatg

SEQ ID NO: 74220 - DNA, 20 bp, Artificial Sequence
  Description of Artificial Sequence: Synthetic oligonucleotide
  Target: LAMA2; (-) strand; PAM type: NRG; PAM sequence: CAG
actgtgtatagtttactgtg

SEQ ID NO: 74221 - DNA, 20 bp, Artificial Sequence
  Description of Artificial Sequence: Synthetic oligonucleotide
  Target: LAMA2; (-) strand; PAM type: NRG; PAM sequence: TAG
accacaaggttcactgtgta

SEQ ID NO: 74222 - DNA, 20 bp, Artificial Sequence
  Description of Artificial Sequence: Synthetic oligonucleotide
  Target: LAMA2; (-) strand; PAM type: NRG; PAM sequence: AGG
ggatgctacagtttaccaca

SEQ ID NO: 74223 - DNA, 20 bp, Artificial Sequence
  Description of Artificial Sequence: Synthetic oligonucleotide
  Target: LAMA2; (-) strand; PAM type: NRG; PAM sequence: AAG
aggatgctacagtttaccac

SEQ ID NO: 74224 - DNA, 20 bp, Artificial Sequence
  Description of Artificial Sequence: Synthetic oligonucleotide
  Target: LAMA2; (-) strand; PAM type: NRG; PAM sequence: CAG
ctatagtacacaggatgcta

SEQ ID NO: 74225 - DNA, 20 bp, Artificial Sequence
  Description of Artificial Sequence: Synthetic oligonucleotide
  Target: LAMA2; (-) strand; PAM type: NRG; PAM sequence: AGG
agtaaattgctatagtacac

SEQ ID NO: 74226 - DNA, 20 bp, Artificial Sequence
  Description of Artificial Sequence: Synthetic oligonucleotide
  Target: LAMA2; (-) strand; PAM type: NRG; PAM sequence: CAG
gagtaaattgctatagtaca

SEQ ID NO: 74227 - DNA, 20 bp, Artificial Sequence
  Description of Artificial Sequence: Synthetic oligonucleotide
  Target: LAMA2; (-) strand; PAM type: NRG; PAM sequence: TAG
caacatggagtaaattgcta

SEQ ID NO: 74228 - DNA, 20 bp, Artificial Sequence
  Description of Artificial Sequence: Synthetic oligonucleotide
  Target: LAMA2; (-) strand; PAM type: NRG; PAM sequence: GAG
taaatgaaaaaagcaacatg

SEQ ID NO: 74229 - DNA, 20 bp, Artificial Sequence
  Description of Artificial Sequence: Synthetic oligonucleotide
  Target: LAMA2; (-) strand; PAM type: NRG; PAM sequence: TGG
gttaaatgaaaaaagcaaca

SEQ ID NO: 74230 - DNA, 20 bp, Artificial Sequence
  Description of Artificial Sequence: Synthetic oligonucleotide
  Target: LAMA2; (-) strand; PAM type: NRG; PAM sequence: AAG
gatttattgttaaatgaaaa

SEQ ID NO: 74231 - DNA, 20 bp, Artificial Sequence
  Description of Artificial Sequence: Synthetic oligonucleotide
  Target: LAMA2; (-) strand; PAM type: NRG; PAM sequence: GGG
atggaagagcaatgaatggc

SEQ ID NO: 74232 - DNA, 20 bp, Artificial Sequence
  Description of Artificial Sequence: Synthetic oligonucleotide
  Target: LAMA2; (-) strand; PAM type: NRG; PAM sequence: CGG
gatggaagagcaatgaatgg

SEQ ID NO: 74233 - DNA, 20 bp, Artificial Sequence
  Description of Artificial Sequence: Synthetic oligonucleotide
  Target: LAMA2; (-) strand; PAM type: NRG; PAM sequence: TGG
tgagatggaagagcaatgaa

SEQ ID NO: 74234 - DNA, 20 bp, Artificial Sequence
  Description of Artificial Sequence: Synthetic oligonucleotide
  Target: LAMA2; (-) strand; PAM type: NRG; PAM sequence: GAG
aagaaaaccctgagatggaa

SEQ ID NO: 74235 - DNA, 20 bp, Artificial Sequence
  Description of Artificial Sequence: Synthetic oligonucleotide
  Target: LAMA2; (-) strand; PAM type: NRG; PAM sequence: AAG
gcaagaaaaccctgagatgg

SEQ ID NO: 74236 - DNA, 20 bp, Artificial Sequence
  Description of Artificial Sequence: Synthetic oligonucleotide
  Target: LAMA2; (-) strand; PAM type: NRG; PAM sequence: TGG
taagcaagaaaaccctgaga

SEQ ID NO: 74237 - DNA, 20 bp, Artificial Sequence
  Description of Artificial Sequence: Synthetic oligonucleotide
  Target: LAMA2; (-) strand; PAM type: NRG; PAM sequence: GAG
ataataagcaagaaaaccct

SEQ ID NO: 74238 - DNA, 20 bp, Artificial Sequence
  Description of Artificial Sequence: Synthetic oligonucleotide
  Target: LAMA2; (-) strand; PAM type: NRG; PAM sequence: AAG
tttaacaagcaataataagc

SEQ ID NO: 74239 - DNA, 20 bp, Artificial Sequence
  Description of Artificial Sequence: Synthetic oligonucleotide
  Target: LAMA2; (-) strand; PAM type: NRG; PAM sequence: AAG
gaattttaacaagcaataat

SEQ ID NO: 74240 - DNA, 20 bp, Artificial Sequence
  Description of Artificial Sequence: Synthetic oligonucleotide
  Target: LAMA2; (-) strand; PAM type: NRG; PAM sequence: AAG
tgatttggaagaattttaac

SEQ ID NO: 74241 - DNA, 20 bp, Artificial Sequence
  Description of Artificial Sequence: Synthetic oligonucleotide
  Target: LAMA2; (-) strand; PAM type: NRG; PAM sequence: AAG
tgattataaatgtgatttgg

SEQ ID NO: 74242 - DNA, 20 bp, Artificial Sequence
  Description of Artificial Sequence: Synthetic oligonucleotide
  Target: LAMA2; (-) strand; PAM type: NRG; PAM sequence: TGG
acttgattataaatgtgatt

SEQ ID NO: 74243 - DNA, 20 bp, Artificial Sequence
  Description of Artificial Sequence: Synthetic oligonucleotide
  Target: LAMA2; (-) strand; PAM type: NRG; PAM sequence: TAG
aaaatgttattttttttcct

SEQ ID NO: 74244 - DNA, 20 bp, Artificial Sequence
  Description of Artificial Sequence: Synthetic oligonucleotide
  Target: LAMA2; (-) strand; PAM type: NRG; PAM sequence: GAG
cttattttcaatgtccctaa

SEQ ID NO: 74245 - DNA, 20 bp, Artificial Sequence
  Description of Artificial Sequence: Synthetic oligonucleotide
  Target: LAMA2; (-) strand; PAM type: NRG; PAM sequence: AAG
gacttattttcaatgtccct

SEQ ID NO: 74246 - DNA, 20 bp, Artificial Sequence
  Description of Artificial Sequence: Synthetic oligonucleotide
  Target: LAMA2; (-) strand; PAM type: NRG; PAM sequence: AAG
gtctagctctgaaaaatagc

SEQ ID NO: 74247 - DNA, 20 bp, Artificial Sequence
  Description of Artificial Sequence: Synthetic oligonucleotide
  Target: LAMA2; (-) strand; PAM type: NRG; PAM sequence: TAG
caaagtctagctctgaaaaa

SEQ ID NO: 74248 - DNA, 20 bp, Artificial Sequence
  Description of Artificial Sequence: Synthetic oligonucleotide
  Target: LAMA2; (-) strand; PAM type: NRG; PAM sequence: TAG
aaaaagcaaatctcaaagtc

SEQ ID NO: 74249 - DNA, 20 bp, Artificial Sequence
  Description of Artificial Sequence: Synthetic oligonucleotide
  Target: LAMA2; (-) strand; PAM type: NRG; PAM sequence: AAG
ctgcaaaaaagcaaatctca

SEQ ID NO: 74250 - DNA, 20 bp, Artificial Sequence
  Description of Artificial Sequence: Synthetic oligonucleotide
  Target: LAMA2; (-) strand; PAM type: NRG; PAM sequence: AAG
ctctatctcactctgcaaaa

SEQ ID NO: 74251 - DNA, 20 bp, Artificial Sequence
  Description of Artificial Sequence: Synthetic oligonucleotide
  Target: LAMA2; (-) strand; PAM type: NRG; PAM sequence: AGG
cttcaagggacagtatttga

SEQ ID NO: 74252 - DNA, 20 bp, Artificial Sequence
  Description of Artificial Sequence: Synthetic oligonucleotide
  Target: LAMA2; (-) strand; PAM type: NRG; PAM sequence: AAG
tcttcaagggacagtatttg

SEQ ID NO: 74253 - DNA, 20 bp, Artificial Sequence
  Description of Artificial Sequence: Synthetic oligonucleotide
  Target: LAMA2; (-) strand; PAM type: NRG; PAM sequence: CAG
atgcctaactcttcaaggga

SEQ ID NO: 74254 - DNA, 20 bp, Artificial Sequence
  Description of Artificial Sequence: Synthetic oligonucleotide
  Target: LAMA2; (-) strand; PAM type: NRG; PAM sequence: GGG
atcaatgcctaactcttcaa

SEQ ID NO: 74255 - DNA, 20 bp, Artificial Sequence
  Description of Artificial Sequence: Synthetic oligonucleotide
  Target: LAMA2; (-) strand; PAM type: NRG; PAM sequence: AGG
aatcaatgcctaactcttca

SEQ ID NO: 74256 - DNA, 20 bp, Artificial Sequence
  Description of Artificial Sequence: Synthetic oligonucleotide
  Target: LAMA2; (-) strand; PAM type: NRG; PAM sequence: AAG
aaatcaatgcctaactcttc

SEQ ID NO: 74257 - DNA, 20 bp, Artificial Sequence
  Description of Artificial Sequence: Synthetic oligonucleotide
  Target: LAMA2; (-) strand; PAM type: NRG; PAM sequence: GGG
gttgaaattgtttttcaaaa

SEQ ID NO: 74258 - DNA, 20 bp, Artificial Sequence
  Description of Artificial Sequence: Synthetic oligonucleotide
  Target: LAMA2; (-) strand; PAM type: NRG; PAM sequence: AGG
tgttgaaattgtttttcaaa

SEQ ID NO: 74259 - DNA, 20 bp, Artificial Sequence
  Description of Artificial Sequence: Synthetic oligonucleotide
  Target: LAMA2; (-) strand; PAM type: NRG; PAM sequence: AAG
ttgttgaaattgtttttcaa

SEQ ID NO: 74260 - DNA, 20 bp, Artificial Sequence
  Description of Artificial Sequence: Synthetic oligonucleotide
  Target: LAMA2; (-) strand; PAM type: NRG; PAM sequence: GAG
actaatgataatactttgaa

SEQ ID NO: 74261 - DNA, 20 bp, Artificial Sequence
  Description of Artificial Sequence: Synthetic oligonucleotide
  Target: LAMA2; (-) strand; PAM type: NRG; PAM sequence: AAG
tgactaatgataatactttg

SEQ ID NO: 74262 - DNA, 20 bp, Artificial Sequence
  Description of Artificial Sequence: Synthetic oligonucleotide
  Target: LAMA2; (-) strand; PAM type: NRG; PAM sequence: TGG
cctaataataataatctaac

SEQ ID NO: 74263 - DNA, 20 bp, Artificial Sequence
  Description of Artificial Sequence: Synthetic oligonucleotide
  Target: LAMA2; (-) strand; PAM type: NRG; PAM sequence: CAG
aatgaattattccaccacct

SEQ ID NO: 74264 - DNA, 20 bp, Artificial Sequence
  Description of Artificial Sequence: Synthetic oligonucleotide
  Target: LAMA2; (-) strand; PAM type: NRG; PAM sequence: TGG
ctcatgagaagttaacacat

SEQ ID NO: 74265 - DNA, 20 bp, Artificial Sequence
  Description of Artificial Sequence: Synthetic oligonucleotide
  Target: LAMA2; (-) strand; PAM type: NRG; PAM sequence: AAG
actcacattaaactcatgag

SEQ ID NO: 74266 - DNA, 20 bp, Artificial Sequence
  Description of Artificial Sequence: Synthetic oligonucleotide
  Target: LAMA2; (-) strand; PAM type: NRG; PAM sequence: GAG
tatactcacattaaactcat

SEQ ID NO: 74267 - DNA, 20 bp, Artificial Sequence
  Description of Artificial Sequence: Synthetic oligonucleotide
  Target: LAMA2; (-) strand; PAM type: NRG; PAM sequence: CAG
tactctgccctcagttaaaa

SEQ ID NO: 74268 - DNA, 20 bp, Artificial Sequence
  Description of Artificial Sequence: Synthetic oligonucleotide
  Target: LAMA2; (-) strand; PAM type: NRG; PAM sequence: CAG
aaaaaggaatactctgccct

SEQ ID NO: 74269 - DNA, 20 bp, Artificial Sequence
  Description of Artificial Sequence: Synthetic oligonucleotide
  Target: LAMA2; (-) strand; PAM type: NRG; PAM sequence: AGG
tcctgtattataagagaaaa

SEQ ID NO: 74270 - DNA, 20 bp, Artificial Sequence
  Description of Artificial Sequence: Synthetic oligonucleotide
  Target: LAMA2; (-) strand; PAM type: NRG; PAM sequence: AAG
ctcctgtattataagagaaa

SEQ ID NO: 74271 - DNA, 20 bp, Artificial Sequence
  Description of Artificial Sequence: Synthetic oligonucleotide
  Target: LAMA2; (-) strand; PAM type: NRG; PAM sequence: GAG
aactggctcctgtattataa

SEQ ID NO: 74272 - DNA, 20 bp, Artificial Sequence
  Description of Artificial Sequence: Synthetic oligonucleotide
  Target: LAMA2; (-) strand; PAM type: NRG; PAM sequence: AAG
gtaactggctcctgtattat

SEQ ID NO: 74273 - DNA, 20 bp, Artificial Sequence
  Description of Artificial Sequence: Synthetic oligonucleotide
  Target: LAMA2; (-) strand; PAM type: NRG; PAM sequence: TGG
ttcacctcctgtgttgtaac

SEQ ID NO: 74274 - DNA, 20 bp, Artificial Sequence
  Description of Artificial Sequence: Synthetic oligonucleotide
  Target: LAMA2; (-) strand; PAM type: NRG; PAM sequence: AGG
gaagttgcaggtaagcaaac

SEQ ID NO: 74275 - DNA, 20 bp, Artificial Sequence
  Description of Artificial Sequence: Synthetic oligonucleotide
  Target: LAMA2; (-) strand; PAM type: NRG; PAM sequence: CAG
tgaagttgcaggtaagcaaa

SEQ ID NO: 74276 - DNA, 20 bp, Artificial Sequence
  Description of Artificial Sequence: Synthetic oligonucleotide
  Target: LAMA2; (-) strand; PAM type: NRG; PAM sequence: AAG
aaattcctgaagttgcaggt

SEQ ID NO: 74277 - DNA, 20 bp, Artificial Sequence
  Description of Artificial Sequence: Synthetic oligonucleotide
  Target: LAMA2; (-) strand; PAM type: NRG; PAM sequence: AGG
catgaaattcctgaagttgc

SEQ ID NO: 74278 - DNA, 20 bp, Artificial Sequence
  Description of Artificial Sequence: Synthetic oligonucleotide
  Target: LAMA2; (-) strand; PAM type: NRG; PAM sequence: CAG
gcatgaaattcctgaagttg

SEQ ID NO: 74279 - DNA, 20 bp, Artificial Sequence
  Description of Artificial Sequence: Synthetic oligonucleotide
  Target: LAMA2; (-) strand; PAM type: NRG; PAM sequence: AAG
tgctaagcatgaaattcctg

SEQ ID NO: 74280 - DNA, 20 bp, Artificial Sequence
  Description of Artificial Sequence: Synthetic oligonucleotide
  Target: LAMA2; (-) strand; PAM type: NRG; PAM sequence: AAG
gtgtactgcaattaattgct

SEQ ID NO: 74281 - DNA, 20 bp, Artificial Sequence
  Description of Artificial Sequence: Synthetic oligonucleotide
  Target: LAMA2; (-) strand; PAM type: NRG; PAM sequence: AAG
cctcctacccctacccccac

SEQ ID NO: 74282 - DNA, 20 bp, Artificial Sequence
  Description of Artificial Sequence: Synthetic oligonucleotide
  Target: LAMA2; (-) strand; PAM type: NRG; PAM sequence: AAG
gtaattgtcactgaattatt

SEQ ID NO: 74283 - DNA, 20 bp, Artificial Sequence
  Description of Artificial Sequence: Synthetic oligonucleotide
  Target: LAMA2; (-) strand; PAM type: NRG; PAM sequence: TAG
acttcaaatactttcacata

SEQ ID NO: 74284 - DNA, 20 bp, Artificial Sequence
  Description of Artificial Sequence: Synthetic oligonucleotide
  Target: LAMA2; (-) strand; PAM type: NRG; PAM sequence: AGG
cacccatattttctatcttc

SEQ ID NO: 74285 - DNA, 20 bp, Artificial Sequence
  Description of Artificial Sequence: Synthetic oligonucleotide
  Target: LAMA2; (-) strand; PAM type: NRG; PAM sequence: CAG
ccacccatattttctatctt

SEQ ID NO: 74286 - DNA, 20 bp, Artificial Sequence
  Description of Artificial Sequence: Synthetic oligonucleotide
  Target: LAMA2; (-) strand; PAM type: NRG; PAM sequence: GAG
tgtggtggggagttcaggag

SEQ ID NO: 74287 - DNA, 20 bp, Artificial Sequence
  Description of Artificial Sequence: Synthetic oligonucleotide
  Target: LAMA2; (-) strand; PAM type: NRG; PAM sequence: AGG
aatgtggtggggagttcagg

SEQ ID NO: 74288 - DNA, 20 bp, Artificial Sequence
  Description of Artificial Sequence: Synthetic oligonucleotide
  Target: LAMA2; (-) strand; PAM type: NRG; PAM sequence: GAG
taatgtggtggggagttcag

SEQ ID NO: 74289 - DNA, 20 bp, Artificial Sequence
  Description of Artificial Sequence: Synthetic oligonucleotide
  Target: LAMA2; (-) strand; PAM type: NRG; PAM sequence: AGG
aataatgtggtggggagttc

SEQ ID NO: 74290 - DNA, 20 bp, Artificial Sequence
  Description of Artificial Sequence: Synthetic oligonucleotide
  Target: LAMA2; (-) strand; PAM type: NRG; PAM sequence: CAG
gaataatgtggtggggagtt

SEQ ID NO: 74291 - DNA, 20 bp, Artificial Sequence
  Description of Artificial Sequence: Synthetic oligonucleotide
  Target: LAMA2; (-) strand; PAM type: NRG; PAM sequence: GAG
acctagaataatgtggtggg

SEQ ID NO: 74292 - DNA, 20 bp, Artificial Sequence
  Description of Artificial Sequence: Synthetic oligonucleotide
  Target: LAMA2; (-) strand; PAM type: NRG; PAM sequence: GGG
aaacctagaataatgtggtg

SEQ ID NO: 74293 - DNA, 20 bp, Artificial Sequence
  Description of Artificial Sequence: Synthetic oligonucleotide
  Target: LAMA2; (-) strand; PAM type: NRG; PAM sequence: GGG
taaacctagaataatgtggt

SEQ ID NO: 74294 - DNA, 20 bp, Artificial Sequence
  Description of Artificial Sequence: Synthetic oligonucleotide
  Target: LAMA2; (-) strand; PAM type: NRG; PAM sequence: TGG
ataaacctagaataatgtgg

SEQ ID NO: 74295 - DNA, 20 bp, Artificial Sequence
  Description of Artificial Sequence: Synthetic oligonucleotide
  Target: LAMA2; (-) strand; PAM type: NRG; PAM sequence: TGG
tcaataaacctagaataatg

SEQ ID NO: 74296 - DNA, 20 bp, Artificial Sequence
  Description of Artificial Sequence: Synthetic oligonucleotide
  Target: LAMA2; (-) strand; PAM type: NRG; PAM sequence: TAG
tacatttacttcaataaacc

SEQ ID NO: 74297 - DNA, 20 bp, Artificial Sequence
  Description of Artificial Sequence: Synthetic oligonucleotide
  Target: LAMA2; (-) strand; PAM type: NRG; PAM sequence: AAG
tgagttttatgtccccttat

SEQ ID NO: 74298 - DNA, 20 bp, Artificial Sequence
  Description of Artificial Sequence: Synthetic oligonucleotide
  Target: LAMA2; (-) strand; PAM type: NRG; PAM sequence: GAG
ctaattattattttctgtgt

SEQ ID NO: 74299 - DNA, 20 bp, Artificial Sequence
  Description of Artificial Sequence: Synthetic oligonucleotide
  Target: LAMA2; (-) strand; PAM type: NRG; PAM sequence: TGG
taaacttaaaaacattaatg

SEQ ID NO: 74300 - DNA, 20 bp, Artificial Sequence
  Description of Artificial Sequence: Synthetic oligonucleotide
  Target: LAMA2; (-) strand; PAM type: NRG; PAM sequence: CAG
gacttgtttaagtcaagcat

SEQ ID NO: 74301 - DNA, 20 bp, Artificial Sequence
  Description of Artificial Sequence: Synthetic oligonucleotide
  Target: LAMA2; (-) strand; PAM type: NRG; PAM sequence: AAG
taagtggacttgtttaagtc

SEQ ID NO: 74302 - DNA, 20 bp, Artificial Sequence
  Description of Artificial Sequence: Synthetic oligonucleotide
  Target: LAMA2; (-) strand; PAM type: NRG; PAM sequence: AAG
tgctataagtggacttgttt

SEQ ID NO: 74303 - DNA, 20 bp, Artificial Sequence
  Description of Artificial Sequence: Synthetic oligonucleotide
  Target: LAMA2; (-) strand; PAM type: NRG; PAM sequence: TGG
gattctgacaatgctataag

SEQ ID NO: 74304 - DNA, 20 bp, Artificial Sequence
  Description of Artificial Sequence: Synthetic oligonucleotide
  Target: LAMA2; (-) strand; PAM type: NRG; PAM sequence: AAG
acagattctgacaatgctat

SEQ ID NO: 74305 - DNA, 20 bp, Artificial Sequence
  Description of Artificial Sequence: Synthetic oligonucleotide
  Target: LAMA2; (-) strand; PAM type: NRG; PAM sequence: CAG
tccctgaagagatacttata

SEQ ID NO: 74306 - DNA, 20 bp, Artificial Sequence
  Description of Artificial Sequence: Synthetic oligonucleotide
  Target: LAMA2; (-) strand; PAM type: NRG; PAM sequence: GAG
catcttaaaaattccctgaa

SEQ ID NO: 74307 - DNA, 20 bp, Artificial Sequence
  Description of Artificial Sequence: Synthetic oligonucleotide
  Target: LAMA2; (-) strand; PAM type: NRG; PAM sequence: AAG
ctcatcttaaaaattccctg

SEQ ID NO: 74308 - DNA, 20 bp, Artificial Sequence
  Description of Artificial Sequence: Synthetic oligonucleotide
  Target: LAMA2; (-) strand; PAM type: NRG; PAM sequence: CAG
caaaaatgtgtaggcaatct

SEQ ID NO: 74309 - DNA, 20 bp, Artificial Sequence
  Description of Artificial Sequence: Synthetic oligonucleotide
  Target: LAMA2; (-) strand; PAM type: NRG; PAM sequence: AGG
actgtgtaacaaaaatgtgt

SEQ ID NO: 74310 - DNA, 20 bp, Artificial Sequence
  Description of Artificial Sequence: Synthetic oligonucleotide
  Target: LAMA2; (-) strand; PAM type: NRG; PAM sequence: TAG
tactgtgtaacaaaaatgtg

SEQ ID NO: 74311 - DNA, 20 bp, Artificial Sequence
  Description of Artificial Sequence: Synthetic oligonucleotide
  Target: LAMA2; (-) strand; PAM type: NRG; PAM sequence: TGG
cacctaagccacatagaacc

SEQ ID NO: 74312 - DNA, 20 bp, Artificial Sequence
  Description of Artificial Sequence: Synthetic oligonucleotide
  Target: LAMA2; (-) strand; PAM type: NRG; PAM sequence: TAG
ccatccccacctaagccaca

SEQ ID NO: 74313 - DNA, 20 bp, Artificial Sequence
  Description of Artificial Sequence: Synthetic oligonucleotide
  Target: LAMA2; (-) strand; PAM type: NRG; PAM sequence: AAG
tcaaagccccatccccacct

SEQ ID NO: 74314 - DNA, 20 bp, Artificial Sequence
  Description of Artificial Sequence: Synthetic oligonucleotide
  Target: LAMA2; (-) strand; PAM type: NRG; PAM sequence: AAG
tacaacagaggattcactca

SEQ ID NO: 74315 - DNA, 20 bp, Artificial Sequence
  Description of Artificial Sequence: Synthetic oligonucleotide
  Target: LAMA2; (-) strand; PAM type: NRG; PAM sequence: AGG
attaagtctgtgtacaacag

SEQ ID NO: 74316 - DNA, 20 bp, Artificial Sequence
  Description of Artificial Sequence: Synthetic oligonucleotide
  Target: LAMA2; (-) strand; PAM type: NRG; PAM sequence: GAG
tattaagtctgtgtacaaca

SEQ ID NO: 74317 - DNA, 20 bp, Artificial Sequence
  Description of Artificial Sequence: Synthetic oligonucleotide
  Target: LAMA2; (-) strand; PAM type: NRG; PAM sequence: CAG
tgtattaagtctgtgtacaa

SEQ ID NO: 74318 - DNA, 20 bp, Artificial Sequence
  Description of Artificial Sequence: Synthetic oligonucleotide
  Target: LAMA2; (-) strand; PAM type: NRG; PAM sequence: AAG
gctgaaatggagaatgtatt

SEQ ID NO: 74319 - DNA, 20 bp, Artificial Sequence
  Description of Artificial Sequence: Synthetic oligonucleotide
  Target: LAMA2; (-) strand; PAM type: NRG; PAM sequence: GAG
gtgaaaagtgggctgaaatg

SEQ ID NO: 74320 - DNA, 20 bp, Artificial Sequence
  Description of Artificial Sequence: Synthetic oligonucleotide
  Target: LAMA2; (-) strand; PAM type: NRG; PAM sequence: TGG
aggtgaaaagtgggctgaaa

SEQ ID NO: 74321 - DNA, 20 bp, Artificial Sequence
  Description of Artificial Sequence: Synthetic oligonucleotide
  Target: LAMA2; (-) strand; PAM type: NRG; PAM sequence: GGG
tgaaaacagaggtgaaaagt

SEQ ID NO: 74322 - DNA, 20 bp, Artificial Sequence
  Description of Artificial Sequence: Synthetic oligonucleotide
  Target: LAMA2; (-) strand; PAM type: NRG; PAM sequence: TGG
atgaaaacagaggtgaaaag

SEQ ID NO: 74323 - DNA, 20 bp, Artificial Sequence
  Description of Artificial Sequence: Synthetic oligonucleotide
  Target: LAMA2; (-) strand; PAM type: NRG; PAM sequence: AAG
ctgatgaaaacagaggtgaa

SEQ ID NO: 74324 - DNA, 20 bp, Artificial Sequence
  Description of Artificial Sequence: Synthetic oligonucleotide
  Target: LAMA2; (-) strand; PAM type: NRG; PAM sequence: AGG
ggtaggtctgatgaaaacag

SEQ ID NO: 74325 - DNA, 20 bp, Artificial Sequence
  Description of Artificial Sequence: Synthetic oligonucleotide
  Target: LAMA2; (-) strand; PAM type: NRG; PAM sequence: GAG
aggtaggtctgatgaaaaca

SEQ ID NO: 74326 - DNA, 20 bp, Artificial Sequence
  Description of Artificial Sequence: Synthetic oligonucleotide
  Target: LAMA2; (-) strand; PAM type: NRG; PAM sequence: CAG
cgaggtaggtctgatgaaaa

SEQ ID NO: 74327 - DNA, 20 bp, Artificial Sequence
  Description of Artificial Sequence: Synthetic oligonucleotide
  Target: LAMA2; (-) strand; PAM type: NRG; PAM sequence: AGG
gtctagaacctcaccgaggt

SEQ ID NO: 74328 - DNA, 20 bp, Artificial Sequence
  Description of Artificial Sequence: Synthetic oligonucleotide
  Target: LAMA2; (-) strand; PAM type: NRG; PAM sequence: TAG
agtctagaacctcaccgagg

SEQ ID NO: 74329 - DNA, 20 bp, Artificial Sequence
  Description of Artificial Sequence: Synthetic oligonucleotide
  Target: LAMA2; (-) strand; PAM type: NRG; PAM sequence: AGG
agaagtctagaacctcaccg

SEQ ID NO: 74330 - DNA, 20 bp, Artificial Sequence
  Description of Artificial Sequence: Synthetic oligonucleotide
  Target: LAMA2; (-) strand; PAM type: NRG; PAM sequence: GAG
cagaagtctagaacctcacc

SEQ ID NO: 74331 - DNA, 20 bp, Artificial Sequence
  Description of Artificial Sequence: Synthetic oligonucleotide
  Target: LAMA2; (-) strand; PAM type: NRG; PAM sequence: TAG
gctgcagcagggcagaagtc

SEQ ID NO: 74332 - DNA, 20 bp, Artificial Sequence
  Description of Artificial Sequence: Synthetic oligonucleotide
  Target: LAMA2; (-) strand; PAM type: NRG; PAM sequence: AAG
gagtagctgcagcagggcag

SEQ ID NO: 74333 - DNA, 20 bp, Artificial Sequence
  Description of Artificial Sequence: Synthetic oligonucleotide
  Target: LAMA2; (-) strand; PAM type: NRG; PAM sequence: CAG
actgagtagctgcagcaggg

SEQ ID NO: 74334 - DNA, 20 bp, Artificial Sequence
  Description of Artificial Sequence: Synthetic oligonucleotide
  Target: LAMA2; (-) strand; PAM type: NRG; PAM sequence: GGG
agtactgagtagctgcagca

SEQ ID NO: 74335 - DNA, 20 bp, Artificial Sequence
  Description of Artificial Sequence: Synthetic oligonucleotide
  Target: LAMA2; (-) strand; PAM type: NRG; PAM sequence: AGG
aagtactgagtagctgcagc

SEQ ID NO: 74336 - DNA, 20 bp, Artificial Sequence
  Description of Artificial Sequence: Synthetic oligonucleotide
  Target: LAMA2; (-) strand; PAM type: NRG; PAM sequence: CAG
aaagtactgagtagctgcag

SEQ ID NO: 74337 - DNA, 20 bp, Artificial Sequence
  Description of Artificial Sequence: Synthetic oligonucleotide
  Target: LAMA2; (-) strand; PAM type: NRG; PAM sequence: CAG
cctaaagtactgagtagctg

SEQ ID NO: 74338 - DNA, 20 bp, Artificial Sequence
  Description of Artificial Sequence: Synthetic oligonucleotide
  Target: LAMA2; (-) strand; PAM type: NRG; PAM sequence: TAG
tcatggcctaaagtactgag

SEQ ID NO: 74339 - DNA, 20 bp, Artificial Sequence
  Description of Artificial Sequence: Synthetic oligonucleotide
  Target: LAMA2; (-) strand; PAM type: NRG; PAM sequence: GAG
aggtcatggcctaaagtact

SEQ ID NO: 74340 - DNA, 20 bp, Artificial Sequence
  Description of Artificial Sequence: Synthetic oligonucleotide
  Target: LAMA2; (-) strand; PAM type: NRG; PAM sequence: AAG
agagcggaggtcatggccta

SEQ ID NO: 74341 - DNA, 20 bp, Artificial Sequence
  Description of Artificial Sequence: Synthetic oligonucleotide
  Target: LAMA2; (-) strand; PAM type: NRG; PAM sequence: TGG
aggaaggagagcggaggtca

SEQ ID NO: 74342 - DNA, 20 bp, Artificial Sequence
  Description of Artificial Sequence: Synthetic oligonucleotide
  Target: LAMA2; (-) strand; PAM type: NRG; PAM sequence: AGG
ttgctgaggaaggagagcgg

SEQ ID NO: 74343 - DNA, 20 bp, Artificial Sequence
  Description of Artificial Sequence: Synthetic oligonucleotide
  Target: LAMA2; (-) strand; PAM type: NRG; PAM sequence: GAG
gttgctgaggaaggagagcg

SEQ ID NO: 74344 - DNA, 20 bp, Artificial Sequence
  Description of Artificial Sequence: Synthetic oligonucleotide
  Target: LAMA2; (-) strand; PAM type: NRG; PAM sequence: CGG
gagttgctgaggaaggagag

SEQ ID NO: 74345 - DNA, 20 bp, Artificial Sequence
  Description of Artificial Sequence: Synthetic oligonucleotide
  Target: LAMA2; (-) strand; PAM type: NRG; PAM sequence: GAG
ggtgagttgctgaggaagga

SEQ ID NO: 74346 - DNA, 20 bp, Artificial Sequence
  Description of Artificial Sequence: Synthetic oligonucleotide
  Target: LAMA2; (-) strand; PAM type: NRG; PAM sequence: GAG
gtggtgagttgctgaggaag

SEQ ID NO: 74347 - DNA, 20 bp, Artificial Sequence
  Description of Artificial Sequence: Synthetic oligonucleotide
  Target: LAMA2; (-) strand; PAM type: NRG; PAM sequence: AGG
ctgtggtgagttgctgagga

SEQ ID NO: 74348 - DNA, 20 bp, Artificial Sequence
  Description of Artificial Sequence: Synthetic oligonucleotide
  Target: LAMA2; (-) strand; PAM type: NRG; PAM sequence: AAG
tctgtggtgagttgctgagg

SEQ ID NO: 74349 - DNA, 20 bp, Artificial Sequence
  Description of Artificial Sequence: Synthetic oligonucleotide
  Target: LAMA2; (-) strand; PAM type: NRG; PAM sequence: AGG
aggtctgtggtgagttgctg

SEQ ID NO: 74350 - DNA, 20 bp, Artificial Sequence
  Description of Artificial Sequence: Synthetic oligonucleotide
  Target: LAMA2; (-) strand; PAM type: NRG; PAM sequence: GAG
aaggtctgtggtgagttgct

SEQ ID NO: 74351 - DNA, 20 bp, Artificial Sequence
  Description of Artificial Sequence: Synthetic oligonucleotide
  Target: LAMA2; (-) strand; PAM type: NRG; PAM sequence: GAG
ttttctggaaggtctgtggt

SEQ ID NO: 74352 - DNA, 20 bp, Artificial Sequence
  Description of Artificial Sequence: Synthetic oligonucleotide
  Target: LAMA2; (-) strand; PAM type: NRG; PAM sequence: TGG
acatttttctggaaggtctg

SEQ ID NO: 74353 - DNA, 20 bp, Artificial Sequence
  Description of Artificial Sequence: Synthetic oligonucleotide
  Target: LAMA2; (-) strand; PAM type: NRG; PAM sequence: AGG
gggtttaacatttttctgga

SEQ ID NO: 74354 - DNA, 20 bp, Artificial Sequence
  Description of Artificial Sequence: Synthetic oligonucleotide
  Target: LAMA2; (-) strand; PAM type: NRG; PAM sequence: AAG
agggtttaacatttttctgg

SEQ ID NO: 74355 - DNA, 20 bp, Artificial Sequence
  Description of Artificial Sequence: Synthetic oligonucleotide
  Target: LAMA2; (-) strand; PAM type: NRG; PAM sequence: TGG
agaagggtttaacatttttc

SEQ ID NO: 74356 - DNA, 20 bp, Artificial Sequence
  Description of Artificial Sequence: Synthetic oligonucleotide
  Target: LAMA2; (-) strand; PAM type: NRG; PAM sequence: GGG
taacaagaaaaggatgagaa

SEQ ID NO: 74357 - DNA, 20 bp, Artificial Sequence
  Description of Artificial Sequence: Synthetic oligonucleotide
  Target: LAMA2; (-) strand; PAM type: NRG; PAM sequence: AGG
ataacaagaaaaggatgaga

SEQ ID NO: 74358 - DNA, 20 bp, Artificial Sequence
  Description of Artificial Sequence: Synthetic oligonucleotide
  Target: LAMA2; (-) strand; PAM type: NRG; PAM sequence: AAG
aataacaagaaaaggatgag

SEQ ID NO: 74359 - DNA, 20 bp, Artificial Sequence
  Description of Artificial Sequence: Synthetic oligonucleotide
  Target: LAMA2; (-) strand; PAM type: NRG; PAM sequence: GAG
accaataacaagaaaaggat

SEQ ID NO: 74360 - DNA, 20 bp, Artificial Sequence
  Description of Artificial Sequence: Synthetic oligonucleotide
  Target: LAMA2; (-) strand; PAM type: NRG; PAM sequence: AGG
tagaaaccaataacaagaaa

SEQ ID NO: 74361 - DNA, 20 bp, Artificial Sequence
  Description of Artificial Sequence: Synthetic oligonucleotide
  Target: LAMA2; (-) strand; PAM type: NRG; PAM sequence: AAG
atagaaaccaataacaagaa

SEQ ID NO: 74362 - DNA, 20 bp, Artificial Sequence
  Description of Artificial Sequence: Synthetic oligonucleotide
  Target: LAMA2; (-) strand; PAM type: NRG; PAM sequence: AAG
agaaaatagaaaccaataac

SEQ ID NO: 74363 - DNA, 20 bp, Artificial Sequence
  Description of Artificial Sequence: Synthetic oligonucleotide
  Target: LAMA2; (-) strand; PAM type: NRG; PAM sequence: TAG
gaaaaaagaaagaaagaaaa

SEQ ID NO: 74364 - DNA, 20 bp, Artificial Sequence
  Description of Artificial Sequence: Synthetic oligonucleotide
  Target: LAMA2; (-) strand; PAM type: NRG; PAM sequence: AAG
cgctaaagaaaaaagaaaga

SEQ ID NO: 74365 - DNA, 20 bp, Artificial Sequence
  Description of Artificial Sequence: Synthetic oligonucleotide
  Target: LAMA2; (-) strand; PAM type: NRG; PAM sequence: AAG
gtgacgctaaagaaaaaaga

SEQ ID NO: 74366 - DNA, 20 bp, Artificial Sequence
  Description of Artificial Sequence: Synthetic oligonucleotide
  Target: LAMA2; (-) strand; PAM type: NRG; PAM sequence: AAG
ccctgtgacgctaaagaaaa

SEQ ID NO: 74367 - DNA, 20 bp, Artificial Sequence
  Description of Artificial Sequence: Synthetic oligonucleotide
  Target: LAMA2; (-) strand; PAM type: NRG; PAM sequence: AAG
gctcttcccctgtgacgcta

SEQ ID NO: 74368 - DNA, 20 bp, Artificial Sequence
  Description of Artificial Sequence: Synthetic oligonucleotide
  Target: LAMA2; (-) strand; PAM type: NRG; PAM sequence: CAG
catatagccaatacaattat

SEQ ID NO: 74369 - DNA, 20 bp, Artificial Sequence
  Description of Artificial Sequence: Synthetic oligonucleotide
  Target: LAMA2; (-) strand; PAM type: NRG; PAM sequence: TAG
tctgtttgagttgatacata

SEQ ID NO: 74370 - DNA, 20 bp, Artificial Sequence
  Description of Artificial Sequence: Synthetic oligonucleotide
  Target: LAMA2; (-) strand; PAM type: NRG; PAM sequence: GAG
caggtaatgtctctctgttt

SEQ ID NO: 74371 - DNA, 20 bp, Artificial Sequence
  Description of Artificial Sequence: Synthetic oligonucleotide
  Target: LAMA2; (-) strand; PAM type: NRG; PAM sequence: AGG
gggaatctttatagaactgc

SEQ ID NO: 74372 - DNA, 20 bp, Artificial Sequence
  Description of Artificial Sequence: Synthetic oligonucleotide
  Target: LAMA2; (-) strand; PAM type: NRG; PAM sequence: CAG
tgggaatctttatagaactg

SEQ ID NO: 74373 - DNA, 20 bp, Artificial Sequence
  Description of Artificial Sequence: Synthetic oligonucleotide
  Target: LAMA2; (-) strand; PAM type: NRG; PAM sequence: TAG
gaataatctgggaatcttta

SEQ ID NO: 74374 - DNA, 20 bp, Artificial Sequence
  Description of Artificial Sequence: Synthetic oligonucleotide
  Target: LAMA2; (-) strand; PAM type: NRG; PAM sequence: GGG
aatacccattggaataatct

SEQ ID NO: 74375 - DNA, 20 bp, Artificial Sequence
  Description of Artificial Sequence: Synthetic oligonucleotide
  Target: LAMA2; (-) strand; PAM type: NRG; PAM sequence: TGG
taatacccattggaataatc

SEQ ID NO: 74376 - DNA, 20 bp, Artificial Sequence
  Description of Artificial Sequence: Synthetic oligonucleotide
  Target: LAMA2; (-) strand; PAM type: NRG; PAM sequence: TGG
ttttcaagcttaatacccat

SEQ ID NO: 74377 - DNA, 20 bp, Artificial Sequence
  Description of Artificial Sequence: Synthetic oligonucleotide
  Target: LAMA2; (-) strand; PAM type: NRG; PAM sequence: AAG
atcatagacatcatgttttc

SEQ ID NO: 74378 - DNA, 20 bp, Artificial Sequence
  Description of Artificial Sequence: Synthetic oligonucleotide
  Target: LAMA2; (-) strand; PAM type: NRG; PAM sequence: TAG
atcagaaccagaaaggatca

SEQ ID NO: 74379 - DNA, 20 bp, Artificial Sequence
  Description of Artificial Sequence: Synthetic oligonucleotide
  Target: LAMA2; (-) strand; PAM type: NRG; PAM sequence: AGG
atacaatatcagaaccagaa

SEQ ID NO: 74380 - DNA, 20 bp, Artificial Sequence
  Description of Artificial Sequence: Synthetic oligonucleotide
  Target: LAMA2; (-) strand; PAM type: NRG; PAM sequence: AAG
tatacaatatcagaaccaga

SEQ ID NO: 74381 - DNA, 20 bp, Artificial Sequence
  Description of Artificial Sequence: Synthetic oligonucleotide
  Target: LAMA2; (-) strand; PAM type: NRG; PAM sequence: CAG
gagttatacaatatcagaac

SEQ ID NO: 74382 - DNA, 20 bp, Artificial Sequence
  Description of Artificial Sequence: Synthetic oligonucleotide
  Target: LAMA2; (-) strand; PAM type: NRG; PAM sequence: CAG
tgatgagagttatacaatat

SEQ ID NO: 74383 - DNA, 20 bp, Artificial Sequence
  Description of Artificial Sequence: Synthetic oligonucleotide
  Target: LAMA2; (-) strand; PAM type: NRG; PAM sequence: GAG
tggctttcattaagtgatga

SEQ ID NO: 74384 - DNA, 20 bp, Artificial Sequence
  Description of Artificial Sequence: Synthetic oligonucleotide
  Target: LAMA2; (-) strand; PAM type: NRG; PAM sequence: GAG
ggtggctttcattaagtgat

SEQ ID NO: 74385 - DNA, 20 bp, Artificial Sequence
  Description of Artificial Sequence: Synthetic oligonucleotide
  Target: LAMA2; (-) strand; PAM type: NRG; PAM sequence: AAG
taggaacggtggctttcatt

SEQ ID NO: 74386 - DNA, 20 bp, Artificial Sequence
  Description of Artificial Sequence: Synthetic oligonucleotide
  Target: LAMA2; (-) strand; PAM type: NRG; PAM sequence: TGG
atttatccaaataggaacgg

SEQ ID NO: 74387 - DNA, 20 bp, Artificial Sequence
  Description of Artificial Sequence: Synthetic oligonucleotide
  Target: LAMA2; (-) strand; PAM type: NRG; PAM sequence: CGG
cttatttatccaaataggaa

SEQ ID NO: 74388 - DNA, 20 bp, Artificial Sequence
  Description of Artificial Sequence: Synthetic oligonucleotide
  Target: LAMA2; (-) strand; PAM type: NRG; PAM sequence: AGG
attctcttatttatccaaat

SEQ ID NO: 74389 - DNA, 20 bp, Artificial Sequence
  Description of Artificial Sequence: Synthetic oligonucleotide
  Target: LAMA2; (-) strand; PAM type: NRG; PAM sequence: TAG
aattctcttatttatccaaa

SEQ ID NO: 74390 - DNA, 20 bp, Artificial Sequence
  Description of Artificial Sequence: Synthetic oligonucleotide
  Target: LAMA2; (-) strand; PAM type: NRG; PAM sequence: TAG
atctgtactctcagttctaa

SEQ ID NO: 74391 - DNA, 20 bp, Artificial Sequence
  Description of Artificial Sequence: Synthetic oligonucleotide
  Target: LAMA2; (-) strand; PAM type: NRG; PAM sequence: CAG
ggaaagctcatctgtactct

SEQ ID NO: 74392 - DNA, 20 bp, Artificial Sequence
  Description of Artificial Sequence: Synthetic oligonucleotide
  Target: LAMA2; (-) strand; PAM type: NRG; PAM sequence: AAG
ccatctctaatatatttgga

SEQ ID NO: 74393 - DNA, 20 bp, Artificial Sequence
  Description of Artificial Sequence: Synthetic oligonucleotide
  Target: LAMA2; (-) strand; PAM type: NRG; PAM sequence: TGG
gatgccatctctaatatatt

SEQ ID NO: 74394 - DNA, 20 bp, Artificial Sequence
  Description of Artificial Sequence: Synthetic oligonucleotide
  Target: LAMA2; (-) strand; PAM type: NRG; PAM sequence: TGG
atgtgctcttgcccatgtta

SEQ ID NO: 74395 - DNA, 20 bp, Artificial Sequence
  Description of Artificial Sequence: Synthetic oligonucleotide
  Target: LAMA2; (-) strand; PAM type: NRG; PAM sequence: TAG
aaagaggttctgcacttttc

SEQ ID NO: 74396 - DNA, 20 bp, Artificial Sequence
  Description of Artificial Sequence: Synthetic oligonucleotide
  Target: LAMA2; (-) strand; PAM type: NRG; PAM sequence: AGG
aaaatgcttcacttctaaag

SEQ ID NO: 74397 - DNA, 20 bp, Artificial Sequence
  Description of Artificial Sequence: Synthetic oligonucleotide
  Target: LAMA2; (-) strand; PAM type: NRG; PAM sequence: GAG
gaaaatgcttcacttctaaa

SEQ ID NO: 74398 - DNA, 20 bp, Artificial Sequence
  Description of Artificial Sequence: Synthetic oligonucleotide
  Target: LAMA2; (-) strand; PAM type: NRG; PAM sequence: AAG
acgaaaatgcttcacttcta

SEQ ID NO: 74399 - DNA, 20 bp, Artificial Sequence
  Description of Artificial Sequence: Synthetic oligonucleotide
  Target: LAMA2; (-) strand; PAM type: NRG; PAM sequence: TGG
ctatagcaaattgatgtgca

SEQ ID NO: 74400 - DNA, 20 bp, Artificial Sequence
  Description of Artificial Sequence: Synthetic oligonucleotide
  Target: LAMA2; (-) strand; PAM type: NRG; PAM sequence: TAG
tatttgtccctgaactccta

SEQ ID NO: 74401 - DNA, 20 bp, Artificial Sequence
  Description of Artificial Sequence: Synthetic oligonucleotide
  Target: LAMA2; (-) strand; PAM type: NRG; PAM sequence: GAG
tctaatttctgctcaatgtt

SEQ ID NO: 74402 - DNA, 20 bp, Artificial Sequence
  Description of Artificial Sequence: Synthetic oligonucleotide
  Target: LAMA2; (-) strand; PAM type: NRG; PAM sequence: CAG
ttcttaatctctcaagagaa

SEQ ID NO: 74403 - DNA, 20 bp, Artificial Sequence
  Description of Artificial Sequence: Synthetic oligonucleotide
  Target: LAMA2; (-) strand; PAM type: NRG; PAM sequence: GAG
attctttcttaatctctcaa

SEQ ID NO: 74404 - DNA, 20 bp, Artificial Sequence
  Description of Artificial Sequence: Synthetic oligonucleotide
  Target: LAMA2; (-) strand; PAM type: NRG; PAM sequence: AAG
ttattctttcttaatctctc

SEQ ID NO: 74405 - DNA, 20 bp, Artificial Sequence
  Description of Artificial Sequence: Synthetic oligonucleotide
  Target: LAMA2; (-) strand; PAM type: NRG; PAM sequence: AGG
caatgctttatccttctcat

SEQ ID NO: 74406 - DNA, 20 bp, Artificial Sequence
  Description of Artificial Sequence: Synthetic oligonucleotide
  Target: LAMA2; (-) strand; PAM type: NRG; PAM sequence: TAG
acaatgctttatccttctca

SEQ ID NO: 74407 - DNA, 20 bp, Artificial Sequence
  Description of Artificial Sequence: Synthetic oligonucleotide
  Target: LAMA2; (-) strand; PAM type: NRG; PAM sequence: AAG
atgaaggtcactctctatgg

SEQ ID NO: 74408 - DNA, 20 bp, Artificial Sequence
  Description of Artificial Sequence: Synthetic oligonucleotide
  Target: LAMA2; (-) strand; PAM type: NRG; PAM sequence: TGG
ttaatgaaggtcactctcta

SEQ ID NO: 74409 - DNA, 20 bp, Artificial Sequence
  Description of Artificial Sequence: Synthetic oligonucleotide
  Target: LAMA2; (-) strand; PAM type: NRG; PAM sequence: AGG
gccgtaaaaaatattaatga

SEQ ID NO: 74410 - DNA, 20 bp, Artificial Sequence
  Description of Artificial Sequence: Synthetic oligonucleotide
  Target: LAMA2; (-) strand; PAM type: NRG; PAM sequence: AAG
agccgtaaaaaatattaatg

SEQ ID NO: 74411 - DNA, 20 bp, Artificial Sequence
  Description of Artificial Sequence: Synthetic oligonucleotide
  Target: LAMA2; (-) strand; PAM type: NRG; PAM sequence: AAG
ccttaggctgatctccacaa

SEQ ID NO: 74412 - DNA, 20 bp, Artificial Sequence
  Description of Artificial Sequence: Synthetic oligonucleotide
  Target: LAMA2; (-) strand; PAM type: NRG; PAM sequence: AGG
cataggacttctgtttcctt

SEQ ID NO: 74413 - DNA, 20 bp, Artificial Sequence
  Description of Artificial Sequence: Synthetic oligonucleotide
  Target: LAMA2; (-) strand; PAM type: NRG; PAM sequence: TAG
ccataggacttctgtttcct

SEQ ID NO: 74414 - DNA, 20 bp, Artificial Sequence
  Description of Artificial Sequence: Synthetic oligonucleotide
  Target: LAMA2; (-) strand; PAM type: NRG; PAM sequence: AGG
taatgatgtaataaggccat

SEQ ID NO: 74415 - DNA, 20 bp, Artificial Sequence
  Description of Artificial Sequence: Synthetic oligonucleotide
  Target: LAMA2; (-) strand; PAM type: NRG; PAM sequence: TAG
gtaatgatgtaataaggcca

SEQ ID NO: 74416 - DNA, 20 bp, Artificial Sequence
  Description of Artificial Sequence: Synthetic oligonucleotide
  Target: LAMA2; (-) strand; PAM type: NRG; PAM sequence: AGG
gattctgtaatgatgtaata

SEQ ID NO: 74417 - DNA, 20 bp, Artificial Sequence
  Description of Artificial Sequence: Synthetic oligonucleotide
  Target: LAMA2; (-) strand; PAM type: NRG; PAM sequence: AAG
tgattctgtaatgatgtaat

SEQ ID NO: 74418 - DNA, 20 bp, Artificial Sequence
  Description of Artificial Sequence: Synthetic oligonucleotide
  Target: LAMA2; (-) strand; PAM type: NRG; PAM sequence: AAG
acagttaagagacccagcca

SEQ ID NO: 74419 - DNA, 20 bp, Artificial Sequence
  Description of Artificial Sequence: Synthetic oligonucleotide
  Target: LAMA2; (-) strand; PAM type: NRG; PAM sequence: CAG
tgttacacagttaagagacc

SEQ ID NO: 74420 - DNA, 20 bp, Artificial Sequence
  Description of Artificial Sequence: Synthetic oligonucleotide
  Target: LAMA2; (-) strand; PAM type: NRG; PAM sequence: GAG
caccactgttacacagttaa

SEQ ID NO: 74421 - DNA, 20 bp, Artificial Sequence
  Description of Artificial Sequence: Synthetic oligonucleotide
  Target: LAMA2; (-) strand; PAM type: NRG; PAM sequence: AAG
agcaccactgttacacagtt

SEQ ID NO: 74422 - DNA, 20 bp, Artificial Sequence
  Description of Artificial Sequence: Synthetic oligonucleotide
  Target: LAMA2; (-) strand; PAM type: NRG; PAM sequence: CAG
ttttgagcaccactgttaca

SEQ ID NO: 74423 - DNA, 20 bp, Artificial Sequence
  Description of Artificial Sequence: Synthetic oligonucleotide
  Target: LAMA2; (-) strand; PAM type: NRG; PAM sequence: GAG
ggagatttacagagactttt

SEQ ID NO: 74424 - DNA, 20 bp, Artificial Sequence
  Description of Artificial Sequence: Synthetic oligonucleotide
  Target: LAMA2; (-) strand; PAM type: NRG; PAM sequence: GAG
ttgtgttttggagatttaca

SEQ ID NO: 74425 - DNA, 20 bp, Artificial Sequence
  Description of Artificial Sequence: Synthetic oligonucleotide
  Target: LAMA2; (-) strand; PAM type: NRG; PAM sequence: CAG
tattgtgttttggagattta

SEQ ID NO: 74426 - DNA, 20 bp, Artificial Sequence
  Description of Artificial Sequence: Synthetic oligonucleotide
  Target: LAMA2; (-) strand; PAM type: NRG; PAM sequence: GAG
ctaaagagtattgtgttttg

SEQ ID NO: 74427 - DNA, 20 bp, Artificial Sequence
  Description of Artificial Sequence: Synthetic oligonucleotide
  Target: LAMA2; (-) strand; PAM type: NRG; PAM sequence: TGG
tactaaagagtattgtgttt

SEQ ID NO: 74428 - DNA, 20 bp, Artificial Sequence
  Description of Artificial Sequence: Synthetic oligonucleotide
  Target: LAMA2; (-) strand; PAM type: NRG; PAM sequence: GAG
atctaagaaatgctactaaa

SEQ ID NO: 74429 - DNA, 20 bp, Artificial Sequence
  Description of Artificial Sequence: Synthetic oligonucleotide
  Target: LAMA2; (-) strand; PAM type: NRG; PAM sequence: AAG
aaatctaagaaatgctacta

SEQ ID NO: 74430 - DNA, 20 bp, Artificial Sequence
  Description of Artificial Sequence: Synthetic oligonucleotide
  Target: LAMA2; (-) strand; PAM type: NRG; PAM sequence: AAG
cccagaagaatcacaaatct

SEQ ID NO: 74431 - DNA, 20 bp, Artificial Sequence
  Description of Artificial Sequence: Synthetic oligonucleotide
  Target: LAMA2; (-) strand; PAM type: NRG; PAM sequence: AAG
cccagatcctttgtccccag

SEQ ID NO: 74432 - DNA, 20 bp, Artificial Sequence
  Description of Artificial Sequence: Synthetic oligonucleotide
  Target: LAMA2; (-) strand; PAM type: NRG; PAM sequence: CAG
tatcccagatcctttgtccc

SEQ ID NO: 74433 - DNA, 20 bp, Artificial Sequence
  Description of Artificial Sequence: Synthetic oligonucleotide
  Target: LAMA2; (-) strand; PAM type: NRG; PAM sequence: CAG
ctcgggaacccattgtatcc

SEQ ID NO: 74434 - DNA, 20 bp, Artificial Sequence
  Description of Artificial Sequence: Synthetic oligonucleotide
  Target: LAMA2; (-) strand; PAM type: NRG; PAM sequence: GGG
gagatcacaccactgcactc

SEQ ID NO: 74435 - DNA, 20 bp, Artificial Sequence
  Description of Artificial Sequence: Synthetic oligonucleotide
  Target: LAMA2; (-) strand; PAM type: NRG; PAM sequence: CGG
cgagatcacaccactgcact

SEQ ID NO: 74436 - DNA, 20 bp, Artificial Sequence
  Description of Artificial Sequence: Synthetic oligonucleotide
  Target: LAMA2; (-) strand; PAM type: NRG; PAM sequence: GAG
ggcggaggttgcagtgagcc

SEQ ID NO: 74437 - DNA, 20 bp, Artificial Sequence
  Description of Artificial Sequence: Synthetic oligonucleotide
  Target: LAMA2; (-) strand; PAM type: NRG; PAM sequence: GAG
cggaaggcggaggttgcagt

SEQ ID NO: 74438 - DNA, 20 bp, Artificial Sequence
  Description of Artificial Sequence: Synthetic oligonucleotide
  Target: LAMA2; (-) strand; PAM type: NRG; PAM sequence: CAG
aaatcggaaggcggaggttg

SEQ ID NO: 74439 - DNA, 20 bp, Artificial Sequence
  Description of Artificial Sequence: Synthetic oligonucleotide
  Target: LAMA2; (-) strand; PAM type: NRG; PAM sequence: AGG
gcttgaaaatcggaaggcgg

SEQ ID NO: 74440 - DNA, 20 bp, Artificial Sequence
  Description of Artificial Sequence: Synthetic oligonucleotide
  Target: LAMA2; (-) strand; PAM type: NRG; PAM sequence: GAG
cgcttgaaaatcggaaggcg

SEQ ID NO: 74441 - DNA, 20 bp, Artificial Sequence
  Description of Artificial Sequence: Synthetic oligonucleotide
  Target: LAMA2; (-) strand; PAM type: NRG; PAM sequence: CGG
atcgcttgaaaatcggaagg

SEQ ID NO: 74442 - DNA, 20 bp, Artificial Sequence
  Description of Artificial Sequence: Synthetic oligonucleotide
  Target: LAMA2; (-) strand; PAM type: NRG; PAM sequence: AGG
agaatcgcttgaaaatcgga

SEQ ID NO: 74443 - DNA, 20 bp, Artificial Sequence
  Description of Artificial Sequence: Synthetic oligonucleotide
  Target: LAMA2; (-) strand; PAM type: NRG; PAM sequence: AAG
gagaatcgcttgaaaatcgg

SEQ ID NO: 74444 - DNA, 20 bp, Artificial Sequence
  Description of Artificial Sequence: Synthetic oligonucleotide
  Target: LAMA2; (-) strand; PAM type: NRG; PAM sequence: CGG
caggagaatcgcttgaaaat

SEQ ID NO: 74445 - DNA, 20 bp, Artificial Sequence
  Description of Artificial Sequence: Synthetic oligonucleotide
  Target: LAMA2; (-) strand; PAM type: NRG; PAM sequence: GAG
tactccggaagctgaggcag

SEQ ID NO: 74446 - DNA, 20 bp, Artificial Sequence
  Description of Artificial Sequence: Synthetic oligonucleotide
  Target: LAMA2; (-) strand; PAM type: NRG; PAM sequence: AGG
gctactccggaagctgaggc

SEQ ID NO: 74447 - DNA, 20 bp, Artificial Sequence
  Description of Artificial Sequence: Synthetic oligonucleotide
  Target: LAMA2; (-) strand; PAM type: NRG; PAM sequence: CAG
agctactccggaagctgagg

SEQ ID NO: 74448 - DNA, 20 bp, Artificial Sequence
  Description of Artificial Sequence: Synthetic oligonucleotide
  Target: LAMA2; (-) strand; PAM type: NRG; PAM sequence: AGG
cccagctactccggaagctg

SEQ ID NO: 74449 - DNA, 20 bp, Artificial Sequence
  Description of Artificial Sequence: Synthetic oligonucleotide
  Target: LAMA2; (-) strand; PAM type: NRG; PAM sequence: GAG
tcccagctactccggaagct

SEQ ID NO: 74450 - DNA, 20 bp, Artificial Sequence
  Description of Artificial Sequence: Synthetic oligonucleotide
  Target: LAMA2; (-) strand; PAM type: NRG; PAM sequence: AAG
tgtaatcccagctactccgg

SEQ ID NO: 74451 - DNA, 20 bp, Artificial Sequence
  Description of Artificial Sequence: Synthetic oligonucleotide
  Target: LAMA2; (-) strand; PAM type: NRG; PAM sequence: CGG
gcctgtaatcccagctactc

SEQ ID NO: 74452 - DNA, 20 bp, Artificial Sequence
  Description of Artificial Sequence: Synthetic oligonucleotide
  Target: LAMA2; (-) strand; PAM type: NRG; PAM sequence: CAG
gtggtgggcgcctgtaatcc

SEQ ID NO: 74453 - DNA, 20 bp, Artificial Sequence
  Description of Artificial Sequence: Synthetic oligonucleotide
  Target: LAMA2; (-) strand; PAM type: NRG; PAM sequence: GGG
aattagtcgggggtggtggt

SEQ ID NO: 74454 - DNA, 20 bp, Artificial Sequence
  Description of Artificial Sequence: Synthetic oligonucleotide
  Target: LAMA2; (-) strand; PAM type: NRG; PAM sequence: TGG
aaattagtcgggggtggtgg

SEQ ID NO: 74455 - DNA, 20 bp, Artificial Sequence
  Description of Artificial Sequence: Synthetic oligonucleotide
  Target: LAMA2; (-) strand; PAM type: NRG; PAM sequence: TGG
aaaaaattagtcgggggtgg

SEQ ID NO: 74456 - DNA, 20 bp, Artificial Sequence
  Description of Artificial Sequence: Synthetic oligonucleotide
  Target: LAMA2; (-) strand; PAM type: NRG; PAM sequence: TGG
aaaaaaaaattagtcggggg

SEQ ID NO: 74457 - DNA, 20 bp, Artificial Sequence
  Description of Artificial Sequence: Synthetic oligonucleotide
  Target: LAMA2; (-) strand; PAM type: NRG; PAM sequence: GGG
aaaaaaaaaaaattagtcgg

SEQ ID NO: 74458 - DNA, 20 bp, Artificial Sequence
  Description of Artificial Sequence: Synthetic oligonucleotide
  Target: LAMA2; (-) strand; PAM type: NRG; PAM sequence: GGG
caaaaaaaaaaaattagtcg

SEQ ID NO: 74459 - DNA, 20 bp, Artificial Sequence
  Description of Artificial Sequence: Synthetic oligonucleotide
  Target: LAMA2; (-) strand; PAM type: NRG; PAM sequence: GGG
acaaaaaaaaaaaattagtc

SEQ ID NO: 74460 - DNA, 20 bp, Artificial Sequence
  Description of Artificial Sequence: Synthetic oligonucleotide
  Target: LAMA2; (-) strand; PAM type: NRG; PAM sequence: CGG
tacaaaaaaaaaaaattagt

SEQ ID NO: 74461 - DNA, 20 bp, Artificial Sequence
  Description of Artificial Sequence: Synthetic oligonucleotide
  Target: LAMA2; (-) strand; PAM type: NRG; PAM sequence: TAG
aaaatacaaaaaaaaaaaat

SEQ ID NO: 74462 - DNA, 20 bp, Artificial Sequence
  Description of Artificial Sequence: Synthetic oligonucleotide
  Target: LAMA2; (-) strand; PAM type: NRG; PAM sequence: TGG
cgagaccagcctggccaata

SEQ ID NO: 74463 - DNA, 20 bp, Artificial Sequence
  Description of Artificial Sequence: Synthetic oligonucleotide
  Target: LAMA2; (-) strand; PAM type: NRG; PAM sequence: TGG
tcaggagttcgagaccagcc

SEQ ID NO: 74464 - DNA, 20 bp, Artificial Sequence
  Description of Artificial Sequence: Synthetic oligonucleotide
  Target: LAMA2; (-) strand; PAM type: NRG; PAM sequence: CAG
cgatgtcaggagttcgagac

SEQ ID NO: 74465 - DNA, 20 bp, Artificial Sequence
  Description of Artificial Sequence: Synthetic oligonucleotide
  Target: LAMA2; (-) strand; PAM type: NRG; PAM sequence: GAG
gatcacgatgtcaggagttc

SEQ ID NO: 74466 - DNA, 20 bp, Artificial Sequence
  Description of Artificial Sequence: Synthetic oligonucleotide
  Target: LAMA2; (-) strand; PAM type: NRG; PAM sequence: GAG
caggcggatcacgatgtcag

SEQ ID NO: 74467 - DNA, 20 bp, Artificial Sequence
  Description of Artificial Sequence: Synthetic oligonucleotide
  Target: LAMA2; (-) strand; PAM type: NRG; PAM sequence: AGG
ggcaggcggatcacgatgtc

SEQ ID NO: 74468 - DNA, 20 bp, Artificial Sequence
  Description of Artificial Sequence: Synthetic oligonucleotide
  Target: LAMA2; (-) strand; PAM type: NRG; PAM sequence: CAG
gggcaggcggatcacgatgt

SEQ ID NO: 74469 - DNA, 20 bp, Artificial Sequence
  Description of Artificial Sequence: Synthetic oligonucleotide
  Target: LAMA2; (-) strand; PAM type: NRG; PAM sequence: CGG
ctttgggaggctggggcagg

SEQ ID NO: 74470 - DNA, 20 bp, Artificial Sequence
  Description of Artificial Sequence: Synthetic oligonucleotide
  Target: LAMA2; (-) strand; PAM type: NRG; PAM sequence: AGG
gcactttgggaggctggggc

SEQ ID NO: 74471 - DNA, 20 bp, Artificial Sequence
  Description of Artificial Sequence: Synthetic oligonucleotide
  Target: LAMA2; (-) strand; PAM type: NRG; PAM sequence: CAG
agcactttgggaggctgggg

SEQ ID NO: 74472 - DNA, 20 bp, Artificial Sequence
  Description of Artificial Sequence: Synthetic oligonucleotide
  Target: LAMA2; (-) strand; PAM type: NRG; PAM sequence: GGG
cccagcactttgggaggctg

SEQ ID NO: 74473 - DNA, 20 bp, Artificial Sequence
  Description of Artificial Sequence: Synthetic oligonucleotide
  Target: LAMA2; (-) strand; PAM type: NRG; PAM sequence: GGG
tcccagcactttgggaggct

SEQ ID NO: 74474 - DNA, 20 bp, Artificial Sequence
  Description of Artificial Sequence: Synthetic oligonucleotide
  Target: LAMA2; (-) strand; PAM type: NRG; PAM sequence: TGG
atcccagcactttgggaggc

SEQ ID NO: 74475 - DNA, 20 bp, Artificial Sequence
  Description of Artificial Sequence: Synthetic oligonucleotide
  Target: LAMA2; (-) strand; PAM type: NRG; PAM sequence: AGG
tgtaatcccagcactttggg

SEQ ID NO: 74476 - DNA, 20 bp, Artificial Sequence
  Description of Artificial Sequence: Synthetic oligonucleotide
  Target: LAMA2; (-) strand; PAM type: NRG; PAM sequence: GAG
ctgtaatcccagcactttgg

SEQ ID NO: 74477 - DNA, 20 bp, Artificial Sequence
  Description of Artificial Sequence: Synthetic oligonucleotide
  Target: LAMA2; (-) strand; PAM type: NRG; PAM sequence: GGG
gcctgtaatcccagcacttt

SEQ ID NO: 74478 - DNA, 20 bp, Artificial Sequence
  Description of Artificial Sequence: Synthetic oligonucleotide
  Target: LAMA2; (-) strand; PAM type: NRG; PAM sequence: TGG
cgcctgtaatcccagcactt

SEQ ID NO: 74479 - DNA, 20 bp, Artificial Sequence
  Description of Artificial Sequence: Synthetic oligonucleotide
  Target: LAMA2; (-) strand; PAM type: NRG; PAM sequence: CAG
gtggctcacgcctgtaatcc

SEQ ID NO: 74480 - DNA, 20 bp, Artificial Sequence
  Description of Artificial Sequence: Synthetic oligonucleotide
  Target: LAMA2; (-) strand; PAM type: NRG; PAM sequence: TGG
aaatcctcggccgggcacgg

SEQ ID NO: 74481 - DNA, 20 bp, Artificial Sequence
  Description of Artificial Sequence: Synthetic oligonucleotide
  Target: LAMA2; (-) strand; PAM type: NRG; PAM sequence: CGG
aaaaaatcctcggccgggca

SEQ ID NO: 74482 - DNA, 20 bp, Artificial Sequence
  Description of Artificial Sequence: Synthetic oligonucleotide
  Target: LAMA2; (-) strand; PAM type: NRG; PAM sequence: GGG
aaaaaaaaaaatcctcggcc

SEQ ID NO: 74483 - DNA, 20 bp, Artificial Sequence
  Description of Artificial Sequence: Synthetic oligonucleotide
  Target: LAMA2; (-) strand; PAM type: NRG; PAM sequence: CGG
aaaaaaaaaaaatcctcggc

SEQ ID NO: 74484 - DNA, 20 bp, Artificial Sequence
  Description of Artificial Sequence: Synthetic oligonucleotide
  Target: LAMA2; (-) strand; PAM type: NRG; PAM sequence: CGG
taaaaaaaaaaaaaaatcct

SEQ ID NO: 74485 - DNA, 20 bp, Artificial Sequence
  Description of Artificial Sequence: Synthetic oligonucleotide
  Target: LAMA2; (-) strand; PAM type: NRG; PAM sequence: AAG
tttctagaacatgcattgct

SEQ ID NO: 74486 - DNA, 20 bp, Artificial Sequence
  Description of Artificial Sequence: Synthetic oligonucleotide
  Target: LAMA2; (-) strand; PAM type: NRG; PAM sequence: TAG
tgaaaaccagaatcagtttc

SEQ ID NO: 74487 - DNA, 20 bp, Artificial Sequence
  Description of Artificial Sequence: Synthetic oligonucleotide
  Target: LAMA2; (-) strand; PAM type: NRG; PAM sequence: CAG
ttaagtctgaaaaccagaat

SEQ ID NO: 74488 - DNA, 20 bp, Artificial Sequence
  Description of Artificial Sequence: Synthetic oligonucleotide
  Target: LAMA2; (-) strand; PAM type: NRG; PAM sequence: CAG
tgttagttaagtctgaaaac

SEQ ID NO: 74489 - DNA, 20 bp, Artificial Sequence
  Description of Artificial Sequence: Synthetic oligonucleotide
  Target: LAMA2; (-) strand; PAM type: NRG; PAM sequence: AAG
cacctatacccatgttagtt

SEQ ID NO: 74490 - DNA, 20 bp, Artificial Sequence
  Description of Artificial Sequence: Synthetic oligonucleotide
  Target: LAMA2; (-) strand; PAM type: NRG; PAM sequence: TAG
tagctcacctatacccatgt

SEQ ID NO: 74491 - DNA, 20 bp, Artificial Sequence
  Description of Artificial Sequence: Synthetic oligonucleotide
  Target: LAMA2; (-) strand; PAM type: NRG; PAM sequence: TAG
ttccctgcagcttaatatct

SEQ ID NO: 74492 - DNA, 20 bp, Artificial Sequence
  Description of Artificial Sequence: Synthetic oligonucleotide
  Target: LAMA2; (-) strand; PAM type: NRG; PAM sequence: CAG
ctactctagacccttccctg

SEQ ID NO: 74493 - DNA, 20 bp, Artificial Sequence
  Description of Artificial Sequence: Synthetic oligonucleotide
  Target: LAMA2; (-) strand; PAM type: NRG; PAM sequence: TAG
cccaggaactctagctactc

SEQ ID NO: 74494 - DNA, 20 bp, Artificial Sequence
  Description of Artificial Sequence: Synthetic oligonucleotide
  Target: LAMA2; (-) strand; PAM type: NRG; PAM sequence: TAG
agtgagcagcccaggaactc

SEQ ID NO: 74495 - DNA, 20 bp, Artificial Sequence
  Description of Artificial Sequence: Synthetic oligonucleotide
  Target: LAMA2; (-) strand; PAM type: NRG; PAM sequence: AGG
tagcttgaagtgagcagccc

SEQ ID NO: 74496 - DNA, 20 bp, Artificial Sequence
  Description of Artificial Sequence: Synthetic oligonucleotide
  Target: LAMA2; (-) strand; PAM type: NRG; PAM sequence: CAG
atagcttgaagtgagcagcc

SEQ ID NO: 74497 - DNA, 20 bp, Artificial Sequence
  Description of Artificial Sequence: Synthetic oligonucleotide
  Target: LAMA2; (-) strand; PAM type: NRG; PAM sequence: CAG
acctcatagcttgaagtgag

SEQ ID NO: 74498 - DNA, 20 bp, Artificial Sequence
  Description of Artificial Sequence: Synthetic oligonucleotide
  Target: LAMA2; (-) strand; PAM type: NRG; PAM sequence: GAG
gagacctcatagcttgaagt

SEQ ID NO: 74499 - DNA, 20 bp, Artificial Sequence
  Description of Artificial Sequence: Synthetic oligonucleotide
  Target: LAMA2; (-) strand; PAM type: NRG; PAM sequence: AAG
tcaggagacctcatagcttg

SEQ ID NO: 74500 - DNA, 20 bp, Artificial Sequence
  Description of Artificial Sequence: Synthetic oligonucleotide
  Target: LAMA2; (-) strand; PAM type: NRG; PAM sequence: TAG
ccagtgttcaggagacctca

SEQ ID NO: 74501 - DNA, 20 bp, Artificial Sequence
  Description of Artificial Sequence: Synthetic oligonucleotide
  Target: LAMA2; (-) strand; PAM type: NRG; PAM sequence: GAG
gggtttttaccagtgttcag

SEQ ID NO: 74502 - DNA, 20 bp, Artificial Sequence
  Description of Artificial Sequence: Synthetic oligonucleotide
  Target: LAMA2; (-) strand; PAM type: NRG; PAM sequence: AGG
tggggtttttaccagtgttc

SEQ ID NO: 74503 - DNA, 20 bp, Artificial Sequence
  Description of Artificial Sequence: Synthetic oligonucleotide
  Target: LAMA2; (-) strand; PAM type: NRG; PAM sequence: CAG
ctggggtttttaccagtgtt

SEQ ID NO: 74504 - DNA, 20 bp, Artificial Sequence
  Description of Artificial Sequence: Synthetic oligonucleotide
  Target: LAMA2; (-) strand; PAM type: NRG; PAM sequence: CAG
tacagcactggggtttttac

SEQ ID NO: 74505 - DNA, 20 bp, Artificial Sequence
  Description of Artificial Sequence: Synthetic oligonucleotide
  Target: LAMA2; (-) strand; PAM type: NRG; PAM sequence: GGG
atgatatttgtacagcactg

SEQ ID NO: 74506 - DNA, 20 bp, Artificial Sequence
  Description of Artificial Sequence: Synthetic oligonucleotide
  Target: LAMA2; (-) strand; PAM type: NRG; PAM sequence: GGG
aatgatatttgtacagcact

SEQ ID NO: 74507 - DNA, 20 bp, Artificial Sequence
  Description of Artificial Sequence: Synthetic oligonucleotide
  Target: LAMA2; (-) strand; PAM type: NRG; PAM sequence: TGG
aaatgatatttgtacagcac

SEQ ID NO: 74508 - DNA, 20 bp, Artificial Sequence
  Description of Artificial Sequence: Synthetic oligonucleotide
  Target: LAMA2; (-) strand; PAM type: NRG; PAM sequence: CAG
aagataaaatgatatttgta

SEQ ID NO: 74509 - DNA, 20 bp, Artificial Sequence
  Description of Artificial Sequence: Synthetic oligonucleotide
  Target: LAMA2; (-) strand; PAM type: NRG; PAM sequence: AAG
caatcttgaacatcatggct

SEQ ID NO: 74510 - DNA, 20 bp, Artificial Sequence
  Description of Artificial Sequence: Synthetic oligonucleotide
  Target: LAMA2; (-) strand; PAM type: NRG; PAM sequence: TGG
ctttccaatcttgaacatca

SEQ ID NO: 74511 - DNA, 20 bp, Artificial Sequence
  Description of Artificial Sequence: Synthetic oligonucleotide
  Target: LAMA2; (-) strand; PAM type: NRG; PAM sequence: GAG
cggacaatgatcatcacata

SEQ ID NO: 74512 - DNA, 20 bp, Artificial Sequence
  Description of Artificial Sequence: Synthetic oligonucleotide
  Target: LAMA2; (-) strand; PAM type: NRG; PAM sequence: TAG
aacggacaatgatcatcaca

SEQ ID NO: 74513 - DNA, 20 bp, Artificial Sequence
  Description of Artificial Sequence: Synthetic oligonucleotide
  Target: LAMA2; (-) strand; PAM type: NRG; PAM sequence: CGG
agtctcaaaataataagcaa

SEQ ID NO: 74514 - DNA, 20 bp, Artificial Sequence
  Description of Artificial Sequence: Synthetic oligonucleotide
  Target: LAMA2; (-) strand; PAM type: NRG; PAM sequence: AAG
tcctttagtctcaaaataat

SEQ ID NO: 74515 - DNA, 20 bp, Artificial Sequence
  Description of Artificial Sequence: Synthetic oligonucleotide
  Target: LAMA2; (-) strand; PAM type: NRG; PAM sequence: TAG
ggtctttcttaagaatcctt

SEQ ID NO: 74516 - DNA, 20 bp, Artificial Sequence
  Description of Artificial Sequence: Synthetic oligonucleotide
  Target: LAMA2; (-) strand; PAM type: NRG; PAM sequence: AAG
tggagaatagggtctttctt

SEQ ID NO: 74517 - DNA, 20 bp, Artificial Sequence
  Description of Artificial Sequence: Synthetic oligonucleotide
  Target: LAMA2; (-) strand; PAM type: NRG; PAM sequence: GGG
tagtgtggaaatggagaata

SEQ ID NO: 74518 - DNA, 20 bp, Artificial Sequence
  Description of Artificial Sequence: Synthetic oligonucleotide
  Target: LAMA2; (-) strand; PAM type: NRG; PAM sequence: AGG
ttagtgtggaaatggagaat

SEQ ID NO: 74519 - DNA, 20 bp, Artificial Sequence
  Description of Artificial Sequence: Synthetic oligonucleotide
  Target: LAMA2; (-) strand; PAM type: NRG; PAM sequence: TAG
tttagtgtggaaatggagaa

SEQ ID NO: 74520 - DNA, 20 bp, Artificial Sequence
  Description of Artificial Sequence: Synthetic oligonucleotide
  Target: LAMA2; (-) strand; PAM type: NRG; PAM sequence: GAG
tctcatttagtgtggaaatg

SEQ ID NO: 74521 - DNA, 20 bp, Artificial Sequence
  Description of Artificial Sequence: Synthetic oligonucleotide
  Target: LAMA2; (-) strand; PAM type: NRG; PAM sequence: TGG
gatctcatttagtgtggaaa

SEQ ID NO: 74522 - DNA, 20 bp, Artificial Sequence
  Description of Artificial Sequence: Synthetic oligonucleotide
  Target: LAMA2; (-) strand; PAM type: NRG; PAM sequence: TGG
gaacttgatctcatttagtg

SEQ ID NO: 74523 - DNA, 20 bp, Artificial Sequence
  Description of Artificial Sequence: Synthetic oligonucleotide
  Target: LAMA2; (-) strand; PAM type: NRG; PAM sequence: TAG
attaagaacttgatctcatt

SEQ ID NO: 74524 - DNA, 20 bp, Artificial Sequence
  Description of Artificial Sequence: Synthetic oligonucleotide
  Target: LAMA2; (-) strand; PAM type: NRG; PAM sequence: AAG
cctataataagaagagtatt

SEQ ID NO: 74525 - DNA, 20 bp, Artificial Sequence
  Description of Artificial Sequence: Synthetic oligonucleotide
  Target: LAMA2; (-) strand; PAM type: NRG; PAM sequence: GAG
tgttcctcctataataagaa

SEQ ID NO: 74526 - DNA, 20 bp, Artificial Sequence
  Description of Artificial Sequence: Synthetic oligonucleotide
  Target: LAMA2; (-) strand; PAM type: NRG; PAM sequence: AAG
gatgttcctcctataataag

SEQ ID NO: 74527 - DNA, 20 bp, Artificial Sequence
  Description of Artificial Sequence: Synthetic oligonucleotide
  Target: LAMA2; (-) strand; PAM type: NRG; PAM sequence: AAG
ttagatgttcctcctataat

SEQ ID NO: 74528 - DNA, 20 bp, Artificial Sequence
  Description of Artificial Sequence: Synthetic oligonucleotide
  Target: LAMA2; (-) strand; PAM type: NRG; PAM sequence: TAG
ttactgatgtagcattgaat

SEQ ID NO: 74529 - DNA, 20 bp, Artificial Sequence
  Description of Artificial Sequence: Synthetic oligonucleotide
  Target: LAMA2; (-) strand; PAM type: NRG; PAM sequence: TAG
atatcatttaattactgatg

SEQ ID NO: 74530 - DNA, 20 bp, Artificial Sequence
  Description of Artificial Sequence: Synthetic oligonucleotide
  Target: LAMA2; (-) strand; PAM type: NRG; PAM sequence: GGG
ttgacaatttacataacaaa

SEQ ID NO: 74531 - DNA, 20 bp, Artificial Sequence
  Description of Artificial Sequence: Synthetic oligonucleotide
  Target: LAMA2; (-) strand; PAM type: NRG; PAM sequence: AGG
tttgacaatttacataacaa

SEQ ID NO: 74532 - DNA, 20 bp, Artificial Sequence
  Description of Artificial Sequence: Synthetic oligonucleotide
  Target: LAMA2; (-) strand; PAM type: NRG; PAM sequence: AAG
gtttgacaatttacataaca

SEQ ID NO: 74533 - DNA, 20 bp, Artificial Sequence
  Description of Artificial Sequence: Synthetic oligonucleotide
  Target: LAMA2; (-) strand; PAM type: NRG; PAM sequence: AAG
ataactttaaaaacaatatc

SEQ ID NO: 74534 - DNA, 20 bp, Artificial Sequence
  Description of Artificial Sequence: Synthetic oligonucleotide
  Target: LAMA2; (-) strand; PAM type: NRG; PAM sequence: TGG
aagggcacttgttacaaact

SEQ ID NO: 74535 - DNA, 20 bp, Artificial Sequence
  Description of Artificial Sequence: Synthetic oligonucleotide
  Target: LAMA2; (-) strand; PAM type: NRG; PAM sequence: GGG
caagtgtcttttctgttgaa

SEQ ID NO: 74536 - DNA, 20 bp, Artificial Sequence
  Description of Artificial Sequence: Synthetic oligonucleotide
  Target: LAMA2; (-) strand; PAM type: NRG; PAM sequence: AGG
ccaagtgtcttttctgttga

SEQ ID NO: 74537 - DNA, 20 bp, Artificial Sequence
  Description of Artificial Sequence: Synthetic oligonucleotide
  Target: LAMA2; (-) strand; PAM type: NRG; PAM sequence: AAG
tccaagtgtcttttctgttg

SEQ ID NO: 74538 - DNA, 20 bp, Artificial Sequence
  Description of Artificial Sequence: Synthetic oligonucleotide
  Target: LAMA2; (-) strand; PAM type: NRG; PAM sequence: AAG
gagaacatctcatgatatcc

SEQ ID NO: 74539 - DNA, 20 bp, Artificial Sequence
  Description of Artificial Sequence: Synthetic oligonucleotide
  Target: LAMA2; (-) strand; PAM type: NRG; PAM sequence: GAG
ctaggctttgaggaacctaa

SEQ ID NO: 74540 - DNA, 20 bp, Artificial Sequence
  Description of Artificial Sequence: Synthetic oligonucleotide
  Target: LAMA2; (-) strand; PAM type: NRG; PAM sequence: AAG
tgctaggctttgaggaacct

SEQ ID NO: 74541 - DNA, 20 bp, Artificial Sequence
  Description of Artificial Sequence: Synthetic oligonucleotide
  Target: LAMA2; (-) strand; PAM type: NRG; PAM sequence: AGG
gctatgactgctaggctttg

SEQ ID NO: 74542 - DNA, 20 bp, Artificial Sequence
  Description of Artificial Sequence: Synthetic oligonucleotide
  Target: LAMA2; (-) strand; PAM type: NRG; PAM sequence: GAG
tgctatgactgctaggcttt

SEQ ID NO: 74543 - DNA, 20 bp, Artificial Sequence
  Description of Artificial Sequence: Synthetic oligonucleotide
  Target: LAMA2; (-) strand; PAM type: NRG; PAM sequence: AGG
attaaaatgctatgactgct

SEQ ID NO: 74544 - DNA, 20 bp, Artificial Sequence
  Description of Artificial Sequence: Synthetic oligonucleotide
  Target: LAMA2; (-) strand; PAM type: NRG; PAM sequence: TAG
tattaaaatgctatgactgc

SEQ ID NO: 74545 - DNA, 20 bp, Artificial Sequence
  Description of Artificial Sequence: Synthetic oligonucleotide
  Target: LAMA2; (-) strand; PAM type: NRG; PAM sequence: AAG
aaggcagactccccactagt

SEQ ID NO: 74546 - DNA, 20 bp, Artificial Sequence
  Description of Artificial Sequence: Synthetic oligonucleotide
  Target: LAMA2; (-) strand; PAM type: NRG; PAM sequence: TAG
agggaaggcagactccccac

SEQ ID NO: 74547 - DNA, 20 bp, Artificial Sequence
  Description of Artificial Sequence: Synthetic oligonucleotide
  Target: LAMA2; (-) strand; PAM type: NRG; PAM sequence: CAG
ctggtgtgcagcagggaagg

SEQ ID NO: 74548 - DNA, 20 bp, Artificial Sequence
  Description of Artificial Sequence: Synthetic oligonucleotide
  Target: LAMA2; (-) strand; PAM type: NRG; PAM sequence: AGG
gttctggtgtgcagcaggga

SEQ ID NO: 74549 - DNA, 20 bp, Artificial Sequence
  Description of Artificial Sequence: Synthetic oligonucleotide
  Target: LAMA2; (-) strand; PAM type: NRG; PAM sequence: AAG
tgttctggtgtgcagcaggg

SEQ ID NO: 74550 - DNA, 20 bp, Artificial Sequence
  Description of Artificial Sequence: Synthetic oligonucleotide
  Target: LAMA2; (-) strand; PAM type: NRG; PAM sequence: GGG
gtctgttctggtgtgcagca

SEQ ID NO: 74551 - DNA, 20 bp, Artificial Sequence
  Description of Artificial Sequence: Synthetic oligonucleotide
  Target: LAMA2; (-) strand; PAM type: NRG; PAM sequence: AGG
agtctgttctggtgtgcagc

SEQ ID NO: 74552 - DNA, 20 bp, Artificial Sequence
  Description of Artificial Sequence: Synthetic oligonucleotide
  Target: LAMA2; (-) strand; PAM type: NRG; PAM sequence: CAG
cagtctgttctggtgtgcag

SEQ ID NO: 74553 - DNA, 20 bp, Artificial Sequence
  Description of Artificial Sequence: Synthetic oligonucleotide
  Target: LAMA2; (-) strand; PAM type: NRG; PAM sequence: CAG
ccccagtctgttctggtgtg

SEQ ID NO: 74554 - DNA, 20 bp, Artificial Sequence
  Description of Artificial Sequence: Synthetic oligonucleotide
  Target: LAMA2; (-) strand; PAM type: NRG; PAM sequence: TGG
acccccaccccagtctgttc

SEQ ID NO: 74555 - DNA, 20 bp, Artificial Sequence
  Description of Artificial Sequence: Synthetic oligonucleotide
  Target: LAMA2; (-) strand; PAM type: NRG; PAM sequence: CAG
cagatgattaacccccaccc

SEQ ID NO: 74556 - DNA, 20 bp, Artificial Sequence
  Description of Artificial Sequence: Synthetic oligonucleotide
  Target: LAMA2; (-) strand; PAM type: NRG; PAM sequence: CAG
tagttataatacctcatttc

SEQ ID NO: 74557 - DNA, 20 bp, Artificial Sequence
  Description of Artificial Sequence: Synthetic oligonucleotide
  Target: LAMA2; (-) strand; PAM type: NRG; PAM sequence: TAG
taaagactcttcaaaatcag

SEQ ID NO: 74558 - DNA, 20 bp, Artificial Sequence
  Description of Artificial Sequence: Synthetic oligonucleotide
  Target: LAMA2; (-) strand; PAM type: NRG; PAM sequence: CAG
ttataaagactcttcaaaat

SEQ ID NO: 74559 - DNA, 20 bp, Artificial Sequence
  Description of Artificial Sequence: Synthetic oligonucleotide
  Target: LAMA2; (-) strand; PAM type: NRG; PAM sequence: AAG
tgtgtcttgttttcattata

SEQ ID NO: 74560 - DNA, 20 bp, Artificial Sequence
  Description of Artificial Sequence: Synthetic oligonucleotide
  Target: LAMA2; (-) strand; PAM type: NRG; PAM sequence: TGG
actgtactccaaatatttaa

SEQ ID NO: 74561 - DNA, 20 bp, Artificial Sequence
  Description of Artificial Sequence: Synthetic oligonucleotide
  Target: LAMA2; (-) strand; PAM type: NRG; PAM sequence: AAG
aattttaacagtgattttct

SEQ ID NO: 74562 - DNA, 20 bp, Artificial Sequence
  Description of Artificial Sequence: Synthetic oligonucleotide
  Target: LAMA2; (-) strand; PAM type: NRG; PAM sequence: CAG
agtaactgtaacaattttaa

SEQ ID NO: 74563 - DNA, 20 bp, Artificial Sequence
  Description of Artificial Sequence: Synthetic oligonucleotide
  Target: LAMA2; (-) strand; PAM type: NRG; PAM sequence: GAG
tattcttagcaggcttcaga

SEQ ID NO: 74564 - DNA, 20 bp, Artificial Sequence
  Description of Artificial Sequence: Synthetic oligonucleotide
  Target: LAMA2; (-) strand; PAM type: NRG; PAM sequence: GAG
agtattcttagcaggcttca

SEQ ID NO: 74565 - DNA, 20 bp, Artificial Sequence
  Description of Artificial Sequence: Synthetic oligonucleotide
  Target: LAMA2; (-) strand; PAM type: NRG; PAM sequence: CAG
gcagtattcttagcaggctt

SEQ ID NO: 74566 - DNA, 20 bp, Artificial Sequence
  Description of Artificial Sequence: Synthetic oligonucleotide
  Target: LAMA2; (-) strand; PAM type: NRG; PAM sequence: AGG
taaatagcagtattcttagc

SEQ ID NO: 74567 - DNA, 20 bp, Artificial Sequence
  Description of Artificial Sequence: Synthetic oligonucleotide
  Target: LAMA2; (-) strand; PAM type: NRG; PAM sequence: CAG
ataaatagcagtattcttag

SEQ ID NO: 74568 - DNA, 20 bp, Artificial Sequence
  Description of Artificial Sequence: Synthetic oligonucleotide
  Target: LAMA2; (-) strand; PAM type: NRG; PAM sequence: TAG
gtaataaatagcagtattct

SEQ ID NO: 74569 - DNA, 20 bp, Artificial Sequence
  Description of Artificial Sequence: Synthetic oligonucleotide
  Target: LAMA2; (-) strand; PAM type: NRG; PAM sequence: CAG
attaaaaatgtaataaatag

SEQ ID NO: 74570 - DNA, 20 bp, Artificial Sequence
  Description of Artificial Sequence: Synthetic oligonucleotide
  Target: LAMA2; (-) strand; PAM type: NRG; PAM sequence: TAG
attattaaaaatgtaataaa

SEQ ID NO: 74571 - DNA, 20 bp, Artificial Sequence
  Description of Artificial Sequence: Synthetic oligonucleotide
  Target: LAMA2; (-) strand; PAM type: NRG; PAM sequence: TAG
aacttttaaaatgtagtgaa

SEQ ID NO: 74572 - DNA, 20 bp, Artificial Sequence
  Description of Artificial Sequence: Synthetic oligonucleotide
  Target: LAMA2; (-) strand; PAM type: NRG; PAM sequence: TAG
ttgagtaaacttttaaaatg

SEQ ID NO: 74573 - DNA, 20 bp, Artificial Sequence
  Description of Artificial Sequence: Synthetic oligonucleotide
  Target: LAMA2; (-) strand; PAM type: NRG; PAM sequence: GAG
ttgaaagtcatgtagttttt

SEQ ID NO: 74574 - DNA, 20 bp, Artificial Sequence
  Description of Artificial Sequence: Synthetic oligonucleotide
  Target: LAMA2; (-) strand; PAM type: NRG; PAM sequence: TAG
taaatgacttgaaagtcatg

SEQ ID NO: 74575 - DNA, 20 bp, Artificial Sequence
  Description of Artificial Sequence: Synthetic oligonucleotide
  Target: LAMA2; (-) strand; PAM type: NRG; PAM sequence: AAG
ggacttcttaaatgacttga

SEQ ID NO: 74576 - DNA, 20 bp, Artificial Sequence
  Description of Artificial Sequence: Synthetic oligonucleotide
  Target: LAMA2; (-) strand; PAM type: NRG; PAM sequence: TGG
tgttggcatggaatttcttt

SEQ ID NO: 74577 - DNA, 20 bp, Artificial Sequence
  Description of Artificial Sequence: Synthetic oligonucleotide
  Target: LAMA2; (-) strand; PAM type: NRG; PAM sequence: TGG
attaattaaatttgttggca

SEQ ID NO: 74578 - DNA, 20 bp, Artificial Sequence
  Description of Artificial Sequence: Synthetic oligonucleotide
  Target: LAMA2; (-) strand; PAM type: NRG; PAM sequence: TGG
gcaaaattaattaaatttgt

SEQ ID NO: 74579 - DNA, 20 bp, Artificial Sequence
  Description of Artificial Sequence: Synthetic oligonucleotide
  Target: LAMA2; (-) strand; PAM type: NRG; PAM sequence: GGG
ctctttcatttattttctat

SEQ ID NO: 74580 - DNA, 20 bp, Artificial Sequence
  Description of Artificial Sequence: Synthetic oligonucleotide
  Target: LAMA2; (-) strand; PAM type: NRG; PAM sequence: TGG
cctctttcatttattttcta

SEQ ID NO: 74581 - DNA, 20 bp, Artificial Sequence
  Description of Artificial Sequence: Synthetic oligonucleotide
  Target: LAMA2; (-) strand; PAM type: NRG; PAM sequence: GAG
cgccttacagaagactgaat

SEQ ID NO: 74582 - DNA, 20 bp, Artificial Sequence
  Description of Artificial Sequence: Synthetic oligonucleotide
  Target: LAMA2; (-) strand; PAM type: NRG; PAM sequence: AAG
aagcagtcaccgccttacag

SEQ ID NO: 74583 - DNA, 20 bp, Artificial Sequence
  Description of Artificial Sequence: Synthetic oligonucleotide
  Target: LAMA2; (-) strand; PAM type: NRG; PAM sequence: CAG
gaaaagcagtcaccgcctta

SEQ ID NO: 74584 - DNA, 20 bp, Artificial Sequence
  Description of Artificial Sequence: Synthetic oligonucleotide
  Target: LAMA2; (-) strand; PAM type: NRG; PAM sequence: CAG
ccagcagtgacacggaaaag

SEQ ID NO: 74585 - DNA, 20 bp, Artificial Sequence
  Description of Artificial Sequence: Synthetic oligonucleotide
  Target: LAMA2; (-) strand; PAM type: NRG; PAM sequence: AAG
ctgccagcagtgacacggaa

SEQ ID NO: 74586 - DNA, 20 bp, Artificial Sequence
  Description of Artificial Sequence: Synthetic oligonucleotide
  Target: LAMA2; (-) strand; PAM type: NRG; PAM sequence: CGG
cataactgccagcagtgaca

SEQ ID NO: 74587 - DNA, 20 bp, Artificial Sequence
  Description of Artificial Sequence: Synthetic oligonucleotide
  Target: LAMA2; (-) strand; PAM type: NRG; PAM sequence: CAG
taattcaacataactgccag

SEQ ID NO: 74588 - DNA, 20 bp, Artificial Sequence
  Description of Artificial Sequence: Synthetic oligonucleotide
  Target: LAMA2; (-) strand; PAM type: NRG; PAM sequence: CAG
ctataattcaacataactgc

SEQ ID NO: 74589 - DNA, 20 bp, Artificial Sequence
  Description of Artificial Sequence: Synthetic oligonucleotide
  Target: LAMA2; (-) strand; PAM type: NRG; PAM sequence: CAG
aagttctactagagacccca

SEQ ID NO: 74590 - DNA, 20 bp, Artificial Sequence
  Description of Artificial Sequence: Synthetic oligonucleotide
  Target: LAMA2; (-) strand; PAM type: NRG; PAM sequence: GAG
cacgaagagaagttctacta

SEQ ID NO: 74591 - DNA, 20 bp, Artificial Sequence
  Description of Artificial Sequence: Synthetic oligonucleotide
  Target: LAMA2; (-) strand; PAM type: NRG; PAM sequence: TAG
tccacgaagagaagttctac

SEQ ID NO: 74592 - DNA, 20 bp, Artificial Sequence
  Description of Artificial Sequence: Synthetic oligonucleotide
  Target: LAMA2; (-) strand; PAM type: NRG; PAM sequence: AAG
taaaaataatccacgaagag

SEQ ID NO: 74593 - DNA, 20 bp, Artificial Sequence
  Description of Artificial Sequence: Synthetic oligonucleotide
  Target: LAMA2; (-) strand; PAM type: NRG; PAM sequence: GAG
agataaaaataatccacgaa

SEQ ID NO: 74594 - DNA, 20 bp, Artificial Sequence
  Description of Artificial Sequence: Synthetic oligonucleotide
  Target: LAMA2; (-) strand; PAM type: NRG; PAM sequence: AAG
atagataaaaataatccacg

SEQ ID NO: 74595 - DNA, 20 bp, Artificial Sequence
  Description of Artificial Sequence: Synthetic oligonucleotide
  Target: LAMA2; (-) strand; PAM type: NRG; PAM sequence: TAG
ctgtgttggctctggaataa

SEQ ID NO: 74596 - DNA, 20 bp, Artificial Sequence
  Description of Artificial Sequence: Synthetic oligonucleotide
  Target: LAMA2; (-) strand; PAM type: NRG; PAM sequence: TGG
catagctcctgtgttggctc

SEQ ID NO: 74597 - DNA, 20 bp, Artificial Sequence
  Description of Artificial Sequence: Synthetic oligonucleotide
  Target: LAMA2; (-) strand; PAM type: NRG; PAM sequence: TGG
tgacttcatagctcctgtgt

SEQ ID NO: 74598 - DNA, 20 bp, Artificial Sequence
  Description of Artificial Sequence: Synthetic oligonucleotide
  Target: LAMA2; (-) strand; PAM type: NRG; PAM sequence: TAG
aatgtggatttatgacttca

SEQ ID NO: 74599 - DNA, 20 bp, Artificial Sequence
  Description of Artificial Sequence: Synthetic oligonucleotide
  Target: LAMA2; (-) strand; PAM type: NRG; PAM sequence: TGG
gttctcatgcagctacaatg

SEQ ID NO: 74600 - DNA, 20 bp, Artificial Sequence
  Description of Artificial Sequence: Synthetic oligonucleotide
  Target: LAMA2; (-) strand; PAM type: NRG; PAM sequence: CAG
gataaggccaagttctcatg

SEQ ID NO: 74601 - DNA, 20 bp, Artificial Sequence
  Description of Artificial Sequence: Synthetic oligonucleotide
  Target: LAMA2; (-) strand; PAM type: NRG; PAM sequence: AAG
tgcaaatatgtgataaggcc

SEQ ID NO: 74602 - DNA, 20 bp, Artificial Sequence
  Description of Artificial Sequence: Synthetic oligonucleotide
  Target: LAMA2; (-) strand; PAM type: NRG; PAM sequence: AGG
gagtatgcaaatatgtgata

SEQ ID NO: 74603 - DNA, 20 bp, Artificial Sequence
  Description of Artificial Sequence: Synthetic oligonucleotide
  Target: LAMA2; (-) strand; PAM type: NRG; PAM sequence: AAG
tgagtatgcaaatatgtgat

SEQ ID NO: 74604 - DNA, 20 bp, Artificial Sequence
  Description of Artificial Sequence: Synthetic oligonucleotide
  Target: LAMA2; (-) strand; PAM type: NRG; PAM sequence: GAG
aactttgcttagaaagcact

SEQ ID NO: 74605 - DNA, 20 bp, Artificial Sequence
  Description of Artificial Sequence: Synthetic oligonucleotide
  Target: LAMA2; (-) strand; PAM type: NRG; PAM sequence: AAG
gataaagaactttgcttaga

SEQ ID NO: 74606 - DNA, 20 bp, Artificial Sequence
  Description of Artificial Sequence: Synthetic oligonucleotide
  Target: LAMA2; (-) strand; PAM type: NRG; PAM sequence: TAG
tatggataaagaactttgct

SEQ ID NO: 74607 - DNA, 20 bp, Artificial Sequence
  Description of Artificial Sequence: Synthetic oligonucleotide
  Target: LAMA2; (-) strand; PAM type: NRG; PAM sequence: AAG
ctacactaaggttatggata

SEQ ID NO: 74608 - DNA, 20 bp, Artificial Sequence
  Description of Artificial Sequence: Synthetic oligonucleotide
  Target: LAMA2; (-) strand; PAM type: NRG; PAM sequence: TGG
ataagactacactaaggtta

SEQ ID NO: 74609 - DNA, 20 bp, Artificial Sequence
  Description of Artificial Sequence: Synthetic oligonucleotide
  Target: LAMA2; (-) strand; PAM type: NRG; PAM sequence: AGG
agaaaaataagactacacta

SEQ ID NO: 74610 - DNA, 20 bp, Artificial Sequence
  Description of Artificial Sequence: Synthetic oligonucleotide
  Target: LAMA2; (-) strand; PAM type: NRG; PAM sequence: AAG
aagaaaaataagactacact

SEQ ID NO: 74611 - DNA, 20 bp, Artificial Sequence
  Description of Artificial Sequence: Synthetic oligonucleotide
  Target: LAMA2; (-) strand; PAM type: NRG; PAM sequence: AAG
aggtacccactaagaaaaat

SEQ ID NO: 74612 - DNA, 20 bp, Artificial Sequence
  Description of Artificial Sequence: Synthetic oligonucleotide
  Target: LAMA2; (-) strand; PAM type: NRG; PAM sequence: AAG
agagatcacaggtacccact

SEQ ID NO: 74613 - DNA, 20 bp, Artificial Sequence
  Description of Artificial Sequence: Synthetic oligonucleotide
  Target: LAMA2; (-) strand; PAM type: NRG; PAM sequence: AGG
caaagcatattagagatcac

SEQ ID NO: 74614 - DNA, 20 bp, Artificial Sequence
  Description of Artificial Sequence: Synthetic oligonucleotide
  Target: LAMA2; (-) strand; PAM type: NRG; PAM sequence: CAG
gcaaagcatattagagatca

SEQ ID NO: 74615 - DNA, 20 bp, Artificial Sequence
  Description of Artificial Sequence: Synthetic oligonucleotide
  Target: LAMA2; (-) strand; PAM type: NRG; PAM sequence: GAG
agagatagcaaagcatatta

SEQ ID NO: 74616 - DNA, 20 bp, Artificial Sequence
  Description of Artificial Sequence: Synthetic oligonucleotide
  Target: LAMA2; (-) strand; PAM type: NRG; PAM sequence: TAG
agagagatagcaaagcatat

SEQ ID NO: 74617 - DNA, 20 bp, Artificial Sequence
  Description of Artificial Sequence: Synthetic oligonucleotide
  Target: LAMA2; (-) strand; PAM type: NRG; PAM sequence: AAG
aaacaaaaagagagatagca

SEQ ID NO: 74618 - DNA, 20 bp, Artificial Sequence
  Description of Artificial Sequence: Synthetic oligonucleotide
  Target: LAMA2; (-) strand; PAM type: NRG; PAM sequence: TAG
atataaaacaaaaagagaga

SEQ ID NO: 74619 - DNA, 20 bp, Artificial Sequence
  Description of Artificial Sequence: Synthetic oligonucleotide
  Target: LAMA2; (-) strand; PAM type: NRG; PAM sequence: GAG
aaagatataaaacaaaaaga

SEQ ID NO: 74620 - DNA, 20 bp, Artificial Sequence
  Description of Artificial Sequence: Synthetic oligonucleotide
  Target: LAMA2; (-) strand; PAM type: NRG; PAM sequence: GAG
ttaaagatataaaacaaaaa

SEQ ID NO: 74621 - DNA, 20 bp, Artificial Sequence
  Description of Artificial Sequence: Synthetic oligonucleotide
  Target: LAMA2; (-) strand; PAM type: NRG; PAM sequence: AAG
ttttaaagatataaaacaaa

SEQ ID NO: 74622 - DNA, 20 bp, Artificial Sequence
  Description of Artificial Sequence: Synthetic oligonucleotide
  Target: LAMA2; (-) strand; PAM type: NRG; PAM sequence: AAG
aaaacatagagattttttta

SEQ ID NO: 74623 - DNA, 20 bp, Artificial Sequence
  Description of Artificial Sequence: Synthetic oligonucleotide
  Target: LAMA2; (-) strand; PAM type: NRG; PAM sequence: GAG
ccagaaaaaataaaaacata

SEQ ID NO: 74624 - DNA, 20 bp, Artificial Sequence
  Description of Artificial Sequence: Synthetic oligonucleotide
  Target: LAMA2; (-) strand; PAM type: NRG; PAM sequence: TAG
ttccagaaaaaataaaaaca

SEQ ID NO: 74625 - DNA, 20 bp, Artificial Sequence
  Description of Artificial Sequence: Synthetic oligonucleotide
  Target: LAMA2; (-) strand; PAM type: NRG; PAM sequence: CAG
caagtgagcctgtttccttc

SEQ ID NO: 74626 - DNA, 20 bp, Artificial Sequence
  Description of Artificial Sequence: Synthetic oligonucleotide
  Target: LAMA2; (-) strand; PAM type: NRG; PAM sequence: GAG
tctaggtaaatattccaagt

SEQ ID NO: 74627 - DNA, 20 bp, Artificial Sequence
  Description of Artificial Sequence: Synthetic oligonucleotide
  Target: LAMA2; (-) strand; PAM type: NRG; PAM sequence: AAG
agaatctaggtaaatattcc

SEQ ID NO: 74628 - DNA, 20 bp, Artificial Sequence
  Description of Artificial Sequence: Synthetic oligonucleotide
  Target: LAMA2; (-) strand; PAM type: NRG; PAM sequence: AGG
tcttgtgaaagagagaatct

SEQ ID NO: 74629 - DNA, 20 bp, Artificial Sequence
  Description of Artificial Sequence: Synthetic oligonucleotide
  Target: LAMA2; (-) strand; PAM type: NRG; PAM sequence: TAG
ttcttgtgaaagagagaatc

SEQ ID NO: 74630 - DNA, 20 bp, Artificial Sequence
  Description of Artificial Sequence: Synthetic oligonucleotide
  Target: LAMA2; (-) strand; PAM type: NRG; PAM sequence: GAG
ctgcgtgttcttgtgaaaga

SEQ ID NO: 74631 - DNA, 20 bp, Artificial Sequence
  Description of Artificial Sequence: Synthetic oligonucleotide
  Target: LAMA2; (-) strand; PAM type: NRG; PAM sequence: GAG
tactgcgtgttcttgtgaaa

SEQ ID NO: 74632 - DNA, 20 bp, Artificial Sequence
  Description of Artificial Sequence: Synthetic oligonucleotide
  Target: LAMA2; (-) strand; PAM type: NRG; PAM sequence: AAG
aatactgcgtgttcttgtga

SEQ ID NO: 74633 - DNA, 20 bp, Artificial Sequence
  Description of Artificial Sequence: Synthetic oligonucleotide
  Target: LAMA2; (-) strand; PAM type: NRG; PAM sequence: GAG
acaaccagggaagagataat

SEQ ID NO: 74634 - DNA, 20 bp, Artificial Sequence
  Description of Artificial Sequence: Synthetic oligonucleotide
  Target: LAMA2; (-) strand; PAM type: NRG; PAM sequence: GAG
ctaaagacacaaccagggaa

SEQ ID NO: 74635 - DNA, 20 bp, Artificial Sequence
  Description of Artificial Sequence: Synthetic oligonucleotide
  Target: LAMA2; (-) strand; PAM type: NRG; PAM sequence: AAG
ttctaaagacacaaccaggg

SEQ ID NO: 74636 - DNA, 20 bp, Artificial Sequence
  Description of Artificial Sequence: Synthetic oligonucleotide
  Target: LAMA2; (-) strand; PAM type: NRG; PAM sequence: GGG
cttttctaaagacacaacca

SEQ ID NO: 74637 - DNA, 20 bp, Artificial Sequence
  Description of Artificial Sequence: Synthetic oligonucleotide
  Target: LAMA2; (-) strand; PAM type: NRG; PAM sequence: AGG
tcttttctaaagacacaacc

SEQ ID NO: 74638 - DNA, 20 bp, Artificial Sequence
  Description of Artificial Sequence: Synthetic oligonucleotide
  Target: LAMA2; (-) strand; PAM type: NRG; PAM sequence: CAG
ttcttttctaaagacacaac

SEQ ID NO: 74639 - DNA, 20 bp, Artificial Sequence
  Description of Artificial Sequence: Synthetic oligonucleotide
  Target: LAMA2; (-) strand; PAM type: NRG; PAM sequence: AAG
tatccattgtttcttttcta

SEQ ID NO: 74640 - DNA, 20 bp, Artificial Sequence
  Description of Artificial Sequence: Synthetic oligonucleotide
  Target: LAMA2; (-) strand; PAM type: NRG; PAM sequence: GAG
ctattaggtctctgtgagct

SEQ ID NO: 74641 - DNA, 20 bp, Artificial Sequence
  Description of Artificial Sequence: Synthetic oligonucleotide
  Target: LAMA2; (-) strand; PAM type: NRG; PAM sequence: GAG
ttgtcctattaggtctctgt

SEQ ID NO: 74642 - DNA, 20 bp, Artificial Sequence
  Description of Artificial Sequence: Synthetic oligonucleotide
  Target: LAMA2; (-) strand; PAM type: NRG; PAM sequence: AGG
cctggagtatttgtcctatt

SEQ ID NO: 74643 - DNA, 20 bp, Artificial Sequence
  Description of Artificial Sequence: Synthetic oligonucleotide
  Target: LAMA2; (-) strand; PAM type: NRG; PAM sequence: TAG
tcctggagtatttgtcctat

SEQ ID NO: 74644 - DNA, 20 bp, Artificial Sequence
  Description of Artificial Sequence: Synthetic oligonucleotide
  Target: LAMA2; (-) strand; PAM type: NRG; PAM sequence: GAG
aactaaggcatacgttcctg

SEQ ID NO: 74645 - DNA, 20 bp, Artificial Sequence
  Description of Artificial Sequence: Synthetic oligonucleotide
  Target: LAMA2; (-) strand; PAM type: NRG; PAM sequence: TGG
ggaactaaggcatacgttcc

SEQ ID NO: 74646 - DNA, 20 bp, Artificial Sequence
  Description of Artificial Sequence: Synthetic oligonucleotide
  Target: LAMA2; (-) strand; PAM type: NRG; PAM sequence: AGG
attgtcatctgcaggaacta

SEQ ID NO: 74647 - DNA, 20 bp, Artificial Sequence
  Description of Artificial Sequence: Synthetic oligonucleotide
  Target: LAMA2; (-) strand; PAM type: NRG; PAM sequence: AAG
tattgtcatctgcaggaact

SEQ ID NO: 74648 - DNA, 20 bp, Artificial Sequence
  Description of Artificial Sequence: Synthetic oligonucleotide
  Target: LAMA2; (-) strand; PAM type: NRG; PAM sequence: AGG
tagcatatattgtcatctgc

SEQ ID NO: 74649 - DNA, 20 bp, Artificial Sequence
  Description of Artificial Sequence: Synthetic oligonucleotide
  Target: LAMA2; (-) strand; PAM type: NRG; PAM sequence: CAG
ttagcatatattgtcatctg

SEQ ID NO: 74650 - DNA, 20 bp, Artificial Sequence
  Description of Artificial Sequence: Synthetic oligonucleotide
  Target: LAMA2; (-) strand; PAM type: NRG; PAM sequence: TAG
gttagagcttgaatcccagt

SEQ ID NO: 74651 - DNA, 20 bp, Artificial Sequence
  Description of Artificial Sequence: Synthetic oligonucleotide
  Target: LAMA2; (-) strand; PAM type: NRG; PAM sequence: CAG
gtttgttagagcttgaatcc

SEQ ID NO: 74652 - DNA, 20 bp, Artificial Sequence
  Description of Artificial Sequence: Synthetic oligonucleotide
  Target: LAMA2; (-) strand; PAM type: NRG; PAM sequence: GAG
ttggtcttgcctgtttgtta

SEQ ID NO: 74653 - DNA, 20 bp, Artificial Sequence
  Description of Artificial Sequence: Synthetic oligonucleotide
  Target: LAMA2; (-) strand; PAM type: NRG; PAM sequence: TAG
cattggtcttgcctgtttgt

SEQ ID NO: 74654 - DNA, 20 bp, Artificial Sequence
  Description of Artificial Sequence: Synthetic oligonucleotide
  Target: LAMA2; (-) strand; PAM type: NRG; PAM sequence: TGG
tatggttattagtttgacat

SEQ ID NO: 74655 - DNA, 20 bp, Artificial Sequence
  Description of Artificial Sequence: Synthetic oligonucleotide
  Target: LAMA2; (-) strand; PAM type: NRG; PAM sequence: TAG
tgcttccacgttatggttat

SEQ ID NO: 74656 - DNA, 20 bp, Artificial Sequence
  Description of Artificial Sequence: Synthetic oligonucleotide
  Target: LAMA2; (-) strand; PAM type: NRG; PAM sequence: TGG
tgtaatgtgcttccacgtta

SEQ ID NO: 74657 - DNA, 20 bp, Artificial Sequence
  Description of Artificial Sequence: Synthetic oligonucleotide
  Target: LAMA2; (-) strand; PAM type: NRG; PAM sequence: TAG
atttattacatttagttgga

SEQ ID NO: 74658 - DNA, 20 bp, Artificial Sequence
  Description of Artificial Sequence: Synthetic oligonucleotide
  Target: LAMA2; (-) strand; PAM type: NRG; PAM sequence: TGG
tgatatttattacatttagt

SEQ ID NO: 74659 - DNA, 20 bp, Artificial Sequence
  Description of Artificial Sequence: Synthetic oligonucleotide
  Target: LAMA2; (-) strand; PAM type: NRG; PAM sequence: TAG
catttgatatttattacatt

SEQ ID NO: 74660 - DNA, 20 bp, Artificial Sequence
  Description of Artificial Sequence: Synthetic oligonucleotide
  Target: LAMA2; (-) strand; PAM type: NRG; PAM sequence: GGG
tataattcttctgaaatggt

SEQ ID NO: 74661 - DNA, 20 bp, Artificial Sequence
  Description of Artificial Sequence: Synthetic oligonucleotide
  Target: LAMA2; (-) strand; PAM type: NRG; PAM sequence: TGG
ttataattcttctgaaatgg

SEQ ID NO: 74662 - DNA, 20 bp, Artificial Sequence
  Description of Artificial Sequence: Synthetic oligonucleotide
  Target: LAMA2; (-) strand; PAM type: NRG; PAM sequence: TGG
ttattataattcttctgaaa

SEQ ID NO: 74663 - DNA, 20 bp, Artificial Sequence
  Description of Artificial Sequence: Synthetic oligonucleotide
  Target: LAMA2; (-) strand; PAM type: NRG; PAM sequence: AAG
ggcaaatgagaaatgggtta

SEQ ID NO: 74664 - DNA, 20 bp, Artificial Sequence
  Description of Artificial Sequence: Synthetic oligonucleotide
  Target: LAMA2; (-) strand; PAM type: NRG; PAM sequence: GGG
tcttcaggcaaatgagaaat

SEQ ID NO: 74665 - DNA, 20 bp, Artificial Sequence
  Description of Artificial Sequence: Synthetic oligonucleotide
  Target: LAMA2; (-) strand; PAM type: NRG; PAM sequence: TGG
ttcttcaggcaaatgagaaa

SEQ ID NO: 74666 - DNA, 20 bp, Artificial Sequence
  Description of Artificial Sequence: Synthetic oligonucleotide
  Target: LAMA2; (-) strand; PAM type: NRG; PAM sequence: GAG
caagtattcttcaggcaaat

SEQ ID NO: 74667 - DNA, 20 bp, Artificial Sequence
  Description of Artificial Sequence: Synthetic oligonucleotide
  Target: LAMA2; (-) strand; PAM type: NRG; PAM sequence: AGG
gctgtctgcaagtattcttc

SEQ ID NO: 74668 - DNA, 20 bp, Artificial Sequence
  Description of Artificial Sequence: Synthetic oligonucleotide
  Target: LAMA2; (-) strand; PAM type: NRG; PAM sequence: CAG
tgctgtctgcaagtattctt

SEQ ID NO: 74669 - DNA, 20 bp, Artificial Sequence
  Description of Artificial Sequence: Synthetic oligonucleotide
  Target: LAMA2; (-) strand; PAM type: NRG; PAM sequence: AAG
aagccacaaatgctgtctgc

SEQ ID NO: 74670 - DNA, 20 bp, Artificial Sequence
  Description of Artificial Sequence: Synthetic oligonucleotide
  Target: LAMA2; (-) strand; PAM type: NRG; PAM sequence: AAG
gttatctcagggtaaacatt

SEQ ID NO: 74671 - DNA, 20 bp, Artificial Sequence
  Description of Artificial Sequence: Synthetic oligonucleotide
  Target: LAMA2; (-) strand; PAM type: NRG; PAM sequence: GGG
gtaagccacaagttatctca

SEQ ID NO: 74672 - DNA, 20 bp, Artificial Sequence
  Description of Artificial Sequence: Synthetic oligonucleotide
  Target: LAMA2; (-) strand; PAM type: NRG; PAM sequence: AGG
agtaagccacaagttatctc

SEQ ID NO: 74673 - DNA, 20 bp, Artificial Sequence
  Description of Artificial Sequence: Synthetic oligonucleotide
  Target: LAMA2; (-) strand; PAM type: NRG; PAM sequence: CAG
cagtaagccacaagttatct

SEQ ID NO: 74674 - DNA, 20 bp, Artificial Sequence
  Description of Artificial Sequence: Synthetic oligonucleotide
  Target: LAMA2; (-) strand; PAM type: NRG; PAM sequence: AAG
aggttaggacagtaagccac

SEQ ID NO: 74675 - DNA, 20 bp, Artificial Sequence
  Description of Artificial Sequence: Synthetic oligonucleotide
  Target: LAMA2; (-) strand; PAM type: NRG; PAM sequence: AAG
ggggataaggttaggacagt

SEQ ID NO: 74676 - DNA, 20 bp, Artificial Sequence
  Description of Artificial Sequence: Synthetic oligonucleotide
  Target: LAMA2; (-) strand; PAM type: NRG; PAM sequence: CAG
ctttggggataaggttagga

SEQ ID NO: 74677 - DNA, 20 bp, Artificial Sequence
  Description of Artificial Sequence: Synthetic oligonucleotide
  Target: LAMA2; (-) strand; PAM type: NRG; PAM sequence: AGG
caaactttggggataaggtt

SEQ ID NO: 74678 - DNA, 20 bp, Artificial Sequence
  Description of Artificial Sequence: Synthetic oligonucleotide
  Target: LAMA2; (-) strand; PAM type: NRG; PAM sequence: TAG
gcaaactttggggataaggt

SEQ ID NO: 74679 - DNA, 20 bp, Artificial Sequence
  Description of Artificial Sequence: Synthetic oligonucleotide
  Target: LAMA2; (-) strand; PAM type: NRG; PAM sequence: AGG
catggcaaactttggggata

SEQ ID NO: 74680 - DNA, 20 bp, Artificial Sequence
  Description of Artificial Sequence: Synthetic oligonucleotide
  Target: LAMA2; (-) strand; PAM type: NRG; PAM sequence: AAG
tcatggcaaactttggggat

SEQ ID NO: 74681 - DNA, 20 bp, Artificial Sequence
  Description of Artificial Sequence: Synthetic oligonucleotide
  Target: LAMA2; (-) strand; PAM type: NRG; PAM sequence: GGG
atatttcatggcaaactttg

SEQ ID NO: 74682 - DNA, 20 bp, Artificial Sequence
  Description of Artificial Sequence: Synthetic oligonucleotide
  Target: LAMA2; (-) strand; PAM type: NRG; PAM sequence: GGG
gatatttcatggcaaacttt

SEQ ID NO: 74683 - DNA, 20 bp, Artificial Sequence
  Description of Artificial Sequence: Synthetic oligonucleotide
  Target: LAMA2; (-) strand; PAM type: NRG; PAM sequence: TGG
agatatttcatggcaaactt

SEQ ID NO: 74684 - DNA, 20 bp, Artificial Sequence
  Description of Artificial Sequence: Synthetic oligonucleotide
  Target: LAMA2; (-) strand; PAM type: NRG; PAM sequence: TGG
aataaaagtgagatatttca

SEQ ID NO: 74685 - DNA, 20 bp, Artificial Sequence
  Description of Artificial Sequence: Synthetic oligonucleotide
  Target: LAMA2; (-) strand; PAM type: NRG; PAM sequence: GAG
gcaaaaataataataaaagt

SEQ ID NO: 74686 - DNA, 20 bp, Artificial Sequence
  Description of Artificial Sequence: Synthetic oligonucleotide
  Target: LAMA2; (-) strand; PAM type: NRG; PAM sequence: AAG
ctatgcaaaaataataataa

SEQ ID NO: 74687 - DNA, 20 bp, Artificial Sequence
  Description of Artificial Sequence: Synthetic oligonucleotide
  Target: LAMA2; (-) strand; PAM type: NRG; PAM sequence: TAG
tgtttccaaagtcaatatgc

SEQ ID NO: 74688 - DNA, 20 bp, Artificial Sequence
  Description of Artificial Sequence: Synthetic oligonucleotide
  Target: LAMA2; (-) strand; PAM type: NRG; PAM sequence: AAG
aatgatgtcttttgtttcca

SEQ ID NO: 74689 - DNA, 20 bp, Artificial Sequence
  Description of Artificial Sequence: Synthetic oligonucleotide
  Target: LAMA2; (-) strand; PAM type: NRG; PAM sequence: TAG
caaacacagaatgctacaaa

SEQ ID NO: 74690 - DNA, 20 bp, Artificial Sequence
  Description of Artificial Sequence: Synthetic oligonucleotide
  Target: LAMA2; (-) strand; PAM type: NRG; PAM sequence: CAG
ggaaatactactatcaaaca

SEQ ID NO: 74691 - DNA, 20 bp, Artificial Sequence
  Description of Artificial Sequence: Synthetic oligonucleotide
  Target: LAMA2; (-) strand; PAM type: NRG; PAM sequence: TGG
taattactatattttgtata

SEQ ID NO: 74692 - DNA, 20 bp, Artificial Sequence
  Description of Artificial Sequence: Synthetic oligonucleotide
  Target: LAMA2; (-) strand; PAM type: NRG; PAM sequence: CAG
tattttctaggatttgattt

SEQ ID NO: 74693 - DNA, 20 bp, Artificial Sequence
  Description of Artificial Sequence: Synthetic oligonucleotide
  Target: LAMA2; (-) strand; PAM type: NRG; PAM sequence: AGG
ataggaatgctgtattttct

SEQ ID NO: 74694 - DNA, 20 bp, Artificial Sequence
  Description of Artificial Sequence: Synthetic oligonucleotide
  Target: LAMA2; (-) strand; PAM type: NRG; PAM sequence: TAG
tataggaatgctgtattttc

SEQ ID NO: 74695 - DNA, 20 bp, Artificial Sequence
  Description of Artificial Sequence: Synthetic oligonucleotide
  Target: LAMA2; (-) strand; PAM type: NRG; PAM sequence: AGG
aatttaataattttttatat

SEQ ID NO: 74696 - DNA, 20 bp, Artificial Sequence
  Description of Artificial Sequence: Synthetic oligonucleotide
  Target: LAMA2; (-) strand; PAM type: NRG; PAM sequence: TAG
gaatttaataattttttata

SEQ ID NO: 74697 - DNA, 20 bp, Artificial Sequence
  Description of Artificial Sequence: Synthetic oligonucleotide
  Target: LAMA2; (-) strand; PAM type: NRG; PAM sequence: CAG
acagaaatgtatatgatgat

SEQ ID NO: 74698 - DNA, 20 bp, Artificial Sequence
  Description of Artificial Sequence: Synthetic oligonucleotide
  Target: LAMA2; (-) strand; PAM type: NRG; PAM sequence: CAG
tatctctaatcctaatgtaa

SEQ ID NO: 74699 - DNA, 20 bp, Artificial Sequence
  Description of Artificial Sequence: Synthetic oligonucleotide
  Target: LAMA2; (-) strand; PAM type: NRG; PAM sequence: GAG
aaatataaaaacgtttctta

SEQ ID NO: 74700 - DNA, 20 bp, Artificial Sequence
  Description of Artificial Sequence: Synthetic oligonucleotide
  Target: LAMA2; (-) strand; PAM type: NRG; PAM sequence: TAG
taaaatataaaaacgtttct

SEQ ID NO: 74701 - DNA, 20 bp, Artificial Sequence
  Description of Artificial Sequence: Synthetic oligonucleotide
  Target: LAMA2; (-) strand; PAM type: NRG; PAM sequence: AAG
aaacacattttttgaggctg

SEQ ID NO: 74702 - DNA, 20 bp, Artificial Sequence
  Description of Artificial Sequence: Synthetic oligonucleotide
  Target: LAMA2; (-) strand; PAM type: NRG; PAM sequence: AGG
ttacataaacacattttttg

SEQ ID NO: 74703 - DNA, 20 bp, Artificial Sequence
  Description of Artificial Sequence: Synthetic oligonucleotide
  Target: LAMA2; (-) strand; PAM type: NRG; PAM sequence: GAG
tttacataaacacatttttt

SEQ ID NO: 74704 - DNA, 20 bp, Artificial Sequence
  Description of Artificial Sequence: Synthetic oligonucleotide
  Target: LAMA2; (-) strand; PAM type: NRG; PAM sequence: CAG
aaaaatgtacagctcactgc

SEQ ID NO: 74705 - DNA, 20 bp, Artificial Sequence
  Description of Artificial Sequence: Synthetic oligonucleotide
  Target: LAMA2; (-) strand; PAM type: NRG; PAM sequence: CAG
ccattaggaaaaaaaatgta

SEQ ID NO: 74706 - DNA, 20 bp, Artificial Sequence
  Description of Artificial Sequence: Synthetic oligonucleotide
  Target: LAMA2; (-) strand; PAM type: NRG; PAM sequence: AGG
cccataacccatgtcccatt

SEQ ID NO: 74707 - DNA, 20 bp, Artificial Sequence
  Description of Artificial Sequence: Synthetic oligonucleotide
  Target: LAMA2; (-) strand; PAM type: NRG; PAM sequence: TAG
acccataacccatgtcccat

SEQ ID NO: 74708 - DNA, 20 bp, Artificial Sequence
  Description of Artificial Sequence: Synthetic oligonucleotide
  Target: LAMA2; (-) strand; PAM type: NRG; PAM sequence: CAG
catgagccaccgtgcccggc

SEQ ID NO: 74709 - DNA, 20 bp, Artificial Sequence
  Description of Artificial Sequence: Synthetic oligonucleotide
  Target: LAMA2; (-) strand; PAM type: NRG; PAM sequence: CGG
caggcatgagccaccgtgcc

SEQ ID NO: 74710 - DNA, 20 bp, Artificial Sequence
  Description of Artificial Sequence: Synthetic oligonucleotide
  Target: LAMA2; (-) strand; PAM type: NRG; PAM sequence: GAG
agtgttgggattacaggcat

SEQ ID NO: 74711 - DNA, 20 bp, Artificial Sequence
  Description of Artificial Sequence: Synthetic oligonucleotide
  Target: LAMA2; (-) strand; PAM type: NRG; PAM sequence: AGG
tcacaaagtgttgggattac

SEQ ID NO: 74712 - DNA, 20 bp, Artificial Sequence
  Description of Artificial Sequence: Synthetic oligonucleotide
  Target: LAMA2; (-) strand; PAM type: NRG; PAM sequence: CAG
ctcacaaagtgttgggatta

SEQ ID NO: 74713 - DNA, 20 bp, Artificial Sequence
  Description of Artificial Sequence: Synthetic oligonucleotide
  Target: LAMA2; (-) strand; PAM type: NRG; PAM sequence: GGG
cctcagcctcacaaagtgtt

SEQ ID NO: 74714 - DNA, 20 bp, Artificial Sequence
  Description of Artificial Sequence: Synthetic oligonucleotide
  Target: LAMA2; (-) strand; PAM type: NRG; PAM sequence: TGG
gcctcagcctcacaaagtgt

SEQ ID NO: 74715 - DNA, 20 bp, Artificial Sequence
  Description of Artificial Sequence: Synthetic oligonucleotide
  Target: LAMA2; (-) strand; PAM type: NRG; PAM sequence: AAG
ccacttgcctcagcctcaca

SEQ ID NO: 74716 - DNA, 20 bp, Artificial Sequence
  Description of Artificial Sequence: Synthetic oligonucleotide
  Target: LAMA2; (-) strand; PAM type: NRG; PAM sequence: CAG
ctcaggtgatccacttgcct

SEQ ID NO: 74717 - DNA, 20 bp, Artificial Sequence
  Description of Artificial Sequence: Synthetic oligonucleotide
  Target: LAMA2; (-) strand; PAM type: NRG; PAM sequence: AGG
ggtctcaaactcctaacctc

SEQ ID NO: 74718 - DNA, 20 bp, Artificial Sequence
  Description of Artificial Sequence: Synthetic oligonucleotide
  Target: LAMA2; (-) strand; PAM type: NRG; PAM sequence: CAG
tggtctcaaactcctaacct

SEQ ID NO: 74719 - DNA, 20 bp, Artificial Sequence
  Description of Artificial Sequence: Synthetic oligonucleotide
  Target: LAMA2; (-) strand; PAM type: NRG; PAM sequence: TGG
tttcaccatattggtaaggc

SEQ ID NO: 74720 - DNA, 20 bp, Artificial Sequence
  Description of Artificial Sequence: Synthetic oligonucleotide
  Target: LAMA2; (-) strand; PAM type: NRG; PAM sequence: AGG
ggagtttcaccatattggta

SEQ ID NO: 74721 - DNA, 20 bp, Artificial Sequence
  Description of Artificial Sequence: Synthetic oligonucleotide
  Target: LAMA2; (-) strand; PAM type: NRG; PAM sequence: AAG
tggagtttcaccatattggt

SEQ ID NO: 74722 - DNA, 20 bp, Artificial Sequence
  Description of Artificial Sequence: Synthetic oligonucleotide
  Target: LAMA2; (-) strand; PAM type: NRG; PAM sequence: TGG
gagatggagtttcaccatat

SEQ ID NO: 74723 - DNA, 20 bp, Artificial Sequence
  Description of Artificial Sequence: Synthetic oligonucleotide
  Target: LAMA2; (-) strand; PAM type: NRG; PAM sequence: GAG
ttttgtatttagtagagatg

SEQ ID NO: 74724 - DNA, 20 bp, Artificial Sequence
  Description of Artificial Sequence: Synthetic oligonucleotide
  Target: LAMA2; (-) strand; PAM type: NRG; PAM sequence: TGG
ttttttgtatttagtagaga

SEQ ID NO: 74725 - DNA, 20 bp, Artificial Sequence
  Description of Artificial Sequence: Synthetic oligonucleotide
  Target: LAMA2; (-) strand; PAM type: NRG; PAM sequence: GAG
ttttttttttgtatttagta

SEQ ID NO: 74726 - DNA, 20 bp, Artificial Sequence
  Description of Artificial Sequence: Synthetic oligonucleotide
  Target: LAMA2; (-) strand; PAM type: NRG; PAM sequence: TAG
ttttttttttttgtatttag

SEQ ID NO: 74727 - DNA, 20 bp, Artificial Sequence
  Description of Artificial Sequence: Synthetic oligonucleotide
  Target: LAMA2; (-) strand; PAM type: NRG; PAM sequence: TAG
tttttttttttttttgtatt

SEQ ID NO: 74728 - DNA, 20 bp, Artificial Sequence
  Description of Artificial Sequence: Synthetic oligonucleotide
  Target: LAMA2; (-) strand; PAM type: NRG; PAM sequence: TGG
caggcaggtgccactgcgcc

SEQ ID NO: 74729 - DNA, 20 bp, Artificial Sequence
  Description of Artificial Sequence: Synthetic oligonucleotide
  Target: LAMA2; (-) strand; PAM type: NRG; PAM sequence: AGG
caagtagctggattacaggc

SEQ ID NO: 74730 - DNA, 20 bp, Artificial Sequence
  Description of Artificial Sequence: Synthetic oligonucleotide
  Target: LAMA2; (-) strand; PAM type: NRG; PAM sequence: CAG
ccaagtagctggattacagg

SEQ ID NO: 74731 - DNA, 20 bp, Artificial Sequence
  Description of Artificial Sequence: Synthetic oligonucleotide
  Target: LAMA2; (-) strand; PAM type: NRG; PAM sequence: AGG
ctcccaagtagctggattac

SEQ ID NO: 74732 - DNA, 20 bp, Artificial Sequence
  Description of Artificial Sequence: Synthetic oligonucleotide
  Target: LAMA2; (-) strand; PAM type: NRG; PAM sequence: CAG
cctcccaagtagctggatta

SEQ ID NO: 74733 - DNA, 20 bp, Artificial Sequence
  Description of Artificial Sequence: Synthetic oligonucleotide
  Target: LAMA2; (-) strand; PAM type: NRG; PAM sequence: TGG
gcctcagcctcccaagtagc

SEQ ID NO: 74734 - DNA, 20 bp, Artificial Sequence
  Description of Artificial Sequence: Synthetic oligonucleotide
  Target: LAMA2; (-) strand; PAM type: NRG; PAM sequence: TAG
tcctgcctcagcctcccaag

SEQ ID NO: 74735 - DNA, 20 bp, Artificial Sequence
  Description of Artificial Sequence: Synthetic oligonucleotide
  Target: LAMA2; (-) strand; PAM type: NRG; PAM sequence: AAG
ttctcctgcctcagcctccc

SEQ ID NO: 74736 - DNA, 20 bp, Artificial Sequence
  Description of Artificial Sequence: Synthetic oligonucleotide
  Target: LAMA2; (-) strand; PAM type: NRG; PAM sequence: CAG
ttcaagcaattctcctgcct

SEQ ID NO: 74737 - DNA, 20 bp, Artificial Sequence
  Description of Artificial Sequence: Synthetic oligonucleotide
  Target: LAMA2; (-) strand; PAM type: NRG; PAM sequence: AAG
aacctctgcctcccaggttc

SEQ ID NO: 74738 - DNA, 20 bp, Artificial Sequence
  Description of Artificial Sequence: Synthetic oligonucleotide
  Target: LAMA2; (-) strand; PAM type: NRG; PAM sequence: AGG
cactgcaacctctgcctccc

SEQ ID NO: 74739 - DNA, 20 bp, Artificial Sequence
  Description of Artificial Sequence: Synthetic oligonucleotide
  Target: LAMA2; (-) strand; PAM type: NRG; PAM sequence: CAG
tcactgcaacctctgcctcc

SEQ ID NO: 74740 - DNA, 20 bp, Artificial Sequence
  Description of Artificial Sequence: Synthetic oligonucleotide
  Target: LAMA2; (-) strand; PAM type: NRG; PAM sequence: TGG
ggagtgcaatggcgcaagct

SEQ ID NO: 74741 - DNA, 20 bp, Artificial Sequence
  Description of Artificial Sequence: Synthetic oligonucleotide
  Target: LAMA2; (-) strand; PAM type: NRG; PAM sequence: AAG
aggatggagtgcaatggcgc

SEQ ID NO: 74742 - DNA, 20 bp, Artificial Sequence
  Description of Artificial Sequence: Synthetic oligonucleotide
  Target: LAMA2; (-) strand; PAM type: NRG; PAM sequence: TGG
ttgtccaggatggagtgcaa

SEQ ID NO: 74743 - DNA, 20 bp, Artificial Sequence
  Description of Artificial Sequence: Synthetic oligonucleotide
  Target: LAMA2; (-) strand; PAM type: NRG; PAM sequence: GAG
ctgctctgttgtccaggatg

SEQ ID NO: 74744 - DNA, 20 bp, Artificial Sequence
  Description of Artificial Sequence: Synthetic oligonucleotide
  Target: LAMA2; (-) strand; PAM type: NRG; PAM sequence: TGG
tcctgctctgttgtccagga

SEQ ID NO: 74745 - DNA, 20 bp, Artificial Sequence
  Description of Artificial Sequence: Synthetic oligonucleotide
  Target: LAMA2; (-) strand; PAM type: NRG; PAM sequence: AGG
tgcgtcctgctctgttgtcc

SEQ ID NO: 74746 - DNA, 20 bp, Artificial Sequence
  Description of Artificial Sequence: Synthetic oligonucleotide
  Target: LAMA2; (-) strand; PAM type: NRG; PAM sequence: CAG
ctgcgtcctgctctgttgtc

SEQ ID NO: 74747 - DNA, 20 bp, Artificial Sequence
  Description of Artificial Sequence: Synthetic oligonucleotide
  Target: LAMA2; (-) strand; PAM type: NRG; PAM sequence: CAG
ttacactttttttttttttc

SEQ ID NO: 74748 - DNA, 20 bp, Artificial Sequence
  Description of Artificial Sequence: Synthetic oligonucleotide
  Target: LAMA2; (-) strand; PAM type: NRG; PAM sequence: TAG
cttgtggaggccagggcctc

SEQ ID NO: 74749 - DNA, 20 bp, Artificial Sequence
  Description of Artificial Sequence: Synthetic oligonucleotide
  Target: LAMA2; (-) strand; PAM type: NRG; PAM sequence: GGG
ttgtgggcttgtggaggcca

SEQ ID NO: 74750 - DNA, 20 bp, Artificial Sequence
  Description of Artificial Sequence: Synthetic oligonucleotide
  Target: LAMA2; (-) strand; PAM type: NRG; PAM sequence: AGG
attgtgggcttgtggaggcc

SEQ ID NO: 74751 - DNA, 20 bp, Artificial Sequence
  Description of Artificial Sequence: Synthetic oligonucleotide
  Target: LAMA2; (-) strand; PAM type: NRG; PAM sequence: CAG
aattgtgggcttgtggaggc

SEQ ID NO: 74752 - DNA, 20 bp, Artificial Sequence
  Description of Artificial Sequence: Synthetic oligonucleotide
  Target: LAMA2; (-) strand; PAM type: NRG; PAM sequence: AGG
actaaattgtgggcttgtgg

SEQ ID NO: 74753 - DNA, 20 bp, Artificial Sequence
  Description of Artificial Sequence: Synthetic oligonucleotide
  Target: LAMA2; (-) strand; PAM type: NRG; PAM sequence: GAG
aactaaattgtgggcttgtg

SEQ ID NO: 74754 - DNA, 20 bp, Artificial Sequence
  Description of Artificial Sequence: Synthetic oligonucleotide
  Target: LAMA2; (-) strand; PAM type: NRG; PAM sequence: TGG
ataactaaattgtgggcttg

SEQ ID NO: 74755 - DNA, 20 bp, Artificial Sequence
  Description of Artificial Sequence: Synthetic oligonucleotide
  Target: LAMA2; (-) strand; PAM type: NRG; PAM sequence: GGG
aagaagaataactaaattgt

SEQ ID NO: 74756 - DNA, 20 bp, Artificial Sequence
  Description of Artificial Sequence: Synthetic oligonucleotide
  Target: LAMA2; (-) strand; PAM type: NRG; PAM sequence: TGG
gaagaagaataactaaattg

SEQ ID NO: 74757 - DNA, 20 bp, Artificial Sequence
  Description of Artificial Sequence: Synthetic oligonucleotide
  Target: LAMA2; (-) strand; PAM type: NRG; PAM sequence: AAG
gtcttaaaatcataaagaag

SEQ ID NO: 74758 - DNA, 20 bp, Artificial Sequence
  Description of Artificial Sequence: Synthetic oligonucleotide
  Target: LAMA2; (-) strand; PAM type: NRG; PAM sequence: AAG
aaggtcttaaaatcataaag

SEQ ID NO: 74759 - DNA, 20 bp, Artificial Sequence
  Description of Artificial Sequence: Synthetic oligonucleotide
  Target: LAMA2; (-) strand; PAM type: NRG; PAM sequence: AAG
gacaaggtcttaaaatcata

SEQ ID NO: 74760 - DNA, 20 bp, Artificial Sequence
  Description of Artificial Sequence: Synthetic oligonucleotide
  Target: LAMA2; (-) strand; PAM type: NRG; PAM sequence: AGG
atcccaaagtattcctgaca

SEQ ID NO: 74761 - DNA, 20 bp, Artificial Sequence
  Description of Artificial Sequence: Synthetic oligonucleotide
  Target: LAMA2; (-) strand; PAM type: NRG; PAM sequence: AAG
aatcccaaagtattcctgac

SEQ ID NO: 74762 - DNA, 20 bp, Artificial Sequence
  Description of Artificial Sequence: Synthetic oligonucleotide
  Target: LAMA2; (-) strand; PAM type: NRG; PAM sequence: AAG
cctaactactgataatccca

SEQ ID NO: 74763 - DNA, 20 bp, Artificial Sequence
  Description of Artificial Sequence: Synthetic oligonucleotide
  Target: LAMA2; (-) strand; PAM type: NRG; PAM sequence: TGG
ctataaaatatgaaatatct

SEQ ID NO: 74764 - DNA, 20 bp, Artificial Sequence
  Description of Artificial Sequence: Synthetic oligonucleotide
  Target: LAMA2; (-) strand; PAM type: NRG; PAM sequence: GAG
tcttataaaatgcacagata

SEQ ID NO: 74765 - DNA, 20 bp, Artificial Sequence
  Description of Artificial Sequence: Synthetic oligonucleotide
  Target: LAMA2; (-) strand; PAM type: NRG; PAM sequence: TAG
aatcttataaaatgcacaga

SEQ ID NO: 74766 - DNA, 20 bp, Artificial Sequence
  Description of Artificial Sequence: Synthetic oligonucleotide
  Target: LAMA2; (-) strand; PAM type: NRG; PAM sequence: CAG
gattaatcttataaaatgca

SEQ ID NO: 74767 - DNA, 20 bp, Artificial Sequence
  Description of Artificial Sequence: Synthetic oligonucleotide
  Target: LAMA2; (-) strand; PAM type: NRG; PAM sequence: TGG
ttcaacaagaaacataccaa

SEQ ID NO: 74768 - DNA, 20 bp, Artificial Sequence
  Description of Artificial Sequence: Synthetic oligonucleotide
  Target: LAMA2; (-) strand; PAM type: NRG; PAM sequence: AAG
tctttatatagaaattcaac

SEQ ID NO: 74769 - DNA, 20 bp, Artificial Sequence
  Description of Artificial Sequence: Synthetic oligonucleotide
  Target: LAMA2; (-) strand; PAM type: NRG; PAM sequence: TAG
tcacgtagaatgtctttata

SEQ ID NO: 74770 - DNA, 20 bp, Artificial Sequence
  Description of Artificial Sequence: Synthetic oligonucleotide
  Target: LAMA2; (-) strand; PAM type: NRG; PAM sequence: TAG
atattgaacaactcatcacg

SEQ ID NO: 74771 - DNA, 20 bp, Artificial Sequence
  Description of Artificial Sequence: Synthetic oligonucleotide
  Target: LAMA2; (-) strand; PAM type: NRG; PAM sequence: CAG
ataaggaattgttttttaga

SEQ ID NO: 74772 - DNA, 20 bp, Artificial Sequence
  Description of Artificial Sequence: Synthetic oligonucleotide
  Target: LAMA2; (-) strand; PAM type: NRG; PAM sequence: TAG
attcataaggaattgttttt

SEQ ID NO: 74773 - DNA, 20 bp, Artificial Sequence
  Description of Artificial Sequence: Synthetic oligonucleotide
  Target: LAMA2; (-) strand; PAM type: NRG; PAM sequence: AGG
atttttaggtattattcata

SEQ ID NO: 74774 - DNA, 20 bp, Artificial Sequence
  Description of Artificial Sequence: Synthetic oligonucleotide
  Target: LAMA2; (-) strand; PAM type: NRG; PAM sequence: AAG
catttttaggtattattcat

SEQ ID NO: 74775 - DNA, 20 bp, Artificial Sequence
  Description of Artificial Sequence: Synthetic oligonucleotide
  Target: LAMA2; (-) strand; PAM type: NRG; PAM sequence: AGG
tttgctacttatgcattttt

SEQ ID NO: 74776 - DNA, 20 bp, Artificial Sequence
  Description of Artificial Sequence: Synthetic oligonucleotide
  Target: LAMA2; (-) strand; PAM type: NRG; PAM sequence: TAG
atttgctacttatgcatttt

SEQ ID NO: 74777 - DNA, 20 bp, Artificial Sequence
  Description of Artificial Sequence: Synthetic oligonucleotide
  Target: LAMA2; (-) strand; PAM type: NRG; PAM sequence: AAG
tgttacatcaaccactataa

SEQ ID NO: 74778 - DNA, 20 bp, Artificial Sequence
  Description of Artificial Sequence: Synthetic oligonucleotide
  Target: LAMA2; (-) strand; PAM type: NRG; PAM sequence: TAG
gggcaaaagtaggaacaaca

SEQ ID NO: 74779 - DNA, 20 bp, Artificial Sequence
  Description of Artificial Sequence: Synthetic oligonucleotide
  Target: LAMA2; (-) strand; PAM type: NRG; PAM sequence: AGG
aacagagaaagggcaaaagt

SEQ ID NO: 74780 - DNA, 20 bp, Artificial Sequence
  Description of Artificial Sequence: Synthetic oligonucleotide
  Target: LAMA2; (-) strand; PAM type: NRG; PAM sequence: TAG
taacagagaaagggcaaaag

SEQ ID NO: 74781 - DNA, 20 bp, Artificial Sequence
  Description of Artificial Sequence: Synthetic oligonucleotide
  Target: LAMA2; (-) strand; PAM type: NRG; PAM sequence: AAG
aagtaacagagaaagggcaa

SEQ ID NO: 74782 - DNA, 20 bp, Artificial Sequence
  Description of Artificial Sequence: Synthetic oligonucleotide
  Target: LAMA2; (-) strand; PAM type: NRG; PAM sequence: GGG
taaaataagtaacagagaaa

SEQ ID NO: 74783 - DNA, 20 bp, Artificial Sequence
  Description of Artificial Sequence: Synthetic oligonucleotide
  Target: LAMA2; (-) strand; PAM type: NRG; PAM sequence: AGG
gtaaaataagtaacagagaa

SEQ ID NO: 74784 - DNA, 20 bp, Artificial Sequence
  Description of Artificial Sequence: Synthetic oligonucleotide
  Target: LAMA2; (-) strand; PAM type: NRG; PAM sequence: AAG
agtaaaataagtaacagaga

SEQ ID NO: 74785 - DNA, 20 bp, Artificial Sequence
  Description of Artificial Sequence: Synthetic oligonucleotide
  Target: LAMA2; (-) strand; PAM type: NRG; PAM sequence: GAG
acaaagtaaaataagtaaca

SEQ ID NO: 74786 - DNA, 20 bp, Artificial Sequence
  Description of Artificial Sequence: Synthetic oligonucleotide
  Target: LAMA2; (-) strand; PAM type: NRG; PAM sequence: CAG
agacaaagtaaaataagtaa

SEQ ID NO: 74787 - DNA, 20 bp, Artificial Sequence
  Description of Artificial Sequence: Synthetic oligonucleotide
  Target: LAMA2; (-) strand; PAM type: NRG; PAM sequence: AAG
aaataaagacaaagtaaaat

SEQ ID NO: 74788 - DNA, 20 bp, Artificial Sequence
  Description of Artificial Sequence: Synthetic oligonucleotide
  Target: LAMA2; (-) strand; PAM type: NRG; PAM sequence: AAG
ttatctttaaaataaagaca

SEQ ID NO: 74789 - DNA, 20 bp, Artificial Sequence
  Description of Artificial Sequence: Synthetic oligonucleotide
  Target: LAMA2; (-) strand; PAM type: NRG; PAM sequence: AAG
ataaaattatctttaaaata

SEQ ID NO: 74790 - DNA, 20 bp, Artificial Sequence
  Description of Artificial Sequence: Synthetic oligonucleotide
  Target: LAMA2; (-) strand; PAM type: NRG; PAM sequence: AGG
ttaggagtcaagaaaagagg

SEQ ID NO: 74791 - DNA, 20 bp, Artificial Sequence
  Description of Artificial Sequence: Synthetic oligonucleotide
  Target: LAMA2; (-) strand; PAM type: NRG; PAM sequence: GAG
tttaggagtcaagaaaagag

SEQ ID NO: 74792 - DNA, 20 bp, Artificial Sequence
  Description of Artificial Sequence: Synthetic oligonucleotide
  Target: LAMA2; (-) strand; PAM type: NRG; PAM sequence: AGG
cctttaggagtcaagaaaag

SEQ ID NO: 74793 - DNA, 20 bp, Artificial Sequence
  Description of Artificial Sequence: Synthetic oligonucleotide
  Target: LAMA2; (-) strand; PAM type: NRG; PAM sequence: GAG
acctttaggagtcaagaaaa

SEQ ID NO: 74794 - DNA, 20 bp, Artificial Sequence
  Description of Artificial Sequence: Synthetic oligonucleotide
  Target: LAMA2; (-) strand; PAM type: NRG; PAM sequence: AAG
ccacctttaggagtcaagaa

SEQ ID NO: 74795 - DNA, 20 bp, Artificial Sequence
  Description of Artificial Sequence: Synthetic oligonucleotide
  Target: LAMA2; (-) strand; PAM type: NRG; PAM sequence: AAG
agctgccacctttaggagtc

SEQ ID NO: 74796 - DNA, 20 bp, Artificial Sequence
  Description of Artificial Sequence: Synthetic oligonucleotide
  Target: LAMA2; (-) strand; PAM type: NRG; PAM sequence: GAG
attaaagctgccacctttag

SEQ ID NO: 74797 - DNA, 20 bp, Artificial Sequence
  Description of Artificial Sequence: Synthetic oligonucleotide
  Target: LAMA2; (-) strand; PAM type: NRG; PAM sequence: AGG
atattaaagctgccaccttt

SEQ ID NO: 74798 - DNA, 20 bp, Artificial Sequence
  Description of Artificial Sequence: Synthetic oligonucleotide
  Target: LAMA2; (-) strand; PAM type: NRG; PAM sequence: TAG
catattaaagctgccacctt

SEQ ID NO: 74799 - DNA, 20 bp, Artificial Sequence
  Description of Artificial Sequence: Synthetic oligonucleotide
  Target: LAMA2; (-) strand; PAM type: NRG; PAM sequence: AAG
ggaattatgtgaacatatta

SEQ ID NO: 74800 - DNA, 20 bp, Artificial Sequence
  Description of Artificial Sequence: Synthetic oligonucleotide
  Target: LAMA2; (-) strand; PAM type: NRG; PAM sequence: AGG
atgccaagacattttgggag

SEQ ID NO: 74801 - DNA, 20 bp, Artificial Sequence
  Description of Artificial Sequence: Synthetic oligonucleotide
  Target: LAMA2; (-) strand; PAM type: NRG; PAM sequence: GAG
tatgccaagacattttggga

SEQ ID NO: 74802 - DNA, 20 bp, Artificial Sequence
  Description of Artificial Sequence: Synthetic oligonucleotide
  Target: LAMA2; (-) strand; PAM type: NRG; PAM sequence: GAG
aatatgccaagacattttgg

SEQ ID NO: 74803 - DNA, 20 bp, Artificial Sequence
  Description of Artificial Sequence: Synthetic oligonucleotide
  Target: LAMA2; (-) strand; PAM type: NRG; PAM sequence: GGG
tgaatatgccaagacatttt

SEQ ID NO: 74804 - DNA, 20 bp, Artificial Sequence
  Description of Artificial Sequence: Synthetic oligonucleotide
  Target: LAMA2; (-) strand; PAM type: NRG; PAM sequence: TGG
ttgaatatgccaagacattt

SEQ ID NO: 74805 - DNA, 20 bp, Artificial Sequence
  Description of Artificial Sequence: Synthetic oligonucleotide
  Target: LAMA2; (-) strand; PAM type: NRG; PAM sequence: AAG
tgtaactgcttgaatatgcc

SEQ ID NO: 74806 - DNA, 20 bp, Artificial Sequence
  Description of Artificial Sequence: Synthetic oligonucleotide
  Target: LAMA2; (-) strand; PAM type: NRG; PAM sequence: TAG
tagataggtataactgcaga

SEQ ID NO: 74807 - DNA, 20 bp, Artificial Sequence
  Description of Artificial Sequence: Synthetic oligonucleotide
  Target: LAMA2; (-) strand; PAM type: NRG; PAM sequence: CAG
catatagataggtataactg

SEQ ID NO: 74808 - DNA, 20 bp, Artificial Sequence
  Description of Artificial Sequence: Synthetic oligonucleotide
  Target: LAMA2; (-) strand; PAM type: NRG; PAM sequence: AGG
atttacaaaggcatatagat

SEQ ID NO: 74809 - DNA, 20 bp, Artificial Sequence
  Description of Artificial Sequence: Synthetic oligonucleotide
  Target: LAMA2; (-) strand; PAM type: NRG; PAM sequence: TAG
tatttacaaaggcatataga

SEQ ID NO: 74810 - DNA, 20 bp, Artificial Sequence
  Description of Artificial Sequence: Synthetic oligonucleotide
  Target: LAMA2; (-) strand; PAM type: NRG; PAM sequence: TAG
tttatatttacaaaggcata

SEQ ID NO: 74811 - DNA, 20 bp, Artificial Sequence
  Description of Artificial Sequence: Synthetic oligonucleotide
  Target: LAMA2; (-) strand; PAM type: NRG; PAM sequence: AGG
tgatgaatttatatttacaa

SEQ ID NO: 74812 - DNA, 20 bp, Artificial Sequence
  Description of Artificial Sequence: Synthetic oligonucleotide
  Target: LAMA2; (-) strand; PAM type: NRG; PAM sequence: AAG
ctgatgaatttatatttaca

SEQ ID NO: 74813 - DNA, 20 bp, Artificial Sequence
  Description of Artificial Sequence: Synthetic oligonucleotide
  Target: LAMA2; (-) strand; PAM type: NRG; PAM sequence: GAG
tattgagtatcactgcaggt

SEQ ID NO: 74814 - DNA, 20 bp, Artificial Sequence
  Description of Artificial Sequence: Synthetic oligonucleotide
  Target: LAMA2; (-) strand; PAM type: NRG; PAM sequence: AGG
gttttattgagtatcactgc

SEQ ID NO: 74815 - DNA, 20 bp, Artificial Sequence
  Description of Artificial Sequence: Synthetic oligonucleotide
  Target: LAMA2; (-) strand; PAM type: NRG; PAM sequence: CAG
tgttttattgagtatcactg

SEQ ID NO: 74816 - DNA, 20 bp, Artificial Sequence
  Description of Artificial Sequence: Synthetic oligonucleotide
  Target: LAMA2; (-) strand; PAM type: NRG; PAM sequence: GAG
tttgagcattctgttttatt

SEQ ID NO: 74817 - DNA, 20 bp, Artificial Sequence
  Description of Artificial Sequence: Synthetic oligonucleotide
  Target: LAMA2; (-) strand; PAM type: NRG; PAM sequence: GAG
tcctgaggggtctgggcttt

SEQ ID NO: 74818 - DNA, 20 bp, Artificial Sequence
  Description of Artificial Sequence: Synthetic oligonucleotide
  Target: LAMA2; (-) strand; PAM type: NRG; PAM sequence: GGG
atatttgtcctgaggggtct

SEQ ID NO: 74819 - DNA, 20 bp, Artificial Sequence
  Description of Artificial Sequence: Synthetic oligonucleotide
  Target: LAMA2; (-) strand; PAM type: NRG; PAM sequence: TGG
gatatttgtcctgaggggtc

SEQ ID NO: 74820 - DNA, 20 bp, Artificial Sequence
  Description of Artificial Sequence: Synthetic oligonucleotide
  Target: LAMA2; (-) strand; PAM type: NRG; PAM sequence: GGG
gccaagatatttgtcctgag

SEQ ID NO: 74821 - DNA, 20 bp, Artificial Sequence
  Description of Artificial Sequence: Synthetic oligonucleotide
  Target: LAMA2; (-) strand; PAM type: NRG; PAM sequence: GGG
agccaagatatttgtcctga

SEQ ID NO: 74822 - DNA, 20 bp, Artificial Sequence
  Description of Artificial Sequence: Synthetic oligonucleotide
  Target: LAMA2; (-) strand; PAM type: NRG; PAM sequence: AGG
cagccaagatatttgtcctg

SEQ ID NO: 74823 - DNA, 20 bp, Artificial Sequence
  Description of Artificial Sequence: Synthetic oligonucleotide
  Target: LAMA2; (-) strand; PAM type: NRG; PAM sequence: GAG
acagccaagatatttgtcct

SEQ ID NO: 74824 - DNA, 20 bp, Artificial Sequence
  Description of Artificial Sequence: Synthetic oligonucleotide
  Target: LAMA2; (-) strand; PAM type: NRG; PAM sequence: AAG
ccagcatagcaaggacagcc

SEQ ID NO: 74825 - DNA, 20 bp, Artificial Sequence
  Description of Artificial Sequence: Synthetic oligonucleotide
  Target: LAMA2; (-) strand; PAM type: NRG; PAM sequence: CAG
tgaccccagcatagcaagga

SEQ ID NO: 74826 - DNA, 20 bp, Artificial Sequence
  Description of Artificial Sequence: Synthetic oligonucleotide
  Target: LAMA2; (-) strand; PAM type: NRG; PAM sequence: AGG
tgattgaccccagcatagca

SEQ ID NO: 74827 - DNA, 20 bp, Artificial Sequence
  Description of Artificial Sequence: Synthetic oligonucleotide
  Target: LAMA2; (-) strand; PAM type: NRG; PAM sequence: AAG
ctgattgaccccagcatagc

SEQ ID NO: 74828 - DNA, 20 bp, Artificial Sequence
  Description of Artificial Sequence: Synthetic oligonucleotide
  Target: LAMA2; (-) strand; PAM type: NRG; PAM sequence: TAG
ccatctgattgaccccagca

SEQ ID NO: 74829 - DNA, 20 bp, Artificial Sequence
  Description of Artificial Sequence: Synthetic oligonucleotide
  Target: LAMA2; (-) strand; PAM type: NRG; PAM sequence: CAG
tgagaccatctgattgaccc

SEQ ID NO: 74830 - DNA, 20 bp, Artificial Sequence
  Description of Artificial Sequence: Synthetic oligonucleotide
  Target: LAMA2; (-) strand; PAM type: NRG; PAM sequence: GAG
ccaaatgcctcctctcccct

SEQ ID NO: 74831 - DNA, 20 bp, Artificial Sequence
  Description of Artificial Sequence: Synthetic oligonucleotide
  Target: LAMA2; (-) strand; PAM type: NRG; PAM sequence: TGG
cacagttgtggaacaactag

SEQ ID NO: 74832 - DNA, 20 bp, Artificial Sequence
  Description of Artificial Sequence: Synthetic oligonucleotide
  Target: LAMA2; (-) strand; PAM type: NRG; PAM sequence: TAG
aggcacagttgtggaacaac

SEQ ID NO: 74833 - DNA, 20 bp, Artificial Sequence
  Description of Artificial Sequence: Synthetic oligonucleotide
  Target: LAMA2; (-) strand; PAM type: NRG; PAM sequence: TGG
tagccttttaggcacagttg

SEQ ID NO: 74834 - DNA, 20 bp, Artificial Sequence
  Description of Artificial Sequence: Synthetic oligonucleotide
  Target: LAMA2; (-) strand; PAM type: NRG; PAM sequence: CAG
tagtattagccttttaggca

SEQ ID NO: 74835 - DNA, 20 bp, Artificial Sequence
  Description of Artificial Sequence: Synthetic oligonucleotide
  Target: LAMA2; (-) strand; PAM type: NRG; PAM sequence: AGG
agggttagtattagcctttt

SEQ ID NO: 74836 - DNA, 20 bp, Artificial Sequence
  Description of Artificial Sequence: Synthetic oligonucleotide
  Target: LAMA2; (-) strand; PAM type: NRG; PAM sequence: TAG
tagggttagtattagccttt

SEQ ID NO: 74837 - DNA, 20 bp, Artificial Sequence
  Description of Artificial Sequence: Synthetic oligonucleotide
  Target: LAMA2; (-) strand; PAM type: NRG; PAM sequence: TAG
agtcaaagtagggttagtat

SEQ ID NO: 74838 - DNA, 20 bp, Artificial Sequence
  Description of Artificial Sequence: Synthetic oligonucleotide
  Target: LAMA2; (-) strand; PAM type: NRG; PAM sequence: TAG
cgaatgagtcaaagtagggt

SEQ ID NO: 74839 - DNA, 20 bp, Artificial Sequence
  Description of Artificial Sequence: Synthetic oligonucleotide
  Target: LAMA2; (-) strand; PAM type: NRG; PAM sequence: GGG
ccatcgaatgagtcaaagta

SEQ ID NO: 74840 - DNA, 20 bp, Artificial Sequence
  Description of Artificial Sequence: Synthetic oligonucleotide
  Target: LAMA2; (-) strand; PAM type: NRG; PAM sequence: AGG
cccatcgaatgagtcaaagt

SEQ ID NO: 74841 - DNA, 20 bp, Artificial Sequence
  Description of Artificial Sequence: Synthetic oligonucleotide
  Target: LAMA2; (-) strand; PAM type: NRG; PAM sequence: TAG
acccatcgaatgagtcaaag

SEQ ID NO: 74842 - DNA, 20 bp, Artificial Sequence
  Description of Artificial Sequence: Synthetic oligonucleotide
  Target: LAMA2; (-) strand; PAM type: NRG; PAM sequence: AAG
atcacccatcgaatgagtca

SEQ ID NO: 74843 - DNA, 20 bp, Artificial Sequence
  Description of Artificial Sequence: Synthetic oligonucleotide
  Target: LAMA2; (-) strand; PAM type: NRG; PAM sequence: GAG
ggggaaatcacccatcgaat

SEQ ID NO: 74844 - DNA, 20 bp, Artificial Sequence
  Description of Artificial Sequence: Synthetic oligonucleotide
  Target: LAMA2; (-) strand; PAM type: NRG; PAM sequence: GGG
catgcttgagagccatggag

SEQ ID NO: 74845 - DNA, 20 bp, Artificial Sequence
  Description of Artificial Sequence: Synthetic oligonucleotide
  Target: LAMA2; (-) strand; PAM type: NRG; PAM sequence: GGG
gcatgcttgagagccatgga

SEQ ID NO: 74846 - DNA, 20 bp, Artificial Sequence
  Description of Artificial Sequence: Synthetic oligonucleotide
  Target: LAMA2; (-) strand; PAM type: NRG; PAM sequence: AGG
tgcatgcttgagagccatgg

SEQ ID NO: 74847 - DNA, 20 bp, Artificial Sequence
  Description of Artificial Sequence: Synthetic oligonucleotide
  Target: LAMA2; (-) strand; PAM type: NRG; PAM sequence: GAG
atgcatgcttgagagccatg

SEQ ID NO: 74848 - DNA, 20 bp, Artificial Sequence
  Description of Artificial Sequence: Synthetic oligonucleotide
  Target: LAMA2; (-) strand; PAM type: NRG; PAM sequence: TGG
gcatgcatgcttgagagcca

SEQ ID NO: 74849 - DNA, 20 bp, Artificial Sequence
  Description of Artificial Sequence: Synthetic oligonucleotide
  Target: LAMA2; (-) strand; PAM type: NRG; PAM sequence: GAG
ttgaatgcatgcatgcttga

SEQ ID NO: 74850 - DNA, 20 bp, Artificial Sequence
  Description of Artificial Sequence: Synthetic oligonucleotide
  Target: LAMA2; (-) strand; PAM type: NRG; PAM sequence: GAG
acttgaatgcatgcatgctt

SEQ ID NO: 74851 - DNA, 20 bp, Artificial Sequence
  Description of Artificial Sequence: Synthetic oligonucleotide
  Target: LAMA2; (-) strand; PAM type: NRG; PAM sequence: AAG
ggctctgatgctattccttc

SEQ ID NO: 74852 - DNA, 20 bp, Artificial Sequence
  Description of Artificial Sequence: Synthetic oligonucleotide
  Target: LAMA2; (-) strand; PAM type: NRG; PAM sequence: TGG
atggaatgcggtaatacagg

SEQ ID NO: 74853 - DNA, 20 bp, Artificial Sequence
  Description of Artificial Sequence: Synthetic oligonucleotide
  Target: LAMA2; (-) strand; PAM type: NRG; PAM sequence: AGG
ggtatggaatgcggtaatac

SEQ ID NO: 74854 - DNA, 20 bp, Artificial Sequence
  Description of Artificial Sequence: Synthetic oligonucleotide
  Target: LAMA2; (-) strand; PAM type: NRG; PAM sequence: CAG
tggtatggaatgcggtaata

SEQ ID NO: 74855 - DNA, 20 bp, Artificial Sequence
  Description of Artificial Sequence: Synthetic oligonucleotide
  Target: LAMA2; (-) strand; PAM type: NRG; PAM sequence: CGG
taaaaatttggtatggaatg

SEQ ID NO: 74856 - DNA, 20 bp, Artificial Sequence
  Description of Artificial Sequence: Synthetic oligonucleotide
  Target: LAMA2; (-) strand; PAM type: NRG; PAM sequence: TGG
aaaaatataaaaatttggta

SEQ ID NO: 74857 - DNA, 20 bp, Artificial Sequence
  Description of Artificial Sequence: Synthetic oligonucleotide
  Target: LAMA2; (-) strand; PAM type: NRG; PAM sequence: TGG
gatttaaaaatataaaaatt

SEQ ID NO: 74858 - DNA, 20 bp, Artificial Sequence
  Description of Artificial Sequence: Synthetic oligonucleotide
  Target: LAMA2; (-) strand; PAM type: NRG; PAM sequence: TAG
tatggtataccctaagggac

SEQ ID NO: 74859 - DNA, 20 bp, Artificial Sequence
  Description of Artificial Sequence: Synthetic oligonucleotide
  Target: LAMA2; (-) strand; PAM type: NRG; PAM sequence: GGG
ggatctatggtataccctaa

SEQ ID NO: 74860 - DNA, 20 bp, Artificial Sequence
  Description of Artificial Sequence: Synthetic oligonucleotide
  Target: LAMA2; (-) strand; PAM type: NRG; PAM sequence: AGG
aggatctatggtatacccta

SEQ ID NO: 74861 - DNA, 20 bp, Artificial Sequence
  Description of Artificial Sequence: Synthetic oligonucleotide
  Target: LAMA2; (-) strand; PAM type: NRG; PAM sequence: AAG
taggatctatggtataccct

SEQ ID NO: 74862 - DNA, 20 bp, Artificial Sequence
  Description of Artificial Sequence: Synthetic oligonucleotide
  Target: LAMA2; (-) strand; PAM type: NRG; PAM sequence: TGG
gcatacgtgtataggatcta

SEQ ID NO: 74863 - DNA, 20 bp, Artificial Sequence
  Description of Artificial Sequence: Synthetic oligonucleotide
  Target: LAMA2; (-) strand; PAM type: NRG; PAM sequence: AGG
taactcatgcatacgtgtat

SEQ ID NO: 74864 - DNA, 20 bp, Artificial Sequence
  Description of Artificial Sequence: Synthetic oligonucleotide
  Target: LAMA2; (-) strand; PAM type: NRG; PAM sequence: TAG
gtaactcatgcatacgtgta

SEQ ID NO: 74865 - DNA, 20 bp, Artificial Sequence
  Description of Artificial Sequence: Synthetic oligonucleotide
  Target: LAMA2; (-) strand; PAM type: NRG; PAM sequence: TGG
tctgcttcatagttttgaca

SEQ ID NO: 74866 - DNA, 20 bp, Artificial Sequence
  Description of Artificial Sequence: Synthetic oligonucleotide
  Target: LAMA2; (-) strand; PAM type: NRG; PAM sequence: TAG
aacaaattttatctgcttca

SEQ ID NO: 74867 - DNA, 20 bp, Artificial Sequence
  Description of Artificial Sequence: Synthetic oligonucleotide
  Target: LAMA2; (-) strand; PAM type: NRG; PAM sequence: TAG
gaatcctgaaagggatgctc

SEQ ID NO: 74868 - DNA, 20 bp, Artificial Sequence
  Description of Artificial Sequence: Synthetic oligonucleotide
  Target: LAMA2; (-) strand; PAM type: NRG; PAM sequence: GGG
ctacagagggaatcctgaaa

SEQ ID NO: 74869 - DNA, 20 bp, Artificial Sequence
  Description of Artificial Sequence: Synthetic oligonucleotide
  Target: LAMA2; (-) strand; PAM type: NRG; PAM sequence: AGG
gctacagagggaatcctgaa

SEQ ID NO: 74870 - DNA, 20 bp, Artificial Sequence
  Description of Artificial Sequence: Synthetic oligonucleotide
  Target: LAMA2; (-) strand; PAM type: NRG; PAM sequence: AAG
agctacagagggaatcctga

SEQ ID NO: 74871 - DNA, 20 bp, Artificial Sequence
  Description of Artificial Sequence: Synthetic oligonucleotide
  Target: LAMA2; (-) strand; PAM type: NRG; PAM sequence: GGG
caggactgctgagctacaga

SEQ ID NO: 74872 - DNA, 20 bp, Artificial Sequence
  Description of Artificial Sequence: Synthetic oligonucleotide
  Target: LAMA2; (-) strand; PAM type: NRG; PAM sequence: AGG
acaggactgctgagctacag

SEQ ID NO: 74873 - DNA, 20 bp, Artificial Sequence
  Description of Artificial Sequence: Synthetic oligonucleotide
  Target: LAMA2; (-) strand; PAM type: NRG; PAM sequence: GAG
aacaggactgctgagctaca

SEQ ID NO: 74874 - DNA, 20 bp, Artificial Sequence
  Description of Artificial Sequence: Synthetic oligonucleotide
  Target: LAMA2; (-) strand; PAM type: NRG; PAM sequence: CAG
ttaacaggactgctgagcta

SEQ ID NO: 74875 - DNA, 20 bp, Artificial Sequence
  Description of Artificial Sequence: Synthetic oligonucleotide
  Target: LAMA2; (-) strand; PAM type: NRG; PAM sequence: GAG
atgtgattaacaggactgct

SEQ ID NO: 74876 - DNA, 20 bp, Artificial Sequence
  Description of Artificial Sequence: Synthetic oligonucleotide
  Target: LAMA2; (-) strand; PAM type: NRG; PAM sequence: AGG
ctcactacaatgtgattaac

SEQ ID NO: 74877 - DNA, 20 bp, Artificial Sequence
  Description of Artificial Sequence: Synthetic oligonucleotide
  Target: LAMA2; (-) strand; PAM type: NRG; PAM sequence: CAG
gctcactacaatgtgattaa

SEQ ID NO: 74878 - DNA, 20 bp, Artificial Sequence
  Description of Artificial Sequence: Synthetic oligonucleotide
  Target: LAMA2; (-) strand; PAM type: NRG; PAM sequence: AGG
tggggcacaattgggaggac

SEQ ID NO: 74879 - DNA, 20 bp, Artificial Sequence
  Description of Artificial Sequence: Synthetic oligonucleotide
  Target: LAMA2; (-) strand; PAM type: NRG; PAM sequence: CAG
gtggggcacaattgggagga

SEQ ID NO: 74880 - DNA, 20 bp, Artificial Sequence
  Description of Artificial Sequence: Synthetic oligonucleotide
  Target: LAMA2; (-) strand; PAM type: NRG; PAM sequence: AGG
actggtggggcacaattggg

SEQ ID NO: 74881 - DNA, 20 bp, Artificial Sequence
  Description of Artificial Sequence: Synthetic oligonucleotide
  Target: LAMA2; (-) strand; PAM type: NRG; PAM sequence: GAG
cactggtggggcacaattgg

SEQ ID NO: 74882 - DNA, 20 bp, Artificial Sequence
  Description of Artificial Sequence: Synthetic oligonucleotide
  Target: LAMA2; (-) strand; PAM type: NRG; PAM sequence: GGG
gtcactggtggggcacaatt

SEQ ID NO: 74883 - DNA, 20 bp, Artificial Sequence
  Description of Artificial Sequence: Synthetic oligonucleotide
  Target: LAMA2; (-) strand; PAM type: NRG; PAM sequence: TGG
ggtcactggtggggcacaat

SEQ ID NO: 74884 - DNA, 20 bp, Artificial Sequence
  Description of Artificial Sequence: Synthetic oligonucleotide
  Target: LAMA2; (-) strand; PAM type: NRG; PAM sequence: GGG
agtggatgaggtcactggtg

SEQ ID NO: 74885 - DNA, 20 bp, Artificial Sequence
  Description of Artificial Sequence: Synthetic oligonucleotide
  Target: LAMA2; (-) strand; PAM type: NRG; PAM sequence: GGG
aagtggatgaggtcactggt

SEQ ID NO: 74886 - DNA, 20 bp, Artificial Sequence
  Description of Artificial Sequence: Synthetic oligonucleotide
  Target: LAMA2; (-) strand; PAM type: NRG; PAM sequence: TGG
taagtggatgaggtcactgg

SEQ ID NO: 74887 - DNA, 20 bp, Artificial Sequence
  Description of Artificial Sequence: Synthetic oligonucleotide
  Target: LAMA2; (-) strand; PAM type: NRG; PAM sequence: TGG
ctctaagtggatgaggtcac

SEQ ID NO: 74888 - DNA, 20 bp, Artificial Sequence
  Description of Artificial Sequence: Synthetic oligonucleotide
  Target: LAMA2; (-) strand; PAM type: NRG; PAM sequence: AGG
ctctaagctctaagtggatg

SEQ ID NO: 74889 - DNA, 20 bp, Artificial Sequence
  Description of Artificial Sequence: Synthetic oligonucleotide
  Target: LAMA2; (-) strand; PAM type: NRG; PAM sequence: GAG
gctctaagctctaagtggat

SEQ ID NO: 74890 - DNA, 20 bp, Artificial Sequence
  Description of Artificial Sequence: Synthetic oligonucleotide
  Target: LAMA2; (-) strand; PAM type: NRG; PAM sequence: TGG
tggcagctctaagctctaag

SEQ ID NO: 74891 - DNA, 20 bp, Artificial Sequence
  Description of Artificial Sequence: Synthetic oligonucleotide
  Target: LAMA2; (-) strand; PAM type: NRG; PAM sequence: AAG
gcttggcagctctaagctct

SEQ ID NO: 74892 - DNA, 20 bp, Artificial Sequence
  Description of Artificial Sequence: Synthetic oligonucleotide
  Target: LAMA2; (-) strand; PAM type: NRG; PAM sequence: AAG
tatgagagcttggcagctct

SEQ ID NO: 74893 - DNA, 20 bp, Artificial Sequence
  Description of Artificial Sequence: Synthetic oligonucleotide
  Target: LAMA2; (-) strand; PAM type: NRG; PAM sequence: CAG
tatgaggtatgagagcttgg

SEQ ID NO: 74894 - DNA, 20 bp, Artificial Sequence
  Description of Artificial Sequence: Synthetic oligonucleotide
  Target: LAMA2; (-) strand; PAM type: NRG; PAM sequence: TGG
tgctatgaggtatgagagct

SEQ ID NO: 74895 - DNA, 20 bp, Artificial Sequence
  Description of Artificial Sequence: Synthetic oligonucleotide
  Target: LAMA2; (-) strand; PAM type: NRG; PAM sequence: GAG
gtaaatgctatgaggtatga

SEQ ID NO: 74896 - DNA, 20 bp, Artificial Sequence
  Description of Artificial Sequence: Synthetic oligonucleotide
  Target: LAMA2; (-) strand; PAM type: NRG; PAM sequence: GAG
tagtaaatgctatgaggtat

SEQ ID NO: 74897 - DNA, 20 bp, Artificial Sequence
  Description of Artificial Sequence: Synthetic oligonucleotide
  Target: LAMA2; (-) strand; PAM type: NRG; PAM sequence: AGG
cttgactagtaaatgctatg

SEQ ID NO: 74898 - DNA, 20 bp, Artificial Sequence
  Description of Artificial Sequence: Synthetic oligonucleotide
  Target: LAMA2; (-) strand; PAM type: NRG; PAM sequence: GAG
tcttgactagtaaatgctat

SEQ ID NO: 74899 - DNA, 20 bp, Artificial Sequence
  Description of Artificial Sequence: Synthetic oligonucleotide
  Target: LAMA2; (-) strand; PAM type: NRG; PAM sequence: TAG
cagtatgatatgttcttgac

SEQ ID NO: 74900 - DNA, 20 bp, Artificial Sequence
  Description of Artificial Sequence: Synthetic oligonucleotide
  Target: LAMA2; (-) strand; PAM type: NRG; PAM sequence: CAG
aaagtgctataataataaaa

SEQ ID NO: 74901 - DNA, 20 bp, Artificial Sequence
  Description of Artificial Sequence: Synthetic oligonucleotide
  Target: LAMA2; (-) strand; PAM type: NRG; PAM sequence: AAG
gtaataatgagacaaatgaa

SEQ ID NO: 74902 - DNA, 20 bp, Artificial Sequence
  Description of Artificial Sequence: Synthetic oligonucleotide
  Target: LAMA2; (-) strand; PAM type: NRG; PAM sequence: GAG
tgttaatatattgtaataat

SEQ ID NO: 74903 - DNA, 20 bp, Artificial Sequence
  Description of Artificial Sequence: Synthetic oligonucleotide
  Target: LAMA2; (-) strand; PAM type: NRG; PAM sequence: TAG
gtagaaagacagatatgaat

SEQ ID NO: 74904 - DNA, 20 bp, Artificial Sequence
  Description of Artificial Sequence: Synthetic oligonucleotide
  Target: LAMA2; (-) strand; PAM type: NRG; PAM sequence: CAG
caatgttctaggtagaaaga

SEQ ID NO: 74905 - DNA, 20 bp, Artificial Sequence
  Description of Artificial Sequence: Synthetic oligonucleotide
  Target: LAMA2; (-) strand; PAM type: NRG; PAM sequence: AAG
tgtacaatgttctaggtaga

SEQ ID NO: 74906 - DNA, 20 bp, Artificial Sequence
  Description of Artificial Sequence: Synthetic oligonucleotide
  Target: LAMA2; (-) strand; PAM type: NRG; PAM sequence: TAG
tttatgtacaatgttctagg

SEQ ID NO: 74907 - DNA, 20 bp, Artificial Sequence
  Description of Artificial Sequence: Synthetic oligonucleotide
  Target: LAMA2; (-) strand; PAM type: NRG; PAM sequence: AGG
acatttatgtacaatgttct

SEQ ID NO: 74908 - DNA, 20 bp, Artificial Sequence
  Description of Artificial Sequence: Synthetic oligonucleotide
  Target: LAMA2; (-) strand; PAM type: NRG; PAM sequence: TAG
gacatttatgtacaatgttc

SEQ ID NO: 74909 - DNA, 20 bp, Artificial Sequence
  Description of Artificial Sequence: Synthetic oligonucleotide
  Target: LAMA2; (-) strand; PAM type: NRG; PAM sequence: TGG
agaatagtgaagaaacatta

SEQ ID NO: 74910 - DNA, 20 bp, Artificial Sequence
  Description of Artificial Sequence: Synthetic oligonucleotide
  Target: LAMA2; (-) strand; PAM type: NRG; PAM sequence: AAG
tgtagtccaaaagaatagtg

SEQ ID NO: 74911 - DNA, 20 bp, Artificial Sequence
  Description of Artificial Sequence: Synthetic oligonucleotide
  Target: LAMA2; (-) strand; PAM type: NRG; PAM sequence: TAG
accaatgtagtccaaaagaa

SEQ ID NO: 74912 - DNA, 20 bp, Artificial Sequence
  Description of Artificial Sequence: Synthetic oligonucleotide
  Target: LAMA2; (-) strand; PAM type: NRG; PAM sequence: AAG
tctttaccaatgtagtccaa

SEQ ID NO: 74913 - DNA, 20 bp, Artificial Sequence
  Description of Artificial Sequence: Synthetic oligonucleotide
  Target: LAMA2; (-) strand; PAM type: NRG; PAM sequence: TAG
tatctgtgtctttaccaatg

SEQ ID NO: 74914 - DNA, 20 bp, Artificial Sequence
  Description of Artificial Sequence: Synthetic oligonucleotide
  Target: LAMA2; (-) strand; PAM type: NRG; PAM sequence: TAG
atattctagatgttttgtgg

SEQ ID NO: 74915 - DNA, 20 bp, Artificial Sequence
  Description of Artificial Sequence: Synthetic oligonucleotide
  Target: LAMA2; (-) strand; PAM type: NRG; PAM sequence: TGG
gaaatattctagatgttttg

SEQ ID NO: 74916 - DNA, 20 bp, Artificial Sequence
  Description of Artificial Sequence: Synthetic oligonucleotide
  Target: LAMA2; (-) strand; PAM type: NRG; PAM sequence: TAG
acgtaaaaaaagaaatattc

SEQ ID NO: 74917 - DNA, 20 bp, Artificial Sequence
  Description of Artificial Sequence: Synthetic oligonucleotide
  Target: LAMA2; (-) strand; PAM type: NRG; PAM sequence: AAG
agaatttgaagacgtaaaaa

SEQ ID NO: 74918 - DNA, 20 bp, Artificial Sequence
  Description of Artificial Sequence: Synthetic oligonucleotide
  Target: LAMA2; (-) strand; PAM type: NRG; PAM sequence: AAG
acaaatttatatagaatttg

SEQ ID NO: 74919 - DNA, 20 bp, Artificial Sequence
  Description of Artificial Sequence: Synthetic oligonucleotide
  Target: LAMA2; (-) strand; PAM type: NRG; PAM sequence: TAG
gctctatttacaaatttata

SEQ ID NO: 74920 - DNA, 20 bp, Artificial Sequence
  Description of Artificial Sequence: Synthetic oligonucleotide
  Target: LAMA2; (-) strand; PAM type: NRG; PAM sequence: TGG
agtgacaatggagaggaatg

SEQ ID NO: 74921 - DNA, 20 bp, Artificial Sequence
  Description of Artificial Sequence: Synthetic oligonucleotide
  Target: LAMA2; (-) strand; PAM type: NRG; PAM sequence: AGG
ttaacagagtgacaatggag

SEQ ID NO: 74922 - DNA, 20 bp, Artificial Sequence
  Description of Artificial Sequence: Synthetic oligonucleotide
  Target: LAMA2; (-) strand; PAM type: NRG; PAM sequence: GAG
gttaacagagtgacaatgga

SEQ ID NO: 74923 - DNA, 20 bp, Artificial Sequence
  Description of Artificial Sequence: Synthetic oligonucleotide
  Target: LAMA2; (-) strand; PAM type: NRG; PAM sequence: GAG
ctgttaacagagtgacaatg

SEQ ID NO: 74924 - DNA, 20 bp, Artificial Sequence
  Description of Artificial Sequence: Synthetic oligonucleotide
  Target: LAMA2; (-) strand; PAM type: NRG; PAM sequence: TGG
tactgttaacagagtgacaa

SEQ ID NO: 74925 - DNA, 20 bp, Artificial Sequence
  Description of Artificial Sequence: Synthetic oligonucleotide
  Target: LAMA2; (-) strand; PAM type: NRG; PAM sequence: GAG
aggtattgttactgttaaca

SEQ ID NO: 74926 - DNA, 20 bp, Artificial Sequence
  Description of Artificial Sequence: Synthetic oligonucleotide
  Target: LAMA2; (-) strand; PAM type: NRG; PAM sequence: CAG
agaggtattgttactgttaa

SEQ ID NO: 74927 - DNA, 20 bp, Artificial Sequence
  Description of Artificial Sequence: Synthetic oligonucleotide
  Target: LAMA2; (-) strand; PAM type: NRG; PAM sequence: AGG
agaaaaggggtgaaataaag

SEQ ID NO: 74928 - DNA, 20 bp, Artificial Sequence
  Description of Artificial Sequence: Synthetic oligonucleotide
  Target: LAMA2; (-) strand; PAM type: NRG; PAM sequence: GAG
aagaaaaggggtgaaataaa

SEQ ID NO: 74929 - DNA, 20 bp, Artificial Sequence
  Description of Artificial Sequence: Synthetic oligonucleotide
  Target: LAMA2; (-) strand; PAM type: NRG; PAM sequence: AAG
gcaagaaaaggggtgaaata

SEQ ID NO: 74930 - DNA, 20 bp, Artificial Sequence
  Description of Artificial Sequence: Synthetic oligonucleotide
  Target: LAMA2; (-) strand; PAM type: NRG; PAM sequence: GGG
aggtaaacatgcaagaaaag

SEQ ID NO: 74931 - DNA, 20 bp, Artificial Sequence
  Description of Artificial Sequence: Synthetic oligonucleotide
  Target: LAMA2; (-) strand; PAM type: NRG; PAM sequence: GGG
aaggtaaacatgcaagaaaa

SEQ ID NO: 74932 - DNA, 20 bp, Artificial Sequence
  Description of Artificial Sequence: Synthetic oligonucleotide
  Target: LAMA2; (-) strand; PAM type: NRG; PAM sequence: AGG
aaaggtaaacatgcaagaaa

SEQ ID NO: 74933 - DNA, 20 bp, Artificial Sequence
  Description of Artificial Sequence: Synthetic oligonucleotide
  Target: LAMA2; (-) strand; PAM type: NRG; PAM sequence: AAG
aaaaggtaaacatgcaagaa

SEQ ID NO: 74934 - DNA, 20 bp, Artificial Sequence
  Description of Artificial Sequence: Synthetic oligonucleotide
  Target: LAMA2; (-) strand; PAM type: NRG; PAM sequence: AAG
tttacaaaaggtaaacatgc

SEQ ID NO: 74935 - DNA, 20 bp, Artificial Sequence
  Description of Artificial Sequence: Synthetic oligonucleotide
  Target: LAMA2; (-) strand; PAM type: NRG; PAM sequence: AGG
ctgtaccttctctttacaaa

SEQ ID NO: 74936 - DNA, 20 bp, Artificial Sequence
  Description of Artificial Sequence: Synthetic oligonucleotide
  Target: LAMA2; (-) strand; PAM type: NRG; PAM sequence: AAG
tctgtaccttctctttacaa

SEQ ID NO: 74937 - DNA, 20 bp, Artificial Sequence
  Description of Artificial Sequence: Synthetic oligonucleotide
  Target: LAMA2; (-) strand; PAM type: NRG; PAM sequence: GGG
cctgaaacacattaaatgaa

SEQ ID NO: 74938 - DNA, 20 bp, Artificial Sequence
  Description of Artificial Sequence: Synthetic oligonucleotide
  Target: LAMA2; (-) strand; PAM type: NRG; PAM sequence: AGG
acctgaaacacattaaatga

SEQ ID NO: 74939 - DNA, 20 bp, Artificial Sequence
  Description of Artificial Sequence: Synthetic oligonucleotide
  Target: LAMA2; (-) strand; PAM type: NRG; PAM sequence: AAG
aacctgaaacacattaaatg

SEQ ID NO: 74940 - DNA, 20 bp, Artificial Sequence
  Description of Artificial Sequence: Synthetic oligonucleotide
  Target: LAMA2; (-) strand; PAM type: NRG; PAM sequence: CGG
ttccagtgttatgaagacaa

SEQ ID NO: 74941 - DNA, 20 bp, Artificial Sequence
  Description of Artificial Sequence: Synthetic oligonucleotide
  Target: LAMA2; (-) strand; PAM type: NRG; PAM sequence: AAG
ggagaaattccagtgttatg

SEQ ID NO: 74942 - DNA, 20 bp, Artificial Sequence
  Description of Artificial Sequence: Synthetic oligonucleotide
  Target: LAMA2; (-) strand; PAM type: NRG; PAM sequence: CAG
aaataatggaggagaaattc

SEQ ID NO: 74943 - DNA, 20 bp, Artificial Sequence
  Description of Artificial Sequence: Synthetic oligonucleotide
  Target: LAMA2; (-) strand; PAM type: NRG; PAM sequence: GAG
ccaaatagaaaataatggag

SEQ ID NO: 74944 - DNA, 20 bp, Artificial Sequence
  Description of Artificial Sequence: Synthetic oligonucleotide
  Target: LAMA2; (-) strand; PAM type: NRG; PAM sequence: AGG
ccccaaatagaaaataatgg

SEQ ID NO: 74945 - DNA, 20 bp, Artificial Sequence
  Description of Artificial Sequence: Synthetic oligonucleotide
  Target: LAMA2; (-) strand; PAM type: NRG; PAM sequence: GAG
tccccaaatagaaaataatg

SEQ ID NO: 74946 - DNA, 20 bp, Artificial Sequence
  Description of Artificial Sequence: Synthetic oligonucleotide
  Target: LAMA2; (-) strand; PAM type: NRG; PAM sequence: TGG
catccccaaatagaaaataa

SEQ ID NO: 74947 - DNA, 20 bp, Artificial Sequence
  Description of Artificial Sequence: Synthetic oligonucleotide
  Target: LAMA2; (-) strand; PAM type: NRG; PAM sequence: TAG
cattcctttacatccccaaa

SEQ ID NO: 74948 - DNA, 20 bp, Artificial Sequence
  Description of Artificial Sequence: Synthetic oligonucleotide
  Target: LAMA2; (-) strand; PAM type: NRG; PAM sequence: CAG
ttgtggttctagcattgtgg

SEQ ID NO: 74949 - DNA, 20 bp, Artificial Sequence
  Description of Artificial Sequence: Synthetic oligonucleotide
  Target: LAMA2; (-) strand; PAM type: NRG; PAM sequence: TGG
agattgtggttctagcattg

SEQ ID NO: 74950 - DNA, 20 bp, Artificial Sequence
  Description of Artificial Sequence: Synthetic oligonucleotide
  Target: LAMA2; (-) strand; PAM type: NRG; PAM sequence: TAG
ctatgttcagattgtggttc

SEQ ID NO: 74951 - DNA, 20 bp, Artificial Sequence
  Description of Artificial Sequence: Synthetic oligonucleotide
  Target: LAMA2; (-) strand; PAM type: NRG; PAM sequence: TGG
acattcctatgttcagattg

SEQ ID NO: 74952 - DNA, 20 bp, Artificial Sequence
  Description of Artificial Sequence: Synthetic oligonucleotide
  Target: LAMA2; (-) strand; PAM type: NRG; PAM sequence: CAG
cataaacacattcctatgtt

SEQ ID NO: 74953 - DNA, 20 bp, Artificial Sequence
  Description of Artificial Sequence: Synthetic oligonucleotide
  Target: LAMA2; (-) strand; PAM type: NRG; PAM sequence: CAG
tagaggcagttagtatggta

SEQ ID NO: 74954 - DNA, 20 bp, Artificial Sequence
  Description of Artificial Sequence: Synthetic oligonucleotide
  Target: LAMA2; (-) strand; PAM type: NRG; PAM sequence: TGG
ccatttagaggcagttagta

SEQ ID NO: 74955 - DNA, 20 bp, Artificial Sequence
  Description of Artificial Sequence: Synthetic oligonucleotide
  Target: LAMA2; (-) strand; PAM type: NRG; PAM sequence: TAG
aagtgccatttagaggcagt

SEQ ID NO: 74956 - DNA, 20 bp, Artificial Sequence
  Description of Artificial Sequence: Synthetic oligonucleotide
  Target: LAMA2; (-) strand; PAM type: NRG; PAM sequence: CAG
aaaaaagtgccatttagagg

SEQ ID NO: 74957 - DNA, 20 bp, Artificial Sequence
  Description of Artificial Sequence: Synthetic oligonucleotide
  Target: LAMA2; (-) strand; PAM type: NRG; PAM sequence: AGG
ctcaaaaaagtgccatttag

SEQ ID NO: 74958 - DNA, 20 bp, Artificial Sequence
  Description of Artificial Sequence: Synthetic oligonucleotide
  Target: LAMA2; (-) strand; PAM type: NRG; PAM sequence: GAG
cctcaaaaaagtgccattta

SEQ ID NO: 74959 - DNA, 20 bp, Artificial Sequence
  Description of Artificial Sequence: Synthetic oligonucleotide
  Target: LAMA2; (-) strand; PAM type: NRG; PAM sequence: TAG
atcctcaaaaaagtgccatt

SEQ ID NO: 74960 - DNA, 20 bp, Artificial Sequence
  Description of Artificial Sequence: Synthetic oligonucleotide
  Target: LAMA2; (-) strand; PAM type: NRG; PAM sequence: AAG
atatcacataatcctcaaaa

SEQ ID NO: 74961 - DNA, 20 bp, Artificial Sequence
  Description of Artificial Sequence: Synthetic oligonucleotide
  Target: LAMA2; (-) strand; PAM type: NRG; PAM sequence: TAG
gtgaatagtgcttgatagtt

SEQ ID NO: 74962 - DNA, 20 bp, Artificial Sequence
  Description of Artificial Sequence: Synthetic oligonucleotide
  Target: LAMA2; (-) strand; PAM type: NRG; PAM sequence: TAG
ccagtgtgaatagtgcttga

SEQ ID NO: 74963 - DNA, 20 bp, Artificial Sequence
  Description of Artificial Sequence: Synthetic oligonucleotide
  Target: LAMA2; (-) strand; PAM type: NRG; PAM sequence: TAG
ctagaaattcccagtgtgaa

SEQ ID NO: 74964 - DNA, 20 bp, Artificial Sequence
  Description of Artificial Sequence: Synthetic oligonucleotide
  Target: LAMA2; (-) strand; PAM type: NRG; PAM sequence: CAG
aaatacaagctagaaattcc

SEQ ID NO: 74965 - DNA, 20 bp, Artificial Sequence
  Description of Artificial Sequence: Synthetic oligonucleotide
  Target: LAMA2; (-) strand; PAM type: NRG; PAM sequence: TAG
aaagactgtaaaatacaagc

SEQ ID NO: 74966 - DNA, 20 bp, Artificial Sequence
  Description of Artificial Sequence: Synthetic oligonucleotide
  Target: LAMA2; (-) strand; PAM type: NRG; PAM sequence: AAG
tgttaaagactgtaaaatac

SEQ ID NO: 74967 - DNA, 20 bp, Artificial Sequence
  Description of Artificial Sequence: Synthetic oligonucleotide
  Target: LAMA2; (-) strand; PAM type: NRG; PAM sequence: AAG
ttactcaccttactgtgtta

SEQ ID NO: 74968 - DNA, 20 bp, Artificial Sequence
  Description of Artificial Sequence: Synthetic oligonucleotide
  Target: LAMA2; (-) strand; PAM type: NRG; PAM sequence: TAG
ccacctaaaacatttattaa

SEQ ID NO: 74969 - DNA, 20 bp, Artificial Sequence
  Description of Artificial Sequence: Synthetic oligonucleotide
  Target: LAMA2; (-) strand; PAM type: NRG; PAM sequence: AAG
aacatttcacctgatgttta

SEQ ID NO: 74970 - DNA, 20 bp, Artificial Sequence
  Description of Artificial Sequence: Synthetic oligonucleotide
  Target: LAMA2; (-) strand; PAM type: NRG; PAM sequence: TGG
ggattttagtaacaactcat

SEQ ID NO: 74971 - DNA, 20 bp, Artificial Sequence
  Description of Artificial Sequence: Synthetic oligonucleotide
  Target: LAMA2; (-) strand; PAM type: NRG; PAM sequence: TAG
aatggattaagactggattt

SEQ ID NO: 74972 - DNA, 20 bp, Artificial Sequence
  Description of Artificial Sequence: Synthetic oligonucleotide
  Target: LAMA2; (-) strand; PAM type: NRG; PAM sequence: TGG
taaaagaaatggattaagac

SEQ ID NO: 74973 - DNA, 20 bp, Artificial Sequence
  Description of Artificial Sequence: Synthetic oligonucleotide
  Target: LAMA2; (-) strand; PAM type: NRG; PAM sequence: AAG
ggctttaaaagaaatggatt

SEQ ID NO: 74974 - DNA, 20 bp, Artificial Sequence
  Description of Artificial Sequence: Synthetic oligonucleotide
  Target: LAMA2; (-) strand; PAM type: NRG; PAM sequence: TGG
aaccatggctttaaaagaaa

SEQ ID NO: 74975 - DNA, 20 bp, Artificial Sequence
  Description of Artificial Sequence: Synthetic oligonucleotide
  Target: LAMA2; (-) strand; PAM type: NRG; PAM sequence: AAG
tttgacaaccatggctttaa

SEQ ID NO: 74976 - DNA, 20 bp, Artificial Sequence
  Description of Artificial Sequence: Synthetic oligonucleotide
  Target: LAMA2; (-) strand; PAM type: NRG; PAM sequence: TGG
atgttttgttttgacaacca

SEQ ID NO: 74977 - DNA, 20 bp, Artificial Sequence
  Description of Artificial Sequence: Synthetic oligonucleotide
  Target: LAMA2; (-) strand; PAM type: NRG; PAM sequence: AAG
tctaataattttttgctaag

SEQ ID NO: 74978 - DNA, 20 bp, Artificial Sequence
  Description of Artificial Sequence: Synthetic oligonucleotide
  Target: LAMA2; (-) strand; PAM type: NRG; PAM sequence: AAG
atatctaataattttttgct

SEQ ID NO: 74979 - DNA, 20 bp, Artificial Sequence
  Description of Artificial Sequence: Synthetic oligonucleotide
  Target: LAMA2; (-) strand; PAM type: NRG; PAM sequence: AGG
tgaaatgattttactattac

SEQ ID NO: 74980 - DNA, 20 bp, Artificial Sequence
  Description of Artificial Sequence: Synthetic oligonucleotide
  Target: LAMA2; (-) strand; PAM type: NRG; PAM sequence: CAG
ctgaaatgattttactatta

SEQ ID NO: 74981 - DNA, 20 bp, Artificial Sequence
  Description of Artificial Sequence: Synthetic oligonucleotide
  Target: LAMA2; (-) strand; PAM type: NRG; PAM sequence: CAG
tgctacagtagattttattt

SEQ ID NO: 74982 - DNA, 20 bp, Artificial Sequence
  Description of Artificial Sequence: Synthetic oligonucleotide
  Target: LAMA2; (-) strand; PAM type: NRG; PAM sequence: TAG
tataagtctaaatgctacag

SEQ ID NO: 74983 - DNA, 20 bp, Artificial Sequence
  Description of Artificial Sequence: Synthetic oligonucleotide
  Target: LAMA2; (-) strand; PAM type: NRG; PAM sequence: CAG
aaatataagtctaaatgcta

SEQ ID NO: 74984 - DNA, 20 bp, Artificial Sequence
  Description of Artificial Sequence: Synthetic oligonucleotide
  Target: LAMA2; (-) strand; PAM type: NRG; PAM sequence: AAG
catcattttatgtcaaatat

SEQ ID NO: 74985 - DNA, 20 bp, Artificial Sequence
  Description of Artificial Sequence: Synthetic oligonucleotide
  Target: LAMA2; (-) strand; PAM type: NRG; PAM sequence: AAG
gcgatctggaacacctaggg

SEQ ID NO: 74986 - DNA, 20 bp, Artificial Sequence
  Description of Artificial Sequence: Synthetic oligonucleotide
  Target: LAMA2; (-) strand; PAM type: NRG; PAM sequence: GGG
tacgcgatctggaacaccta

SEQ ID NO: 74987 - DNA, 20 bp, Artificial Sequence
  Description of Artificial Sequence: Synthetic oligonucleotide
  Target: LAMA2; (-) strand; PAM type: NRG; PAM sequence: AGG
atacgcgatctggaacacct

SEQ ID NO: 74988 - DNA, 20 bp, Artificial Sequence
  Description of Artificial Sequence: Synthetic oligonucleotide
  Target: LAMA2; (-) strand; PAM type: NRG; PAM sequence: TAG
catacgcgatctggaacacc

SEQ ID NO: 74989 - DNA, 20 bp, Artificial Sequence
  Description of Artificial Sequence: Synthetic oligonucleotide
  Target: LAMA2; (-) strand; PAM type: NRG; PAM sequence: TGG
tcacaatcacatacgcgatc

SEQ ID NO: 74990 - DNA, 20 bp, Artificial Sequence
  Description of Artificial Sequence: Synthetic oligonucleotide
  Target: LAMA2; (-) strand; PAM type: NRG; PAM sequence: TAG
gtttccaggccggggggagt

SEQ ID NO: 74991 - DNA, 20 bp, Artificial Sequence
  Description of Artificial Sequence: Synthetic oligonucleotide
  Target: LAMA2; (-) strand; PAM type: NRG; PAM sequence: GAG
tccagtttccaggccggggg

SEQ ID NO: 74992 - DNA, 20 bp, Artificial Sequence
  Description of Artificial Sequence: Synthetic oligonucleotide
  Target: LAMA2; (-) strand; PAM type: NRG; PAM sequence: GGG
aatccagtttccaggccggg

SEQ ID NO: 74993 - DNA, 20 bp, Artificial Sequence
  Description of Artificial Sequence: Synthetic oligonucleotide
  Target: LAMA2; (-) strand; PAM type: NRG; PAM sequence: GGG
aaatccagtttccaggccgg

SEQ ID NO: 74994 - DNA, 20 bp, Artificial Sequence
  Description of Artificial Sequence: Synthetic oligonucleotide
  Target: LAMA2; (-) strand; PAM type: NRG; PAM sequence: GGG
aaaatccagtttccaggccg

SEQ ID NO: 74995 - DNA, 20 bp, Artificial Sequence
  Description of Artificial Sequence: Synthetic oligonucleotide
  Target: LAMA2; (-) strand; PAM type: NRG; PAM sequence: GGG
caaaatccagtttccaggcc

SEQ ID NO: 74996 - DNA, 20 bp, Artificial Sequence
  Description of Artificial Sequence: Synthetic oligonucleotide
  Target: LAMA2; (-) strand; PAM type: NRG; PAM sequence: CGG
ccaaaatccagtttccaggc

SEQ ID NO: 74997 - DNA, 20 bp, Artificial Sequence
  Description of Artificial Sequence: Synthetic oligonucleotide
  Target: LAMA2; (-) strand; PAM type: NRG; PAM sequence: AGG
cgttccaaaatccagtttcc

SEQ ID NO: 74998 - DNA, 20 bp, Artificial Sequence
  Description of Artificial Sequence: Synthetic oligonucleotide
  Target: LAMA2; (-) strand; PAM type: NRG; PAM sequence: CAG
gcgttccaaaatccagtttc

SEQ ID NO: 74999 - DNA, 20 bp, Artificial Sequence
  Description of Artificial Sequence: Synthetic oligonucleotide
  Target: LAMA2; (-) strand; PAM type: NRG; PAM sequence: CAG
caagagagcgttccaaaatc

SEQ ID NO: 75000 - DNA, 20 bp, Artificial Sequence
  Description of Artificial Sequence: Synthetic oligonucleotide
  Target: LAMA2; (-) strand; PAM type: NRG; PAM sequence: GAG
tgtattcaacatcatcaaga

SEQ ID NO: 75001 - DNA, 20 bp, Artificial Sequence
  Description of Artificial Sequence: Synthetic oligonucleotide
  Target: LAMA2; (-) strand; PAM type: NRG; PAM sequence: GAG
cttgtattcaacatcatcaa

SEQ ID NO: 75002 - DNA, 20 bp, Artificial Sequence
  Description of Artificial Sequence: Synthetic oligonucleotide
  Target: LAMA2; (-) strand; PAM type: NRG; PAM sequence: AAG
ggcttgtattcaacatcatc

SEQ ID NO: 75003 - DNA, 20 bp, Artificial Sequence
  Description of Artificial Sequence: Synthetic oligonucleotide
  Target: LAMA2; (-) strand; PAM type: NRG; PAM sequence: GGG
gtcacagcatgatactgcca

SEQ ID NO: 75004 - DNA, 20 bp, Artificial Sequence
  Description of Artificial Sequence: Synthetic oligonucleotide
  Target: LAMA2; (-) strand; PAM type: NRG; PAM sequence: AGG
tgtcacagcatgatactgcc

SEQ ID NO: 75005 - DNA, 20 bp, Artificial Sequence
  Description of Artificial Sequence: Synthetic oligonucleotide
  Target: LAMA2; (-) strand; PAM type: NRG; PAM sequence: CAG
ctgtcacagcatgatactgc

SEQ ID NO: 75006 - DNA, 20 bp, Artificial Sequence
  Description of Artificial Sequence: Synthetic oligonucleotide
  Target: LAMA2; (-) strand; PAM type: NRG; PAM sequence: CAG
taggcactccgtgtctgtca

SEQ ID NO: 75007 - DNA, 20 bp, Artificial Sequence
  Description of Artificial Sequence: Synthetic oligonucleotide
  Target: LAMA2; (-) strand; PAM type: NRG; PAM sequence: AGG
gataaatattgtaaagcgtt

SEQ ID NO: 75008 - DNA, 20 bp, Artificial Sequence
  Description of Artificial Sequence: Synthetic oligonucleotide
  Target: LAMA2; (-) strand; PAM type: NRG; PAM sequence: TAG
ggataaatattgtaaagcgt

SEQ ID NO: 75009 - DNA, 20 bp, Artificial Sequence
  Description of Artificial Sequence: Synthetic oligonucleotide
  Target: LAMA2; (-) strand; PAM type: NRG; PAM sequence: AAG
gtgcggggataaatattgta

SEQ ID NO: 75010 - DNA, 20 bp, Artificial Sequence
  Description of Artificial Sequence: Synthetic oligonucleotide
  Target: LAMA2; (-) strand; PAM type: NRG; PAM sequence: GGG
tatgacggtggcccagtgcg

SEQ ID NO: 75011 - DNA, 20 bp, Artificial Sequence
  Description of Artificial Sequence: Synthetic oligonucleotide
  Target: LAMA2; (-) strand; PAM type: NRG; PAM sequence: GGG
atatgacggtggcccagtgc

SEQ ID NO: 75012 - DNA, 20 bp, Artificial Sequence
  Description of Artificial Sequence: Synthetic oligonucleotide
  Target: LAMA2; (-) strand; PAM type: NRG; PAM sequence: CGG
catatgacggtggcccagtg

SEQ ID NO: 75013 - DNA, 20 bp, Artificial Sequence
  Description of Artificial Sequence: Synthetic oligonucleotide
  Target: LAMA2; (-) strand; PAM type: NRG; PAM sequence: CAG
tttggcatatgacggtggcc

SEQ ID NO: 75014 - DNA, 20 bp, Artificial Sequence
  Description of Artificial Sequence: Synthetic oligonucleotide
  Target: LAMA2; (-) strand; PAM type: NRG; PAM sequence: TGG
tcatctttggcatatgacgg

SEQ ID NO: 75015 - DNA, 20 bp, Artificial Sequence
  Description of Artificial Sequence: Synthetic oligonucleotide
  Target: LAMA2; (-) strand; PAM type: NRG; PAM sequence: CGG
tcatcatctttggcatatga

SEQ ID NO: 75016 - DNA, 20 bp, Artificial Sequence
  Description of Artificial Sequence: Synthetic oligonucleotide
  Target: LAMA2; (-) strand; PAM type: NRG; PAM sequence: TGG
gcagatgacctcatcatctt

SEQ ID NO: 75017 - DNA, 20 bp, Artificial Sequence
  Description of Artificial Sequence: Synthetic oligonucleotide
  Target: LAMA2; (-) strand; PAM type: NRG; PAM sequence: CAG
tcttggagtaaaatgaagtg

SEQ ID NO: 75018 - DNA, 20 bp, Artificial Sequence
  Description of Artificial Sequence: Synthetic oligonucleotide
  Target: LAMA2; (-) strand; PAM type: NRG; PAM sequence: AAG
gtgtatcttggagtaaaatg

SEQ ID NO: 75019 - DNA, 20 bp, Artificial Sequence
  Description of Artificial Sequence: Synthetic oligonucleotide
  Target: LAMA2; (-) strand; PAM type: NRG; PAM sequence: GAG
tttctaaggggtgtatcttg

SEQ ID NO: 75020 - DNA, 20 bp, Artificial Sequence
  Description of Artificial Sequence: Synthetic oligonucleotide
  Target: LAMA2; (-) strand; PAM type: NRG; PAM sequence: TGG
attttctaaggggtgtatct

SEQ ID NO: 75021 - DNA, 20 bp, Artificial Sequence
  Description of Artificial Sequence: Synthetic oligonucleotide
  Target: LAMA2; (-) strand; PAM type: NRG; PAM sequence: GGG
ttacctctccattttctaag

SEQ ID NO: 75022 - DNA, 20 bp, Artificial Sequence
  Description of Artificial Sequence: Synthetic oligonucleotide
  Target: LAMA2; (-) strand; PAM type: NRG; PAM sequence: GGG
cttacctctccattttctaa

SEQ ID NO: 75023 - DNA, 20 bp, Artificial Sequence
  Description of Artificial Sequence: Synthetic oligonucleotide
  Target: LAMA2; (-) strand; PAM type: NRG; PAM sequence: AGG
tcttacctctccattttcta

SEQ ID NO: 75024 - DNA, 20 bp, Artificial Sequence
  Description of Artificial Sequence: Synthetic oligonucleotide
  Target: LAMA2; (-) strand; PAM type: NRG; PAM sequence: AAG
atcttacctctccattttct

SEQ ID NO: 75025 - DNA, 20 bp, Artificial Sequence
  Description of Artificial Sequence: Synthetic oligonucleotide
  Target: LAMA2; (-) strand; PAM type: NRG; PAM sequence: GAG
atcaaatgtgcttaaatggt

SEQ ID NO: 75026 - DNA, 20 bp, Artificial Sequence
  Description of Artificial Sequence: Synthetic oligonucleotide
  Target: LAMA2; (-) strand; PAM type: NRG; PAM sequence: TGG
ccgtatcaaatgtgcttaaa

SEQ ID NO: 75027 - DNA, 20 bp, Artificial Sequence
  Description of Artificial Sequence: Synthetic oligonucleotide
  Target: LAMA2; (-) strand; PAM type: NRG; PAM sequence: AGG
tatattcaggtctttctgac

SEQ ID NO: 75028 - DNA, 20 bp, Artificial Sequence
  Description of Artificial Sequence: Synthetic oligonucleotide
  Target: LAMA2; (-) strand; PAM type: NRG; PAM sequence: CAG
atatattcaggtctttctga

SEQ ID NO: 75029 - DNA, 20 bp, Artificial Sequence
  Description of Artificial Sequence: Synthetic oligonucleotide
  Target: LAMA2; (-) strand; PAM type: NRG; PAM sequence: AGG
cattaattactgatatattc

SEQ ID NO: 75030 - DNA, 20 bp, Artificial Sequence
  Description of Artificial Sequence: Synthetic oligonucleotide
  Target: LAMA2; (-) strand; PAM type: NRG; PAM sequence: CAG
acattaattactgatatatt

SEQ ID NO: 75031 - DNA, 20 bp, Artificial Sequence
  Description of Artificial Sequence: Synthetic oligonucleotide
  Target: LAMA2; (-) strand; PAM type: NRG; PAM sequence: AGG
gttaaaattctaatcacctc

SEQ ID NO: 75032 - DNA, 20 bp, Artificial Sequence
  Description of Artificial Sequence: Synthetic oligonucleotide
  Target: LAMA2; (-) strand; PAM type: NRG; PAM sequence: CAG
agttaaaattctaatcacct

SEQ ID NO: 75033 - DNA, 20 bp, Artificial Sequence
  Description of Artificial Sequence: Synthetic oligonucleotide
  Target: LAMA2; (-) strand; PAM type: NRG; PAM sequence: TAG
agatgggagacacatgaagg

SEQ ID NO: 75034 - DNA, 20 bp, Artificial Sequence
  Description of Artificial Sequence: Synthetic oligonucleotide
  Target: LAMA2; (-) strand; PAM type: NRG; PAM sequence: AGG
tggagatgggagacacatga

SEQ ID NO: 75035 - DNA, 20 bp, Artificial Sequence
  Description of Artificial Sequence: Synthetic oligonucleotide
  Target: LAMA2; (-) strand; PAM type: NRG; PAM sequence: AAG
ctggagatgggagacacatg

SEQ ID NO: 75036 - DNA, 20 bp, Artificial Sequence
  Description of Artificial Sequence: Synthetic oligonucleotide
  Target: LAMA2; (-) strand; PAM type: NRG; PAM sequence: GAG
ctgatctttactggagatgg

SEQ ID NO: 75037 - DNA, 20 bp, Artificial Sequence
  Description of Artificial Sequence: Synthetic oligonucleotide
  Target: LAMA2; (-) strand; PAM type: NRG; PAM sequence: GGG
ctctgatctttactggagat

SEQ ID NO: 75038 - DNA, 20 bp, Artificial Sequence
  Description of Artificial Sequence: Synthetic oligonucleotide
  Target: LAMA2; (-) strand; PAM type: NRG; PAM sequence: TGG
tctctgatctttactggaga

SEQ ID NO: 75039 - DNA, 20 bp, Artificial Sequence
  Description of Artificial Sequence: Synthetic oligonucleotide
  Target: LAMA2; (-) strand; PAM type: NRG; PAM sequence: GAG
ctcttctctgatctttactg

SEQ ID NO: 75040 - DNA, 20 bp, Artificial Sequence
  Description of Artificial Sequence: Synthetic oligonucleotide
  Target: LAMA2; (-) strand; PAM type: NRG; PAM sequence: TGG
tcctcttctctgatctttac

SEQ ID NO: 75041 - DNA, 20 bp, Artificial Sequence
  Description of Artificial Sequence: Synthetic oligonucleotide
  Target: LAMA2; (-) strand; PAM type: NRG; PAM sequence: CAG
aaaattaatcattgactttc

SEQ ID NO: 75042 - DNA, 20 bp, Artificial Sequence
  Description of Artificial Sequence: Synthetic oligonucleotide
  Target: LAMA2; (-) strand; PAM type: NRG; PAM sequence: AAG
agcaatcctcattgttgaga

SEQ ID NO: 75043 - DNA, 20 bp, Artificial Sequence
  Description of Artificial Sequence: Synthetic oligonucleotide
  Target: LAMA2; (-) strand; PAM type: NRG; PAM sequence: GAG
cattagcaatcctcattgtt

SEQ ID NO: 75044 - DNA, 20 bp, Artificial Sequence
  Description of Artificial Sequence: Synthetic oligonucleotide
  Target: LAMA2; (-) strand; PAM type: NRG; PAM sequence: TAG
tccaatccttctctaatcat

SEQ ID NO: 75045 - DNA, 20 bp, Artificial Sequence
  Description of Artificial Sequence: Synthetic oligonucleotide
  Target: LAMA2; (-) strand; PAM type: NRG; PAM sequence: AGG
caaatgtaaggccaccttta

SEQ ID NO: 75046 - DNA, 20 bp, Artificial Sequence
  Description of Artificial Sequence: Synthetic oligonucleotide
  Target: LAMA2; (-) strand; PAM type: NRG; PAM sequence: AAG
tcaaatgtaaggccaccttt

SEQ ID NO: 75047 - DNA, 20 bp, Artificial Sequence
  Description of Artificial Sequence: Synthetic oligonucleotide
  Target: LAMA2; (-) strand; PAM type: NRG; PAM sequence: AGG
ccaaagtacactcaaatgta

SEQ ID NO: 75048 - DNA, 20 bp, Artificial Sequence
  Description of Artificial Sequence: Synthetic oligonucleotide
  Target: LAMA2; (-) strand; PAM type: NRG; PAM sequence: AAG
accaaagtacactcaaatgt

SEQ ID NO: 75049 - DNA, 20 bp, Artificial Sequence
  Description of Artificial Sequence: Synthetic oligonucleotide
  Target: LAMA2; (-) strand; PAM type: NRG; PAM sequence: AAG
ttgtctccatcttcagacca

SEQ ID NO: 75050 - DNA, 20 bp, Artificial Sequence
  Description of Artificial Sequence: Synthetic oligonucleotide
  Target: LAMA2; (-) strand; PAM type: NRG; PAM sequence: CAG
atttcttttgtctccatctt

SEQ ID NO: 75051 - DNA, 20 bp, Artificial Sequence
  Description of Artificial Sequence: Synthetic oligonucleotide
  Target: LAMA2; (-) strand; PAM type: NRG; PAM sequence: TGG
tttcatttgggtctttcatg

SEQ ID NO: 75052 - DNA, 20 bp, Artificial Sequence
  Description of Artificial Sequence: Synthetic oligonucleotide
  Target: LAMA2; (-) strand; PAM type: NRG; PAM sequence: GGG
gaaagaattacttttcattt

SEQ ID NO: 75053 - DNA, 20 bp, Artificial Sequence
  Description of Artificial Sequence: Synthetic oligonucleotide
  Target: LAMA2; (-) strand; PAM type: NRG; PAM sequence: TGG
tgaaagaattacttttcatt

SEQ ID NO: 75054 - DNA, 20 bp, Artificial Sequence
  Description of Artificial Sequence: Synthetic oligonucleotide
  Target: LAMA2; (-) strand; PAM type: NRG; PAM sequence: AAG
gaaaaacatcaaaagattga

SEQ ID NO: 75055 - DNA, 20 bp, Artificial Sequence
  Description of Artificial Sequence: Synthetic oligonucleotide
  Target: LAMA2; (-) strand; PAM type: NRG; PAM sequence: AAG
tgacagcagaaaaacatcaa

SEQ ID NO: 75056 - DNA, 20 bp, Artificial Sequence
  Description of Artificial Sequence: Synthetic oligonucleotide
  Target: LAMA2; (-) strand; PAM type: NRG; PAM sequence: CAG
gtagccctatgtggtgacag

SEQ ID NO: 75057 - DNA, 20 bp, Artificial Sequence
  Description of Artificial Sequence: Synthetic oligonucleotide
  Target: LAMA2; (-) strand; PAM type: NRG; PAM sequence: CAG
actgtagccctatgtggtga

SEQ ID NO: 75058 - DNA, 20 bp, Artificial Sequence
  Description of Artificial Sequence: Synthetic oligonucleotide
  Target: LAMA2; (-) strand; PAM type: NRG; PAM sequence: TGG
aaccccactgtagccctatg

SEQ ID NO: 75059 - DNA, 20 bp, Artificial Sequence
  Description of Artificial Sequence: Synthetic oligonucleotide
  Target: LAMA2; (-) strand; PAM type: NRG; PAM sequence: TAG
ccagggaagaaaccccactg

SEQ ID NO: 75060 - DNA, 20 bp, Artificial Sequence
  Description of Artificial Sequence: Synthetic oligonucleotide
  Target: LAMA2; (-) strand; PAM type: NRG; PAM sequence: AAG
ccacaaagcctgacccaggg

SEQ ID NO: 75061 - DNA, 20 bp, Artificial Sequence
  Description of Artificial Sequence: Synthetic oligonucleotide
  Target: LAMA2; (-) strand; PAM type: NRG; PAM sequence: GGG
gttccacaaagcctgaccca

SEQ ID NO: 75062 - DNA, 20 bp, Artificial Sequence
  Description of Artificial Sequence: Synthetic oligonucleotide
  Target: LAMA2; (-) strand; PAM type: NRG; PAM sequence: AGG
tgttccacaaagcctgaccc

SEQ ID NO: 75063 - DNA, 20 bp, Artificial Sequence
  Description of Artificial Sequence: Synthetic oligonucleotide
  Target: LAMA2; (-) strand; PAM type: NRG; PAM sequence: CAG
ctgttccacaaagcctgacc

SEQ ID NO: 75064 - DNA, 20 bp, Artificial Sequence
  Description of Artificial Sequence: Synthetic oligonucleotide
  Target: LAMA2; (-) strand; PAM type: NRG; PAM sequence: AAG
ctgcacattactgttccaca

SEQ ID NO: 75065 - DNA, 20 bp, Artificial Sequence
  Description of Artificial Sequence: Synthetic oligonucleotide
  Target: LAMA2; (-) strand; PAM type: NRG; PAM sequence: AAG
ttgcacatcactgagaacct

SEQ ID NO: 75066 - DNA, 20 bp, Artificial Sequence
  Description of Artificial Sequence: Synthetic oligonucleotide
  Target: LAMA2; (-) strand; PAM type: NRG; PAM sequence: GAG
aacctagcttgcacatcact

SEQ ID NO: 75067 - DNA, 20 bp, Artificial Sequence
  Description of Artificial Sequence: Synthetic oligonucleotide
  Target: LAMA2; (-) strand; PAM type: NRG; PAM sequence: TAG
tttgaactaagcacgtaacc

SEQ ID NO: 75068 - DNA, 20 bp, Artificial Sequence
  Description of Artificial Sequence: Synthetic oligonucleotide
  Target: LAMA2; (-) strand; PAM type: NRG; PAM sequence: AAG
gagaagaacatatttgaact

SEQ ID NO: 75069 - DNA, 20 bp, Artificial Sequence
  Description of Artificial Sequence: Synthetic oligonucleotide
  Target: LAMA2; (-) strand; PAM type: NRG; PAM sequence: AAG
caggatgacagacactggag

SEQ ID NO: 75070 - DNA, 20 bp, Artificial Sequence
  Description of Artificial Sequence: Synthetic oligonucleotide
  Target: LAMA2; (-) strand; PAM type: NRG; PAM sequence: GAG
ccacaggatgacagacactg

SEQ ID NO: 75071 - DNA, 20 bp, Artificial Sequence
  Description of Artificial Sequence: Synthetic oligonucleotide
  Target: LAMA2; (-) strand; PAM type: NRG; PAM sequence: TGG
aaccacaggatgacagacac

SEQ ID NO: 75072 - DNA, 20 bp, Artificial Sequence
  Description of Artificial Sequence: Synthetic oligonucleotide
  Target: LAMA2; (-) strand; PAM type: NRG; PAM sequence: CAG
aaatcttaaccacaggatga

SEQ ID NO: 75073 - DNA, 20 bp, Artificial Sequence
  Description of Artificial Sequence: Synthetic oligonucleotide
  Target: LAMA2; (-) strand; PAM type: NRG; PAM sequence: AGG
gaatctaaaatcttaaccac

SEQ ID NO: 75074 - DNA, 20 bp, Artificial Sequence
  Description of Artificial Sequence: Synthetic oligonucleotide
  Target: LAMA2; (-) strand; PAM type: NRG; PAM sequence: CAG
tgaatctaaaatcttaacca

SEQ ID NO: 75075 - DNA, 20 bp, Artificial Sequence
  Description of Artificial Sequence: Synthetic oligonucleotide
  Target: LAMA2; (-) strand; PAM type: NRG; PAM sequence: TGG
gaagccatggttagaatatg

SEQ ID NO: 75076 - DNA, 20 bp, Artificial Sequence
  Description of Artificial Sequence: Synthetic oligonucleotide
  Target: LAMA2; (-) strand; PAM type: NRG; PAM sequence: TAG
ataacaactgaagccatggt

SEQ ID NO: 75077 - DNA, 20 bp, Artificial Sequence
  Description of Artificial Sequence: Synthetic oligonucleotide
  Target: LAMA2; (-) strand; PAM type: NRG; PAM sequence: TGG
actaataacaactgaagcca

SEQ ID NO: 75078 - DNA, 20 bp, Artificial Sequence
  Description of Artificial Sequence: Synthetic oligonucleotide
  Target: LAMA2; (-) strand; PAM type: NRG; PAM sequence: AAG
taataaactaataacaactg

SEQ ID NO: 75079 - DNA, 20 bp, Artificial Sequence
  Description of Artificial Sequence: Synthetic oligonucleotide
  Target: LAMA2; (-) strand; PAM type: NRG; PAM sequence: CAG
tcaagaacacacaactaagc

SEQ ID NO: 75080 - DNA, 20 bp, Artificial Sequence
  Description of Artificial Sequence: Synthetic oligonucleotide
  Target: LAMA2; (-) strand; PAM type: NRG; PAM sequence: AAG
tggatcaagaacacacaact

SEQ ID NO: 75081 - DNA, 20 bp, Artificial Sequence
  Description of Artificial Sequence: Synthetic oligonucleotide
  Target: LAMA2; (-) strand; PAM type: NRG; PAM sequence: AAG
agaatttaagtaactggatc

SEQ ID NO: 75082 - DNA, 20 bp, Artificial Sequence
  Description of Artificial Sequence: Synthetic oligonucleotide
  Target: LAMA2; (-) strand; PAM type: NRG; PAM sequence: TGG
gtgcagagaatttaagtaac

SEQ ID NO: 75083 - DNA, 20 bp, Artificial Sequence
  Description of Artificial Sequence: Synthetic oligonucleotide
  Target: LAMA2; (-) strand; PAM type: NRG; PAM sequence: AAG
aactgaggtgcagagaattt

SEQ ID NO: 75084 - DNA, 20 bp, Artificial Sequence
  Description of Artificial Sequence: Synthetic oligonucleotide
  Target: LAMA2; (-) strand; PAM type: NRG; PAM sequence: GAG
ggcgatgaaactgaggtgca

SEQ ID NO: 75085 - DNA, 20 bp, Artificial Sequence
  Description of Artificial Sequence: Synthetic oligonucleotide
  Target: LAMA2; (-) strand; PAM type: NRG; PAM sequence: CAG
tgggcgatgaaactgaggtg

SEQ ID NO: 75086 - DNA, 20 bp, Artificial Sequence
  Description of Artificial Sequence: Synthetic oligonucleotide
  Target: LAMA2; (-) strand; PAM type: NRG; PAM sequence: AGG
atttatgggcgatgaaactg

SEQ ID NO: 75087 - DNA, 20 bp, Artificial Sequence
  Description of Artificial Sequence: Synthetic oligonucleotide
  Target: LAMA2; (-) strand; PAM type: NRG; PAM sequence: GAG
gatttatgggcgatgaaact

SEQ ID NO: 75088 - DNA, 20 bp, Artificial Sequence
  Description of Artificial Sequence: Synthetic oligonucleotide
  Target: LAMA2; (-) strand; PAM type: NRG; PAM sequence: GGG
tattattattcctgatttat

SEQ ID NO: 75089 - DNA, 20 bp, Artificial Sequence
  Description of Artificial Sequence: Synthetic oligonucleotide
  Target: LAMA2; (-) strand; PAM type: NRG; PAM sequence: TGG
ctattattattcctgattta

SEQ ID NO: 75090 - DNA, 20 bp, Artificial Sequence
  Description of Artificial Sequence: Synthetic oligonucleotide
  Target: LAMA2; (-) strand; PAM type: NRG; PAM sequence: AAG
tcttgacaattatatgaggt

SEQ ID NO: 75091 - DNA, 20 bp, Artificial Sequence
  Description of Artificial Sequence: Synthetic oligonucleotide
  Target: LAMA2; (-) strand; PAM type: NRG; PAM sequence: AGG
atcctcttgacaattatatg

SEQ ID NO: 75092 - DNA, 20 bp, Artificial Sequence
  Description of Artificial Sequence: Synthetic oligonucleotide
  Target: LAMA2; (-) strand; PAM type: NRG; PAM sequence: GAG
aatcctcttgacaattatat

SEQ ID NO: 75093 - DNA, 20 bp, Artificial Sequence
  Description of Artificial Sequence: Synthetic oligonucleotide
  Target: LAMA2; (-) strand; PAM type: NRG; PAM sequence: CAG
agagtacttagtgtgcattt

SEQ ID NO: 75094 - DNA, 20 bp, Artificial Sequence
  Description of Artificial Sequence: Synthetic oligonucleotide
  Target: LAMA2; (-) strand; PAM type: NRG; PAM sequence: TAG
taaaaatagcacagagtact

SEQ ID NO: 75095 - DNA, 20 bp, Artificial Sequence
  Description of Artificial Sequence: Synthetic oligonucleotide
  Target: LAMA2; (-) strand; PAM type: NRG; PAM sequence: GAG
aaaacaataaaaatagcaca

SEQ ID NO: 75096 - DNA, 20 bp, Artificial Sequence
  Description of Artificial Sequence: Synthetic oligonucleotide
  Target: LAMA2; (-) strand; PAM type: NRG; PAM sequence: CAG
acaaaacaataaaaatagca

SEQ ID NO: 75097 - DNA, 20 bp, Artificial Sequence
  Description of Artificial Sequence: Synthetic oligonucleotide
  Target: LAMA2; (-) strand; PAM type: NRG; PAM sequence: TAG
tggcaacaaaacaataaaaa

SEQ ID NO: 75098 - DNA, 20 bp, Artificial Sequence
  Description of Artificial Sequence: Synthetic oligonucleotide
  Target: LAMA2; (-) strand; PAM type: NRG; PAM sequence: TGG
aatggttattatttccttaa

SEQ ID NO: 75099 - DNA, 20 bp, Artificial Sequence
  Description of Artificial Sequence: Synthetic oligonucleotide
  Target: LAMA2; (-) strand; PAM type: NRG; PAM sequence: TGG
aataaaaataatagtagtaa

SEQ ID NO: 75100 - DNA, 20 bp, Artificial Sequence
  Description of Artificial Sequence: Synthetic oligonucleotide
  Target: LAMA2; (-) strand; PAM type: NRG; PAM sequence: TAG
gataataataaaaataatag

SEQ ID NO: 75101 - DNA, 20 bp, Artificial Sequence
  Description of Artificial Sequence: Synthetic oligonucleotide
  Target: LAMA2; (-) strand; PAM type: NRG; PAM sequence: TAG
aaggataataataaaaataa

SEQ ID NO: 75102 - DNA, 20 bp, Artificial Sequence
  Description of Artificial Sequence: Synthetic oligonucleotide
  Target: LAMA2; (-) strand; PAM type: NRG; PAM sequence: AGG
gggtatttgagagaagacta

SEQ ID NO: 75103 - DNA, 20 bp, Artificial Sequence
  Description of Artificial Sequence: Synthetic oligonucleotide
  Target: LAMA2; (-) strand; PAM type: NRG; PAM sequence: AAG
tgggtatttgagagaagact

SEQ ID NO: 75104 - DNA, 20 bp, Artificial Sequence
  Description of Artificial Sequence: Synthetic oligonucleotide
  Target: LAMA2; (-) strand; PAM type: NRG; PAM sequence: AAG
aaagtttgggtatttgagag

SEQ ID NO: 75105 - DNA, 20 bp, Artificial Sequence
  Description of Artificial Sequence: Synthetic oligonucleotide
  Target: LAMA2; (-) strand; PAM type: NRG; PAM sequence: GAG
gtcaaagtttgggtatttga

SEQ ID NO: 75106 - DNA, 20 bp, Artificial Sequence
  Description of Artificial Sequence: Synthetic oligonucleotide
  Target: LAMA2; (-) strand; PAM type: NRG; PAM sequence: GAG
aagtcaaagtttgggtattt

SEQ ID NO: 75107 - DNA, 20 bp, Artificial Sequence
  Description of Artificial Sequence: Synthetic oligonucleotide
  Target: LAMA2; (-) strand; PAM type: NRG; PAM sequence: GGG
gagtcactaagtcaaagttt

SEQ ID NO: 75108 - DNA, 20 bp, Artificial Sequence
  Description of Artificial Sequence: Synthetic oligonucleotide
  Target: LAMA2; (-) strand; PAM type: NRG; PAM sequence: TGG
agagtcactaagtcaaagtt

SEQ ID NO: 75109 - DNA, 20 bp, Artificial Sequence
  Description of Artificial Sequence: Synthetic oligonucleotide
  Target: LAMA2; (-) strand; PAM type: NRG; PAM sequence: AAG
tcaagagagtcactaagtca

SEQ ID NO: 75110 - DNA, 20 bp, Artificial Sequence
  Description of Artificial Sequence: Synthetic oligonucleotide
  Target: LAMA2; (-) strand; PAM type: NRG; PAM sequence: AAG
aataattcaagagagtcact

SEQ ID NO: 75111 - DNA, 20 bp, Artificial Sequence
  Description of Artificial Sequence: Synthetic oligonucleotide
  Target: LAMA2; (-) strand; PAM type: NRG; PAM sequence: GAG
aaatattgaataattcaaga

SEQ ID NO: 75112 - DNA, 20 bp, Artificial Sequence
  Description of Artificial Sequence: Synthetic oligonucleotide
  Target: LAMA2; (-) strand; PAM type: NRG; PAM sequence: GAG
agaaatattgaataattcaa

SEQ ID NO: 75113 - DNA, 20 bp, Artificial Sequence
  Description of Artificial Sequence: Synthetic oligonucleotide
  Target: LAMA2; (-) strand; PAM type: NRG; PAM sequence: AAG
aaagaaatattgaataattc

SEQ ID NO: 75114 - DNA, 20 bp, Artificial Sequence
  Description of Artificial Sequence: Synthetic oligonucleotide
  Target: LAMA2; (-) strand; PAM type: NRG; PAM sequence: AAG
caagtcagggaaacatacta

SEQ ID NO: 75115 - DNA, 20 bp, Artificial Sequence
  Description of Artificial Sequence: Synthetic oligonucleotide
  Target: LAMA2; (-) strand; PAM type: NRG; PAM sequence: GGG
tactaaagggagacaagtca

SEQ ID NO: 75116 - DNA, 20 bp, Artificial Sequence
  Description of Artificial Sequence: Synthetic oligonucleotide
  Target: LAMA2; (-) strand; PAM type: NRG; PAM sequence: AGG
atactaaagggagacaagtc

SEQ ID NO: 75117 - DNA, 20 bp, Artificial Sequence
  Description of Artificial Sequence: Synthetic oligonucleotide
  Target: LAMA2; (-) strand; PAM type: NRG; PAM sequence: CAG
tatactaaagggagacaagt

SEQ ID NO: 75118 - DNA, 20 bp, Artificial Sequence
  Description of Artificial Sequence: Synthetic oligonucleotide
  Target: LAMA2; (-) strand; PAM type: NRG; PAM sequence: AAG
cacatatactaaagggagac

SEQ ID NO: 75119 - DNA, 20 bp, Artificial Sequence
  Description of Artificial Sequence: Synthetic oligonucleotide
  Target: LAMA2; (-) strand; PAM type: NRG; PAM sequence: GAG
tgggtcacatatactaaagg

SEQ ID NO: 75120 - DNA, 20 bp, Artificial Sequence
  Description of Artificial Sequence: Synthetic oligonucleotide
  Target: LAMA2; (-) strand; PAM type: NRG; PAM sequence: GGG
ggtgggtcacatatactaaa

SEQ ID NO: 75121 - DNA, 20 bp, Artificial Sequence
  Description of Artificial Sequence: Synthetic oligonucleotide
  Target: LAMA2; (-) strand; PAM type: NRG; PAM sequence: AGG
aggtgggtcacatatactaa

SEQ ID NO: 75122 - DNA, 20 bp, Artificial Sequence
  Description of Artificial Sequence: Synthetic oligonucleotide
  Target: LAMA2; (-) strand; PAM type: NRG; PAM sequence: AAG
gaggtgggtcacatatacta

SEQ ID NO: 75123 - DNA, 20 bp, Artificial Sequence
  Description of Artificial Sequence: Synthetic oligonucleotide
  Target: LAMA2; (-) strand; PAM type: NRG; PAM sequence: GGG
taggtagcatgaaaggaggt

SEQ ID NO: 75124 - DNA, 20 bp, Artificial Sequence
  Description of Artificial Sequence: Synthetic oligonucleotide
  Target: LAMA2; (-) strand; PAM type: NRG; PAM sequence: TGG
ttaggtagcatgaaaggagg

SEQ ID NO: 75125 - DNA, 20 bp, Artificial Sequence
  Description of Artificial Sequence: Synthetic oligonucleotide
  Target: LAMA2; (-) strand; PAM type: NRG; PAM sequence: AGG
taattaggtagcatgaaagg

SEQ ID NO: 75126 - DNA, 20 bp, Artificial Sequence
  Description of Artificial Sequence: Synthetic oligonucleotide
  Target: LAMA2; (-) strand; PAM type: NRG; PAM sequence: GAG
ataattaggtagcatgaaag

SEQ ID NO: 75127 - DNA, 20 bp, Artificial Sequence
  Description of Artificial Sequence: Synthetic oligonucleotide
  Target: LAMA2; (-) strand; PAM type: NRG; PAM sequence: AGG
acataattaggtagcatgaa

SEQ ID NO: 75128 - DNA, 20 bp, Artificial Sequence
  Description of Artificial Sequence: Synthetic oligonucleotide
  Target: LAMA2; (-) strand; PAM type: NRG; PAM sequence: AAG
tacataattaggtagcatga

SEQ ID NO: 75129 - DNA, 20 bp, Artificial Sequence
  Description of Artificial Sequence: Synthetic oligonucleotide
  Target: LAMA2; (-) strand; PAM type: NRG; PAM sequence: TAG
tggagatatacataattagg

SEQ ID NO: 75130 - DNA, 20 bp, Artificial Sequence
  Description of Artificial Sequence: Synthetic oligonucleotide
  Target: LAMA2; (-) strand; PAM type: NRG; PAM sequence: AGG
caatggagatatacataatt

SEQ ID NO: 75131 - DNA, 20 bp, Artificial Sequence
  Description of Artificial Sequence: Synthetic oligonucleotide
  Target: LAMA2; (-) strand; PAM type: NRG; PAM sequence: TAG
tcaatggagatatacataat

SEQ ID NO: 75132 - DNA, 20 bp, Artificial Sequence
  Description of Artificial Sequence: Synthetic oligonucleotide
  Target: LAMA2; (-) strand; PAM type: NRG; PAM sequence: GAG
atcagacatgagtatcaatg

SEQ ID NO: 75133 - DNA, 20 bp, Artificial Sequence
  Description of Artificial Sequence: Synthetic oligonucleotide
  Target: LAMA2; (-) strand; PAM type: NRG; PAM sequence: TGG
atatcagacatgagtatcaa

SEQ ID NO: 75134 - DNA, 20 bp, Artificial Sequence
  Description of Artificial Sequence: Synthetic oligonucleotide
  Target: LAMA2; (-) strand; PAM type: NRG; PAM sequence: GAG
tgggagagaatatcagacat

SEQ ID NO: 75135 - DNA, 20 bp, Artificial Sequence
  Description of Artificial Sequence: Synthetic oligonucleotide
  Target: LAMA2; (-) strand; PAM type: NRG; PAM sequence: CAG
gactatgtgggagagaatat

SEQ ID NO: 75136 - DNA, 20 bp, Artificial Sequence
  Description of Artificial Sequence: Synthetic oligonucleotide
  Target: LAMA2; (-) strand; PAM type: NRG; PAM sequence: GAG
gatgtttggactatgtggga

SEQ ID NO: 75137 - DNA, 20 bp, Artificial Sequence
  Description of Artificial Sequence: Synthetic oligonucleotide
  Target: LAMA2; (-) strand; PAM type: NRG; PAM sequence: GAG
cagatgtttggactatgtgg

SEQ ID NO: 75138 - DNA, 20 bp, Artificial Sequence
  Description of Artificial Sequence: Synthetic oligonucleotide
  Target: LAMA2; (-) strand; PAM type: NRG; PAM sequence: GGG
ttcagatgtttggactatgt

SEQ ID NO: 75139 - DNA, 20 bp, Artificial Sequence
  Description of Artificial Sequence: Synthetic oligonucleotide
  Target: LAMA2; (-) strand; PAM type: NRG; PAM sequence: TGG
cttcagatgtttggactatg

SEQ ID NO: 75140 - DNA, 20 bp, Artificial Sequence
  Description of Artificial Sequence: Synthetic oligonucleotide
  Target: LAMA2; (-) strand; PAM type: NRG; PAM sequence: TGG
tgatactagcttcagatgtt

SEQ ID NO: 75141 - DNA, 20 bp, Artificial Sequence
  Description of Artificial Sequence: Synthetic oligonucleotide
  Target: LAMA2; (-) strand; PAM type: NRG; PAM sequence: CAG
ataaatgatgatactagctt

SEQ ID NO: 75142 - DNA, 20 bp, Artificial Sequence
  Description of Artificial Sequence: Synthetic oligonucleotide
  Target: LAMA2; (-) strand; PAM type: NRG; PAM sequence: TAG
gtaaatataaatgatgatac

SEQ ID NO: 75143 - DNA, 20 bp, Artificial Sequence
  Description of Artificial Sequence: Synthetic oligonucleotide
  Target: LAMA2; (-) strand; PAM type: NRG; PAM sequence: GGG
gcatgatagaatgtgaatat

SEQ ID NO: 75144 - DNA, 20 bp, Artificial Sequence
  Description of Artificial Sequence: Synthetic oligonucleotide
  Target: LAMA2; (-) strand; PAM type: NRG; PAM sequence: TGG
ggcatgatagaatgtgaata

SEQ ID NO: 75145 - DNA, 20 bp, Artificial Sequence
  Description of Artificial Sequence: Synthetic oligonucleotide
  Target: LAMA2; (-) strand; PAM type: NRG; PAM sequence: TAG
attggctggggtgggcatga

SEQ ID NO: 75146 - DNA, 20 bp, Artificial Sequence
  Description of Artificial Sequence: Synthetic oligonucleotide
  Target: LAMA2; (-) strand; PAM type: NRG; PAM sequence: GGG
aaccctagattggctggggt

SEQ ID NO: 75147 - DNA, 20 bp, Artificial Sequence
  Description of Artificial Sequence: Synthetic oligonucleotide
  Target: LAMA2; (-) strand; PAM type: NRG; PAM sequence: TGG
taaccctagattggctgggg

SEQ ID NO: 75148 - DNA, 20 bp, Artificial Sequence
  Description of Artificial Sequence: Synthetic oligonucleotide
  Target: LAMA2; (-) strand; PAM type: NRG; PAM sequence: GGG
agataaccctagattggctg

SEQ ID NO: 75149 - DNA, 20 bp, Artificial Sequence
  Description of Artificial Sequence: Synthetic oligonucleotide
  Target: LAMA2; (-) strand; PAM type: NRG; PAM sequence: GGG
gagataaccctagattggct

SEQ ID NO: 75150 - DNA, 20 bp, Artificial Sequence
  Description of Artificial Sequence: Synthetic oligonucleotide
  Target: LAMA2; (-) strand; PAM type: NRG; PAM sequence: TGG
agagataaccctagattggc

SEQ ID NO: 75151 - DNA, 20 bp, Artificial Sequence
  Description of Artificial Sequence: Synthetic oligonucleotide
  Target: LAMA2; (-) strand; PAM type: NRG; PAM sequence: TGG
gttgagagataaccctagat

SEQ ID NO: 75152 - DNA, 20 bp, Artificial Sequence
  Description of Artificial Sequence: Synthetic oligonucleotide
  Target: LAMA2; (-) strand; PAM type: NRG; PAM sequence: TAG
gaagtgttgagagataaccc

SEQ ID NO: 75153 - DNA, 20 bp, Artificial Sequence
  Description of Artificial Sequence: Synthetic oligonucleotide
  Target: LAMA2; (-) strand; PAM type: NRG; PAM sequence: GAG
attttccctagaagtgttga

SEQ ID NO: 75154 - DNA, 20 bp, Artificial Sequence
  Description of Artificial Sequence: Synthetic oligonucleotide
  Target: LAMA2; (-) strand; PAM type: NRG; PAM sequence: GAG
taattttccctagaagtgtt

SEQ ID NO: 75155 - DNA, 20 bp, Artificial Sequence
  Description of Artificial Sequence: Synthetic oligonucleotide
  Target: LAMA2; (-) strand; PAM type: NRG; PAM sequence: AAG
aaaaccctaattttccctag

SEQ ID NO: 75156 - DNA, 20 bp, Artificial Sequence
  Description of Artificial Sequence: Synthetic oligonucleotide
  Target: LAMA2; (-) strand; PAM type: NRG; PAM sequence: TAG
gccaaaaccctaattttccc

SEQ ID NO: 75157 - DNA, 20 bp, Artificial Sequence
  Description of Artificial Sequence: Synthetic oligonucleotide
  Target: LAMA2; (-) strand; PAM type: NRG; PAM sequence: CAG
agtgcctaatgagggtctga

SEQ ID NO: 75158 - DNA, 20 bp, Artificial Sequence
  Description of Artificial Sequence: Synthetic oligonucleotide
  Target: LAMA2; (-) strand; PAM type: NRG; PAM sequence: GGG
ataaaaatagtgcctaatga

SEQ ID NO: 75159 - DNA, 20 bp, Artificial Sequence
  Description of Artificial Sequence: Synthetic oligonucleotide
  Target: LAMA2; (-) strand; PAM type: NRG; PAM sequence: AGG
tataaaaatagtgcctaatg

SEQ ID NO: 75160 - DNA, 20 bp, Artificial Sequence
  Description of Artificial Sequence: Synthetic oligonucleotide
  Target: LAMA2; (-) strand; PAM type: NRG; PAM sequence: GAG
atataaaaatagtgcctaat

SEQ ID NO: 75161 - DNA, 20 bp, Artificial Sequence
  Description of Artificial Sequence: Synthetic oligonucleotide
  Target: LAMA2; (-) strand; PAM type: NRG; PAM sequence: TAG
ggtatacattaatataaaaa

SEQ ID NO: 75162 - DNA, 20 bp, Artificial Sequence
  Description of Artificial Sequence: Synthetic oligonucleotide
  Target: LAMA2; (-) strand; PAM type: NRG; PAM sequence: TGG
tttaaaatatagtgaagcac

SEQ ID NO: 75163 - DNA, 20 bp, Artificial Sequence
  Description of Artificial Sequence: Synthetic oligonucleotide
  Target: LAMA2; (-) strand; PAM type: NRG; PAM sequence: AAG
atggaatttaaaatatagtg

SEQ ID NO: 75164 - DNA, 20 bp, Artificial Sequence
  Description of Artificial Sequence: Synthetic oligonucleotide
  Target: LAMA2; (-) strand; PAM type: NRG; PAM sequence: TAG
tgaacatggaatttaaaata

SEQ ID NO: 75165 - DNA, 20 bp, Artificial Sequence
  Description of Artificial Sequence: Synthetic oligonucleotide
  Target: LAMA2; (-) strand; PAM type: NRG; PAM sequence: TGG
aaaactggtatttttgaaca

SEQ ID NO: 75166 - DNA, 20 bp, Artificial Sequence
  Description of Artificial Sequence: Synthetic oligonucleotide
  Target: LAMA2; (-) strand; PAM type: NRG; PAM sequence: TGG
ggaatgtttttccccaaaac

SEQ ID NO: 75167 - DNA, 20 bp, Artificial Sequence
  Description of Artificial Sequence: Synthetic oligonucleotide
  Target: LAMA2; (-) strand; PAM type: NRG; PAM sequence: TGG
tttctgctgagagtaccatt

SEQ ID NO: 75168 - DNA, 20 bp, Artificial Sequence
  Description of Artificial Sequence: Synthetic oligonucleotide
  Target: LAMA2; (-) strand; PAM type: NRG; PAM sequence: GAG
cagattgagatttctgctga

SEQ ID NO: 75169 - DNA, 20 bp, Artificial Sequence
  Description of Artificial Sequence: Synthetic oligonucleotide
  Target: LAMA2; (-) strand; PAM type: NRG; PAM sequence: GAG
ggcagattgagatttctgct

SEQ ID NO: 75170 - DNA, 20 bp, Artificial Sequence
  Description of Artificial Sequence: Synthetic oligonucleotide
  Target: LAMA2; (-) strand; PAM type: NRG; PAM sequence: GAG
tccttgtcatttggcagatt

SEQ ID NO: 75171 - DNA, 20 bp, Artificial Sequence
  Description of Artificial Sequence: Synthetic oligonucleotide
  Target: LAMA2; (-) strand; PAM type: NRG; PAM sequence: CAG
tttgagtccttgtcatttgg

SEQ ID NO: 75172 - DNA, 20 bp, Artificial Sequence
  Description of Artificial Sequence: Synthetic oligonucleotide
  Target: LAMA2; (-) strand; PAM type: NRG; PAM sequence: TGG
gcatttgagtccttgtcatt

SEQ ID NO: 75173 - DNA, 20 bp, Artificial Sequence
  Description of Artificial Sequence: Synthetic oligonucleotide
  Target: LAMA2; (-) strand; PAM type: NRG; PAM sequence: GAG
ctgtttgactcactgcattt

SEQ ID NO: 75174 - DNA, 20 bp, Artificial Sequence
  Description of Artificial Sequence: Synthetic oligonucleotide
  Target: LAMA2; (-) strand; PAM type: NRG; PAM sequence: CAG
taggcacaaagcaggttgaa

SEQ ID NO: 75175 - DNA, 20 bp, Artificial Sequence
  Description of Artificial Sequence: Synthetic oligonucleotide
  Target: LAMA2; (-) strand; PAM type: NRG; PAM sequence: AGG
gatgcctctaggcacaaagc

SEQ ID NO: 75176 - DNA, 20 bp, Artificial Sequence
  Description of Artificial Sequence: Synthetic oligonucleotide
  Target: LAMA2; (-) strand; PAM type: NRG; PAM sequence: CAG
ggatgcctctaggcacaaag

SEQ ID NO: 75177 - DNA, 20 bp, Artificial Sequence
  Description of Artificial Sequence: Synthetic oligonucleotide
  Target: LAMA2; (-) strand; PAM type: NRG; PAM sequence: AAG
attggatgcctctaggcaca

SEQ ID NO: 75178 - DNA, 20 bp, Artificial Sequence
  Description of Artificial Sequence: Synthetic oligonucleotide
  Target: LAMA2; (-) strand; PAM type: NRG; PAM sequence: AGG
gccaggaattggatgcctct

SEQ ID NO: 75179 - DNA, 20 bp, Artificial Sequence
  Description of Artificial Sequence: Synthetic oligonucleotide
  Target: LAMA2; (-) strand; PAM type: NRG; PAM sequence: TAG
ggccaggaattggatgcctc

SEQ ID NO: 75180 - DNA, 20 bp, Artificial Sequence
  Description of Artificial Sequence: Synthetic oligonucleotide
  Target: LAMA2; (-) strand; PAM type: NRG; PAM sequence: TGG
aggccaaactggccaggaat

SEQ ID NO: 75181 - DNA, 20 bp, Artificial Sequence
  Description of Artificial Sequence: Synthetic oligonucleotide
  Target: LAMA2; (-) strand; PAM type: NRG; PAM sequence: AGG
atcctcaggccaaactggcc

SEQ ID NO: 75182 - DNA, 20 bp, Artificial Sequence
  Description of Artificial Sequence: Synthetic oligonucleotide
  Target: LAMA2; (-) strand; PAM type: NRG; PAM sequence: CAG
tatcctcaggccaaactggc

SEQ ID NO: 75183 - DNA, 20 bp, Artificial Sequence
  Description of Artificial Sequence: Synthetic oligonucleotide
  Target: LAMA2; (-) strand; PAM type: NRG; PAM sequence: TGG
cccatatcctcaggccaaac

SEQ ID NO: 75184 - DNA, 20 bp, Artificial Sequence
  Description of Artificial Sequence: Synthetic oligonucleotide
  Target: LAMA2; (-) strand; PAM type: NRG; PAM sequence: AGG
ctccctactcccatatcctc

SEQ ID NO: 75185 - DNA, 20 bp, Artificial Sequence
  Description of Artificial Sequence: Synthetic oligonucleotide
  Target: LAMA2; (-) strand; PAM type: NRG; PAM sequence: CAG
actccctactcccatatcct

SEQ ID NO: 75186 - DNA, 20 bp, Artificial Sequence
  Description of Artificial Sequence: Synthetic oligonucleotide
  Target: LAMA2; (-) strand; PAM type: NRG; PAM sequence: AGG
gtcttatgtaaactgaatct

SEQ ID NO: 75187 - DNA, 20 bp, Artificial Sequence
  Description of Artificial Sequence: Synthetic oligonucleotide
  Target: LAMA2; (-) strand; PAM type: NRG; PAM sequence: TAG
agtcttatgtaaactgaatc

SEQ ID NO: 75188 - DNA, 20 bp, Artificial Sequence
  Description of Artificial Sequence: Synthetic oligonucleotide
  Target: LAMA2; (-) strand; PAM type: NRG; PAM sequence: TAG
ttaaattgtttgagaattat

SEQ ID NO: 75189 - DNA, 20 bp, Artificial Sequence
  Description of Artificial Sequence: Synthetic oligonucleotide
  Target: LAMA2; (-) strand; PAM type: NRG; PAM sequence: GAG
agaatagtcttaaattgttt

SEQ ID NO: 75190 - DNA, 20 bp, Artificial Sequence
  Description of Artificial Sequence: Synthetic oligonucleotide
  Target: LAMA2; (-) strand; PAM type: NRG; PAM sequence: TAG
tcatttttaaaggtatagaa

SEQ ID NO: 75191 - DNA, 20 bp, Artificial Sequence
  Description of Artificial Sequence: Synthetic oligonucleotide
  Target: LAMA2; (-) strand; PAM type: NRG; PAM sequence: TAG
ttgaatcatttttaaaggta

SEQ ID NO: 75192 - DNA, 20 bp, Artificial Sequence
  Description of Artificial Sequence: Synthetic oligonucleotide
  Target: LAMA2; (-) strand; PAM type: NRG; PAM sequence: AGG
ctgaattgaatcatttttaa

SEQ ID NO: 75193 - DNA, 20 bp, Artificial Sequence
  Description of Artificial Sequence: Synthetic oligonucleotide
  Target: LAMA2; (-) strand; PAM type: NRG; PAM sequence: AAG
tctgaattgaatcattttta

SEQ ID NO: 75194 - DNA, 20 bp, Artificial Sequence
  Description of Artificial Sequence: Synthetic oligonucleotide
  Target: LAMA2; (-) strand; PAM type: NRG; PAM sequence: AAG
cgcatgttacatacctgccg

SEQ ID NO: 75195 - DNA, 20 bp, Artificial Sequence
  Description of Artificial Sequence: Synthetic oligonucleotide
  Target: LAMA2; (-) strand; PAM type: NRG; PAM sequence: GGG
atgaagggagagaatgggta

SEQ ID NO: 75196 - DNA, 20 bp, Artificial Sequence
  Description of Artificial Sequence: Synthetic oligonucleotide
  Target: LAMA2; (-) strand; PAM type: NRG; PAM sequence: AGG
aatgaagggagagaatgggt

SEQ ID NO: 75197 - DNA, 20 bp, Artificial Sequence
  Description of Artificial Sequence: Synthetic oligonucleotide
  Target: LAMA2; (-) strand; PAM type: NRG; PAM sequence: TAG
taatgaagggagagaatggg

SEQ ID NO: 75198 - DNA, 20 bp, Artificial Sequence
  Description of Artificial Sequence: Synthetic oligonucleotide
  Target: LAMA2; (-) strand; PAM type: NRG; PAM sequence: GGG
tattaatgaagggagagaat

SEQ ID NO: 75199 - DNA, 20 bp, Artificial Sequence
  Description of Artificial Sequence: Synthetic oligonucleotide
  Target: LAMA2; (-) strand; PAM type: NRG; PAM sequence: TGG
ttattaatgaagggagagaa

SEQ ID NO: 75200 - DNA, 20 bp, Artificial Sequence
  Description of Artificial Sequence: Synthetic oligonucleotide
  Target: LAMA2; (-) strand; PAM type: NRG; PAM sequence: GAG
aaccattattaatgaaggga

SEQ ID NO: 75201 - DNA, 20 bp, Artificial Sequence
  Description of Artificial Sequence: Synthetic oligonucleotide
  Target: LAMA2; (-) strand; PAM type: NRG; PAM sequence: GAG
agaaccattattaatgaagg

SEQ ID NO: 75202 - DNA, 20 bp, Artificial Sequence
  Description of Artificial Sequence: Synthetic oligonucleotide
  Target: LAMA2; (-) strand; PAM type: NRG; PAM sequence: GGG
ggagaaccattattaatgaa

SEQ ID NO: 75203 - DNA, 20 bp, Artificial Sequence
  Description of Artificial Sequence: Synthetic oligonucleotide
  Target: LAMA2; (-) strand; PAM type: NRG; PAM sequence: AGG
tggagaaccattattaatga

SEQ ID NO: 75204 - DNA, 20 bp, Artificial Sequence
  Description of Artificial Sequence: Synthetic oligonucleotide
  Target: LAMA2; (-) strand; PAM type: NRG; PAM sequence: AAG
atggagaaccattattaatg

SEQ ID NO: 75205 - DNA, 20 bp, Artificial Sequence
  Description of Artificial Sequence: Synthetic oligonucleotide
  Target: LAMA2; (-) strand; PAM type: NRG; PAM sequence: GAG
ctgacttggtttaaggaatg

SEQ ID NO: 75206 - DNA, 20 bp, Artificial Sequence
  Description of Artificial Sequence: Synthetic oligonucleotide
  Target: LAMA2; (-) strand; PAM type: NRG; PAM sequence: TGG
ggctgacttggtttaaggaa

SEQ ID NO: 75207 - DNA, 20 bp, Artificial Sequence
  Description of Artificial Sequence: Synthetic oligonucleotide
  Target: LAMA2; (-) strand; PAM type: NRG; PAM sequence: AGG
tggcaggctgacttggttta

SEQ ID NO: 75208 - DNA, 20 bp, Artificial Sequence
  Description of Artificial Sequence: Synthetic oligonucleotide
  Target: LAMA2; (-) strand; PAM type: NRG; PAM sequence: AAG
ttggcaggctgacttggttt

SEQ ID NO: 75209 - DNA, 20 bp, Artificial Sequence
  Description of Artificial Sequence: Synthetic oligonucleotide
  Target: LAMA2; (-) strand; PAM type: NRG; PAM sequence: TGG
ttcatattggcaggctgact

SEQ ID NO: 75210 - DNA, 20 bp, Artificial Sequence
  Description of Artificial Sequence: Synthetic oligonucleotide
  Target: LAMA2; (-) strand; PAM type: NRG; PAM sequence: AGG
gtcttttgtttcatattggc

SEQ ID NO: 75211 - DNA, 20 bp, Artificial Sequence
  Description of Artificial Sequence: Synthetic oligonucleotide
  Target: LAMA2; (-) strand; PAM type: NRG; PAM sequence: CAG
tgtcttttgtttcatattgg

SEQ ID NO: 75212 - DNA, 20 bp, Artificial Sequence
  Description of Artificial Sequence: Synthetic oligonucleotide
  Target: LAMA2; (-) strand; PAM type: NRG; PAM sequence: TGG
acatgtcttttgtttcatat

SEQ ID NO: 75213 - DNA, 20 bp, Artificial Sequence
  Description of Artificial Sequence: Synthetic oligonucleotide
  Target: LAMA2; (-) strand; PAM type: NRG; PAM sequence: AAG
gaaaacaatatagccaatta

SEQ ID NO: 75214 - DNA, 20 bp, Artificial Sequence
  Description of Artificial Sequence: Synthetic oligonucleotide
  Target: LAMA2; (-) strand; PAM type: NRG; PAM sequence: TAG
gtttaggagtgaaaacaata

SEQ ID NO: 75215 - DNA, 20 bp, Artificial Sequence
  Description of Artificial Sequence: Synthetic oligonucleotide
  Target: LAMA2; (-) strand; PAM type: NRG; PAM sequence: GAG
ttttagtaagtgttgtttag

SEQ ID NO: 75216 - DNA, 20 bp, Artificial Sequence
  Description of Artificial Sequence: Synthetic oligonucleotide
  Target: LAMA2; (-) strand; PAM type: NRG; PAM sequence: AGG
gtttttagtaagtgttgttt

SEQ ID NO: 75217 - DNA, 20 bp, Artificial Sequence
  Description of Artificial Sequence: Synthetic oligonucleotide
  Target: LAMA2; (-) strand; PAM type: NRG; PAM sequence: TAG
agtttttagtaagtgttgtt

SEQ ID NO: 75218 - DNA, 20 bp, Artificial Sequence
  Description of Artificial Sequence: Synthetic oligonucleotide
  Target: LAMA2; (-) strand; PAM type: NRG; PAM sequence: AAG
atcaataagcagtttttagt

SEQ ID NO: 75219 - DNA, 20 bp, Artificial Sequence
  Description of Artificial Sequence: Synthetic oligonucleotide
  Target: LAMA2; (-) strand; PAM type: NRG; PAM sequence: TAG
taccatcaataagcagtttt

SEQ ID NO: 75220 - DNA, 20 bp, Artificial Sequence
  Description of Artificial Sequence: Synthetic oligonucleotide
  Target: LAMA2; (-) strand; PAM type: NRG; PAM sequence: CAG
taatagttaccatcaataag

SEQ ID NO: 75221 - DNA, 20 bp, Artificial Sequence
  Description of Artificial Sequence: Synthetic oligonucleotide
  Target: LAMA2; (-) strand; PAM type: NRG; PAM sequence: AAG
tcctaatagttaccatcaat

SEQ ID NO: 75222 - DNA, 20 bp, Artificial Sequence
  Description of Artificial Sequence: Synthetic oligonucleotide
  Target: LAMA2; (-) strand; PAM type: NRG; PAM sequence: TAG
gttcagtcagttgctcctaa

SEQ ID NO: 75223 - DNA, 20 bp, Artificial Sequence
  Description of Artificial Sequence: Synthetic oligonucleotide
  Target: LAMA2; (-) strand; PAM type: NRG; PAM sequence: CAG
tgtcacagagacagttcagt

SEQ ID NO: 75224 - DNA, 20 bp, Artificial Sequence
  Description of Artificial Sequence: Synthetic oligonucleotide
  Target: LAMA2; (-) strand; PAM type: NRG; PAM sequence: CAG
aacatgtcacagagacagtt

SEQ ID NO: 75225 - DNA, 20 bp, Artificial Sequence
  Description of Artificial Sequence: Synthetic oligonucleotide
  Target: LAMA2; (-) strand; PAM type: NRG; PAM sequence: CAG
aaggaaacatgtcacagaga

SEQ ID NO: 75226 - DNA, 20 bp, Artificial Sequence
  Description of Artificial Sequence: Synthetic oligonucleotide
  Target: LAMA2; (-) strand; PAM type: NRG; PAM sequence: GAG
acgtaaggaaacatgtcaca

SEQ ID NO: 75227 - DNA, 20 bp, Artificial Sequence
  Description of Artificial Sequence: Synthetic oligonucleotide
  Target: LAMA2; (-) strand; PAM type: NRG; PAM sequence: CAG
agacgtaaggaaacatgtca

SEQ ID NO: 75228 - DNA, 20 bp, Artificial Sequence
  Description of Artificial Sequence: Synthetic oligonucleotide
  Target: LAMA2; (-) strand; PAM type: NRG; PAM sequence: AGG
atgagtgacaaatagacgta

SEQ ID NO: 75229 - DNA, 20 bp, Artificial Sequence
  Description of Artificial Sequence: Synthetic oligonucleotide
  Target: LAMA2; (-) strand; PAM type: NRG; PAM sequence: AAG
catgagtgacaaatagacgt

SEQ ID NO: 75230 - DNA, 20 bp, Artificial Sequence
  Description of Artificial Sequence: Synthetic oligonucleotide
  Target: LAMA2; (-) strand; PAM type: NRG; PAM sequence: TAG
acttccccatgagtgacaaa

SEQ ID NO: 75231 - DNA, 20 bp, Artificial Sequence
  Description of Artificial Sequence: Synthetic oligonucleotide
  Target: LAMA2; (-) strand; PAM type: NRG; PAM sequence: GAG
tatttcattcacttccccat

SEQ ID NO: 75232 - DNA, 20 bp, Artificial Sequence
  Description of Artificial Sequence: Synthetic oligonucleotide
  Target: LAMA2; (-) strand; PAM type: NRG; PAM sequence: TGG
tcttcagtcttatcattcta

SEQ ID NO: 75233 - DNA, 20 bp, Artificial Sequence
  Description of Artificial Sequence: Synthetic oligonucleotide
  Target: LAMA2; (-) strand; PAM type: NRG; PAM sequence: CAG
tgaatttaattcttattctt

SEQ ID NO: 75234 - DNA, 20 bp, Artificial Sequence
  Description of Artificial Sequence: Synthetic oligonucleotide
  Target: LAMA2; (-) strand; PAM type: NRG; PAM sequence: AGG
atgaatagatagcctaggag

SEQ ID NO: 75235 - DNA, 20 bp, Artificial Sequence
  Description of Artificial Sequence: Synthetic oligonucleotide
  Target: LAMA2; (-) strand; PAM type: NRG; PAM sequence: GAG
aatgaatagatagcctagga

SEQ ID NO: 75236 - DNA, 20 bp, Artificial Sequence
  Description of Artificial Sequence: Synthetic oligonucleotide
  Target: LAMA2; (-) strand; PAM type: NRG; PAM sequence: GAG
aaaatgaatagatagcctag

SEQ ID NO: 75237 - DNA, 20 bp, Artificial Sequence
  Description of Artificial Sequence: Synthetic oligonucleotide
  Target: LAMA2; (-) strand; PAM type: NRG; PAM sequence: AGG
ataaaatgaatagatagcct

SEQ ID NO: 75238 - DNA, 20 bp, Artificial Sequence
  Description of Artificial Sequence: Synthetic oligonucleotide
  Target: LAMA2; (-) strand; PAM type: NRG; PAM sequence: TAG
tataaaatgaatagatagcc

SEQ ID NO: 75239 - DNA, 20 bp, Artificial Sequence
  Description of Artificial Sequence: Synthetic oligonucleotide
  Target: LAMA2; (-) strand; PAM type: NRG; PAM sequence: TAG
agctatataaaatgaataga

SEQ ID NO: 75240 - DNA, 20 bp, Artificial Sequence
  Description of Artificial Sequence: Synthetic oligonucleotide
  Target: LAMA2; (-) strand; PAM type: NRG; PAM sequence: TAG
agtaagctatataaaatgaa

SEQ ID NO: 75241 - DNA, 20 bp, Artificial Sequence
  Description of Artificial Sequence: Synthetic oligonucleotide
  Target: LAMA2; (-) strand; PAM type: NRG; PAM sequence: AAG
agtaacatattccacaaagt

SEQ ID NO: 75242 - DNA, 20 bp, Artificial Sequence
  Description of Artificial Sequence: Synthetic oligonucleotide
  Target: LAMA2; (-) strand; PAM type: NRG; PAM sequence: AAG
aaaaagtaacatattccaca

SEQ ID NO: 75243 - DNA, 20 bp, Artificial Sequence
  Description of Artificial Sequence: Synthetic oligonucleotide
  Target: LAMA2; (-) strand; PAM type: NRG; PAM sequence: AAG
tatcacctgtctattcaaaa

SEQ ID NO: 75244 - DNA, 20 bp, Artificial Sequence
  Description of Artificial Sequence: Synthetic oligonucleotide
  Target: LAMA2; (-) strand; PAM type: NRG; PAM sequence: AGG
cattgagctgagagtcttgg

SEQ ID NO: 75245 - DNA, 20 bp, Artificial Sequence
  Description of Artificial Sequence: Synthetic oligonucleotide
  Target: LAMA2; (-) strand; PAM type: NRG; PAM sequence: GAG
tcattgagctgagagtcttg

SEQ ID NO: 75246 - DNA, 20 bp, Artificial Sequence
  Description of Artificial Sequence: Synthetic oligonucleotide
  Target: LAMA2; (-) strand; PAM type: NRG; PAM sequence: TGG
tatcattgagctgagagtct

SEQ ID NO: 75247 - DNA, 20 bp, Artificial Sequence
  Description of Artificial Sequence: Synthetic oligonucleotide
  Target: LAMA2; (-) strand; PAM type: NRG; PAM sequence: GAG
ttatattatcattgagctga

SEQ ID NO: 75248 - DNA, 20 bp, Artificial Sequence
  Description of Artificial Sequence: Synthetic oligonucleotide
  Target: LAMA2; (-) strand; PAM type: NRG; PAM sequence: GAG
agttatattatcattgagct

SEQ ID NO: 75249 - DNA, 20 bp, Artificial Sequence
  Description of Artificial Sequence: Synthetic oligonucleotide
  Target: LAMA2; (-) strand; PAM type: NRG; PAM sequence: GAG
atttcagttatattatcatt

SEQ ID NO: 75250 - DNA, 20 bp, Artificial Sequence
  Description of Artificial Sequence: Synthetic oligonucleotide
  Target: LAMA2; (-) strand; PAM type: NRG; PAM sequence: CAG
agagacctcaattattattt

SEQ ID NO: 75251 - DNA, 20 bp, Artificial Sequence
  Description of Artificial Sequence: Synthetic oligonucleotide
  Target: LAMA2; (-) strand; PAM type: NRG; PAM sequence: GAG
aaatatttacctgagaatca

SEQ ID NO: 75252 - DNA, 20 bp, Artificial Sequence
  Description of Artificial Sequence: Synthetic oligonucleotide
  Target: LAMA2; (-) strand; PAM type: NRG; PAM sequence: CAG
tgaaatatttacctgagaat

SEQ ID NO: 75253 - DNA, 20 bp, Artificial Sequence
  Description of Artificial Sequence: Synthetic oligonucleotide
  Target: LAMA2; (-) strand; PAM type: NRG; PAM sequence: GAG
tatggatgaaatatttacct

SEQ ID NO: 75254 - DNA, 20 bp, Artificial Sequence
  Description of Artificial Sequence: Synthetic oligonucleotide
  Target: LAMA2; (-) strand; PAM type: NRG; PAM sequence: TGG
ttttaatccttaccagatta

SEQ ID NO: 75255 - DNA, 20 bp, Artificial Sequence
  Description of Artificial Sequence: Synthetic oligonucleotide
  Target: LAMA2; (-) strand; PAM type: NRG; PAM sequence: CAG
agtcaacttttaatccttac

SEQ ID NO: 75256 - DNA, 20 bp, Artificial Sequence
  Description of Artificial Sequence: Synthetic oligonucleotide
  Target: LAMA2; (-) strand; PAM type: NRG; PAM sequence: AAG
tagcgattgtcaacttttaa

SEQ ID NO: 75257 - DNA, 20 bp, Artificial Sequence
  Description of Artificial Sequence: Synthetic oligonucleotide
  Target: LAMA2; (-) strand; PAM type: NRG; PAM sequence: TAG
ctctgaaccatttttaagtt

SEQ ID NO: 75258 - DNA, 20 bp, Artificial Sequence
  Description of Artificial Sequence: Synthetic oligonucleotide
  Target: LAMA2; (-) strand; PAM type: NRG; PAM sequence: AAG
atctcctctgaaccattttt

SEQ ID NO: 75259 - DNA, 20 bp, Artificial Sequence
  Description of Artificial Sequence: Synthetic oligonucleotide
  Target: LAMA2; (-) strand; PAM type: NRG; PAM sequence: CAG
ctttctacttacattagatc

SEQ ID NO: 75260 - DNA, 20 bp, Artificial Sequence
  Description of Artificial Sequence: Synthetic oligonucleotide
  Target: LAMA2; (-) strand; PAM type: NRG; PAM sequence: TAG
aggattctttctacttacat

SEQ ID NO: 75261 - DNA, 20 bp, Artificial Sequence
  Description of Artificial Sequence: Synthetic oligonucleotide
  Target: LAMA2; (-) strand; PAM type: NRG; PAM sequence: AGG
tgccatgatatatcagaatt

SEQ ID NO: 75262 - DNA, 20 bp, Artificial Sequence
  Description of Artificial Sequence: Synthetic oligonucleotide
  Target: LAMA2; (-) strand; PAM type: NRG; PAM sequence: TAG
atgccatgatatatcagaat

SEQ ID NO: 75263 - DNA, 20 bp, Artificial Sequence
  Description of Artificial Sequence: Synthetic oligonucleotide
  Target: LAMA2; (-) strand; PAM type: NRG; PAM sequence: CAG
ttttctatgccatgatatat

SEQ ID NO: 75264 - DNA, 20 bp, Artificial Sequence
  Description of Artificial Sequence: Synthetic oligonucleotide
  Target: LAMA2; (-) strand; PAM type: NRG; PAM sequence: AGG
tggaaccagtaccagaatcc

SEQ ID NO: 75265 - DNA, 20 bp, Artificial Sequence
  Description of Artificial Sequence: Synthetic oligonucleotide
  Target: LAMA2; (-) strand; PAM type: NRG; PAM sequence: CAG
ctggaaccagtaccagaatc

SEQ ID NO: 75266 - DNA, 20 bp, Artificial Sequence
  Description of Artificial Sequence: Synthetic oligonucleotide
  Target: LAMA2; (-) strand; PAM type: NRG; PAM sequence: CAG
caaataactggaaccagtac

SEQ ID NO: 75267 - DNA, 20 bp, Artificial Sequence
  Description of Artificial Sequence: Synthetic oligonucleotide
  Target: LAMA2; (-) strand; PAM type: NRG; PAM sequence: CAG
gtcccacaaataactggaac

SEQ ID NO: 75268 - DNA, 20 bp, Artificial Sequence
  Description of Artificial Sequence: Synthetic oligonucleotide
  Target: LAMA2; (-) strand; PAM type: NRG; PAM sequence: TGG
accaaggtcccacaaataac

SEQ ID NO: 75269 - DNA, 20 bp, Artificial Sequence
  Description of Artificial Sequence: Synthetic oligonucleotide
  Target: LAMA2; (-) strand; PAM type: NRG; PAM sequence: AGG
gagattaaatcatttgacca

SEQ ID NO: 75270 - DNA, 20 bp, Artificial Sequence
  Description of Artificial Sequence: Synthetic oligonucleotide
  Target: LAMA2; (-) strand; PAM type: NRG; PAM sequence: AAG
agagattaaatcatttgacc

SEQ ID NO: 75271 - DNA, 20 bp, Artificial Sequence
  Description of Artificial Sequence: Synthetic oligonucleotide
  Target: LAMA2; (-) strand; PAM type: NRG; PAM sequence: GAG
taaagaaatttaatcccaga

SEQ ID NO: 75272 - DNA, 20 bp, Artificial Sequence
  Description of Artificial Sequence: Synthetic oligonucleotide
  Target: LAMA2; (-) strand; PAM type: NRG; PAM sequence: GAG
attaaagaaatttaatccca

SEQ ID NO: 75273 - DNA, 20 bp, Artificial Sequence
  Description of Artificial Sequence: Synthetic oligonucleotide
  Target: LAMA2; (-) strand; PAM type: NRG; PAM sequence: CAG
ctattaaagaaatttaatcc

SEQ ID NO: 75274 - DNA, 20 bp, Artificial Sequence
  Description of Artificial Sequence: Synthetic oligonucleotide
  Target: LAMA2; (-) strand; PAM type: NRG; PAM sequence: AAG
ttgaactaattcatctatta

SEQ ID NO: 75275 - DNA, 20 bp, Artificial Sequence
  Description of Artificial Sequence: Synthetic oligonucleotide
  Target: LAMA2; (-) strand; PAM type: NRG; PAM sequence: GGG
atgctgccttagaacaatct

SEQ ID NO: 75276 - DNA, 20 bp, Artificial Sequence
  Description of Artificial Sequence: Synthetic oligonucleotide
  Target: LAMA2; (-) strand; PAM type: NRG; PAM sequence: TGG
catgctgccttagaacaatc

SEQ ID NO: 75277 - DNA, 20 bp, Artificial Sequence
  Description of Artificial Sequence: Synthetic oligonucleotide
  Target: LAMA2; (-) strand; PAM type: NRG; PAM sequence: TAG
tagaaaataccatgctgcct

SEQ ID NO: 75278 - DNA, 20 bp, Artificial Sequence
  Description of Artificial Sequence: Synthetic oligonucleotide
  Target: LAMA2; (-) strand; PAM type: NRG; PAM sequence: TAG
tagccaaagctatattattt

SEQ ID NO: 75279 - DNA, 20 bp, Artificial Sequence
  Description of Artificial Sequence: Synthetic oligonucleotide
  Target: LAMA2; (-) strand; PAM type: NRG; PAM sequence: AAG
caaatgttgtatgatagcca

SEQ ID NO: 75280 - DNA, 20 bp, Artificial Sequence
  Description of Artificial Sequence: Synthetic oligonucleotide
  Target: LAMA2; (-) strand; PAM type: NRG; PAM sequence: TAG
tatcctcaaatgttgtatga

SEQ ID NO: 75281 - DNA, 20 bp, Artificial Sequence
  Description of Artificial Sequence: Synthetic oligonucleotide
  Target: LAMA2; (-) strand; PAM type: NRG; PAM sequence: TAG
agaaaagtatccaaaacttt

SEQ ID NO: 75282 - DNA, 20 bp, Artificial Sequence
  Description of Artificial Sequence: Synthetic oligonucleotide
  Target: LAMA2; (-) strand; PAM type: NRG; PAM sequence: AAG
gtctggataatgttagagaa

SEQ ID NO: 75283 - DNA, 20 bp, Artificial Sequence
  Description of Artificial Sequence: Synthetic oligonucleotide
  Target: LAMA2; (-) strand; PAM type: NRG; PAM sequence: GAG
actttgtctggataatgtta

SEQ ID NO: 75284 - DNA, 20 bp, Artificial Sequence
  Description of Artificial Sequence: Synthetic oligonucleotide
  Target: LAMA2; (-) strand; PAM type: NRG; PAM sequence: TAG
ctactttgtctggataatgt

SEQ ID NO: 75285 - DNA, 20 bp, Artificial Sequence
  Description of Artificial Sequence: Synthetic oligonucleotide
  Target: LAMA2; (-) strand; PAM type: NRG; PAM sequence: TGG
tattccacagctactttgtc

SEQ ID NO: 75286 - DNA, 20 bp, Artificial Sequence
  Description of Artificial Sequence: Synthetic oligonucleotide
  Target: LAMA2; (-) strand; PAM type: NRG; PAM sequence: CAG
gacgagtgagatttattcca

SEQ ID NO: 75287 - DNA, 20 bp, Artificial Sequence
  Description of Artificial Sequence: Synthetic oligonucleotide
  Target: LAMA2; (-) strand; PAM type: NRG; PAM sequence: GAG
taaaactaaagctgacgagt

SEQ ID NO: 75288 - DNA, 20 bp, Artificial Sequence
  Description of Artificial Sequence: Synthetic oligonucleotide
  Target: LAMA2; (-) strand; PAM type: NRG; PAM sequence: GAG
attttaaaactaaagctgac

SEQ ID NO: 75289 - DNA, 20 bp, Artificial Sequence
  Description of Artificial Sequence: Synthetic oligonucleotide
  Target: LAMA2; (-) strand; PAM type: NRG; PAM sequence: AAG
agtacataattttaaaacta

SEQ ID NO: 75290 - DNA, 20 bp, Artificial Sequence
  Description of Artificial Sequence: Synthetic oligonucleotide
  Target: LAMA2; (-) strand; PAM type: NRG; PAM sequence: AAG
gtattccagggattatgtga

SEQ ID NO: 75291 - DNA, 20 bp, Artificial Sequence
  Description of Artificial Sequence: Synthetic oligonucleotide
  Target: LAMA2; (-) strand; PAM type: NRG; PAM sequence: GGG
caattaataattgtattcca

SEQ ID NO: 75292 - DNA, 20 bp, Artificial Sequence
  Description of Artificial Sequence: Synthetic oligonucleotide
  Target: LAMA2; (-) strand; PAM type: NRG; PAM sequence: AGG
acaattaataattgtattcc

SEQ ID NO: 75293 - DNA, 20 bp, Artificial Sequence
  Description of Artificial Sequence: Synthetic oligonucleotide
  Target: LAMA2; (-) strand; PAM type: NRG; PAM sequence: CAG
aacaattaataattgtattc

SEQ ID NO: 75294 - DNA, 20 bp, Artificial Sequence
  Description of Artificial Sequence: Synthetic oligonucleotide
  Target: LAMA2; (-) strand; PAM type: NRG; PAM sequence: AAG
ttgactgtcacttctctgta

SEQ ID NO: 75295 - DNA, 20 bp, Artificial Sequence
  Description of Artificial Sequence: Synthetic oligonucleotide
  Target: LAMA2; (-) strand; PAM type: NRG; PAM sequence: TGG
tgcaatcatgttttatttac

SEQ ID NO: 75296 - DNA, 20 bp, Artificial Sequence
  Description of Artificial Sequence: Synthetic oligonucleotide
  Target: LAMA2; (-) strand; PAM type: NRG; PAM sequence: CAG
ctctgtatacactactgtta

SEQ ID NO: 75297 - DNA, 20 bp, Artificial Sequence
  Description of Artificial Sequence: Synthetic oligonucleotide
  Target: LAMA2; (-) strand; PAM type: NRG; PAM sequence: GAG
tccttccactcaagcagggg

SEQ ID NO: 75298 - DNA, 20 bp, Artificial Sequence
  Description of Artificial Sequence: Synthetic oligonucleotide
  Target: LAMA2; (-) strand; PAM type: NRG; PAM sequence: GGG
cctccttccactcaagcagg

SEQ ID NO: 75299 - DNA, 20 bp, Artificial Sequence
  Description of Artificial Sequence: Synthetic oligonucleotide
  Target: LAMA2; (-) strand; PAM type: NRG; PAM sequence: GGG
gcctccttccactcaagcag

SEQ ID NO: 75300 - DNA, 20 bp, Artificial Sequence
  Description of Artificial Sequence: Synthetic oligonucleotide
  Target: LAMA2; (-) strand; PAM type: NRG; PAM sequence: GGG
tgcctccttccactcaagca

SEQ ID NO: 75301 - DNA, 20 bp, Artificial Sequence
  Description of Artificial Sequence: Synthetic oligonucleotide
  Target: LAMA2; (-) strand; PAM type: NRG; PAM sequence: AGG
gtgcctccttccactcaagc

SEQ ID NO: 75302 - DNA, 20 bp, Artificial Sequence
  Description of Artificial Sequence: Synthetic oligonucleotide
  Target: LAMA2; (-) strand; PAM type: NRG; PAM sequence: CAG
tgtgcctccttccactcaag

SEQ ID NO: 75303 - DNA, 20 bp, Artificial Sequence
  Description of Artificial Sequence: Synthetic oligonucleotide
  Target: LAMA2; (-) strand; PAM type: NRG; PAM sequence: AAG
caatgtgcctccttccactc

SEQ ID NO: 75304 - DNA, 20 bp, Artificial Sequence
  Description of Artificial Sequence: Synthetic oligonucleotide
  Target: LAMA2; (-) strand; PAM type: NRG; PAM sequence: AAG
tggttttcccatattctgag

SEQ ID NO: 75305 - DNA, 20 bp, Artificial Sequence
  Description of Artificial Sequence: Synthetic oligonucleotide
  Target: LAMA2; (-) strand; PAM type: NRG; PAM sequence: GAG
tgctggttttcccatattct

SEQ ID NO: 75306 - DNA, 20 bp, Artificial Sequence
  Description of Artificial Sequence: Synthetic oligonucleotide
  Target: LAMA2; (-) strand; PAM type: NRG; PAM sequence: TGG
tttgagataagagttgttgc

SEQ ID NO: 75307 - DNA, 20 bp, Artificial Sequence
  Description of Artificial Sequence: Synthetic oligonucleotide
  Target: LAMA2; (-) strand; PAM type: NRG; PAM sequence: GAG
ctttgagacttttgagataa

SEQ ID NO: 75308 - DNA, 20 bp, Artificial Sequence
  Description of Artificial Sequence: Synthetic oligonucleotide
  Target: LAMA2; (-) strand; PAM type: NRG; PAM sequence: AAG
ggctttgagacttttgagat

SEQ ID NO: 75309 - DNA, 20 bp, Artificial Sequence
  Description of Artificial Sequence: Synthetic oligonucleotide
  Target: LAMA2; (-) strand; PAM type: NRG; PAM sequence: GAG
atattggctttgagactttt

SEQ ID NO: 75310 - DNA, 20 bp, Artificial Sequence
  Description of Artificial Sequence: Synthetic oligonucleotide
  Target: LAMA2; (-) strand; PAM type: NRG; PAM sequence: GAG
tgaatttgcatattggcttt

SEQ ID NO: 75311 - DNA, 20 bp, Artificial Sequence
  Description of Artificial Sequence: Synthetic oligonucleotide
  Target: LAMA2; (-) strand; PAM type: NRG; PAM sequence: TGG
ttggagatgaatttgcatat

SEQ ID NO: 75312 - DNA, 20 bp, Artificial Sequence
  Description of Artificial Sequence: Synthetic oligonucleotide
  Target: LAMA2; (-) strand; PAM type: NRG; PAM sequence: GAG
ttaacacataggcattattg

SEQ ID NO: 75313 - DNA, 20 bp, Artificial Sequence
  Description of Artificial Sequence: Synthetic oligonucleotide
  Target: LAMA2; (-) strand; PAM type: NRG; PAM sequence: TGG
gtttaacacataggcattat

SEQ ID NO: 75314 - DNA, 20 bp, Artificial Sequence
  Description of Artificial Sequence: Synthetic oligonucleotide
  Target: LAMA2; (-) strand; PAM type: NRG; PAM sequence: AGG
atgtaccgagtttaacacat

SEQ ID NO: 75315 - DNA, 20 bp, Artificial Sequence
  Description of Artificial Sequence: Synthetic oligonucleotide
  Target: LAMA2; (-) strand; PAM type: NRG; PAM sequence: TAG
tatgtaccgagtttaacaca

SEQ ID NO: 75316 - DNA, 20 bp, Artificial Sequence
  Description of Artificial Sequence: Synthetic oligonucleotide
  Target: LAMA2; (-) strand; PAM type: NRG; PAM sequence: GAG
aggtaaattctgtatgtacc

SEQ ID NO: 75317 - DNA, 20 bp, Artificial Sequence
  Description of Artificial Sequence: Synthetic oligonucleotide
  Target: LAMA2; (-) strand; PAM type: NRG; PAM sequence: AGG
acaatatccctcaacaatgg

SEQ ID NO: 75318 - DNA, 20 bp, Artificial Sequence
  Description of Artificial Sequence: Synthetic oligonucleotide
  Target: LAMA2; (-) strand; PAM type: NRG; PAM sequence: GAG
aacaatatccctcaacaatg

SEQ ID NO: 75319 - DNA, 20 bp, Artificial Sequence
  Description of Artificial Sequence: Synthetic oligonucleotide
  Target: LAMA2; (-) strand; PAM type: NRG; PAM sequence: TGG
ataacaatatccctcaacaa

SEQ ID NO: 75320 - DNA, 20 bp, Artificial Sequence
  Description of Artificial Sequence: Synthetic oligonucleotide
  Target: LAMA2; (-) strand; PAM type: NRG; PAM sequence: TAG
aaagaaaataactgcaaacc

SEQ ID NO: 75321 - DNA, 20 bp, Artificial Sequence
  Description of Artificial Sequence: Synthetic oligonucleotide
  Target: LAMA2; (-) strand; PAM type: NRG; PAM sequence: AAG
aaaacaataaaatgtgccaa

SEQ ID NO: 75322 - DNA, 20 bp, Artificial Sequence
  Description of Artificial Sequence: Synthetic oligonucleotide
  Target: LAMA2; (-) strand; PAM type: NRG; PAM sequence: CAG
tctacataagcaatggaaat

SEQ ID NO: 75323 - DNA, 20 bp, Artificial Sequence
  Description of Artificial Sequence: Synthetic oligonucleotide
  Target: LAMA2; (-) strand; PAM type: NRG; PAM sequence: TGG
tgcattctctacataagcaa

SEQ ID NO: 75324 - DNA, 20 bp, Artificial Sequence
  Description of Artificial Sequence: Synthetic oligonucleotide
  Target: LAMA2; (-) strand; PAM type: NRG; PAM sequence: AAG
gatagctgcattctctacat

SEQ ID NO: 75325 - DNA, 20 bp, Artificial Sequence
  Description of Artificial Sequence: Synthetic oligonucleotide
  Target: LAMA2; (-) strand; PAM type: NRG; PAM sequence: TAG
tccaaaagatagtaatcgga

SEQ ID NO: 75326 - DNA, 20 bp, Artificial Sequence
  Description of Artificial Sequence: Synthetic oligonucleotide
  Target: LAMA2; (-) strand; PAM type: NRG; PAM sequence: CGG
tcactccaaaagatagtaat

SEQ ID NO: 75327 - DNA, 20 bp, Artificial Sequence
  Description of Artificial Sequence: Synthetic oligonucleotide
  Target: LAMA2; (-) strand; PAM type: NRG; PAM sequence: TAG
agaaaagtcactccaaaaga

SEQ ID NO: 75328 - DNA, 20 bp, Artificial Sequence
  Description of Artificial Sequence: Synthetic oligonucleotide
  Target: LAMA2; (-) strand; PAM type: NRG; PAM sequence: AAG
tcagagaaaagtcactccaa

SEQ ID NO: 75329 - DNA, 20 bp, Artificial Sequence
  Description of Artificial Sequence: Synthetic oligonucleotide
  Target: LAMA2; (-) strand; PAM type: NRG; PAM sequence: AAG
tatttaaataaatcagagaa

SEQ ID NO: 75330 - DNA, 20 bp, Artificial Sequence
  Description of Artificial Sequence: Synthetic oligonucleotide
  Target: LAMA2; (-) strand; PAM type: NRG; PAM sequence: GAG
aaaaatatttaaataaatca

SEQ ID NO: 75331 - DNA, 20 bp, Artificial Sequence
  Description of Artificial Sequence: Synthetic oligonucleotide
  Target: LAMA2; (-) strand; PAM type: NRG; PAM sequence: CAG
aaaaaaatatttaaataaat

SEQ ID NO: 75332 - DNA, 20 bp, Artificial Sequence
  Description of Artificial Sequence: Synthetic oligonucleotide
  Target: LAMA2; (-) strand; PAM type: NRG; PAM sequence: AAG
agtaaaactactgaagaaca

SEQ ID NO: 75333 - DNA, 20 bp, Artificial Sequence
  Description of Artificial Sequence: Synthetic oligonucleotide
  Target: LAMA2; (-) strand; PAM type: NRG; PAM sequence: AAG
gcatcatagtaaaactactg

SEQ ID NO: 75334 - DNA, 20 bp, Artificial Sequence
  Description of Artificial Sequence: Synthetic oligonucleotide
  Target: LAMA2; (-) strand; PAM type: NRG; PAM sequence: TAG
agtgaagatctgaagcatca

SEQ ID NO: 75335 - DNA, 20 bp, Artificial Sequence
  Description of Artificial Sequence: Synthetic oligonucleotide
  Target: LAMA2; (-) strand; PAM type: NRG; PAM sequence: AAG
tagtgggcagtgaagatctg

SEQ ID NO: 75336 - DNA, 20 bp, Artificial Sequence
  Description of Artificial Sequence: Synthetic oligonucleotide
  Target: LAMA2; (-) strand; PAM type: NRG; PAM sequence: AAG
ggctattgtagtgggcagtg

SEQ ID NO: 75337 - DNA, 20 bp, Artificial Sequence
  Description of Artificial Sequence: Synthetic oligonucleotide
  Target: LAMA2; (-) strand; PAM type: NRG; PAM sequence: CAG
ctagtggctattgtagtggg

SEQ ID NO: 75338 - DNA, 20 bp, Artificial Sequence
  Description of Artificial Sequence: Synthetic oligonucleotide
  Target: LAMA2; (-) strand; PAM type: NRG; PAM sequence: GGG
tggctagtggctattgtagt

SEQ ID NO: 75339 - DNA, 20 bp, Artificial Sequence
  Description of Artificial Sequence: Synthetic oligonucleotide
  Target: LAMA2; (-) strand; PAM type: NRG; PAM sequence: TGG
atggctagtggctattgtag

SEQ ID NO: 75340 - DNA, 20 bp, Artificial Sequence
  Description of Artificial Sequence: Synthetic oligonucleotide
  Target: LAMA2; (-) strand; PAM type: NRG; PAM sequence: TAG
catatggctagtggctattg

SEQ ID NO: 75341 - DNA, 20 bp, Artificial Sequence
  Description of Artificial Sequence: Synthetic oligonucleotide
  Target: LAMA2; (-) strand; PAM type: NRG; PAM sequence: TGG
gaattaccacatatggctag

SEQ ID NO: 75342 - DNA, 20 bp, Artificial Sequence
  Description of Artificial Sequence: Synthetic oligonucleotide
  Target: LAMA2; (-) strand; PAM type: NRG; PAM sequence: TAG
tttgaattaccacatatggc

SEQ ID NO: 75343 - DNA, 20 bp, Artificial Sequence
  Description of Artificial Sequence: Synthetic oligonucleotide
  Target: LAMA2; (-) strand; PAM type: NRG; PAM sequence: TGG
taaatttgaattaccacata

SEQ ID NO: 75344 - DNA, 20 bp, Artificial Sequence
  Description of Artificial Sequence: Synthetic oligonucleotide
  Target: LAMA2; (-) strand; PAM type: NRG; PAM sequence: TGG
tggctagtgtaatggggaaa

SEQ ID NO: 75345 - DNA, 20 bp, Artificial Sequence
  Description of Artificial Sequence: Synthetic oligonucleotide
  Target: LAMA2; (-) strand; PAM type: NRG; PAM sequence: GGG
gaaatgtggctagtgtaatg

SEQ ID NO: 75346 - DNA, 20 bp, Artificial Sequence
  Description of Artificial Sequence: Synthetic oligonucleotide
  Target: LAMA2; (-) strand; PAM type: NRG; PAM sequence: GGG
tgaaatgtggctagtgtaat

SEQ ID NO: 75347 - DNA, 20 bp, Artificial Sequence
  Description of Artificial Sequence: Synthetic oligonucleotide
  Target: LAMA2; (-) strand; PAM type: NRG; PAM sequence: TGG
ttgaaatgtggctagtgtaa

SEQ ID NO: 75348 - DNA, 20 bp, Artificial Sequence
  Description of Artificial Sequence: Synthetic oligonucleotide
  Target: LAMA2; (-) strand; PAM type: NRG; PAM sequence: TAG
ctgagtacttgaaatgtggc

SEQ ID NO: 75349 - DNA, 20 bp, Artificial Sequence
  Description of Artificial Sequence: Synthetic oligonucleotide
  Target: LAMA2; (-) strand; PAM type: NRG; PAM sequence: TGG
gctactgagtacttgaaatg

SEQ ID NO: 75350 - DNA, 20 bp, Artificial Sequence
  Description of Artificial Sequence: Synthetic oligonucleotide
  Target: LAMA2; (-) strand; PAM type: NRG; PAM sequence: GAG
gctagtcccatgtggctact

SEQ ID NO: 75351 - DNA, 20 bp, Artificial Sequence
  Description of Artificial Sequence: Synthetic oligonucleotide
  Target: LAMA2; (-) strand; PAM type: NRG; PAM sequence: TGG
tggtggctgctagtcccatg

SEQ ID NO: 75352 - DNA, 20 bp, Artificial Sequence
  Description of Artificial Sequence: Synthetic oligonucleotide
  Target: LAMA2; (-) strand; PAM type: NRG; PAM sequence: TAG
caatccagtgtggtggctgc

SEQ ID NO: 75353 - DNA, 20 bp, Artificial Sequence
  Description of Artificial Sequence: Synthetic oligonucleotide
  Target: LAMA2; (-) strand; PAM type: NRG; PAM sequence: TGG
ttctgcccaatccagtgtgg

SEQ ID NO: 75354 - DNA, 20 bp, Artificial Sequence
  Description of Artificial Sequence: Synthetic oligonucleotide
  Target: LAMA2; (-) strand; PAM type: NRG; PAM sequence: TGG
gctttctgcccaatccagtg

SEQ ID NO: 75355 - DNA, 20 bp, Artificial Sequence
  Description of Artificial Sequence: Synthetic oligonucleotide
  Target: LAMA2; (-) strand; PAM type: NRG; PAM sequence: CAG
gtgttgctttctgcccaatc

SEQ ID NO: 75356 - DNA, 20 bp, Artificial Sequence
  Description of Artificial Sequence: Synthetic oligonucleotide
  Target: LAMA2; (-) strand; PAM type: NRG; PAM sequence: CAG
agaactttgtgcaataatgg

SEQ ID NO: 75357 - DNA, 20 bp, Artificial Sequence
  Description of Artificial Sequence: Synthetic oligonucleotide
  Target: LAMA2; (-) strand; PAM type: NRG; PAM sequence: TGG
aacagaactttgtgcaataa

SEQ ID NO: 75358 - DNA, 20 bp, Artificial Sequence
  Description of Artificial Sequence: Synthetic oligonucleotide
  Target: LAMA2; (-) strand; PAM type: NRG; PAM sequence: CAG
tctaaagtagcattgcccaa

SEQ ID NO: 75359 - DNA, 20 bp, Artificial Sequence
  Description of Artificial Sequence: Synthetic oligonucleotide
  Target: LAMA2; (-) strand; PAM type: NRG; PAM sequence: TAG
taaaaaggtacaatctaaag

SEQ ID NO: 75360 - DNA, 20 bp, Artificial Sequence
  Description of Artificial Sequence: Synthetic oligonucleotide
  Target: LAMA2; (-) strand; PAM type: NRG; PAM sequence: AAG
aaataaaaaggtacaatcta

SEQ ID NO: 75361 - DNA, 20 bp, Artificial Sequence
  Description of Artificial Sequence: Synthetic oligonucleotide
  Target: LAMA2; (-) strand; PAM type: NRG; PAM sequence: AGG
cagatatgtagaaaataaaa

SEQ ID NO: 75362 - DNA, 20 bp, Artificial Sequence
  Description of Artificial Sequence: Synthetic oligonucleotide
  Target: LAMA2; (-) strand; PAM type: NRG; PAM sequence: AAG
gcagatatgtagaaaataaa

SEQ ID NO: 75363 - DNA, 20 bp, Artificial Sequence
  Description of Artificial Sequence: Synthetic oligonucleotide
  Target: LAMA2; (-) strand; PAM type: NRG; PAM sequence: TAG
gacatcactttgcagatatg

SEQ ID NO: 75364 - DNA, 20 bp, Artificial Sequence
  Description of Artificial Sequence: Synthetic oligonucleotide
  Target: LAMA2; (-) strand; PAM type: NRG; PAM sequence: CAG
tgatgaaagacatcactttg

SEQ ID NO: 75365 - DNA, 20 bp, Artificial Sequence
  Description of Artificial Sequence: Synthetic oligonucleotide
  Target: LAMA2; (-) strand; PAM type: NRG; PAM sequence: AAG
acagttttctgaactgatga

SEQ ID NO: 75366 - DNA, 20 bp, Artificial Sequence
  Description of Artificial Sequence: Synthetic oligonucleotide
  Target: LAMA2; (-) strand; PAM type: NRG; PAM sequence: CAG
ttagagaggtaatgactgaa

SEQ ID NO: 75367 - DNA, 20 bp, Artificial Sequence
  Description of Artificial Sequence: Synthetic oligonucleotide
  Target: LAMA2; (-) strand; PAM type: NRG; PAM sequence: AGG
ggaagaagcaatatttagag

SEQ ID NO: 75368 - DNA, 20 bp, Artificial Sequence
  Description of Artificial Sequence: Synthetic oligonucleotide
  Target: LAMA2; (-) strand; PAM type: NRG; PAM sequence: GAG
cggaagaagcaatatttaga

SEQ ID NO: 75369 - DNA, 20 bp, Artificial Sequence
  Description of Artificial Sequence: Synthetic oligonucleotide
  Target: LAMA2; (-) strand; PAM type: NRG; PAM sequence: GAG
tgcggaagaagcaatattta

SEQ ID NO: 75370 - DNA, 20 bp, Artificial Sequence
  Description of Artificial Sequence: Synthetic oligonucleotide
  Target: LAMA2; (-) strand; PAM type: NRG; PAM sequence: TAG
aatgcggaagaagcaatatt

SEQ ID NO: 75371 - DNA, 20 bp, Artificial Sequence
  Description of Artificial Sequence: Synthetic oligonucleotide
  Target: LAMA2; (-) strand; PAM type: NRG; PAM sequence: AAG
gagcagagggaatgcggaag

SEQ ID NO: 75372 - DNA, 20 bp, Artificial Sequence
  Description of Artificial Sequence: Synthetic oligonucleotide
  Target: LAMA2; (-) strand; PAM type: NRG; PAM sequence: AAG
atagagcagagggaatgcgg

SEQ ID NO: 75373 - DNA, 20 bp, Artificial Sequence
  Description of Artificial Sequence: Synthetic oligonucleotide
  Target: LAMA2; (-) strand; PAM type: NRG; PAM sequence: CGG
atcatagagcagagggaatg

SEQ ID NO: 75374 - DNA, 20 bp, Artificial Sequence
  Description of Artificial Sequence: Synthetic oligonucleotide
  Target: LAMA2; (-) strand; PAM type: NRG; PAM sequence: GGG
aattagaatcatagagcaga

SEQ ID NO: 75375 - DNA, 20 bp, Artificial Sequence
  Description of Artificial Sequence: Synthetic oligonucleotide
  Target: LAMA2; (-) strand; PAM type: NRG; PAM sequence: AGG
taattagaatcatagagcag

SEQ ID NO: 75376 - DNA, 20 bp, Artificial Sequence
  Description of Artificial Sequence: Synthetic oligonucleotide
  Target: LAMA2; (-) strand; PAM type: NRG; PAM sequence: GAG
ttaattagaatcatagagca

SEQ ID NO: 75377 - DNA, 20 bp, Artificial Sequence
  Description of Artificial Sequence: Synthetic oligonucleotide
  Target: LAMA2; (-) strand; PAM type: NRG; PAM sequence: CAG
ttttaattagaatcatagag

SEQ ID NO: 75378 - DNA, 20 bp, Artificial Sequence
  Description of Artificial Sequence: Synthetic oligonucleotide
  Target: LAMA2; (-) strand; PAM type: NRG; PAM sequence: GAG
catttttaattagaatcata

SEQ ID NO: 75379 - DNA, 20 bp, Artificial Sequence
  Description of Artificial Sequence: Synthetic oligonucleotide
  Target: LAMA2; (-) strand; PAM type: NRG; PAM sequence: TAG
gtcatttttaattagaatca

SEQ ID NO: 75380 - DNA, 20 bp, Artificial Sequence
  Description of Artificial Sequence: Synthetic oligonucleotide
  Target: LAMA2; (-) strand; PAM type: NRG; PAM sequence: TAG
agttccaagtcatttttaat

SEQ ID NO: 75381 - DNA, 20 bp, Artificial Sequence
  Description of Artificial Sequence: Synthetic oligonucleotide
  Target: LAMA2; (-) strand; PAM type: NRG; PAM sequence: AAG
tgtatacagtaaaaagttcc

SEQ ID NO: 75382 - DNA, 20 bp, Artificial Sequence
  Description of Artificial Sequence: Synthetic oligonucleotide
  Target: LAMA2; (-) strand; PAM type: NRG; PAM sequence: AAG
tacatagtgtatacagtaaa

SEQ ID NO: 75383 - DNA, 20 bp, Artificial Sequence
  Description of Artificial Sequence: Synthetic oligonucleotide
  Target: LAMA2; (-) strand; PAM type: NRG; PAM sequence: CAG
tttaaaatacatagtgtata

SEQ ID NO: 75384 - DNA, 20 bp, Artificial Sequence
  Description of Artificial Sequence: Synthetic oligonucleotide
  Target: LAMA2; (-) strand; PAM type: NRG; PAM sequence: TAG
agaagagagtttaaaataca

SEQ ID NO: 75385 - DNA, 20 bp, Artificial Sequence
  Description of Artificial Sequence: Synthetic oligonucleotide
  Target: LAMA2; (-) strand; PAM type: NRG; PAM sequence: GAG
aggatgaaaactaaagaaga

SEQ ID NO: 75386 - DNA, 20 bp, Artificial Sequence
  Description of Artificial Sequence: Synthetic oligonucleotide
  Target: LAMA2; (-) strand; PAM type: NRG; PAM sequence: GAG
aaaggatgaaaactaaagaa

SEQ ID NO: 75387 - DNA, 20 bp, Artificial Sequence
  Description of Artificial Sequence: Synthetic oligonucleotide
  Target: LAMA2; (-) strand; PAM type: NRG; PAM sequence: AAG
caaaaggatgaaaactaaag

SEQ ID NO: 75388 - DNA, 20 bp, Artificial Sequence
  Description of Artificial Sequence: Synthetic oligonucleotide
  Target: LAMA2; (-) strand; PAM type: NRG; PAM sequence: AAG
agacaaaaggatgaaaacta

SEQ ID NO: 75389 - DNA, 20 bp, Artificial Sequence
  Description of Artificial Sequence: Synthetic oligonucleotide
  Target: LAMA2; (-) strand; PAM type: NRG; PAM sequence: AGG
tgaagatacagaaagacaaa

SEQ ID NO: 75390 - DNA, 20 bp, Artificial Sequence
  Description of Artificial Sequence: Synthetic oligonucleotide
  Target: LAMA2; (-) strand; PAM type: NRG; PAM sequence: AAG
atgaagatacagaaagacaa

SEQ ID NO: 75391 - DNA, 20 bp, Artificial Sequence
  Description of Artificial Sequence: Synthetic oligonucleotide
  Target: LAMA2; (-) strand; PAM type: NRG; PAM sequence: AAG
acctagaatgaagatacaga

SEQ ID NO: 75392 - DNA, 20 bp, Artificial Sequence
  Description of Artificial Sequence: Synthetic oligonucleotide
  Target: LAMA2; (-) strand; PAM type: NRG; PAM sequence: CAG
aaatacctagaatgaagata

SEQ ID NO: 75393 - DNA, 20 bp, Artificial Sequence
  Description of Artificial Sequence: Synthetic oligonucleotide
  Target: LAMA2; (-) strand; PAM type: NRG; PAM sequence: AAG
agaagaaaatacctagaatg

SEQ ID NO: 75394 - DNA, 20 bp, Artificial Sequence
  Description of Artificial Sequence: Synthetic oligonucleotide
  Target: LAMA2; (-) strand; PAM type: NRG; PAM sequence: TAG
gtaatccagaagaaaatacc

SEQ ID NO: 75395 - DNA, 20 bp, Artificial Sequence
  Description of Artificial Sequence: Synthetic oligonucleotide
  Target: LAMA2; (-) strand; PAM type: NRG; PAM sequence: AAG
atgaactagaagtaatccag

SEQ ID NO: 75396 - DNA, 20 bp, Artificial Sequence
  Description of Artificial Sequence: Synthetic oligonucleotide
  Target: LAMA2; (-) strand; PAM type: NRG; PAM sequence: CAG
ttaatgaactagaagtaatc

SEQ ID NO: 75397 - DNA, 20 bp, Artificial Sequence
  Description of Artificial Sequence: Synthetic oligonucleotide
  Target: LAMA2; (-) strand; PAM type: NRG; PAM sequence: AAG
gaagagaattaatgaactag

SEQ ID NO: 75398 - DNA, 20 bp, Artificial Sequence
  Description of Artificial Sequence: Synthetic oligonucleotide
  Target: LAMA2; (-) strand; PAM type: NRG; PAM sequence: TAG
tgagaagagaattaatgaac

SEQ ID NO: 75399 - DNA, 20 bp, Artificial Sequence
  Description of Artificial Sequence: Synthetic oligonucleotide
  Target: LAMA2; (-) strand; PAM type: NRG; PAM sequence: GAG
aatatttacatagctgagaa

SEQ ID NO: 75400 - DNA, 20 bp, Artificial Sequence
  Description of Artificial Sequence: Synthetic oligonucleotide
  Target: LAMA2; (-) strand; PAM type: NRG; PAM sequence: AAG
gcaatatttacatagctgag

SEQ ID NO: 75401 - DNA, 20 bp, Artificial Sequence
  Description of Artificial Sequence: Synthetic oligonucleotide
  Target: LAMA2; (-) strand; PAM type: NRG; PAM sequence: GAG
atagcaatatttacatagct

SEQ ID NO: 75402 - DNA, 20 bp, Artificial Sequence
  Description of Artificial Sequence: Synthetic oligonucleotide
  Target: LAMA2; (-) strand; PAM type: NRG; PAM sequence: TAG
ctttaatagcaatatttaca

SEQ ID NO: 75403 - DNA, 20 bp, Artificial Sequence
  Description of Artificial Sequence: Synthetic oligonucleotide
  Target: LAMA2; (-) strand; PAM type: NRG; PAM sequence: TAG
aatcctatgaataactttaa

SEQ ID NO: 75404 - DNA, 20 bp, Artificial Sequence
  Description of Artificial Sequence: Synthetic oligonucleotide
  Target: LAMA2; (-) strand; PAM type: NRG; PAM sequence: AAG
actgaaaaatatatgaaatt

SEQ ID NO: 75405 - DNA, 20 bp, Artificial Sequence
  Description of Artificial Sequence: Synthetic oligonucleotide
  Target: LAMA2; (-) strand; PAM type: NRG; PAM sequence: TAG
gaaaatgaaccagagaaatt

SEQ ID NO: 75406 - DNA, 20 bp, Artificial Sequence
  Description of Artificial Sequence: Synthetic oligonucleotide
  Target: LAMA2; (-) strand; PAM type: NRG; PAM sequence: GAG
gaaaaaaagaaaatgaacca

SEQ ID NO: 75407 - DNA, 20 bp, Artificial Sequence
  Description of Artificial Sequence: Synthetic oligonucleotide
  Target: LAMA2; (-) strand; PAM type: NRG; PAM sequence: CAG
aagaaaaaaagaaaatgaac

SEQ ID NO: 75408 - DNA, 20 bp, Artificial Sequence
  Description of Artificial Sequence: Synthetic oligonucleotide
  Target: LAMA2; (-) strand; PAM type: NRG; PAM sequence: AAG
aaaaaagaaagaaagaaaaa

SEQ ID NO: 75409 - DNA, 20 bp, Artificial Sequence
  Description of Artificial Sequence: Synthetic oligonucleotide
  Target: LAMA2; (-) strand; PAM type: NRG; PAM sequence: AAG
aaaaaaaaaaaaaagaaaga

SEQ ID NO: 75410 - DNA, 20 bp, Artificial Sequence
  Description of Artificial Sequence: Synthetic oligonucleotide
  Target: LAMA2; (-) strand; PAM type: NRG; PAM sequence: AAG
tcaaaaaaaaaaaaaaaaga

SEQ ID NO: 75411 - DNA, 20 bp, Artificial Sequence
  Description of Artificial Sequence: Synthetic oligonucleotide
  Target: LAMA2; (-) strand; PAM type: NRG; PAM sequence: AAG
ggtctcaaaaaaaaaaaaaa

SEQ ID NO: 75412 - DNA, 20 bp, Artificial Sequence
  Description of Artificial Sequence: Synthetic oligonucleotide
  Target: LAMA2; (-) strand; PAM type: NRG; PAM sequence: CGG
ctgggtgacagagcgagact

SEQ ID NO: 75413 - DNA, 20 bp, Artificial Sequence
  Description of Artificial Sequence: Synthetic oligonucleotide
  Target: LAMA2; (-) strand; PAM type: NRG; PAM sequence: GAG
tccagcctgggtgacagagc

SEQ ID NO: 75414 - DNA, 20 bp, Artificial Sequence
  Description of Artificial Sequence: Synthetic oligonucleotide
  Target: LAMA2; (-) strand; PAM type: NRG; PAM sequence: GAG
gcactccagcctgggtgaca

SEQ ID NO: 75415 - DNA, 20 bp, Artificial Sequence
  Description of Artificial Sequence: Synthetic oligonucleotide
  Target: LAMA2; (-) strand; PAM type: NRG; PAM sequence: CAG
ctgcactccagcctgggtga

SEQ ID NO: 75416 - DNA, 20 bp, Artificial Sequence
  Description of Artificial Sequence: Synthetic oligonucleotide
  Target: LAMA2; (-) strand; PAM type: NRG; PAM sequence: GGG
gcgccactgcactccagcct

SEQ ID NO: 75417 - DNA, 20 bp, Artificial Sequence
  Description of Artificial Sequence: Synthetic oligonucleotide
  Target: LAMA2; (-) strand; PAM type: NRG; PAM sequence: TGG
ggcgccactgcactccagcc

SEQ ID NO: 75418 - DNA, 20 bp, Artificial Sequence
  Description of Artificial Sequence: Synthetic oligonucleotide
  Target: LAMA2; (-) strand; PAM type: NRG; PAM sequence: CAG
gagatggcgccactgcactc

SEQ ID NO: 75419 - DNA, 20 bp, Artificial Sequence
  Description of Artificial Sequence: Synthetic oligonucleotide
  Target: LAMA2; (-) strand; PAM type: NRG; PAM sequence: TGG
gaggttacagtgagctgaga

SEQ ID NO: 75420 - DNA, 20 bp, Artificial Sequence
  Description of Artificial Sequence: Synthetic oligonucleotide
  Target: LAMA2; (-) strand; PAM type: NRG; PAM sequence: GAG
ggcggaggttacagtgagct

SEQ ID NO: 75421 - DNA, 20 bp, Artificial Sequence
  Description of Artificial Sequence: Synthetic oligonucleotide
  Target: LAMA2; (-) strand; PAM type: NRG; PAM sequence: GAG
cgggaggcggaggttacagt

SEQ ID NO: 75422 - DNA, 20 bp, Artificial Sequence
  Description of Artificial Sequence: Synthetic oligonucleotide
  Target: LAMA2; (-) strand; PAM type: NRG; PAM sequence: CAG
aacccgggaggcggaggtta

SEQ ID NO: 75423 - DNA, 20 bp, Artificial Sequence
  Description of Artificial Sequence: Synthetic oligonucleotide
  Target: LAMA2; (-) strand; PAM type: NRG; PAM sequence: AGG
cccgggaacccgggaggcgg

SEQ ID NO: 75424 - DNA, 20 bp, Artificial Sequence
  Description of Artificial Sequence: Synthetic oligonucleotide
  Target: LAMA2; (-) strand; PAM type: NRG; PAM sequence: GAG
acccgggaacccgggaggcg

SEQ ID NO: 75425 - DNA, 20 bp, Artificial Sequence
  Description of Artificial Sequence: Synthetic oligonucleotide
  Target: LAMA2; (-) strand; PAM type: NRG; PAM sequence: CGG
gaacccgggaacccgggagg

SEQ ID NO: 75426 - DNA, 20 bp, Artificial Sequence
  Description of Artificial Sequence: Synthetic oligonucleotide
  Target: LAMA2; (-) strand; PAM type: NRG; PAM sequence: AGG
cttgaacccgggaacccggg

SEQ ID NO: 75427 - DNA, 20 bp, Artificial Sequence
  Description of Artificial Sequence: Synthetic oligonucleotide
  Target: LAMA2; (-) strand; PAM type: NRG; PAM sequence: GAG
acttgaacccgggaacccgg

SEQ ID NO: 75428 - DNA, 20 bp, Artificial Sequence
  Description of Artificial Sequence: Synthetic oligonucleotide
  Target: LAMA2; (-) strand; PAM type: NRG; PAM sequence: GGG
ccacttgaacccgggaaccc

SEQ ID NO: 75429 - DNA, 20 bp, Artificial Sequence
  Description of Artificial Sequence: Synthetic oligonucleotide
  Target: LAMA2; (-) strand; PAM type: NRG; PAM sequence: CGG
accacttgaacccgggaacc

SEQ ID NO: 75430 - DNA, 20 bp, Artificial Sequence
  Description of Artificial Sequence: Synthetic oligonucleotide
  Target: LAMA2; (-) strand; PAM type: NRG; PAM sequence: GGG
caggagaaccacttgaaccc

SEQ ID NO: 75431 - DNA, 20 bp, Artificial Sequence
  Description of Artificial Sequence: Synthetic oligonucleotide
  Target: LAMA2; (-) strand; PAM type: NRG; PAM sequence: CGG
gcaggagaaccacttgaacc

SEQ ID NO: 75432 - DNA, 20 bp, Artificial Sequence
  Description of Artificial Sequence: Synthetic oligonucleotide
  Target: LAMA2; (-) strand; PAM type: NRG; PAM sequence: GAG
tactcaggaggctgaggcag

SEQ ID NO: 75433 - DNA, 20 bp, Artificial Sequence
  Description of Artificial Sequence: Synthetic oligonucleotide
  Target: LAMA2; (-) strand; PAM type: NRG; PAM sequence: AGG
gctactcaggaggctgaggc

SEQ ID NO: 75434 - DNA, 20 bp, Artificial Sequence
  Description of Artificial Sequence: Synthetic oligonucleotide
  Target: LAMA2; (-) strand; PAM type: NRG; PAM sequence: CAG
agctactcaggaggctgagg

SEQ ID NO: 75435 - DNA, 20 bp, Artificial Sequence
  Description of Artificial Sequence: Synthetic oligonucleotide
  Target: LAMA2; (-) strand; PAM type: NRG; PAM sequence: AGG
cccagctactcaggaggctg

SEQ ID NO: 75436 - DNA, 20 bp, Artificial Sequence
  Description of Artificial Sequence: Synthetic oligonucleotide
  Target: LAMA2; (-) strand; PAM type: NRG; PAM sequence: GAG
tcccagctactcaggaggct

SEQ ID NO: 75437 - DNA, 20 bp, Artificial Sequence
  Description of Artificial Sequence: Synthetic oligonucleotide
  Target: LAMA2; (-) strand; PAM type: NRG; PAM sequence: AGG
tgtaatcccagctactcagg

SEQ ID NO: 75438 - DNA, 20 bp, Artificial Sequence
  Description of Artificial Sequence: Synthetic oligonucleotide
  Target: LAMA2; (-) strand; PAM type: NRG; PAM sequence: GAG
ctgtaatcccagctactcag

SEQ ID NO: 75439 - DNA, 20 bp, Artificial Sequence
  Description of Artificial Sequence: Synthetic oligonucleotide
  Target: LAMA2; (-) strand; PAM type: NRG; PAM sequence: AGG
gcctgtaatcccagctactc

SEQ ID NO: 75440 - DNA, 20 bp, Artificial Sequence
  Description of Artificial Sequence: Synthetic oligonucleotide
  Target: LAMA2; (-) strand; PAM type: NRG; PAM sequence: CAG
cgcctgtaatcccagctact

SEQ ID NO: 75441 - DNA, 20 bp, Artificial Sequence
  Description of Artificial Sequence: Synthetic oligonucleotide
  Target: LAMA2; (-) strand; PAM type: NRG; PAM sequence: CAG
gtggcacgcgcctgtaatcc

SEQ ID NO: 75442 - DNA, 20 bp, Artificial Sequence
  Description of Artificial Sequence: Synthetic oligonucleotide
  Target: LAMA2; (-) strand; PAM type: NRG; PAM sequence: TGG
caaaaatcaagtggacatgg

SEQ ID NO: 75443 - DNA, 20 bp, Artificial Sequence
  Description of Artificial Sequence: Synthetic oligonucleotide
  Target: LAMA2; (-) strand; PAM type: NRG; PAM sequence: TGG
acacaaaaatcaagtggaca

SEQ ID NO: 75444 - DNA, 20 bp, Artificial Sequence
  Description of Artificial Sequence: Synthetic oligonucleotide
  Target: LAMA2; (-) strand; PAM type: NRG; PAM sequence: TGG
ctgaaaacacaaaaatcaag

SEQ ID NO: 75445 - DNA, 20 bp, Artificial Sequence
  Description of Artificial Sequence: Synthetic oligonucleotide
  Target: LAMA2; (-) strand; PAM type: NRG; PAM sequence: AAG
gtactgaaaacacaaaaatc

SEQ ID NO: 75446 - DNA, 20 bp, Artificial Sequence
  Description of Artificial Sequence: Synthetic oligonucleotide
  Target: LAMA2; (-) strand; PAM type: NRG; PAM sequence: TGG
cgagaccatcctgaccaaca

SEQ ID NO: 75447 - DNA, 20 bp, Artificial Sequence
  Description of Artificial Sequence: Synthetic oligonucleotide
  Target: LAMA2; (-) strand; PAM type: NRG; PAM sequence: GAG
gatcatgaggtcaagagatc

SEQ ID NO: 75448 - DNA, 20 bp, Artificial Sequence
  Description of Artificial Sequence: Synthetic oligonucleotide
  Target: LAMA2; (-) strand; PAM type: NRG; PAM sequence: GAG
tgggcagatcatgaggtcaa

SEQ ID NO: 75449 - DNA, 20 bp, Artificial Sequence
  Description of Artificial Sequence: Synthetic oligonucleotide
  Target: LAMA2; (-) strand; PAM type: NRG; PAM sequence: AAG
ggtgggcagatcatgaggtc

SEQ ID NO: 75450 - DNA, 20 bp, Artificial Sequence
  Description of Artificial Sequence: Synthetic oligonucleotide
  Target: LAMA2; (-) strand; PAM type: NRG; PAM sequence: AGG
gccaaggtgggcagatcatg

SEQ ID NO: 75451 - DNA, 20 bp, Artificial Sequence
  Description of Artificial Sequence: Synthetic oligonucleotide
  Target: LAMA2; (-) strand; PAM type: NRG; PAM sequence: GAG
ggccaaggtgggcagatcat

SEQ ID NO: 75452 - DNA, 20 bp, Artificial Sequence
  Description of Artificial Sequence: Synthetic oligonucleotide
  Target: LAMA2; (-) strand; PAM type: NRG; PAM sequence: CAG
ctttgggaggccaaggtggg

SEQ ID NO: 75453 - DNA, 20 bp, Artificial Sequence
  Description of Artificial Sequence: Synthetic oligonucleotide
  Target: LAMA2; (-) strand; PAM type: NRG; PAM sequence: GGG
gcactttgggaggccaaggt

SEQ ID NO: 75454 - DNA, 20 bp, Artificial Sequence
  Description of Artificial Sequence: Synthetic oligonucleotide
  Target: LAMA2; (-) strand; PAM type: NRG; PAM sequence: TGG
agcactttgggaggccaagg

SEQ ID NO: 75455 - DNA, 20 bp, Artificial Sequence
  Description of Artificial Sequence: Synthetic oligonucleotide
  Target: LAMA2; (-) strand; PAM type: NRG; PAM sequence: AGG
cctagcactttgggaggcca

SEQ ID NO: 75456 - DNA, 20 bp, Artificial Sequence
  Description of Artificial Sequence: Synthetic oligonucleotide
  Target: LAMA2; (-) strand; PAM type: NRG; PAM sequence: AAG
tcctagcactttgggaggcc

SEQ ID NO: 75457 - DNA, 20 bp, Artificial Sequence
  Description of Artificial Sequence: Synthetic oligonucleotide
  Target: LAMA2; (-) strand; PAM type: NRG; PAM sequence: AGG
tgtaatcctagcactttggg

SEQ ID NO: 75458 - DNA, 20 bp, Artificial Sequence
  Description of Artificial Sequence: Synthetic oligonucleotide
  Target: LAMA2; (-) strand; PAM type: NRG; PAM sequence: GAG
ctgtaatcctagcactttgg

SEQ ID NO: 75459 - DNA, 20 bp, Artificial Sequence
  Description of Artificial Sequence: Synthetic oligonucleotide
  Target: LAMA2; (-) strand; PAM type: NRG; PAM sequence: GGG
gcctgtaatcctagcacttt

SEQ ID NO: 75460 - DNA, 20 bp, Artificial Sequence
  Description of Artificial Sequence: Synthetic oligonucleotide
  Target: LAMA2; (-) strand; PAM type: NRG; PAM sequence: TGG
tgcctgtaatcctagcactt

SEQ ID NO: 75461 - DNA, 20 bp, Artificial Sequence
  Description of Artificial Sequence: Synthetic oligonucleotide
  Target: LAMA2; (-) strand; PAM type: NRG; PAM sequence: TAG
gtggctcatgcctgtaatcc

SEQ ID NO: 75462 - DNA, 20 bp, Artificial Sequence
  Description of Artificial Sequence: Synthetic oligonucleotide
  Target: LAMA2; (-) strand; PAM type: NRG; PAM sequence: TGG
atgaaccaggctgggcacag

SEQ ID NO: 75463 - DNA, 20 bp, Artificial Sequence
  Description of Artificial Sequence: Synthetic oligonucleotide
  Target: LAMA2; (-) strand; PAM type: NRG; PAM sequence: CAG
aaaatgaaccaggctgggca

SEQ ID NO: 75464 - DNA, 20 bp, Artificial Sequence
  Description of Artificial Sequence: Synthetic oligonucleotide
  Target: LAMA2; (-) strand; PAM type: NRG; PAM sequence: GGG
atttgaaaatgaaccaggct

SEQ ID NO: 75465 - DNA, 20 bp, Artificial Sequence
  Description of Artificial Sequence: Synthetic oligonucleotide
  Target: LAMA2; (-) strand; PAM type: NRG; PAM sequence: TGG
tatttgaaaatgaaccaggc

SEQ ID NO: 75466 - DNA, 20 bp, Artificial Sequence
  Description of Artificial Sequence: Synthetic oligonucleotide
  Target: LAMA2; (-) strand; PAM type: NRG; PAM sequence: AGG
cttctatttgaaaatgaacc

SEQ ID NO: 75467 - DNA, 20 bp, Artificial Sequence
  Description of Artificial Sequence: Synthetic oligonucleotide
  Target: LAMA2; (-) strand; PAM type: NRG; PAM sequence: CAG
acttctatttgaaaatgaac

SEQ ID NO: 75468 - DNA, 20 bp, Artificial Sequence
  Description of Artificial Sequence: Synthetic oligonucleotide
  Target: LAMA2; (-) strand; PAM type: NRG; PAM sequence: GAG
ataaaatttcaatgtaaaat

SEQ ID NO: 75469 - DNA, 20 bp, Artificial Sequence
  Description of Artificial Sequence: Synthetic oligonucleotide
  Target: LAMA2; (-) strand; PAM type: NRG; PAM sequence: TAG
aaatagaatattgaaaattt

SEQ ID NO: 75470 - DNA, 20 bp, Artificial Sequence
  Description of Artificial Sequence: Synthetic oligonucleotide
  Target: LAMA2; (-) strand; PAM type: NRG; PAM sequence: TAG
atgctcaaggagattaaaaa

SEQ ID NO: 75471 - DNA, 20 bp, Artificial Sequence
  Description of Artificial Sequence: Synthetic oligonucleotide
  Target: LAMA2; (-) strand; PAM type: NRG; PAM sequence: GAG
atttttactttatgctcaag

SEQ ID NO: 75472 - DNA, 20 bp, Artificial Sequence
  Description of Artificial Sequence: Synthetic oligonucleotide
  Target: LAMA2; (-) strand; PAM type: NRG; PAM sequence: AGG
taatttttactttatgctca

SEQ ID NO: 75473 - DNA, 20 bp, Artificial Sequence
  Description of Artificial Sequence: Synthetic oligonucleotide
  Target: LAMA2; (-) strand; PAM type: NRG; PAM sequence: AAG
ataatttttactttatgctc

SEQ ID NO: 75474 - DNA, 20 bp, Artificial Sequence
  Description of Artificial Sequence: Synthetic oligonucleotide
  Target: LAMA2; (-) strand; PAM type: NRG; PAM sequence: AAG
ttatcagacaaaaactttta

SEQ ID NO: 75475 - DNA, 20 bp, Artificial Sequence
  Description of Artificial Sequence: Synthetic oligonucleotide
  Target: LAMA2; (-) strand; PAM type: NRG; PAM sequence: CAG
aggccatatattagaattat

SEQ ID NO: 75476 - DNA, 20 bp, Artificial Sequence
  Description of Artificial Sequence: Synthetic oligonucleotide
  Target: LAMA2; (-) strand; PAM type: NRG; PAM sequence: TAG
tatccaaaaaggccatatat

SEQ ID NO: 75477 - DNA, 20 bp, Artificial Sequence
  Description of Artificial Sequence: Synthetic oligonucleotide
  Target: LAMA2; (-) strand; PAM type: NRG; PAM sequence: AGG
aaaataaaatatatccaaaa

SEQ ID NO: 75478 - DNA, 20 bp, Artificial Sequence
  Description of Artificial Sequence: Synthetic oligonucleotide
  Target: LAMA2; (-) strand; PAM type: NRG; PAM sequence: AAG
gaaaataaaatatatccaaa

SEQ ID NO: 75479 - DNA, 20 bp, Artificial Sequence
  Description of Artificial Sequence: Synthetic oligonucleotide
  Target: LAMA2; (-) strand; PAM type: NRG; PAM sequence: CAG
aaaagaatcagcagatgaaa

SEQ ID NO: 75480 - DNA, 20 bp, Artificial Sequence
  Description of Artificial Sequence: Synthetic oligonucleotide
  Target: LAMA2; (-) strand; PAM type: NRG; PAM sequence: CAG
gacagcataaaaagaatcag

SEQ ID NO: 75481 - DNA, 20 bp, Artificial Sequence
  Description of Artificial Sequence: Synthetic oligonucleotide
  Target: LAMA2; (-) strand; PAM type: NRG; PAM sequence: CAG
taagacagcataaaaagaat

SEQ ID NO: 75482 - DNA, 20 bp, Artificial Sequence
  Description of Artificial Sequence: Synthetic oligonucleotide
  Target: LAMA2; (-) strand; PAM type: NRG; PAM sequence: AAG
agaatgtaagacagcataaa

SEQ ID NO: 75483 - DNA, 20 bp, Artificial Sequence
  Description of Artificial Sequence: Synthetic oligonucleotide
  Target: LAMA2; (-) strand; PAM type: NRG; PAM sequence: CAG
aggcacacaagaatgtaaga

SEQ ID NO: 75484 - DNA, 20 bp, Artificial Sequence
  Description of Artificial Sequence: Synthetic oligonucleotide
  Target: LAMA2; (-) strand; PAM type: NRG; PAM sequence: AAG
aatcaggcacacaagaatgt

SEQ ID NO: 75485 - DNA, 20 bp, Artificial Sequence
  Description of Artificial Sequence: Synthetic oligonucleotide
  Target: LAMA2; (-) strand; PAM type: NRG; PAM sequence: AAG
acaaagataatcaggcacac

SEQ ID NO: 75486 - DNA, 20 bp, Artificial Sequence
  Description of Artificial Sequence: Synthetic oligonucleotide
  Target: LAMA2; (-) strand; PAM type: NRG; PAM sequence: AGG
tctgttatacaaagataatc

SEQ ID NO: 75487 - DNA, 20 bp, Artificial Sequence
  Description of Artificial Sequence: Synthetic oligonucleotide
  Target: LAMA2; (-) strand; PAM type: NRG; PAM sequence: CAG
ttctgttatacaaagataat

SEQ ID NO: 75488 - DNA, 20 bp, Artificial Sequence
  Description of Artificial Sequence: Synthetic oligonucleotide
  Target: LAMA2; (-) strand; PAM type: NRG; PAM sequence: AAG
aatacaacttctgttataca

SEQ ID NO: 75489 - DNA, 20 bp, Artificial Sequence
  Description of Artificial Sequence: Synthetic oligonucleotide
  Target: LAMA2; (-) strand; PAM type: NRG; PAM sequence: TAG
acaggatgaagacaatatac

SEQ ID NO: 75490 - DNA, 20 bp, Artificial Sequence
  Description of Artificial Sequence: Synthetic oligonucleotide
  Target: LAMA2; (-) strand; PAM type: NRG; PAM sequence: AAG
cagaaagttcacacaggatg

SEQ ID NO: 75491 - DNA, 20 bp, Artificial Sequence
  Description of Artificial Sequence: Synthetic oligonucleotide
  Target: LAMA2; (-) strand; PAM type: NRG; PAM sequence: AGG
tagcatcagaaagttcacac

SEQ ID NO: 75492 - DNA, 20 bp, Artificial Sequence
  Description of Artificial Sequence: Synthetic oligonucleotide
  Target: LAMA2; (-) strand; PAM type: NRG; PAM sequence: CAG
gtagcatcagaaagttcaca

SEQ ID NO: 75493 - DNA, 20 bp, Artificial Sequence
  Description of Artificial Sequence: Synthetic oligonucleotide
  Target: LAMA2; (-) strand; PAM type: NRG; PAM sequence: AAG
tgcctggcagtagcatcaga

SEQ ID NO: 75494 - DNA, 20 bp, Artificial Sequence
  Description of Artificial Sequence: Synthetic oligonucleotide
  Target: LAMA2; (-) strand; PAM type: NRG; PAM sequence: CAG
ccattgcctggcagtagcat

SEQ ID NO: 75495 - DNA, 20 bp, Artificial Sequence
  Description of Artificial Sequence: Synthetic oligonucleotide
  Target: LAMA2; (-) strand; PAM type: NRG; PAM sequence: TAG
agatttccattgcctggcag

SEQ ID NO: 75496 - DNA, 20 bp, Artificial Sequence
  Description of Artificial Sequence: Synthetic oligonucleotide
  Target: LAMA2; (-) strand; PAM type: NRG; PAM sequence: CAG
tccagatttccattgcctgg

SEQ ID NO: 75497 - DNA, 20 bp, Artificial Sequence
  Description of Artificial Sequence: Synthetic oligonucleotide
  Target: LAMA2; (-) strand; PAM type: NRG; PAM sequence: TGG
tgatccagatttccattgcc

SEQ ID NO: 75498 - DNA, 20 bp, Artificial Sequence
  Description of Artificial Sequence: Synthetic oligonucleotide
  Target: LAMA2; (-) strand; PAM type: NRG; PAM sequence: CAG
aaaattgaattaagatgatc

SEQ ID NO: 75499 - DNA, 20 bp, Artificial Sequence
  Description of Artificial Sequence: Synthetic oligonucleotide
  Target: LAMA2; (-) strand; PAM type: NRG; PAM sequence: AAG
tgaatccctaaaattgaatt

SEQ ID NO: 75500 - DNA, 20 bp, Artificial Sequence
  Description of Artificial Sequence: Synthetic oligonucleotide
  Target: LAMA2; (-) strand; PAM type: NRG; PAM sequence: CAG
tttgaatcatctgaatgtcc

SEQ ID NO: 75501 - DNA, 20 bp, Artificial Sequence
  Description of Artificial Sequence: Synthetic oligonucleotide
  Target: LAMA2; (-) strand; PAM type: NRG; PAM sequence: TAG
aagcagctgtcactgggtta

SEQ ID NO: 75502 - DNA, 20 bp, Artificial Sequence
  Description of Artificial Sequence: Synthetic oligonucleotide
  Target: LAMA2; (-) strand; PAM type: NRG; PAM sequence: GGG
gaattaaagcagctgtcact

SEQ ID NO: 75503 - DNA, 20 bp, Artificial Sequence
  Description of Artificial Sequence: Synthetic oligonucleotide
  Target: LAMA2; (-) strand; PAM type: NRG; PAM sequence: TGG
ggaattaaagcagctgtcac

SEQ ID NO: 75504 - DNA, 20 bp, Artificial Sequence
  Description of Artificial Sequence: Synthetic oligonucleotide
  Target: LAMA2; (-) strand; PAM type: NRG; PAM sequence: CAG
agcgtatactggaattaaag

SEQ ID NO: 75505 - DNA, 20 bp, Artificial Sequence
  Description of Artificial Sequence: Synthetic oligonucleotide
  Target: LAMA2; (-) strand; PAM type: NRG; PAM sequence: AAG
atgagcgtatactggaatta

SEQ ID NO: 75506 - DNA, 20 bp, Artificial Sequence
  Description of Artificial Sequence: Synthetic oligonucleotide
  Target: LAMA2; (-) strand; PAM type: NRG; PAM sequence: TGG
gcatgggaatgagcgtatac

SEQ ID NO: 75507 - DNA, 20 bp, Artificial Sequence
  Description of Artificial Sequence: Synthetic oligonucleotide
  Target: LAMA2; (-) strand; PAM type: NRG; PAM sequence: GAG
aagataagcagcatgggaat

SEQ ID NO: 75508 - DNA, 20 bp, Artificial Sequence
  Description of Artificial Sequence: Synthetic oligonucleotide
  Target: LAMA2; (-) strand; PAM type: NRG; PAM sequence: GGG
actccaaagataagcagcat

SEQ ID NO: 75509 - DNA, 20 bp, Artificial Sequence
  Description of Artificial Sequence: Synthetic oligonucleotide
  Target: LAMA2; (-) strand; PAM type: NRG; PAM sequence: TGG
gactccaaagataagcagca

SEQ ID NO: 75510 - DNA, 20 bp, Artificial Sequence
  Description of Artificial Sequence: Synthetic oligonucleotide
  Target: LAMA2; (-) strand; PAM type: NRG; PAM sequence: CAG
gcttggactccaaagataag

SEQ ID NO: 75511 - DNA, 20 bp, Artificial Sequence
  Description of Artificial Sequence: Synthetic oligonucleotide
  Target: LAMA2; (-) strand; PAM type: NRG; PAM sequence: AAG
ctggcttggactccaaagat

SEQ ID NO: 75512 - DNA, 20 bp, Artificial Sequence
  Description of Artificial Sequence: Synthetic oligonucleotide
  Target: LAMA2; (-) strand; PAM type: NRG; PAM sequence: AAG
acacgctggcttggactcca

SEQ ID NO: 75513 - DNA, 20 bp, Artificial Sequence
  Description of Artificial Sequence: Synthetic oligonucleotide
  Target: LAMA2; (-) strand; PAM type: NRG; PAM sequence: TGG
aattcccacacacgctggct

SEQ ID NO: 75514 - DNA, 20 bp, Artificial Sequence
  Description of Artificial Sequence: Synthetic oligonucleotide
  Target: LAMA2; (-) strand; PAM type: NRG; PAM sequence: TGG
ttcgtaattcccacacacgc

SEQ ID NO: 75515 - DNA, 20 bp, Artificial Sequence
  Description of Artificial Sequence: Synthetic oligonucleotide
  Target: LAMA2; (-) strand; PAM type: NRG; PAM sequence: GGG
gattccaggactgcatgggt

SEQ ID NO: 75516 - DNA, 20 bp, Artificial Sequence
  Description of Artificial Sequence: Synthetic oligonucleotide
  Target: LAMA2; (-) strand; PAM type: NRG; PAM sequence: TGG
ggattccaggactgcatggg

SEQ ID NO: 75517 - DNA, 20 bp, Artificial Sequence
  Description of Artificial Sequence: Synthetic oligonucleotide
  Target: LAMA2; (-) strand; PAM type: NRG; PAM sequence: GGG
gttggattccaggactgcat

SEQ ID NO: 75518 - DNA, 20 bp, Artificial Sequence
  Description of Artificial Sequence: Synthetic oligonucleotide
  Target: LAMA2; (-) strand; PAM type: NRG; PAM sequence: TGG
agttggattccaggactgca

SEQ ID NO: 75519 - DNA, 20 bp, Artificial Sequence
  Description of Artificial Sequence: Synthetic oligonucleotide
  Target: LAMA2; (-) strand; PAM type: NRG; PAM sequence: AGG
gaggacaaaagttggattcc

SEQ ID NO: 75520 - DNA, 20 bp, Artificial Sequence
  Description of Artificial Sequence: Synthetic oligonucleotide
  Target: LAMA2; (-) strand; PAM type: NRG; PAM sequence: CAG
ggaggacaaaagttggattc

SEQ ID NO: 75521 - DNA, 20 bp, Artificial Sequence
  Description of Artificial Sequence: Synthetic oligonucleotide
  Target: LAMA2; (-) strand; PAM type: NRG; PAM sequence: TGG
tgtattaggaggacaaaagt

SEQ ID NO: 75522 - DNA, 20 bp, Artificial Sequence
  Description of Artificial Sequence: Synthetic oligonucleotide
  Target: LAMA2; (-) strand; PAM type: NRG; PAM sequence: AAG
ctgctgtattaggaggacaa

SEQ ID NO: 75523 - DNA, 20 bp, Artificial Sequence
  Description of Artificial Sequence: Synthetic oligonucleotide
  Target: LAMA2; (-) strand; PAM type: NRG; PAM sequence: AGG
gacagccctgctgtattagg

SEQ ID NO: 75524 - DNA, 20 bp, Artificial Sequence
  Description of Artificial Sequence: Synthetic oligonucleotide
  Target: LAMA2; (-) strand; PAM type: NRG; PAM sequence: GAG
tgacagccctgctgtattag

SEQ ID NO: 75525 - DNA, 20 bp, Artificial Sequence
  Description of Artificial Sequence: Synthetic oligonucleotide
  Target: LAMA2; (-) strand; PAM type: NRG; PAM sequence: AGG
tttgacagccctgctgtatt

SEQ ID NO: 75526 - DNA, 20 bp, Artificial Sequence
  Description of Artificial Sequence: Synthetic oligonucleotide
  Target: LAMA2; (-) strand; PAM type: NRG; PAM sequence: TAG
ttttgacagccctgctgtat

SEQ ID NO: 75527 - DNA, 20 bp, Artificial Sequence
  Description of Artificial Sequence: Synthetic oligonucleotide
  Target: LAMA2; (-) strand; PAM type: NRG; PAM sequence: CAG
agactgagcagctcttttga

SEQ ID NO: 75528 - DNA, 20 bp, Artificial Sequence
  Description of Artificial Sequence: Synthetic oligonucleotide
  Target: LAMA2; (-) strand; PAM type: NRG; PAM sequence: CAG
cacatggctgagagactgag

SEQ ID NO: 75529 - DNA, 20 bp, Artificial Sequence
  Description of Artificial Sequence: Synthetic oligonucleotide
  Target: LAMA2; (-) strand; PAM type: NRG; PAM sequence: GAG
agacacatggctgagagact

SEQ ID NO: 75530 - DNA, 20 bp, Artificial Sequence
  Description of Artificial Sequence: Synthetic oligonucleotide
  Target: LAMA2; (-) strand; PAM type: NRG; PAM sequence: GAG
ctgtccagacacatggctga

SEQ ID NO: 75531 - DNA, 20 bp, Artificial Sequence
  Description of Artificial Sequence: Synthetic oligonucleotide
  Target: LAMA2; (-) strand; PAM type: NRG; PAM sequence: GAG
tcctgtccagacacatggct

SEQ ID NO: 75532 - DNA, 20 bp, Artificial Sequence
  Description of Artificial Sequence: Synthetic oligonucleotide
  Target: LAMA2; (-) strand; PAM type: NRG; PAM sequence: TGG
cattttcctgtccagacaca

SEQ ID NO: 75533 - DNA, 20 bp, Artificial Sequence
  Description of Artificial Sequence: Synthetic oligonucleotide
  Target: LAMA2; (-) strand; PAM type: NRG; PAM sequence: CAG
cctgtgagcattttcctgtc

SEQ ID NO: 75534 - DNA, 20 bp, Artificial Sequence
  Description of Artificial Sequence: Synthetic oligonucleotide
  Target: LAMA2; (-) strand; PAM type: NRG; PAM sequence: GAG
tgtgacagcttttgtcctgt

SEQ ID NO: 75535 - DNA, 20 bp, Artificial Sequence
  Description of Artificial Sequence: Synthetic oligonucleotide
  Target: LAMA2; (-) strand; PAM type: NRG; PAM sequence: CAG
aggtgattggtacgttgtga

SEQ ID NO: 75536 - DNA, 20 bp, Artificial Sequence
  Description of Artificial Sequence: Synthetic oligonucleotide
  Target: LAMA2; (-) strand; PAM type: NRG; PAM sequence: TGG
gagatgtctagacaggtgat

SEQ ID NO: 75537 - DNA, 20 bp, Artificial Sequence
  Description of Artificial Sequence: Synthetic oligonucleotide
  Target: LAMA2; (-) strand; PAM type: NRG; PAM sequence: AGG
gacaaaagagatgtctagac

SEQ ID NO: 75538 - DNA, 20 bp, Artificial Sequence
  Description of Artificial Sequence: Synthetic oligonucleotide
  Target: LAMA2; (-) strand; PAM type: NRG; PAM sequence: CAG
ggacaaaagagatgtctaga

SEQ ID NO: 75539 - DNA, 20 bp, Artificial Sequence
  Description of Artificial Sequence: Synthetic oligonucleotide
  Target: LAMA2; (-) strand; PAM type: NRG; PAM sequence: TAG
tcaaggacaaaagagatgtc

SEQ ID NO: 75540 - DNA, 20 bp, Artificial Sequence
  Description of Artificial Sequence: Synthetic oligonucleotide
  Target: LAMA2; (-) strand; PAM type: NRG; PAM sequence: GAG
tctcaacatcaaggacaaaa

SEQ ID NO: 75541 - DNA, 20 bp, Artificial Sequence
  Description of Artificial Sequence: Synthetic oligonucleotide
  Target: LAMA2; (-) strand; PAM type: NRG; PAM sequence: AAG
cttctcaacatcaaggacaa

SEQ ID NO: 75542 - DNA, 20 bp, Artificial Sequence
  Description of Artificial Sequence: Synthetic oligonucleotide
  Target: LAMA2; (-) strand; PAM type: NRG; PAM sequence: AGG
agataaccttctcaacatca

SEQ ID NO: 75543 - DNA, 20 bp, Artificial Sequence
  Description of Artificial Sequence: Synthetic oligonucleotide
  Target: LAMA2; (-) strand; PAM type: NRG; PAM sequence: AAG
aagataaccttctcaacatc

SEQ ID NO: 75544 - DNA, 20 bp, Artificial Sequence
  Description of Artificial Sequence: Synthetic oligonucleotide
  Target: LAMA2; (-) strand; PAM type: NRG; PAM sequence: AAG
tgagagctatcaagagagtg

SEQ ID NO: 75545 - DNA, 20 bp, Artificial Sequence
  Description of Artificial Sequence: Synthetic oligonucleotide
  Target: LAMA2; (-) strand; PAM type: NRG; PAM sequence: GAG
ccatgtgagagctatcaaga

SEQ ID NO: 75546 - DNA, 20 bp, Artificial Sequence
  Description of Artificial Sequence: Synthetic oligonucleotide
  Target: LAMA2; (-) strand; PAM type: NRG; PAM sequence: GAG
agccatgtgagagctatcaa

SEQ ID NO: 75547 - DNA, 20 bp, Artificial Sequence
  Description of Artificial Sequence: Synthetic oligonucleotide
  Target: LAMA2; (-) strand; PAM type: NRG; PAM sequence: AAG
aaagccatgtgagagctatc

SEQ ID NO: 75548 - DNA, 20 bp, Artificial Sequence
  Description of Artificial Sequence: Synthetic oligonucleotide
  Target: LAMA2; (-) strand; PAM type: NRG; PAM sequence: GAG
atatgtttaaagccatgtga

SEQ ID NO: 75549 - DNA, 20 bp, Artificial Sequence
  Description of Artificial Sequence: Synthetic oligonucleotide
  Target: LAMA2; (-) strand; PAM type: NRG; PAM sequence: GAG
acatatgtttaaagccatgt

SEQ ID NO: 75550 - DNA, 20 bp, Artificial Sequence
  Description of Artificial Sequence: Synthetic oligonucleotide
  Target: LAMA2; (-) strand; PAM type: NRG; PAM sequence: AAG
tatacaaaaacatatgttta

SEQ ID NO: 75551 - DNA, 20 bp, Artificial Sequence
  Description of Artificial Sequence: Synthetic oligonucleotide
  Target: LAMA2; (-) strand; PAM type: NRG; PAM sequence: TGG
atgacaacaactagacaaac

SEQ ID NO: 75552 - DNA, 20 bp, Artificial Sequence
  Description of Artificial Sequence: Synthetic oligonucleotide
  Target: LAMA2; (-) strand; PAM type: NRG; PAM sequence: TAG
acactctcaatgacaacaac

SEQ ID NO: 75553 - DNA, 20 bp, Artificial Sequence
  Description of Artificial Sequence: Synthetic oligonucleotide
  Target: LAMA2; (-) strand; PAM type: NRG; PAM sequence: GAG
tatggtagattatacagtaa

SEQ ID NO: 75554 - DNA, 20 bp, Artificial Sequence
  Description of Artificial Sequence: Synthetic oligonucleotide
  Target: LAMA2; (-) strand; PAM type: NRG; PAM sequence: AAG
tttatggtagattatacagt

SEQ ID NO: 75555 - DNA, 20 bp, Artificial Sequence
  Description of Artificial Sequence: Synthetic oligonucleotide
  Target: LAMA2; (-) strand; PAM type: NRG; PAM sequence: CAG
tctatttatggtagattata

SEQ ID NO: 75556 - DNA, 20 bp, Artificial Sequence
  Description of Artificial Sequence: Synthetic oligonucleotide
  Target: LAMA2; (-) strand; PAM type: NRG; PAM sequence: TAG
aacttcgcttctatttatgg

SEQ ID NO: 75557 - DNA, 20 bp, Artificial Sequence
  Description of Artificial Sequence: Synthetic oligonucleotide
  Target: LAMA2; (-) strand; PAM type: NRG; PAM sequence: TGG
tgcaacttcgcttctattta

SEQ ID NO: 75558 - DNA, 20 bp, Artificial Sequence
  Description of Artificial Sequence: Synthetic oligonucleotide
  Target: LAMA2; (-) strand; PAM type: NRG; PAM sequence: AGG
tagctggatgagggaatgtg

SEQ ID NO: 75559 - DNA, 20 bp, Artificial Sequence
  Description of Artificial Sequence: Synthetic oligonucleotide
  Target: LAMA2; (-) strand; PAM type: NRG; PAM sequence: GAG
atagctggatgagggaatgt

SEQ ID NO: 75560 - DNA, 20 bp, Artificial Sequence
  Description of Artificial Sequence: Synthetic oligonucleotide
  Target: LAMA2; (-) strand; PAM type: NRG; PAM sequence: GGG
tcctagggatagctggatga

SEQ ID NO: 75561 - DNA, 20 bp, Artificial Sequence
  Description of Artificial Sequence: Synthetic oligonucleotide
  Target: LAMA2; (-) strand; PAM type: NRG; PAM sequence: AGG
ttcctagggatagctggatg

SEQ ID NO: 75562 - DNA, 20 bp, Artificial Sequence
  Description of Artificial Sequence: Synthetic oligonucleotide
  Target: LAMA2; (-) strand; PAM type: NRG; PAM sequence: GAG
attcctagggatagctggat

SEQ ID NO: 75563 - DNA, 20 bp, Artificial Sequence
  Description of Artificial Sequence: Synthetic oligonucleotide
  Target: LAMA2; (-) strand; PAM type: NRG; PAM sequence: TGG
atattattcctagggatagc

SEQ ID NO: 75564 - DNA, 20 bp, Artificial Sequence
  Description of Artificial Sequence: Synthetic oligonucleotide
  Target: LAMA2; (-) strand; PAM type: NRG; PAM sequence: TAG
taagatattattcctaggga

SEQ ID NO: 75565 - DNA, 20 bp, Artificial Sequence
  Description of Artificial Sequence: Synthetic oligonucleotide
  Target: LAMA2; (-) strand; PAM type: NRG; PAM sequence: GGG
tatttaagatattattccta

SEQ ID NO: 75566 - DNA, 20 bp, Artificial Sequence
  Description of Artificial Sequence: Synthetic oligonucleotide
  Target: LAMA2; (-) strand; PAM type: NRG; PAM sequence: AGG
ttatttaagatattattcct

SEQ ID NO: 75567 - DNA, 20 bp, Artificial Sequence
  Description of Artificial Sequence: Synthetic oligonucleotide
  Target: LAMA2; (-) strand; PAM type: NRG; PAM sequence: TAG
attatttaagatattattcc

SEQ ID NO: 75568 - DNA, 20 bp, Artificial Sequence
  Description of Artificial Sequence: Synthetic oligonucleotide
  Target: LAMA2; (-) strand; PAM type: NRG; PAM sequence: AAG
catgtgcattgtcattattt

SEQ ID NO: 75569 - DNA, 20 bp, Artificial Sequence
  Description of Artificial Sequence: Synthetic oligonucleotide
  Target: LAMA2; (-) strand; PAM type: NRG; PAM sequence: TAG
atgtatcaatgctaacttct

SEQ ID NO: 75570 - DNA, 20 bp, Artificial Sequence
  Description of Artificial Sequence: Synthetic oligonucleotide
  Target: LAMA2; (-) strand; PAM type: NRG; PAM sequence: TAG
cctgaataaggtctgtggtt

SEQ ID NO: 75571 - DNA, 20 bp, Artificial Sequence
  Description of Artificial Sequence: Synthetic oligonucleotide
  Target: LAMA2; (-) strand; PAM type: NRG; PAM sequence: TGG
tgaaacctgaataaggtctg

SEQ ID NO: 75572 - DNA, 20 bp, Artificial Sequence
  Description of Artificial Sequence: Synthetic oligonucleotide
  Target: LAMA2; (-) strand; PAM type: NRG; PAM sequence: AGG
aaatgaatgaaacctgaata

SEQ ID NO: 75573 - DNA, 20 bp, Artificial Sequence
  Description of Artificial Sequence: Synthetic oligonucleotide
  Target: LAMA2; (-) strand; PAM type: NRG; PAM sequence: AAG
aaaatgaatgaaacctgaat

SEQ ID NO: 75574 - DNA, 20 bp, Artificial Sequence
  Description of Artificial Sequence: Synthetic oligonucleotide
  Target: LAMA2; (-) strand; PAM type: NRG; PAM sequence: TGG
cagaagagaaaaaatgaaat

SEQ ID NO: 75575 - DNA, 20 bp, Artificial Sequence
  Description of Artificial Sequence: Synthetic oligonucleotide
  Target: LAMA2; (-) strand; PAM type: NRG; PAM sequence: GAG
acctgaattggatcccagaa

SEQ ID NO: 75576 - DNA, 20 bp, Artificial Sequence
  Description of Artificial Sequence: Synthetic oligonucleotide
  Target: LAMA2; (-) strand; PAM type: NRG; PAM sequence: AAG
gtacctgaattggatcccag

SEQ ID NO: 75577 - DNA, 20 bp, Artificial Sequence
  Description of Artificial Sequence: Synthetic oligonucleotide
  Target: LAMA2; (-) strand; PAM type: NRG; PAM sequence: CAG
atagtacctgaattggatcc

SEQ ID NO: 75578 - DNA, 20 bp, Artificial Sequence
  Description of Artificial Sequence: Synthetic oligonucleotide
  Target: LAMA2; (-) strand; PAM type: NRG; PAM sequence: TGG
atgcaaaatagtacctgaat

SEQ ID NO: 75579 - DNA, 20 bp, Artificial Sequence
  Description of Artificial Sequence: Synthetic oligonucleotide
  Target: LAMA2; (-) strand; PAM type: NRG; PAM sequence: TAG
atcagtgactaaatgcaaaa

SEQ ID NO: 75580 - DNA, 20 bp, Artificial Sequence
  Description of Artificial Sequence: Synthetic oligonucleotide
  Target: LAMA2; (-) strand; PAM type: NRG; PAM sequence: CAG
ctcttaaaactgtcacagat

SEQ ID NO: 75581 - DNA, 20 bp, Artificial Sequence
  Description of Artificial Sequence: Synthetic oligonucleotide
  Target: LAMA2; (-) strand; PAM type: NRG; PAM sequence: CAG
aatatctcttaaaactgtca

SEQ ID NO: 75582 - DNA, 20 bp, Artificial Sequence
  Description of Artificial Sequence: Synthetic oligonucleotide
  Target: LAMA2; (-) strand; PAM type: NRG; PAM sequence: TAG
ggcaaacccaaactgaataa

SEQ ID NO: 75583 - DNA, 20 bp, Artificial Sequence
  Description of Artificial Sequence: Synthetic oligonucleotide
  Target: LAMA2; (-) strand; PAM type: NRG; PAM sequence: AGG
tttaaccatgaaaaaacatc

SEQ ID NO: 75584 - DNA, 20 bp, Artificial Sequence
  Description of Artificial Sequence: Synthetic oligonucleotide
  Target: LAMA2; (-) strand; PAM type: NRG; PAM sequence: CAG
gtttaaccatgaaaaaacat

SEQ ID NO: 75585 - DNA, 20 bp, Artificial Sequence
  Description of Artificial Sequence: Synthetic oligonucleotide
  Target: LAMA2; (-) strand; PAM type: NRG; PAM sequence: CAG
gttcccaaaatccagaagcc

SEQ ID NO: 75586 - DNA, 20 bp, Artificial Sequence
  Description of Artificial Sequence: Synthetic oligonucleotide
  Target: LAMA2; (-) strand; PAM type: NRG; PAM sequence: AAG
tattggttcccaaaatccag

SEQ ID NO: 75587 - DNA, 20 bp, Artificial Sequence
  Description of Artificial Sequence: Synthetic oligonucleotide
  Target: LAMA2; (-) strand; PAM type: NRG; PAM sequence: CAG
tagtattggttcccaaaatc

SEQ ID NO: 75588 - DNA, 20 bp, Artificial Sequence
  Description of Artificial Sequence: Synthetic oligonucleotide
  Target: LAMA2; (-) strand; PAM type: NRG; PAM sequence: TGG
aactgtttcctctgtagtat

SEQ ID NO: 75589 - DNA, 20 bp, Artificial Sequence
  Description of Artificial Sequence: Synthetic oligonucleotide
  Target: LAMA2; (-) strand; PAM type: NRG; PAM sequence: TAG
atgagaaactgtttcctctg

SEQ ID NO: 75590 - DNA, 20 bp, Artificial Sequence
  Description of Artificial Sequence: Synthetic oligonucleotide
  Target: LAMA2; (-) strand; PAM type: NRG; PAM sequence: GAG
taaaaaatgattgatgcaat

SEQ ID NO: 75591 - DNA, 20 bp, Artificial Sequence
  Description of Artificial Sequence: Synthetic oligonucleotide
  Target: LAMA2; (-) strand; PAM type: NRG; PAM sequence: AAG
agccccataaaccaataaaa

SEQ ID NO: 75592 - DNA, 20 bp, Artificial Sequence
  Description of Artificial Sequence: Synthetic oligonucleotide
  Target: LAMA2; (-) strand; PAM type: NRG; PAM sequence: AAG
ctacctattaatagaagcac

SEQ ID NO: 75593 - DNA, 20 bp, Artificial Sequence
  Description of Artificial Sequence: Synthetic oligonucleotide
  Target: LAMA2; (-) strand; PAM type: NRG; PAM sequence: AAG
aaaaatctacctattaatag

SEQ ID NO: 75594 - DNA, 20 bp, Artificial Sequence
  Description of Artificial Sequence: Synthetic oligonucleotide
  Target: LAMA2; (-) strand; PAM type: NRG; PAM sequence: TAG
tttaaaaatctacctattaa

SEQ ID NO: 75595 - DNA, 20 bp, Artificial Sequence
  Description of Artificial Sequence: Synthetic oligonucleotide
  Target: LAMA2; (-) strand; PAM type: NRG; PAM sequence: TAG
tacaaatcacagtaaatatt

SEQ ID NO: 75596 - DNA, 20 bp, Artificial Sequence
  Description of Artificial Sequence: Synthetic oligonucleotide
  Target: LAMA2; (-) strand; PAM type: NRG; PAM sequence: CAG
aaaatatacattacaaatca

SEQ ID NO: 75597 - DNA, 20 bp, Artificial Sequence
  Description of Artificial Sequence: Synthetic oligonucleotide
  Target: LAMA2; (-) strand; PAM type: NRG; PAM sequence: TAG
gaaaatgaccattcaatgct

SEQ ID NO: 75598 - DNA, 20 bp, Artificial Sequence
  Description of Artificial Sequence: Synthetic oligonucleotide
  Target: LAMA2; (-) strand; PAM type: NRG; PAM sequence: AAG
ggaatattttgaaggtctgg

SEQ ID NO: 75599 - DNA, 20 bp, Artificial Sequence
  Description of Artificial Sequence: Synthetic oligonucleotide
  Target: LAMA2; (-) strand; PAM type: NRG; PAM sequence: TGG
taaggaatattttgaaggtc

SEQ ID NO: 75600 - DNA, 20 bp, Artificial Sequence
  Description of Artificial Sequence: Synthetic oligonucleotide
  Target: LAMA2; (-) strand; PAM type: NRG; PAM sequence: AGG
atatttaaggaatattttga

SEQ ID NO: 75601 - DNA, 20 bp, Artificial Sequence
  Description of Artificial Sequence: Synthetic oligonucleotide
  Target: LAMA2; (-) strand; PAM type: NRG; PAM sequence: AAG
catatttaaggaatattttg

SEQ ID NO: 75602 - DNA, 20 bp, Artificial Sequence
  Description of Artificial Sequence: Synthetic oligonucleotide
  Target: LAMA2; (-) strand; PAM type: NRG; PAM sequence: AGG
tcttatttctgacatattta

SEQ ID NO: 75603 - DNA, 20 bp, Artificial Sequence
  Description of Artificial Sequence: Synthetic oligonucleotide
  Target: LAMA2; (-) strand; PAM type: NRG; PAM sequence: AAG
ttcttatttctgacatattt

SEQ ID NO: 75604 - DNA, 20 bp, Artificial Sequence
  Description of Artificial Sequence: Synthetic oligonucleotide
  Target: LAMA2; (-) strand; PAM type: NRG; PAM sequence: GGG
gggaggaaggcagagaggga

SEQ ID NO: 75605 - DNA, 20 bp, Artificial Sequence
  Description of Artificial Sequence: Synthetic oligonucleotide
  Target: LAMA2; (-) strand; PAM type: NRG; PAM sequence: AGG
agggaggaaggcagagaggg

SEQ ID NO: 75606 - DNA, 20 bp, Artificial Sequence
  Description of Artificial Sequence: Synthetic oligonucleotide
  Target: LAMA2; (-) strand; PAM type: NRG; PAM sequence: GAG
aagggaggaaggcagagagg

SEQ ID NO: 75607 - DNA, 20 bp, Artificial Sequence
  Description of Artificial Sequence: Synthetic oligonucleotide
  Target: LAMA2; (-) strand; PAM type: NRG; PAM sequence: GGG
ggaagggaggaaggcagaga

SEQ ID NO: 75608 - DNA, 20 bp, Artificial Sequence
  Description of Artificial Sequence: Synthetic oligonucleotide
  Target: LAMA2; (-) strand; PAM type: NRG; PAM sequence: AGG
aggaagggaggaaggcagag

SEQ ID NO: 75609 - DNA, 20 bp, Artificial Sequence
  Description of Artificial Sequence: Synthetic oligonucleotide
  Target: LAMA2; (-) strand; PAM type: NRG; PAM sequence: GAG
aaggaagggaggaaggcaga

SEQ ID NO: 75610 - DNA, 20 bp, Artificial Sequence
  Description of Artificial Sequence: Synthetic oligonucleotide
  Target: LAMA2; (-) strand; PAM type: NRG; PAM sequence: GAG
ggaaggaagggaggaaggca

SEQ ID NO: 75611 - DNA, 20 bp, Artificial Sequence
  Description of Artificial Sequence: Synthetic oligonucleotide
  Target: LAMA2; (-) strand; PAM type: NRG; PAM sequence: CAG
aaggaaggaagggaggaagg

SEQ ID NO: 75612 - DNA, 20 bp, Artificial Sequence
  Description of Artificial Sequence: Synthetic oligonucleotide
  Target: LAMA2; (-) strand; PAM type: NRG; PAM sequence: AGG
aggaaggaaggaagggagga

SEQ ID NO: 75613 - DNA, 20 bp, Artificial Sequence
  Description of Artificial Sequence: Synthetic oligonucleotide
  Target: LAMA2; (-) strand; PAM type: NRG; PAM sequence: AAG
aaggaaggaaggaagggagg

SEQ ID NO: 75614 - DNA, 20 bp, Artificial Sequence
  Description of Artificial Sequence: Synthetic oligonucleotide
  Target: LAMA2; (-) strand; PAM type: NRG; PAM sequence: AGG
aggaaggaaggaaggaaggg

SEQ ID NO: 75615 - DNA, 20 bp, Artificial Sequence
  Description of Artificial Sequence: Synthetic oligonucleotide
  Target: LAMA2; (-) strand; PAM type: NRG; PAM sequence: GAG
aaggaaggaaggaaggaagg

SEQ ID NO: 75616 - DNA, 20 bp, Artificial Sequence
  Description of Artificial Sequence: Synthetic oligonucleotide
  Target: LAMA2; (-) strand; PAM type: NRG; PAM sequence: GGG
aaaaggaaggaaggaaggaa

SEQ ID NO: 75617 - DNA, 20 bp, Artificial Sequence
  Description of Artificial Sequence: Synthetic oligonucleotide
  Target: LAMA2; (-) strand; PAM type: NRG; PAM sequence: AGG
aaaaaggaaggaaggaagga

SEQ ID NO: 75618 - DNA, 20 bp, Artificial Sequence
  Description of Artificial Sequence: Synthetic oligonucleotide
  Target: LAMA2; (-) strand; PAM type: NRG; PAM sequence: AAG
aaaaaaggaaggaaggaagg

SEQ ID NO: 75619 - DNA, 20 bp, Artificial Sequence
  Description of Artificial Sequence: Synthetic oligonucleotide
  Target: LAMA2; (-) strand; PAM type: NRG; PAM sequence: AGG
gaaaaaaaaggaaggaagga

SEQ ID NO: 75620 - DNA, 20 bp, Artificial Sequence
  Description of Artificial Sequence: Synthetic oligonucleotide
  Target: LAMA2; (-) strand; PAM type: NRG; PAM sequence: AAG
agaaaaaaaaggaaggaagg

SEQ ID NO: 75621 - DNA, 20 bp, Artificial Sequence
  Description of Artificial Sequence: Synthetic oligonucleotide
  Target: LAMA2; (-) strand; PAM type: NRG; PAM sequence: AGG
gaaagaaaaaaaaggaagga

SEQ ID NO: 75622 - DNA, 20 bp, Artificial Sequence
  Description of Artificial Sequence: Synthetic oligonucleotide
  Target: LAMA2; (-) strand; PAM type: NRG; PAM sequence: AAG
agaaagaaaaaaaaggaagg

SEQ ID NO: 75623 - DNA, 20 bp, Artificial Sequence
  Description of Artificial Sequence: Synthetic oligonucleotide
  Target: LAMA2; (-) strand; PAM type: NRG; PAM sequence: AGG
agaagaaagaaaaaaaagga

SEQ ID NO: 75624 - DNA, 20 bp, Artificial Sequence
  Description of Artificial Sequence: Synthetic oligonucleotide
  Target: LAMA2; (-) strand; PAM type: NRG; PAM sequence: AAG
aagaagaaagaaaaaaaagg

SEQ ID NO: 75625 - DNA, 20 bp, Artificial Sequence
  Description of Artificial Sequence: Synthetic oligonucleotide
  Target: LAMA2; (-) strand; PAM type: NRG; PAM sequence: AGG
gtaaagaagaaagaaaaaaa

SEQ ID NO: 75626 - DNA, 20 bp, Artificial Sequence
  Description of Artificial Sequence: Synthetic oligonucleotide
  Target: LAMA2; (-) strand; PAM type: NRG; PAM sequence: AAG
tgtaaagaagaaagaaaaaa

SEQ ID NO: 75627 - DNA, 20 bp, Artificial Sequence
  Description of Artificial Sequence: Synthetic oligonucleotide
  Target: LAMA2; (-) strand; PAM type: NRG; PAM sequence: AAG
gaacctgtttgtaaagaaga

SEQ ID NO: 75628 - DNA, 20 bp, Artificial Sequence
  Description of Artificial Sequence: Synthetic oligonucleotide
  Target: LAMA2; (-) strand; PAM type: NRG; PAM sequence: AAG
atgagaacctgtttgtaaag

SEQ ID NO: 75629 - DNA, 20 bp, Artificial Sequence
  Description of Artificial Sequence: Synthetic oligonucleotide
  Target: LAMA2; (-) strand; PAM type: NRG; PAM sequence: AAG
acaatgagaacctgtttgta

SEQ ID NO: 75630 - DNA, 20 bp, Artificial Sequence
  Description of Artificial Sequence: Synthetic oligonucleotide
  Target: LAMA2; (-) strand; PAM type: NRG; PAM sequence: GAG
tctagcctgatcaacacaat

SEQ ID NO: 75631 - DNA, 20 bp, Artificial Sequence
  Description of Artificial Sequence: Synthetic oligonucleotide
  Target: LAMA2; (-) strand; PAM type: NRG; PAM sequence: TAG
ataatcatgccactggactc

SEQ ID NO: 75632 - DNA, 20 bp, Artificial Sequence
  Description of Artificial Sequence: Synthetic oligonucleotide
  Target: LAMA2; (-) strand; PAM type: NRG; PAM sequence: TGG
gtgagctataatcatgccac

SEQ ID NO: 75633 - DNA, 20 bp, Artificial Sequence
  Description of Artificial Sequence: Synthetic oligonucleotide
  Target: LAMA2; (-) strand; PAM type: NRG; PAM sequence: GAG
taggagtttgagcctgcagt

SEQ ID NO: 75634 - DNA, 20 bp, Artificial Sequence
  Description of Artificial Sequence: Synthetic oligonucleotide
  Target: LAMA2; (-) strand; PAM type: NRG; PAM sequence: CAG
agcctaggagtttgagcctg

SEQ ID NO: 75635 - DNA, 20 bp, Artificial Sequence
  Description of Artificial Sequence: Synthetic oligonucleotide
  Target: LAMA2; (-) strand; PAM type: NRG; PAM sequence: GAG
tttcttgagcctaggagttt

SEQ ID NO: 75636 - DNA, 20 bp, Artificial Sequence
  Description of Artificial Sequence: Synthetic oligonucleotide
  Target: LAMA2; (-) strand; PAM type: NRG; PAM sequence: GAG
ggaagatttcttgagcctag

SEQ ID NO: 75637 - DNA, 20 bp, Artificial Sequence
  Description of Artificial Sequence: Synthetic oligonucleotide
  Target: LAMA2; (-) strand; PAM type: NRG; PAM sequence: AGG
taggaagatttcttgagcct

SEQ ID NO: 75638 - DNA, 20 bp, Artificial Sequence
  Description of Artificial Sequence: Synthetic oligonucleotide
  Target: LAMA2; (-) strand; PAM type: NRG; PAM sequence: TAG
gtaggaagatttcttgagcc

SEQ ID NO: 75639 - DNA, 20 bp, Artificial Sequence
  Description of Artificial Sequence: Synthetic oligonucleotide
  Target: LAMA2; (-) strand; PAM type: NRG; PAM sequence: GAG
tttaggtaggaagatttctt

SEQ ID NO: 75640 - DNA, 20 bp, Artificial Sequence
  Description of Artificial Sequence: Synthetic oligonucleotide
  Target: LAMA2; (-) strand; PAM type: NRG; PAM sequence: AAG
aggctgattttttaggtagg

SEQ ID NO: 75641 - DNA, 20 bp, Artificial Sequence
  Description of Artificial Sequence: Synthetic oligonucleotide
  Target: LAMA2; (-) strand; PAM type: NRG; PAM sequence: AGG
tggaggctgattttttaggt

SEQ ID NO: 75642 - DNA, 20 bp, Artificial Sequence
  Description of Artificial Sequence: Synthetic oligonucleotide
  Target: LAMA2; (-) strand; PAM type: NRG; PAM sequence: TAG
ctggaggctgattttttagg

SEQ ID NO: 75643 - DNA, 20 bp, Artificial Sequence
  Description of Artificial Sequence: Synthetic oligonucleotide
  Target: LAMA2; (-) strand; PAM type: NRG; PAM sequence: AGG
tagctggaggctgatttttt

SEQ ID NO: 75644 - DNA, 20 bp, Artificial Sequence
  Description of Artificial Sequence: Synthetic oligonucleotide
  Target: LAMA2; (-) strand; PAM type: NRG; PAM sequence: TAG
ttagctggaggctgattttt

SEQ ID NO: 75645 - DNA, 20 bp, Artificial Sequence
  Description of Artificial Sequence: Synthetic oligonucleotide
  Target: LAMA2; (-) strand; PAM type: NRG; PAM sequence: AGG
aattttaaaaaattagctgg

SEQ ID NO: 75646 - DNA, 20 bp, Artificial Sequence
  Description of Artificial Sequence: Synthetic oligonucleotide
  Target: LAMA2; (-) strand; PAM type: NRG; PAM sequence: GAG
aaattttaaaaaattagctg

SEQ ID NO: 75647 - DNA, 20 bp, Artificial Sequence
  Description of Artificial Sequence: Synthetic oligonucleotide
  Target: LAMA2; (-) strand; PAM type: NRG; PAM sequence: TGG
aaaaattttaaaaaattagc

SEQ ID NO: 75648 - DNA, 20 bp, Artificial Sequence
  Description of Artificial Sequence: Synthetic oligonucleotide
  Target: LAMA2; (-) strand; PAM type: NRG; PAM sequence: TAG
acaaaaaaattttaaaaaat

SEQ ID NO: 75649 - DNA, 20 bp, Artificial Sequence
  Description of Artificial Sequence: Synthetic oligonucleotide
  Target: LAMA2; (-) strand; PAM type: NRG; PAM sequence: AAG
aacggcctgggcaacatagc

SEQ ID NO: 75650 - DNA, 20 bp, Artificial Sequence
  Description of Artificial Sequence: Synthetic oligonucleotide
  Target: LAMA2; (-) strand; PAM type: NRG; PAM sequence: TAG
tgagaacggcctgggcaaca

SEQ ID NO: 75651 - DNA, 20 bp, Artificial Sequence
  Description of Artificial Sequence: Synthetic oligonucleotide
  Target: LAMA2; (-) strand; PAM type: NRG; PAM sequence: GGG
caggagtttgagaacggcct

SEQ ID NO: 75652 - DNA, 20 bp, Artificial Sequence
  Description of Artificial Sequence: Synthetic oligonucleotide
  Target: LAMA2; (-) strand; PAM type: NRG; PAM sequence: TGG
ccaggagtttgagaacggcc

SEQ ID NO: 75653 - DNA, 20 bp, Artificial Sequence
  Description of Artificial Sequence: Synthetic oligonucleotide
  Target: LAMA2; (-) strand; PAM type: NRG; PAM sequence: CGG
tgaggccaggagtttgagaa

SEQ ID NO: 75654 - DNA, 20 bp, Artificial Sequence
  Description of Artificial Sequence: Synthetic oligonucleotide
  Target: LAMA2; (-) strand; PAM type: NRG; PAM sequence: GAG
tcacttgaggccaggagttt

SEQ ID NO: 75655 - DNA, 20 bp, Artificial Sequence
  Description of Artificial Sequence: Synthetic oligonucleotide
  Target: LAMA2; (-) strand; PAM type: NRG; PAM sequence: GAG
gaaagatcacttgaggccag

SEQ ID NO: 75656 - DNA, 20 bp, Artificial Sequence
  Description of Artificial Sequence: Synthetic oligonucleotide
  Target: LAMA2; (-) strand; PAM type: NRG; PAM sequence: AGG
tggaaagatcacttgaggcc

SEQ ID NO: 75657 - DNA, 20 bp, Artificial Sequence
  Description of Artificial Sequence: Synthetic oligonucleotide
  Target: LAMA2; (-) strand; PAM type: NRG; PAM sequence: CAG
gtggaaagatcacttgaggc

SEQ ID NO: 75658 - DNA, 20 bp, Artificial Sequence
  Description of Artificial Sequence: Synthetic oligonucleotide
  Target: LAMA2; (-) strand; PAM type: NRG; PAM sequence: AGG
taaggtggaaagatcacttg

SEQ ID NO: 75659 - DNA, 20 bp, Artificial Sequence
  Description of Artificial Sequence: Synthetic oligonucleotide
  Target: LAMA2; (-) strand; PAM type: NRG; PAM sequence: GAG
ctaaggtggaaagatcactt

SEQ ID NO: 75660 - DNA, 20 bp, Artificial Sequence
  Description of Artificial Sequence: Synthetic oligonucleotide
  Target: LAMA2; (-) strand; PAM type: NRG; PAM sequence: AAG
ctttagaagactaaggtgga

SEQ ID NO: 75661 - DNA, 20 bp, Artificial Sequence
  Description of Artificial Sequence: Synthetic oligonucleotide
  Target: LAMA2; (-) strand; PAM type: NRG; PAM sequence: TGG
gtaactttagaagactaagg

SEQ ID NO: 75662 - DNA, 20 bp, Artificial Sequence
  Description of Artificial Sequence: Synthetic oligonucleotide
  Target: LAMA2; (-) strand; PAM type: NRG; PAM sequence: AGG
actgtaactttagaagacta

SEQ ID NO: 75663 - DNA, 20 bp, Artificial Sequence
  Description of Artificial Sequence: Synthetic oligonucleotide
  Target: LAMA2; (-) strand; PAM type: NRG; PAM sequence: AAG
gactgtaactttagaagact

SEQ ID NO: 75664 - DNA, 20 bp, Artificial Sequence
  Description of Artificial Sequence: Synthetic oligonucleotide
  Target: LAMA2; (-) strand; PAM type: NRG; PAM sequence: AAG
tcagaagactgtaactttag

SEQ ID NO: 75665 - DNA, 20 bp, Artificial Sequence
  Description of Artificial Sequence: Synthetic oligonucleotide
  Target: LAMA2; (-) strand; PAM type: NRG; PAM sequence: TAG
atctcagaagactgtaactt

SEQ ID NO: 75666 - DNA, 20 bp, Artificial Sequence
  Description of Artificial Sequence: Synthetic oligonucleotide
  Target: LAMA2; (-) strand; PAM type: NRG; PAM sequence: AAG
gttcatgtctgtaatctcag

SEQ ID NO: 75667 - DNA, 20 bp, Artificial Sequence
  Description of Artificial Sequence: Synthetic oligonucleotide
  Target: LAMA2; (-) strand; PAM type: NRG; PAM sequence: CAG
gtggttcatgtctgtaatct

SEQ ID NO: 75668 - DNA, 20 bp, Artificial Sequence
  Description of Artificial Sequence: Synthetic oligonucleotide
  Target: LAMA2; (-) strand; PAM type: NRG; PAM sequence: TGG
ttcctctgggccaggcatgg

SEQ ID NO: 75669 - DNA, 20 bp, Artificial Sequence
  Description of Artificial Sequence: Synthetic oligonucleotide
  Target: LAMA2; (-) strand; PAM type: NRG; PAM sequence: TGG
aaattcctctgggccaggca

SEQ ID NO: 75670 - DNA, 20 bp, Artificial Sequence
  Description of Artificial Sequence: Synthetic oligonucleotide
  Target: LAMA2; (-) strand; PAM type: NRG; PAM sequence: AGG
cttaaaaattcctctgggcc

SEQ ID NO: 75671 - DNA, 20 bp, Artificial Sequence
  Description of Artificial Sequence: Synthetic oligonucleotide
  Target: LAMA2; (-) strand; PAM type: NRG; PAM sequence: CAG
ccttaaaaattcctctgggc

SEQ ID NO: 75672 - DNA, 20 bp, Artificial Sequence
  Description of Artificial Sequence: Synthetic oligonucleotide
  Target: LAMA2; (-) strand; PAM type: NRG; PAM sequence: GGG
tgggccttaaaaattcctct

SEQ ID NO: 75673 - DNA, 20 bp, Artificial Sequence
  Description of Artificial Sequence: Synthetic oligonucleotide
  Target: LAMA2; (-) strand; PAM type: NRG; PAM sequence: TGG
gtgggccttaaaaattcctc

SEQ ID NO: 75674 - DNA, 20 bp, Artificial Sequence
  Description of Artificial Sequence: Synthetic oligonucleotide
  Target: LAMA2; (-) strand; PAM type: NRG; PAM sequence: GGG
taatgccttgttacatgggt

SEQ ID NO: 75675 - DNA, 20 bp, Artificial Sequence
  Description of Artificial Sequence: Synthetic oligonucleotide
  Target: LAMA2; (-) strand; PAM type: NRG; PAM sequence: TGG
ataatgccttgttacatggg

SEQ ID NO: 75676 - DNA, 20 bp, Artificial Sequence
  Description of Artificial Sequence: Synthetic oligonucleotide
  Target: LAMA2; (-) strand; PAM type: NRG; PAM sequence: GGG
ttcataatgccttgttacat

SEQ ID NO: 75677 - DNA, 20 bp, Artificial Sequence
  Description of Artificial Sequence: Synthetic oligonucleotide
  Target: LAMA2; (-) strand; PAM type: NRG; PAM sequence: TGG
tttcataatgccttgttaca

SEQ ID NO: 75678 - DNA, 20 bp, Artificial Sequence
  Description of Artificial Sequence: Synthetic oligonucleotide
  Target: LAMA2; (-) strand; PAM type: NRG; PAM sequence: GAG
ctaactagtgtgtaacaatt

SEQ ID NO: 75679 - DNA, 20 bp, Artificial Sequence
  Description of Artificial Sequence: Synthetic oligonucleotide
  Target: LAMA2; (-) strand; PAM type: NRG; PAM sequence: TAG
catgaacattgttgtctaac

SEQ ID NO: 75680 - DNA, 20 bp, Artificial Sequence
  Description of Artificial Sequence: Synthetic oligonucleotide
  Target: LAMA2; (-) strand; PAM type: NRG; PAM sequence: AAG
ctatttcctattaatgttct

SEQ ID NO: 75681 - DNA, 20 bp, Artificial Sequence
  Description of Artificial Sequence: Synthetic oligonucleotide
  Target: LAMA2; (-) strand; PAM type: NRG; PAM sequence: AAG
gtggatttggcattagtcac

SEQ ID NO: 75682 - DNA, 20 bp, Artificial Sequence
  Description of Artificial Sequence: Synthetic oligonucleotide
  Target: LAMA2; (-) strand; PAM type: NRG; PAM sequence: TAG
agactcagtggatttggcat

SEQ ID NO: 75683 - DNA, 20 bp, Artificial Sequence
  Description of Artificial Sequence: Synthetic oligonucleotide
  Target: LAMA2; (-) strand; PAM type: NRG; PAM sequence: TGG
aactttagactcagtggatt

SEQ ID NO: 75684 - DNA, 20 bp, Artificial Sequence
  Description of Artificial Sequence: Synthetic oligonucleotide
  Target: LAMA2; (-) strand; PAM type: NRG; PAM sequence: TGG
gtaataaactttagactcag

SEQ ID NO: 75685 - DNA, 20 bp, Artificial Sequence
  Description of Artificial Sequence: Synthetic oligonucleotide
  Target: LAMA2; (-) strand; PAM type: NRG; PAM sequence: CAG
aatgtaataaactttagact

SEQ ID NO: 75686 - DNA, 20 bp, Artificial Sequence
  Description of Artificial Sequence: Synthetic oligonucleotide
  Target: LAMA2; (-) strand; PAM type: NRG; PAM sequence: TAG
agtggaaatgtaataaactt

SEQ ID NO: 75687 - DNA, 20 bp, Artificial Sequence
  Description of Artificial Sequence: Synthetic oligonucleotide
  Target: LAMA2; (-) strand; PAM type: NRG; PAM sequence: TGG
tcaaaaattctttagacaag

SEQ ID NO: 75688 - DNA, 20 bp, Artificial Sequence
  Description of Artificial Sequence: Synthetic oligonucleotide
  Target: LAMA2; (-) strand; PAM type: NRG; PAM sequence: AAG
gtctcaaaaattctttagac

SEQ ID NO: 75689 - DNA, 20 bp, Artificial Sequence
  Description of Artificial Sequence: Synthetic oligonucleotide
  Target: LAMA2; (-) strand; PAM type: NRG; PAM sequence: TAG
cacatgtctcaaaaattctt

SEQ ID NO: 75690 - DNA, 20 bp, Artificial Sequence
  Description of Artificial Sequence: Synthetic oligonucleotide
  Target: LAMA2; (-) strand; PAM type: NRG; PAM sequence: TGG
ctctaatgttctaaagattt

SEQ ID NO: 75691 - DNA, 20 bp, Artificial Sequence
  Description of Artificial Sequence: Synthetic oligonucleotide
  Target: LAMA2; (-) strand; PAM type: NRG; PAM sequence: AAG
ctttcagctctaatgttcta

SEQ ID NO: 75692 - DNA, 20 bp, Artificial Sequence
  Description of Artificial Sequence: Synthetic oligonucleotide
  Target: LAMA2; (-) strand; PAM type: NRG; PAM sequence: CAG
aatttacctaaggtatcttt

SEQ ID NO: 75693 - DNA, 20 bp, Artificial Sequence
  Description of Artificial Sequence: Synthetic oligonucleotide
  Target: LAMA2; (-) strand; PAM type: NRG; PAM sequence: AGG
attgatgagaaatttaccta

SEQ ID NO: 75694 - DNA, 20 bp, Artificial Sequence
  Description of Artificial Sequence: Synthetic oligonucleotide
  Target: LAMA2; (-) strand; PAM type: NRG; PAM sequence: AAG
gattgatgagaaatttacct

SEQ ID NO: 75695 - DNA, 20 bp, Artificial Sequence
  Description of Artificial Sequence: Synthetic oligonucleotide
  Target: LAMA2; (-) strand; PAM type: NRG; PAM sequence: GAG
atatcctttaatagattgat

SEQ ID NO: 75696 - DNA, 20 bp, Artificial Sequence
  Description of Artificial Sequence: Synthetic oligonucleotide
  Target: LAMA2; (-) strand; PAM type: NRG; PAM sequence: TAG
ggggcttgaatatcctttaa

SEQ ID NO: 75697 - DNA, 20 bp, Artificial Sequence
  Description of Artificial Sequence: Synthetic oligonucleotide
  Target: LAMA2; (-) strand; PAM type: NRG; PAM sequence: GGG
gatacagaggctgaaattgg

SEQ ID NO: 75698 - DNA, 20 bp, Artificial Sequence
  Description of Artificial Sequence: Synthetic oligonucleotide
  Target: LAMA2; (-) strand; PAM type: NRG; PAM sequence: GGG
ggatacagaggctgaaattg

SEQ ID NO: 75699 - DNA, 20 bp, Artificial Sequence
  Description of Artificial Sequence: Synthetic oligonucleotide
  Target: LAMA2; (-) strand; PAM type: NRG; PAM sequence: GGG
tggatacagaggctgaaatt

SEQ ID NO: 75700 - DNA, 20 bp, Artificial Sequence
  Description of Artificial Sequence: Synthetic oligonucleotide
  Target: LAMA2; (-) strand; PAM type: NRG; PAM sequence: TGG
ttggatacagaggctgaaat

SEQ ID NO: 75701 - DNA, 20 bp, Artificial Sequence
  Description of Artificial Sequence: Synthetic oligonucleotide
  Target: LAMA2; (-) strand; PAM type: NRG; PAM sequence: AGG
gtattgaagtttggatacag

SEQ ID NO: 75702 - DNA, 20 bp, Artificial Sequence
  Description of Artificial Sequence: Synthetic oligonucleotide
  Target: LAMA2; (-) strand; PAM type: NRG; PAM sequence: GAG
agtattgaagtttggataca

SEQ ID NO: 75703 - DNA, 20 bp, Artificial Sequence
  Description of Artificial Sequence: Synthetic oligonucleotide
  Target: LAMA2; (-) strand; PAM type: NRG; PAM sequence: CAG
gcagtattgaagtttggata

SEQ ID NO: 75704 - DNA, 20 bp, Artificial Sequence
  Description of Artificial Sequence: Synthetic oligonucleotide
  Target: LAMA2; (-) strand; PAM type: NRG; PAM sequence: TGG
catagggcagtattgaagtt

SEQ ID NO: 75705 - DNA, 20 bp, Artificial Sequence
  Description of Artificial Sequence: Synthetic oligonucleotide
  Target: LAMA2; (-) strand; PAM type: NRG; PAM sequence: AAG
atgaacatagggcagtattg

SEQ ID NO: 75706 - DNA, 20 bp, Artificial Sequence
  Description of Artificial Sequence: Synthetic oligonucleotide
  Target: LAMA2; (-) strand; PAM type: NRG; PAM sequence: CAG
gtgatgatatgaacataggg

SEQ ID NO: 75707 - DNA, 20 bp, Artificial Sequence
  Description of Artificial Sequence: Synthetic oligonucleotide
  Target: LAMA2; (-) strand; PAM type: NRG; PAM sequence: GGG
ccagtgatgatatgaacata

SEQ ID NO: 75708 - DNA, 20 bp, Artificial Sequence
  Description of Artificial Sequence: Synthetic oligonucleotide
  Target: LAMA2; (-) strand; PAM type: NRG; PAM sequence: AGG
tccagtgatgatatgaacat

SEQ ID NO: 75709 - DNA, 20 bp, Artificial Sequence
  Description of Artificial Sequence: Synthetic oligonucleotide
  Target: LAMA2; (-) strand; PAM type: NRG; PAM sequence: TAG
ctccagtgatgatatgaaca

SEQ ID NO: 75710 - DNA, 20 bp, Artificial Sequence
  Description of Artificial Sequence: Synthetic oligonucleotide
  Target: LAMA2; (-) strand; PAM type: NRG; PAM sequence: CAG
aaggaaaggccagacctctc

SEQ ID NO: 75711 - DNA, 20 bp, Artificial Sequence
  Description of Artificial Sequence: Synthetic oligonucleotide
  Target: LAMA2; (-) strand; PAM type: NRG; PAM sequence: CAG
aagaggccataaggaaaggc

SEQ ID NO: 75712 - DNA, 20 bp, Artificial Sequence
  Description of Artificial Sequence: Synthetic oligonucleotide
  Target: LAMA2; (-) strand; PAM type: NRG; PAM sequence: AGG
attaaagaggccataaggaa

SEQ ID NO: 75713 - DNA, 20 bp, Artificial Sequence
  Description of Artificial Sequence: Synthetic oligonucleotide
  Target: LAMA2; (-) strand; PAM type: NRG; PAM sequence: AAG
gattaaagaggccataagga

SEQ ID NO: 75714 - DNA, 20 bp, Artificial Sequence
  Description of Artificial Sequence: Synthetic oligonucleotide
  Target: LAMA2; (-) strand; PAM type: NRG; PAM sequence: AGG
ttaagattaaagaggccata

SEQ ID NO: 75715 - DNA, 20 bp, Artificial Sequence
  Description of Artificial Sequence: Synthetic oligonucleotide
  Target: LAMA2; (-) strand; PAM type: NRG; PAM sequence: AAG
attaagattaaagaggccat

SEQ ID NO: 75716 - DNA, 20 bp, Artificial Sequence
  Description of Artificial Sequence: Synthetic oligonucleotide
  Target: LAMA2; (-) strand; PAM type: NRG; PAM sequence: AGG
tgatgcaattaagattaaag

SEQ ID NO: 75717 - DNA, 20 bp, Artificial Sequence
  Description of Artificial Sequence: Synthetic oligonucleotide
  Target: LAMA2; (-) strand; PAM type: NRG; PAM sequence: GAG
atgatgcaattaagattaaa

SEQ ID NO: 75718 - DNA, 20 bp, Artificial Sequence
  Description of Artificial Sequence: Synthetic oligonucleotide
  Target: LAMA2; (-) strand; PAM type: NRG; PAM sequence: AAG
agatgatgcaattaagatta

SEQ ID NO: 75719 - DNA, 20 bp, Artificial Sequence
  Description of Artificial Sequence: Synthetic oligonucleotide
  Target: LAMA2; (-) strand; PAM type: NRG; PAM sequence: AAG
acatcagagatgatgcaatt

SEQ ID NO: 75720 - DNA, 20 bp, Artificial Sequence
  Description of Artificial Sequence: Synthetic oligonucleotide
  Target: LAMA2; (-) strand; PAM type: NRG; PAM sequence: GAG
caaagccaaataaaacatca

SEQ ID NO: 75721 - DNA, 20 bp, Artificial Sequence
  Description of Artificial Sequence: Synthetic oligonucleotide
  Target: LAMA2; (-) strand; PAM type: NRG; PAM sequence: CAG
aacaaagccaaataaaacat

SEQ ID NO: 75722 - DNA, 20 bp, Artificial Sequence
  Description of Artificial Sequence: Synthetic oligonucleotide
  Target: LAMA2; (-) strand; PAM type: NRG; PAM sequence: AAG
agtaactggagtaacaaaca

SEQ ID NO: 75723 - DNA, 20 bp, Artificial Sequence
  Description of Artificial Sequence: Synthetic oligonucleotide
  Target: LAMA2; (-) strand; PAM type: NRG; PAM sequence: GAG
gaaacaggtgggagtaactg

SEQ ID NO: 75724 - DNA, 20 bp, Artificial Sequence
  Description of Artificial Sequence: Synthetic oligonucleotide
  Target: LAMA2; (-) strand; PAM type: NRG; PAM sequence: TGG
gggaaacaggtgggagtaac

SEQ ID NO: 75725 - DNA, 20 bp, Artificial Sequence
  Description of Artificial Sequence: Synthetic oligonucleotide
  Target: LAMA2; (-) strand; PAM type: NRG; PAM sequence: GAG
ccatgaagggaaacaggtgg

SEQ ID NO: 75726 - DNA, 20 bp, Artificial Sequence
  Description of Artificial Sequence: Synthetic oligonucleotide
  Target: LAMA2; (-) strand; PAM type: NRG; PAM sequence: GGG
aaccatgaagggaaacaggt

SEQ ID NO: 75727 - DNA, 20 bp, Artificial Sequence
  Description of Artificial Sequence: Synthetic oligonucleotide
  Target: LAMA2; (-) strand; PAM type: NRG; PAM sequence: TGG
aaaccatgaagggaaacagg

SEQ ID NO: 75728 - DNA, 20 bp, Artificial Sequence
  Description of Artificial Sequence: Synthetic oligonucleotide
  Target: LAMA2; (-) strand; PAM type: NRG; PAM sequence: AGG
accaaaccatgaagggaaac

SEQ ID NO: 75729 - DNA, 20 bp, Artificial Sequence
  Description of Artificial Sequence: Synthetic oligonucleotide
  Target: LAMA2; (-) strand; PAM type: NRG; PAM sequence: CAG
aaccaaaccatgaagggaaa

SEQ ID NO: 75730 - DNA, 20 bp, Artificial Sequence
  Description of Artificial Sequence: Synthetic oligonucleotide
  Target: LAMA2; (-) strand; PAM type: NRG; PAM sequence: GGG
gggccaaaccaaaccatgaa

SEQ ID NO: 75731 - DNA, 20 bp, Artificial Sequence
  Description of Artificial Sequence: Synthetic oligonucleotide
  Target: LAMA2; (-) strand; PAM type: NRG; PAM sequence: AGG
ggggccaaaccaaaccatga

SEQ ID NO: 75732 - DNA, 20 bp, Artificial Sequence
  Description of Artificial Sequence: Synthetic oligonucleotide
  Target: LAMA2; (-) strand; PAM type: NRG; PAM sequence: AAG
aggggccaaaccaaaccatg

SEQ ID NO: 75733 - DNA, 20 bp, Artificial Sequence
  Description of Artificial Sequence: Synthetic oligonucleotide
  Target: LAMA2; (-) strand; PAM type: NRG; PAM sequence: GGG
tggagtggagggcagagaag

SEQ ID NO: 75734 - DNA, 20 bp, Artificial Sequence
  Description of Artificial Sequence: Synthetic oligonucleotide
  Target: LAMA2; (-) strand; PAM type: NRG; PAM sequence: GGG
gtggagtggagggcagagaa

SEQ ID NO: 75735 - DNA, 20 bp, Artificial Sequence
  Description of Artificial Sequence: Synthetic oligonucleotide
  Target: LAMA2; (-) strand; PAM type: NRG; PAM sequence: AGG
tgtggagtggagggcagaga

SEQ ID NO: 75736 - DNA, 20 bp, Artificial Sequence
  Description of Artificial Sequence: Synthetic oligonucleotide
  Target: LAMA2; (-) strand; PAM type: NRG; PAM sequence: AAG
atgtggagtggagggcagag

SEQ ID NO: 75737 - DNA, 20 bp, Artificial Sequence
  Description of Artificial Sequence: Synthetic oligonucleotide
  Target: LAMA2; (-) strand; PAM type: NRG; PAM sequence: GAG
tcaatgtggagtggagggca

SEQ ID NO: 75738 - DNA, 20 bp, Artificial Sequence
  Description of Artificial Sequence: Synthetic oligonucleotide
  Target: LAMA2; (-) strand; PAM type: NRG; PAM sequence: CAG
aatcaatgtggagtggaggg

SEQ ID NO: 75739 - DNA, 20 bp, Artificial Sequence
  Description of Artificial Sequence: Synthetic oligonucleotide
  Target: LAMA2; (-) strand; PAM type: NRG; PAM sequence: GGG
tgaaatcaatgtggagtgga

SEQ ID NO: 75740 - DNA, 20 bp, Artificial Sequence
  Description of Artificial Sequence: Synthetic oligonucleotide
  Target: LAMA2; (-) strand; PAM type: NRG; PAM sequence: AGG
ttgaaatcaatgtggagtgg

SEQ ID NO: 75741 - DNA, 20 bp, Artificial Sequence
  Description of Artificial Sequence: Synthetic oligonucleotide
  Target: LAMA2; (-) strand; PAM type: NRG; PAM sequence: GAG
cttgaaatcaatgtggagtg

SEQ ID NO: 75742 - DNA, 20 bp, Artificial Sequence
  Description of Artificial Sequence: Synthetic oligonucleotide
  Target: LAMA2; (-) strand; PAM type: NRG; PAM sequence: TGG
ctcttgaaatcaatgtggag

SEQ ID NO: 75743 - DNA, 20 bp, Artificial Sequence
  Description of Artificial Sequence: Synthetic oligonucleotide
  Target: LAMA2; (-) strand; PAM type: NRG; PAM sequence: GAG
gatctcttgaaatcaatgtg

SEQ ID NO: 75744 - DNA, 20 bp, Artificial Sequence
  Description of Artificial Sequence: Synthetic oligonucleotide
  Target: LAMA2; (-) strand; PAM type: NRG; PAM sequence: TGG
ttgatctcttgaaatcaatg

SEQ ID NO: 75745 - DNA, 20 bp, Artificial Sequence
  Description of Artificial Sequence: Synthetic oligonucleotide
  Target: LAMA2; (-) strand; PAM type: NRG; PAM sequence: CAG
ttcttggtagtagttgaacc

SEQ ID NO: 75746 - DNA, 20 bp, Artificial Sequence
  Description of Artificial Sequence: Synthetic oligonucleotide
  Target: LAMA2; (-) strand; PAM type: NRG; PAM sequence: TAG
gttaagctctttcttggtag

SEQ ID NO: 75747 - DNA, 20 bp, Artificial Sequence
  Description of Artificial Sequence: Synthetic oligonucleotide
  Target: LAMA2; (-) strand; PAM type: NRG; PAM sequence: TAG
agggttaagctctttcttgg

SEQ ID NO: 75748 - DNA, 20 bp, Artificial Sequence
  Description of Artificial Sequence: Synthetic oligonucleotide
  Target: LAMA2; (-) strand; PAM type: NRG; PAM sequence: TGG
ttcagggttaagctctttct

SEQ ID NO: 75749 - DNA, 20 bp, Artificial Sequence
  Description of Artificial Sequence: Synthetic oligonucleotide
  Target: LAMA2; (-) strand; PAM type: NRG; PAM sequence: AAG
ggatgctaggtttcagggtt

SEQ ID NO: 75750 - DNA, 20 bp, Artificial Sequence
  Description of Artificial Sequence: Synthetic oligonucleotide
  Target: LAMA2; (-) strand; PAM type: NRG; PAM sequence: GGG
gcctaggatgctaggtttca

SEQ ID NO: 75751 - DNA, 20 bp, Artificial Sequence
  Description of Artificial Sequence: Synthetic oligonucleotide
  Target: LAMA2; (-) strand; PAM type: NRG; PAM sequence: AGG
ggcctaggatgctaggtttc

SEQ ID NO: 75752 - DNA, 20 bp, Artificial Sequence
  Description of Artificial Sequence: Synthetic oligonucleotide
  Target: LAMA2; (-) strand; PAM type: NRG; PAM sequence: CAG
aggcctaggatgctaggttt

SEQ ID NO: 75753 - DNA, 20 bp, Artificial Sequence
  Description of Artificial Sequence: Synthetic oligonucleotide
  Target: LAMA2; (-) strand; PAM type: NRG; PAM sequence: AGG
gggtgcaggcctaggatgct

SEQ ID NO: 75754 - DNA, 20 bp, Artificial Sequence
  Description of Artificial Sequence: Synthetic oligonucleotide
  Target: LAMA2; (-) strand; PAM type: NRG; PAM sequence: TAG
tgggtgcaggcctaggatgc

SEQ ID NO: 75755 - DNA, 20 bp, Artificial Sequence
  Description of Artificial Sequence: Synthetic oligonucleotide
  Target: LAMA2; (-) strand; PAM type: NRG; PAM sequence: AGG
ctccctttgggtgcaggcct

SEQ ID NO: 75756 - DNA, 20 bp, Artificial Sequence
  Description of Artificial Sequence: Synthetic oligonucleotide
  Target: LAMA2; (-) strand; PAM type: NRG; PAM sequence: TAG
tctccctttgggtgcaggcc

SEQ ID NO: 75757 - DNA, 20 bp, Artificial Sequence
  Description of Artificial Sequence: Synthetic oligonucleotide
  Target: LAMA2; (-) strand; PAM type: NRG; PAM sequence: AGG
tctcttctccctttgggtgc

SEQ ID NO: 75758 - DNA, 20 bp, Artificial Sequence
  Description of Artificial Sequence: Synthetic oligonucleotide
  Target: LAMA2; (-) strand; PAM type: NRG; PAM sequence: CAG
ttctcttctccctttgggtg

SEQ ID NO: 75759 - DNA, 20 bp, Artificial Sequence
  Description of Artificial Sequence: Synthetic oligonucleotide
  Target: LAMA2; (-) strand; PAM type: NRG; PAM sequence: GGG
taagcttctcttctcccttt

SEQ ID NO: 75760 - DNA, 20 bp, Artificial Sequence
  Description of Artificial Sequence: Synthetic oligonucleotide
  Target: LAMA2; (-) strand; PAM type: NRG; PAM sequence: TGG
ataagcttctcttctccctt

SEQ ID NO: 75761 - DNA, 20 bp, Artificial Sequence
  Description of Artificial Sequence: Synthetic oligonucleotide
  Target: LAMA2; (-) strand; PAM type: NRG; PAM sequence: AAG
attatctcatagctcagaat

SEQ ID NO: 75762 - DNA, 20 bp, Artificial Sequence
  Description of Artificial Sequence: Synthetic oligonucleotide
  Target: LAMA2; (-) strand; PAM type: NRG; PAM sequence: CAG
cttacgattatctcatagct

SEQ ID NO: 75763 - DNA, 20 bp, Artificial Sequence
  Description of Artificial Sequence: Synthetic oligonucleotide
  Target: LAMA2; (-) strand; PAM type: NRG; PAM sequence: TAG
gataccttacgattatctca

SEQ ID NO: 75764 - DNA, 20 bp, Artificial Sequence
  Description of Artificial Sequence: Synthetic oligonucleotide
  Target: LAMA2; (-) strand; PAM type: NRG; PAM sequence: GAG
tccctcctttgccaggccct

SEQ ID NO: 75765 - DNA, 20 bp, Artificial Sequence
  Description of Artificial Sequence: Synthetic oligonucleotide
  Target: LAMA2; (-) strand; PAM type: NRG; PAM sequence: AGG
tccattatccctcctttgcc

SEQ ID NO: 75766 - DNA, 20 bp, Artificial Sequence
  Description of Artificial Sequence: Synthetic oligonucleotide
  Target: LAMA2; (-) strand; PAM type: NRG; PAM sequence: CAG
ctccattatccctcctttgc

SEQ ID NO: 75767 - DNA, 20 bp, Artificial Sequence
  Description of Artificial Sequence: Synthetic oligonucleotide
  Target: LAMA2; (-) strand; PAM type: NRG; PAM sequence: CAG
agcctggataacgacatacc

SEQ ID NO: 75768 - DNA, 20 bp, Artificial Sequence
  Description of Artificial Sequence: Synthetic oligonucleotide
  Target: LAMA2; (-) strand; PAM type: NRG; PAM sequence: TGG
gcctccttctatttgcagcc

SEQ ID NO: 75769 - DNA, 20 bp, Artificial Sequence
  Description of Artificial Sequence: Synthetic oligonucleotide
  Target: LAMA2; (-) strand; PAM type: NRG; PAM sequence: CAG
tcaaagcctccttctatttg

SEQ ID NO: 75770 - DNA, 20 bp, Artificial Sequence
  Description of Artificial Sequence: Synthetic oligonucleotide
  Target: LAMA2; (-) strand; PAM type: NRG; PAM sequence: AAG
tgttttaaggcttttgctca

SEQ ID NO: 75771 - DNA, 20 bp, Artificial Sequence
  Description of Artificial Sequence: Synthetic oligonucleotide
  Target: LAMA2; (-) strand; PAM type: NRG; PAM sequence: AGG
tctaaaataaaactgtttta

SEQ ID NO: 75772 - DNA, 20 bp, Artificial Sequence
  Description of Artificial Sequence: Synthetic oligonucleotide
  Target: LAMA2; (-) strand; PAM type: NRG; PAM sequence: AAG
ttctaaaataaaactgtttt

SEQ ID NO: 75773 - DNA, 20 bp, Artificial Sequence
  Description of Artificial Sequence: Synthetic oligonucleotide
  Target: LAMA2; (-) strand; PAM type: NRG; PAM sequence: TAG
ccttctcttggcattgatga

SEQ ID NO: 75774 - DNA, 20 bp, Artificial Sequence
  Description of Artificial Sequence: Synthetic oligonucleotide
  Target: LAMA2; (-) strand; PAM type: NRG; PAM sequence: TGG
gtccctgctgagccttctct

SEQ ID NO: 75775 - DNA, 20 bp, Artificial Sequence
  Description of Artificial Sequence: Synthetic oligonucleotide
  Target: LAMA2; (-) strand; PAM type: NRG; PAM sequence: GAG
gacaaagtagggtccctgct

SEQ ID NO: 75776 - DNA, 20 bp, Artificial Sequence
  Description of Artificial Sequence: Synthetic oligonucleotide
  Target: LAMA2; (-) strand; PAM type: NRG; PAM sequence: GGG
gctcaaagcaggacaaagta

SEQ ID NO: 75777 - DNA, 20 bp, Artificial Sequence
  Description of Artificial Sequence: Synthetic oligonucleotide
  Target: LAMA2; (-) strand; PAM type: NRG; PAM sequence: AGG
tgctcaaagcaggacaaagt

SEQ ID NO: 75778 - DNA, 20 bp, Artificial Sequence
  Description of Artificial Sequence: Synthetic oligonucleotide
  Target: LAMA2; (-) strand; PAM type: NRG; PAM sequence: TAG
ttgctcaaagcaggacaaag

SEQ ID NO: 75779 - DNA, 20 bp, Artificial Sequence
  Description of Artificial Sequence: Synthetic oligonucleotide
  Target: LAMA2; (-) strand; PAM type: NRG; PAM sequence: AAG
catttgctcaaagcaggaca

SEQ ID NO: 75780 - DNA, 20 bp, Artificial Sequence
  Description of Artificial Sequence: Synthetic oligonucleotide
  Target: LAMA2; (-) strand; PAM type: NRG; PAM sequence: AGG
cagtatcatttgctcaaagc

SEQ ID NO: 75781 - DNA, 20 bp, Artificial Sequence
  Description of Artificial Sequence: Synthetic oligonucleotide
  Target: LAMA2; (-) strand; PAM type: NRG; PAM sequence: CAG
tcagtatcatttgctcaaag

SEQ ID NO: 75782 - DNA, 20 bp, Artificial Sequence
  Description of Artificial Sequence: Synthetic oligonucleotide
  Target: LAMA2; (-) strand; PAM type: NRG; PAM sequence: AAG
agctcagtatcatttgctca

SEQ ID NO: 75783 - DNA, 20 bp, Artificial Sequence
  Description of Artificial Sequence: Synthetic oligonucleotide
  Target: LAMA2; (-) strand; PAM type: NRG; PAM sequence: CAG
gcaactcctattagggagct

SEQ ID NO: 75784 - DNA, 20 bp, Artificial Sequence
  Description of Artificial Sequence: Synthetic oligonucleotide
  Target: LAMA2; (-) strand; PAM type: NRG; PAM sequence: GAG
accctgcaactcctattagg

SEQ ID NO: 75785 - DNA, 20 bp, Artificial Sequence
  Description of Artificial Sequence: Synthetic oligonucleotide
  Target: LAMA2; (-) strand; PAM type: NRG; PAM sequence: GGG
ataccctgcaactcctatta

SEQ ID NO: 75786 - DNA, 20 bp, Artificial Sequence
  Description of Artificial Sequence: Synthetic oligonucleotide
  Target: LAMA2; (-) strand; PAM type: NRG; PAM sequence: AGG
cataccctgcaactcctatt

SEQ ID NO: 75787 - DNA, 20 bp, Artificial Sequence
  Description of Artificial Sequence: Synthetic oligonucleotide
  Target: LAMA2; (-) strand; PAM type: NRG; PAM sequence: TAG
tcataccctgcaactcctat

SEQ ID NO: 75788 - DNA, 20 bp, Artificial Sequence
  Description of Artificial Sequence: Synthetic oligonucleotide
  Target: LAMA2; (-) strand; PAM type: NRG; PAM sequence: CAG
caaagtaatggaggcccctg

SEQ ID NO: 75789 - DNA, 20 bp, Artificial Sequence
  Description of Artificial Sequence: Synthetic oligonucleotide
  Target: LAMA2; (-) strand; PAM type: NRG; PAM sequence: AGG
ggttggcctcaaagtaatgg

SEQ ID NO: 75790 - DNA, 20 bp, Artificial Sequence
  Description of Artificial Sequence: Synthetic oligonucleotide
  Target: LAMA2; (-) strand; PAM type: NRG; PAM sequence: GAG
tggttggcctcaaagtaatg

SEQ ID NO: 75791 - DNA, 20 bp, Artificial Sequence
  Description of Artificial Sequence: Synthetic oligonucleotide
  Target: LAMA2; (-) strand; PAM type: NRG; PAM sequence: TGG
tgtggttggcctcaaagtaa

SEQ ID NO: 75792 - DNA, 20 bp, Artificial Sequence
  Description of Artificial Sequence: Synthetic oligonucleotide
  Target: LAMA2; (-) strand; PAM type: NRG; PAM sequence: AAG
ctaccctgtggttggcctca

SEQ ID NO: 75793 - DNA, 20 bp, Artificial Sequence
  Description of Artificial Sequence: Synthetic oligonucleotide
  Target: LAMA2; (-) strand; PAM type: NRG; PAM sequence: TGG
caagagctctaccctgtggt

SEQ ID NO: 75794 - DNA, 20 bp, Artificial Sequence
  Description of Artificial Sequence: Synthetic oligonucleotide
  Target: LAMA2; (-) strand; PAM type: NRG; PAM sequence: TGG
cccacaagagctctaccctg

SEQ ID NO: 75795 - DNA, 20 bp, Artificial Sequence
  Description of Artificial Sequence: Synthetic oligonucleotide
  Target: LAMA2; (-) strand; PAM type: NRG; PAM sequence: GAG
ttatgtagctgttcccacaa

SEQ ID NO: 75796 - DNA, 20 bp, Artificial Sequence
  Description of Artificial Sequence: Synthetic oligonucleotide
  Target: LAMA2; (-) strand; PAM type: NRG; PAM sequence: AAG
tgttatgtagctgttcccac

SEQ ID NO: 75797 - DNA, 20 bp, Artificial Sequence
  Description of Artificial Sequence: Synthetic oligonucleotide
  Target: LAMA2; (-) strand; PAM type: NRG; PAM sequence: TAG
tgctggacatgcatgttatg

SEQ ID NO: 75798 - DNA, 20 bp, Artificial Sequence
  Description of Artificial Sequence: Synthetic oligonucleotide
  Target: LAMA2; (-) strand; PAM type: NRG; PAM sequence: TGG
ttggttccctggggcactgc

SEQ ID NO: 75799 - DNA, 20 bp, Artificial Sequence
  Description of Artificial Sequence: Synthetic oligonucleotide
  Target: LAMA2; (-) strand; PAM type: NRG; PAM sequence: GGG
ctcgatggcttggttccctg

SEQ ID NO: 75800 - DNA, 20 bp, Artificial Sequence
  Description of Artificial Sequence: Synthetic oligonucleotide
  Target: LAMA2; (-) strand; PAM type: NRG; PAM sequence: GGG
tctcgatggcttggttccct

SEQ ID NO: 75801 - DNA, 20 bp, Artificial Sequence
  Description of Artificial Sequence: Synthetic oligonucleotide
  Target: LAMA2; (-) strand; PAM type: NRG; PAM sequence: TGG
ctctcgatggcttggttccc

SEQ ID NO: 75802 - DNA, 20 bp, Artificial Sequence
  Description of Artificial Sequence: Synthetic oligonucleotide
  Target: LAMA2; (-) strand; PAM type: NRG; PAM sequence: TGG
gatagtagctctcgatggct

SEQ ID NO: 75803 - DNA, 20 bp, Artificial Sequence
  Description of Artificial Sequence: Synthetic oligonucleotide
  Target: LAMA2; (-) strand; PAM type: NRG; PAM sequence: TGG
gctgtgatagtagctctcga

SEQ ID NO: 75804 - DNA, 20 bp, Artificial Sequence
  Description of Artificial Sequence: Synthetic oligonucleotide
  Target: LAMA2; (-) strand; PAM type: NRG; PAM sequence: TAG
cagcacttgggctgtgatag

SEQ ID NO: 75805 - DNA, 20 bp, Artificial Sequence
  Description of Artificial Sequence: Synthetic oligonucleotide
  Target: LAMA2; (-) strand; PAM type: NRG; PAM sequence: TAG
aggcagcacttgggctgtga

SEQ ID NO: 75806 - DNA, 20 bp, Artificial Sequence
  Description of Artificial Sequence: Synthetic oligonucleotide
  Target: LAMA2; (-) strand; PAM type: NRG; PAM sequence: GGG
tttctgcagaggcagcactt

SEQ ID NO: 75807 - DNA, 20 bp, Artificial Sequence
  Description of Artificial Sequence: Synthetic oligonucleotide
  Target: LAMA2; (-) strand; PAM type: NRG; PAM sequence: TGG
ctttctgcagaggcagcact

SEQ ID NO: 75808 - DNA, 20 bp, Artificial Sequence
  Description of Artificial Sequence: Synthetic oligonucleotide
  Target: LAMA2; (-) strand; PAM type: NRG; PAM sequence: CAG
gctactgctttctgcagagg

SEQ ID NO: 75809 - DNA, 20 bp, Artificial Sequence
  Description of Artificial Sequence: Synthetic oligonucleotide
  Target: LAMA2; (-) strand; PAM type: NRG; PAM sequence: AGG
tgggctactgctttctgcag

SEQ ID NO: 75810 - DNA, 20 bp, Artificial Sequence
  Description of Artificial Sequence: Synthetic oligonucleotide
  Target: LAMA2; (-) strand; PAM type: NRG; PAM sequence: GAG
ctgggctactgctttctgca

SEQ ID NO: 75811 - DNA, 20 bp, Artificial Sequence
  Description of Artificial Sequence: Synthetic oligonucleotide
  Target: LAMA2; (-) strand; PAM type: NRG; PAM sequence: CAG
atctgggctactgctttctg

SEQ ID NO: 75812 - DNA, 20 bp, Artificial Sequence
  Description of Artificial Sequence: Synthetic oligonucleotide
  Target: LAMA2; (-) strand; PAM type: NRG; PAM sequence: GGG
agcagttctcaatagcatct

SEQ ID NO: 75813 - DNA, 20 bp, Artificial Sequence
  Description of Artificial Sequence: Synthetic oligonucleotide
  Target: LAMA2; (-) strand; PAM type: NRG; PAM sequence: TGG
aagcagttctcaatagcatc

SEQ ID NO: 75814 - DNA, 20 bp, Artificial Sequence
  Description of Artificial Sequence: Synthetic oligonucleotide
  Target: LAMA2; (-) strand; PAM type: NRG; PAM sequence: TAG
ttcttgtaagcagttctcaa

SEQ ID NO: 75815 - DNA, 20 bp, Artificial Sequence
  Description of Artificial Sequence: Synthetic oligonucleotide
  Target: LAMA2; (-) strand; PAM type: NRG; PAM sequence: CAG
caagtggcagttcttgtaag

SEQ ID NO: 75816 - DNA, 20 bp, Artificial Sequence
  Description of Artificial Sequence: Synthetic oligonucleotide
  Target: LAMA2; (-) strand; PAM type: NRG; PAM sequence: AAG
ttccaagtggcagttcttgt

SEQ ID NO: 75817 - DNA, 20 bp, Artificial Sequence
  Description of Artificial Sequence: Synthetic oligonucleotide
  Target: LAMA2; (-) strand; PAM type: NRG; PAM sequence: CAG
ctcagggtgcttccaagtgg

SEQ ID NO: 75818 - DNA, 20 bp, Artificial Sequence
  Description of Artificial Sequence: Synthetic oligonucleotide
  Target: LAMA2; (-) strand; PAM type: NRG; PAM sequence: TGG
gttctcagggtgcttccaag

SEQ ID NO: 75819 - DNA, 20 bp, Artificial Sequence
  Description of Artificial Sequence: Synthetic oligonucleotide
  Target: LAMA2; (-) strand; PAM type: NRG; PAM sequence: AAG
caagttctcagggtgcttcc

SEQ ID NO: 75820 - DNA, 20 bp, Artificial Sequence
  Description of Artificial Sequence: Synthetic oligonucleotide
  Target: LAMA2; (-) strand; PAM type: NRG; PAM sequence: GGG
caagtaaagccaagttctca

SEQ ID NO: 75821 - DNA, 20 bp, Artificial Sequence
  Description of Artificial Sequence: Synthetic oligonucleotide
  Target: LAMA2; (-) strand; PAM type: NRG; PAM sequence: AGG
ccaagtaaagccaagttctc

SEQ ID NO: 75822 - DNA, 20 bp, Artificial Sequence
  Description of Artificial Sequence: Synthetic oligonucleotide
  Target: LAMA2; (-) strand; PAM type: NRG; PAM sequence: CAG
tccaagtaaagccaagttct

SEQ ID NO: 75823 - DNA, 20 bp, Artificial Sequence
  Description of Artificial Sequence: Synthetic oligonucleotide
  Target: LAMA2; (-) strand; PAM type: NRG; PAM sequence: AAG
ggtgatttccaagtaaagcc

SEQ ID NO: 75824 - DNA, 20 bp, Artificial Sequence
  Description of Artificial Sequence: Synthetic oligonucleotide
  Target: LAMA2; (-) strand; PAM type: NRG; PAM sequence: AAG
tcctaggtgatttccaagta

SEQ ID NO: 75825 - DNA, 20 bp, Artificial Sequence
  Description of Artificial Sequence: Synthetic oligonucleotide
  Target: LAMA2; (-) strand; PAM type: NRG; PAM sequence: AAG
aatgctcctaggtgatttcc

SEQ ID NO: 75826 - DNA, 20 bp, Artificial Sequence
  Description of Artificial Sequence: Synthetic oligonucleotide
  Target: LAMA2; (-) strand; PAM type: NRG; PAM sequence: AGG
gctatttttcaaatgctcct

SEQ ID NO: 75827 - DNA, 20 bp, Artificial Sequence
  Description of Artificial Sequence: Synthetic oligonucleotide
  Target: LAMA2; (-) strand; PAM type: NRG; PAM sequence: TAG
agctatttttcaaatgctcc

SEQ ID NO: 75828 - DNA, 20 bp, Artificial Sequence
  Description of Artificial Sequence: Synthetic oligonucleotide
  Target: LAMA2; (-) strand; PAM type: NRG; PAM sequence: TAG
aaaagttctggtctcaggag

SEQ ID NO: 75829 - DNA, 20 bp, Artificial Sequence
  Description of Artificial Sequence: Synthetic oligonucleotide
  Target: LAMA2; (-) strand; PAM type: NRG; PAM sequence: GAG
attaaaagttctggtctcag

SEQ ID NO: 75830 - DNA, 20 bp, Artificial Sequence
  Description of Artificial Sequence: Synthetic oligonucleotide
  Target: LAMA2; (-) strand; PAM type: NRG; PAM sequence: AGG
gaattaaaagttctggtctc

SEQ ID NO: 75831 - DNA, 20 bp, Artificial Sequence
  Description of Artificial Sequence: Synthetic oligonucleotide
  Target: LAMA2; (-) strand; PAM type: NRG; PAM sequence: CAG
tgaattaaaagttctggtct

SEQ ID NO: 75832 - DNA, 20 bp, Artificial Sequence
  Description of Artificial Sequence: Synthetic oligonucleotide
  Target: LAMA2; (-) strand; PAM type: NRG; PAM sequence: TGG
atataatgaattaaaagttc

SEQ ID NO: 75833 - DNA, 20 bp, Artificial Sequence
  Description of Artificial Sequence: Synthetic oligonucleotide
  Target: LAMA2; (-) strand; PAM type: NRG; PAM sequence: AAG
tgacaaatataatgaattaa

SEQ ID NO: 75834 - DNA, 20 bp, Artificial Sequence
  Description of Artificial Sequence: Synthetic oligonucleotide
  Target: LAMA2; (-) strand; PAM type: NRG; PAM sequence: GAG
aaatatacatagggcttaat

SEQ ID NO: 75835 - DNA, 20 bp, Artificial Sequence
  Description of Artificial Sequence: Synthetic oligonucleotide
  Target: LAMA2; (-) strand; PAM type: NRG; PAM sequence: GGG
acttgtttaaaatatacata

SEQ ID NO: 75836 - DNA, 20 bp, Artificial Sequence
  Description of Artificial Sequence: Synthetic oligonucleotide
  Target: LAMA2; (-) strand; PAM type: NRG; PAM sequence: AGG
tacttgtttaaaatatacat

SEQ ID NO: 75837 - DNA, 20 bp, Artificial Sequence
  Description of Artificial Sequence: Synthetic oligonucleotide
  Target: LAMA2; (-) strand; PAM type: NRG; PAM sequence: TAG
gtacttgtttaaaatataca

SEQ ID NO: 75838 - DNA, 20 bp, Artificial Sequence
  Description of Artificial Sequence: Synthetic oligonucleotide
  Target: LAMA2; (-) strand; PAM type: NRG; PAM sequence: GAG
acagacataagaatcaccaa

SEQ ID NO: 75839 - DNA, 20 bp, Artificial Sequence
  Description of Artificial Sequence: Synthetic oligonucleotide
  Target: LAMA2; (-) strand; PAM type: NRG; PAM sequence: AAG
atacagacataagaatcacc

SEQ ID NO: 75840 - DNA, 20 bp, Artificial Sequence
  Description of Artificial Sequence: Synthetic oligonucleotide
  Target: LAMA2; (-) strand; PAM type: NRG; PAM sequence: AAG
taagccaggaatacagacat

SEQ ID NO: 75841 - DNA, 20 bp, Artificial Sequence
  Description of Artificial Sequence: Synthetic oligonucleotide
  Target: LAMA2; (-) strand; PAM type: NRG; PAM sequence: CAG
tgaacattaagccaggaata

SEQ ID NO: 75842 - DNA, 20 bp, Artificial Sequence
  Description of Artificial Sequence: Synthetic oligonucleotide
  Target: LAMA2; (-) strand; PAM type: NRG; PAM sequence: AGG
aaatagctgaacattaagcc

SEQ ID NO: 75843 - DNA, 20 bp, Artificial Sequence
  Description of Artificial Sequence: Synthetic oligonucleotide
  Target: LAMA2; (-) strand; PAM type: NRG; PAM sequence: CAG
gaaatagctgaacattaagc

SEQ ID NO: 75844 - DNA, 20 bp, Artificial Sequence
  Description of Artificial Sequence: Synthetic oligonucleotide
  Target: LAMA2; (-) strand; PAM type: NRG; PAM sequence: AAG
gctggaaatagctgaacatt

SEQ ID NO: 75845 - DNA, 20 bp, Artificial Sequence
  Description of Artificial Sequence: Synthetic oligonucleotide
  Target: LAMA2; (-) strand; PAM type: NRG; PAM sequence: TAG
agggtttaaaaggctggaaa

SEQ ID NO: 75846 - DNA, 20 bp, Artificial Sequence
  Description of Artificial Sequence: Synthetic oligonucleotide
  Target: LAMA2; (-) strand; PAM type: NRG; PAM sequence: TGG
tcctacagggtttaaaaggc

SEQ ID NO: 75847 - DNA, 20 bp, Artificial Sequence
  Description of Artificial Sequence: Synthetic oligonucleotide
  Target: LAMA2; (-) strand; PAM type: NRG; PAM sequence: AGG
gttctcctacagggtttaaa

SEQ ID NO: 75848 - DNA, 20 bp, Artificial Sequence
  Description of Artificial Sequence: Synthetic oligonucleotide
  Target: LAMA2; (-) strand; PAM type: NRG; PAM sequence: AAG
tgttctcctacagggtttaa

SEQ ID NO: 75849 - DNA, 20 bp, Artificial Sequence
  Description of Artificial Sequence: Synthetic oligonucleotide
  Target: LAMA2; (-) strand; PAM type: NRG; PAM sequence: GGG
tggtgccctgttctcctaca

SEQ ID NO: 75850 - DNA, 20 bp, Artificial Sequence
  Description of Artificial Sequence: Synthetic oligonucleotide
  Target: LAMA2; (-) strand; PAM type: NRG; PAM sequence: AGG
ctggtgccctgttctcctac

SEQ ID NO: 75851 - DNA, 20 bp, Artificial Sequence
  Description of Artificial Sequence: Synthetic oligonucleotide
  Target: LAMA2; (-) strand; PAM type: NRG; PAM sequence: CAG
actggtgccctgttctccta

SEQ ID NO: 75852 - DNA, 20 bp, Artificial Sequence
  Description of Artificial Sequence: Synthetic oligonucleotide
  Target: LAMA2; (-) strand; PAM type: NRG; PAM sequence: TGG
atattctttccctaaataac

SEQ ID NO: 75853 - DNA, 20 bp, Artificial Sequence
  Description of Artificial Sequence: Synthetic oligonucleotide
  Target: LAMA2; (-) strand; PAM type: NRG; PAM sequence: TAG
tttcttcagttggaagtagt

SEQ ID NO: 75854 - DNA, 20 bp, Artificial Sequence
  Description of Artificial Sequence: Synthetic oligonucleotide
  Target: LAMA2; (-) strand; PAM type: NRG; PAM sequence: TAG
tctctttcttcagttggaag

SEQ ID NO: 75855 - DNA, 20 bp, Artificial Sequence
  Description of Artificial Sequence: Synthetic oligonucleotide
  Target: LAMA2; (-) strand; PAM type: NRG; PAM sequence: AAG
tagtctctttcttcagttgg

SEQ ID NO: 75856 - DNA, 20 bp, Artificial Sequence
  Description of Artificial Sequence: Synthetic oligonucleotide
  Target: LAMA2; (-) strand; PAM type: NRG; PAM sequence: TGG
agttagtctctttcttcagt

SEQ ID NO: 75857 - DNA, 20 bp, Artificial Sequence
  Description of Artificial Sequence: Synthetic oligonucleotide
  Target: LAMA2; (-) strand; PAM type: NRG; PAM sequence: CAG
aaaaagttagtctctttctt

SEQ ID NO: 75858 - DNA, 20 bp, Artificial Sequence
  Description of Artificial Sequence: Synthetic oligonucleotide
  Target: LAMA2; (-) strand; PAM type: NRG; PAM sequence: TAG
catttgttgacagaaaaagt

SEQ ID NO: 75859 - DNA, 20 bp, Artificial Sequence
  Description of Artificial Sequence: Synthetic oligonucleotide
  Target: LAMA2; (-) strand; PAM type: NRG; PAM sequence: AAG
atcacatttgttgacagaaa

SEQ ID NO: 75860 - DNA, 20 bp, Artificial Sequence
  Description of Artificial Sequence: Synthetic oligonucleotide
  Target: LAMA2; (-) strand; PAM type: NRG; PAM sequence: CAG
aaacctatcacatttgttga

SEQ ID NO: 75861 - DNA, 20 bp, Artificial Sequence
  Description of Artificial Sequence: Synthetic oligonucleotide
  Target: LAMA2; (-) strand; PAM type: NRG; PAM sequence: CAG
ctcaaacctgccaagagact

SEQ ID NO: 75862 - DNA, 20 bp, Artificial Sequence
  Description of Artificial Sequence: Synthetic oligonucleotide
  Target: LAMA2; (-) strand; PAM type: NRG; PAM sequence: GAG
gctcaactcaaacctgccaa

SEQ ID NO: 75863 - DNA, 20 bp, Artificial Sequence
  Description of Artificial Sequence: Synthetic oligonucleotide
  Target: LAMA2; (-) strand; PAM type: NRG; PAM sequence: AAG
ttgctcaactcaaacctgcc

SEQ ID NO: 75864 - DNA, 20 bp, Artificial Sequence
  Description of Artificial Sequence: Synthetic oligonucleotide
  Target: LAMA2; (-) strand; PAM type: NRG; PAM sequence: AAG
aataacctagttttagttcg

SEQ ID NO: 75865 - DNA, 20 bp, Artificial Sequence
  Description of Artificial Sequence: Synthetic oligonucleotide
  Target: LAMA2; (-) strand; PAM type: NRG; PAM sequence: TAG
gaccatcaataacctagttt

SEQ ID NO: 75866 - DNA, 20 bp, Artificial Sequence
  Description of Artificial Sequence: Synthetic oligonucleotide
  Target: LAMA2; (-) strand; PAM type: NRG; PAM sequence: TAG
ccctttgaccatcaataacc

SEQ ID NO: 75867 - DNA, 20 bp, Artificial Sequence
  Description of Artificial Sequence: Synthetic oligonucleotide
  Target: LAMA2; (-) strand; PAM type: NRG; PAM sequence: CAG
tattactgtgattcttctct

SEQ ID NO: 75868 - DNA, 20 bp, Artificial Sequence
  Description of Artificial Sequence: Synthetic oligonucleotide
  Target: LAMA2; (-) strand; PAM type: NRG; PAM sequence: AAG
ctaaagcagtgccatctaga

SEQ ID NO: 75869 - DNA, 20 bp, Artificial Sequence
  Description of Artificial Sequence: Synthetic oligonucleotide
  Target: LAMA2; (-) strand; PAM type: NRG; PAM sequence: TAG
atctctaaagcagtgccatc

SEQ ID NO: 75870 - DNA, 20 bp, Artificial Sequence
  Description of Artificial Sequence: Synthetic oligonucleotide
  Target: LAMA2; (-) strand; PAM type: NRG; PAM sequence: CAG
taattctaggatctctaaag

SEQ ID NO: 75871 - DNA, 20 bp, Artificial Sequence
  Description of Artificial Sequence: Synthetic oligonucleotide
  Target: LAMA2; (-) strand; PAM type: NRG; PAM sequence: AAG
ttttaattctaggatctcta

SEQ ID NO: 75872 - DNA, 20 bp, Artificial Sequence
  Description of Artificial Sequence: Synthetic oligonucleotide
  Target: LAMA2; (-) strand; PAM type: NRG; PAM sequence: AGG
aatattataattttaattct

SEQ ID NO: 75873 - DNA, 20 bp, Artificial Sequence
  Description of Artificial Sequence: Synthetic oligonucleotide
  Target: LAMA2; (-) strand; PAM type: NRG; PAM sequence: TAG
aaatattataattttaattc

SEQ ID NO: 75874 - DNA, 20 bp, Artificial Sequence
  Description of Artificial Sequence: Synthetic oligonucleotide
  Target: LAMA2; (-) strand; PAM type: NRG; PAM sequence: CAG
aagggaaaagtctcatacaa

SEQ ID NO: 75875 - DNA, 20 bp, Artificial Sequence
  Description of Artificial Sequence: Synthetic oligonucleotide
  Target: LAMA2; (-) strand; PAM type: NRG; PAM sequence: AAG
tgtgagtcaaagaaagggaa

SEQ ID NO: 75876 - DNA, 20 bp, Artificial Sequence
  Description of Artificial Sequence: Synthetic oligonucleotide
  Target: LAMA2; (-) strand; PAM type: NRG; PAM sequence: GGG
aataatgtgagtcaaagaaa

SEQ ID NO: 75877 - DNA, 20 bp, Artificial Sequence
  Description of Artificial Sequence: Synthetic oligonucleotide
  Target: LAMA2; (-) strand; PAM type: NRG; PAM sequence: AGG
caataatgtgagtcaaagaa

SEQ ID NO: 75878 - DNA, 20 bp, Artificial Sequence
  Description of Artificial Sequence: Synthetic oligonucleotide
  Target: LAMA2; (-) strand; PAM type: NRG; PAM sequence: AAG
gcaataatgtgagtcaaaga

SEQ ID NO: 75879 - DNA, 20 bp, Artificial Sequence
  Description of Artificial Sequence: Synthetic oligonucleotide
  Target: LAMA2; (-) strand; PAM type: NRG; PAM sequence: AAG
aaaagcaataatgtgagtca

SEQ ID NO: 75880 - DNA, 20 bp, Artificial Sequence
  Description of Artificial Sequence: Synthetic oligonucleotide
  Target: LAMA2; (-) strand; PAM type: NRG; PAM sequence: GAG
taaattaaaagcaataatgt

SEQ ID NO: 75881 - DNA, 20 bp, Artificial Sequence
  Description of Artificial Sequence: Synthetic oligonucleotide
  Target: LAMA2; (-) strand; PAM type: NRG; PAM sequence: AAG
tgacaatccaaataaattaa

SEQ ID NO: 75882 - DNA, 20 bp, Artificial Sequence
  Description of Artificial Sequence: Synthetic oligonucleotide
  Target: LAMA2; (-) strand; PAM type: NRG; PAM sequence: TAG
cgaatatttagctagcagtc

SEQ ID NO: 75883 - DNA, 20 bp, Artificial Sequence
  Description of Artificial Sequence: Synthetic oligonucleotide
  Target: LAMA2; (-) strand; PAM type: NRG; PAM sequence: CAG
aaccacgaatatttagctag

SEQ ID NO: 75884 - DNA, 20 bp, Artificial Sequence
  Description of Artificial Sequence: Synthetic oligonucleotide
  Target: LAMA2; (-) strand; PAM type: NRG; PAM sequence: TAG
ggtaaccacgaatatttagc

SEQ ID NO: 75885 - DNA, 20 bp, Artificial Sequence
  Description of Artificial Sequence: Synthetic oligonucleotide
  Target: LAMA2; (-) strand; PAM type: NRG; PAM sequence: TAG
ctatggtaaccacgaatatt

SEQ ID NO: 75886 - DNA, 20 bp, Artificial Sequence
  Description of Artificial Sequence: Synthetic oligonucleotide
  Target: LAMA2; (-) strand; PAM type: NRG; PAM sequence: TGG
aaatggaagcaaaatcacta

SEQ ID NO: 75887 - DNA, 20 bp, Artificial Sequence
  Description of Artificial Sequence: Synthetic oligonucleotide
  Target: LAMA2; (-) strand; PAM type: NRG; PAM sequence: AAG
gcctctgtatgaggaaatgg

SEQ ID NO: 75888 - DNA, 20 bp, Artificial Sequence
  Description of Artificial Sequence: Synthetic oligonucleotide
  Target: LAMA2; (-) strand; PAM type: NRG; PAM sequence: TGG
aaggcctctgtatgaggaaa

SEQ ID NO: 75889 - DNA, 20 bp, Artificial Sequence
  Description of Artificial Sequence: Synthetic oligonucleotide
  Target: LAMA2; (-) strand; PAM type: NRG; PAM sequence: AGG
aacttaaaggcctctgtatg

SEQ ID NO: 75890 - DNA, 20 bp, Artificial Sequence
  Description of Artificial Sequence: Synthetic oligonucleotide
  Target: LAMA2; (-) strand; PAM type: NRG; PAM sequence: GAG
taacttaaaggcctctgtat

SEQ ID NO: 75891 - DNA, 20 bp, Artificial Sequence
  Description of Artificial Sequence: Synthetic oligonucleotide
  Target: LAMA2; (-) strand; PAM type: NRG; PAM sequence: AGG
atcatatgtaaataacttaa

SEQ ID NO: 75892 - DNA, 20 bp, Artificial Sequence
  Description of Artificial Sequence: Synthetic oligonucleotide
  Target: LAMA2; (-) strand; PAM type: NRG; PAM sequence: AAG
aatcatatgtaaataactta

SEQ ID NO: 75893 - DNA, 20 bp, Artificial Sequence
  Description of Artificial Sequence: Synthetic oligonucleotide
  Target: LAMA2; (-) strand; PAM type: NRG; PAM sequence: AGG
aaggtggtggtaagaaggaa

SEQ ID NO: 75894 - DNA, 20 bp, Artificial Sequence
  Description of Artificial Sequence: Synthetic oligonucleotide
  Target: LAMA2; (-) strand; PAM type: NRG; PAM sequence: AAG
gaaggtggtggtaagaagga

SEQ ID NO: 75895 - DNA, 20 bp, Artificial Sequence
  Description of Artificial Sequence: Synthetic oligonucleotide
  Target: LAMA2; (-) strand; PAM type: NRG; PAM sequence: AGG
gtgagaaggtggtggtaaga

SEQ ID NO: 75896 - DNA, 20 bp, Artificial Sequence
  Description of Artificial Sequence: Synthetic oligonucleotide
  Target: LAMA2; (-) strand; PAM type: NRG; PAM sequence: AAG
agtgagaaggtggtggtaag

SEQ ID NO: 75897 - DNA, 20 bp, Artificial Sequence
  Description of Artificial Sequence: Synthetic oligonucleotide
  Target: LAMA2; (-) strand; PAM type: NRG; PAM sequence: AAG
gagagtgagaaggtggtggt

SEQ ID NO: 75898 - DNA, 20 bp, Artificial Sequence
  Description of Artificial Sequence: Synthetic oligonucleotide
  Target: LAMA2; (-) strand; PAM type: NRG; PAM sequence: TGG
ccaggagagtgagaaggtgg

SEQ ID NO: 75899 - DNA, 20 bp, Artificial Sequence
  Description of Artificial Sequence: Synthetic oligonucleotide
  Target: LAMA2; (-) strand; PAM type: NRG; PAM sequence: TGG
agtccaggagagtgagaagg

SEQ ID NO: 75900 - DNA, 20 bp, Artificial Sequence
  Description of Artificial Sequence: Synthetic oligonucleotide
  Target: LAMA2; (-) strand; PAM type: NRG; PAM sequence: AGG
tgcagtccaggagagtgaga

SEQ ID NO: 75901 - DNA, 20 bp, Artificial Sequence
  Description of Artificial Sequence: Synthetic oligonucleotide
  Target: LAMA2; (-) strand; PAM type: NRG; PAM sequence: AAG
ctgcagtccaggagagtgag

SEQ ID NO: 75902 - DNA, 20 bp, Artificial Sequence
  Description of Artificial Sequence: Synthetic oligonucleotide
  Target: LAMA2; (-) strand; PAM type: NRG; PAM sequence: GAG
gagctgcagtccaggagagt

SEQ ID NO: 75903 - DNA, 20 bp, Artificial Sequence
  Description of Artificial Sequence: Synthetic oligonucleotide
  Target: LAMA2; (-) strand; PAM type: NRG; PAM sequence: GAG
cattgagctgcagtccagga

SEQ ID NO: 75904 - DNA, 20 bp, Artificial Sequence
  Description of Artificial Sequence: Synthetic oligonucleotide
  Target: LAMA2; (-) strand; PAM type: NRG; PAM sequence: GAG
tccattgagctgcagtccag

SEQ ID NO: 75905 - DNA, 20 bp, Artificial Sequence
  Description of Artificial Sequence: Synthetic oligonucleotide
  Target: LAMA2; (-) strand; PAM type: NRG; PAM sequence: AGG
gttccattgagctgcagtcc

SEQ ID NO: 75906 - DNA, 20 bp, Artificial Sequence
  Description of Artificial Sequence: Synthetic oligonucleotide
  Target: LAMA2; (-) strand; PAM type: NRG; PAM sequence: CAG
agttccattgagctgcagtc

SEQ ID NO: 75907 - DNA, 20 bp, Artificial Sequence
  Description of Artificial Sequence: Synthetic oligonucleotide
  Target: LAMA2; (-) strand; PAM type: NRG; PAM sequence: CAG
atctaagttccattgagctg

SEQ ID NO: 75908 - DNA, 20 bp, Artificial Sequence
  Description of Artificial Sequence: Synthetic oligonucleotide
  Target: LAMA2; (-) strand; PAM type: NRG; PAM sequence: GAG
aagtgaatctaagttccatt

SEQ ID NO: 75909 - DNA, 20 bp, Artificial Sequence
  Description of Artificial Sequence: Synthetic oligonucleotide
  Target: LAMA2; (-) strand; PAM type: NRG; PAM sequence: AAG
agcagaatcaaagtgaatct

SEQ ID NO: 75910 - DNA, 20 bp, Artificial Sequence
  Description of Artificial Sequence: Synthetic oligonucleotide
  Target: LAMA2; (-) strand; PAM type: NRG; PAM sequence: AAG
catgtttcaaagcagaatca

SEQ ID NO: 75911 - DNA, 20 bp, Artificial Sequence
  Description of Artificial Sequence: Synthetic oligonucleotide
  Target: LAMA2; (-) strand; PAM type: NRG; PAM sequence: CAG
aagcctgccatgtttcaaag

SEQ ID NO: 75912 - DNA, 20 bp, Artificial Sequence
  Description of Artificial Sequence: Synthetic oligonucleotide
  Target: LAMA2; (-) strand; PAM type: NRG; PAM sequence: AAG
tacaagcctgccatgtttca

SEQ ID NO: 75913 - DNA, 20 bp, Artificial Sequence
  Description of Artificial Sequence: Synthetic oligonucleotide
  Target: LAMA2; (-) strand; PAM type: NRG; PAM sequence: AAG
ttctccagggatttttatac

SEQ ID NO: 75914 - DNA, 20 bp, Artificial Sequence
  Description of Artificial Sequence: Synthetic oligonucleotide
  Target: LAMA2; (-) strand; PAM type: NRG; PAM sequence: GGG
atttaatgatggtttctcca

SEQ ID NO: 75915 - DNA, 20 bp, Artificial Sequence
  Description of Artificial Sequence: Synthetic oligonucleotide
  Target: LAMA2; (-) strand; PAM type: NRG; PAM sequence: AGG
gatttaatgatggtttctcc

SEQ ID NO: 75916 - DNA, 20 bp, Artificial Sequence
  Description of Artificial Sequence: Synthetic oligonucleotide
  Target: LAMA2; (-) strand; PAM type: NRG; PAM sequence: CAG
agatttaatgatggtttctc

SEQ ID NO: 75917 - DNA, 20 bp, Artificial Sequence
  Description of Artificial Sequence: Synthetic oligonucleotide
  Target: LAMA2; (-) strand; PAM type: NRG; PAM sequence: TGG
gtgtcttcaagatttaatga

SEQ ID NO: 75918 - DNA, 20 bp, Artificial Sequence
  Description of Artificial Sequence: Synthetic oligonucleotide
  Target: LAMA2; (-) strand; PAM type: NRG; PAM sequence: AAG
aaaaaaaaaaaagtgtcttc

SEQ ID NO: 75919 - DNA, 20 bp, Artificial Sequence
  Description of Artificial Sequence: Synthetic oligonucleotide
  Target: LAMA2; (-) strand; PAM type: NRG; PAM sequence: AAG
cagtttacaaaaaaaaaaaa

SEQ ID NO: 75920 - DNA, 20 bp, Artificial Sequence
  Description of Artificial Sequence: Synthetic oligonucleotide
  Target: LAMA2; (-) strand; PAM type: NRG; PAM sequence: CAG
taatatcaaagctctacata

SEQ ID NO: 75921 - DNA, 20 bp, Artificial Sequence
  Description of Artificial Sequence: Synthetic oligonucleotide
  Target: LAMA2; (-) strand; PAM type: NRG; PAM sequence: AAG
aggaaatcaaaataatatca

SEQ ID NO: 75922 - DNA, 20 bp, Artificial Sequence
  Description of Artificial Sequence: Synthetic oligonucleotide
  Target: LAMA2; (-) strand; PAM type: NRG; PAM sequence: AGG
tatataaaattctgtcacat

SEQ ID NO: 75923 - DNA, 20 bp, Artificial Sequence
  Description of Artificial Sequence: Synthetic oligonucleotide
  Target: LAMA2; (-) strand; PAM type: NRG; PAM sequence: TAG
atatataaaattctgtcaca

SEQ ID NO: 75924 - DNA, 20 bp, Artificial Sequence
  Description of Artificial Sequence: Synthetic oligonucleotide
  Target: LAMA2; (-) strand; PAM type: NRG; PAM sequence: AAG
tgtcagatgatgaaaagagg

SEQ ID NO: 75925 - DNA, 20 bp, Artificial Sequence
  Description of Artificial Sequence: Synthetic oligonucleotide
  Target: LAMA2; (-) strand; PAM type: NRG; PAM sequence: AGG
taatgtcagatgatgaaaag

SEQ ID NO: 75926 - DNA, 20 bp, Artificial Sequence
  Description of Artificial Sequence: Synthetic oligonucleotide
  Target: LAMA2; (-) strand; PAM type: NRG; PAM sequence: GAG
ataatgtcagatgatgaaaa

SEQ ID NO: 75927 - DNA, 20 bp, Artificial Sequence
  Description of Artificial Sequence: Synthetic oligonucleotide
  Target: LAMA2; (-) strand; PAM type: NRG; PAM sequence: AAG
ccataatgtcagatgatgaa

SEQ ID NO: 75928 - DNA, 20 bp, Artificial Sequence
  Description of Artificial Sequence: Synthetic oligonucleotide
  Target: LAMA2; (-) strand; PAM type: NRG; PAM sequence: CAG
tctaaggaccaccataatgt

SEQ ID NO: 75929 - DNA, 20 bp, Artificial Sequence
  Description of Artificial Sequence: Synthetic oligonucleotide
  Target: LAMA2; (-) strand; PAM type: NRG; PAM sequence: AGG
ctcctgtatttgcaattcta

SEQ ID NO: 75930 - DNA, 20 bp, Artificial Sequence
  Description of Artificial Sequence: Synthetic oligonucleotide
  Target: LAMA2; (-) strand; PAM type: NRG; PAM sequence: AAG
tctcctgtatttgcaattct

SEQ ID NO: 75931 - DNA, 20 bp, Artificial Sequence
  Description of Artificial Sequence: Synthetic oligonucleotide
  Target: LAMA2; (-) strand; PAM type: NRG; PAM sequence: GGG
acattttttaatacagtctt

SEQ ID NO: 75932 - DNA, 20 bp, Artificial Sequence
  Description of Artificial Sequence: Synthetic oligonucleotide
  Target: LAMA2; (-) strand; PAM type: NRG; PAM sequence: TGG
aacattttttaatacagtct

SEQ ID NO: 75933 - DNA, 20 bp, Artificial Sequence
  Description of Artificial Sequence: Synthetic oligonucleotide
  Target: LAMA2; (-) strand; PAM type: NRG; PAM sequence: CAG
ttctgaaacattttttaata

SEQ ID NO: 75934 - DNA, 20 bp, Artificial Sequence
  Description of Artificial Sequence: Synthetic oligonucleotide
  Target: LAMA2; (-) strand; PAM type: NRG; PAM sequence: GAG
ttaacaatgttatatcaaag

SEQ ID NO: 75935 - DNA, 20 bp, Artificial Sequence
  Description of Artificial Sequence: Synthetic oligonucleotide
  Target: LAMA2; (-) strand; PAM type: NRG; PAM sequence: AGG
ccttaacaatgttatatcaa

SEQ ID NO: 75936 - DNA, 20 bp, Artificial Sequence
  Description of Artificial Sequence: Synthetic oligonucleotide
  Target: LAMA2; (-) strand; PAM type: NRG; PAM sequence: AAG
accttaacaatgttatatca

SEQ ID NO: 75937 - DNA, 20 bp, Artificial Sequence
  Description of Artificial Sequence: Synthetic oligonucleotide
  Target: LAMA2; (-) strand; PAM type: NRG; PAM sequence: AGG
aagggtaattgagaaaggct

SEQ ID NO: 75938 - DNA, 20 bp, Artificial Sequence
  Description of Artificial Sequence: Synthetic oligonucleotide
  Target: LAMA2; (-) strand; PAM type: NRG; PAM sequence: TAG
caagggtaattgagaaaggc

SEQ ID NO: 75939 - DNA, 20 bp, Artificial Sequence
  Description of Artificial Sequence: Synthetic oligonucleotide
  Target: LAMA2; (-) strand; PAM type: NRG; PAM sequence: AGG
attgcaagggtaattgagaa

SEQ ID NO: 75940 - DNA, 20 bp, Artificial Sequence
  Description of Artificial Sequence: Synthetic oligonucleotide
  Target: LAMA2; (-) strand; PAM type: NRG; PAM sequence: AAG
aattgcaagggtaattgaga

SEQ ID NO: 75941 - DNA, 20 bp, Artificial Sequence
  Description of Artificial Sequence: Synthetic oligonucleotide
  Target: LAMA2; (-) strand; PAM type: NRG; PAM sequence: GAG
gaacaattgcaagggtaatt

SEQ ID NO: 75942 - DNA, 20 bp, Artificial Sequence
  Description of Artificial Sequence: Synthetic oligonucleotide
  Target: LAMA2; (-) strand; PAM type: NRG; PAM sequence: GGG
ccctaaaggaacaattgcaa

SEQ ID NO: 75943 - DNA, 20 bp, Artificial Sequence
  Description of Artificial Sequence: Synthetic oligonucleotide
  Target: LAMA2; (-) strand; PAM type: NRG; PAM sequence: AGG
tccctaaaggaacaattgca

SEQ ID NO: 75944 - DNA, 20 bp, Artificial Sequence
  Description of Artificial Sequence: Synthetic oligonucleotide
  Target: LAMA2; (-) strand; PAM type: NRG; PAM sequence: AAG
ctccctaaaggaacaattgc

SEQ ID NO: 75945 - DNA, 20 bp, Artificial Sequence
  Description of Artificial Sequence: Synthetic oligonucleotide
  Target: LAMA2; (-) strand; PAM type: NRG; PAM sequence: AGG
actccgctgtttctccctaa

SEQ ID NO: 75946 - DNA, 20 bp, Artificial Sequence
  Description of Artificial Sequence: Synthetic oligonucleotide
  Target: LAMA2; (-) strand; PAM type: NRG; PAM sequence: AAG
tactccgctgtttctcccta

SEQ ID NO: 75947 - DNA, 20 bp, Artificial Sequence
  Description of Artificial Sequence: Synthetic oligonucleotide
  Target: LAMA2; (-) strand; PAM type: NRG; PAM sequence: TAG
tattgaaaaccaatacaaat

SEQ ID NO: 75948 - DNA, 20 bp, Artificial Sequence
  Description of Artificial Sequence: Synthetic oligonucleotide
  Target: LAMA2; (-) strand; PAM type: NRG; PAM sequence: AAG
gaattatttttagagaaagg

SEQ ID NO: 75949 - DNA, 20 bp, Artificial Sequence
  Description of Artificial Sequence: Synthetic oligonucleotide
  Target: LAMA2; (-) strand; PAM type: NRG; PAM sequence: AGG
aaagaattatttttagagaa

SEQ ID NO: 75950 - DNA, 20 bp, Artificial Sequence
  Description of Artificial Sequence: Synthetic oligonucleotide
  Target: LAMA2; (-) strand; PAM type: NRG; PAM sequence: AAG
aaaagaattatttttagaga

SEQ ID NO: 75951 - DNA, 20 bp, Artificial Sequence
  Description of Artificial Sequence: Synthetic oligonucleotide
  Target: LAMA2; (-) strand; PAM type: NRG; PAM sequence: GAG
tctaaaaagaattattttta

SEQ ID NO: 75952 - DNA, 20 bp, Artificial Sequence
  Description of Artificial Sequence: Synthetic oligonucleotide
  Target: LAMA2; (-) strand; PAM type: NRG; PAM sequence: TAG
ggtctaaaaagaattatttt

SEQ ID NO: 75953 - DNA, 20 bp, Artificial Sequence
  Description of Artificial Sequence: Synthetic oligonucleotide
  Target: LAMA2; (-) strand; PAM type: NRG; PAM sequence: AAG
tggccccacattggtctaaa

SEQ ID NO: 75954 - DNA, 20 bp, Artificial Sequence
  Description of Artificial Sequence: Synthetic oligonucleotide
  Target: LAMA2; (-) strand; PAM type: NRG; PAM sequence: TGG
ggtactgattggccccacat

SEQ ID NO: 75955 - DNA, 20 bp, Artificial Sequence
  Description of Artificial Sequence: Synthetic oligonucleotide
  Target: LAMA2; (-) strand; PAM type: NRG; PAM sequence: TGG
ttgttgctccaggtactgat

SEQ ID NO: 75956 - DNA, 20 bp, Artificial Sequence
  Description of Artificial Sequence: Synthetic oligonucleotide
  Target: LAMA2; (-) strand; PAM type: NRG; PAM sequence: AGG
tactttaatattgttgctcc

SEQ ID NO: 75957 - DNA, 20 bp, Artificial Sequence
  Description of Artificial Sequence: Synthetic oligonucleotide
  Target: LAMA2; (-) strand; PAM type: NRG; PAM sequence: CAG
gtactttaatattgttgctc

SEQ ID NO: 75958 - DNA, 20 bp, Artificial Sequence
  Description of Artificial Sequence: Synthetic oligonucleotide
  Target: LAMA2; (-) strand; PAM type: NRG; PAM sequence: AGG
atataaacctcactgtaagg

SEQ ID NO: 75959 - DNA, 20 bp, Artificial Sequence
  Description of Artificial Sequence: Synthetic oligonucleotide
  Target: LAMA2; (-) strand; PAM type: NRG; PAM sequence: GAG
catataaacctcactgtaag

SEQ ID NO: 75960 - DNA, 20 bp, Artificial Sequence
  Description of Artificial Sequence: Synthetic oligonucleotide
  Target: LAMA2; (-) strand; PAM type: NRG; PAM sequence: AGG
tccatataaacctcactgta

SEQ ID NO: 75961 - DNA, 20 bp, Artificial Sequence
  Description of Artificial Sequence: Synthetic oligonucleotide
  Target: LAMA2; (-) strand; PAM type: NRG; PAM sequence: AAG
ctccatataaacctcactgt

SEQ ID NO: 75962 - DNA, 20 bp, Artificial Sequence
  Description of Artificial Sequence: Synthetic oligonucleotide
  Target: LAMA2; (-) strand; PAM type: NRG; PAM sequence: AGG
tgaaacatttcattttttag

SEQ ID NO: 75963 - DNA, 20 bp, Artificial Sequence
  Description of Artificial Sequence: Synthetic oligonucleotide
  Target: LAMA2; (-) strand; PAM type: NRG; PAM sequence: GAG
ttgaaacatttcatttttta

SEQ ID NO: 75964 - DNA, 20 bp, Artificial Sequence
  Description of Artificial Sequence: Synthetic oligonucleotide
  Target: LAMA2; (-) strand; PAM type: NRG; PAM sequence: TAG
agttgaaacatttcattttt

SEQ ID NO: 75965 - DNA, 20 bp, Artificial Sequence
  Description of Artificial Sequence: Synthetic oligonucleotide
  Target: LAMA2; (-) strand; PAM type: NRG; PAM sequence: GAG
tgctctgtgtattccaacca

SEQ ID NO: 75966 - DNA, 20 bp, Artificial Sequence
  Description of Artificial Sequence: Synthetic oligonucleotide
  Target: LAMA2; (-) strand; PAM type: NRG; PAM sequence: CAG
gctgctctgtgtattccaac

SEQ ID NO: 75967 - DNA, 20 bp, Artificial Sequence
  Description of Artificial Sequence: Synthetic oligonucleotide
  Target: LAMA2; (-) strand; PAM type: NRG; PAM sequence: CAG
tgtgtcatttcaaaatattt

SEQ ID NO: 75968 - DNA, 20 bp, Artificial Sequence
  Description of Artificial Sequence: Synthetic oligonucleotide
  Target: LAMA2; (-) strand; PAM type: NRG; PAM sequence: AAG
tttatctttattttattaaa

SEQ ID NO: 75969 - DNA, 20 bp, Artificial Sequence
  Description of Artificial Sequence: Synthetic oligonucleotide
  Target: LAMA2; (-) strand; PAM type: NRG; PAM sequence: AGG
ctgatcaacaaagaaaaagg

SEQ ID NO: 75970 - DNA, 20 bp, Artificial Sequence
  Description of Artificial Sequence: Synthetic oligonucleotide
  Target: LAMA2; (-) strand; PAM type: NRG; PAM sequence: GAG
actgatcaacaaagaaaaag

SEQ ID NO: 75971 - DNA, 20 bp, Artificial Sequence
  Description of Artificial Sequence: Synthetic oligonucleotide
  Target: LAMA2; (-) strand; PAM type: NRG; PAM sequence: AGG
taactgatcaacaaagaaaa

SEQ ID NO: 75972 - DNA, 20 bp, Artificial Sequence
  Description of Artificial Sequence: Synthetic oligonucleotide
  Target: LAMA2; (-) strand; PAM type: NRG; PAM sequence: AAG
gtaactgatcaacaaagaaa

SEQ ID NO: 75973 - DNA, 20 bp, Artificial Sequence
  Description of Artificial Sequence: Synthetic oligonucleotide
  Target: LAMA2; (-) strand; PAM type: NRG; PAM sequence: AAG
agtctagtaactgatcaaca

SEQ ID NO: 75974 - DNA, 20 bp, Artificial Sequence
  Description of Artificial Sequence: Synthetic oligonucleotide
  Target: LAMA2; (-) strand; PAM type: NRG; PAM sequence: TAG
tttggaggagtaagggagtc

SEQ ID NO: 75975 - DNA, 20 bp, Artificial Sequence
  Description of Artificial Sequence: Synthetic oligonucleotide
  Target: LAMA2; (-) strand; PAM type: NRG; PAM sequence: GAG
ttttttttggaggagtaagg

SEQ ID NO: 75976 - DNA, 20 bp, Artificial Sequence
  Description of Artificial Sequence: Synthetic oligonucleotide
  Target: LAMA2; (-) strand; PAM type: NRG; PAM sequence: GGG
ttttttttttggaggagtaa

SEQ ID NO: 75977 - DNA, 20 bp, Artificial Sequence
  Description of Artificial Sequence: Synthetic oligonucleotide
  Target: LAMA2; (-) strand; PAM type: NRG; PAM sequence: AGG
tttttttttttggaggagta

SEQ ID NO: 75978 - DNA, 20 bp, Artificial Sequence
  Description of Artificial Sequence: Synthetic oligonucleotide
  Target: LAMA2; (-) strand; PAM type: NRG; PAM sequence: AAG
ttttttttttttggaggagt

SEQ ID NO: 75979 - DNA, 20 bp, Artificial Sequence
  Description of Artificial Sequence: Synthetic oligonucleotide
  Target: LAMA2; (-) strand; PAM type: NRG; PAM sequence: GAG
atttttttttttttttggag

SEQ ID NO: 75980 - DNA, 20 bp, Artificial Sequence
  Description of Artificial Sequence: Synthetic oligonucleotide
  Target: LAMA2; (-) strand; PAM type: NRG; PAM sequence: AGG
atatttttttttttttttgg

SEQ ID NO: 75981 - DNA, 20 bp, Artificial Sequence
  Description of Artificial Sequence: Synthetic oligonucleotide
  Target: LAMA2; (-) strand; PAM type: NRG; PAM sequence: GAG
tatatttttttttttttttg

SEQ ID NO: 75982 - DNA, 20 bp, Artificial Sequence
  Description of Artificial Sequence: Synthetic oligonucleotide
  Target: LAMA2; (-) strand; PAM type: NRG; PAM sequence: TGG
tatatatttttttttttttt

SEQ ID NO: 75983 - DNA, 20 bp, Artificial Sequence
  Description of Artificial Sequence: Synthetic oligonucleotide
  Target: LAMA2; (-) strand; PAM type: NRG; PAM sequence: GGG
gggatttgtggatactttct

SEQ ID NO: 75984 - DNA, 20 bp, Artificial Sequence
  Description of Artificial Sequence: Synthetic oligonucleotide
  Target: LAMA2; (-) strand; PAM type: NRG; PAM sequence: TGG
agggatttgtggatactttc

SEQ ID NO: 75985 - DNA, 20 bp, Artificial Sequence
  Description of Artificial Sequence: Synthetic oligonucleotide
  Target: LAMA2; (-) strand; PAM type: NRG; PAM sequence: TGG
attaatttaacagggatttg

SEQ ID NO: 75986 - DNA, 20 bp, Artificial Sequence
  Description of Artificial Sequence: Synthetic oligonucleotide
  Target: LAMA2; (-) strand; PAM type: NRG; PAM sequence: GGG
aatactgcattaatttaaca

SEQ ID NO: 75987 - DNA, 20 bp, Artificial Sequence
  Description of Artificial Sequence: Synthetic oligonucleotide
  Target: LAMA2; (-) strand; PAM type: NRG; PAM sequence: AGG
caatactgcattaatttaac

SEQ ID NO: 75988 - DNA, 20 bp, Artificial Sequence
  Description of Artificial Sequence: Synthetic oligonucleotide
  Target: LAMA2; (-) strand; PAM type: NRG; PAM sequence: CAG
acaatactgcattaatttaa

SEQ ID NO: 75989 - DNA, 20 bp, Artificial Sequence
  Description of Artificial Sequence: Synthetic oligonucleotide
  Target: LAMA2; (-) strand; PAM type: NRG; PAM sequence: TGG
ccattctcattcagtttctc

SEQ ID NO: 75990 - DNA, 20 bp, Artificial Sequence
  Description of Artificial Sequence: Synthetic oligonucleotide
  Target: LAMA2; (-) strand; PAM type: NRG; PAM sequence: CAG
ctcaggattccattctcatt

SEQ ID NO: 75991 - DNA, 20 bp, Artificial Sequence
  Description of Artificial Sequence: Synthetic oligonucleotide
  Target: LAMA2; (-) strand; PAM type: NRG; PAM sequence: AGG
aatattggtgttttctcctc

SEQ ID NO: 75992 - DNA, 20 bp, Artificial Sequence
  Description of Artificial Sequence: Synthetic oligonucleotide
  Target: LAMA2; (-) strand; PAM type: NRG; PAM sequence: CAG
aaatattggtgttttctcct

SEQ ID NO: 75993 - DNA, 20 bp, Artificial Sequence
  Description of Artificial Sequence: Synthetic oligonucleotide
  Target: LAMA2; (-) strand; PAM type: NRG; PAM sequence: TGG
gaaccaggtctcttaaatat

SEQ ID NO: 75994 - DNA, 20 bp, Artificial Sequence
  Description of Artificial Sequence: Synthetic oligonucleotide
  Target: LAMA2; (-) strand; PAM type: NRG; PAM sequence: AGG
tccacaacactgagagaacc

SEQ ID NO: 75995 - DNA, 20 bp, Artificial Sequence
  Description of Artificial Sequence: Synthetic oligonucleotide
  Target: LAMA2; (-) strand; PAM type: NRG; PAM sequence: CAG
ttccacaacactgagagaac

SEQ ID NO: 75996 - DNA, 20 bp, Artificial Sequence
  Description of Artificial Sequence: Synthetic oligonucleotide
  Target: LAMA2; (-) strand; PAM type: NRG; PAM sequence: GAG
atcctgttccacaacactga

SEQ ID NO: 75997 - DNA, 20 bp, Artificial Sequence
  Description of Artificial Sequence: Synthetic oligonucleotide
  Target: LAMA2; (-) strand; PAM type: NRG; PAM sequence: GAG
ggatcctgttccacaacact

SEQ ID NO: 75998 - DNA, 20 bp, Artificial Sequence
  Description of Artificial Sequence: Synthetic oligonucleotide
  Target: LAMA2; (-) strand; PAM type: NRG; PAM sequence: TGG
acccttctgttccatatcag

SEQ ID NO: 75999 - DNA, 20 bp, Artificial Sequence
  Description of Artificial Sequence: Synthetic oligonucleotide
  Target: LAMA2; (-) strand; PAM type: NRG; PAM sequence: CAG
cttacccttctgttccatat

SEQ ID NO: 76000 - DNA, 20 bp, Artificial Sequence
  Description of Artificial Sequence: Synthetic oligonucleotide
  Target: LAMA2; (-) strand; PAM type: NRG; PAM sequence: AAG
ttccttacctagcttaacag

SEQ ID NO: 76001 - DNA, 20 bp, Artificial Sequence
  Description of Artificial Sequence: Synthetic oligonucleotide
  Target: LAMA2; (-) strand; PAM type: NRG; PAM sequence: CAG
agcttccttacctagcttaa

SEQ ID NO: 76002 - DNA, 20 bp, Artificial Sequence
  Description of Artificial Sequence: Synthetic oligonucleotide
  Target: LAMA2; (-) strand; PAM type: NRG; PAM sequence: TAG
caaccctaagcttccttacc

SEQ ID NO: 76003 - DNA, 20 bp, Artificial Sequence
  Description of Artificial Sequence: Synthetic oligonucleotide
  Target: LAMA2; (-) strand; PAM type: NRG; PAM sequence: AAG
gtaccttctttcacaaccct

SEQ ID NO: 76004 - DNA, 20 bp, Artificial Sequence
  Description of Artificial Sequence: Synthetic oligonucleotide
  Target: LAMA2; (-) strand; PAM type: NRG; PAM sequence: CAG
attccccaaaagtcagtgtg

SEQ ID NO: 76005 - DNA, 20 bp, Artificial Sequence
  Description of Artificial Sequence: Synthetic oligonucleotide
  Target: LAMA2; (-) strand; PAM type: NRG; PAM sequence: CAG
ccaggtaattccccaaaagt

SEQ ID NO: 76006 - DNA, 20 bp, Artificial Sequence
  Description of Artificial Sequence: Synthetic oligonucleotide
  Target: LAMA2; (-) strand; PAM type: NRG; PAM sequence: AAG
aaatccaggtaattccccaa

SEQ ID NO: 76007 - DNA, 20 bp, Artificial Sequence
  Description of Artificial Sequence: Synthetic oligonucleotide
  Target: LAMA2; (-) strand; PAM type: NRG; PAM sequence: AGG
gctacctgaaagccaaatcc

SEQ ID NO: 76008 - DNA, 20 bp, Artificial Sequence
  Description of Artificial Sequence: Synthetic oligonucleotide
  Target: LAMA2; (-) strand; PAM type: NRG; PAM sequence: CAG
agctacctgaaagccaaatc

SEQ ID NO: 76009 - DNA, 20 bp, Artificial Sequence
  Description of Artificial Sequence: Synthetic oligonucleotide
  Target: LAMA2; (-) strand; PAM type: NRG; PAM sequence: AAG
tccttggcagagctacctga

SEQ ID NO: 76010 - DNA, 20 bp, Artificial Sequence
  Description of Artificial Sequence: Synthetic oligonucleotide
  Target: LAMA2; (-) strand; PAM type: NRG; PAM sequence: GAG
cctattgttaatccttggca

SEQ ID NO: 76011 - DNA, 20 bp, Artificial Sequence
  Description of Artificial Sequence: Synthetic oligonucleotide
  Target: LAMA2; (-) strand; PAM type: NRG; PAM sequence: CAG
accctattgttaatccttgg

SEQ ID NO: 76012 - DNA, 20 bp, Artificial Sequence
  Description of Artificial Sequence: Synthetic oligonucleotide
  Target: LAMA2; (-) strand; PAM type: NRG; PAM sequence: TGG
tgaaccctattgttaatcct

SEQ ID NO: 76013 - DNA, 20 bp, Artificial Sequence
  Description of Artificial Sequence: Synthetic oligonucleotide
  Target: LAMA2; (-) strand; PAM type: NRG; PAM sequence: TGG
tggctggggcacatattaga

SEQ ID NO: 76014 - DNA, 20 bp, Artificial Sequence
  Description of Artificial Sequence: Synthetic oligonucleotide
  Target: LAMA2; (-) strand; PAM type: NRG; PAM sequence: TAG
aaactggctggggcacatat

SEQ ID NO: 76015 - DNA, 20 bp, Artificial Sequence
  Description of Artificial Sequence: Synthetic oligonucleotide
  Target: LAMA2; (-) strand; PAM type: NRG; PAM sequence: GGG
ataaccacgtaaactggctg

SEQ ID NO: 76016 - DNA, 20 bp, Artificial Sequence
  Description of Artificial Sequence: Synthetic oligonucleotide
  Target: LAMA2; (-) strand; PAM type: NRG; PAM sequence: GGG
tataaccacgtaaactggct

SEQ ID NO: 76017 - DNA, 20 bp, Artificial Sequence
  Description of Artificial Sequence: Synthetic oligonucleotide
  Target: LAMA2; (-) strand; PAM type: NRG; PAM sequence: TGG
ttataaccacgtaaactggc

SEQ ID NO: 76018 - DNA, 20 bp, Artificial Sequence
  Description of Artificial Sequence: Synthetic oligonucleotide
  Target: LAMA2; (-) strand; PAM type: NRG; PAM sequence: TGG
gttattataaccacgtaaac

SEQ ID NO: 76019 - DNA, 20 bp, Artificial Sequence
  Description of Artificial Sequence: Synthetic oligonucleotide
  Target: LAMA2; (-) strand; PAM type: NRG; PAM sequence: GAG
catatcgtagaggttaaaga

SEQ ID NO: 76020 - DNA, 20 bp, Artificial Sequence
  Description of Artificial Sequence: Synthetic oligonucleotide
  Target: LAMA2; (-) strand; PAM type: NRG; PAM sequence: GAG
atcatatcgtagaggttaaa

SEQ ID NO: 76021 - DNA, 20 bp, Artificial Sequence
  Description of Artificial Sequence: Synthetic oligonucleotide
  Target: LAMA2; (-) strand; PAM type: NRG; PAM sequence: AAG
ctatcatatcgtagaggtta

SEQ ID NO: 76022 - DNA, 20 bp, Artificial Sequence
  Description of Artificial Sequence: Synthetic oligonucleotide
  Target: LAMA2; (-) strand; PAM type: NRG; PAM sequence: AGG
gaaatactatcatatcgtag

SEQ ID NO: 76023 - DNA, 20 bp, Artificial Sequence
  Description of Artificial Sequence: Synthetic oligonucleotide
  Target: LAMA2; (-) strand; PAM type: NRG; PAM sequence: GAG
ggaaatactatcatatcgta

SEQ ID NO: 76024 - DNA, 20 bp, Artificial Sequence
  Description of Artificial Sequence: Synthetic oligonucleotide
  Target: LAMA2; (-) strand; PAM type: NRG; PAM sequence: TAG
ctggaaatactatcatatcg

SEQ ID NO: 76025 - DNA, 20 bp, Artificial Sequence
  Description of Artificial Sequence: Synthetic oligonucleotide
  Target: LAMA2; (-) strand; PAM type: NRG; PAM sequence: TGG
aaccttgagaataaaaaggc

SEQ ID NO: 76026 - DNA, 20 bp, Artificial Sequence
  Description of Artificial Sequence: Synthetic oligonucleotide
  Target: LAMA2; (-) strand; PAM type: NRG; PAM sequence: AGG
actgaaccttgagaataaaa

SEQ ID NO: 76027 - DNA, 20 bp, Artificial Sequence
  Description of Artificial Sequence: Synthetic oligonucleotide
  Target: LAMA2; (-) strand; PAM type: NRG; PAM sequence: AAG
tactgaaccttgagaataaa

SEQ ID NO: 76028 - DNA, 20 bp, Artificial Sequence
  Description of Artificial Sequence: Synthetic oligonucleotide
  Target: LAMA2; (-) strand; PAM type: NRG; PAM sequence: GAG
aatgttagctactgaacctt

SEQ ID NO: 76029 - DNA, 20 bp, Artificial Sequence
  Description of Artificial Sequence: Synthetic oligonucleotide
  Target: LAMA2; (-) strand; PAM type: NRG; PAM sequence: TAG
gagtgggcttaagccaatgt

SEQ ID NO: 76030 - DNA, 20 bp, Artificial Sequence
  Description of Artificial Sequence: Synthetic oligonucleotide
  Target: LAMA2; (-) strand; PAM type: NRG; PAM sequence: AAG
tcatagttaggagtgggctt

SEQ ID NO: 76031 - DNA, 20 bp, Artificial Sequence
  Description of Artificial Sequence: Synthetic oligonucleotide
  Target: LAMA2; (-) strand; PAM type: NRG; PAM sequence: GGG
gtcatttcatagttaggagt

SEQ ID NO: 76032 - DNA, 20 bp, Artificial Sequence
  Description of Artificial Sequence: Synthetic oligonucleotide
  Target: LAMA2; (-) strand; PAM type: NRG; PAM sequence: TGG
agtcatttcatagttaggag

SEQ ID NO: 76033 - DNA, 20 bp, Artificial Sequence
  Description of Artificial Sequence: Synthetic oligonucleotide
  Target: LAMA2; (-) strand; PAM type: NRG; PAM sequence: GAG
ctcagtcatttcatagttag

SEQ ID NO: 76034 - DNA, 20 bp, Artificial Sequence
  Description of Artificial Sequence: Synthetic oligonucleotide
  Target: LAMA2; (-) strand; PAM type: NRG; PAM sequence: AGG
agctcagtcatttcatagtt

SEQ ID NO: 76035 - DNA, 20 bp, Artificial Sequence
  Description of Artificial Sequence: Synthetic oligonucleotide
  Target: LAMA2; (-) strand; PAM type: NRG; PAM sequence: TAG
cagctcagtcatttcatagt

SEQ ID NO: 76036 - DNA, 20 bp, Artificial Sequence
  Description of Artificial Sequence: Synthetic oligonucleotide
  Target: LAMA2; (-) strand; PAM type: NRG; PAM sequence: TAG
gagccagctcagtcatttca

SEQ ID NO: 76037 - DNA, 20 bp, Artificial Sequence
  Description of Artificial Sequence: Synthetic oligonucleotide
  Target: LAMA2; (-) strand; PAM type: NRG; PAM sequence: CAG
cattccaggctgagccagct

SEQ ID NO: 76038 - DNA, 20 bp, Artificial Sequence
  Description of Artificial Sequence: Synthetic oligonucleotide
  Target: LAMA2; (-) strand; PAM type: NRG; PAM sequence: CAG
actctcattccaggctgagc

SEQ ID NO: 76039 - DNA, 20 bp, Artificial Sequence
  Description of Artificial Sequence: Synthetic oligonucleotide
  Target: LAMA2; (-) strand; PAM type: NRG; PAM sequence: GAG
ccccactctcattccaggct

SEQ ID NO: 76040 - DNA, 20 bp, Artificial Sequence
  Description of Artificial Sequence: Synthetic oligonucleotide
  Target: LAMA2; (-) strand; PAM type: NRG; PAM sequence: AGG
atgctccccactctcattcc

SEQ ID NO: 76041 - DNA, 20 bp, Artificial Sequence
  Description of Artificial Sequence: Synthetic oligonucleotide
  Target: LAMA2; (-) strand; PAM type: NRG; PAM sequence: CAG
catgctccccactctcattc

SEQ ID NO: 76042 - DNA, 20 bp, Artificial Sequence
  Description of Artificial Sequence: Synthetic oligonucleotide
  Target: LAMA2; (-) strand; PAM type: NRG; PAM sequence: TGG
agccatggcctcatgtggta

SEQ ID NO: 76043 - DNA, 20 bp, Artificial Sequence
  Description of Artificial Sequence: Synthetic oligonucleotide
  Target: LAMA2; (-) strand; PAM type: NRG; PAM sequence: TGG
tccctagccatggcctcatg

SEQ ID NO: 76044 - DNA, 20 bp, Artificial Sequence
  Description of Artificial Sequence: Synthetic oligonucleotide
  Target: LAMA2; (-) strand; PAM type: NRG; PAM sequence: TGG
gcctctgccttccctagcca

SEQ ID NO: 76045 - DNA, 20 bp, Artificial Sequence
  Description of Artificial Sequence: Synthetic oligonucleotide
  Target: LAMA2; (-) strand; PAM type: NRG; PAM sequence: TAG
tcagtagcctctgccttccc

SEQ ID NO: 76046 - DNA, 20 bp, Artificial Sequence
  Description of Artificial Sequence: Synthetic oligonucleotide
  Target: LAMA2; (-) strand; PAM type: NRG; PAM sequence: TAG
attccttcagtcttgttcag

SEQ ID NO: 76047 - DNA, 20 bp, Artificial Sequence
  Description of Artificial Sequence: Synthetic oligonucleotide
  Target: LAMA2; (-) strand; PAM type: NRG; PAM sequence: CAG
cttattccttcagtcttgtt

SEQ ID NO: 76048 - DNA, 20 bp, Artificial Sequence
  Description of Artificial Sequence: Synthetic oligonucleotide
  Target: LAMA2; (-) strand; PAM type: NRG; PAM sequence: CAG
ttttgctttgcttattcctt

SEQ ID NO: 76049 - DNA, 20 bp, Artificial Sequence
  Description of Artificial Sequence: Synthetic oligonucleotide
  Target: LAMA2; (-) strand; PAM type: NRG; PAM sequence: TGG
ctccaacttcagcaagcttg

SEQ ID NO: 76050 - DNA, 20 bp, Artificial Sequence
  Description of Artificial Sequence: Synthetic oligonucleotide
  Target: LAMA2; (-) strand; PAM type: NRG; PAM sequence: AAG
tctggtcctccaacttcagc

SEQ ID NO: 76051 - DNA, 20 bp, Artificial Sequence
  Description of Artificial Sequence: Synthetic oligonucleotide
  Target: LAMA2; (-) strand; PAM type: NRG; PAM sequence: CAG
tccttctggtcctccaactt

SEQ ID NO: 76052 - DNA, 20 bp, Artificial Sequence
  Description of Artificial Sequence: Synthetic oligonucleotide
  Target: LAMA2; (-) strand; PAM type: NRG; PAM sequence: TGG
agaccctcacctattccttc

SEQ ID NO: 76053 - DNA, 20 bp, Artificial Sequence
  Description of Artificial Sequence: Synthetic oligonucleotide
  Target: LAMA2; (-) strand; PAM type: NRG; PAM sequence: GAG
attaaccctacattagcact

SEQ ID NO: 76054 - DNA, 20 bp, Artificial Sequence
  Description of Artificial Sequence: Synthetic oligonucleotide
  Target: LAMA2; (-) strand; PAM type: NRG; PAM sequence: TAG
gccctggattaaccctacat

SEQ ID NO: 76055 - DNA, 20 bp, Artificial Sequence
  Description of Artificial Sequence: Synthetic oligonucleotide
  Target: LAMA2; (-) strand; PAM type: NRG; PAM sequence: TGG
tatttttgtctacttggccc

SEQ ID NO: 76056 - DNA, 20 bp, Artificial Sequence
  Description of Artificial Sequence: Synthetic oligonucleotide
  Target: LAMA2; (-) strand; PAM type: NRG; PAM sequence: TGG
tattattatttttgtctact

SEQ ID NO: 76057 - DNA, 20 bp, Artificial Sequence
  Description of Artificial Sequence: Synthetic oligonucleotide
  Target: LAMA2; (-) strand; PAM type: NRG; PAM sequence: TGG
tattattattattattgttg

SEQ ID NO: 76058 - DNA, 20 bp, Artificial Sequence
  Description of Artificial Sequence: Synthetic oligonucleotide
  Target: LAMA2; (-) strand; PAM type: NRG; PAM sequence: TAG
aataaatgtgcaacaaatgc

SEQ ID NO: 76059 - DNA, 20 bp, Artificial Sequence
  Description of Artificial Sequence: Synthetic oligonucleotide
  Target: LAMA2; (-) strand; PAM type: NRG; PAM sequence: TAG
tttatacatgggaaatttct

SEQ ID NO: 76060 - DNA, 20 bp, Artificial Sequence
  Description of Artificial Sequence: Synthetic oligonucleotide
  Target: LAMA2; (-) strand; PAM type: NRG; PAM sequence: GGG
gtatatatgaatttatacat

SEQ ID NO: 76061 - DNA, 20 bp, Artificial Sequence
  Description of Artificial Sequence: Synthetic oligonucleotide
  Target: LAMA2; (-) strand; PAM type: NRG; PAM sequence: TGG
agtatatatgaatttataca

SEQ ID NO: 76062 - DNA, 20 bp, Artificial Sequence
  Description of Artificial Sequence: Synthetic oligonucleotide
  Target: LAMA2; (-) strand; PAM type: NRG; PAM sequence: TAG
ctgtaaaatgcgacaagtat

SEQ ID NO: 76063 - DNA, 20 bp, Artificial Sequence
  Description of Artificial Sequence: Synthetic oligonucleotide
  Target: LAMA2; (-) strand; PAM type: NRG; PAM sequence: AAG
tctcaactgtaaaatgcgac

SEQ ID NO: 76064 - DNA, 20 bp, Artificial Sequence
  Description of Artificial Sequence: Synthetic oligonucleotide
  Target: LAMA2; (-) strand; PAM type: NRG; PAM sequence: AAG
ctagctgtggaaccctggga

SEQ ID NO: 76065 - DNA, 20 bp, Artificial Sequence
  Description of Artificial Sequence: Synthetic oligonucleotide
  Target: LAMA2; (-) strand; PAM type: NRG; PAM sequence: GGG
attactagctgtggaaccct

SEQ ID NO: 76066 - DNA, 20 bp, Artificial Sequence
  Description of Artificial Sequence: Synthetic oligonucleotide
  Target: LAMA2; (-) strand; PAM type: NRG; PAM sequence: TGG
aattactagctgtggaaccc

SEQ ID NO: 76067 - DNA, 20 bp, Artificial Sequence
  Description of Artificial Sequence: Synthetic oligonucleotide
  Target: LAMA2; (-) strand; PAM type: NRG; PAM sequence: TGG
gctccaaaaattactagctg

SEQ ID NO: 76068 - DNA, 20 bp, Artificial Sequence
  Description of Artificial Sequence: Synthetic oligonucleotide
  Target: LAMA2; (-) strand; PAM type: NRG; PAM sequence: TAG
atcacagctccaaaaattac

SEQ ID NO: 76069 - DNA, 20 bp, Artificial Sequence
  Description of Artificial Sequence: Synthetic oligonucleotide
  Target: LAMA2; (-) strand; PAM type: NRG; PAM sequence: CAG
aatacactgaattcaaatca

SEQ ID NO: 76070 - DNA, 20 bp, Artificial Sequence
  Description of Artificial Sequence: Synthetic oligonucleotide
  Target: LAMA2; (-) strand; PAM type: NRG; PAM sequence: GAG
ttgtacctttctggtgctct

SEQ ID NO: 76071 - DNA, 20 bp, Artificial Sequence
  Description of Artificial Sequence: Synthetic oligonucleotide
  Target: LAMA2; (-) strand; PAM type: NRG; PAM sequence: TGG
cttttagctttgtacctttc

SEQ ID NO: 76072 - DNA, 20 bp, Artificial Sequence
  Description of Artificial Sequence: Synthetic oligonucleotide
  Target: LAMA2; (-) strand; PAM type: NRG; PAM sequence: TAG
cagacacagaaggaaacttt

SEQ ID NO: 76073 - DNA, 20 bp, Artificial Sequence
  Description of Artificial Sequence: Synthetic oligonucleotide
  Target: LAMA2; (-) strand; PAM type: NRG; PAM sequence: AGG
caggaaaccccagacacaga

SEQ ID NO: 76074 - DNA, 20 bp, Artificial Sequence
  Description of Artificial Sequence: Synthetic oligonucleotide
  Target: LAMA2; (-) strand; PAM type: NRG; PAM sequence: AAG
ccaggaaaccccagacacag

SEQ ID NO: 76075 - DNA, 20 bp, Artificial Sequence
  Description of Artificial Sequence: Synthetic oligonucleotide
  Target: LAMA2; (-) strand; PAM type: NRG; PAM sequence: CAG
tttccaggaaaccccagaca

SEQ ID NO: 76076 - DNA, 20 bp, Artificial Sequence
  Description of Artificial Sequence: Synthetic oligonucleotide
  Target: LAMA2; (-) strand; PAM type: NRG; PAM sequence: CAG
gcagattttccaggaaaccc

SEQ ID NO: 76077 - DNA, 20 bp, Artificial Sequence
  Description of Artificial Sequence: Synthetic oligonucleotide
  Target: LAMA2; (-) strand; PAM type: NRG; PAM sequence: AGG
tagggcagagcagattttcc

SEQ ID NO: 76078 - DNA, 20 bp, Artificial Sequence
  Description of Artificial Sequence: Synthetic oligonucleotide
  Target: LAMA2; (-) strand; PAM type: NRG; PAM sequence: CAG
atagggcagagcagattttc

SEQ ID NO: 76079 - DNA, 20 bp, Artificial Sequence
  Description of Artificial Sequence: Synthetic oligonucleotide
  Target: LAMA2; (-) strand; PAM type: NRG; PAM sequence: CAG
cctgagcttatagggcagag

SEQ ID NO: 76080 - DNA, 20 bp, Artificial Sequence
  Description of Artificial Sequence: Synthetic oligonucleotide
  Target: LAMA2; (-) strand; PAM type: NRG; PAM sequence: GAG
actcctgagcttatagggca

SEQ ID NO: 76081 - DNA, 20 bp, Artificial Sequence
  Description of Artificial Sequence: Synthetic oligonucleotide
  Target: LAMA2; (-) strand; PAM type: NRG; PAM sequence: CAG
ggactcctgagcttataggg

SEQ ID NO: 76082 - DNA, 20 bp, Artificial Sequence
  Description of Artificial Sequence: Synthetic oligonucleotide
  Target: LAMA2; (-) strand; PAM type: NRG; PAM sequence: GGG
gggggactcctgagcttata

SEQ ID NO: 76083 - DNA, 20 bp, Artificial Sequence
  Description of Artificial Sequence: Synthetic oligonucleotide
  Target: LAMA2; (-) strand; PAM type: NRG; PAM sequence: AGG
ggggggactcctgagcttat

SEQ ID NO: 76084 - DNA, 20 bp, Artificial Sequence
  Description of Artificial Sequence: Synthetic oligonucleotide
  Target: LAMA2; (-) strand; PAM type: NRG; PAM sequence: TAG
aggggggactcctgagctta

SEQ ID NO: 76085 - DNA, 20 bp, Artificial Sequence
  Description of Artificial Sequence: Synthetic oligonucleotide
  Target: LAMA2; (-) strand; PAM type: NRG; PAM sequence: GAG
tgctaggaggggggactcct

SEQ ID NO: 76086 - DNA, 20 bp, Artificial Sequence
  Description of Artificial Sequence: Synthetic oligonucleotide
  Target: LAMA2; (-) strand; PAM type: NRG; PAM sequence: GGG
agcaggaactgctaggaggg

SEQ ID NO: 76087 - DNA, 20 bp, Artificial Sequence
  Description of Artificial Sequence: Synthetic oligonucleotide
  Target: LAMA2; (-) strand; PAM type: NRG; PAM sequence: GGG
cagcaggaactgctaggagg

SEQ ID NO: 76088 - DNA, 20 bp, Artificial Sequence
  Description of Artificial Sequence: Synthetic oligonucleotide
  Target: LAMA2; (-) strand; PAM type: NRG; PAM sequence: GGG
tcagcaggaactgctaggag

SEQ ID NO: 76089 - DNA, 20 bp, Artificial Sequence
  Description of Artificial Sequence: Synthetic oligonucleotide
  Target: LAMA2; (-) strand; PAM type: NRG; PAM sequence: GGG
ttcagcaggaactgctagga

SEQ ID NO: 76090 - DNA, 20 bp, Artificial Sequence
  Description of Artificial Sequence: Synthetic oligonucleotide
  Target: LAMA2; (-) strand; PAM type: NRG; PAM sequence: AGG
cttcagcaggaactgctagg

SEQ ID NO: 76091 - DNA, 20 bp, Artificial Sequence
  Description of Artificial Sequence: Synthetic oligonucleotide
  Target: LAMA2; (-) strand; PAM type: NRG; PAM sequence: GAG
gcttcagcaggaactgctag

SEQ ID NO: 76092 - DNA, 20 bp, Artificial Sequence
  Description of Artificial Sequence: Synthetic oligonucleotide
  Target: LAMA2; (-) strand; PAM type: NRG; PAM sequence: AGG
gagcttcagcaggaactgct

SEQ ID NO: 76093 - DNA, 20 bp, Artificial Sequence
  Description of Artificial Sequence: Synthetic oligonucleotide
  Target: LAMA2; (-) strand; PAM type: NRG; PAM sequence: TAG
agagcttcagcaggaactgc

SEQ ID NO: 76094 - DNA, 20 bp, Artificial Sequence
  Description of Artificial Sequence: Synthetic oligonucleotide
  Target: LAMA2; (-) strand; PAM type: NRG; PAM sequence: AGG
atctcacatagagcttcagc

SEQ ID NO: 76095 - DNA, 20 bp, Artificial Sequence
  Description of Artificial Sequence: Synthetic oligonucleotide
  Target: LAMA2; (-) strand; PAM type: NRG; PAM sequence: CAG
aatctcacatagagcttcag

SEQ ID NO: 76096 - DNA, 20 bp, Artificial Sequence
  Description of Artificial Sequence: Synthetic oligonucleotide
  Target: LAMA2; (-) strand; PAM type: NRG; PAM sequence: CAG
tgcaatctcacatagagctt

SEQ ID NO: 76097 - DNA, 20 bp, Artificial Sequence
  Description of Artificial Sequence: Synthetic oligonucleotide
  Target: LAMA2; (-) strand; PAM type: NRG; PAM sequence: GAG
ggtctgtgcaatctcacata

SEQ ID NO: 76098 - DNA, 20 bp, Artificial Sequence
  Description of Artificial Sequence: Synthetic oligonucleotide
  Target: LAMA2; (-) strand; PAM type: NRG; PAM sequence: TAG
caggtctgtgcaatctcaca

SEQ ID NO: 76099 - DNA, 20 bp, Artificial Sequence
  Description of Artificial Sequence: Synthetic oligonucleotide
  Target: LAMA2; (-) strand; PAM type: NRG; PAM sequence: AGG
ataagcagcagctcaaactc

SEQ ID NO: 76100 - DNA, 20 bp, Artificial Sequence
  Description of Artificial Sequence: Synthetic oligonucleotide
  Target: LAMA2; (-) strand; PAM type: NRG; PAM sequence: CAG
aataagcagcagctcaaact

SEQ ID NO: 76101 - DNA, 20 bp, Artificial Sequence
  Description of Artificial Sequence: Synthetic oligonucleotide
  Target: LAMA2; (-) strand; PAM type: NRG; PAM sequence: CAG
ccaaaataaaaaataagcag

SEQ ID NO: 76102 - DNA, 20 bp, Artificial Sequence
  Description of Artificial Sequence: Synthetic oligonucleotide
  Target: LAMA2; (-) strand; PAM type: NRG; PAM sequence: CAG
accccaaaataaaaaataag

SEQ ID NO: 76103 - DNA, 20 bp, Artificial Sequence
  Description of Artificial Sequence: Synthetic oligonucleotide
  Target: LAMA2; (-) strand; PAM type: NRG; PAM sequence: AAG
aaaaccccaaaataaaaaat

SEQ ID NO: 76104 - DNA, 20 bp, Artificial Sequence
  Description of Artificial Sequence: Synthetic oligonucleotide
  Target: LAMA2; (-) strand; PAM type: NRG; PAM sequence: AAG
ttcatcaaagctaaaaggta

SEQ ID NO: 76105 - DNA, 20 bp, Artificial Sequence
  Description of Artificial Sequence: Synthetic oligonucleotide
  Target: LAMA2; (-) strand; PAM type: NRG; PAM sequence: AGG
agtaattcatcaaagctaaa

SEQ ID NO: 76106 - DNA, 20 bp, Artificial Sequence
  Description of Artificial Sequence: Synthetic oligonucleotide
  Target: LAMA2; (-) strand; PAM type: NRG; PAM sequence: AAG
aagtaattcatcaaagctaa

SEQ ID NO: 76107 - DNA, 20 bp, Artificial Sequence
  Description of Artificial Sequence: Synthetic oligonucleotide
  Target: LAMA2; (-) strand; PAM type: NRG; PAM sequence: AAG
aaaaatgaagtaattcatca

SEQ ID NO: 76108 - DNA, 20 bp, Artificial Sequence
  Description of Artificial Sequence: Synthetic oligonucleotide
  Target: LAMA2; (-) strand; PAM type: NRG; PAM sequence: AAG
acctattagatataaaaatg

SEQ ID NO: 76109 - DNA, 20 bp, Artificial Sequence
  Description of Artificial Sequence: Synthetic oligonucleotide
  Target: LAMA2; (-) strand; PAM type: NRG; PAM sequence: TAG
tgaaggttaaaaaaacctat

SEQ ID NO: 76110 - DNA, 20 bp, Artificial Sequence
  Description of Artificial Sequence: Synthetic oligonucleotide
  Target: LAMA2; (-) strand; PAM type: NRG; PAM sequence: AGG
taagaaatcaattaaagtga

SEQ ID NO: 76111 - DNA, 20 bp, Artificial Sequence
  Description of Artificial Sequence: Synthetic oligonucleotide
  Target: LAMA2; (-) strand; PAM type: NRG; PAM sequence: AAG
ttaagaaatcaattaaagtg

SEQ ID NO: 76112 - DNA, 20 bp, Artificial Sequence
  Description of Artificial Sequence: Synthetic oligonucleotide
  Target: LAMA2; (-) strand; PAM type: NRG; PAM sequence: AAG
agaggttaagaaatcaatta

SEQ ID NO: 76113 - DNA, 20 bp, Artificial Sequence
  Description of Artificial Sequence: Synthetic oligonucleotide
  Target: LAMA2; (-) strand; PAM type: NRG; PAM sequence: AAG
atgagcaagataaagaggtt

SEQ ID NO: 76114 - DNA, 20 bp, Artificial Sequence
  Description of Artificial Sequence: Synthetic oligonucleotide
  Target: LAMA2; (-) strand; PAM type: NRG; PAM sequence: AGG
aaaaaatgagcaagataaag

SEQ ID NO: 76115 - DNA, 20 bp, Artificial Sequence
  Description of Artificial Sequence: Synthetic oligonucleotide
  Target: LAMA2; (-) strand; PAM type: NRG; PAM sequence: GAG
taaaaaatgagcaagataaa

SEQ ID NO: 76116 - DNA, 20 bp, Artificial Sequence
  Description of Artificial Sequence: Synthetic oligonucleotide
  Target: LAMA2; (-) strand; PAM type: NRG; PAM sequence: AAG
attaaaaaatgagcaagata

SEQ ID NO: 76117 - DNA, 20 bp, Artificial Sequence
  Description of Artificial Sequence: Synthetic oligonucleotide
  Target: LAMA2; (-) strand; PAM type: NRG; PAM sequence: AAG
aaaaagattaaaaaatgagc

SEQ ID NO: 76118 - DNA, 20 bp, Artificial Sequence
  Description of Artificial Sequence: Synthetic oligonucleotide
  Target: LAMA2; (-) strand; PAM type: NRG; PAM sequence: GAG
cattaaaaagattaaaaaat

SEQ ID NO: 76119 - DNA, 20 bp, Artificial Sequence
  Description of Artificial Sequence: Synthetic oligonucleotide
  Target: LAMA2; (-) strand; PAM type: NRG; PAM sequence: AAG
agcattttaaaatcattaaa

SEQ ID NO: 76120 - DNA, 20 bp, Artificial Sequence
  Description of Artificial Sequence: Synthetic oligonucleotide
  Target: LAMA2; (-) strand; PAM type: NRG; PAM sequence: CAG
caagataaaattattaaaat

SEQ ID NO: 76121 - DNA, 20 bp, Artificial Sequence
  Description of Artificial Sequence: Synthetic oligonucleotide
  Target: LAMA2; (-) strand; PAM type: NRG; PAM sequence: AAG
ctgataaatataaatatgcc

SEQ ID NO: 76122 - DNA, 20 bp, Artificial Sequence
  Description of Artificial Sequence: Synthetic oligonucleotide
  Target: LAMA2; (-) strand; PAM type: NRG; PAM sequence: CAG
tgccagaataaagcttgaag

SEQ ID NO: 76123 - DNA, 20 bp, Artificial Sequence
  Description of Artificial Sequence: Synthetic oligonucleotide
  Target: LAMA2; (-) strand; PAM type: NRG; PAM sequence: AAG
atttgccagaataaagcttg

SEQ ID NO: 76124 - DNA, 20 bp, Artificial Sequence
  Description of Artificial Sequence: Synthetic oligonucleotide
  Target: LAMA2; (-) strand; PAM type: NRG; PAM sequence: AAG
atacatcatttgccagaata

SEQ ID NO: 76125 - DNA, 20 bp, Artificial Sequence
  Description of Artificial Sequence: Synthetic oligonucleotide
  Target: LAMA2; (-) strand; PAM type: NRG; PAM sequence: CAG
tataaatatacatcatttgc

SEQ ID NO: 76126 - DNA, 20 bp, Artificial Sequence
  Description of Artificial Sequence: Synthetic oligonucleotide
  Target: LAMA2; (-) strand; PAM type: NRG; PAM sequence: AAG
atatttaaaaaacaacacaa

SEQ ID NO: 76127 - DNA, 20 bp, Artificial Sequence
  Description of Artificial Sequence: Synthetic oligonucleotide
  Target: LAMA2; (-) strand; PAM type: NRG; PAM sequence: CAG
aactgacatacattaaattc

SEQ ID NO: 76128 - DNA, 20 bp, Artificial Sequence
  Description of Artificial Sequence: Synthetic oligonucleotide
  Target: LAMA2; (-) strand; PAM type: NRG; PAM sequence: AAG
aaagcaaacaaaattctaac

SEQ ID NO: 76129 - DNA, 20 bp, Artificial Sequence
  Description of Artificial Sequence: Synthetic oligonucleotide
  Target: LAMA2; (-) strand; PAM type: NRG; PAM sequence: AAG
agtcactttaaaaattatta

SEQ ID NO: 76130 - DNA, 20 bp, Artificial Sequence
  Description of Artificial Sequence: Synthetic oligonucleotide
  Target: LAMA2; (-) strand; PAM type: NRG; PAM sequence: AAG
atgatcaaaagtaatgcaaa

SEQ ID NO: 76131 - DNA, 20 bp, Artificial Sequence
  Description of Artificial Sequence: Synthetic oligonucleotide
  Target: LAMA2; (-) strand; PAM type: NRG; PAM sequence: AAG
gctaagagtaaaatgatcaa

SEQ ID NO: 76132 - DNA, 20 bp, Artificial Sequence
  Description of Artificial Sequence: Synthetic oligonucleotide
  Target: LAMA2; (-) strand; PAM type: NRG; PAM sequence: GAG
aaaagctcaaaataagctaa

SEQ ID NO: 76133 - DNA, 20 bp, Artificial Sequence
  Description of Artificial Sequence: Synthetic oligonucleotide
  Target: LAMA2; (-) strand; PAM type: NRG; PAM sequence: AAG
tcaaaagctcaaaataagct

SEQ ID NO: 76134 - DNA, 20 bp, Artificial Sequence
  Description of Artificial Sequence: Synthetic oligonucleotide
  Target: LAMA2; (-) strand; PAM type: NRG; PAM sequence: AAG
agacatcaaaagctcaaaat

SEQ ID NO: 76135 - DNA, 20 bp, Artificial Sequence
  Description of Artificial Sequence: Synthetic oligonucleotide
  Target: LAMA2; (-) strand; PAM type: NRG; PAM sequence: AAG
aagttatatttagacatcaa

SEQ ID NO: 76136 - DNA, 20 bp, Artificial Sequence
  Description of Artificial Sequence: Synthetic oligonucleotide
  Target: LAMA2; (-) strand; PAM type: NRG; PAM sequence: TAG
tagacaaacaaagttatatt

SEQ ID NO: 76137 - DNA, 20 bp, Artificial Sequence
  Description of Artificial Sequence: Synthetic oligonucleotide
  Target: LAMA2; (-) strand; PAM type: NRG; PAM sequence: AAG
actaaaacactagacaaaca

SEQ ID NO: 76138 - DNA, 20 bp, Artificial Sequence
  Description of Artificial Sequence: Synthetic oligonucleotide
  Target: LAMA2; (-) strand; PAM type: NRG; PAM sequence: TAG
gactaaagacactaaaacac

SEQ ID NO: 76139 - DNA, 20 bp, Artificial Sequence
  Description of Artificial Sequence: Synthetic oligonucleotide
  Target: LAMA2; (-) strand; PAM type: NRG; PAM sequence: AAG
ccatgtagaagcaatgacta

SEQ ID NO: 76140 - DNA, 20 bp, Artificial Sequence
  Description of Artificial Sequence: Synthetic oligonucleotide
  Target: LAMA2; (-) strand; PAM type: NRG; PAM sequence: AAG
tatttcctattgccatgtag

SEQ ID NO: 76141 - DNA, 20 bp, Artificial Sequence
  Description of Artificial Sequence: Synthetic oligonucleotide
  Target: LAMA2; (-) strand; PAM type: NRG; PAM sequence: TAG
tcatatttcctattgccatg

SEQ ID NO: 76142 - DNA, 20 bp, Artificial Sequence
  Description of Artificial Sequence: Synthetic oligonucleotide
  Target: LAMA2; (-) strand; PAM type: NRG; PAM sequence: TGG
tactttcactgaggttttta

SEQ ID NO: 76143 - DNA, 20 bp, Artificial Sequence
  Description of Artificial Sequence: Synthetic oligonucleotide
  Target: LAMA2; (-) strand; PAM type: NRG; PAM sequence: AGG
aatgtgggttactttcactg

SEQ ID NO: 76144 - DNA, 20 bp, Artificial Sequence
  Description of Artificial Sequence: Synthetic oligonucleotide
  Target: LAMA2; (-) strand; PAM type: NRG; PAM sequence: GAG
aaatgtgggttactttcact

SEQ ID NO: 76145 - DNA, 20 bp, Artificial Sequence
  Description of Artificial Sequence: Synthetic oligonucleotide
  Target: LAMA2; (-) strand; PAM type: NRG; PAM sequence: GGG
tacaagccttctctaaatgt

SEQ ID NO: 76146 - DNA, 20 bp, Artificial Sequence
  Description of Artificial Sequence: Synthetic oligonucleotide
  Target: LAMA2; (-) strand; PAM type: NRG; PAM sequence: TGG
atacaagccttctctaaatg

SEQ ID NO: 76147 - DNA, 20 bp, Artificial Sequence
  Description of Artificial Sequence: Synthetic oligonucleotide
  Target: LAMA2; (-) strand; PAM type: NRG; PAM sequence: AAG
ggggcgggattaaggaatac

SEQ ID NO: 76148 - DNA, 20 bp, Artificial Sequence
  Description of Artificial Sequence: Synthetic oligonucleotide
  Target: LAMA2; (-) strand; PAM type: NRG; PAM sequence: AGG
tgtgtagaggggcgggatta

SEQ ID NO: 76149 - DNA, 20 bp, Artificial Sequence
  Description of Artificial Sequence: Synthetic oligonucleotide
  Target: LAMA2; (-) strand; PAM type: NRG; PAM sequence: AAG
gtgtgtagaggggcgggatt

SEQ ID NO: 76150 - DNA, 20 bp, Artificial Sequence
  Description of Artificial Sequence: Synthetic oligonucleotide
  Target: LAMA2; (-) strand; PAM type: NRG; PAM sequence: GGG
ggtggggtgtgtagaggggc

SEQ ID NO: 76151 - DNA, 20 bp, Artificial Sequence
  Description of Artificial Sequence: Synthetic oligonucleotide
  Target: LAMA2; (-) strand; PAM type: NRG; PAM sequence: CGG
gggtggggtgtgtagagggg

SEQ ID NO: 76152 - DNA, 20 bp, Artificial Sequence
  Description of Artificial Sequence: Synthetic oligonucleotide
  Target: LAMA2; (-) strand; PAM type: NRG; PAM sequence: GGG
aatgggtggggtgtgtagag

SEQ ID NO: 76153 - DNA, 20 bp, Artificial Sequence
  Description of Artificial Sequence: Synthetic oligonucleotide
  Target: LAMA2; (-) strand; PAM type: NRG; PAM sequence: GGG
gaatgggtggggtgtgtaga

SEQ ID NO: 76154 - DNA, 20 bp, Artificial Sequence
  Description of Artificial Sequence: Synthetic oligonucleotide
  Target: LAMA2; (-) strand; PAM type: NRG; PAM sequence: AGG
tgaatgggtggggtgtgtag

SEQ ID NO: 76155 - DNA, 20 bp, Artificial Sequence
  Description of Artificial Sequence: Synthetic oligonucleotide
  Target: LAMA2; (-) strand; PAM type: NRG; PAM sequence: GAG
ttgaatgggtggggtgtgta

SEQ ID NO: 76156 - DNA, 20 bp, Artificial Sequence
  Description of Artificial Sequence: Synthetic oligonucleotide
  Target: LAMA2; (-) strand; PAM type: NRG; PAM sequence: TAG
ggttgaatgggtggggtgtg

SEQ ID NO: 76157 - DNA, 20 bp, Artificial Sequence
  Description of Artificial Sequence: Synthetic oligonucleotide
  Target: LAMA2; (-) strand; PAM type: NRG; PAM sequence: GGG
acagatgggttgaatgggtg

SEQ ID NO: 76158 - DNA, 20 bp, Artificial Sequence
  Description of Artificial Sequence: Synthetic oligonucleotide
  Target: LAMA2; (-) strand; PAM type: NRG; PAM sequence: GGG
tacagatgggttgaatgggt

SEQ ID NO: 76159 - DNA, 20 bp, Artificial Sequence
  Description of Artificial Sequence: Synthetic oligonucleotide
  Target: LAMA2; (-) strand; PAM type: NRG; PAM sequence: TGG
ctacagatgggttgaatggg

SEQ ID NO: 76160 - DNA, 20 bp, Artificial Sequence
  Description of Artificial Sequence: Synthetic oligonucleotide
  Target: LAMA2; (-) strand; PAM type: NRG; PAM sequence: GGG
aggctacagatgggttgaat

SEQ ID NO: 76161 - DNA, 20 bp, Artificial Sequence
  Description of Artificial Sequence: Synthetic oligonucleotide
  Target: LAMA2; (-) strand; PAM type: NRG; PAM sequence: TGG
gaggctacagatgggttgaa

SEQ ID NO: 76162 - DNA, 20 bp, Artificial Sequence
  Description of Artificial Sequence: Synthetic oligonucleotide
  Target: LAMA2; (-) strand; PAM type: NRG; PAM sequence: GGG
ctgaaagggaggctacagat

SEQ ID NO: 76163 - DNA, 20 bp, Artificial Sequence
  Description of Artificial Sequence: Synthetic oligonucleotide
  Target: LAMA2; (-) strand; PAM type: NRG; PAM sequence: TGG
gctgaaagggaggctacaga

SEQ ID NO: 76164 - DNA, 20 bp, Artificial Sequence
  Description of Artificial Sequence: Synthetic oligonucleotide
  Target: LAMA2; (-) strand; PAM type: NRG; PAM sequence: CAG
aacagctgaaagggaggcta

SEQ ID NO: 76165 - DNA, 20 bp, Artificial Sequence
  Description of Artificial Sequence: Synthetic oligonucleotide
  Target: LAMA2; (-) strand; PAM type: NRG; PAM sequence: AGG
tttaagaacagctgaaaggg

SEQ ID NO: 76166 - DNA, 20 bp, Artificial Sequence
  Description of Artificial Sequence: Synthetic oligonucleotide
  Target: LAMA2; (-) strand; PAM type: NRG; PAM sequence: GAG
ttttaagaacagctgaaagg

SEQ ID NO: 76167 - DNA, 20 bp, Artificial Sequence
  Description of Artificial Sequence: Synthetic oligonucleotide
  Target: LAMA2; (-) strand; PAM type: NRG; PAM sequence: GGG
tcttttaagaacagctgaaa

SEQ ID NO: 76168 - DNA, 20 bp, Artificial Sequence
  Description of Artificial Sequence: Synthetic oligonucleotide
  Target: LAMA2; (-) strand; PAM type: NRG; PAM sequence: AGG
gtcttttaagaacagctgaa

SEQ ID NO: 76169 - DNA, 20 bp, Artificial Sequence
  Description of Artificial Sequence: Synthetic oligonucleotide
  Target: LAMA2; (-) strand; PAM type: NRG; PAM sequence: AAG
ggtcttttaagaacagctga

SEQ ID NO: 76170 - DNA, 20 bp, Artificial Sequence
  Description of Artificial Sequence: Synthetic oligonucleotide
  Target: LAMA2; (-) strand; PAM type: NRG; PAM sequence: CAG
aagggaaggtcttttaagaa

SEQ ID NO: 76171 - DNA, 20 bp, Artificial Sequence
  Description of Artificial Sequence: Synthetic oligonucleotide
  Target: LAMA2; (-) strand; PAM type: NRG; PAM sequence: AAG
cttaaaagggaaggtctttt

SEQ ID NO: 76172 - DNA, 20 bp, Artificial Sequence
  Description of Artificial Sequence: Synthetic oligonucleotide
  Target: LAMA2; (-) strand; PAM type: NRG; PAM sequence: AGG
gtaagttcccttaaaaggga

SEQ ID NO: 76173 - DNA, 20 bp, Artificial Sequence
  Description of Artificial Sequence: Synthetic oligonucleotide
  Target: LAMA2; (-) strand; PAM type: NRG; PAM sequence: AAG
tgtaagttcccttaaaaggg

SEQ ID NO: 76174 - DNA, 20 bp, Artificial Sequence
  Description of Artificial Sequence: Synthetic oligonucleotide
  Target: LAMA2; (-) strand; PAM type: NRG; PAM sequence: GGG
aaatgtaagttcccttaaaa

SEQ ID NO: 76175 - DNA, 20 bp, Artificial Sequence
  Description of Artificial Sequence: Synthetic oligonucleotide
  Target: LAMA2; (-) strand; PAM type: NRG; PAM sequence: AGG
aaaatgtaagttcccttaaa

SEQ ID NO: 76176 - DNA, 20 bp, Artificial Sequence
  Description of Artificial Sequence: Synthetic oligonucleotide
  Target: LAMA2; (-) strand; PAM type: NRG; PAM sequence: AAG
gaaaatgtaagttcccttaa

SEQ ID NO: 76177 - DNA, 20 bp, Artificial Sequence
  Description of Artificial Sequence: Synthetic oligonucleotide
  Target: LAMA2; (-) strand; PAM type: NRG; PAM sequence: AAG
tagtattgaagggaaaatgt

SEQ ID NO: 76178 - DNA, 20 bp, Artificial Sequence
  Description of Artificial Sequence: Synthetic oligonucleotide
  Target: LAMA2; (-) strand; PAM type: NRG; PAM sequence: GGG
ttttgggatttagtattgaa

SEQ ID NO: 76179 - DNA, 20 bp, Artificial Sequence
  Description of Artificial Sequence: Synthetic oligonucleotide
  Target: LAMA2; (-) strand; PAM type: NRG; PAM sequence: AGG
cttttgggatttagtattga

SEQ ID NO: 76180 - DNA, 20 bp, Artificial Sequence
  Description of Artificial Sequence: Synthetic oligonucleotide
  Target: LAMA2; (-) strand; PAM type: NRG; PAM sequence: AAG
gcttttgggatttagtattg

SEQ ID NO: 76181 - DNA, 20 bp, Artificial Sequence
  Description of Artificial Sequence: Synthetic oligonucleotide
  Target: LAMA2; (-) strand; PAM type: NRG; PAM sequence: TAG
tgctattagcttttgggatt

SEQ ID NO: 76182 - DNA, 20 bp, Artificial Sequence
  Description of Artificial Sequence: Synthetic oligonucleotide
  Target: LAMA2; (-) strand; PAM type: NRG; PAM sequence: GGG
ctgtattgctattagctttt

SEQ ID NO: 76183 - DNA, 20 bp, Artificial Sequence
  Description of Artificial Sequence: Synthetic oligonucleotide
  Target: LAMA2; (-) strand; PAM type: NRG; PAM sequence: TGG
tctgtattgctattagcttt

SEQ ID NO: 76184 - DNA, 20 bp, Artificial Sequence
  Description of Artificial Sequence: Synthetic oligonucleotide
  Target: LAMA2; (-) strand; PAM type: NRG; PAM sequence: TAG
tggatcttctgtattgctat

SEQ ID NO: 76185 - DNA, 20 bp, Artificial Sequence
  Description of Artificial Sequence: Synthetic oligonucleotide
  Target: LAMA2; (-) strand; PAM type: NRG; PAM sequence: TGG
tgggaagaaatgttggtcag

SEQ ID NO: 76186 - DNA, 20 bp, Artificial Sequence
  Description of Artificial Sequence: Synthetic oligonucleotide
  Target: LAMA2; (-) strand; PAM type: NRG; PAM sequence: CAG
tcttgggaagaaatgttggt

SEQ ID NO: 76187 - DNA, 20 bp, Artificial Sequence
  Description of Artificial Sequence: Synthetic oligonucleotide
  Target: LAMA2; (-) strand; PAM type: NRG; PAM sequence: TGG
attgtcttgggaagaaatgt

SEQ ID NO: 76188 - DNA, 20 bp, Artificial Sequence
  Description of Artificial Sequence: Synthetic oligonucleotide
  Target: LAMA2; (-) strand; PAM type: NRG; PAM sequence: AAG
gttactattattgtcttggg

SEQ ID NO: 76189 - DNA, 20 bp, Artificial Sequence
  Description of Artificial Sequence: Synthetic oligonucleotide
  Target: LAMA2; (-) strand; PAM type: NRG; PAM sequence: GGG
taagttactattattgtctt

SEQ ID NO: 76190 - DNA, 20 bp, Artificial Sequence
  Description of Artificial Sequence: Synthetic oligonucleotide
  Target: LAMA2; (-) strand; PAM type: NRG; PAM sequence: TGG
ataagttactattattgtct

SEQ ID NO: 76191 - DNA, 20 bp, Artificial Sequence
  Description of Artificial Sequence: Synthetic oligonucleotide
  Target: LAMA2; (-) strand; PAM type: NRG; PAM sequence: AAG
gctttaacaattatgcatat

SEQ ID NO: 76192 - DNA, 20 bp, Artificial Sequence
  Description of Artificial Sequence: Synthetic oligonucleotide
  Target: LAMA2; (-) strand; PAM type: NRG; PAM sequence: TAG
acatgtcttaggaacttgga

SEQ ID NO: 76193 - DNA, 20 bp, Artificial Sequence
  Description of Artificial Sequence: Synthetic oligonucleotide
  Target: LAMA2; (-) strand; PAM type: NRG; PAM sequence: TGG
aataacatgtcttaggaact

SEQ ID NO: 76194 - DNA, 20 bp, Artificial Sequence
  Description of Artificial Sequence: Synthetic oligonucleotide
  Target: LAMA2; (-) strand; PAM type: NRG; PAM sequence: AGG
ttagaggaataacatgtctt

SEQ ID NO: 76195 - DNA, 20 bp, Artificial Sequence
  Description of Artificial Sequence: Synthetic oligonucleotide
  Target: LAMA2; (-) strand; PAM type: NRG; PAM sequence: TAG
tttagaggaataacatgtct

SEQ ID NO: 76196 - DNA, 20 bp, Artificial Sequence
  Description of Artificial Sequence: Synthetic oligonucleotide
  Target: LAMA2; (-) strand; PAM type: NRG; PAM sequence: AGG
ttcatatagtaaacttttag

SEQ ID NO: 76197 - DNA, 20 bp, Artificial Sequence
  Description of Artificial Sequence: Synthetic oligonucleotide
  Target: LAMA2; (-) strand; PAM type: NRG; PAM sequence: GAG
tttcatatagtaaactttta

SEQ ID NO: 76198 - DNA, 20 bp, Artificial Sequence
  Description of Artificial Sequence: Synthetic oligonucleotide
  Target: LAMA2; (-) strand; PAM type: NRG; PAM sequence: TAG
catttcatatagtaaacttt

SEQ ID NO: 76199 - DNA, 20 bp, Artificial Sequence
  Description of Artificial Sequence: Synthetic oligonucleotide
  Target: LAMA2; (-) strand; PAM type: NRG; PAM sequence: TAG
cattagtcaatcatttcata

SEQ ID NO: 76200 - DNA, 20 bp, Artificial Sequence
  Description of Artificial Sequence: Synthetic oligonucleotide
  Target: LAMA2; (-) strand; PAM type: NRG; PAM sequence: TAG
tatagtatttgttcaaccat

SEQ ID NO: 76201 - DNA, 20 bp, Artificial Sequence
  Description of Artificial Sequence: Synthetic oligonucleotide
  Target: LAMA2; (-) strand; PAM type: NRG; PAM sequence: TAG
tcaccttccttatgtgttta

SEQ ID NO: 76202 - DNA, 20 bp, Artificial Sequence
  Description of Artificial Sequence: Synthetic oligonucleotide
  Target: LAMA2; (-) strand; PAM type: NRG; PAM sequence: GAG
cgttttgaggaatcttctgt

SEQ ID NO: 76203 - DNA, 20 bp, Artificial Sequence
  Description of Artificial Sequence: Synthetic oligonucleotide
  Target: LAMA2; (-) strand; PAM type: NRG; PAM sequence: AGG
caaatcaggtatgcgttttg

SEQ ID NO: 76204 - DNA, 20 bp, Artificial Sequence
  Description of Artificial Sequence: Synthetic oligonucleotide
  Target: LAMA2; (-) strand; PAM type: NRG; PAM sequence: GAG
ccaaatcaggtatgcgtttt

SEQ ID NO: 76205 - DNA, 20 bp, Artificial Sequence
  Description of Artificial Sequence: Synthetic oligonucleotide
  Target: LAMA2; (-) strand; PAM type: NRG; PAM sequence: AGG
atccttattaaaaccaaatc

SEQ ID NO: 76206 - DNA, 20 bp, Artificial Sequence
  Description of Artificial Sequence: Synthetic oligonucleotide
  Target: LAMA2; (-) strand; PAM type: NRG; PAM sequence: CAG
gatccttattaaaaccaaat

SEQ ID NO: 76207 - DNA, 20 bp, Artificial Sequence
  Description of Artificial Sequence: Synthetic oligonucleotide
  Target: LAMA2; (-) strand; PAM type: NRG; PAM sequence: TGG
actttttaagtagcttctat

SEQ ID NO: 76208 - DNA, 20 bp, Artificial Sequence
  Description of Artificial Sequence: Synthetic oligonucleotide
  Target: LAMA2; (-) strand; PAM type: NRG; PAM sequence: TAG
tttctaaaacactttttaag

SEQ ID NO: 76209 - DNA, 20 bp, Artificial Sequence
  Description of Artificial Sequence: Synthetic oligonucleotide
  Target: LAMA2; (-) strand; PAM type: NRG; PAM sequence: AAG
cattttctaaaacacttttt

SEQ ID NO: 76210 - DNA, 20 bp, Artificial Sequence
  Description of Artificial Sequence: Synthetic oligonucleotide
  Target: LAMA2; (-) strand; PAM type: NRG; PAM sequence: TGG
ttcaaatagtaatgttataa

SEQ ID NO: 76211 - DNA, 20 bp, Artificial Sequence
  Description of Artificial Sequence: Synthetic oligonucleotide
  Target: LAMA2; (-) strand; PAM type: NRG; PAM sequence: TAG
ggaaggaagttaaattcaaa

SEQ ID NO: 76212 - DNA, 20 bp, Artificial Sequence
  Description of Artificial Sequence: Synthetic oligonucleotide
  Target: LAMA2; (-) strand; PAM type: NRG; PAM sequence: AAG
tctacaggtatattggaagg

SEQ ID NO: 76213 - DNA, 20 bp, Artificial Sequence
  Description of Artificial Sequence: Synthetic oligonucleotide
  Target: LAMA2; (-) strand; PAM type: NRG; PAM sequence: AGG
cattctacaggtatattgga

SEQ ID NO: 76214 - DNA, 20 bp, Artificial Sequence
  Description of Artificial Sequence: Synthetic oligonucleotide
  Target: LAMA2; (-) strand; PAM type: NRG; PAM sequence: AAG
tcattctacaggtatattgg

SEQ ID NO: 76215 - DNA, 20 bp, Artificial Sequence
  Description of Artificial Sequence: Synthetic oligonucleotide
  Target: LAMA2; (-) strand; PAM type: NRG; PAM sequence: TGG
agctcattctacaggtatat

SEQ ID NO: 76216 - DNA, 20 bp, Artificial Sequence
  Description of Artificial Sequence: Synthetic oligonucleotide
  Target: LAMA2; (-) strand; PAM type: NRG; PAM sequence: AGG
aactcaatagctcattctac

SEQ ID NO: 76217 - DNA, 20 bp, Artificial Sequence
  Description of Artificial Sequence: Synthetic oligonucleotide
  Target: LAMA2; (-) strand; PAM type: NRG; PAM sequence: CAG
aaactcaatagctcattcta

SEQ ID NO: 76218 - DNA, 20 bp, Artificial Sequence
  Description of Artificial Sequence: Synthetic oligonucleotide
  Target: LAMA2; (-) strand; PAM type: NRG; PAM sequence: TAG
tggaaagaagttaaactcaa

SEQ ID NO: 76219 - DNA, 20 bp, Artificial Sequence
  Description of Artificial Sequence: Synthetic oligonucleotide
  Target: LAMA2; (-) strand; PAM type: NRG; PAM sequence: AAG
ccataaccatgcctggaaag

SEQ ID NO: 76220 - DNA, 20 bp, Artificial Sequence
  Description of Artificial Sequence: Synthetic oligonucleotide
  Target: LAMA2; (-) strand; PAM type: NRG; PAM sequence: AAG
gctccataaccatgcctgga

SEQ ID NO: 76221 - DNA, 20 bp, Artificial Sequence
  Description of Artificial Sequence: Synthetic oligonucleotide
  Target: LAMA2; (-) strand; PAM type: NRG; PAM sequence: TGG
gcaggctccataaccatgcc

SEQ ID NO: 76222 - DNA, 20 bp, Artificial Sequence
  Description of Artificial Sequence: Synthetic oligonucleotide
  Target: LAMA2; (-) strand; PAM type: NRG; PAM sequence: AGG
cgggacacccacacactagc

SEQ ID NO: 76223 - DNA, 20 bp, Artificial Sequence
  Description of Artificial Sequence: Synthetic oligonucleotide
  Target: LAMA2; (-) strand; PAM type: NRG; PAM sequence: CAG
ccgggacacccacacactag

SEQ ID NO: 76224 - DNA, 20 bp, Artificial Sequence
  Description of Artificial Sequence: Synthetic oligonucleotide
  Target: LAMA2; (-) strand; PAM type: NRG; PAM sequence: TAG
gccccgggacacccacacac

SEQ ID NO: 76225 - DNA, 20 bp, Artificial Sequence
  Description of Artificial Sequence: Synthetic oligonucleotide
  Target: LAMA2; (-) strand; PAM type: NRG; PAM sequence: GGG
atttaatacggtgtggcccc

SEQ ID NO: 76226 - DNA, 20 bp, Artificial Sequence
  Description of Artificial Sequence: Synthetic oligonucleotide
  Target: LAMA2; (-) strand; PAM type: NRG; PAM sequence: CGG
tatttaatacggtgtggccc

SEQ ID NO: 76227 - DNA, 20 bp, Artificial Sequence
  Description of Artificial Sequence: Synthetic oligonucleotide
  Target: LAMA2; (-) strand; PAM type: NRG; PAM sequence: TGG
ctagcctatttaatacggtg

SEQ ID NO: 76228 - DNA, 20 bp, Artificial Sequence
  Description of Artificial Sequence: Synthetic oligonucleotide
  Target: LAMA2; (-) strand; PAM type: NRG; PAM sequence: CGG
tatcactagcctatttaata

SEQ ID NO: 76229 - DNA, 20 bp, Artificial Sequence
  Description of Artificial Sequence: Synthetic oligonucleotide
  Target: LAMA2; (-) strand; PAM type: NRG; PAM sequence: TAG
tgtcctatccattttatcac

SEQ ID NO: 76230 - DNA, 20 bp, Artificial Sequence
  Description of Artificial Sequence: Synthetic oligonucleotide
  Target: LAMA2; (-) strand; PAM type: NRG; PAM sequence: GAG
tgtttaaaaatgttcctgat

SEQ ID NO: 76231 - DNA, 20 bp, Artificial Sequence
  Description of Artificial Sequence: Synthetic oligonucleotide
  Target: LAMA2; (-) strand; PAM type: NRG; PAM sequence: CAG
tgcccccaacacagaatcaa

SEQ ID NO: 76232 - DNA, 20 bp, Artificial Sequence
  Description of Artificial Sequence: Synthetic oligonucleotide
  Target: LAMA2; (-) strand; PAM type: NRG; PAM sequence: CAG
cccagcctctgcccccaaca

SEQ ID NO: 76233 - DNA, 20 bp, Artificial Sequence
  Description of Artificial Sequence: Synthetic oligonucleotide
  Target: LAMA2; (-) strand; PAM type: NRG; PAM sequence: CAG
taatatctccctatttctcc

SEQ ID NO: 76234 - DNA, 20 bp, Artificial Sequence
  Description of Artificial Sequence: Synthetic oligonucleotide
  Target: LAMA2; (-) strand; PAM type: NRG; PAM sequence: AAG
gttctgttgcccacttataa

SEQ ID NO: 76235 - DNA, 20 bp, Artificial Sequence
  Description of Artificial Sequence: Synthetic oligonucleotide
  Target: LAMA2; (-) strand; PAM type: NRG; PAM sequence: GGG
gtactttgaccacacaacat

SEQ ID NO: 76236 - DNA, 20 bp, Artificial Sequence
  Description of Artificial Sequence: Synthetic oligonucleotide
  Target: LAMA2; (-) strand; PAM type: NRG; PAM sequence: TGG
agtactttgaccacacaaca

SEQ ID NO: 76237 - DNA, 20 bp, Artificial Sequence
  Description of Artificial Sequence: Synthetic oligonucleotide
  Target: LAMA2; (-) strand; PAM type: NRG; PAM sequence: CAG
acaatgcttgagaagttctg

SEQ ID NO: 76238 - DNA, 20 bp, Artificial Sequence
  Description of Artificial Sequence: Synthetic oligonucleotide
  Target: LAMA2; (-) strand; PAM type: NRG; PAM sequence: AAG
aaacgtgtacaatgcttgag

SEQ ID NO: 76239 - DNA, 20 bp, Artificial Sequence
  Description of Artificial Sequence: Synthetic oligonucleotide
  Target: LAMA2; (-) strand; PAM type: NRG; PAM sequence: GAG
ctgaaacgtgtacaatgctt

SEQ ID NO: 76240 - DNA, 20 bp, Artificial Sequence
  Description of Artificial Sequence: Synthetic oligonucleotide
  Target: LAMA2; (-) strand; PAM type: NRG; PAM sequence: TAG
cttgtggaccattaaagtcg

SEQ ID NO: 76241 - DNA, 20 bp, Artificial Sequence
  Description of Artificial Sequence: Synthetic oligonucleotide
  Target: LAMA2; (-) strand; PAM type: NRG; PAM sequence: AAG
gcctttcttgtggaccatta

SEQ ID NO: 76242 - DNA, 20 bp, Artificial Sequence
  Description of Artificial Sequence: Synthetic oligonucleotide
  Target: LAMA2; (-) strand; PAM type: NRG; PAM sequence: TGG
attcttagaggcctttcttg

SEQ ID NO: 76243 - DNA, 20 bp, Artificial Sequence
  Description of Artificial Sequence: Synthetic oligonucleotide
  Target: LAMA2; (-) strand; PAM type: NRG; PAM sequence: AGG
gacacgaaaaagattcttag

SEQ ID NO: 76244 - DNA, 20 bp, Artificial Sequence
  Description of Artificial Sequence: Synthetic oligonucleotide
  Target: LAMA2; (-) strand; PAM type: NRG; PAM sequence: GAG
ggacacgaaaaagattctta

SEQ ID NO: 76245 - DNA, 20 bp, Artificial Sequence
  Description of Artificial Sequence: Synthetic oligonucleotide
  Target: LAMA2; (-) strand; PAM type: NRG; PAM sequence: TAG
atggacacgaaaaagattct

SEQ ID NO: 76246 - DNA, 20 bp, Artificial Sequence
  Description of Artificial Sequence: Synthetic oligonucleotide
  Target: LAMA2; (-) strand; PAM type: NRG; PAM sequence: AAG
ttatagaaatggacacgaaa

SEQ ID NO: 76247 - DNA, 20 bp, Artificial Sequence
  Description of Artificial Sequence: Synthetic oligonucleotide
  Target: LAMA2; (-) strand; PAM type: NRG; PAM sequence: TGG
tatgttctctcttatagaaa

SEQ ID NO: 76248 - DNA, 20 bp, Artificial Sequence
  Description of Artificial Sequence: Synthetic oligonucleotide
  Target: LAMA2; (-) strand; PAM type: NRG; PAM sequence: TAG
cagcattatgttctctctta

SEQ ID NO: 76249 - DNA, 20 bp, Artificial Sequence
  Description of Artificial Sequence: Synthetic oligonucleotide
  Target: LAMA2; (-) strand; PAM type: NRG; PAM sequence: CAG
gatctcaactatgtctaaca

SEQ ID NO: 76250 - DNA, 20 bp, Artificial Sequence
  Description of Artificial Sequence: Synthetic oligonucleotide
  Target: LAMA2; (-) strand; PAM type: NRG; PAM sequence: TGG
atgtagtgacattattataa

SEQ ID NO: 76251 - DNA, 20 bp, Artificial Sequence
  Description of Artificial Sequence: Synthetic oligonucleotide
  Target: LAMA2; (-) strand; PAM type: NRG; PAM sequence: TAG
cagaattttatttcaaaatg

SEQ ID NO: 76252 - DNA, 20 bp, Artificial Sequence
  Description of Artificial Sequence: Synthetic oligonucleotide
  Target: LAMA2; (-) strand; PAM type: NRG; PAM sequence: CAG
atttatgtattaaggcattt

SEQ ID NO: 76253 - DNA, 20 bp, Artificial Sequence
  Description of Artificial Sequence: Synthetic oligonucleotide
  Target: LAMA2; (-) strand; PAM type: NRG; PAM sequence: AGG
ataaaaggatttatgtatta

SEQ ID NO: 76254 - DNA, 20 bp, Artificial Sequence
  Description of Artificial Sequence: Synthetic oligonucleotide
  Target: LAMA2; (-) strand; PAM type: NRG; PAM sequence: AAG
cataaaaggatttatgtatt

SEQ ID NO: 76255 - DNA, 20 bp, Artificial Sequence
  Description of Artificial Sequence: Synthetic oligonucleotide
  Target: LAMA2; (-) strand; PAM type: NRG; PAM sequence: AGG
aattttaaagacttcataaa

SEQ ID NO: 76256 - DNA, 20 bp, Artificial Sequence
  Description of Artificial Sequence: Synthetic oligonucleotide
  Target: LAMA2; (-) strand; PAM type: NRG; PAM sequence: AAG
caattttaaagacttcataa

SEQ ID NO: 76257 - DNA, 20 bp, Artificial Sequence
  Description of Artificial Sequence: Synthetic oligonucleotide
  Target: LAMA2; (-) strand; PAM type: NRG; PAM sequence: AAG
ggttttagcagccaatttta

SEQ ID NO: 76258 - DNA, 20 bp, Artificial Sequence
  Description of Artificial Sequence: Synthetic oligonucleotide
  Target: LAMA2; (-) strand; PAM type: NRG; PAM sequence: CAG
tataattttattggttttag

SEQ ID NO: 76259 - DNA, 20 bp, Artificial Sequence
  Description of Artificial Sequence: Synthetic oligonucleotide
  Target: LAMA2; (-) strand; PAM type: NRG; PAM sequence: TAG
aaatataattttattggttt

SEQ ID NO: 76260 - DNA, 20 bp, Artificial Sequence
  Description of Artificial Sequence: Synthetic oligonucleotide
  Target: LAMA2; (-) strand; PAM type: NRG; PAM sequence: TGG
ttccaaaaatataattttat

SEQ ID NO: 76261 - DNA, 20 bp, Artificial Sequence
  Description of Artificial Sequence: Synthetic oligonucleotide
  Target: LAMA2; (-) strand; PAM type: NRG; PAM sequence: TGG
cctcacttatgtgcacaaag

SEQ ID NO: 76262 - DNA, 20 bp, Artificial Sequence
  Description of Artificial Sequence: Synthetic oligonucleotide
  Target: LAMA2; (-) strand; PAM type: NRG; PAM sequence: AAG
cagcctcacttatgtgcaca

SEQ ID NO: 76263 - DNA, 20 bp, Artificial Sequence
  Description of Artificial Sequence: Synthetic oligonucleotide
  Target: LAMA2; (-) strand; PAM type: NRG; PAM sequence: CAG
tttaaaaaccctagtttcta

SEQ ID NO: 76264 - DNA, 20 bp, Artificial Sequence
  Description of Artificial Sequence: Synthetic oligonucleotide
  Target: LAMA2; (-) strand; PAM type: NRG; PAM sequence: TAG
tttaagtcatttaaaaaccc

SEQ ID NO: 76265 - DNA, 20 bp, Artificial Sequence
  Description of Artificial Sequence: Synthetic oligonucleotide
  Target: LAMA2; (-) strand; PAM type: NRG; PAM sequence: AAG
tggagaaatatatatctttt

SEQ ID NO: 76266 - DNA, 20 bp, Artificial Sequence
  Description of Artificial Sequence: Synthetic oligonucleotide
  Target: LAMA2; (-) strand; PAM type: NRG; PAM sequence: GAG
atataattacctatagtttg

SEQ ID NO: 76267 - DNA, 20 bp, Artificial Sequence
  Description of Artificial Sequence: Synthetic oligonucleotide
  Target: LAMA2; (-) strand; PAM type: NRG; PAM sequence: TGG
tgatataattacctatagtt

SEQ ID NO: 76268 - DNA, 20 bp, Artificial Sequence
  Description of Artificial Sequence: Synthetic oligonucleotide
  Target: LAMA2; (-) strand; PAM type: NRG; PAM sequence: TAG
aatattgatataattaccta

SEQ ID NO: 76269 - DNA, 20 bp, Artificial Sequence
  Description of Artificial Sequence: Synthetic oligonucleotide
  Target: LAMA2; (-) strand; PAM type: NRG; PAM sequence: AAG
gaattactatatctctgtca

SEQ ID NO: 76270 - DNA, 20 bp, Artificial Sequence
  Description of Artificial Sequence: Synthetic oligonucleotide
  Target: LAMA2; (-) strand; PAM type: NRG; PAM sequence: GAG
ataaattttactataagatg

SEQ ID NO: 76271 - DNA, 20 bp, Artificial Sequence
  Description of Artificial Sequence: Synthetic oligonucleotide
  Target: LAMA2; (-) strand; PAM type: NRG; PAM sequence: TGG
tcataaattttactataaga

SEQ ID NO: 76272 - DNA, 20 bp, Artificial Sequence
  Description of Artificial Sequence: Synthetic oligonucleotide
  Target: LAMA2; (-) strand; PAM type: NRG; PAM sequence: AAG
gttttcataaattttactat

SEQ ID NO: 76273 - DNA, 20 bp, Artificial Sequence
  Description of Artificial Sequence: Synthetic oligonucleotide
  Target: LAMA2; (-) strand; PAM type: NRG; PAM sequence: TGG
ccaaaaatgtatttacctgt

SEQ ID NO: 76274 - DNA, 20 bp, Artificial Sequence
  Description of Artificial Sequence: Synthetic oligonucleotide
  Target: LAMA2; (-) strand; PAM type: NRG; PAM sequence: AAG
aaagaaaaacataattttta

SEQ ID NO: 76275 - DNA, 20 bp, Artificial Sequence
  Description of Artificial Sequence: Synthetic oligonucleotide
  Target: LAMA2; (-) strand; PAM type: NRG; PAM sequence: AAG
aattagcttgagccaaataa

SEQ ID NO: 76276 - DNA, 20 bp, Artificial Sequence
  Description of Artificial Sequence: Synthetic oligonucleotide
  Target: LAMA2; (-) strand; PAM type: NRG; PAM sequence: GAG
ataacagaaagaattagctt

SEQ ID NO: 76277 - DNA, 20 bp, Artificial Sequence
  Description of Artificial Sequence: Synthetic oligonucleotide
  Target: LAMA2; (-) strand; PAM type: NRG; PAM sequence: TAG
ataaaaataacagaaagaat

SEQ ID NO: 76278 - DNA, 20 bp, Artificial Sequence
  Description of Artificial Sequence: Synthetic oligonucleotide
  Target: LAMA2; (-) strand; PAM type: NRG; PAM sequence: AAG
ttaataataaaaataacaga

SEQ ID NO: 76279 - DNA, 20 bp, Artificial Sequence
  Description of Artificial Sequence: Synthetic oligonucleotide
  Target: LAMA2; (-) strand; PAM type: NRG; PAM sequence: CAG
tcaattaataataaaaataa

SEQ ID NO: 76280 - DNA, 20 bp, Artificial Sequence
  Description of Artificial Sequence: Synthetic oligonucleotide
  Target: LAMA2; (-) strand; PAM type: NRG; PAM sequence: TAG
cagatagaattttacctgag

SEQ ID NO: 76281 - DNA, 20 bp, Artificial Sequence
  Description of Artificial Sequence: Synthetic oligonucleotide
  Target: LAMA2; (-) strand; PAM type: NRG; PAM sequence: GAG
attcagatagaattttacct

SEQ ID NO: 76282 - DNA, 20 bp, Artificial Sequence
  Description of Artificial Sequence: Synthetic oligonucleotide
  Target: LAMA2; (-) strand; PAM type: NRG; PAM sequence: TAG
tgatgtcaattcaattcaga

SEQ ID NO: 76283 - DNA, 20 bp, Artificial Sequence
  Description of Artificial Sequence: Synthetic oligonucleotide
  Target: LAMA2; (-) strand; PAM type: NRG; PAM sequence: CAG
tcaatgatgtcaattcaatt

SEQ ID NO: 76284 - DNA, 20 bp, Artificial Sequence
  Description of Artificial Sequence: Synthetic oligonucleotide
  Target: LAMA2; (-) strand; PAM type: NRG; PAM sequence: GGG
gggctgtcttttctgacaat

SEQ ID NO: 76285 - DNA, 20 bp, Artificial Sequence
  Description of Artificial Sequence: Synthetic oligonucleotide
  Target: LAMA2; (-) strand; PAM type: NRG; PAM sequence: TGG
agggctgtcttttctgacaa

SEQ ID NO: 76286 - DNA, 20 bp, Artificial Sequence
  Description of Artificial Sequence: Synthetic oligonucleotide
  Target: LAMA2; (-) strand; PAM type: NRG; PAM sequence: GGG
aataaattgaatgggataga

SEQ ID NO: 76287 - DNA, 20 bp, Artificial Sequence
  Description of Artificial Sequence: Synthetic oligonucleotide
  Target: LAMA2; (-) strand; PAM type: NRG; PAM sequence: AGG
taataaattgaatgggatag

SEQ ID NO: 76288 - DNA, 20 bp, Artificial Sequence
  Description of Artificial Sequence: Synthetic oligonucleotide
  Target: LAMA2; (-) strand; PAM type: NRG; PAM sequence: GAG
ttaataaattgaatgggata

SEQ ID NO: 76289 - DNA, 20 bp, Artificial Sequence
  Description of Artificial Sequence: Synthetic oligonucleotide
  Target: LAMA2; (-) strand; PAM type: NRG; PAM sequence: TAG
gtttaataaattgaatggga

SEQ ID NO: 76290 - DNA, 20 bp, Artificial Sequence
  Description of Artificial Sequence: Synthetic oligonucleotide
  Target: LAMA2; (-) strand; PAM type: NRG; PAM sequence: GGG
agcagtttaataaattgaat

SEQ ID NO: 76291 - DNA, 20 bp, Artificial Sequence
  Description of Artificial Sequence: Synthetic oligonucleotide
  Target: LAMA2; (-) strand; PAM type: NRG; PAM sequence: TGG
tagcagtttaataaattgaa

SEQ ID NO: 76292 - DNA, 20 bp, Artificial Sequence
  Description of Artificial Sequence: Synthetic oligonucleotide
  Target: LAMA2; (-) strand; PAM type: NRG; PAM sequence: CAG
agaaaagtccagaagattag

SEQ ID NO: 76293 - DNA, 20 bp, Artificial Sequence
  Description of Artificial Sequence: Synthetic oligonucleotide
  Target: LAMA2; (-) strand; PAM type: NRG; PAM sequence: TAG
tgaagaaaagtccagaagat

SEQ ID NO: 76294 - DNA, 20 bp, Artificial Sequence
  Description of Artificial Sequence: Synthetic oligonucleotide
  Target: LAMA2; (-) strand; PAM type: NRG; PAM sequence: AAG
agctttgaagaaaagtccag

SEQ ID NO: 76295 - DNA, 20 bp, Artificial Sequence
  Description of Artificial Sequence: Synthetic oligonucleotide
  Target: LAMA2; (-) strand; PAM type: NRG; PAM sequence: CAG
acaagctttgaagaaaagtc

SEQ ID NO: 76296 - DNA, 20 bp, Artificial Sequence
  Description of Artificial Sequence: Synthetic oligonucleotide
  Target: LAMA2; (-) strand; PAM type: NRG; PAM sequence: AAG
aactgacaagctttgaagaa

SEQ ID NO: 76297 - DNA, 20 bp, Artificial Sequence
  Description of Artificial Sequence: Synthetic oligonucleotide
  Target: LAMA2; (-) strand; PAM type: NRG; PAM sequence: AAG
atcaaaactgacaagctttg

SEQ ID NO: 76298 - DNA, 20 bp, Artificial Sequence
  Description of Artificial Sequence: Synthetic oligonucleotide
  Target: LAMA2; (-) strand; PAM type: NRG; PAM sequence: AAG
ttttttggatcaaaactgac

SEQ ID NO: 76299 - DNA, 20 bp, Artificial Sequence
  Description of Artificial Sequence: Synthetic oligonucleotide
  Target: LAMA2; (-) strand; PAM type: NRG; PAM sequence: TGG
aatgaaatctgaagtttttt

SEQ ID NO: 76300 - DNA, 20 bp, Artificial Sequence
  Description of Artificial Sequence: Synthetic oligonucleotide
  Target: LAMA2; (-) strand; PAM type: NRG; PAM sequence: AAG
ggtccacacaatgaaatctg

SEQ ID NO: 76301 - DNA, 20 bp, Artificial Sequence
  Description of Artificial Sequence: Synthetic oligonucleotide
  Target: LAMA2; (-) strand; PAM type: NRG; PAM sequence: AGG
tttttcacacaagaagtaac

SEQ ID NO: 76302 - DNA, 20 bp, Artificial Sequence
  Description of Artificial Sequence: Synthetic oligonucleotide
  Target: LAMA2; (-) strand; PAM type: NRG; PAM sequence: CAG
gtttttcacacaagaagtaa

SEQ ID NO: 76303 - DNA, 20 bp, Artificial Sequence
  Description of Artificial Sequence: Synthetic oligonucleotide
  Target: LAMA2; (-) strand; PAM type: NRG; PAM sequence: AAG
catactgtttttcacacaag

SEQ ID NO: 76304 - DNA, 20 bp, Artificial Sequence
  Description of Artificial Sequence: Synthetic oligonucleotide
  Target: LAMA2; (-) strand; PAM type: NRG; PAM sequence: AAG
aaccatactgtttttcacac

SEQ ID NO: 76305 - DNA, 20 bp, Artificial Sequence
  Description of Artificial Sequence: Synthetic oligonucleotide
  Target: LAMA2; (-) strand; PAM type: NRG; PAM sequence: TGG
atattaacaatggccaagag

SEQ ID NO: 76306 - DNA, 20 bp, Artificial Sequence
  Description of Artificial Sequence: Synthetic oligonucleotide
  Target: LAMA2; (-) strand; PAM type: NRG; PAM sequence: GAG
acaatattaacaatggccaa

SEQ ID NO: 76307 - DNA, 20 bp, Artificial Sequence
  Description of Artificial Sequence: Synthetic oligonucleotide
  Target: LAMA2; (-) strand; PAM type: NRG; PAM sequence: AAG
gtacaatattaacaatggcc

SEQ ID NO: 76308 - DNA, 20 bp, Artificial Sequence
  Description of Artificial Sequence: Synthetic oligonucleotide
  Target: LAMA2; (-) strand; PAM type: NRG; PAM sequence: TGG
tatctgtacaatattaacaa

SEQ ID NO: 76309 - DNA, 20 bp, Artificial Sequence
  Description of Artificial Sequence: Synthetic oligonucleotide
  Target: LAMA2; (-) strand; PAM type: NRG; PAM sequence: TAG
ttttttttgcaataaggtgc

SEQ ID NO: 76310 - DNA, 20 bp, Artificial Sequence
  Description of Artificial Sequence: Synthetic oligonucleotide
  Target: LAMA2; (-) strand; PAM type: NRG; PAM sequence: AGG
acttttttttttttgcaata

SEQ ID NO: 76311 - DNA, 20 bp, Artificial Sequence
  Description of Artificial Sequence: Synthetic oligonucleotide
  Target: LAMA2; (-) strand; PAM type: NRG; PAM sequence: AAG
aacttttttttttttgcaat

SEQ ID NO: 76312 - DNA, 20 bp, Artificial Sequence
  Description of Artificial Sequence: Synthetic oligonucleotide
  Target: LAMA2; (-) strand; PAM type: NRG; PAM sequence: TAG
taaattgcaatgaatataag

SEQ ID NO: 76313 - DNA, 20 bp, Artificial Sequence
  Description of Artificial Sequence: Synthetic oligonucleotide
  Target: LAMA2; (-) strand; PAM type: NRG; PAM sequence: AAG
taataaattgcaatgaatat

SEQ ID NO: 76314 - DNA, 20 bp, Artificial Sequence
  Description of Artificial Sequence: Synthetic oligonucleotide
  Target: LAMA2; (-) strand; PAM type: NRG; PAM sequence: CAG
acagtttataattttcagtt

SEQ ID NO: 76315 - DNA, 20 bp, Artificial Sequence
  Description of Artificial Sequence: Synthetic oligonucleotide
  Target: LAMA2; (-) strand; PAM type: NRG; PAM sequence: CAG
tgacaacagtttataatttt

SEQ ID NO: 76316 - DNA, 20 bp, Artificial Sequence
  Description of Artificial Sequence: Synthetic oligonucleotide
  Target: LAMA2; (-) strand; PAM type: NRG; PAM sequence: CAG
gggacctgaattattgacaa

SEQ ID NO: 76317 - DNA, 20 bp, Artificial Sequence
  Description of Artificial Sequence: Synthetic oligonucleotide
  Target: LAMA2; (-) strand; PAM type: NRG; PAM sequence: GGG
tctcaatacacttcagaatt

SEQ ID NO: 76318 - DNA, 20 bp, Artificial Sequence
  Description of Artificial Sequence: Synthetic oligonucleotide
  Target: LAMA2; (-) strand; PAM type: NRG; PAM sequence: TGG
atctcaatacacttcagaat

SEQ ID NO: 76319 - DNA, 20 bp, Artificial Sequence
  Description of Artificial Sequence: Synthetic oligonucleotide
  Target: LAMA2; (-) strand; PAM type: NRG; PAM sequence: CAG
ttggtaatctcaatacactt

SEQ ID NO: 76320 - DNA, 20 bp, Artificial Sequence
  Description of Artificial Sequence: Synthetic oligonucleotide
  Target: LAMA2; (-) strand; PAM type: NRG; PAM sequence: TGG
attgttcctgcttcacagtt

SEQ ID NO: 76321 - DNA, 20 bp, Artificial Sequence
  Description of Artificial Sequence: Synthetic oligonucleotide
  Target: LAMA2; (-) strand; PAM type: NRG; PAM sequence: CAG
taaatattgttcctgcttca

SEQ ID NO: 76322 - DNA, 20 bp, Artificial Sequence
  Description of Artificial Sequence: Synthetic oligonucleotide
  Target: LAMA2; (-) strand; PAM type: NRG; PAM sequence: GAG
ttcttttctttctttatgta

SEQ ID NO: 76323 - DNA, 20 bp, Artificial Sequence
  Description of Artificial Sequence: Synthetic oligonucleotide
  Target: LAMA2; (-) strand; PAM type: NRG; PAM sequence: TAG
agttcttttctttctttatg

SEQ ID NO: 76324 - DNA, 20 bp, Artificial Sequence
  Description of Artificial Sequence: Synthetic oligonucleotide
  Target: LAMA2; (-) strand; PAM type: NRG; PAM sequence: TAG
ataatatcaagttcatttaa

SEQ ID NO: 76325 - DNA, 20 bp, Artificial Sequence
  Description of Artificial Sequence: Synthetic oligonucleotide
  Target: LAMA2; (-) strand; PAM type: NRG; PAM sequence: AAG
gaagtgcttcttataatatc

SEQ ID NO: 76326 - DNA, 20 bp, Artificial Sequence
  Description of Artificial Sequence: Synthetic oligonucleotide
  Target: LAMA2; (-) strand; PAM type: NRG; PAM sequence: AAG
atatgagttttgacaacctg

SEQ ID NO: 76327 - DNA, 20 bp, Artificial Sequence
  Description of Artificial Sequence: Synthetic oligonucleotide
  Target: LAMA2; (-) strand; PAM type: NRG; PAM sequence: GAG
gattatagatgtcataatat

SEQ ID NO: 76328 - DNA, 20 bp, Artificial Sequence
  Description of Artificial Sequence: Synthetic oligonucleotide
  Target: LAMA2; (-) strand; PAM type: NRG; PAM sequence: TAG
tgtgattttaggccagatta

SEQ ID NO: 76329 - DNA, 20 bp, Artificial Sequence
  Description of Artificial Sequence: Synthetic oligonucleotide
  Target: LAMA2; (-) strand; PAM type: NRG; PAM sequence: CAG
gtttgcttgtgattttaggc

SEQ ID NO: 76330 - DNA, 20 bp, Artificial Sequence
  Description of Artificial Sequence: Synthetic oligonucleotide
  Target: LAMA2; (-) strand; PAM type: NRG; PAM sequence: AGG
gaatgtttgcttgtgatttt

SEQ ID NO: 76331 - DNA, 20 bp, Artificial Sequence
  Description of Artificial Sequence: Synthetic oligonucleotide
  Target: LAMA2; (-) strand; PAM type: NRG; PAM sequence: TAG
ggaatgtttgcttgtgattt

SEQ ID NO: 76332 - DNA, 20 bp, Artificial Sequence
  Description of Artificial Sequence: Synthetic oligonucleotide
  Target: LAMA2; (-) strand; PAM type: NRG; PAM sequence: TGG
catgatctgccattccatca

SEQ ID NO: 76333 - DNA, 20 bp, Artificial Sequence
  Description of Artificial Sequence: Synthetic oligonucleotide
  Target: LAMA2; (-) strand; PAM type: NRG; PAM sequence: TAG
ctgataataaccagcaaatc

SEQ ID NO: 76334 - DNA, 20 bp, Artificial Sequence
  Description of Artificial Sequence: Synthetic oligonucleotide
  Target: LAMA2; (-) strand; PAM type: NRG; PAM sequence: CAG
aaaataaaactgataataac

SEQ ID NO: 76335 - DNA, 20 bp, Artificial Sequence
  Description of Artificial Sequence: Synthetic oligonucleotide
  Target: LAMA2; (-) strand; PAM type: NRG; PAM sequence: AGG
gaaaggcttaaattctactt

SEQ ID NO: 76336 - DNA, 20 bp, Artificial Sequence
  Description of Artificial Sequence: Synthetic oligonucleotide
  Target: LAMA2; (-) strand; PAM type: NRG; PAM sequence: TAG
tgaaaggcttaaattctact

SEQ ID NO: 76337 - DNA, 20 bp, Artificial Sequence
  Description of Artificial Sequence: Synthetic oligonucleotide
  Target: LAMA2; (-) strand; PAM type: NRG; PAM sequence: AGG
ggagtcatattttaactgaa

SEQ ID NO: 76338 - DNA, 20 bp, Artificial Sequence
  Description of Artificial Sequence: Synthetic oligonucleotide
  Target: LAMA2; (-) strand; PAM type: NRG; PAM sequence: AAG
gggagtcatattttaactga

SEQ ID NO: 76339 - DNA, 20 bp, Artificial Sequence
  Description of Artificial Sequence: Synthetic oligonucleotide
  Target: LAMA2; (-) strand; PAM type: NRG; PAM sequence: GAG
atcctcttccttttgcttgg

SEQ ID NO: 76340 - DNA, 20 bp, Artificial Sequence
  Description of Artificial Sequence: Synthetic oligonucleotide
  Target: LAMA2; (-) strand; PAM type: NRG; PAM sequence: GGG
taatcctcttccttttgctt

SEQ ID NO: 76341 - DNA, 20 bp, Artificial Sequence
  Description of Artificial Sequence: Synthetic oligonucleotide
  Target: LAMA2; (-) strand; PAM type: NRG; PAM sequence: TGG
ttaatcctcttccttttgct

SEQ ID NO: 76342 - DNA, 20 bp, Artificial Sequence
  Description of Artificial Sequence: Synthetic oligonucleotide
  Target: LAMA2; (-) strand; PAM type: NRG; PAM sequence: TAG
attattgataacacaaacaa

SEQ ID NO: 76343 - DNA, 20 bp, Artificial Sequence
  Description of Artificial Sequence: Synthetic oligonucleotide
  Target: LAMA2; (-) strand; PAM type: NRG; PAM sequence: TAG
gacacagcaccatagacaaa

SEQ ID NO: 76344 - DNA, 20 bp, Artificial Sequence
  Description of Artificial Sequence: Synthetic oligonucleotide
  Target: LAMA2; (-) strand; PAM type: NRG; PAM sequence: TAG
ttgtaactgacacagcacca

SEQ ID NO: 76345 - DNA, 20 bp, Artificial Sequence
  Description of Artificial Sequence: Synthetic oligonucleotide
  Target: LAMA2; (-) strand; PAM type: NRG; PAM sequence: CAG
agagtgccttgtaactgaca

SEQ ID NO: 76346 - DNA, 20 bp, Artificial Sequence
  Description of Artificial Sequence: Synthetic oligonucleotide
  Target: LAMA2; (-) strand; PAM type: NRG; PAM sequence: GAG
agatggaagaatgcatggca

SEQ ID NO: 76347 - DNA, 20 bp, Artificial Sequence
  Description of Artificial Sequence: Synthetic oligonucleotide
  Target: LAMA2; (-) strand; PAM type: NRG; PAM sequence: CAG
tcagatggaagaatgcatgg

SEQ ID NO: 76348 - DNA, 20 bp, Artificial Sequence
  Description of Artificial Sequence: Synthetic oligonucleotide
  Target: LAMA2; (-) strand; PAM type: NRG; PAM sequence: TGG
ggatcagatggaagaatgca

SEQ ID NO: 76349 - DNA, 20 bp, Artificial Sequence
  Description of Artificial Sequence: Synthetic oligonucleotide
  Target: LAMA2; (-) strand; PAM type: NRG; PAM sequence: AAG
ctttggtgaggatcagatgg

SEQ ID NO: 76350 - DNA, 20 bp, Artificial Sequence
  Description of Artificial Sequence: Synthetic oligonucleotide
  Target: LAMA2; (-) strand; PAM type: NRG; PAM sequence: TGG
aggctttggtgaggatcaga

SEQ ID NO: 76351 - DNA, 20 bp, Artificial Sequence
  Description of Artificial Sequence: Synthetic oligonucleotide
  Target: LAMA2; (-) strand; PAM type: NRG; PAM sequence: CAG
tccaaggctttggtgaggat

SEQ ID NO: 76352 - DNA, 20 bp, Artificial Sequence
  Description of Artificial Sequence: Synthetic oligonucleotide
  Target: LAMA2; (-) strand; PAM type: NRG; PAM sequence: AGG
gcatctccaaggctttggtg

SEQ ID NO: 76353 - DNA, 20 bp, Artificial Sequence
  Description of Artificial Sequence: Synthetic oligonucleotide
  Target: LAMA2; (-) strand; PAM type: NRG; PAM sequence: GAG
agcatctccaaggctttggt

SEQ ID NO: 76354 - DNA, 20 bp, Artificial Sequence
  Description of Artificial Sequence: Synthetic oligonucleotide
  Target: LAMA2; (-) strand; PAM type: NRG; PAM sequence: TGG
ttgaagcatctccaaggctt

SEQ ID NO: 76355 - DNA, 20 bp, Artificial Sequence
  Description of Artificial Sequence: Synthetic oligonucleotide
  Target: LAMA2; (-) strand; PAM type: NRG; PAM sequence: AGG
tttggcttgaagcatctcca

SEQ ID NO: 76356 - DNA, 20 bp, Artificial Sequence
  Description of Artificial Sequence: Synthetic oligonucleotide
  Target: LAMA2; (-) strand; PAM type: NRG; PAM sequence: AAG
ttttggcttgaagcatctcc

SEQ ID NO: 76357 - DNA, 20 bp, Artificial Sequence
  Description of Artificial Sequence: Synthetic oligonucleotide
  Target: LAMA2; (-) strand; PAM type: NRG; PAM sequence: AAG
ataataacaattttggcttg

SEQ ID NO: 76358 - DNA, 20 bp, Artificial Sequence
  Description of Artificial Sequence: Synthetic oligonucleotide
  Target: LAMA2; (-) strand; PAM type: NRG; PAM sequence: TGG
aatgagaataataacaattt

SEQ ID NO: 76359 - DNA, 20 bp, Artificial Sequence
  Description of Artificial Sequence: Synthetic oligonucleotide
  Target: LAMA2; (-) strand; PAM type: NRG; PAM sequence: GAG
ttcacctccatctgtaaaat

SEQ ID NO: 76360 - DNA, 20 bp, Artificial Sequence
  Description of Artificial Sequence: Synthetic oligonucleotide
  Target: LAMA2; (-) strand; PAM type: NRG; PAM sequence: CAG
accacagtgtgacctcaaat

SEQ ID NO: 76361 - DNA, 20 bp, Artificial Sequence
  Description of Artificial Sequence: Synthetic oligonucleotide
  Target: LAMA2; (-) strand; PAM type: NRG; PAM sequence: CAG
ttagtgttgaacatttacca

SEQ ID NO: 76362 - DNA, 20 bp, Artificial Sequence
  Description of Artificial Sequence: Synthetic oligonucleotide
  Target: LAMA2; (-) strand; PAM type: NRG; PAM sequence: TAG
actggacctggaccagagat

SEQ ID NO: 76363 - DNA, 20 bp, Artificial Sequence
  Description of Artificial Sequence: Synthetic oligonucleotide
  Target: LAMA2; (-) strand; PAM type: NRG; PAM sequence: GAG
tctggactggacctggacca

SEQ ID NO: 76364 - DNA, 20 bp, Artificial Sequence
  Description of Artificial Sequence: Synthetic oligonucleotide
  Target: LAMA2; (-) strand; PAM type: NRG; PAM sequence: CAG
gatctggactggacctggac

SEQ ID NO: 76365 - DNA, 20 bp, Artificial Sequence
  Description of Artificial Sequence: Synthetic oligonucleotide
  Target: LAMA2; (-) strand; PAM type: NRG; PAM sequence: TGG
cagaagatctggactggacc

SEQ ID NO: 76366 - DNA, 20 bp, Artificial Sequence
  Description of Artificial Sequence: Synthetic oligonucleotide
  Target: LAMA2; (-) strand; PAM type: NRG; PAM sequence: TGG
tgccatcagaagatctggac

SEQ ID NO: 76367 - DNA, 20 bp, Artificial Sequence
  Description of Artificial Sequence: Synthetic oligonucleotide
  Target: LAMA2; (-) strand; PAM type: NRG; PAM sequence: TGG
aggtttgccatcagaagatc

SEQ ID NO: 76368 - DNA, 20 bp, Artificial Sequence
  Description of Artificial Sequence: Synthetic oligonucleotide
  Target: LAMA2; (-) strand; PAM type: NRG; PAM sequence: AAG
attataaggtttgccatcag

SEQ ID NO: 76369 - DNA, 20 bp, Artificial Sequence
  Description of Artificial Sequence: Synthetic oligonucleotide
  Target: LAMA2; (-) strand; PAM type: NRG; PAM sequence: CAG
atgattataaggtttgccat

SEQ ID NO: 76370 - DNA, 20 bp, Artificial Sequence
  Description of Artificial Sequence: Synthetic oligonucleotide
  Target: LAMA2; (-) strand; PAM type: NRG; PAM sequence: AGG
tatgaagtggaatgattata

SEQ ID NO: 76371 - DNA, 20 bp, Artificial Sequence
  Description of Artificial Sequence: Synthetic oligonucleotide
  Target: LAMA2; (-) strand; PAM type: NRG; PAM sequence: AAG
ttatgaagtggaatgattat

SEQ ID NO: 76372 - DNA, 20 bp, Artificial Sequence
  Description of Artificial Sequence: Synthetic oligonucleotide
  Target: LAMA2; (-) strand; PAM type: NRG; PAM sequence: TGG
taagtgttccatttatgaag

SEQ ID NO: 76373 - DNA, 20 bp, Artificial Sequence
  Description of Artificial Sequence: Synthetic oligonucleotide
  Target: LAMA2; (-) strand; PAM type: NRG; PAM sequence: AAG
acctaagtgttccatttatg

SEQ ID NO: 76374 - DNA, 20 bp, Artificial Sequence
  Description of Artificial Sequence: Synthetic oligonucleotide
  Target: LAMA2; (-) strand; PAM type: NRG; PAM sequence: AAG
gaaaatgactgattggacct

SEQ ID NO: 76375 - DNA, 20 bp, Artificial Sequence
  Description of Artificial Sequence: Synthetic oligonucleotide
  Target: LAMA2; (-) strand; PAM type: NRG; PAM sequence: TGG
acatttagaaaatgactgat

SEQ ID NO: 76376 - DNA, 20 bp, Artificial Sequence
  Description of Artificial Sequence: Synthetic oligonucleotide
  Target: LAMA2; (-) strand; PAM type: NRG; PAM sequence: TAG
accaacagtaaatacacatt

SEQ ID NO: 76377 - DNA, 20 bp, Artificial Sequence
  Description of Artificial Sequence: Synthetic oligonucleotide
  Target: LAMA2; (-) strand; PAM type: NRG; PAM sequence: CAG
acacaaactcttgtgaccaa

SEQ ID NO: 76378 - DNA, 20 bp, Artificial Sequence
  Description of Artificial Sequence: Synthetic oligonucleotide
  Target: LAMA2; (-) strand; PAM type: NRG; PAM sequence: CAG
atggcatttaattatccaca

SEQ ID NO: 76379 - DNA, 20 bp, Artificial Sequence
  Description of Artificial Sequence: Synthetic oligonucleotide
  Target: LAMA2; (-) strand; PAM type: NRG; PAM sequence: TGG
ttccgagtagagatggtgga

SEQ ID NO: 76380 - DNA, 20 bp, Artificial Sequence
  Description of Artificial Sequence: Synthetic oligonucleotide
  Target: LAMA2; (-) strand; PAM type: NRG; PAM sequence: TGG
gtttttccgagtagagatgg

SEQ ID NO: 76381 - DNA, 20 bp, Artificial Sequence
  Description of Artificial Sequence: Synthetic oligonucleotide
  Target: LAMA2; (-) strand; PAM type: NRG; PAM sequence: TGG
tgggtttttccgagtagaga

SEQ ID NO: 76382 - DNA, 20 bp, Artificial Sequence
  Description of Artificial Sequence: Synthetic oligonucleotide
  Target: LAMA2; (-) strand; PAM type: NRG; PAM sequence: GAG
cccttgggtttttccgagta

SEQ ID NO: 76383 - DNA, 20 bp, Artificial Sequence
  Description of Artificial Sequence: Synthetic oligonucleotide
  Target: LAMA2; (-) strand; PAM type: NRG; PAM sequence: TAG
cacccttgggtttttccgag

SEQ ID NO: 76384 - DNA, 20 bp, Artificial Sequence
  Description of Artificial Sequence: Synthetic oligonucleotide
  Target: LAMA2; (-) strand; PAM type: NRG; PAM sequence: GAG
acacacccttgggtttttcc

SEQ ID NO: 76385 - DNA, 20 bp, Artificial Sequence
  Description of Artificial Sequence: Synthetic oligonucleotide
  Target: LAMA2; (-) strand; PAM type: NRG; PAM sequence: GGG
tgattaactgacacaccctt

SEQ ID NO: 76386 - DNA, 20 bp, Artificial Sequence
  Description of Artificial Sequence: Synthetic oligonucleotide
  Target: LAMA2; (-) strand; PAM type: NRG; PAM sequence: TGG
ctgattaactgacacaccct

SEQ ID NO: 76387 - DNA, 20 bp, Artificial Sequence
  Description of Artificial Sequence: Synthetic oligonucleotide
  Target: LAMA2; (-) strand; PAM type: NRG; PAM sequence: AAG
agtacattatctttcctgtt

SEQ ID NO: 76388 - DNA, 20 bp, Artificial Sequence
  Description of Artificial Sequence: Synthetic oligonucleotide
  Target: LAMA2; (-) strand; PAM type: NRG; PAM sequence: TAG
tacttttgccataatgataa

SEQ ID NO: 76389 - DNA, 20 bp, Artificial Sequence
  Description of Artificial Sequence: Synthetic oligonucleotide
  Target: LAMA2; (-) strand; PAM type: NRG; PAM sequence: AAG
atatcctttgttgtattttc

SEQ ID NO: 76390 - DNA, 20 bp, Artificial Sequence
  Description of Artificial Sequence: Synthetic oligonucleotide
  Target: LAMA2; (-) strand; PAM type: NRG; PAM sequence: TAG
ggataagaagcttattttaa

SEQ ID NO: 76391 - DNA, 20 bp, Artificial Sequence
  Description of Artificial Sequence: Synthetic oligonucleotide
  Target: LAMA2; (-) strand; PAM type: NRG; PAM sequence: AAG
atagtttccctaaggataag

SEQ ID NO: 76392 - DNA, 20 bp, Artificial Sequence
  Description of Artificial Sequence: Synthetic oligonucleotide
  Target: LAMA2; (-) strand; PAM type: NRG; PAM sequence: AAG
gaaatagtttccctaaggat

SEQ ID NO: 76393 - DNA, 20 bp, Artificial Sequence
  Description of Artificial Sequence: Synthetic oligonucleotide
  Target: LAMA2; (-) strand; PAM type: NRG; PAM sequence: AGG
gtgttgaaatagtttcccta

SEQ ID NO: 76394 - DNA, 20 bp, Artificial Sequence
  Description of Artificial Sequence: Synthetic oligonucleotide
  Target: LAMA2; (-) strand; PAM type: NRG; PAM sequence: AAG
agtgttgaaatagtttccct

SEQ ID NO: 76395 - DNA, 20 bp, Artificial Sequence
  Description of Artificial Sequence: Synthetic oligonucleotide
  Target: LAMA2; (-) strand; PAM type: NRG; PAM sequence: TAG
tgatagctctagtgttgaaa

SEQ ID NO: 76396 - DNA, 20 bp, Artificial Sequence
  Description of Artificial Sequence: Synthetic oligonucleotide
  Target: LAMA2; (-) strand; PAM type: NRG; PAM sequence: TAG
aggacttttgatgatagctc

SEQ ID NO: 76397 - DNA, 20 bp, Artificial Sequence
  Description of Artificial Sequence: Synthetic oligonucleotide
  Target: LAMA2; (-) strand; PAM type: NRG; PAM sequence: TAG
gtctcaaggacttttgatga

SEQ ID NO: 76398 - DNA, 20 bp, Artificial Sequence
  Description of Artificial Sequence: Synthetic oligonucleotide
  Target: LAMA2; (-) strand; PAM type: NRG; PAM sequence: AGG
ctcctgggttacttgtctca

SEQ ID NO: 76399 - DNA, 20 bp, Artificial Sequence
  Description of Artificial Sequence: Synthetic oligonucleotide
  Target: LAMA2; (-) strand; PAM type: NRG; PAM sequence: AAG
actcctgggttacttgtctc

SEQ ID NO: 76400 - DNA, 20 bp, Artificial Sequence
  Description of Artificial Sequence: Synthetic oligonucleotide
  Target: LAMA2; (-) strand; PAM type: NRG; PAM sequence: GGG
atcataaccattccactcct

SEQ ID NO: 76401 - DNA, 20 bp, Artificial Sequence
  Description of Artificial Sequence: Synthetic oligonucleotide
  Target: LAMA2; (-) strand; PAM type: NRG; PAM sequence: TGG
aatcataaccattccactcc

SEQ ID NO: 76402 - DNA, 20 bp, Artificial Sequence
  Description of Artificial Sequence: Synthetic oligonucleotide
  Target: LAMA2; (-) strand; PAM type: NRG; PAM sequence: AAG
tctttttaagtttgcttata

SEQ ID NO: 76403 - DNA, 20 bp, Artificial Sequence
  Description of Artificial Sequence: Synthetic oligonucleotide
  Target: LAMA2; (-) strand; PAM type: NRG; PAM sequence: AAG
gcagctcctgatatcttttt

SEQ ID NO: 76404 - DNA, 20 bp, Artificial Sequence
  Description of Artificial Sequence: Synthetic oligonucleotide
  Target: LAMA2; (-) strand; PAM type: NRG; PAM sequence: CAG
atagcaggggcctagtaaag

SEQ ID NO: 76405 - DNA, 20 bp, Artificial Sequence
  Description of Artificial Sequence: Synthetic oligonucleotide
  Target: LAMA2; (-) strand; PAM type: NRG; PAM sequence: AAG
ttcatagcaggggcctagta

SEQ ID NO: 76406 - DNA, 20 bp, Artificial Sequence
  Description of Artificial Sequence: Synthetic oligonucleotide
  Target: LAMA2; (-) strand; PAM type: NRG; PAM sequence: TAG
ttcacttcatagcaggggcc

SEQ ID NO: 76407 - DNA, 20 bp, Artificial Sequence
  Description of Artificial Sequence: Synthetic oligonucleotide
  Target: LAMA2; (-) strand; PAM type: NRG; PAM sequence: GGG
cagttttcacttcatagcag

SEQ ID NO: 76408 - DNA, 20 bp, Artificial Sequence
  Description of Artificial Sequence: Synthetic oligonucleotide
  Target: LAMA2; (-) strand; PAM type: NRG; PAM sequence: GGG
ccagttttcacttcatagca

SEQ ID NO: 76409 - DNA, 20 bp, Artificial Sequence
  Description of Artificial Sequence: Synthetic oligonucleotide
  Target: LAMA2; (-) strand; PAM type: NRG; PAM sequence: AGG
tccagttttcacttcatagc

SEQ ID NO: 76410 - DNA, 20 bp, Artificial Sequence
  Description of Artificial Sequence: Synthetic oligonucleotide
  Target: LAMA2; (-) strand; PAM type: NRG; PAM sequence: CAG
ctccagttttcacttcatag

SEQ ID NO: 76411 - DNA, 20 bp, Artificial Sequence
  Description of Artificial Sequence: Synthetic oligonucleotide
  Target: LAMA2; (-) strand; PAM type: NRG; PAM sequence: TAG
tttctccagttttcacttca

SEQ ID NO: 76412 - DNA, 20 bp, Artificial Sequence
  Description of Artificial Sequence: Synthetic oligonucleotide
  Target: LAMA2; (-) strand; PAM type: NRG; PAM sequence: CAG
ctttgctgtagatttttctc

SEQ ID NO: 76413 - DNA, 20 bp, Artificial Sequence
  Description of Artificial Sequence: Synthetic oligonucleotide
  Target: LAMA2; (-) strand; PAM type: NRG; PAM sequence: TAG
caggctagaatgctttgctg

SEQ ID NO: 76414 - DNA, 20 bp, Artificial Sequence
  Description of Artificial Sequence: Synthetic oligonucleotide
  Target: LAMA2; (-) strand; PAM type: NRG; PAM sequence: TAG
aatagtacacatcctcaggc

SEQ ID NO: 76415 - DNA, 20 bp, Artificial Sequence
  Description of Artificial Sequence: Synthetic oligonucleotide
  Target: LAMA2; (-) strand; PAM type: NRG; PAM sequence: AGG
gcaaaatagtacacatcctc

SEQ ID NO: 76416 - DNA, 20 bp, Artificial Sequence
  Description of Artificial Sequence: Synthetic oligonucleotide
  Target: LAMA2; (-) strand; PAM type: NRG; PAM sequence: CAG
tgcaaaatagtacacatcct

SEQ ID NO: 76417 - DNA, 20 bp, Artificial Sequence
  Description of Artificial Sequence: Synthetic oligonucleotide
  Target: LAMA2; (-) strand; PAM type: NRG; PAM sequence: TAG
cagtctgctgtgttgcaaaa

SEQ ID NO: 76418 - DNA, 20 bp, Artificial Sequence
  Description of Artificial Sequence: Synthetic oligonucleotide
  Target: LAMA2; (-) strand; PAM type: NRG; PAM sequence: CAG
tgaaaatatttggctgtagt

SEQ ID NO: 76419 - DNA, 20 bp, Artificial Sequence
  Description of Artificial Sequence: Synthetic oligonucleotide
  Target: LAMA2; (-) strand; PAM type: NRG; PAM sequence: TAG
ccaatgaaaatatttggctg

SEQ ID NO: 76420 - DNA, 20 bp, Artificial Sequence
  Description of Artificial Sequence: Synthetic oligonucleotide
  Target: LAMA2; (-) strand; PAM type: NRG; PAM sequence: TGG
atttttccaatgaaaatatt

SEQ ID NO: 76421 - DNA, 20 bp, Artificial Sequence
  Description of Artificial Sequence: Synthetic oligonucleotide
  Target: LAMA2; (-) strand; PAM type: NRG; PAM sequence: GAG
actacccaggtagcagaatt

SEQ ID NO: 76422 - DNA, 20 bp, Artificial Sequence
  Description of Artificial Sequence: Synthetic oligonucleotide
  Target: LAMA2; (-) strand; PAM type: NRG; PAM sequence: CAG
cttatgtactacccaggtag

SEQ ID NO: 76423 - DNA, 20 bp, Artificial Sequence
  Description of Artificial Sequence: Synthetic oligonucleotide
  Target: LAMA2; (-) strand; PAM type: NRG; PAM sequence: TAG
tgtcttatgtactacccagg

SEQ ID NO: 76424 - DNA, 20 bp, Artificial Sequence
  Description of Artificial Sequence: Synthetic oligonucleotide
  Target: LAMA2; (-) strand; PAM type: NRG; PAM sequence: AGG
acatgtcttatgtactaccc

SEQ ID NO: 76425 - DNA, 20 bp, Artificial Sequence
  Description of Artificial Sequence: Synthetic oligonucleotide
  Target: LAMA2; (-) strand; PAM type: NRG; PAM sequence: CAG
tacatgtcttatgtactacc

SEQ ID NO: 76426 - DNA, 20 bp, Artificial Sequence
  Description of Artificial Sequence: Synthetic oligonucleotide
  Target: LAMA2; (-) strand; PAM type: NRG; PAM sequence: TAG
ggatttttgttatccctgat

SEQ ID NO: 76427 - DNA, 20 bp, Artificial Sequence
  Description of Artificial Sequence: Synthetic oligonucleotide
  Target: LAMA2; (-) strand; PAM type: NRG; PAM sequence: AGG
ctttgcaaaataagtatcat

SEQ ID NO: 76428 - DNA, 20 bp, Artificial Sequence
  Description of Artificial Sequence: Synthetic oligonucleotide
  Target: LAMA2; (-) strand; PAM type: NRG; PAM sequence: TAG
cctttgcaaaataagtatca

SEQ ID NO: 76429 - DNA, 20 bp, Artificial Sequence
  Description of Artificial Sequence: Synthetic oligonucleotide
  Target: LAMA2; (-) strand; PAM type: NRG; PAM sequence: AAG
gccattttcctttgcaaaat

SEQ ID NO: 76430 - DNA, 20 bp, Artificial Sequence
  Description of Artificial Sequence: Synthetic oligonucleotide
  Target: LAMA2; (-) strand; PAM type: NRG; PAM sequence: AGG
ttctaacttataaccttgcc

SEQ ID NO: 76431 - DNA, 20 bp, Artificial Sequence
  Description of Artificial Sequence: Synthetic oligonucleotide
  Target: LAMA2; (-) strand; PAM type: NRG; PAM sequence: CAG
tttctaacttataaccttgc

SEQ ID NO: 76432 - DNA, 20 bp, Artificial Sequence
  Description of Artificial Sequence: Synthetic oligonucleotide
  Target: LAMA2; (-) strand; PAM type: NRG; PAM sequence: AAG
ctaaagaacaaatttacaca

SEQ ID NO: 76433 - DNA, 20 bp, Artificial Sequence
  Description of Artificial Sequence: Synthetic oligonucleotide
  Target: LAMA2; (-) strand; PAM type: NRG; PAM sequence: AAG
ctgattactgaatgaagcta

SEQ ID NO: 76434 - DNA, 20 bp, Artificial Sequence
  Description of Artificial Sequence: Synthetic oligonucleotide
  Target: LAMA2; (-) strand; PAM type: NRG; PAM sequence: AAG
ataattctgattactgaatg

SEQ ID NO: 76435 - DNA, 20 bp, Artificial Sequence
  Description of Artificial Sequence: Synthetic oligonucleotide
  Target: LAMA2; (-) strand; PAM type: NRG; PAM sequence: AGG
aggcacttacaatttgaata

SEQ ID NO: 76436 - DNA, 20 bp, Artificial Sequence
  Description of Artificial Sequence: Synthetic oligonucleotide
  Target: LAMA2; (-) strand; PAM type: NRG; PAM sequence: AAG
aaggcacttacaatttgaat

SEQ ID NO: 76437 - DNA, 20 bp, Artificial Sequence
  Description of Artificial Sequence: Synthetic oligonucleotide
  Target: LAMA2; (-) strand; PAM type: NRG; PAM sequence: AGG
gtagtaggctcgggtttaga

SEQ ID NO: 76438 - DNA, 20 bp, Artificial Sequence
  Description of Artificial Sequence: Synthetic oligonucleotide
  Target: LAMA2; (-) strand; PAM type: NRG; PAM sequence: AAG
agtagtaggctcgggtttag

SEQ ID NO: 76439 - DNA, 20 bp, Artificial Sequence
  Description of Artificial Sequence: Synthetic oligonucleotide
  Target: LAMA2; (-) strand; PAM type: NRG; PAM sequence: TAG
aatagtagtaggctcgggtt

SEQ ID NO: 76440 - DNA, 20 bp, Artificial Sequence
  Description of Artificial Sequence: Synthetic oligonucleotide
  Target: LAMA2; (-) strand; PAM type: NRG; PAM sequence: GGG
aacataatagtagtaggctc

SEQ ID NO: 76441 - DNA, 20 bp, Artificial Sequence
  Description of Artificial Sequence: Synthetic oligonucleotide
  Target: LAMA2; (-) strand; PAM type: NRG; PAM sequence: CGG
caacataatagtagtaggct

SEQ ID NO: 76442 - DNA, 20 bp, Artificial Sequence
  Description of Artificial Sequence: Synthetic oligonucleotide
  Target: LAMA2; (-) strand; PAM type: NRG; PAM sequence: AGG
tggctcaacataatagtagt

SEQ ID NO: 76443 - DNA, 20 bp, Artificial Sequence
  Description of Artificial Sequence: Synthetic oligonucleotide
  Target: LAMA2; (-) strand; PAM type: NRG; PAM sequence: TAG
atggctcaacataatagtag

SEQ ID NO: 76444 - DNA, 20 bp, Artificial Sequence
  Description of Artificial Sequence: Synthetic oligonucleotide
  Target: LAMA2; (-) strand; PAM type: NRG; PAM sequence: TAG
cccatggctcaacataatag

SEQ ID NO: 76445 - DNA, 20 bp, Artificial Sequence
  Description of Artificial Sequence: Synthetic oligonucleotide
  Target: LAMA2; (-) strand; PAM type: NRG; PAM sequence: TAG
tttcccatggctcaacataa

SEQ ID NO: 76446 - DNA, 20 bp, Artificial Sequence
  Description of Artificial Sequence: Synthetic oligonucleotide
  Target: LAMA2; (-) strand; PAM type: NRG; PAM sequence: TGG
caaatattggcaatttccca

SEQ ID NO: 76447 - DNA, 20 bp, Artificial Sequence
  Description of Artificial Sequence: Synthetic oligonucleotide
  Target: LAMA2; (-) strand; PAM type: NRG; PAM sequence: TGG
ggactaaaatagtcaaatat

SEQ ID NO: 76448 - DNA, 20 bp, Artificial Sequence
  Description of Artificial Sequence: Synthetic oligonucleotide
  Target: LAMA2; (-) strand; PAM type: NRG; PAM sequence: TAG
tgcattttaatggactaaaa

SEQ ID NO: 76449 - DNA, 20 bp, Artificial Sequence
  Description of Artificial Sequence: Synthetic oligonucleotide
  Target: LAMA2; (-) strand; PAM type: NRG; PAM sequence: TGG
catatgaaactgcattttaa

SEQ ID NO: 76450 - DNA, 20 bp, Artificial Sequence
  Description of Artificial Sequence: Synthetic oligonucleotide
  Target: LAMA2; (-) strand; PAM type: NRG; PAM sequence: TAG
attcatgctttggcacatat

SEQ ID NO: 76451 - DNA, 20 bp, Artificial Sequence
  Description of Artificial Sequence: Synthetic oligonucleotide
  Target: LAMA2; (-) strand; PAM type: NRG; PAM sequence: TGG
aagtatttctattcatgctt

SEQ ID NO: 76452 - DNA, 20 bp, Artificial Sequence
  Description of Artificial Sequence: Synthetic oligonucleotide
  Target: LAMA2; (-) strand; PAM type: NRG; PAM sequence: AAG
acttaggacagtattcctgc

SEQ ID NO: 76453 - DNA, 20 bp, Artificial Sequence
  Description of Artificial Sequence: Synthetic oligonucleotide
  Target: LAMA2; (-) strand; PAM type: NRG; PAM sequence: CAG
atctgaggttatacttagga

SEQ ID NO: 76454 - DNA, 20 bp, Artificial Sequence
  Description of Artificial Sequence: Synthetic oligonucleotide
  Target: LAMA2; (-) strand; PAM type: NRG; PAM sequence: AGG
gtgcatctgaggttatactt

SEQ ID NO: 76455 - DNA, 20 bp, Artificial Sequence
  Description of Artificial Sequence: Synthetic oligonucleotide
  Target: LAMA2; (-) strand; PAM type: NRG; PAM sequence: TAG
tgtgcatctgaggttatact

SEQ ID NO: 76456 - DNA, 20 bp, Artificial Sequence
  Description of Artificial Sequence: Synthetic oligonucleotide
  Target: LAMA2; (-) strand; PAM type: NRG; PAM sequence: AGG
taaaatactgtgtgcatctg

SEQ ID NO: 76457 - DNA, 20 bp, Artificial Sequence
  Description of Artificial Sequence: Synthetic oligonucleotide
  Target: LAMA2; (-) strand; PAM type: NRG; PAM sequence: GAG
ctaaaatactgtgtgcatct

SEQ ID NO: 76458 - DNA, 20 bp, Artificial Sequence
  Description of Artificial Sequence: Synthetic oligonucleotide
  Target: LAMA2; (-) strand; PAM type: NRG; PAM sequence: AGG
ttataaattgtttcagtgaa

SEQ ID NO: 76459 - DNA, 20 bp, Artificial Sequence
  Description of Artificial Sequence: Synthetic oligonucleotide
  Target: LAMA2; (-) strand; PAM type: NRG; PAM sequence: AAG
cttataaattgtttcagtga

SEQ ID NO: 76460 - DNA, 20 bp, Artificial Sequence
  Description of Artificial Sequence: Synthetic oligonucleotide
  Target: LAMA2; (-) strand; PAM type: NRG; PAM sequence: CAG
attatacttataaattgttt

SEQ ID NO: 76461 - DNA, 20 bp, Artificial Sequence
  Description of Artificial Sequence: Synthetic oligonucleotide
  Target: LAMA2; (-) strand; PAM type: NRG; PAM sequence: AGG
ttactaatttggtaaagaaa

SEQ ID NO: 76462 - DNA, 20 bp, Artificial Sequence
  Description of Artificial Sequence: Synthetic oligonucleotide
  Target: LAMA2; (-) strand; PAM type: NRG; PAM sequence: AAG
attactaatttggtaaagaa

SEQ ID NO: 76463 - DNA, 20 bp, Artificial Sequence
  Description of Artificial Sequence: Synthetic oligonucleotide
  Target: LAMA2; (-) strand; PAM type: NRG; PAM sequence: AAG
accatattactaatttggta

SEQ ID NO: 76464 - DNA, 20 bp, Artificial Sequence
  Description of Artificial Sequence: Synthetic oligonucleotide
  Target: LAMA2; (-) strand; PAM type: NRG; PAM sequence: TGG
tattcaccatattactaatt

SEQ ID NO: 76465 - DNA, 20 bp, Artificial Sequence
  Description of Artificial Sequence: Synthetic oligonucleotide
  Target: LAMA2; (-) strand; PAM type: NRG; PAM sequence: TAG
aatgtagtatgactcaggtt

SEQ ID NO: 76466 - DNA, 20 bp, Artificial Sequence
  Description of Artificial Sequence: Synthetic oligonucleotide
  Target: LAMA2; (-) strand; PAM type: NRG; PAM sequence: AGG
aaacaaatgtagtatgactc

SEQ ID NO: 76467 - DNA, 20 bp, Artificial Sequence
  Description of Artificial Sequence: Synthetic oligonucleotide
  Target: LAMA2; (-) strand; PAM type: NRG; PAM sequence: CAG
aaaacaaatgtagtatgact

SEQ ID NO: 76468 - DNA, 20 bp, Artificial Sequence
  Description of Artificial Sequence: Synthetic oligonucleotide
  Target: LAMA2; (-) strand; PAM type: NRG; PAM sequence: TAG
acaaaatttaaaaacaaatg

SEQ ID NO: 76469 - DNA, 20 bp, Artificial Sequence
  Description of Artificial Sequence: Synthetic oligonucleotide
  Target: LAMA2; (-) strand; PAM type: NRG; PAM sequence: TAG
ctgatataatgcctgattac

SEQ ID NO: 76470 - DNA, 20 bp, Artificial Sequence
  Description of Artificial Sequence: Synthetic oligonucleotide
  Target: LAMA2; (-) strand; PAM type: NRG; PAM sequence: TAG
gtataccaccaactttcatg

SEQ ID NO: 76471 - DNA, 20 bp, Artificial Sequence
  Description of Artificial Sequence: Synthetic oligonucleotide
  Target: LAMA2; (-) strand; PAM type: NRG; PAM sequence: TGG
acagttcccaaacttactac

SEQ ID NO: 76472 - DNA, 20 bp, Artificial Sequence
  Description of Artificial Sequence: Synthetic oligonucleotide
  Target: LAMA2; (-) strand; PAM type: NRG; PAM sequence: CAG
ttctgtgagccaaaacaaca

SEQ ID NO: 76473 - DNA, 20 bp, Artificial Sequence
  Description of Artificial Sequence: Synthetic oligonucleotide
  Target: LAMA2; (-) strand; PAM type: NRG; PAM sequence: GAG
atacacgctttatattctgt

SEQ ID NO: 76474 - DNA, 20 bp, Artificial Sequence
  Description of Artificial Sequence: Synthetic oligonucleotide
  Target: LAMA2; (-) strand; PAM type: NRG; PAM sequence: AGG
gtgtgtctatgtggaaacac

SEQ ID NO: 76475 - DNA, 20 bp, Artificial Sequence
  Description of Artificial Sequence: Synthetic oligonucleotide
  Target: LAMA2; (-) strand; PAM type: NRG; PAM sequence: CAG
agtgtgtctatgtggaaaca

SEQ ID NO: 76476 - DNA, 20 bp, Artificial Sequence
  Description of Artificial Sequence: Synthetic oligonucleotide
  Target: LAMA2; (-) strand; PAM type: NRG; PAM sequence: TGG
ggtaacagagtgtgtctatg

SEQ ID NO: 76477 - DNA, 20 bp, Artificial Sequence
  Description of Artificial Sequence: Synthetic oligonucleotide
  Target: LAMA2; (-) strand; PAM type: NRG; PAM sequence: GAG
caatacatataagggtaaca

SEQ ID NO: 76478 - DNA, 20 bp, Artificial Sequence
  Description of Artificial Sequence: Synthetic oligonucleotide
  Target: LAMA2; (-) strand; PAM type: NRG; PAM sequence: CAG
tacaatacatataagggtaa

SEQ ID NO: 76479 - DNA, 20 bp, Artificial Sequence
  Description of Artificial Sequence: Synthetic oligonucleotide
  Target: LAMA2; (-) strand; PAM type: NRG; PAM sequence: GGG
tgattatacaatacatataa

SEQ ID NO: 76480 - DNA, 20 bp, Artificial Sequence
  Description of Artificial Sequence: Synthetic oligonucleotide
  Target: LAMA2; (-) strand; PAM type: NRG; PAM sequence: AGG
gtgattatacaatacatata

SEQ ID NO: 76481 - DNA, 20 bp, Artificial Sequence
  Description of Artificial Sequence: Synthetic oligonucleotide
  Target: LAMA2; (-) strand; PAM type: NRG; PAM sequence: AAG
tgtgattatacaatacatat

SEQ ID NO: 76482 - DNA, 20 bp, Artificial Sequence
  Description of Artificial Sequence: Synthetic oligonucleotide
  Target: LAMA2; (-) strand; PAM type: NRG; PAM sequence: CAG
aaaggtgtcaactgtcactc

SEQ ID NO: 76483 - DNA, 20 bp, Artificial Sequence
  Description of Artificial Sequence: Synthetic oligonucleotide
  Target: LAMA2; (-) strand; PAM type: NRG; PAM sequence: AGG
acatgtaaaatgcccctaaa

SEQ ID NO: 76484 - DNA, 20 bp, Artificial Sequence
  Description of Artificial Sequence: Synthetic oligonucleotide
  Target: LAMA2; (-) strand; PAM type: NRG; PAM sequence: AAG
aacatgtaaaatgcccctaa

SEQ ID NO: 76485 - DNA, 20 bp, Artificial Sequence
  Description of Artificial Sequence: Synthetic oligonucleotide
  Target: LAMA2; (-) strand; PAM type: NRG; PAM sequence: AGG
aagtgctgtaagtggatgtc

SEQ ID NO: 76486 - DNA, 20 bp, Artificial Sequence
  Description of Artificial Sequence: Synthetic oligonucleotide
  Target: LAMA2; (-) strand; PAM type: NRG; PAM sequence: CAG
taagtgctgtaagtggatgt

SEQ ID NO: 76487 - DNA, 20 bp, Artificial Sequence
  Description of Artificial Sequence: Synthetic oligonucleotide
  Target: LAMA2; (-) strand; PAM type: NRG; PAM sequence: TGG
tagtagataagtgctgtaag

SEQ ID NO: 76488 - DNA, 20 bp, Artificial Sequence
  Description of Artificial Sequence: Synthetic oligonucleotide
  Target: LAMA2; (-) strand; PAM type: NRG; PAM sequence: AAG
gagtagtagataagtgctgt

SEQ ID NO: 76489 - DNA, 20 bp, Artificial Sequence
  Description of Artificial Sequence: Synthetic oligonucleotide
  Target: LAMA2; (-) strand; PAM type: NRG; PAM sequence: AAG
tcctgaagagagtagtagat

SEQ ID NO: 76490 - DNA, 20 bp, Artificial Sequence
  Description of Artificial Sequence: Synthetic oligonucleotide
  Target: LAMA2; (-) strand; PAM type: NRG; PAM sequence: TAG
gtttatcctgaagagagtag

SEQ ID NO: 76491 - DNA, 20 bp, Artificial Sequence
  Description of Artificial Sequence: Synthetic oligonucleotide
  Target: LAMA2; (-) strand; PAM type: NRG; PAM sequence: TAG
gtagtttatcctgaagagag

SEQ ID NO: 76492 - DNA, 20 bp, Artificial Sequence
  Description of Artificial Sequence: Synthetic oligonucleotide
  Target: LAMA2; (-) strand; PAM type: NRG; PAM sequence: GAG
aaggtagtttatcctgaaga

SEQ ID NO: 76493 - DNA, 20 bp, Artificial Sequence
  Description of Artificial Sequence: Synthetic oligonucleotide
  Target: LAMA2; (-) strand; PAM type: NRG; PAM sequence: GAG
taaaggtagtttatcctgaa

SEQ ID NO: 76494 - DNA, 20 bp, Artificial Sequence
  Description of Artificial Sequence: Synthetic oligonucleotide
  Target: LAMA2; (-) strand; PAM type: NRG; PAM sequence: AAG
aataaaggtagtttatcctg

SEQ ID NO: 76495 - DNA, 20 bp, Artificial Sequence
  Description of Artificial Sequence: Synthetic oligonucleotide
  Target: LAMA2; (-) strand; PAM type: NRG; PAM sequence: TAG
caaaagtcttgcaataaagg

SEQ ID NO: 76496 - DNA, 20 bp, Artificial Sequence
  Description of Artificial Sequence: Synthetic oligonucleotide
  Target: LAMA2; (-) strand; PAM type: NRG; PAM sequence: AGG
tagcaaaagtcttgcaataa

SEQ ID NO: 76497 - DNA, 20 bp, Artificial Sequence
  Description of Artificial Sequence: Synthetic oligonucleotide
  Target: LAMA2; (-) strand; PAM type: NRG; PAM sequence: AAG
ttagcaaaagtcttgcaata

SEQ ID NO: 76498 - DNA, 20 bp, Artificial Sequence
  Description of Artificial Sequence: Synthetic oligonucleotide
  Target: LAMA2; (-) strand; PAM type: NRG; PAM sequence: AAG
aatctaagaatttttagcaa

SEQ ID NO: 76499 - DNA, 20 bp, Artificial Sequence
  Description of Artificial Sequence: Synthetic oligonucleotide
  Target: LAMA2; (-) strand; PAM type: NRG; PAM sequence: TAG
tgacataatctaagaatttt

SEQ ID NO: 76500 - DNA, 20 bp, Artificial Sequence
  Description of Artificial Sequence: Synthetic oligonucleotide
  Target: LAMA2; (-) strand; PAM type: NRG; PAM sequence: AAG
tttttcccttgacataatct

SEQ ID NO: 76501 - DNA, 20 bp, Artificial Sequence
  Description of Artificial Sequence: Synthetic oligonucleotide
  Target: LAMA2; (-) strand; PAM type: NRG; PAM sequence: AGG
ttttctttaaaaagcaatag

SEQ ID NO: 76502 - DNA, 20 bp, Artificial Sequence
  Description of Artificial Sequence: Synthetic oligonucleotide
  Target: LAMA2; (-) strand; PAM type: NRG; PAM sequence: GAG
tttttctttaaaaagcaata

SEQ ID NO: 76503 - DNA, 20 bp, Artificial Sequence
  Description of Artificial Sequence: Synthetic oligonucleotide
  Target: LAMA2; (-) strand; PAM type: NRG; PAM sequence: TAG
attttttctttaaaaagcaa

SEQ ID NO: 76504 - DNA, 20 bp, Artificial Sequence
  Description of Artificial Sequence: Synthetic oligonucleotide
  Target: LAMA2; (-) strand; PAM type: NRG; PAM sequence: AAG
ctgataattttttctttaaa

SEQ ID NO: 76505 - DNA, 20 bp, Artificial Sequence
  Description of Artificial Sequence: Synthetic oligonucleotide
  Target: LAMA2; (-) strand; PAM type: NRG; PAM sequence: GAG
tgaaataacaaactaatgtg

SEQ ID NO: 76506 - DNA, 20 bp, Artificial Sequence
  Description of Artificial Sequence: Synthetic oligonucleotide
  Target: LAMA2; (-) strand; PAM type: NRG; PAM sequence: TGG
actgaaataacaaactaatg

SEQ ID NO: 76507 - DNA, 20 bp, Artificial Sequence
  Description of Artificial Sequence: Synthetic oligonucleotide
  Target: LAMA2; (-) strand; PAM type: NRG; PAM sequence: GAG
aacaaattgaaataatggaa

SEQ ID NO: 76508 - DNA, 20 bp, Artificial Sequence
  Description of Artificial Sequence: Synthetic oligonucleotide
  Target: LAMA2; (-) strand; PAM type: NRG; PAM sequence: AAG
gtaacaaattgaaataatgg

SEQ ID NO: 76509 - DNA, 20 bp, Artificial Sequence
  Description of Artificial Sequence: Synthetic oligonucleotide
  Target: LAMA2; (-) strand; PAM type: NRG; PAM sequence: TGG
aatgtaacaaattgaaataa

SEQ ID NO: 76510 - DNA, 20 bp, Artificial Sequence
  Description of Artificial Sequence: Synthetic oligonucleotide
  Target: LAMA2; (-) strand; PAM type: NRG; PAM sequence: TGG
ttatctttctatgagataaa

SEQ ID NO: 76511 - DNA, 20 bp, Artificial Sequence
  Description of Artificial Sequence: Synthetic oligonucleotide
  Target: LAMA2; (-) strand; PAM type: NRG; PAM sequence: GAG
acaaaagtttatctttctat

SEQ ID NO: 76512 - DNA, 20 bp, Artificial Sequence
  Description of Artificial Sequence: Synthetic oligonucleotide
  Target: LAMA2; (-) strand; PAM type: NRG; PAM sequence: AAG
ccacagctaattcaacacaa

SEQ ID NO: 76513 - DNA, 20 bp, Artificial Sequence
  Description of Artificial Sequence: Synthetic oligonucleotide
  Target: LAMA2; (-) strand; PAM type: NRG; PAM sequence: CAG
atgtgtgagctggtcttcca

SEQ ID NO: 76514 - DNA, 20 bp, Artificial Sequence
  Description of Artificial Sequence: Synthetic oligonucleotide
  Target: LAMA2; (-) strand; PAM type: NRG; PAM sequence: TGG
gtagtgattaatgtgtgagc

SEQ ID NO: 76515 - DNA, 20 bp, Artificial Sequence
  Description of Artificial Sequence: Synthetic oligonucleotide
  Target: LAMA2; (-) strand; PAM type: NRG; PAM sequence: GAG
cttagtagtgattaatgtgt

SEQ ID NO: 76516 - DNA, 20 bp, Artificial Sequence
  Description of Artificial Sequence: Synthetic oligonucleotide
  Target: LAMA2; (-) strand; PAM type: NRG; PAM sequence: TAG
tttgtaacgcatttgcttag

SEQ ID NO: 76517 - DNA, 20 bp, Artificial Sequence
  Description of Artificial Sequence: Synthetic oligonucleotide
  Target: LAMA2; (-) strand; PAM type: NRG; PAM sequence: TAG
ttttttgtaacgcatttgct

SEQ ID NO: 76518 - DNA, 20 bp, Artificial Sequence
  Description of Artificial Sequence: Synthetic oligonucleotide
  Target: LAMA2; (-) strand; PAM type: NRG; PAM sequence: CAG
gttgaactgaaactgtattc

SEQ ID NO: 76519 - DNA, 20 bp, Artificial Sequence
  Description of Artificial Sequence: Synthetic oligonucleotide
  Target: LAMA2; (-) strand; PAM type: NRG; PAM sequence: TGG
catgatatcaaatcgtttgg

SEQ ID NO: 76520 - DNA, 20 bp, Artificial Sequence
  Description of Artificial Sequence: Synthetic oligonucleotide
  Target: LAMA2; (-) strand; PAM type: NRG; PAM sequence: TGG
attcatgatatcaaatcgtt

SEQ ID NO: 76521 - DNA, 20 bp, Artificial Sequence
  Description of Artificial Sequence: Synthetic oligonucleotide
  Target: LAMA2; (-) strand; PAM type: NRG; PAM sequence: AAG
cttactggctacatataccc

SEQ ID NO: 76522 - DNA, 20 bp, Artificial Sequence
  Description of Artificial Sequence: Synthetic oligonucleotide
  Target: LAMA2; (-) strand; PAM type: NRG; PAM sequence: TGG
aaatgttgaggtctacttac

SEQ ID NO: 76523 - DNA, 20 bp, Artificial Sequence
  Description of Artificial Sequence: Synthetic oligonucleotide
  Target: LAMA2; (-) strand; PAM type: NRG; PAM sequence: AGG
aaaaaaatagctaaatgttg

SEQ ID NO: 76524 - DNA, 20 bp, Artificial Sequence
  Description of Artificial Sequence: Synthetic oligonucleotide
  Target: LAMA2; (-) strand; PAM type: NRG; PAM sequence: GAG
gaaaaaaatagctaaatgtt

SEQ ID NO: 76525 - DNA, 20 bp, Artificial Sequence
  Description of Artificial Sequence: Synthetic oligonucleotide
  Target: LAMA2; (-) strand; PAM type: NRG; PAM sequence: TAG
tatttatttattgaaaaaaa

SEQ ID NO: 76526 - DNA, 20 bp, Artificial Sequence
  Description of Artificial Sequence: Synthetic oligonucleotide
  Target: LAMA2; (-) strand; PAM type: NRG; PAM sequence: CAG
gacagtgtttgccataaaga

SEQ ID NO: 76527 - DNA, 20 bp, Artificial Sequence
  Description of Artificial Sequence: Synthetic oligonucleotide
  Target: LAMA2; (-) strand; PAM type: NRG; PAM sequence: AAG
ctaagacagtgtttgccata

SEQ ID NO: 76528 - DNA, 20 bp, Artificial Sequence
  Description of Artificial Sequence: Synthetic oligonucleotide
  Target: LAMA2; (-) strand; PAM type: NRG; PAM sequence: CAG
attatcccctgcacctaaga

SEQ ID NO: 76529 - DNA, 20 bp, Artificial Sequence
  Description of Artificial Sequence: Synthetic oligonucleotide
  Target: LAMA2; (-) strand; PAM type: NRG; PAM sequence: AAG
gtccattatcccctgcacct

SEQ ID NO: 76530 - DNA, 20 bp, Artificial Sequence
  Description of Artificial Sequence: Synthetic oligonucleotide
  Target: LAMA2; (-) strand; PAM type: NRG; PAM sequence: AAG
tctcttatctaatcccccaa

SEQ ID NO: 76531 - DNA, 20 bp, Artificial Sequence
  Description of Artificial Sequence: Synthetic oligonucleotide
  Target: LAMA2; (-) strand; PAM type: NRG; PAM sequence: GAG
aaccagacttttctgtgcta

SEQ ID NO: 76532 - DNA, 20 bp, Artificial Sequence
  Description of Artificial Sequence: Synthetic oligonucleotide
  Target: LAMA2; (-) strand; PAM type: NRG; PAM sequence: TAG
gtaaccagacttttctgtgc

SEQ ID NO: 76533 - DNA, 20 bp, Artificial Sequence
  Description of Artificial Sequence: Synthetic oligonucleotide
  Target: LAMA2; (-) strand; PAM type: NRG; PAM sequence: CAG
tctctctgtaatcttgtaac

SEQ ID NO: 76534 - DNA, 20 bp, Artificial Sequence
  Description of Artificial Sequence: Synthetic oligonucleotide
  Target: LAMA2; (-) strand; PAM type: NRG; PAM sequence: CAG
gttccctagacaagtcacta

SEQ ID NO: 76535 - DNA, 20 bp, Artificial Sequence
  Description of Artificial Sequence: Synthetic oligonucleotide
  Target: LAMA2; (-) strand; PAM type: NRG; PAM sequence: AAG
aaccacacagttccctagac

SEQ ID NO: 76536 - DNA, 20 bp, Artificial Sequence
  Description of Artificial Sequence: Synthetic oligonucleotide
  Target: LAMA2; (-) strand; PAM type: NRG; PAM sequence: TAG
gtggcaaccacacagttccc

SEQ ID NO: 76537 - DNA, 20 bp, Artificial Sequence
  Description of Artificial Sequence: Synthetic oligonucleotide
  Target: LAMA2; (-) strand; PAM type: NRG; PAM sequence: CAG
ttttctatgtggcaaccaca

SEQ ID NO: 76538 - DNA, 20 bp, Artificial Sequence
  Description of Artificial Sequence: Synthetic oligonucleotide
  Target: LAMA2; (-) strand; PAM type: NRG; PAM sequence: TGG
tcccttccacattttctatg

SEQ ID NO: 76539 - DNA, 20 bp, Artificial Sequence
  Description of Artificial Sequence: Synthetic oligonucleotide
  Target: LAMA2; (-) strand; PAM type: NRG; PAM sequence: TAG
caaggcaattgctaggaaca

SEQ ID NO: 76540 - DNA, 20 bp, Artificial Sequence
  Description of Artificial Sequence: Synthetic oligonucleotide
  Target: LAMA2; (-) strand; PAM type: NRG; PAM sequence: AGG
ggtgagtcaaggcaattgct

SEQ ID NO: 76541 - DNA, 20 bp, Artificial Sequence
  Description of Artificial Sequence: Synthetic oligonucleotide
  Target: LAMA2; (-) strand; PAM type: NRG; PAM sequence: TAG
tggtgagtcaaggcaattgc

SEQ ID NO: 76542 - DNA, 20 bp, Artificial Sequence
  Description of Artificial Sequence: Synthetic oligonucleotide
  Target: LAMA2; (-) strand; PAM type: NRG; PAM sequence: AGG
gaaataattatggtgagtca

SEQ ID NO: 76543 - DNA, 20 bp, Artificial Sequence
  Description of Artificial Sequence: Synthetic oligonucleotide
  Target: LAMA2; (-) strand; PAM type: NRG; PAM sequence: AAG
tgaaataattatggtgagtc

SEQ ID NO: 76544 - DNA, 20 bp, Artificial Sequence
  Description of Artificial Sequence: Synthetic oligonucleotide
  Target: LAMA2; (-) strand; PAM type: NRG; PAM sequence: GAG
gtaggtgaaataattatggt

SEQ ID NO: 76545 - DNA, 20 bp, Artificial Sequence
  Description of Artificial Sequence: Synthetic oligonucleotide
  Target: LAMA2; (-) strand; PAM type: NRG; PAM sequence: TGG
ttcagtaggtgaaataatta

SEQ ID NO: 76546 - DNA, 20 bp, Artificial Sequence
  Description of Artificial Sequence: Synthetic oligonucleotide
  Target: LAMA2; (-) strand; PAM type: NRG; PAM sequence: AGG
aatttattcagttattcagt

SEQ ID NO: 76547 - DNA, 20 bp, Artificial Sequence
  Description of Artificial Sequence: Synthetic oligonucleotide
  Target: LAMA2; (-) strand; PAM type: NRG; PAM sequence: TAG
caatttattcagttattcag

SEQ ID NO: 76548 - DNA, 20 bp, Artificial Sequence
  Description of Artificial Sequence: Synthetic oligonucleotide
  Target: LAMA2; (-) strand; PAM type: NRG; PAM sequence: CAG
actcaatttattcagttatt

SEQ ID NO: 76549 - DNA, 20 bp, Artificial Sequence
  Description of Artificial Sequence: Synthetic oligonucleotide
  Target: LAMA2; (-) strand; PAM type: NRG; PAM sequence: CAG
gcctctctactcaatttatt

SEQ ID NO: 76550 - DNA, 20 bp, Artificial Sequence
  Description of Artificial Sequence: Synthetic oligonucleotide
  Target: LAMA2; (-) strand; PAM type: NRG; PAM sequence: CAG
gttttacagtttggtacaag

SEQ ID NO: 76551 - DNA, 20 bp, Artificial Sequence
  Description of Artificial Sequence: Synthetic oligonucleotide
  Target: LAMA2; (-) strand; PAM type: NRG; PAM sequence: AAG
actgttttacagtttggtac

SEQ ID NO: 76552 - DNA, 20 bp, Artificial Sequence
  Description of Artificial Sequence: Synthetic oligonucleotide
  Target: LAMA2; (-) strand; PAM type: NRG; PAM sequence: TGG
cctgaaactgttttacagtt

SEQ ID NO: 76553 - DNA, 20 bp, Artificial Sequence
  Description of Artificial Sequence: Synthetic oligonucleotide
  Target: LAMA2; (-) strand; PAM type: NRG; PAM sequence: CAG
ctcatcctgaaactgtttta

SEQ ID NO: 76554 - DNA, 20 bp, Artificial Sequence
  Description of Artificial Sequence: Synthetic oligonucleotide
  Target: LAMA2; (-) strand; PAM type: NRG; PAM sequence: AAG
tttttgtttttgttttccct

SEQ ID NO: 76555 - DNA, 20 bp, Artificial Sequence
  Description of Artificial Sequence: Synthetic oligonucleotide
  Target: LAMA2; (-) strand; PAM type: NRG; PAM sequence: AGG
atgacatgtttctgcaaggc

SEQ ID NO: 76556 - DNA, 20 bp, Artificial Sequence
  Description of Artificial Sequence: Synthetic oligonucleotide
  Target: LAMA2; (-) strand; PAM type: NRG; PAM sequence: CAG
tatgacatgtttctgcaagg

SEQ ID NO: 76557 - DNA, 20 bp, Artificial Sequence
  Description of Artificial Sequence: Synthetic oligonucleotide
  Target: LAMA2; (-) strand; PAM type: NRG; PAM sequence: AGG
ttctatgacatgtttctgca

SEQ ID NO: 76558 - DNA, 20 bp, Artificial Sequence
  Description of Artificial Sequence: Synthetic oligonucleotide
  Target: LAMA2; (-) strand; PAM type: NRG; PAM sequence: AAG
tttctatgacatgtttctgc

SEQ ID NO: 76559 - DNA, 20 bp, Artificial Sequence
  Description of Artificial Sequence: Synthetic oligonucleotide
  Target: LAMA2; (-) strand; PAM type: NRG; PAM sequence: GGG
ttaatcacaattgttgtaca

SEQ ID NO: 76560 - DNA, 20 bp, Artificial Sequence
  Description of Artificial Sequence: Synthetic oligonucleotide
  Target: LAMA2; (-) strand; PAM type: NRG; PAM sequence: AGG
cttaatcacaattgttgtac

SEQ ID NO: 76561 - DNA, 20 bp, Artificial Sequence
  Description of Artificial Sequence: Synthetic oligonucleotide
  Target: LAMA2; (-) strand; PAM type: NRG; PAM sequence: CAG
acttaatcacaattgttgta

SEQ ID NO: 76562 - DNA, 20 bp, Artificial Sequence
  Description of Artificial Sequence: Synthetic oligonucleotide
  Target: LAMA2; (-) strand; PAM type: NRG; PAM sequence: AAG
aggatgcattgtataagcta

SEQ ID NO: 76563 - DNA, 20 bp, Artificial Sequence
  Description of Artificial Sequence: Synthetic oligonucleotide
  Target: LAMA2; (-) strand; PAM type: NRG; PAM sequence: AAG
taaaacaggatgcattgtat

SEQ ID NO: 76564 - DNA, 20 bp, Artificial Sequence
  Description of Artificial Sequence: Synthetic oligonucleotide
  Target: LAMA2; (-) strand; PAM type: NRG; PAM sequence: AGG
ttggaaaacaattataaaac

SEQ ID NO: 76565 - DNA, 20 bp, Artificial Sequence
  Description of Artificial Sequence: Synthetic oligonucleotide
  Target: LAMA2; (-) strand; PAM type: NRG; PAM sequence: CAG
gttggaaaacaattataaaa

SEQ ID NO: 76566 - DNA, 20 bp, Artificial Sequence
  Description of Artificial Sequence: Synthetic oligonucleotide
  Target: LAMA2; (-) strand; PAM type: NRG; PAM sequence: TGG
tcccattatgtaaacattgt

SEQ ID NO: 76567 - DNA, 20 bp, Artificial Sequence
  Description of Artificial Sequence: Synthetic oligonucleotide
  Target: LAMA2; (-) strand; PAM type: NRG; PAM sequence: GAG
acagagcccctcatgttaaa

SEQ ID NO: 76568 - DNA, 20 bp, Artificial Sequence
  Description of Artificial Sequence: Synthetic oligonucleotide
  Target: LAMA2; (-) strand; PAM type: NRG; PAM sequence: AAG
tgacagagcccctcatgtta

SEQ ID NO: 76569 - DNA, 20 bp, Artificial Sequence
  Description of Artificial Sequence: Synthetic oligonucleotide
  Target: LAMA2; (-) strand; PAM type: NRG; PAM sequence: GAG
acactgcaattctagtgaca

SEQ ID NO: 76570 - DNA, 20 bp, Artificial Sequence
  Description of Artificial Sequence: Synthetic oligonucleotide
  Target: LAMA2; (-) strand; PAM type: NRG; PAM sequence: CAG
acacactgcaattctagtga

SEQ ID NO: 76571 - DNA, 20 bp, Artificial Sequence
  Description of Artificial Sequence: Synthetic oligonucleotide
  Target: LAMA2; (-) strand; PAM type: NRG; PAM sequence: TAG
gggctaacacactgcaattc

SEQ ID NO: 76572 - DNA, 20 bp, Artificial Sequence
  Description of Artificial Sequence: Synthetic oligonucleotide
  Target: LAMA2; (-) strand; PAM type: NRG; PAM sequence: GGG
aaaacactggagaaaatgag

SEQ ID NO: 76573 - DNA, 20 bp, Artificial Sequence
  Description of Artificial Sequence: Synthetic oligonucleotide
  Target: LAMA2; (-) strand; PAM type: NRG; PAM sequence: GGG
aaaaacactggagaaaatga

SEQ ID NO: 76574 - DNA, 20 bp, Artificial Sequence
  Description of Artificial Sequence: Synthetic oligonucleotide
  Target: LAMA2; (-) strand; PAM type: NRG; PAM sequence: AGG
caaaaacactggagaaaatg

SEQ ID NO: 76575 - DNA, 20 bp, Artificial Sequence
  Description of Artificial Sequence: Synthetic oligonucleotide
  Target: LAMA2; (-) strand; PAM type: NRG; PAM sequence: GAG
acaaaaacactggagaaaat

SEQ ID NO: 76576 - DNA, 20 bp, Artificial Sequence
  Description of Artificial Sequence: Synthetic oligonucleotide
  Target: LAMA2; (-) strand; PAM type: NRG; PAM sequence: GAG
aaagatttacaaaaacactg

SEQ ID NO: 76577 - DNA, 20 bp, Artificial Sequence
  Description of Artificial Sequence: Synthetic oligonucleotide
  Target: LAMA2; (-) strand; PAM type: NRG; PAM sequence: TGG
ggaaagatttacaaaaacac

SEQ ID NO: 76578 - DNA, 20 bp, Artificial Sequence
  Description of Artificial Sequence: Synthetic oligonucleotide
  Target: LAMA2; (-) strand; PAM type: NRG; PAM sequence: AAG
attaaaagattgtcaatgga

SEQ ID NO: 76579 - DNA, 20 bp, Artificial Sequence
  Description of Artificial Sequence: Synthetic oligonucleotide
  Target: LAMA2; (-) strand; PAM type: NRG; PAM sequence: TGG
aattattaaaagattgtcaa

SEQ ID NO: 76580 - DNA, 20 bp, Artificial Sequence
  Description of Artificial Sequence: Synthetic oligonucleotide
  Target: LAMA2; (-) strand; PAM type: NRG; PAM sequence: AAG
attgttttggaaattattaa

SEQ ID NO: 76581 - DNA, 20 bp, Artificial Sequence
  Description of Artificial Sequence: Synthetic oligonucleotide
  Target: LAMA2; (-) strand; PAM type: NRG; PAM sequence: TGG
aacattacccccgattgttt

SEQ ID NO: 76582 - DNA, 20 bp, Artificial Sequence
  Description of Artificial Sequence: Synthetic oligonucleotide
  Target: LAMA2; (-) strand; PAM type: NRG; PAM sequence: TAG
attcatttatgacaagaact

SEQ ID NO: 76583 - DNA, 20 bp, Artificial Sequence
  Description of Artificial Sequence: Synthetic oligonucleotide
  Target: LAMA2; (-) strand; PAM type: NRG; PAM sequence: AAG
tggattgattcatttatgac

SEQ ID NO: 76584 - DNA, 20 bp, Artificial Sequence
  Description of Artificial Sequence: Synthetic oligonucleotide
  Target: LAMA2; (-) strand; PAM type: NRG; PAM sequence: TGG
tacatccatctcctgccaac

SEQ ID NO: 76585 - DNA, 20 bp, Artificial Sequence
  Description of Artificial Sequence: Synthetic oligonucleotide
  Target: LAMA2; (-) strand; PAM type: NRG; PAM sequence: AAG
tagcacggaacaccagcaaa

SEQ ID NO: 76586 - DNA, 20 bp, Artificial Sequence
  Description of Artificial Sequence: Synthetic oligonucleotide
  Target: LAMA2; (-) strand; PAM type: NRG; PAM sequence: CAG
cttttcttagcacggaacac

SEQ ID NO: 76587 - DNA, 20 bp, Artificial Sequence
  Description of Artificial Sequence: Synthetic oligonucleotide
  Target: LAMA2; (-) strand; PAM type: NRG; PAM sequence: CGG
tgtgtgtgcttttcttagca

SEQ ID NO: 76588 - DNA, 20 bp, Artificial Sequence
  Description of Artificial Sequence: Synthetic oligonucleotide
  Target: LAMA2; (-) strand; PAM type: NRG; PAM sequence: TAG
aaaaatgtgtgtgcttttct

SEQ ID NO: 76589 - DNA, 20 bp, Artificial Sequence
  Description of Artificial Sequence: Synthetic oligonucleotide
  Target: LAMA2; (-) strand; PAM type: NRG; PAM sequence: AAG
tttcggctagccatactctc

SEQ ID NO: 76590 - DNA, 20 bp, Artificial Sequence
  Description of Artificial Sequence: Synthetic oligonucleotide
  Target: LAMA2; (-) strand; PAM type: NRG; PAM sequence: TAG
attctcagatgcttttcggc

SEQ ID NO: 76591 - DNA, 20 bp, Artificial Sequence
  Description of Artificial Sequence: Synthetic oligonucleotide
  Target: LAMA2; (-) strand; PAM type: NRG; PAM sequence: CGG
atcaattctcagatgctttt

SEQ ID NO: 76592 - DNA, 20 bp, Artificial Sequence
  Description of Artificial Sequence: Synthetic oligonucleotide
  Target: LAMA2; (-) strand; PAM type: NRG; PAM sequence: CAG
cttaggattccatcaattct

SEQ ID NO: 76593 - DNA, 20 bp, Artificial Sequence
  Description of Artificial Sequence: Synthetic oligonucleotide
  Target: LAMA2; (-) strand; PAM type: NRG; PAM sequence: AGG
ttggcgtttctgtctgcctt

SEQ ID NO: 76594 - DNA, 20 bp, Artificial Sequence
  Description of Artificial Sequence: Synthetic oligonucleotide
  Target: LAMA2; (-) strand; PAM type: NRG; PAM sequence: TAG
tttggcgtttctgtctgcct

SEQ ID NO: 76595 - DNA, 20 bp, Artificial Sequence
  Description of Artificial Sequence: Synthetic oligonucleotide
  Target: LAMA2; (-) strand; PAM type: NRG; PAM sequence: TGG
aaaaccagttacttgacttt

SEQ ID NO: 76596 - DNA, 20 bp, Artificial Sequence
  Description of Artificial Sequence: Synthetic oligonucleotide
  Target: LAMA2; (-) strand; PAM type: NRG; PAM sequence: CAG
gtaagtgctggagacaaaac

SEQ ID NO: 76597 - DNA, 20 bp, Artificial Sequence
  Description of Artificial Sequence: Synthetic oligonucleotide
  Target: LAMA2; (-) strand; PAM type: NRG; PAM sequence: GAG
acaacaaactgtaagtgctg

SEQ ID NO: 76598 - DNA, 20 bp, Artificial Sequence
  Description of Artificial Sequence: Synthetic oligonucleotide
  Target: LAMA2; (-) strand; PAM type: NRG; PAM sequence: TGG
agacaacaaactgtaagtgc

SEQ ID NO: 76599 - DNA, 20 bp, Artificial Sequence
  Description of Artificial Sequence: Synthetic oligonucleotide
  Target: LAMA2; (-) strand; PAM type: NRG; PAM sequence: AAG
gcacccagacaacaaactgt

SEQ ID NO: 76600 - DNA, 20 bp, Artificial Sequence
  Description of Artificial Sequence: Synthetic oligonucleotide
  Target: LAMA2; (-) strand; PAM type: NRG; PAM sequence: CAG
agagggtatgtcatggcacc

SEQ ID NO: 76601 - DNA, 20 bp, Artificial Sequence
  Description of Artificial Sequence: Synthetic oligonucleotide
  Target: LAMA2; (-) strand; PAM type: NRG; PAM sequence: TGG
aactagtagagggtatgtca

SEQ ID NO: 76602 - DNA, 20 bp, Artificial Sequence
  Description of Artificial Sequence: Synthetic oligonucleotide
  Target: LAMA2; (-) strand; PAM type: NRG; PAM sequence: GGG
taatggaattaactagtaga

SEQ ID NO: 76603 - DNA, 20 bp, Artificial Sequence
  Description of Artificial Sequence: Synthetic oligonucleotide
  Target: LAMA2; (-) strand; PAM type: NRG; PAM sequence: AGG
ttaatggaattaactagtag

SEQ ID NO: 76604 - DNA, 20 bp, Artificial Sequence
  Description of Artificial Sequence: Synthetic oligonucleotide
  Target: LAMA2; (-) strand; PAM type: NRG; PAM sequence: GAG
cttaatggaattaactagta

SEQ ID NO: 76605 - DNA, 20 bp, Artificial Sequence
  Description of Artificial Sequence: Synthetic oligonucleotide
  Target: LAMA2; (-) strand; PAM type: NRG; PAM sequence: TAG
tgcttaatggaattaactag

SEQ ID NO: 76606 - DNA, 20 bp, Artificial Sequence
  Description of Artificial Sequence: Synthetic oligonucleotide
  Target: LAMA2; (-) strand; PAM type: NRG; PAM sequence: TAG
tgttgcttaatggaattaac

SEQ ID NO: 76607 - DNA, 20 bp, Artificial Sequence
  Description of Artificial Sequence: Synthetic oligonucleotide
  Target: LAMA2; (-) strand; PAM type: NRG; PAM sequence: TGG
aaatggcccatgttgcttaa

SEQ ID NO: 76608 - DNA, 20 bp, Artificial Sequence
  Description of Artificial Sequence: Synthetic oligonucleotide
  Target: LAMA2; (-) strand; PAM type: NRG; PAM sequence: TGG
ttgttttgcctatatttaaa

SEQ ID NO: 76609 - DNA, 20 bp, Artificial Sequence
  Description of Artificial Sequence: Synthetic oligonucleotide
  Target: LAMA2; (-) strand; PAM type: NRG; PAM sequence: GAG
aggctctttctgtggtcaca

SEQ ID NO: 76610 - DNA, 20 bp, Artificial Sequence
  Description of Artificial Sequence: Synthetic oligonucleotide
  Target: LAMA2; (-) strand; PAM type: NRG; PAM sequence: CAG
acaggctctttctgtggtca

SEQ ID NO: 76611 - DNA, 20 bp, Artificial Sequence
  Description of Artificial Sequence: Synthetic oligonucleotide
  Target: LAMA2; (-) strand; PAM type: NRG; PAM sequence: TGG
tatgttacaggctctttctg

SEQ ID NO: 76612 - DNA, 20 bp, Artificial Sequence
  Description of Artificial Sequence: Synthetic oligonucleotide
  Target: LAMA2; (-) strand; PAM type: NRG; PAM sequence: AGG
tagtcttctgtctatgttac

SEQ ID NO: 76613 - DNA, 20 bp, Artificial Sequence
  Description of Artificial Sequence: Synthetic oligonucleotide
  Target: LAMA2; (-) strand; PAM type: NRG; PAM sequence: CAG
gtagtcttctgtctatgtta

SEQ ID NO: 76614 - DNA, 20 bp, Artificial Sequence
  Description of Artificial Sequence: Synthetic oligonucleotide
  Target: LAMA2; (-) strand; PAM type: NRG; PAM sequence: TAG
tcttctaagaacactatttg

SEQ ID NO: 76615 - DNA, 20 bp, Artificial Sequence
  Description of Artificial Sequence: Synthetic oligonucleotide
  Target: LAMA2; (-) strand; PAM type: NRG; PAM sequence: AAG
gtcttaatgatttatcttct

SEQ ID NO: 76616 - DNA, 20 bp, Artificial Sequence
  Description of Artificial Sequence: Synthetic oligonucleotide
  Target: LAMA2; (-) strand; PAM type: NRG; PAM sequence: AGG
acacacactttatgttgccc

SEQ ID NO: 76617 - DNA, 20 bp, Artificial Sequence
  Description of Artificial Sequence: Synthetic oligonucleotide
  Target: LAMA2; (-) strand; PAM type: NRG; PAM sequence: CAG
tacacacactttatgttgcc

SEQ ID NO: 76618 - DNA, 20 bp, Artificial Sequence
  Description of Artificial Sequence: Synthetic oligonucleotide
  Target: LAMA2; (-) strand; PAM type: NRG; PAM sequence: GGG
gagtgtttgtgcaggtagaa

SEQ ID NO: 76619 - DNA, 20 bp, Artificial Sequence
  Description of Artificial Sequence: Synthetic oligonucleotide
  Target: LAMA2; (-) strand; PAM type: NRG; PAM sequence: AGG
tgagtgtttgtgcaggtaga

SEQ ID NO: 76620 - DNA, 20 bp, Artificial Sequence
  Description of Artificial Sequence: Synthetic oligonucleotide
  Target: LAMA2; (-) strand; PAM type: NRG; PAM sequence: AAG
ttgagtgtttgtgcaggtag

SEQ ID NO: 76621 - DNA, 20 bp, Artificial Sequence
  Description of Artificial Sequence: Synthetic oligonucleotide
  Target: LAMA2; (-) strand; PAM type: NRG; PAM sequence: TAG
cagttgagtgtttgtgcagg

SEQ ID NO: 76622 - DNA, 20 bp, Artificial Sequence
  Description of Artificial Sequence: Synthetic oligonucleotide
  Target: LAMA2; (-) strand; PAM type: NRG; PAM sequence: AGG
tttcagttgagtgtttgtgc

SEQ ID NO: 76623 - DNA, 20 bp, Artificial Sequence
  Description of Artificial Sequence: Synthetic oligonucleotide
  Target: LAMA2; (-) strand; PAM type: NRG; PAM sequence: CAG
atttcagttgagtgtttgtg

SEQ ID NO: 76624 - DNA, 20 bp, Artificial Sequence
  Description of Artificial Sequence: Synthetic oligonucleotide
  Target: LAMA2; (-) strand; PAM type: NRG; PAM sequence: GAG
agccttggcaaatttcagtt

SEQ ID NO: 76625 - DNA, 20 bp, Artificial Sequence
  Description of Artificial Sequence: Synthetic oligonucleotide
  Target: LAMA2; (-) strand; PAM type: NRG; PAM sequence: CAG
tagtgagccttggcaaattt

SEQ ID NO: 76626 - DNA, 20 bp, Artificial Sequence
  Description of Artificial Sequence: Synthetic oligonucleotide
  Target: LAMA2; (-) strand; PAM type: NRG; PAM sequence: TGG
tcaaagacactagtgagcct

SEQ ID NO: 76627 - DNA, 20 bp, Artificial Sequence
  Description of Artificial Sequence: Synthetic oligonucleotide
  Target: LAMA2; (-) strand; PAM type: NRG; PAM sequence: GAG
ggtgcctcaaagacactagt

SEQ ID NO: 76628 - DNA, 20 bp, Artificial Sequence
  Description of Artificial Sequence: Synthetic oligonucleotide
  Target: LAMA2; (-) strand; PAM type: NRG; PAM sequence: TAG
ctagggtgcctcaaagacac

SEQ ID NO: 76629 - DNA, 20 bp, Artificial Sequence
  Description of Artificial Sequence: Synthetic oligonucleotide
  Target: LAMA2; (-) strand; PAM type: NRG; PAM sequence: AAG
cccctctctagggtgcctca

SEQ ID NO: 76630 - DNA, 20 bp, Artificial Sequence
  Description of Artificial Sequence: Synthetic oligonucleotide
  Target: LAMA2; (-) strand; PAM type: NRG; PAM sequence: GGG
tttctagcctcccctctcta

SEQ ID NO: 76631 - DNA, 20 bp, Artificial Sequence
  Description of Artificial Sequence: Synthetic oligonucleotide
  Target: LAMA2; (-) strand; PAM type: NRG; PAM sequence: AGG
atttctagcctcccctctct

SEQ ID NO: 76632 - DNA, 20 bp, Artificial Sequence
  Description of Artificial Sequence: Synthetic oligonucleotide
  Target: LAMA2; (-) strand; PAM type: NRG; PAM sequence: TAG
tatttctagcctcccctctc

SEQ ID NO: 76633 - DNA, 20 bp, Artificial Sequence
  Description of Artificial Sequence: Synthetic oligonucleotide
  Target: LAMA2; (-) strand; PAM type: NRG; PAM sequence: TAG
ctgaggatgatggttatttc

SEQ ID NO: 76634 - DNA, 20 bp, Artificial Sequence
  Description of Artificial Sequence: Synthetic oligonucleotide
  Target: LAMA2; (-) strand; PAM type: NRG; PAM sequence: TGG
catggaacagctgaggatga

SEQ ID NO: 76635 - DNA, 20 bp, Artificial Sequence
  Description of Artificial Sequence: Synthetic oligonucleotide
  Target: LAMA2; (-) strand; PAM type: NRG; PAM sequence: AGG
gccttaccatggaacagctg

SEQ ID NO: 76636 - DNA, 20 bp, Artificial Sequence
  Description of Artificial Sequence: Synthetic oligonucleotide
  Target: LAMA2; (-) strand; PAM type: NRG; PAM sequence: GAG
ggccttaccatggaacagct

SEQ ID NO: 76637 - DNA, 20 bp, Artificial Sequence
  Description of Artificial Sequence: Synthetic oligonucleotide
  Target: LAMA2; (-) strand; PAM type: NRG; PAM sequence: CAG
tgtagggccttaccatggaa

SEQ ID NO: 76638 - DNA, 20 bp, Artificial Sequence
  Description of Artificial Sequence: Synthetic oligonucleotide
  Target: LAMA2; (-) strand; PAM type: NRG; PAM sequence: TGG
cctagtgtagggccttacca

SEQ ID NO: 76639 - DNA, 20 bp, Artificial Sequence
  Description of Artificial Sequence: Synthetic oligonucleotide
  Target: LAMA2; (-) strand; PAM type: NRG; PAM sequence: GGG
ctcctctgagtcctagtgta

SEQ ID NO: 76640 - DNA, 20 bp, Artificial Sequence
  Description of Artificial Sequence: Synthetic oligonucleotide
  Target: LAMA2; (-) strand; PAM type: NRG; PAM sequence: AGG
tctcctctgagtcctagtgt

SEQ ID NO: 76641 - DNA, 20 bp, Artificial Sequence
  Description of Artificial Sequence: Synthetic oligonucleotide
  Target: LAMA2; (-) strand; PAM type: NRG; PAM sequence: TAG
ctctcctctgagtcctagtg

SEQ ID NO: 76642 - DNA, 20 bp, Artificial Sequence
  Description of Artificial Sequence: Synthetic oligonucleotide
  Target: LAMA2; (-) strand; PAM type: NRG; PAM sequence: TAG
actatctctcctctgagtcc

SEQ ID NO: 76643 - DNA, 20 bp, Artificial Sequence
  Description of Artificial Sequence: Synthetic oligonucleotide
  Target: LAMA2; (-) strand; PAM type: NRG; PAM sequence: GAG
ttccaaactatctctcctct

SEQ ID NO: 76644 - DNA, 20 bp, Artificial Sequence
  Description of Artificial Sequence: Synthetic oligonucleotide
  Target: LAMA2; (-) strand; PAM type: NRG; PAM sequence: GGG
tgtgctattttccactgata

SEQ ID NO: 76645 - DNA, 20 bp, Artificial Sequence
  Description of Artificial Sequence: Synthetic oligonucleotide
  Target: LAMA2; (-) strand; PAM type: NRG; PAM sequence: AGG
ctgtgctattttccactgat

SEQ ID NO: 76646 - DNA, 20 bp, Artificial Sequence
  Description of Artificial Sequence: Synthetic oligonucleotide
  Target: LAMA2; (-) strand; PAM type: NRG; PAM sequence: TAG
actgtgctattttccactga

SEQ ID NO: 76647 - DNA, 20 bp, Artificial Sequence
  Description of Artificial Sequence: Synthetic oligonucleotide
  Target: LAMA2; (-) strand; PAM type: NRG; PAM sequence: AGG
attttcaacgaaaggaagtt

SEQ ID NO: 76648 - DNA, 20 bp, Artificial Sequence
  Description of Artificial Sequence: Synthetic oligonucleotide
  Target: LAMA2; (-) strand; PAM type: NRG; PAM sequence: TAG
tattttcaacgaaaggaagt

SEQ ID NO: 76649 - DNA, 20 bp, Artificial Sequence
  Description of Artificial Sequence: Synthetic oligonucleotide
  Target: LAMA2; (-) strand; PAM type: NRG; PAM sequence: AAG
gtgttattttcaacgaaagg

SEQ ID NO: 76650 - DNA, 20 bp, Artificial Sequence
  Description of Artificial Sequence: Synthetic oligonucleotide
  Target: LAMA2; (-) strand; PAM type: NRG; PAM sequence: AGG
cctgtgttattttcaacgaa

SEQ ID NO: 76651 - DNA, 20 bp, Artificial Sequence
  Description of Artificial Sequence: Synthetic oligonucleotide
  Target: LAMA2; (-) strand; PAM type: NRG; PAM sequence: AAG
acctgtgttattttcaacga

SEQ ID NO: 76652 - DNA, 20 bp, Artificial Sequence
  Description of Artificial Sequence: Synthetic oligonucleotide
  Target: LAMA2; (-) strand; PAM type: NRG; PAM sequence: TGG
tttttgataaaaatctcatt

SEQ ID NO: 76653 - DNA, 20 bp, Artificial Sequence
  Description of Artificial Sequence: Synthetic oligonucleotide
  Target: LAMA2; (-) strand; PAM type: NRG; PAM sequence: CAG
atccttggaattactgatat

SEQ ID NO: 76654 - DNA, 20 bp, Artificial Sequence
  Description of Artificial Sequence: Synthetic oligonucleotide
  Target: LAMA2; (-) strand; PAM type: NRG; PAM sequence: TGG
aaaacaaattttagtatcct

SEQ ID NO: 76655 - DNA, 20 bp, Artificial Sequence
  Description of Artificial Sequence: Synthetic oligonucleotide
  Target: LAMA2; (-) strand; PAM type: NRG; PAM sequence: TAG
ttattatttaaaacaaattt

SEQ ID NO: 76656 - DNA, 20 bp, Artificial Sequence
  Description of Artificial Sequence: Synthetic oligonucleotide
  Target: LAMA2; (-) strand; PAM type: NRG; PAM sequence: AAG
tccaaagtctaaagggcctg

SEQ ID NO: 76657 - DNA, 20 bp, Artificial Sequence
  Description of Artificial Sequence: Synthetic oligonucleotide
  Target: LAMA2; (-) strand; PAM type: NRG; PAM sequence: GGG
tttggagtccaaagtctaaa

SEQ ID NO: 76658 - DNA, 20 bp, Artificial Sequence
  Description of Artificial Sequence: Synthetic oligonucleotide
  Target: LAMA2; (-) strand; PAM type: NRG; PAM sequence: AGG
ttttggagtccaaagtctaa

SEQ ID NO: 76659 - DNA, 20 bp, Artificial Sequence
  Description of Artificial Sequence: Synthetic oligonucleotide
  Target: LAMA2; (-) strand; PAM type: NRG; PAM sequence: AAG
attttggagtccaaagtcta

SEQ ID NO: 76660 - DNA, 20 bp, Artificial Sequence
  Description of Artificial Sequence: Synthetic oligonucleotide
  Target: LAMA2; (-) strand; PAM type: NRG; PAM sequence: AAG
gcatccaattttggagtcca

SEQ ID NO: 76661 - DNA, 20 bp, Artificial Sequence
  Description of Artificial Sequence: Synthetic oligonucleotide
  Target: LAMA2; (-) strand; PAM type: NRG; PAM sequence: GAG
ttgatctgcatccaattttg

SEQ ID NO: 76662 - DNA, 20 bp, Artificial Sequence
  Description of Artificial Sequence: Synthetic oligonucleotide
  Target: LAMA2; (-) strand; PAM type: NRG; PAM sequence: TGG
atttgatctgcatccaattt

SEQ ID NO: 76663 - DNA, 20 bp, Artificial Sequence
  Description of Artificial Sequence: Synthetic oligonucleotide
  Target: LAMA2; (-) strand; PAM type: NRG; PAM sequence: GGG
tatgctgtacaagttctctt

SEQ ID NO: 76664 - DNA, 20 bp, Artificial Sequence
  Description of Artificial Sequence: Synthetic oligonucleotide
  Target: LAMA2; (-) strand; PAM type: NRG; PAM sequence: TGG
ttatgctgtacaagttctct

SEQ ID NO: 76665 - DNA, 20 bp, Artificial Sequence
  Description of Artificial Sequence: Synthetic oligonucleotide
  Target: LAMA2; (-) strand; PAM type: NRG; PAM sequence: AAG
gtatttaccttatgctgtac

SEQ ID NO: 76666 - DNA, 20 bp, Artificial Sequence
  Description of Artificial Sequence: Synthetic oligonucleotide
  Target: LAMA2; (-) strand; PAM type: NRG; PAM sequence: TGG
cagaatatcaaagtattgtt

SEQ ID NO: 76667 - DNA, 20 bp, Artificial Sequence
  Description of Artificial Sequence: Synthetic oligonucleotide
  Target: LAMA2; (-) strand; PAM type: NRG; PAM sequence: AAG
ctttccagaccagaatatca

SEQ ID NO: 76668 - DNA, 20 bp, Artificial Sequence
  Description of Artificial Sequence: Synthetic oligonucleotide
  Target: LAMA2; (-) strand; PAM type: NRG; PAM sequence: CAG
cccaaattctctttccagac

SEQ ID NO: 76669 - DNA, 20 bp, Artificial Sequence
  Description of Artificial Sequence: Synthetic oligonucleotide
  Target: LAMA2; (-) strand; PAM type: NRG; PAM sequence: CAG
ataaccccaaattctctttc

SEQ ID NO: 76670 - DNA, 20 bp, Artificial Sequence
  Description of Artificial Sequence: Synthetic oligonucleotide
  Target: LAMA2; (-) strand; PAM type: NRG; PAM sequence: CAG
gttgtagtgacagtattttt

SEQ ID NO: 76671 - DNA, 20 bp, Artificial Sequence
  Description of Artificial Sequence: Synthetic oligonucleotide
  Target: LAMA2; (-) strand; PAM type: NRG; PAM sequence: CAG
tctggacagagttgtagtga

SEQ ID NO: 76672 - DNA, 20 bp, Artificial Sequence
  Description of Artificial Sequence: Synthetic oligonucleotide
  Target: LAMA2; (-) strand; PAM type: NRG; PAM sequence: TAG
gtgggttctggacagagttg

SEQ ID NO: 76673 - DNA, 20 bp, Artificial Sequence
  Description of Artificial Sequence: Synthetic oligonucleotide
  Target: LAMA2; (-) strand; PAM type: NRG; PAM sequence: GAG
gcagctgtgggttctggaca

SEQ ID NO: 76674 - DNA, 20 bp, Artificial Sequence
  Description of Artificial Sequence: Synthetic oligonucleotide
  Target: LAMA2; (-) strand; PAM type: NRG; PAM sequence: CAG
ctgcagctgtgggttctgga

SEQ ID NO: 76675 - DNA, 20 bp, Artificial Sequence
  Description of Artificial Sequence: Synthetic oligonucleotide
  Target: LAMA2; (-) strand; PAM type: NRG; PAM sequence: TGG
atttctgcagctgtgggttc

SEQ ID NO: 76676 - DNA, 20 bp, Artificial Sequence
  Description of Artificial Sequence: Synthetic oligonucleotide
  Target: LAMA2; (-) strand; PAM type: NRG; PAM sequence: GGG
ttactcatttctgcagctgt

SEQ ID NO: 76677 - DNA, 20 bp, Artificial Sequence
  Description of Artificial Sequence: Synthetic oligonucleotide
  Target: LAMA2; (-) strand; PAM type: NRG; PAM sequence: TGG
tttactcatttctgcagctg

SEQ ID NO: 76678 - DNA, 20 bp, Artificial Sequence
  Description of Artificial Sequence: Synthetic oligonucleotide
  Target: LAMA2; (-) strand; PAM type: NRG; PAM sequence: CAG
gacttgtttactcatttctg

SEQ ID NO: 76679 - DNA, 20 bp, Artificial Sequence
  Description of Artificial Sequence: Synthetic oligonucleotide
  Target: LAMA2; (-) strand; PAM type: NRG; PAM sequence: AAG
taaccttgcagtcttctaat

SEQ ID NO: 76680 - DNA, 20 bp, Artificial Sequence
  Description of Artificial Sequence: Synthetic oligonucleotide
  Target: LAMA2; (-) strand; PAM type: NRG; PAM sequence: CAG
ttagctgttctttaaccttg

SEQ ID NO: 76681 - DNA, 20 bp, Artificial Sequence
  Description of Artificial Sequence: Synthetic oligonucleotide
  Target: LAMA2; (-) strand; PAM type: NRG; PAM sequence: TAG
gtcatttagttttgaatctt

SEQ ID NO: 76682 - DNA, 20 bp, Artificial Sequence
  Description of Artificial Sequence: Synthetic oligonucleotide
  Target: LAMA2; (-) strand; PAM type: NRG; PAM sequence: TAG
gaactaacaagaatgtcatt

SEQ ID NO: 76683 - DNA, 20 bp, Artificial Sequence
  Description of Artificial Sequence: Synthetic oligonucleotide
  Target: LAMA2; (-) strand; PAM type: NRG; PAM sequence: AAG
tcgtatcaatgggaactaac

SEQ ID NO: 76684 - DNA, 20 bp, Artificial Sequence
  Description of Artificial Sequence: Synthetic oligonucleotide
  Target: LAMA2; (-) strand; PAM type: NRG; PAM sequence: GGG
tgagttataatcgtatcaat

SEQ ID NO: 76685 - DNA, 20 bp, Artificial Sequence
  Description of Artificial Sequence: Synthetic oligonucleotide
  Target: LAMA2; (-) strand; PAM type: NRG; PAM sequence: TGG
gtgagttataatcgtatcaa

SEQ ID NO: 76686 - DNA, 20 bp, Artificial Sequence
  Description of Artificial Sequence: Synthetic oligonucleotide
  Target: LAMA2; (-) strand; PAM type: NRG; PAM sequence: GAG
tttcctttagggaattgtgt

SEQ ID NO: 76687 - DNA, 20 bp, Artificial Sequence
  Description of Artificial Sequence: Synthetic oligonucleotide
  Target: LAMA2; (-) strand; PAM type: NRG; PAM sequence: GGG
ctttttgtagttttccttta

SEQ ID NO: 76688 - DNA, 20 bp, Artificial Sequence
  Description of Artificial Sequence: Synthetic oligonucleotide
  Target: LAMA2; (-) strand; PAM type: NRG; PAM sequence: AGG
cctttttgtagttttccttt

SEQ ID NO: 76689 - DNA, 20 bp, Artificial Sequence
  Description of Artificial Sequence: Synthetic oligonucleotide
  Target: LAMA2; (-) strand; PAM type: NRG; PAM sequence: TAG
tcctttttgtagttttcctt

SEQ ID NO: 76690 - DNA, 20 bp, Artificial Sequence
  Description of Artificial Sequence: Synthetic oligonucleotide
  Target: LAMA2; (-) strand; PAM type: NRG; PAM sequence: TAG
ctcaagaaacatcctttttg

SEQ ID NO: 76691 - DNA, 20 bp, Artificial Sequence
  Description of Artificial Sequence: Synthetic oligonucleotide
  Target: LAMA2; (-) strand; PAM type: NRG; PAM sequence: AAG
tttatttgtattcctatctc

SEQ ID NO: 76692 - DNA, 20 bp, Artificial Sequence
  Description of Artificial Sequence: Synthetic oligonucleotide
  Target: LAMA2; (-) strand; PAM type: NRG; PAM sequence: AAG
caaaacaaacaaacaagcaa

SEQ ID NO: 76693 - DNA, 20 bp, Artificial Sequence
  Description of Artificial Sequence: Synthetic oligonucleotide
  Target: LAMA2; (-) strand; PAM type: NRG; PAM sequence: AAG
ttaaaacaaaacaaacaaac

SEQ ID NO: 76694 - DNA, 20 bp, Artificial Sequence
  Description of Artificial Sequence: Synthetic oligonucleotide
  Target: LAMA2; (-) strand; PAM type: NRG; PAM sequence: TGG
aaaacattcattcttatcac

SEQ ID NO: 76695 - DNA, 20 bp, Artificial Sequence
  Description of Artificial Sequence: Synthetic oligonucleotide
  Target: LAMA2; (-) strand; PAM type: NRG; PAM sequence: CAG
ttttttaaaaaaagcaaata

SEQ ID NO: 76696 - DNA, 20 bp, Artificial Sequence
  Description of Artificial Sequence: Synthetic oligonucleotide
  Target: LAMA2; (-) strand; PAM type: NRG; PAM sequence: AAG
atatagagtttttttaaaaa

SEQ ID NO: 76697 - DNA, 20 bp, Artificial Sequence
  Description of Artificial Sequence: Synthetic oligonucleotide
  Target: LAMA2; (-) strand; PAM type: NRG; PAM sequence: GAG
atgtctgcacataaaatata

SEQ ID NO: 76698 - DNA, 20 bp, Artificial Sequence
  Description of Artificial Sequence: Synthetic oligonucleotide
  Target: LAMA2; (-) strand; PAM type: NRG; PAM sequence: TAG
aaatgtctgcacataaaata

SEQ ID NO: 76699 - DNA, 20 bp, Artificial Sequence
  Description of Artificial Sequence: Synthetic oligonucleotide
  Target: LAMA2; (-) strand; PAM type: NRG; PAM sequence: AAG
tctaagaaagacattgggaa

SEQ ID NO: 76700 - DNA, 20 bp, Artificial Sequence
  Description of Artificial Sequence: Synthetic oligonucleotide
  Target: LAMA2; (-) strand; PAM type: NRG; PAM sequence: GGG
aatcatctaagaaagacatt

SEQ ID NO: 76701 - DNA, 20 bp, Artificial Sequence
  Description of Artificial Sequence: Synthetic oligonucleotide
  Target: LAMA2; (-) strand; PAM type: NRG; PAM sequence: TGG
taatcatctaagaaagacat

SEQ ID NO: 76702 - DNA, 20 bp, Artificial Sequence
  Description of Artificial Sequence: Synthetic oligonucleotide
  Target: LAMA2; (-) strand; PAM type: NRG; PAM sequence: AAG
aactacctaatcatctaaga

SEQ ID NO: 76703 - DNA, 20 bp, Artificial Sequence
  Description of Artificial Sequence: Synthetic oligonucleotide
  Target: LAMA2; (-) strand; PAM type: NRG; PAM sequence: AAG
tttcaactacctaatcatct

SEQ ID NO: 76704 - DNA, 20 bp, Artificial Sequence
  Description of Artificial Sequence: Synthetic oligonucleotide
  Target: LAMA2; (-) strand; PAM type: NRG; PAM sequence: TAG
tagcaatgcctcgtaaacag

SEQ ID NO: 76705 - DNA, 20 bp, Artificial Sequence
  Description of Artificial Sequence: Synthetic oligonucleotide
  Target: LAMA2; (-) strand; PAM type: NRG; PAM sequence: CAG
ttttagcaatgcctcgtaaa

SEQ ID NO: 76706 - DNA, 20 bp, Artificial Sequence
  Description of Artificial Sequence: Synthetic oligonucleotide
  Target: LAMA2; (-) strand; PAM type: NRG; PAM sequence: TAG
tcatggaacccaaaagcttt

SEQ ID NO: 76707 - DNA, 20 bp, Artificial Sequence
  Description of Artificial Sequence: Synthetic oligonucleotide
  Target: LAMA2; (-) strand; PAM type: NRG; PAM sequence: AAG
ctctccctcatggaacccaa

SEQ ID NO: 76708 - DNA, 20 bp, Artificial Sequence
  Description of Artificial Sequence: Synthetic oligonucleotide
  Target: LAMA2; (-) strand; PAM type: NRG; PAM sequence: TGG
ggtcatggccctctccctca

SEQ ID NO: 76709 - DNA, 20 bp, Artificial Sequence
  Description of Artificial Sequence: Synthetic oligonucleotide
  Target: LAMA2; (-) strand; PAM type: NRG; PAM sequence: TGG
atgtacaaaggagtaggtca

SEQ ID NO: 76710 - DNA, 20 bp, Artificial Sequence
  Description of Artificial Sequence: Synthetic oligonucleotide
  Target: LAMA2; (-) strand; PAM type: NRG; PAM sequence: AGG
ggggaaatgtacaaaggagt

SEQ ID NO: 76711 - DNA, 20 bp, Artificial Sequence
  Description of Artificial Sequence: Synthetic oligonucleotide
  Target: LAMA2; (-) strand; PAM type: NRG; PAM sequence: TAG
tggggaaatgtacaaaggag

SEQ ID NO: 76712 - DNA, 20 bp, Artificial Sequence
  Description of Artificial Sequence: Synthetic oligonucleotide
  Target: LAMA2; (-) strand; PAM type: NRG; PAM sequence: GAG
gagtggggaaatgtacaaag

SEQ ID NO: 76713 - DNA, 20 bp, Artificial Sequence
  Description of Artificial Sequence: Synthetic oligonucleotide
  Target: LAMA2; (-) strand; PAM type: NRG; PAM sequence: AGG
aggagtggggaaatgtacaa

SEQ ID NO: 76714 - DNA, 20 bp, Artificial Sequence
  Description of Artificial Sequence: Synthetic oligonucleotide
  Target: LAMA2; (-) strand; PAM type: NRG; PAM sequence: AAG
gaggagtggggaaatgtaca

SEQ ID NO: 76715 - DNA, 20 bp, Artificial Sequence
  Description of Artificial Sequence: Synthetic oligonucleotide
  Target: LAMA2; (-) strand; PAM type: NRG; PAM sequence: GGG
gtgatgtaaacggaggagtg

SEQ ID NO: 76716 - DNA, 20 bp, Artificial Sequence
  Description of Artificial Sequence: Synthetic oligonucleotide
  Target: LAMA2; (-) strand; PAM type: NRG; PAM sequence: GGG
tgtgatgtaaacggaggagt

SEQ ID NO: 76717 - DNA, 20 bp, Artificial Sequence
  Description of Artificial Sequence: Synthetic oligonucleotide
  Target: LAMA2; (-) strand; PAM type: NRG; PAM sequence: TGG
atgtgatgtaaacggaggag

SEQ ID NO: 76718 - DNA, 20 bp, Artificial Sequence
  Description of Artificial Sequence: Synthetic oligonucleotide
  Target: LAMA2; (-) strand; PAM type: NRG; PAM sequence: GAG
tttatgtgatgtaaacggag

SEQ ID NO: 76719 - DNA, 20 bp, Artificial Sequence
  Description of Artificial Sequence: Synthetic oligonucleotide
  Target: LAMA2; (-) strand; PAM type: NRG; PAM sequence: AGG
tgtttatgtgatgtaaacgg

SEQ ID NO: 76720 - DNA, 20 bp, Artificial Sequence
  Description of Artificial Sequence: Synthetic oligonucleotide
  Target: LAMA2; (-) strand; PAM type: NRG; PAM sequence: GAG
atgtttatgtgatgtaaacg

SEQ ID NO: 76721 - DNA, 20 bp, Artificial Sequence
  Description of Artificial Sequence: Synthetic oligonucleotide
  Target: LAMA2; (-) strand; PAM type: NRG; PAM sequence: CGG
atatgtttatgtgatgtaaa

SEQ ID NO: 76722 - DNA, 20 bp, Artificial Sequence
  Description of Artificial Sequence: Synthetic oligonucleotide
  Target: LAMA2; (-) strand; PAM type: NRG; PAM sequence: AAG
tgatttggctgactgcatgg

SEQ ID NO: 76723 - DNA, 20 bp, Artificial Sequence
  Description of Artificial Sequence: Synthetic oligonucleotide
  Target: LAMA2; (-) strand; PAM type: NRG; PAM sequence: TGG
gtctgatttggctgactgca

SEQ ID NO: 76724 - DNA, 20 bp, Artificial Sequence
  Description of Artificial Sequence: Synthetic oligonucleotide
  Target: LAMA2; (-) strand; PAM type: NRG; PAM sequence: TGG
taggcatgatttgtctgatt

SEQ ID NO: 76725 - DNA, 20 bp, Artificial Sequence
  Description of Artificial Sequence: Synthetic oligonucleotide
  Target: LAMA2; (-) strand; PAM type: NRG; PAM sequence: AGG
agttcccactttcaactcct

SEQ ID NO: 76726 - DNA, 20 bp, Artificial Sequence
  Description of Artificial Sequence: Synthetic oligonucleotide
  Target: LAMA2; (-) strand; PAM type: NRG; PAM sequence: TAG
cagttcccactttcaactcc

SEQ ID NO: 76727 - DNA, 20 bp, Artificial Sequence
  Description of Artificial Sequence: Synthetic oligonucleotide
  Target: LAMA2; (-) strand; PAM type: NRG; PAM sequence: CAG
aatattcaaactagacaaat

SEQ ID NO: 76728 - DNA, 20 bp, Artificial Sequence
  Description of Artificial Sequence: Synthetic oligonucleotide
  Target: LAMA2; (-) strand; PAM type: NRG; PAM sequence: TAG
actaatcagaatattcaaac

SEQ ID NO: 76729 - DNA, 20 bp, Artificial Sequence
  Description of Artificial Sequence: Synthetic oligonucleotide
  Target: LAMA2; (-) strand; PAM type: NRG; PAM sequence: CAG
aagctagctagttcactaat

SEQ ID NO: 76730 - DNA, 20 bp, Artificial Sequence
  Description of Artificial Sequence: Synthetic oligonucleotide
  Target: LAMA2; (-) strand; PAM type: NRG; PAM sequence: TAG
ccacaaaattctaagctagc

SEQ ID NO: 76731 - DNA, 20 bp, Artificial Sequence
  Description of Artificial Sequence: Synthetic oligonucleotide
  Target: LAMA2; (-) strand; PAM type: NRG; PAM sequence: TAG
aataccacaaaattctaagc

SEQ ID NO: 76732 - DNA, 20 bp, Artificial Sequence
  Description of Artificial Sequence: Synthetic oligonucleotide
  Target: LAMA2; (-) strand; PAM type: NRG; PAM sequence: AAG
tgcaaataccacaaaattct

SEQ ID NO: 76733 - DNA, 20 bp, Artificial Sequence
  Description of Artificial Sequence: Synthetic oligonucleotide
  Target: LAMA2; (-) strand; PAM type: NRG; PAM sequence: TAG
ctgggatttaggtgtagctg

SEQ ID NO: 76734 - DNA, 20 bp, Artificial Sequence
  Description of Artificial Sequence: Synthetic oligonucleotide
  Target: LAMA2; (-) strand; PAM type: NRG; PAM sequence: TAG
atttttctgggatttaggtg

SEQ ID NO: 76735 - DNA, 20 bp, Artificial Sequence
  Description of Artificial Sequence: Synthetic oligonucleotide
  Target: LAMA2; (-) strand; PAM type: NRG; PAM sequence: AGG
taccgatttttctgggattt

SEQ ID NO: 76736 - DNA, 20 bp, Artificial Sequence
  Description of Artificial Sequence: Synthetic oligonucleotide
  Target: LAMA2; (-) strand; PAM type: NRG; PAM sequence: TAG
ttaccgatttttctgggatt

SEQ ID NO: 76737 - DNA, 20 bp, Artificial Sequence
  Description of Artificial Sequence: Synthetic oligonucleotide
  Target: LAMA2; (-) strand; PAM type: NRG; PAM sequence: GGG
attttgttaccgatttttct

SEQ ID NO: 76738 - DNA, 20 bp, Artificial Sequence
  Description of Artificial Sequence: Synthetic oligonucleotide
  Target: LAMA2; (-) strand; PAM type: NRG; PAM sequence: TGG
tattttgttaccgatttttc

SEQ ID NO: 76739 - DNA, 20 bp, Artificial Sequence
  Description of Artificial Sequence: Synthetic oligonucleotide
  Target: LAMA2; (-) strand; PAM type: NRG; PAM sequence: AGG
aaatttaaatctagaataat

SEQ ID NO: 76740 - DNA, 20 bp, Artificial Sequence
  Description of Artificial Sequence: Synthetic oligonucleotide
  Target: LAMA2; (-) strand; PAM type: NRG; PAM sequence: TAG
aaaatttaaatctagaataa

SEQ ID NO: 76741 - DNA, 20 bp, Artificial Sequence
  Description of Artificial Sequence: Synthetic oligonucleotide
  Target: LAMA2; (-) strand; PAM type: NRG; PAM sequence: TAG
tggattttaaaatttaaatc

SEQ ID NO: 76742 - DNA, 20 bp, Artificial Sequence
  Description of Artificial Sequence: Synthetic oligonucleotide
  Target: LAMA2; (-) strand; PAM type: NRG; PAM sequence: TGG
gtgttattaatattcttatg

SEQ ID NO: 76743 - DNA, 20 bp, Artificial Sequence
  Description of Artificial Sequence: Synthetic oligonucleotide
  Target: LAMA2; (-) strand; PAM type: NRG; PAM sequence: AAG
gggtgaaatgaaaaaaatag

SEQ ID NO: 76744 - DNA, 20 bp, Artificial Sequence
  Description of Artificial Sequence: Synthetic oligonucleotide
  Target: LAMA2; (-) strand; PAM type: NRG; PAM sequence: TAG
tgagggtgaaatgaaaaaaa

SEQ ID NO: 76745 - DNA, 20 bp, Artificial Sequence
  Description of Artificial Sequence: Synthetic oligonucleotide
  Target: LAMA2; (-) strand; PAM type: NRG; PAM sequence: GGG
ggaagtatatagatctctga

SEQ ID NO: 76746 - DNA, 20 bp, Artificial Sequence
  Description of Artificial Sequence: Synthetic oligonucleotide
  Target: LAMA2; (-) strand; PAM type: NRG; PAM sequence: AGG
aggaagtatatagatctctg

SEQ ID NO: 76747 - DNA, 20 bp, Artificial Sequence
  Description of Artificial Sequence: Synthetic oligonucleotide
  Target: LAMA2; (-) strand; PAM type: NRG; PAM sequence: GAG
gaggaagtatatagatctct

SEQ ID NO: 76748 - DNA, 20 bp, Artificial Sequence
  Description of Artificial Sequence: Synthetic oligonucleotide
  Target: LAMA2; (-) strand; PAM type: NRG; PAM sequence: TAG
ttttggatagaggaagtata

SEQ ID NO: 76749 - DNA, 20 bp, Artificial Sequence
  Description of Artificial Sequence: Synthetic oligonucleotide
  Target: LAMA2; (-) strand; PAM type: NRG; PAM sequence: AAG
gtgttgtttttggatagagg

SEQ ID NO: 76750 - DNA, 20 bp, Artificial Sequence
  Description of Artificial Sequence: Synthetic oligonucleotide
  Target: LAMA2; (-) strand; PAM type: NRG; PAM sequence: AGG
tctgtgttgtttttggatag

SEQ ID NO: 76751 - DNA, 20 bp, Artificial Sequence
  Description of Artificial Sequence: Synthetic oligonucleotide
  Target: LAMA2; (-) strand; PAM type: NRG; PAM sequence: GAG
ttctgtgttgtttttggata

SEQ ID NO: 76752 - DNA, 20 bp, Artificial Sequence
  Description of Artificial Sequence: Synthetic oligonucleotide
  Target: LAMA2; (-) strand; PAM type: NRG; PAM sequence: TAG
gcttctgtgttgtttttgga

SEQ ID NO: 76753 - DNA, 20 bp, Artificial Sequence
  Description of Artificial Sequence: Synthetic oligonucleotide
  Target: LAMA2; (-) strand; PAM type: NRG; PAM sequence: TGG
ttttgcttctgtgttgtttt

SEQ ID NO: 76754 - DNA, 20 bp, Artificial Sequence
  Description of Artificial Sequence: Synthetic oligonucleotide
  Target: LAMA2; (-) strand; PAM type: NRG; PAM sequence: TGG
tggttttctgggcaacattc

SEQ ID NO: 76755 - DNA, 20 bp, Artificial Sequence
  Description of Artificial Sequence: Synthetic oligonucleotide
  Target: LAMA2; (-) strand; PAM type: NRG; PAM sequence: GGG
taattaatgcatggttttct

SEQ ID NO: 76756 - DNA, 20 bp, Artificial Sequence
  Description of Artificial Sequence: Synthetic oligonucleotide
  Target: LAMA2; (-) strand; PAM type: NRG; PAM sequence: TGG
gtaattaatgcatggttttc

SEQ ID NO: 76757 - DNA, 20 bp, Artificial Sequence
  Description of Artificial Sequence: Synthetic oligonucleotide
  Target: LAMA2; (-) strand; PAM type: NRG; PAM sequence: TGG
tggcttgagtaattaatgca

SEQ ID NO: 76758 - DNA, 20 bp, Artificial Sequence
  Description of Artificial Sequence: Synthetic oligonucleotide
  Target: LAMA2; (-) strand; PAM type: NRG; PAM sequence: GAG
aattgggaatttcctggctt

SEQ ID NO: 76759 - DNA, 20 bp, Artificial Sequence
  Description of Artificial Sequence: Synthetic oligonucleotide
  Target: LAMA2; (-) strand; PAM type: NRG; PAM sequence: TGG
ttgcaaaattgggaatttcc

SEQ ID NO: 76760 - DNA, 20 bp, Artificial Sequence
  Description of Artificial Sequence: Synthetic oligonucleotide
  Target: LAMA2; (-) strand; PAM type: NRG; PAM sequence: GGG
taaaatagagttgcaaaatt

SEQ ID NO: 76761 - DNA, 20 bp, Artificial Sequence
  Description of Artificial Sequence: Synthetic oligonucleotide
  Target: LAMA2; (-) strand; PAM type: NRG; PAM sequence: TGG
ataaaatagagttgcaaaat

SEQ ID NO: 76762 - DNA, 20 bp, Artificial Sequence
  Description of Artificial Sequence: Synthetic oligonucleotide
  Target: LAMA2; (-) strand; PAM type: NRG; PAM sequence: GAG
ctctcttaaatgataaaata

SEQ ID NO: 76763 - DNA, 20 bp, Artificial Sequence
  Description of Artificial Sequence: Synthetic oligonucleotide
  Target: LAMA2; (-) strand; PAM type: NRG; PAM sequence: TAG
atctctcttaaatgataaaa

SEQ ID NO: 76764 - DNA, 20 bp, Artificial Sequence
  Description of Artificial Sequence: Synthetic oligonucleotide
  Target: LAMA2; (-) strand; PAM type: NRG; PAM sequence: AAG
ttttagaacacacatgtgga

SEQ ID NO: 76765 - DNA, 20 bp, Artificial Sequence
  Description of Artificial Sequence: Synthetic oligonucleotide
  Target: LAMA2; (-) strand; PAM type: NRG; PAM sequence: TGG
tcttttttagaacacacatg

SEQ ID NO: 76766 - DNA, 20 bp, Artificial Sequence
  Description of Artificial Sequence: Synthetic oligonucleotide
  Target: LAMA2; (-) strand; PAM type: NRG; PAM sequence: TAG
gttatttctctgttcttttt

SEQ ID NO: 76767 - DNA, 20 bp, Artificial Sequence
  Description of Artificial Sequence: Synthetic oligonucleotide
  Target: LAMA2; (-) strand; PAM type: NRG; PAM sequence: TGG
tttgctaagttacagaggac

SEQ ID NO: 76768 - DNA, 20 bp, Artificial Sequence
  Description of Artificial Sequence: Synthetic oligonucleotide
  Target: LAMA2; (-) strand; PAM type: NRG; PAM sequence: AGG
gtatttttgctaagttacag

SEQ ID NO: 76769 - DNA, 20 bp, Artificial Sequence
  Description of Artificial Sequence: Synthetic oligonucleotide
  Target: LAMA2; (-) strand; PAM type: NRG; PAM sequence: GAG
tgtatttttgctaagttaca

SEQ ID NO: 76770 - DNA, 20 bp, Artificial Sequence
  Description of Artificial Sequence: Synthetic oligonucleotide
  Target: LAMA2; (-) strand; PAM type: NRG; PAM sequence: CAG
tttgtatttttgctaagtta

SEQ ID NO: 76771 - DNA, 20 bp, Artificial Sequence
  Description of Artificial Sequence: Synthetic oligonucleotide
  Target: LAMA2; (-) strand; PAM type: NRG; PAM sequence: AAG
caccaatttgtatttttgct

SEQ ID NO: 76772 - DNA, 20 bp, Artificial Sequence
  Description of Artificial Sequence: Synthetic oligonucleotide
  Target: LAMA2; (-) strand; PAM type: NRG; PAM sequence: TGG
ttcaaaaagagaaatcaaag

SEQ ID NO: 76773 - DNA, 20 bp, Artificial Sequence
  Description of Artificial Sequence: Synthetic oligonucleotide
  Target: LAMA2; (-) strand; PAM type: NRG; PAM sequence: AAG
tatttcaaaaagagaaatca

SEQ ID NO: 76774 - DNA, 20 bp, Artificial Sequence
  Description of Artificial Sequence: Synthetic oligonucleotide
  Target: LAMA2; (-) strand; PAM type: NRG; PAM sequence: GAG
ctgaaaatttatttcaaaaa

SEQ ID NO: 76775 - DNA, 20 bp, Artificial Sequence
  Description of Artificial Sequence: Synthetic oligonucleotide
  Target: LAMA2; (-) strand; PAM type: NRG; PAM sequence: AAG
agctgaaaatttatttcaaa

SEQ ID NO: 76776 - DNA, 20 bp, Artificial Sequence
  Description of Artificial Sequence: Synthetic oligonucleotide
  Target: LAMA2; (-) strand; PAM type: NRG; PAM sequence: AAG
acccgaggcaaaagaaagtc

SEQ ID NO: 76777 - DNA, 20 bp, Artificial Sequence
  Description of Artificial Sequence: Synthetic oligonucleotide
  Target: LAMA2; (-) strand; PAM type: NRG; PAM sequence: AAG
agaatacccgaggcaaaaga

SEQ ID NO: 76778 - DNA, 20 bp, Artificial Sequence
  Description of Artificial Sequence: Synthetic oligonucleotide
  Target: LAMA2; (-) strand; PAM type: NRG; PAM sequence: AAG
atccagaatacccgaggcaa

SEQ ID NO: 76779 - DNA, 20 bp, Artificial Sequence
  Description of Artificial Sequence: Synthetic oligonucleotide
  Target: LAMA2; (-) strand; PAM type: NRG; PAM sequence: AGG
atgataatccagaatacccg

SEQ ID NO: 76780 - DNA, 20 bp, Artificial Sequence
  Description of Artificial Sequence: Synthetic oligonucleotide
  Target: LAMA2; (-) strand; PAM type: NRG; PAM sequence: GAG
aatgataatccagaataccc

SEQ ID NO: 76781 - DNA, 20 bp, Artificial Sequence
  Description of Artificial Sequence: Synthetic oligonucleotide
  Target: LAMA2; (-) strand; PAM type: NRG; PAM sequence: CAG
gatgctacaaaatgataatc

SEQ ID NO: 76782 - DNA, 20 bp, Artificial Sequence
  Description of Artificial Sequence: Synthetic oligonucleotide
  Target: LAMA2; (-) strand; PAM type: NRG; PAM sequence: CAG
gatgttaatgtaaaattatc

SEQ ID NO: 76783 - DNA, 20 bp, Artificial Sequence
  Description of Artificial Sequence: Synthetic oligonucleotide
  Target: LAMA2; (-) strand; PAM type: NRG; PAM sequence: CAG
aataaaaagaccctcaactc

SEQ ID NO: 76784 - DNA, 20 bp, Artificial Sequence
  Description of Artificial Sequence: Synthetic oligonucleotide
  Target: LAMA2; (-) strand; PAM type: NRG; PAM sequence: AAG
atatgcatccgacaaataaa

SEQ ID NO: 76785 - DNA, 20 bp, Artificial Sequence
  Description of Artificial Sequence: Synthetic oligonucleotide
  Target: LAMA2; (-) strand; PAM type: NRG; PAM sequence: AAG
ggaaaatacatttcttacag

SEQ ID NO: 76786 - DNA, 20 bp, Artificial Sequence
  Description of Artificial Sequence: Synthetic oligonucleotide
  Target: LAMA2; (-) strand; PAM type: NRG; PAM sequence: CAG
ctgggaaaatacatttctta

SEQ ID NO: 76787 - DNA, 20 bp, Artificial Sequence
  Description of Artificial Sequence: Synthetic oligonucleotide
  Target: LAMA2; (-) strand; PAM type: NRG; PAM sequence: GGG
aaaatgaataaacagcagct

SEQ ID NO: 76788 - DNA, 20 bp, Artificial Sequence
  Description of Artificial Sequence: Synthetic oligonucleotide
  Target: LAMA2; (-) strand; PAM type: NRG; PAM sequence: TGG
taaaatgaataaacagcagc

SEQ ID NO: 76789 - DNA, 20 bp, Artificial Sequence
  Description of Artificial Sequence: Synthetic oligonucleotide
  Target: LAMA2; (-) strand; PAM type: NRG; PAM sequence: CAG
tctttaaaatgaataaacag

SEQ ID NO: 76790 - DNA, 20 bp, Artificial Sequence
  Description of Artificial Sequence: Synthetic oligonucleotide
  Target: LAMA2; (-) strand; PAM type: NRG; PAM sequence: CAG
gtctctttaaaatgaataaa

SEQ ID NO: 76791 - DNA, 20 bp, Artificial Sequence
  Description of Artificial Sequence: Synthetic oligonucleotide
  Target: LAMA2; (-) strand; PAM type: NRG; PAM sequence: TAG
gaatttcctaaggaggctgt

SEQ ID NO: 76792 - DNA, 20 bp, Artificial Sequence
  Description of Artificial Sequence: Synthetic oligonucleotide
  Target: LAMA2; (-) strand; PAM type: NRG; PAM sequence: AGG
aggaattgaatttcctaagg

SEQ ID NO: 76793 - DNA, 20 bp, Artificial Sequence
  Description of Artificial Sequence: Synthetic oligonucleotide
  Target: LAMA2; (-) strand; PAM type: NRG; PAM sequence: GAG
taggaattgaatttcctaag

SEQ ID NO: 76794 - DNA, 20 bp, Artificial Sequence
  Description of Artificial Sequence: Synthetic oligonucleotide
  Target: LAMA2; (-) strand; PAM type: NRG; PAM sequence: AGG
tttaggaattgaatttccta

SEQ ID NO: 76795 - DNA, 20 bp, Artificial Sequence
  Description of Artificial Sequence: Synthetic oligonucleotide
  Target: LAMA2; (-) strand; PAM type: NRG; PAM sequence: AAG
atttaggaattgaatttcct

SEQ ID NO: 76796 - DNA, 20 bp, Artificial Sequence
  Description of Artificial Sequence: Synthetic oligonucleotide
  Target: LAMA2; (-) strand; PAM type: NRG; PAM sequence: AGG
ttgtgtttcctaaggaattt

SEQ ID NO: 76797 - DNA, 20 bp, Artificial Sequence
  Description of Artificial Sequence: Synthetic oligonucleotide
  Target: LAMA2; (-) strand; PAM type: NRG; PAM sequence: TAG
tttgtgtttcctaaggaatt

SEQ ID NO: 76798 - DNA, 20 bp, Artificial Sequence
  Description of Artificial Sequence: Synthetic oligonucleotide
  Target: LAMA2; (-) strand; PAM type: NRG; PAM sequence: AGG
aacatggtttgtgtttccta

SEQ ID NO: 76799 - DNA, 20 bp, Artificial Sequence
  Description of Artificial Sequence: Synthetic oligonucleotide
  Target: LAMA2; (-) strand; PAM type: NRG; PAM sequence: AAG
aaacatggtttgtgtttcct

SEQ ID NO: 76800 - DNA, 20 bp, Artificial Sequence
  Description of Artificial Sequence: Synthetic oligonucleotide
  Target: LAMA2; (-) strand; PAM type: NRG; PAM sequence: TGG
gcaggacttcagattaaaca

SEQ ID NO: 76801 - DNA, 20 bp, Artificial Sequence
  Description of Artificial Sequence: Synthetic oligonucleotide
  Target: LAMA2; (-) strand; PAM type: NRG; PAM sequence: CAG
aaaacagactggcaggactt

SEQ ID NO: 76802 - DNA, 20 bp, Artificial Sequence
  Description of Artificial Sequence: Synthetic oligonucleotide
  Target: LAMA2; (-) strand; PAM type: NRG; PAM sequence: AGG
aggagagaaaacagactggc

SEQ ID NO: 76803 - DNA, 20 bp, Artificial Sequence
  Description of Artificial Sequence: Synthetic oligonucleotide
  Target: LAMA2; (-) strand; PAM type: NRG; PAM sequence: CAG
taggagagaaaacagactgg

SEQ ID NO: 76804 - DNA, 20 bp, Artificial Sequence
  Description of Artificial Sequence: Synthetic oligonucleotide
  Target: LAMA2; (-) strand; PAM type: NRG; PAM sequence: TGG
tggtaggagagaaaacagac

SEQ ID NO: 76805 - DNA, 20 bp, Artificial Sequence
  Description of Artificial Sequence: Synthetic oligonucleotide
  Target: LAMA2; (-) strand; PAM type: NRG; PAM sequence: CAG
aaagctggtaggagagaaaa

SEQ ID NO: 76806 - DNA, 20 bp, Artificial Sequence
  Description of Artificial Sequence: Synthetic oligonucleotide
  Target: LAMA2; (-) strand; PAM type: NRG; PAM sequence: GAG
catgggaaaagctggtagga

SEQ ID NO: 76807 - DNA, 20 bp, Artificial Sequence
  Description of Artificial Sequence: Synthetic oligonucleotide
  Target: LAMA2; (-) strand; PAM type: NRG; PAM sequence: GAG
gccatgggaaaagctggtag

SEQ ID NO: 76808 - DNA, 20 bp, Artificial Sequence
  Description of Artificial Sequence: Synthetic oligonucleotide
  Target: LAMA2; (-) strand; PAM type: NRG; PAM sequence: AGG
ctgccatgggaaaagctggt

SEQ ID NO: 76809 - DNA, 20 bp, Artificial Sequence
  Description of Artificial Sequence: Synthetic oligonucleotide
  Target: LAMA2; (-) strand; PAM type: NRG; PAM sequence: TAG
tctgccatgggaaaagctgg

SEQ ID NO: 76810 - DNA, 20 bp, Artificial Sequence
  Description of Artificial Sequence: Synthetic oligonucleotide
  Target: LAMA2; (-) strand; PAM type: NRG; PAM sequence: TGG
atttctgccatgggaaaagc

SEQ ID NO: 76811 - DNA, 20 bp, Artificial Sequence
  Description of Artificial Sequence: Synthetic oligonucleotide
  Target: LAMA2; (-) strand; PAM type: NRG; PAM sequence: AAG
aaccatttctgccatgggaa

SEQ ID NO: 76812 - DNA, 20 bp, Artificial Sequence
  Description of Artificial Sequence: Synthetic oligonucleotide
  Target: LAMA2; (-) strand; PAM type: NRG; PAM sequence: GGG
atctcaaccatttctgccat

SEQ ID NO: 76813 - DNA, 20 bp, Artificial Sequence
  Description of Artificial Sequence: Synthetic oligonucleotide
  Target: LAMA2; (-) strand; PAM type: NRG; PAM sequence: TGG
gatctcaaccatttctgcca

SEQ ID NO: 76814 - DNA, 20 bp, Artificial Sequence
  Description of Artificial Sequence: Synthetic oligonucleotide
  Target: LAMA2; (-) strand; PAM type: NRG; PAM sequence: CAG
actaaagtcctccttctgta

SEQ ID NO: 76815 - DNA, 20 bp, Artificial Sequence
  Description of Artificial Sequence: Synthetic oligonucleotide
  Target: LAMA2; (-) strand; PAM type: NRG; PAM sequence: AAG
caccacctgttaccagacta

SEQ ID NO: 76816 - DNA, 20 bp, Artificial Sequence
  Description of Artificial Sequence: Synthetic oligonucleotide
  Target: LAMA2; (-) strand; PAM type: NRG; PAM sequence: CAG
tcagcaacaccacctgttac

SEQ ID NO: 76817 - DNA, 20 bp, Artificial Sequence
  Description of Artificial Sequence: Synthetic oligonucleotide
  Target: LAMA2; (-) strand; PAM type: NRG; PAM sequence: CAG
atttcaaaggcccttgcact

SEQ ID NO: 76818 - DNA, 20 bp, Artificial Sequence
  Description of Artificial Sequence: Synthetic oligonucleotide
  Target: LAMA2; (-) strand; PAM type: NRG; PAM sequence: AGG
caaaccaggcctgatttcaa

SEQ ID NO: 76819 - DNA, 20 bp, Artificial Sequence
  Description of Artificial Sequence: Synthetic oligonucleotide
  Target: LAMA2; (-) strand; PAM type: NRG; PAM sequence: AAG
ccaaaccaggcctgatttca

SEQ ID NO: 76820 - DNA, 20 bp, Artificial Sequence
  Description of Artificial Sequence: Synthetic oligonucleotide
  Target: LAMA2; (-) strand; PAM type: NRG; PAM sequence: AGG
ctggaccaagattccaaacc

SEQ ID NO: 76821 - DNA, 20 bp, Artificial Sequence
  Description of Artificial Sequence: Synthetic oligonucleotide
  Target: LAMA2; (-) strand; PAM type: NRG; PAM sequence: CAG
gctggaccaagattccaaac

SEQ ID NO: 76822 - DNA, 20 bp, Artificial Sequence
  Description of Artificial Sequence: Synthetic oligonucleotide
  Target: LAMA2; (-) strand; PAM type: NRG; PAM sequence: AAG
cagctattgattgctggacc

SEQ ID NO: 76823 - DNA, 20 bp, Artificial Sequence
  Description of Artificial Sequence: Synthetic oligonucleotide
  Target: LAMA2; (-) strand; PAM type: NRG; PAM sequence: TGG
attacacagctattgattgc

SEQ ID NO: 76824 - DNA, 20 bp, Artificial Sequence
  Description of Artificial Sequence: Synthetic oligonucleotide
  Target: LAMA2; (-) strand; PAM type: NRG; PAM sequence: CAG
aagagttacctaagattaca

SEQ ID NO: 76825 - DNA, 20 bp, Artificial Sequence
  Description of Artificial Sequence: Synthetic oligonucleotide
  Target: LAMA2; (-) strand; PAM type: NRG; PAM sequence: AAG
taaacttcaaagagttacct

SEQ ID NO: 76826 - DNA, 20 bp, Artificial Sequence
  Description of Artificial Sequence: Synthetic oligonucleotide
  Target: LAMA2; (-) strand; PAM type: NRG; PAM sequence: GAG
tgcggaaactaaacttcaaa

SEQ ID NO: 76827 - DNA, 20 bp, Artificial Sequence
  Description of Artificial Sequence: Synthetic oligonucleotide
  Target: LAMA2; (-) strand; PAM type: NRG; PAM sequence: AAG
gatgcggaaactaaacttca

SEQ ID NO: 76828 - DNA, 20 bp, Artificial Sequence
  Description of Artificial Sequence: Synthetic oligonucleotide
  Target: LAMA2; (-) strand; PAM type: NRG; PAM sequence: CGG
tacttcctcattcttagatg

SEQ ID NO: 76829 - DNA, 20 bp, Artificial Sequence
  Description of Artificial Sequence: Synthetic oligonucleotide
  Target: LAMA2; (-) strand; PAM type: NRG; PAM sequence: TAG
tatttatacttcctcattct

SEQ ID NO: 76830 - DNA, 20 bp, Artificial Sequence
  Description of Artificial Sequence: Synthetic oligonucleotide
  Target: LAMA2; (-) strand; PAM type: NRG; PAM sequence: CAG
tttaatacaaccaacgtggg

SEQ ID NO: 76831 - DNA, 20 bp, Artificial Sequence
  Description of Artificial Sequence: Synthetic oligonucleotide
  Target: LAMA2; (-) strand; PAM type: NRG; PAM sequence: GGG
tcatttaatacaaccaacgt

SEQ ID NO: 76832 - DNA, 20 bp, Artificial Sequence
  Description of Artificial Sequence: Synthetic oligonucleotide
  Target: LAMA2; (-) strand; PAM type: NRG; PAM sequence: TGG
ctcatttaatacaaccaacg

SEQ ID NO: 76833 - DNA, 20 bp, Artificial Sequence
  Description of Artificial Sequence: Synthetic oligonucleotide
  Target: LAMA2; (-) strand; PAM type: NRG; PAM sequence: CGG
tattacatctgcaccttagt

SEQ ID NO: 76834 - DNA, 20 bp, Artificial Sequence
  Description of Artificial Sequence: Synthetic oligonucleotide
  Target: LAMA2; (-) strand; PAM type: NRG; PAM sequence: TAG
catttattacatctgcacct

SEQ ID NO: 76835 - DNA, 20 bp, Artificial Sequence
  Description of Artificial Sequence: Synthetic oligonucleotide
  Target: LAMA2; (-) strand; PAM type: NRG; PAM sequence: CAG
gctgaaataaatgataataa

SEQ ID NO: 76836 - DNA, 20 bp, Artificial Sequence
  Description of Artificial Sequence: Synthetic oligonucleotide
  Target: LAMA2; (-) strand; PAM type: NRG; PAM sequence: AAG
tcaggaaaagaagaaattgt

SEQ ID NO: 76837 - DNA, 20 bp, Artificial Sequence
  Description of Artificial Sequence: Synthetic oligonucleotide
  Target: LAMA2; (-) strand; PAM type: NRG; PAM sequence: AAG
ccctaggaggtcaggaaaag

SEQ ID NO: 76838 - DNA, 20 bp, Artificial Sequence
  Description of Artificial Sequence: Synthetic oligonucleotide
  Target: LAMA2; (-) strand; PAM type: NRG; PAM sequence: AAG
aagccctaggaggtcaggaa

SEQ ID NO: 76839 - DNA, 20 bp, Artificial Sequence
  Description of Artificial Sequence: Synthetic oligonucleotide
  Target: LAMA2; (-) strand; PAM type: NRG; PAM sequence: AGG
cataaaagccctaggaggtc

SEQ ID NO: 76840 - DNA, 20 bp, Artificial Sequence
  Description of Artificial Sequence: Synthetic oligonucleotide
  Target: LAMA2; (-) strand; PAM type: NRG; PAM sequence: CAG
gcataaaagccctaggaggt

SEQ ID NO: 76841 - DNA, 20 bp, Artificial Sequence
  Description of Artificial Sequence: Synthetic oligonucleotide
  Target: LAMA2; (-) strand; PAM type: NRG; PAM sequence: AGG
gcatgcataaaagccctagg

SEQ ID NO: 76842 - DNA, 20 bp, Artificial Sequence
  Description of Artificial Sequence: Synthetic oligonucleotide
  Target: LAMA2; (-) strand; PAM type: NRG; PAM sequence: GAG
tgcatgcataaaagccctag

SEQ ID NO: 76843 - DNA, 20 bp, Artificial Sequence
  Description of Artificial Sequence: Synthetic oligonucleotide
  Target: LAMA2; (-) strand; PAM type: NRG; PAM sequence: AGG
attgcatgcataaaagccct

SEQ ID NO: 76844 - DNA, 20 bp, Artificial Sequence
  Description of Artificial Sequence: Synthetic oligonucleotide
  Target: LAMA2; (-) strand; PAM type: NRG; PAM sequence: TAG
aattgcatgcataaaagccc

SEQ ID NO: 76845 - DNA, 20 bp, Artificial Sequence
  Description of Artificial Sequence: Synthetic oligonucleotide
  Target: LAMA2; (-) strand; PAM type: NRG; PAM sequence: AAG
attgctaattgcatgcataa

SEQ ID NO: 76846 - DNA, 20 bp, Artificial Sequence
  Description of Artificial Sequence: Synthetic oligonucleotide
  Target: LAMA2; (-) strand; PAM type: NRG; PAM sequence: TGG
ctctcaaaaatcttgtactc

SEQ ID NO: 76847 - DNA, 20 bp, Artificial Sequence
  Description of Artificial Sequence: Synthetic oligonucleotide
  Target: LAMA2; (-) strand; PAM type: NRG; PAM sequence: CAG
taaagaataagattcagtca

SEQ ID NO: 76848 - DNA, 20 bp, Artificial Sequence
  Description of Artificial Sequence: Synthetic oligonucleotide
  Target: LAMA2; (-) strand; PAM type: NRG; PAM sequence: CAG
agtttctaaagaataagatt

SEQ ID NO: 76849 - DNA, 20 bp, Artificial Sequence
  Description of Artificial Sequence: Synthetic oligonucleotide
  Target: LAMA2; (-) strand; PAM type: NRG; PAM sequence: AAG
agagcaagtttctaaagaat

SEQ ID NO: 76850 - DNA, 20 bp, Artificial Sequence
  Description of Artificial Sequence: Synthetic oligonucleotide
  Target: LAMA2; (-) strand; PAM type: NRG; PAM sequence: AAG
actcaaagagcaagtttcta

SEQ ID NO: 76851 - DNA, 20 bp, Artificial Sequence
  Description of Artificial Sequence: Synthetic oligonucleotide
  Target: LAMA2; (-) strand; PAM type: NRG; PAM sequence: AAG
ttttcctccactcaaagagc

SEQ ID NO: 76852 - DNA, 20 bp, Artificial Sequence
  Description of Artificial Sequence: Synthetic oligonucleotide
  Target: LAMA2; (-) strand; PAM type: NRG; PAM sequence: GAG
ttccttttcctccactcaaa

SEQ ID NO: 76853 - DNA, 20 bp, Artificial Sequence
  Description of Artificial Sequence: Synthetic oligonucleotide
  Target: LAMA2; (-) strand; PAM type: NRG; PAM sequence: AAG
tcttccttttcctccactca

SEQ ID NO: 76854 - DNA, 20 bp, Artificial Sequence
  Description of Artificial Sequence: Synthetic oligonucleotide
  Target: LAMA2; (-) strand; PAM type: NRG; PAM sequence: TAG
tataatgtcattagtcaact

SEQ ID NO: 76855 - DNA, 20 bp, Artificial Sequence
  Description of Artificial Sequence: Synthetic oligonucleotide
  Target: LAMA2; (-) strand; PAM type: NRG; PAM sequence: TAG
acctgcttttataatgtcat

SEQ ID NO: 76856 - DNA, 20 bp, Artificial Sequence
  Description of Artificial Sequence: Synthetic oligonucleotide
  Target: LAMA2; (-) strand; PAM type: NRG; PAM sequence: AAG
ctgtgctacagaagctcaga

SEQ ID NO: 76857 - DNA, 20 bp, Artificial Sequence
  Description of Artificial Sequence: Synthetic oligonucleotide
  Target: LAMA2; (-) strand; PAM type: NRG; PAM sequence: CAG
tagcctgtgctacagaagct

SEQ ID NO: 76858 - DNA, 20 bp, Artificial Sequence
  Description of Artificial Sequence: Synthetic oligonucleotide
  Target: LAMA2; (-) strand; PAM type: NRG; PAM sequence: AAG
cttcatagcctgtgctacag

SEQ ID NO: 76859 - DNA, 20 bp, Artificial Sequence
  Description of Artificial Sequence: Synthetic oligonucleotide
  Target: LAMA2; (-) strand; PAM type: NRG; PAM sequence: CAG
acacttcatagcctgtgcta

SEQ ID NO: 76860 - DNA, 20 bp, Artificial Sequence
  Description of Artificial Sequence: Synthetic oligonucleotide
  Target: LAMA2; (-) strand; PAM type: NRG; PAM sequence: TAG
tactttactagcacacttca

SEQ ID NO: 76861 - DNA, 20 bp, Artificial Sequence
  Description of Artificial Sequence: Synthetic oligonucleotide
  Target: LAMA2; (-) strand; PAM type: NRG; PAM sequence: TAG
taaaattgtatttactttac

SEQ ID NO: 76862 - DNA, 20 bp, Artificial Sequence
  Description of Artificial Sequence: Synthetic oligonucleotide
  Target: LAMA2; (-) strand; PAM type: NRG; PAM sequence: TGG
ttacagactttattttatta

SEQ ID NO: 76863 - DNA, 20 bp, Artificial Sequence
  Description of Artificial Sequence: Synthetic oligonucleotide
  Target: LAMA2; (-) strand; PAM type: NRG; PAM sequence: CAG
agtttaatagctgggactta

SEQ ID NO: 76864 - DNA, 20 bp, Artificial Sequence
  Description of Artificial Sequence: Synthetic oligonucleotide
  Target: LAMA2; (-) strand; PAM type: NRG; PAM sequence: GGG
tccctgccagtttaatagct

SEQ ID NO: 76865 - DNA, 20 bp, Artificial Sequence
  Description of Artificial Sequence: Synthetic oligonucleotide
  Target: LAMA2; (-) strand; PAM type: NRG; PAM sequence: TGG
gtccctgccagtttaatagc

SEQ ID NO: 76866 - DNA, 20 bp, Artificial Sequence
  Description of Artificial Sequence: Synthetic oligonucleotide
  Target: LAMA2; (-) strand; PAM type: NRG; PAM sequence: TAG
gtaggtccctgccagtttaa

SEQ ID NO: 76867 - DNA, 20 bp, Artificial Sequence
  Description of Artificial Sequence: Synthetic oligonucleotide
  Target: LAMA2; (-) strand; PAM type: NRG; PAM sequence: CAG
taatgaatgtaggtccctgc

SEQ ID NO: 76868 - DNA, 20 bp, Artificial Sequence
  Description of Artificial Sequence: Synthetic oligonucleotide
  Target: LAMA2; (-) strand; PAM type: NRG; PAM sequence: AGG
gcatttaatttaatgaatgt

SEQ ID NO: 76869 - DNA, 20 bp, Artificial Sequence
  Description of Artificial Sequence: Synthetic oligonucleotide
  Target: LAMA2; (-) strand; PAM type: NRG; PAM sequence: TAG
tgcatttaatttaatgaatg

SEQ ID NO: 76870 - DNA, 20 bp, Artificial Sequence
  Description of Artificial Sequence: Synthetic oligonucleotide
  Target: LAMA2; (-) strand; PAM type: NRG; PAM sequence: AAG
ttataaaagcaatcaactcc

SEQ ID NO: 76871 - DNA, 20 bp, Artificial Sequence
  Description of Artificial Sequence: Synthetic oligonucleotide
  Target: LAMA2; (-) strand; PAM type: NRG; PAM sequence: AAG
acgtgaagtcatcattataa

SEQ ID NO: 76872 - DNA, 20 bp, Artificial Sequence
  Description of Artificial Sequence: Synthetic oligonucleotide
  Target: LAMA2; (-) strand; PAM type: NRG; PAM sequence: AAG
tcactgagagtcaagacgtg

SEQ ID NO: 76873 - DNA, 20 bp, Artificial Sequence
  Description of Artificial Sequence: Synthetic oligonucleotide
  Target: LAMA2; (-) strand; PAM type: NRG; PAM sequence: AAG
aaacaaaatcactgagagtc

SEQ ID NO: 76874 - DNA, 20 bp, Artificial Sequence
  Description of Artificial Sequence: Synthetic oligonucleotide
  Target: LAMA2; (-) strand; PAM type: NRG; PAM sequence: GAG
gagacaaacaaaatcactga

SEQ ID NO: 76875 - DNA, 20 bp, Artificial Sequence
  Description of Artificial Sequence: Synthetic oligonucleotide
  Target: LAMA2; (-) strand; PAM type: NRG; PAM sequence: GAG
aggagacaaacaaaatcact

SEQ ID NO: 76876 - DNA, 20 bp, Artificial Sequence
  Description of Artificial Sequence: Synthetic oligonucleotide
  Target: LAMA2; (-) strand; PAM type: NRG; PAM sequence: GAG
tgaataattttggggctaag

SEQ ID NO: 76877 - DNA, 20 bp, Artificial Sequence
  Description of Artificial Sequence: Synthetic oligonucleotide
  Target: LAMA2; (-) strand; PAM type: NRG; PAM sequence: AGG
ggtgaataattttggggcta

SEQ ID NO: 76878 - DNA, 20 bp, Artificial Sequence
  Description of Artificial Sequence: Synthetic oligonucleotide
  Target: LAMA2; (-) strand; PAM type: NRG; PAM sequence: AAG
aggtgaataattttggggct

SEQ ID NO: 76879 - DNA, 20 bp, Artificial Sequence
  Description of Artificial Sequence: Synthetic oligonucleotide
  Target: LAMA2; (-) strand; PAM type: NRG; PAM sequence: GGG
ttttaaggtgaataattttg

SEQ ID NO: 76880 - DNA, 20 bp, Artificial Sequence
  Description of Artificial Sequence: Synthetic oligonucleotide
  Target: LAMA2; (-) strand; PAM type: NRG; PAM sequence: GGG
cttttaaggtgaataatttt

SEQ ID NO: 76881 - DNA, 20 bp, Artificial Sequence
  Description of Artificial Sequence: Synthetic oligonucleotide
  Target: LAMA2; (-) strand; PAM type: NRG; PAM sequence: TGG
tcttttaaggtgaataattt

SEQ ID NO: 76882 - DNA, 20 bp, Artificial Sequence
  Description of Artificial Sequence: Synthetic oligonucleotide
  Target: LAMA2; (-) strand; PAM type: NRG; PAM sequence: AGG
ttaccaaatttcatctttta

SEQ ID NO: 76883 - DNA, 20 bp, Artificial Sequence
  Description of Artificial Sequence: Synthetic oligonucleotide
  Target: LAMA2; (-) strand; PAM type: NRG; PAM sequence: AAG
attaccaaatttcatctttt

SEQ ID NO: 76884 - DNA, 20 bp, Artificial Sequence
  Description of Artificial Sequence: Synthetic oligonucleotide
  Target: LAMA2; (-) strand; PAM type: NRG; PAM sequence: AGG
atagctgtgatcagaacttc

SEQ ID NO: 76885 - DNA, 20 bp, Artificial Sequence
  Description of Artificial Sequence: Synthetic oligonucleotide
  Target: LAMA2; (-) strand; PAM type: NRG; PAM sequence: CAG
catagctgtgatcagaactt

SEQ ID NO: 76886 - DNA, 20 bp, Artificial Sequence
  Description of Artificial Sequence: Synthetic oligonucleotide
  Target: LAMA2; (-) strand; PAM type: NRG; PAM sequence: CAG
gaactattcatagctgtgat

SEQ ID NO: 76887 - DNA, 20 bp, Artificial Sequence
  Description of Artificial Sequence: Synthetic oligonucleotide
  Target: LAMA2; (-) strand; PAM type: NRG; PAM sequence: TAG
gaagattttagaactattca

SEQ ID NO: 76888 - DNA, 20 bp, Artificial Sequence
  Description of Artificial Sequence: Synthetic oligonucleotide
  Target: LAMA2; (-) strand; PAM type: NRG; PAM sequence: TAG
caaaaatatttagaagattt

SEQ ID NO: 76889 - DNA, 20 bp, Artificial Sequence
  Description of Artificial Sequence: Synthetic oligonucleotide
  Target: LAMA2; (-) strand; PAM type: NRG; PAM sequence: AAG
catatcccaaaaatatttag

SEQ ID NO: 76890 - DNA, 20 bp, Artificial Sequence
  Description of Artificial Sequence: Synthetic oligonucleotide
  Target: LAMA2; (-) strand; PAM type: NRG; PAM sequence: TAG
atacatatcccaaaaatatt

SEQ ID NO: 76891 - DNA, 20 bp, Artificial Sequence
  Description of Artificial Sequence: Synthetic oligonucleotide
  Target: LAMA2; (-) strand; PAM type: NRG; PAM sequence: TGG
acccttcacacaaatcatct

SEQ ID NO: 76892 - DNA, 20 bp, Artificial Sequence
  Description of Artificial Sequence: Synthetic oligonucleotide
  Target: LAMA2; (-) strand; PAM type: NRG; PAM sequence: TGG
atataatacaactaagtgaa

SEQ ID NO: 76893 - DNA, 20 bp, Artificial Sequence
  Description of Artificial Sequence: Synthetic oligonucleotide
  Target: LAMA2; (-) strand; PAM type: NRG; PAM sequence: AAG
tattaaaatataatacaact

SEQ ID NO: 76894 - DNA, 20 bp, Artificial Sequence
  Description of Artificial Sequence: Synthetic oligonucleotide
  Target: LAMA2; (-) strand; PAM type: NRG; PAM sequence: CAG
atattgaaaattactgtttt

SEQ ID NO: 76895 - DNA, 20 bp, Artificial Sequence
  Description of Artificial Sequence: Synthetic oligonucleotide
  Target: LAMA2; (-) strand; PAM type: NRG; PAM sequence: TAG
ttaaagtggttataagaaaa

SEQ ID NO: 76896 - DNA, 20 bp, Artificial Sequence
  Description of Artificial Sequence: Synthetic oligonucleotide
  Target: LAMA2; (-) strand; PAM type: NRG; PAM sequence: AAG
aatttctttaaagtggttat

SEQ ID NO: 76897 - DNA, 20 bp, Artificial Sequence
  Description of Artificial Sequence: Synthetic oligonucleotide
  Target: LAMA2; (-) strand; PAM type: NRG; PAM sequence: TGG
agtccttaatttctttaaag

SEQ ID NO: 76898 - DNA, 20 bp, Artificial Sequence
  Description of Artificial Sequence: Synthetic oligonucleotide
  Target: LAMA2; (-) strand; PAM type: NRG; PAM sequence: AAG
gcaagtccttaatttcttta

SEQ ID NO: 76899 - DNA, 20 bp, Artificial Sequence
  Description of Artificial Sequence: Synthetic oligonucleotide
  Target: LAMA2; (-) strand; PAM type: NRG; PAM sequence: AAG
taaaaaaccagacaacctgc

SEQ ID NO: 76900 - DNA, 20 bp, Artificial Sequence
  Description of Artificial Sequence: Synthetic oligonucleotide
  Target: LAMA2; (-) strand; PAM type: NRG; PAM sequence: CAG
taagaaaaatagtaaaaaac

SEQ ID NO: 76901 - DNA, 20 bp, Artificial Sequence
  Description of Artificial Sequence: Synthetic oligonucleotide
  Target: LAMA2; (-) strand; PAM type: NRG; PAM sequence: TAG
cttgctatggataagaaaaa

SEQ ID NO: 76902 - DNA, 20 bp, Artificial Sequence
  Description of Artificial Sequence: Synthetic oligonucleotide
  Target: LAMA2; (-) strand; PAM type: NRG; PAM sequence: AAG
gcaccaaccttgctatggat

SEQ ID NO: 76903 - DNA, 20 bp, Artificial Sequence
  Description of Artificial Sequence: Synthetic oligonucleotide
  Target: LAMA2; (-) strand; PAM type: NRG; PAM sequence: TGG
attgagcaccaaccttgcta

SEQ ID NO: 76904 - DNA, 20 bp, Artificial Sequence
  Description of Artificial Sequence: Synthetic oligonucleotide
  Target: LAMA2; (-) strand; PAM type: NRG; PAM sequence: GAG
gttgctcatctagtattatt

SEQ ID NO: 76905 - DNA, 20 bp, Artificial Sequence
  Description of Artificial Sequence: Synthetic oligonucleotide
  Target: LAMA2; (-) strand; PAM type: NRG; PAM sequence: TAG
tcttcattcagttgctcatc

SEQ ID NO: 76906 - DNA, 20 bp, Artificial Sequence
  Description of Artificial Sequence: Synthetic oligonucleotide
  Target: LAMA2; (-) strand; PAM type: NRG; PAM sequence: CAG
atttttgtcatctcttcatt

SEQ ID NO: 76907 - DNA, 20 bp, Artificial Sequence
  Description of Artificial Sequence: Synthetic oligonucleotide
  Target: LAMA2; (-) strand; PAM type: NRG; PAM sequence: TGG
tacacttctttaacatgcag

SEQ ID NO: 76908 - DNA, 20 bp, Artificial Sequence
  Description of Artificial Sequence: Synthetic oligonucleotide
  Target: LAMA2; (-) strand; PAM type: NRG; PAM sequence: CAG
aagtacacttctttaacatg

SEQ ID NO: 76909 - DNA, 20 bp, Artificial Sequence
  Description of Artificial Sequence: Synthetic oligonucleotide
  Target: LAMA2; (-) strand; PAM type: NRG; PAM sequence: AAG
tctcaaagacaagcataaaa

SEQ ID NO: 76910 - DNA, 20 bp, Artificial Sequence
  Description of Artificial Sequence: Synthetic oligonucleotide
  Target: LAMA2; (-) strand; PAM type: NRG; PAM sequence: AAG
ttgacacttttctcaaagac

SEQ ID NO: 76911 - DNA, 20 bp, Artificial Sequence
  Description of Artificial Sequence: Synthetic oligonucleotide
  Target: LAMA2; (-) strand; PAM type: NRG; PAM sequence: AAG
ccaccttgacacttttctca

SEQ ID NO: 76912 - DNA, 20 bp, Artificial Sequence
  Description of Artificial Sequence: Synthetic oligonucleotide
  Target: LAMA2; (-) strand; PAM type: NRG; PAM sequence: AAG
aattttttgttgtcatttta

SEQ ID NO: 76913 - DNA, 20 bp, Artificial Sequence
  Description of Artificial Sequence: Synthetic oligonucleotide
  Target: LAMA2; (-) strand; PAM type: NRG; PAM sequence: CAG
ttcttttattttattttgtt

SEQ ID NO: 76914 - DNA, 20 bp, Artificial Sequence
  Description of Artificial Sequence: Synthetic oligonucleotide
  Target: LAMA2; (-) strand; PAM type: NRG; PAM sequence: TAG
actcatcccagatgagcagc

SEQ ID NO: 76915 - DNA, 20 bp, Artificial Sequence
  Description of Artificial Sequence: Synthetic oligonucleotide
  Target: LAMA2; (-) strand; PAM type: NRG; PAM sequence: CAG
actaactcatcccagatgag

SEQ ID NO: 76916 - DNA, 20 bp, Artificial Sequence
  Description of Artificial Sequence: Synthetic oligonucleotide
  Target: LAMA2; (-) strand; PAM type: NRG; PAM sequence: GAG
ataactaactcatcccagat

SEQ ID NO: 76917 - DNA, 20 bp, Artificial Sequence
  Description of Artificial Sequence: Synthetic oligonucleotide
  Target: LAMA2; (-) strand; PAM type: NRG; PAM sequence: CAG
ttgcaataactaactcatcc

SEQ ID NO: 76918 - DNA, 20 bp, Artificial Sequence
  Description of Artificial Sequence: Synthetic oligonucleotide
  Target: LAMA2; (-) strand; PAM type: NRG; PAM sequence: AAG
aaaattctgcattaaattac

SEQ ID NO: 76919 - DNA, 20 bp, Artificial Sequence
  Description of Artificial Sequence: Synthetic oligonucleotide
  Target: LAMA2; (-) strand; PAM type: NRG; PAM sequence: TGG
taatttaacattttcttttt

SEQ ID NO: 76920 - DNA, 20 bp, Artificial Sequence
  Description of Artificial Sequence: Synthetic oligonucleotide
  Target: LAMA2; (-) strand; PAM type: NRG; PAM sequence: TAG
ctttcttctttgtcagacac

SEQ ID NO: 76921 - DNA, 20 bp, Artificial Sequence
  Description of Artificial Sequence: Synthetic oligonucleotide
  Target: LAMA2; (-) strand; PAM type: NRG; PAM sequence: CAG
ttgaaagctttcttctttgt

SEQ ID NO: 76922 - DNA, 20 bp, Artificial Sequence
  Description of Artificial Sequence: Synthetic oligonucleotide
  Target: LAMA2; (-) strand; PAM type: NRG; PAM sequence: AAG
tgttcgtcttgaaagtttga

SEQ ID NO: 76923 - DNA, 20 bp, Artificial Sequence
  Description of Artificial Sequence: Synthetic oligonucleotide
  Target: LAMA2; (-) strand; PAM type: NRG; PAM sequence: AAG
taataaaatgttcgtcttga

SEQ ID NO: 76924 - DNA, 20 bp, Artificial Sequence
  Description of Artificial Sequence: Synthetic oligonucleotide
  Target: LAMA2; (-) strand; PAM type: NRG; PAM sequence: GAG
gactgcattaaatttgctct

SEQ ID NO: 76925 - DNA, 20 bp, Artificial Sequence
  Description of Artificial Sequence: Synthetic oligonucleotide
  Target: LAMA2; (-) strand; PAM type: NRG; PAM sequence: AGG
ctatctgacatccttacata

SEQ ID NO: 76926 - DNA, 20 bp, Artificial Sequence
  Description of Artificial Sequence: Synthetic oligonucleotide
  Target: LAMA2; (-) strand; PAM type: NRG; PAM sequence: AAG
tctatctgacatccttacat

SEQ ID NO: 76927 - DNA, 20 bp, Artificial Sequence
  Description of Artificial Sequence: Synthetic oligonucleotide
  Target: LAMA2; (-) strand; PAM type: NRG; PAM sequence: TAG
agtaatattgtcctttgcac

SEQ ID NO: 76928 - DNA, 20 bp, Artificial Sequence
  Description of Artificial Sequence: Synthetic oligonucleotide
  Target: LAMA2; (-) strand; PAM type: NRG; PAM sequence: AAG
gttacactgcagaaataagc

SEQ ID NO: 76929 - DNA, 20 bp, Artificial Sequence
  Description of Artificial Sequence: Synthetic oligonucleotide
  Target: LAMA2; (-) strand; PAM type: NRG; PAM sequence: AAG
ctttgttacactgcagaaat

SEQ ID NO: 76930 - DNA, 20 bp, Artificial Sequence
  Description of Artificial Sequence: Synthetic oligonucleotide
  Target: LAMA2; (-) strand; PAM type: NRG; PAM sequence: CAG
tcttcatctttgttacactg

SEQ ID NO: 76931 - DNA, 20 bp, Artificial Sequence
  Description of Artificial Sequence: Synthetic oligonucleotide
  Target: LAMA2; (-) strand; PAM type: NRG; PAM sequence: GAG
tcattgagtaaaaaatttaa

SEQ ID NO: 76932 - DNA, 20 bp, Artificial Sequence
  Description of Artificial Sequence: Synthetic oligonucleotide
  Target: LAMA2; (-) strand; PAM type: NRG; PAM sequence: AAG
catcattgagtaaaaaattt

SEQ ID NO: 76933 - DNA, 20 bp, Artificial Sequence
  Description of Artificial Sequence: Synthetic oligonucleotide
  Target: LAMA2; (-) strand; PAM type: NRG; PAM sequence: GAG
gagacacatgaatcatcatt

SEQ ID NO: 76934 - DNA, 20 bp, Artificial Sequence
  Description of Artificial Sequence: Synthetic oligonucleotide
  Target: LAMA2; (-) strand; PAM type: NRG; PAM sequence: GAG
catattatcttagtttctca

SEQ ID NO: 76935 - DNA, 20 bp, Artificial Sequence
  Description of Artificial Sequence: Synthetic oligonucleotide
  Target: LAMA2; (-) strand; PAM type: NRG; PAM sequence: CAG
atcatattatcttagtttct

SEQ ID NO: 76936 - DNA, 20 bp, Artificial Sequence
  Description of Artificial Sequence: Synthetic oligonucleotide
  Target: LAMA2; (-) strand; PAM type: NRG; PAM sequence: TAG
agaattaaatcatattatct

SEQ ID NO: 76937 - DNA, 20 bp, Artificial Sequence
  Description of Artificial Sequence: Synthetic oligonucleotide
  Target: LAMA2; (-) strand; PAM type: NRG; PAM sequence: CAG
gttagactatcccaaaagca

SEQ ID NO: 76938 - DNA, 20 bp, Artificial Sequence
  Description of Artificial Sequence: Synthetic oligonucleotide
  Target: LAMA2; (-) strand; PAM type: NRG; PAM sequence: AAG
attaagttagactatcccaa

SEQ ID NO: 76939 - DNA, 20 bp, Artificial Sequence
  Description of Artificial Sequence: Synthetic oligonucleotide
  Target: LAMA2; (-) strand; PAM type: NRG; PAM sequence: TAG
tactccttcatgaattaagt

SEQ ID NO: 76940 - DNA, 20 bp, Artificial Sequence
  Description of Artificial Sequence: Synthetic oligonucleotide
  Target: LAMA2; (-) strand; PAM type: NRG; PAM sequence: AAG
cctgtactccttcatgaatt

SEQ ID NO: 76941 - DNA, 20 bp, Artificial Sequence
  Description of Artificial Sequence: Synthetic oligonucleotide
  Target: LAMA2; (-) strand; PAM type: NRG; PAM sequence: AAG
acaaacaaagtggacacaca

SEQ ID NO: 76942 - DNA, 20 bp, Artificial Sequence
  Description of Artificial Sequence: Synthetic oligonucleotide
  Target: LAMA2; (-) strand; PAM type: NRG; PAM sequence: TGG
tttgagagtgacaaacaaag

SEQ ID NO: 76943 - DNA, 20 bp, Artificial Sequence
  Description of Artificial Sequence: Synthetic oligonucleotide
  Target: LAMA2; (-) strand; PAM type: NRG; PAM sequence: AAG
acatttgagagtgacaaaca

SEQ ID NO: 76944 - DNA, 20 bp, Artificial Sequence
  Description of Artificial Sequence: Synthetic oligonucleotide
  Target: LAMA2; (-) strand; PAM type: NRG; PAM sequence: GAG
cctgcacatctgacatttga

SEQ ID NO: 76945 - DNA, 20 bp, Artificial Sequence
  Description of Artificial Sequence: Synthetic oligonucleotide
  Target: LAMA2; (-) strand; PAM type: NRG; PAM sequence: GAG
tgcctgcacatctgacattt

SEQ ID NO: 76946 - DNA, 20 bp, Artificial Sequence
  Description of Artificial Sequence: Synthetic oligonucleotide
  Target: LAMA2; (-) strand; PAM type: NRG; PAM sequence: GAG
ctgtcaagtaatttaactct

SEQ ID NO: 76947 - DNA, 20 bp, Artificial Sequence
  Description of Artificial Sequence: Synthetic oligonucleotide
  Target: LAMA2; (-) strand; PAM type: NRG; PAM sequence: AAG
cggatgcttaagttcctgtc

SEQ ID NO: 76948 - DNA, 20 bp, Artificial Sequence
  Description of Artificial Sequence: Synthetic oligonucleotide
  Target: LAMA2; (-) strand; PAM type: NRG; PAM sequence: AAG
ggcaacaaatacggatgctt

SEQ ID NO: 76949 - DNA, 20 bp, Artificial Sequence
  Description of Artificial Sequence: Synthetic oligonucleotide
  Target: LAMA2; (-) strand; PAM type: NRG; PAM sequence: CGG
agactacctggcaacaaata

SEQ ID NO: 76950 - DNA, 20 bp, Artificial Sequence
  Description of Artificial Sequence: Synthetic oligonucleotide
  Target: LAMA2; (-) strand; PAM type: NRG; PAM sequence: TGG
taaccacacagaagactacc

SEQ ID NO: 76951 - DNA, 20 bp, Artificial Sequence
  Description of Artificial Sequence: Synthetic oligonucleotide
  Target: LAMA2; (-) strand; PAM type: NRG; PAM sequence: AAG
tctgtactttaaccacacag

SEQ ID NO: 76952 - DNA, 20 bp, Artificial Sequence
  Description of Artificial Sequence: Synthetic oligonucleotide
  Target: LAMA2; (-) strand; PAM type: NRG; PAM sequence: CAG
cattctgtactttaaccaca

SEQ ID NO: 76953 - DNA, 20 bp, Artificial Sequence
  Description of Artificial Sequence: Synthetic oligonucleotide
  Target: LAMA2; (-) strand; PAM type: NRG; PAM sequence: GAG
ccgcctctctgcttttgtag

SEQ ID NO: 76954 - DNA, 20 bp, Artificial Sequence
  Description of Artificial Sequence: Synthetic oligonucleotide
  Target: LAMA2; (-) strand; PAM type: NRG; PAM sequence: AGG
ggccgcctctctgcttttgt

SEQ ID NO: 76955 - DNA, 20 bp, Artificial Sequence
  Description of Artificial Sequence: Synthetic oligonucleotide
  Target: LAMA2; (-) strand; PAM type: NRG; PAM sequence: TAG
gggccgcctctctgcttttg

SEQ ID NO: 76956 - DNA, 20 bp, Artificial Sequence
  Description of Artificial Sequence: Synthetic oligonucleotide
  Target: LAMA2; (-) strand; PAM type: NRG; PAM sequence: GGG
aaacacttttgtgtggcaac

SEQ ID NO: 76957 - DNA, 20 bp, Artificial Sequence
  Description of Artificial Sequence: Synthetic oligonucleotide
  Target: LAMA2; (-) strand; PAM type: NRG; PAM sequence: CGG
aaaacacttttgtgtggcaa

SEQ ID NO: 76958 - DNA, 20 bp, Artificial Sequence
  Description of Artificial Sequence: Synthetic oligonucleotide
  Target: LAMA2; (-) strand; PAM type: NRG; PAM sequence: TGG
tctgaaaaaacacttttgtg

SEQ ID NO: 76959 - DNA, 20 bp, Artificial Sequence
  Description of Artificial Sequence: Synthetic oligonucleotide
  Target: LAMA2; (-) strand; PAM type: NRG; PAM sequence: AAG
aatatattggttctaaccat

SEQ ID NO: 76960 - DNA, 20 bp, Artificial Sequence
  Description of Artificial Sequence: Synthetic oligonucleotide
  Target: LAMA2; (-) strand; PAM type: NRG; PAM sequence: TGG
tgtatgctagaaaaatatat

SEQ ID NO: 76961 - DNA, 20 bp, Artificial Sequence
  Description of Artificial Sequence: Synthetic oligonucleotide
  Target: LAMA2; (-) strand; PAM type: NRG; PAM sequence: TAG
ttatcactcaaactgtatgc

SEQ ID NO: 76962 - DNA, 20 bp, Artificial Sequence
  Description of Artificial Sequence: Synthetic oligonucleotide
  Target: LAMA2; (-) strand; PAM type: NRG; PAM sequence: GAG
ggcatgtgatcggggaatgt

SEQ ID NO: 76963 - DNA, 20 bp, Artificial Sequence
  Description of Artificial Sequence: Synthetic oligonucleotide
  Target: LAMA2; (-) strand; PAM type: NRG; PAM sequence: GGG
tggcacaaggcatgtgatcg

SEQ ID NO: 76964 - DNA, 20 bp, Artificial Sequence
  Description of Artificial Sequence: Synthetic oligonucleotide
  Target: LAMA2; (-) strand; PAM type: NRG; PAM sequence: GGG
ttggcacaaggcatgtgatc

SEQ ID NO: 76965 - DNA, 20 bp, Artificial Sequence
  Description of Artificial Sequence: Synthetic oligonucleotide
  Target: LAMA2; (-) strand; PAM type: NRG; PAM sequence: CGG
cttggcacaaggcatgtgat

SEQ ID NO: 76966 - DNA, 20 bp, Artificial Sequence
  Description of Artificial Sequence: Synthetic oligonucleotide
  Target: LAMA2; (-) strand; PAM type: NRG; PAM sequence: AGG
ttagaatggtacttggcaca

SEQ ID NO: 76967 - DNA, 20 bp, Artificial Sequence
  Description of Artificial Sequence: Synthetic oligonucleotide
  Target: LAMA2; (-) strand; PAM type: NRG; PAM sequence: AAG
tttagaatggtacttggcac

SEQ ID NO: 76968 - DNA, 20 bp, Artificial Sequence
  Description of Artificial Sequence: Synthetic oligonucleotide
  Target: LAMA2; (-) strand; PAM type: NRG; PAM sequence: TGG
aaggcatttagaatggtact

SEQ ID NO: 76969 - DNA, 20 bp, Artificial Sequence
  Description of Artificial Sequence: Synthetic oligonucleotide
  Target: LAMA2; (-) strand; PAM type: NRG; PAM sequence: TGG
aagatgcaaggcatttagaa

SEQ ID NO: 76970 - DNA, 20 bp, Artificial Sequence
  Description of Artificial Sequence: Synthetic oligonucleotide
  Target: LAMA2; (-) strand; PAM type: NRG; PAM sequence: TAG
gttacaagatgcaaggcatt

SEQ ID NO: 76971 - DNA, 20 bp, Artificial Sequence
  Description of Artificial Sequence: Synthetic oligonucleotide
  Target: LAMA2; (-) strand; PAM type: NRG; PAM sequence: AGG
ttaatgagttacaagatgca

SEQ ID NO: 76972 - DNA, 20 bp, Artificial Sequence
  Description of Artificial Sequence: Synthetic oligonucleotide
  Target: LAMA2; (-) strand; PAM type: NRG; PAM sequence: AAG
tttaatgagttacaagatgc

SEQ ID NO: 76973 - DNA, 20 bp, Artificial Sequence
  Description of Artificial Sequence: Synthetic oligonucleotide
  Target: LAMA2; (-) strand; PAM type: NRG; PAM sequence: AAG
gtaaaggtttaatgagttac

SEQ ID NO: 76974 - DNA, 20 bp, Artificial Sequence
  Description of Artificial Sequence: Synthetic oligonucleotide
  Target: LAMA2; (-) strand; PAM type: NRG; PAM sequence: GAG
ggttactgtaaaggtttaat

SEQ ID NO: 76975 - DNA, 20 bp, Artificial Sequence
  Description of Artificial Sequence: Synthetic oligonucleotide
  Target: LAMA2; (-) strand; PAM type: NRG; PAM sequence: AGG
attgcatgaggttactgtaa

SEQ ID NO: 76976 - DNA, 20 bp, Artificial Sequence
  Description of Artificial Sequence: Synthetic oligonucleotide
  Target: LAMA2; (-) strand; PAM type: NRG; PAM sequence: AAG
cattgcatgaggttactgta

SEQ ID NO: 76977 - DNA, 20 bp, Artificial Sequence
  Description of Artificial Sequence: Synthetic oligonucleotide
  Target: LAMA2; (-) strand; PAM type: NRG; PAM sequence: AGG
acaagagtgtacattgcatg

SEQ ID NO: 76978 - DNA, 20 bp, Artificial Sequence
  Description of Artificial Sequence: Synthetic oligonucleotide
  Target: LAMA2; (-) strand; PAM type: NRG; PAM sequence: GAG
aacaagagtgtacattgcat

SEQ ID NO: 76979 - DNA, 20 bp, Artificial Sequence
  Description of Artificial Sequence: Synthetic oligonucleotide
  Target: LAMA2; (-) strand; PAM type: NRG; PAM sequence: GAG
ttgcaaaatgggaacaacaa

SEQ ID NO: 76980 - DNA, 20 bp, Artificial Sequence
  Description of Artificial Sequence: Synthetic oligonucleotide
  Target: LAMA2; (-) strand; PAM type: NRG; PAM sequence: AAG
atttgcaaaatgggaacaac

SEQ ID NO: 76981 - DNA, 20 bp, Artificial Sequence
  Description of Artificial Sequence: Synthetic oligonucleotide
  Target: LAMA2; (-) strand; PAM type: NRG; PAM sequence: GGG
agttttcttatttgcaaaat

SEQ ID NO: 76982 - DNA, 20 bp, Artificial Sequence
  Description of Artificial Sequence: Synthetic oligonucleotide
  Target: LAMA2; (-) strand; PAM type: NRG; PAM sequence: TGG
cagttttcttatttgcaaaa

SEQ ID NO: 76983 - DNA, 20 bp, Artificial Sequence
  Description of Artificial Sequence: Synthetic oligonucleotide
  Target: LAMA2; (-) strand; PAM type: NRG; PAM sequence: CAG
ggcaaggtaatattgcccat

SEQ ID NO: 76984 - DNA, 20 bp, Artificial Sequence
  Description of Artificial Sequence: Synthetic oligonucleotide
  Target: LAMA2; (-) strand; PAM type: NRG; PAM sequence: AGG
cagctgtataaacttgggca

SEQ ID NO: 76985 - DNA, 20 bp, Artificial Sequence
  Description of Artificial Sequence: Synthetic oligonucleotide
  Target: LAMA2; (-) strand; PAM type: NRG; PAM sequence: AAG
ccagctgtataaacttgggc

SEQ ID NO: 76986 - DNA, 20 bp, Artificial Sequence
  Description of Artificial Sequence: Synthetic oligonucleotide
  Target: LAMA2; (-) strand; PAM type: NRG; PAM sequence: GGG
cttaccagctgtataaactt

SEQ ID NO: 76987 - DNA, 20 bp, Artificial Sequence
  Description of Artificial Sequence: Synthetic oligonucleotide
  Target: LAMA2; (-) strand; PAM type: NRG; PAM sequence: TGG
acttaccagctgtataaact

SEQ ID NO: 76988 - DNA, 20 bp, Artificial Sequence
  Description of Artificial Sequence: Synthetic oligonucleotide
  Target: LAMA2; (-) strand; PAM type: NRG; PAM sequence: CAG
atcctgactctgccacttac

SEQ ID NO: 76989 - DNA, 20 bp, Artificial Sequence
  Description of Artificial Sequence: Synthetic oligonucleotide
  Target: LAMA2; (-) strand; PAM type: NRG; PAM sequence: GGG
gcagactataccatcagcct

SEQ ID NO: 76990 - DNA, 20 bp, Artificial Sequence
  Description of Artificial Sequence: Synthetic oligonucleotide
  Target: LAMA2; (-) strand; PAM type: NRG; PAM sequence: TGG
cgcagactataccatcagcc

SEQ ID NO: 76991 - DNA, 20 bp, Artificial Sequence
  Description of Artificial Sequence: Synthetic oligonucleotide
  Target: LAMA2; (-) strand; PAM type: NRG; PAM sequence: CAG
gagcacgcagactataccat

SEQ ID NO: 76992 - DNA, 20 bp, Artificial Sequence
  Description of Artificial Sequence: Synthetic oligonucleotide
  Target: LAMA2; (-) strand; PAM type: NRG; PAM sequence: CAG
catgattgtggctgagcacg

SEQ ID NO: 76993 - DNA, 20 bp, Artificial Sequence
  Description of Artificial Sequence: Synthetic oligonucleotide
  Target: LAMA2; (-) strand; PAM type: NRG; PAM sequence: GAG
gtaagttcatgattgtggct

SEQ ID NO: 76994 - DNA, 20 bp, Artificial Sequence
  Description of Artificial Sequence: Synthetic oligonucleotide
  Target: LAMA2; (-) strand; PAM type: NRG; PAM sequence: TGG
tgagggtaagttcatgattg

SEQ ID NO: 76995 - DNA, 20 bp, Artificial Sequence
  Description of Artificial Sequence: Synthetic oligonucleotide
  Target: LAMA2; (-) strand; PAM type: NRG; PAM sequence: AAG
aacacaggcagtttgagggt

SEQ ID NO: 76996 - DNA, 20 bp, Artificial Sequence
  Description of Artificial Sequence: Synthetic oligonucleotide
  Target: LAMA2; (-) strand; PAM type: NRG; PAM sequence: GGG
tgcaaacacaggcagtttga

SEQ ID NO: 76997 - DNA, 20 bp, Artificial Sequence
  Description of Artificial Sequence: Synthetic oligonucleotide
  Target: LAMA2; (-) strand; PAM type: NRG; PAM sequence: AGG
atgcaaacacaggcagtttg

SEQ ID NO: 76998 - DNA, 20 bp, Artificial Sequence
  Description of Artificial Sequence: Synthetic oligonucleotide
  Target: LAMA2; (-) strand; PAM type: NRG; PAM sequence: GAG
tatgcaaacacaggcagttt

SEQ ID NO: 76999 - DNA, 20 bp, Artificial Sequence
  Description of Artificial Sequence: Synthetic oligonucleotide
  Target: LAMA2; (-) strand; PAM type: NRG; PAM sequence: CAG
catgattatgcaaacacagg

SEQ ID NO: 77000 - DNA, 20 bp, Artificial Sequence
  Description of Artificial Sequence: Synthetic oligonucleotide
  Target: LAMA2; (-) strand; PAM type: NRG; PAM sequence: AGG
ccacatgattatgcaaacac

SEQ ID NO: 77001 - DNA, 20 bp, Artificial Sequence
  Description of Artificial Sequence: Synthetic oligonucleotide
  Target: LAMA2; (-) strand; PAM type: NRG; PAM sequence: CAG
tccacatgattatgcaaaca

SEQ ID NO: 77002 - DNA, 20 bp, Artificial Sequence
  Description of Artificial Sequence: Synthetic oligonucleotide
  Target: LAMA2; (-) strand; PAM type: NRG; PAM sequence: TAG
agtctaaagaatctatcctg

SEQ ID NO: 77003 - DNA, 20 bp, Artificial Sequence
  Description of Artificial Sequence: Synthetic oligonucleotide
  Target: LAMA2; (-) strand; PAM type: NRG; PAM sequence: AAG
tcctacataagatgagtcta

SEQ ID NO: 77004 - DNA, 20 bp, Artificial Sequence
  Description of Artificial Sequence: Synthetic oligonucleotide
  Target: LAMA2; (-) strand; PAM type: NRG; PAM sequence: GAG
ctattcctcctacataagat

SEQ ID NO: 77005 - DNA, 20 bp, Artificial Sequence
  Description of Artificial Sequence: Synthetic oligonucleotide
  Target: LAMA2; (-) strand; PAM type: NRG; PAM sequence: AAG
tgtcactattcctcctacat

SEQ ID NO: 77006 - DNA, 20 bp, Artificial Sequence
  Description of Artificial Sequence: Synthetic oligonucleotide
  Target: LAMA2; (-) strand; PAM type: NRG; PAM sequence: TGG
agttaatgctcctcttatga

SEQ ID NO: 77007 - DNA, 20 bp, Artificial Sequence
  Description of Artificial Sequence: Synthetic oligonucleotide
  Target: LAMA2; (-) strand; PAM type: NRG; PAM sequence: TAG
tgggtaagacaagcaaagtt

SEQ ID NO: 77008 - DNA, 20 bp, Artificial Sequence
  Description of Artificial Sequence: Synthetic oligonucleotide
  Target: LAMA2; (-) strand; PAM type: NRG; PAM sequence: AAG
tttcatgggtaagacaagca

SEQ ID NO: 77009 - DNA, 20 bp, Artificial Sequence
  Description of Artificial Sequence: Synthetic oligonucleotide
  Target: LAMA2; (-) strand; PAM type: NRG; PAM sequence: AAG
tgttctttcatgggtaagac

SEQ ID NO: 77010 - DNA, 20 bp, Artificial Sequence
  Description of Artificial Sequence: Synthetic oligonucleotide
  Target: LAMA2; (-) strand; PAM type: NRG; PAM sequence: AAG
actgatgttctttcatgggt

SEQ ID NO: 77011 - DNA, 20 bp, Artificial Sequence
  Description of Artificial Sequence: Synthetic oligonucleotide
  Target: LAMA2; (-) strand; PAM type: NRG; PAM sequence: GGG
tcacactgatgttctttcat

SEQ ID NO: 77012 - DNA, 20 bp, Artificial Sequence
  Description of Artificial Sequence: Synthetic oligonucleotide
  Target: LAMA2; (-) strand; PAM type: NRG; PAM sequence: TGG
gtcacactgatgttctttca

SEQ ID NO: 77013 - DNA, 20 bp, Artificial Sequence
  Description of Artificial Sequence: Synthetic oligonucleotide
  Target: LAMA2; (-) strand; PAM type: NRG; PAM sequence: GAG
attatcagatatttggcagg

SEQ ID NO: 77014 - DNA, 20 bp, Artificial Sequence
  Description of Artificial Sequence: Synthetic oligonucleotide
  Target: LAMA2; (-) strand; PAM type: NRG; PAM sequence: GGG
tcattatcagatatttggca

SEQ ID NO: 77015 - DNA, 20 bp, Artificial Sequence
  Description of Artificial Sequence: Synthetic oligonucleotide
  Target: LAMA2; (-) strand; PAM type: NRG; PAM sequence: AGG
ttcattatcagatatttggc

SEQ ID NO: 77016 - DNA, 20 bp, Artificial Sequence
  Description of Artificial Sequence: Synthetic oligonucleotide
  Target: LAMA2; (-) strand; PAM type: NRG; PAM sequence: CAG
tttcattatcagatatttgg

SEQ ID NO: 77017 - DNA, 20 bp, Artificial Sequence
  Description of Artificial Sequence: Synthetic oligonucleotide
  Target: LAMA2; (-) strand; PAM type: NRG; PAM sequence: TGG
tcttttcattatcagatatt

SEQ ID NO: 77018 - DNA, 20 bp, Artificial Sequence
  Description of Artificial Sequence: Synthetic oligonucleotide
  Target: LAMA2; (-) strand; PAM type: NRG; PAM sequence: CAG
aatgcatttcttttcattat

SEQ ID NO: 77019 - DNA, 20 bp, Artificial Sequence
  Description of Artificial Sequence: Synthetic oligonucleotide
  Target: LAMA2; (-) strand; PAM type: NRG; PAM sequence: CAG
attcattcgttcagctattt

SEQ ID NO: 77020 - DNA, 20 bp, Artificial Sequence
  Description of Artificial Sequence: Synthetic oligonucleotide
  Target: LAMA2; (-) strand; PAM type: NRG; PAM sequence: CAG
aggttgttaattcattcgtt

SEQ ID NO: 77021 - DNA, 20 bp, Artificial Sequence
  Description of Artificial Sequence: Synthetic oligonucleotide
  Target: LAMA2; (-) strand; PAM type: NRG; PAM sequence: AGG
ccagcacaatgctataaaat

SEQ ID NO: 77022 - DNA, 20 bp, Artificial Sequence
  Description of Artificial Sequence: Synthetic oligonucleotide
  Target: LAMA2; (-) strand; PAM type: NRG; PAM sequence: TAG
tccagcacaatgctataaaa

SEQ ID NO: 77023 - DNA, 20 bp, Artificial Sequence
  Description of Artificial Sequence: Synthetic oligonucleotide
  Target: LAMA2; (-) strand; PAM type: NRG; PAM sequence: CAG
gtaagatgagcattcttctc

SEQ ID NO: 77024 - DNA, 20 bp, Artificial Sequence
  Description of Artificial Sequence: Synthetic oligonucleotide
  Target: LAMA2; (-) strand; PAM type: NRG; PAM sequence: GAG
cacaatcacctctgtaagat

SEQ ID NO: 77025 - DNA, 20 bp, Artificial Sequence
  Description of Artificial Sequence: Synthetic oligonucleotide
  Target: LAMA2; (-) strand; PAM type: NRG; PAM sequence: AAG
ttagacacaatcacctctgt

SEQ ID NO: 77026 - DNA, 20 bp, Artificial Sequence
  Description of Artificial Sequence: Synthetic oligonucleotide
  Target: LAMA2; (-) strand; PAM type: NRG; PAM sequence: TAG
aaatccagtgcagtttttat

SEQ ID NO: 77027 - DNA, 20 bp, Artificial Sequence
  Description of Artificial Sequence: Synthetic oligonucleotide
  Target: LAMA2; (-) strand; PAM type: NRG; PAM sequence: CAG
tttttacttcaaatccagtg

SEQ ID NO: 77028 - DNA, 20 bp, Artificial Sequence
  Description of Artificial Sequence: Synthetic oligonucleotide
  Target: LAMA2; (-) strand; PAM type: NRG; PAM sequence: CAG
tttattttttacttcaaatc

SEQ ID NO: 77029 - DNA, 20 bp, Artificial Sequence
  Description of Artificial Sequence: Synthetic oligonucleotide
  Target: LAMA2; (-) strand; PAM type: NRG; PAM sequence: CAG
atagaattggaaattagatc

SEQ ID NO: 77030 - DNA, 20 bp, Artificial Sequence
  Description of Artificial Sequence: Synthetic oligonucleotide
  Target: LAMA2; (-) strand; PAM type: NRG; PAM sequence: TAG
cgagtgatagaattggaaat

SEQ ID NO: 77031 - DNA, 20 bp, Artificial Sequence
  Description of Artificial Sequence: Synthetic oligonucleotide
  Target: LAMA2; (-) strand; PAM type: NRG; PAM sequence: TGG
gagactacgagtgatagaat

SEQ ID NO: 77032 - DNA, 20 bp, Artificial Sequence
  Description of Artificial Sequence: Synthetic oligonucleotide
  Target: LAMA2; (-) strand; PAM type: NRG; PAM sequence: TAG
gttacagagactacgagtga

SEQ ID NO: 77033 - DNA, 20 bp, Artificial Sequence
  Description of Artificial Sequence: Synthetic oligonucleotide
  Target: LAMA2; (-) strand; PAM type: NRG; PAM sequence: GAG
taggaggttacagagactac

SEQ ID NO: 77034 - DNA, 20 bp, Artificial Sequence
  Description of Artificial Sequence: Synthetic oligonucleotide
  Target: LAMA2; (-) strand; PAM type: NRG; PAM sequence: GAG
aaagagactaggaggttaca

SEQ ID NO: 77035 - DNA, 20 bp, Artificial Sequence
  Description of Artificial Sequence: Synthetic oligonucleotide
  Target: LAMA2; (-) strand; PAM type: NRG; PAM sequence: CAG
tgaaagagactaggaggtta

SEQ ID NO: 77036 - DNA, 20 bp, Artificial Sequence
  Description of Artificial Sequence: Synthetic oligonucleotide
  Target: LAMA2; (-) strand; PAM type: NRG; PAM sequence: AGG
tcccagtgaaagagactagg

SEQ ID NO: 77037 - DNA, 20 bp, Artificial Sequence
  Description of Artificial Sequence: Synthetic oligonucleotide
  Target: LAMA2; (-) strand; PAM type: NRG; PAM sequence: GAG
atcccagtgaaagagactag

SEQ ID NO: 77038 - DNA, 20 bp, Artificial Sequence
  Description of Artificial Sequence: Synthetic oligonucleotide
  Target: LAMA2; (-) strand; PAM type: NRG; PAM sequence: AGG
agatcccagtgaaagagact

SEQ ID NO: 77039 - DNA, 20 bp, Artificial Sequence
  Description of Artificial Sequence: Synthetic oligonucleotide
  Target: LAMA2; (-) strand; PAM type: NRG; PAM sequence: TAG
aagatcccagtgaaagagac

SEQ ID NO: 77040 - DNA, 20 bp, Artificial Sequence
  Description of Artificial Sequence: Synthetic oligonucleotide
  Target: LAMA2; (-) strand; PAM type: NRG; PAM sequence: GAG
catctaagatcccagtgaaa

SEQ ID NO: 77041 - DNA, 20 bp, Artificial Sequence
  Description of Artificial Sequence: Synthetic oligonucleotide
  Target: LAMA2; (-) strand; PAM type: NRG; PAM sequence: AAG
cacatctaagatcccagtga

SEQ ID NO: 77042 - DNA, 20 bp, Artificial Sequence
  Description of Artificial Sequence: Synthetic oligonucleotide
  Target: LAMA2; (-) strand; PAM type: NRG; PAM sequence: CAG
agaaggcacatctaagatcc

SEQ ID NO: 77043 - DNA, 20 bp, Artificial Sequence
  Description of Artificial Sequence: Synthetic oligonucleotide
  Target: LAMA2; (-) strand; PAM type: NRG; PAM sequence: AAG
gcttctaagaaggcacatct

SEQ ID NO: 77044 - DNA, 20 bp, Artificial Sequence
  Description of Artificial Sequence: Synthetic oligonucleotide
  Target: LAMA2; (-) strand; PAM type: NRG; PAM sequence: AGG
agaaaatttagcttctaaga

SEQ ID NO: 77045 - DNA, 20 bp, Artificial Sequence
  Description of Artificial Sequence: Synthetic oligonucleotide
  Target: LAMA2; (-) strand; PAM type: NRG; PAM sequence: AAG
aagaaaatttagcttctaag

SEQ ID NO: 77046 - DNA, 20 bp, Artificial Sequence
  Description of Artificial Sequence: Synthetic oligonucleotide
  Target: LAMA2; (-) strand; PAM type: NRG; PAM sequence: AAG
gataagaaaatttagcttct

SEQ ID NO: 77047 - DNA, 20 bp, Artificial Sequence
  Description of Artificial Sequence: Synthetic oligonucleotide
  Target: LAMA2; (-) strand; PAM type: NRG; PAM sequence: TAG
aactcacagataagaaaatt

SEQ ID NO: 77048 - DNA, 20 bp, Artificial Sequence
  Description of Artificial Sequence: Synthetic oligonucleotide
  Target: LAMA2; (-) strand; PAM type: NRG; PAM sequence: AAG
tcgtaaaccaactcacagat

SEQ ID NO: 77049 - DNA, 20 bp, Artificial Sequence
  Description of Artificial Sequence: Synthetic oligonucleotide
  Target: LAMA2; (-) strand; PAM type: NRG; PAM sequence: CAG
aggaatcgtaaaccaactca

SEQ ID NO: 77050 - DNA, 20 bp, Artificial Sequence
  Description of Artificial Sequence: Synthetic oligonucleotide
  Target: LAMA2; (-) strand; PAM type: NRG; PAM sequence: AGG
agtgagtggatagaggaaga

SEQ ID NO: 77051 - DNA, 20 bp, Artificial Sequence
  Description of Artificial Sequence: Synthetic oligonucleotide
  Target: LAMA2; (-) strand; PAM type: NRG; PAM sequence: AAG
aagtgagtggatagaggaag

SEQ ID NO: 77052 - DNA, 20 bp, Artificial Sequence
  Description of Artificial Sequence: Synthetic oligonucleotide
  Target: LAMA2; (-) strand; PAM type: NRG; PAM sequence: AAG
ataaagtgagtggatagagg

SEQ ID NO: 77053 - DNA, 20 bp, Artificial Sequence
  Description of Artificial Sequence: Synthetic oligonucleotide
  Target: LAMA2; (-) strand; PAM type: NRG; PAM sequence: AGG
acaataaagtgagtggatag

SEQ ID NO: 77054 - DNA, 20 bp, Artificial Sequence
  Description of Artificial Sequence: Synthetic oligonucleotide
  Target: LAMA2; (-) strand; PAM type: NRG; PAM sequence: GAG
cacaataaagtgagtggata

SEQ ID NO: 77055 - DNA, 20 bp, Artificial Sequence
  Description of Artificial Sequence: Synthetic oligonucleotide
  Target: LAMA2; (-) strand; PAM type: NRG; PAM sequence: TAG
atcacaataaagtgagtgga

SEQ ID NO: 77056 - DNA, 20 bp, Artificial Sequence
  Description of Artificial Sequence: Synthetic oligonucleotide
  Target: LAMA2; (-) strand; PAM type: NRG; PAM sequence: TGG
tgatatcacaataaagtgag

SEQ ID NO: 77057 - DNA, 20 bp, Artificial Sequence
  Description of Artificial Sequence: Synthetic oligonucleotide
  Target: LAMA2; (-) strand; PAM type: NRG; PAM sequence: GAG
ttttgatatcacaataaagt

SEQ ID NO: 77058 - DNA, 20 bp, Artificial Sequence
  Description of Artificial Sequence: Synthetic oligonucleotide
  Target: LAMA2; (-) strand; PAM type: NRG; PAM sequence: AAG
cttattttgatatcacaata

SEQ ID NO: 77059 - DNA, 20 bp, Artificial Sequence
  Description of Artificial Sequence: Synthetic oligonucleotide
  Target: LAMA2; (-) strand; PAM type: NRG; PAM sequence: AGG
agatagctttaaaatctcca

SEQ ID NO: 77060 - DNA, 20 bp, Artificial Sequence
  Description of Artificial Sequence: Synthetic oligonucleotide
  Target: LAMA2; (-) strand; PAM type: NRG; PAM sequence: AAG
cagatagctttaaaatctcc

SEQ ID NO: 77061 - DNA, 20 bp, Artificial Sequence
  Description of Artificial Sequence: Synthetic oligonucleotide
  Target: LAMA2; (-) strand; PAM type: NRG; PAM sequence: TAG
aaatatggcacattttcaga

SEQ ID NO: 77062 - DNA, 20 bp, Artificial Sequence
  Description of Artificial Sequence: Synthetic oligonucleotide
  Target: LAMA2; (-) strand; PAM type: NRG; PAM sequence: CAG
gtttaaatatggcacatttt

SEQ ID NO: 77063 - DNA, 20 bp, Artificial Sequence
  Description of Artificial Sequence: Synthetic oligonucleotide
  Target: LAMA2; (-) strand; PAM type: NRG; PAM sequence: TGG
atgttcagtatgtttaaata

SEQ ID NO: 77064 - DNA, 20 bp, Artificial Sequence
  Description of Artificial Sequence: Synthetic oligonucleotide
  Target: LAMA2; (-) strand; PAM type: NRG; PAM sequence: CAG
gcatgtcttttaactatgtt

SEQ ID NO: 77065 - DNA, 20 bp, Artificial Sequence
  Description of Artificial Sequence: Synthetic oligonucleotide
  Target: LAMA2; (-) strand; PAM type: NRG; PAM sequence: CAG
ggtatagtttttacattaat

SEQ ID NO: 77066 - DNA, 20 bp, Artificial Sequence
  Description of Artificial Sequence: Synthetic oligonucleotide
  Target: LAMA2; (-) strand; PAM type: NRG; PAM sequence: TAG
tggactacaataaattggta

SEQ ID NO: 77067 - DNA, 20 bp, Artificial Sequence
  Description of Artificial Sequence: Synthetic oligonucleotide
  Target: LAMA2; (-) strand; PAM type: NRG; PAM sequence: TGG
ccaagtggactacaataaat

SEQ ID NO: 77068 - DNA, 20 bp, Artificial Sequence
  Description of Artificial Sequence: Synthetic oligonucleotide
  Target: LAMA2; (-) strand; PAM type: NRG; PAM sequence: TGG
aagctacttgtctttccaag

SEQ ID NO: 77069 - DNA, 20 bp, Artificial Sequence
  Description of Artificial Sequence: Synthetic oligonucleotide
  Target: LAMA2; (-) strand; PAM type: NRG; PAM sequence: AAG
agtaagctacttgtctttcc

SEQ ID NO: 77070 - DNA, 20 bp, Artificial Sequence
  Description of Artificial Sequence: Synthetic oligonucleotide
  Target: LAMA2; (-) strand; PAM type: NRG; PAM sequence: AAG
aacaaaatagatctttaagt

SEQ ID NO: 77071 - DNA, 20 bp, Artificial Sequence
  Description of Artificial Sequence: Synthetic oligonucleotide
  Target: LAMA2; (-) strand; PAM type: NRG; PAM sequence: AAG
atgcaacaaaatagatcttt

SEQ ID NO: 77072 - DNA, 20 bp, Artificial Sequence
  Description of Artificial Sequence: Synthetic oligonucleotide
  Target: LAMA2; (-) strand; PAM type: NRG; PAM sequence: TAG
caactttaaatgcaacaaaa

SEQ ID NO: 77073 - DNA, 20 bp, Artificial Sequence
  Description of Artificial Sequence: Synthetic oligonucleotide
  Target: LAMA2; (-) strand; PAM type: NRG; PAM sequence: AGG
gttgggaagagatttatatc

SEQ ID NO: 77074 - DNA, 20 bp, Artificial Sequence
  Description of Artificial Sequence: Synthetic oligonucleotide
  Target: LAMA2; (-) strand; PAM type: NRG; PAM sequence: CAG
agttgggaagagatttatat

SEQ ID NO: 77075 - DNA, 20 bp, Artificial Sequence
  Description of Artificial Sequence: Synthetic oligonucleotide
  Target: LAMA2; (-) strand; PAM type: NRG; PAM sequence: GAG
aggatcacagtagttgggaa

SEQ ID NO: 77076 - DNA, 20 bp, Artificial Sequence
  Description of Artificial Sequence: Synthetic oligonucleotide
  Target: LAMA2; (-) strand; PAM type: NRG; PAM sequence: AAG
acaggatcacagtagttggg

SEQ ID NO: 77077 - DNA, 20 bp, Artificial Sequence
  Description of Artificial Sequence: Synthetic oligonucleotide
  Target: LAMA2; (-) strand; PAM type: NRG; PAM sequence: GGG
aagacaggatcacagtagtt

SEQ ID NO: 77078 - DNA, 20 bp, Artificial Sequence
  Description of Artificial Sequence: Synthetic oligonucleotide
  Target: LAMA2; (-) strand; PAM type: NRG; PAM sequence: TGG
aaagacaggatcacagtagt

SEQ ID NO: 77079 - DNA, 20 bp, Artificial Sequence
  Description of Artificial Sequence: Synthetic oligonucleotide
  Target: LAMA2; (-) strand; PAM type: NRG; PAM sequence: TAG
tattaaagacaggatcacag

SEQ ID NO: 77080 - DNA, 20 bp, Artificial Sequence
  Description of Artificial Sequence: Synthetic oligonucleotide
  Target: LAMA2; (-) strand; PAM type: NRG; PAM sequence: CAG
ttgtattaaagacaggatca

SEQ ID NO: 77081 - DNA, 20 bp, Artificial Sequence
  Description of Artificial Sequence: Synthetic oligonucleotide
  Target: LAMA2; (-) strand; PAM type: NRG; PAM sequence: AGG
attaaagttgtattaaagac

SEQ ID NO: 77082 - DNA, 20 bp, Artificial Sequence
  Description of Artificial Sequence: Synthetic oligonucleotide
  Target: LAMA2; (-) strand; PAM type: NRG; PAM sequence: CAG
tattaaagttgtattaaaga

SEQ ID NO: 77083 - DNA, 20 bp, Artificial Sequence
  Description of Artificial Sequence: Synthetic oligonucleotide
  Target: LAMA2; (-) strand; PAM type: NRG; PAM sequence: AAG
agtctattaaagttgtatta

SEQ ID NO: 77084 - DNA, 20 bp, Artificial Sequence
  Description of Artificial Sequence: Synthetic oligonucleotide
  Target: LAMA2; (-) strand; PAM type: NRG; PAM sequence: AAG
gcatatgttccagtctatta

SEQ ID NO: 77085 - DNA, 20 bp, Artificial Sequence
  Description of Artificial Sequence: Synthetic oligonucleotide
  Target: LAMA2; (-) strand; PAM type: NRG; PAM sequence: CAG
tatactcttggcatatgttc

SEQ ID NO: 77086 - DNA, 20 bp, Artificial Sequence
  Description of Artificial Sequence: Synthetic oligonucleotide
  Target: LAMA2; (-) strand; PAM type: NRG; PAM sequence: TGG
agattctgactgtatactct

SEQ ID NO: 77087 - DNA, 20 bp, Artificial Sequence
  Description of Artificial Sequence: Synthetic oligonucleotide
  Target: LAMA2; (-) strand; PAM type: NRG; PAM sequence: GAG
atcagtctttgattcttaga

SEQ ID NO: 77088 - DNA, 20 bp, Artificial Sequence
  Description of Artificial Sequence: Synthetic oligonucleotide
  Target: LAMA2; (-) strand; PAM type: NRG; PAM sequence: GAG
tcatcagtctttgattctta

SEQ ID NO: 77089 - DNA, 20 bp, Artificial Sequence
  Description of Artificial Sequence: Synthetic oligonucleotide
  Target: LAMA2; (-) strand; PAM type: NRG; PAM sequence: TAG
tctcatcagtctttgattct

SEQ ID NO: 77090 - DNA, 20 bp, Artificial Sequence
  Description of Artificial Sequence: Synthetic oligonucleotide
  Target: LAMA2; (-) strand; PAM type: NRG; PAM sequence: CAG
agctttcagaggtttctcat

SEQ ID NO: 77091 - DNA, 20 bp, Artificial Sequence
  Description of Artificial Sequence: Synthetic oligonucleotide
  Target: LAMA2; (-) strand; PAM type: NRG; PAM sequence: AGG
acacttttcacagctttcag

SEQ ID NO: 77092 - DNA, 20 bp, Artificial Sequence
  Description of Artificial Sequence: Synthetic oligonucleotide
  Target: LAMA2; (-) strand; PAM type: NRG; PAM sequence: GAG
cacacttttcacagctttca

SEQ ID NO: 77093 - DNA, 20 bp, Artificial Sequence
  Description of Artificial Sequence: Synthetic oligonucleotide
  Target: LAMA2; (-) strand; PAM type: NRG; PAM sequence: CAG
aacacacttttcacagcttt

SEQ ID NO: 77094 - DNA, 20 bp, Artificial Sequence
  Description of Artificial Sequence: Synthetic oligonucleotide
  Target: LAMA2; (-) strand; PAM type: NRG; PAM sequence: CAG
aaacaataacacacttttca

SEQ ID NO: 77095 - DNA, 20 bp, Artificial Sequence
  Description of Artificial Sequence: Synthetic oligonucleotide
  Target: LAMA2; (-) strand; PAM type: NRG; PAM sequence: AAG
ccttctctcattctttaggg

SEQ ID NO: 77096 - DNA, 20 bp, Artificial Sequence
  Description of Artificial Sequence: Synthetic oligonucleotide
  Target: LAMA2; (-) strand; PAM type: NRG; PAM sequence: GGG
ttgccttctctcattcttta

SEQ ID NO: 77097 - DNA, 20 bp, Artificial Sequence
  Description of Artificial Sequence: Synthetic oligonucleotide
  Target: LAMA2; (-) strand; PAM type: NRG; PAM sequence: AGG
tttgccttctctcattcttt

SEQ ID NO: 77098 - DNA, 20 bp, Artificial Sequence
  Description of Artificial Sequence: Synthetic oligonucleotide
  Target: LAMA2; (-) strand; PAM type: NRG; PAM sequence: TAG
ctttgccttctctcattctt

SEQ ID NO: 77099 - DNA, 20 bp, Artificial Sequence
  Description of Artificial Sequence: Synthetic oligonucleotide
  Target: LAMA2; (-) strand; PAM type: NRG; PAM sequence: CAG
catcaataccactagggtcc

SEQ ID NO: 77100 - DNA, 20 bp, Artificial Sequence
  Description of Artificial Sequence: Synthetic oligonucleotide
  Target: LAMA2; (-) strand; PAM type: NRG; PAM sequence: GGG
acagcccatcaataccacta

SEQ ID NO: 77101 - DNA, 20 bp, Artificial Sequence
  Description of Artificial Sequence: Synthetic oligonucleotide
  Target: LAMA2; (-) strand; PAM type: NRG; PAM sequence: AGG
aacagcccatcaataccact

SEQ ID NO: 77102 - DNA, 20 bp, Artificial Sequence
  Description of Artificial Sequence: Synthetic oligonucleotide
  Target: LAMA2; (-) strand; PAM type: NRG; PAM sequence: TAG
caacagcccatcaataccac

SEQ ID NO: 77103 - DNA, 20 bp, Artificial Sequence
  Description of Artificial Sequence: Synthetic oligonucleotide
  Target: LAMA2; (-) strand; PAM type: NRG; PAM sequence: CAG
acatcatggataaggagcaa

SEQ ID NO: 77104 - DNA, 20 bp, Artificial Sequence
  Description of Artificial Sequence: Synthetic oligonucleotide
  Target: LAMA2; (-) strand; PAM type: NRG; PAM sequence: GAG
tcttacacatcatggataag

SEQ ID NO: 77105 - DNA, 20 bp, Artificial Sequence
  Description of Artificial Sequence: Synthetic oligonucleotide
  Target: LAMA2; (-) strand; PAM type: NRG; PAM sequence: AGG
actcttacacatcatggata

SEQ ID NO: 77106 - DNA, 20 bp, Artificial Sequence
  Description of Artificial Sequence: Synthetic oligonucleotide
  Target: LAMA2; (-) strand; PAM type: NRG; PAM sequence: AAG
cactcttacacatcatggat

SEQ ID NO: 77107 - DNA, 20 bp, Artificial Sequence
  Description of Artificial Sequence: Synthetic oligonucleotide
  Target: LAMA2; (-) strand; PAM type: NRG; PAM sequence: TGG
ttcctcactcttacacatca

SEQ ID NO: 77108 - DNA, 20 bp, Artificial Sequence
  Description of Artificial Sequence: Synthetic oligonucleotide
  Target: LAMA2; (-) strand; PAM type: NRG; PAM sequence: TAG
ccttaaaaagttttcagact

SEQ ID NO: 77109 - DNA, 20 bp, Artificial Sequence
  Description of Artificial Sequence: Synthetic oligonucleotide
  Target: LAMA2; (-) strand; PAM type: NRG; PAM sequence: CAG
ttttccccttaaaaagtttt

SEQ ID NO: 77110 - DNA, 20 bp, Artificial Sequence
  Description of Artificial Sequence: Synthetic oligonucleotide
  Target: LAMA2; (-) strand; PAM type: NRG; PAM sequence: AAG
actgctattttccccttaaa

SEQ ID NO: 77111 - DNA, 20 bp, Artificial Sequence
  Description of Artificial Sequence: Synthetic oligonucleotide
  Target: LAMA2; (-) strand; PAM type: NRG; PAM sequence: CAG
aaatattacaacaaaacttt

SEQ ID NO: 77112 - DNA, 20 bp, Artificial Sequence
  Description of Artificial Sequence: Synthetic oligonucleotide
  Target: LAMA2; (-) strand; PAM type: NRG; PAM sequence: TGG
attttgcactattttttaat

SEQ ID NO: 77113 - DNA, 20 bp, Artificial Sequence
  Description of Artificial Sequence: Synthetic oligonucleotide
  Target: LAMA2; (-) strand; PAM type: NRG; PAM sequence: TGG
gaggggactttctttgtctt

SEQ ID NO: 77114 - DNA, 20 bp, Artificial Sequence
  Description of Artificial Sequence: Synthetic oligonucleotide
  Target: LAMA2; (-) strand; PAM type: NRG; PAM sequence: GGG
aaagaacatggagagaagag

SEQ ID NO: 77115 - DNA, 20 bp, Artificial Sequence
  Description of Artificial Sequence: Synthetic oligonucleotide
  Target: LAMA2; (-) strand; PAM type: NRG; PAM sequence: GGG
aaaagaacatggagagaaga

SEQ ID NO: 77116 - DNA, 20 bp, Artificial Sequence
  Description of Artificial Sequence: Synthetic oligonucleotide
  Target: LAMA2; (-) strand; PAM type: NRG; PAM sequence: AGG
gaaaagaacatggagagaag

SEQ ID NO: 77117 - DNA, 20 bp, Artificial Sequence
  Description of Artificial Sequence: Synthetic oligonucleotide
  Target: LAMA2; (-) strand; PAM type: NRG; PAM sequence: GAG
tgaaaagaacatggagagaa

SEQ ID NO: 77118 - DNA, 20 bp, Artificial Sequence
  Description of Artificial Sequence: Synthetic oligonucleotide
  Target: LAMA2; (-) strand; PAM type: NRG; PAM sequence: AAG
agtgaaaagaacatggagag

SEQ ID NO: 77119 - DNA, 20 bp, Artificial Sequence
  Description of Artificial Sequence: Synthetic oligonucleotide
  Target: LAMA2; (-) strand; PAM type: NRG; PAM sequence: GAG
agcagtgaaaagaacatgga

SEQ ID NO: 77120 - DNA, 20 bp, Artificial Sequence
  Description of Artificial Sequence: Synthetic oligonucleotide
  Target: LAMA2; (-) strand; PAM type: NRG; PAM sequence: GAG
ctagcagtgaaaagaacatg

SEQ ID NO: 77121 - DNA, 20 bp, Artificial Sequence
  Description of Artificial Sequence: Synthetic oligonucleotide
  Target: LAMA2; (-) strand; PAM type: NRG; PAM sequence: TGG
tgctagcagtgaaaagaaca

SEQ ID NO: 77122 - DNA, 20 bp, Artificial Sequence
  Description of Artificial Sequence: Synthetic oligonucleotide
  Target: LAMA2; (-) strand; PAM type: NRG; PAM sequence: AAG
taattgctgctagcagtgaa

SEQ ID NO: 77123 - DNA, 20 bp, Artificial Sequence
  Description of Artificial Sequence: Synthetic oligonucleotide
  Target: LAMA2; (-) strand; PAM type: NRG; PAM sequence: CAG
caaatgttaattgctgctag

SEQ ID NO: 77124 - DNA, 20 bp, Artificial Sequence
  Description of Artificial Sequence: Synthetic oligonucleotide
  Target: LAMA2; (-) strand; PAM type: NRG; PAM sequence: TAG
tgccaaatgttaattgctgc

SEQ ID NO: 77125 - DNA, 20 bp, Artificial Sequence
  Description of Artificial Sequence: Synthetic oligonucleotide
  Target: LAMA2; (-) strand; PAM type: NRG; PAM sequence: AGG
cataaaaaatgaaatctagg

SEQ ID NO: 77126 - DNA, 20 bp, Artificial Sequence
  Description of Artificial Sequence: Synthetic oligonucleotide
  Target: LAMA2; (-) strand; PAM type: NRG; PAM sequence: GAG
gcataaaaaatgaaatctag

SEQ ID NO: 77127 - DNA, 20 bp, Artificial Sequence
  Description of Artificial Sequence: Synthetic oligonucleotide
  Target: LAMA2; (-) strand; PAM type: NRG; PAM sequence: AGG
atgcataaaaaatgaaatct

SEQ ID NO: 77128 - DNA, 20 bp, Artificial Sequence
  Description of Artificial Sequence: Synthetic oligonucleotide
  Target: LAMA2; (-) strand; PAM type: NRG; PAM sequence: TAG
tatgcataaaaaatgaaatc

SEQ ID NO: 77129 - DNA, 20 bp, Artificial Sequence
  Description of Artificial Sequence: Synthetic oligonucleotide
  Target: LAMA2; (-) strand; PAM type: NRG; PAM sequence: AAG
caagaactatgtaatataac

SEQ ID NO: 77130 - DNA, 20 bp, Artificial Sequence
  Description of Artificial Sequence: Synthetic oligonucleotide
  Target: LAMA2; (-) strand; PAM type: NRG; PAM sequence: AAG
aattccacttgtgttaaaac

SEQ ID NO: 77131 - DNA, 20 bp, Artificial Sequence
  Description of Artificial Sequence: Synthetic oligonucleotide
  Target: LAMA2; (-) strand; PAM type: NRG; PAM sequence: AGG
aaatcataaacaccatgtag

SEQ ID NO: 77132 - DNA, 20 bp, Artificial Sequence
  Description of Artificial Sequence: Synthetic oligonucleotide
  Target: LAMA2; (-) strand; PAM type: NRG; PAM sequence: GAG
caaatcataaacaccatgta

SEQ ID NO: 77133 - DNA, 20 bp, Artificial Sequence
  Description of Artificial Sequence: Synthetic oligonucleotide
  Target: LAMA2; (-) strand; PAM type: NRG; PAM sequence: TAG
aacaaatcataaacaccatg

SEQ ID NO: 77134 - DNA, 20 bp, Artificial Sequence
  Description of Artificial Sequence: Synthetic oligonucleotide
  Target: LAMA2; (-) strand; PAM type: NRG; PAM sequence: AAG
cattttaaacacaacctcat

SEQ ID NO: 77135 - DNA, 20 bp, Artificial Sequence
  Description of Artificial Sequence: Synthetic oligonucleotide
  Target: LAMA2; (-) strand; PAM type: NRG; PAM sequence: AAG
actatgttaaaataaaaaca

SEQ ID NO: 77136 - DNA, 20 bp, Artificial Sequence
  Description of Artificial Sequence: Synthetic oligonucleotide
  Target: LAMA2; (-) strand; PAM type: NRG; PAM sequence: TGG
gcagtataattacatttcag

SEQ ID NO: 77137 - DNA, 20 bp, Artificial Sequence
  Description of Artificial Sequence: Synthetic oligonucleotide
  Target: LAMA2; (-) strand; PAM type: NRG; PAM sequence: CAG
tttgcagtataattacattt

SEQ ID NO: 77138 - DNA, 20 bp, Artificial Sequence
  Description of Artificial Sequence: Synthetic oligonucleotide
  Target: LAMA2; (-) strand; PAM type: NRG; PAM sequence: CAG
gagatatgataaataatttg

SEQ ID NO: 77139 - DNA, 20 bp, Artificial Sequence
  Description of Artificial Sequence: Synthetic oligonucleotide
  Target: LAMA2; (-) strand; PAM type: NRG; PAM sequence: GAG
aacctgaaggaccgtcagtg

SEQ ID NO: 77140 - DNA, 20 bp, Artificial Sequence
  Description of Artificial Sequence: Synthetic oligonucleotide
  Target: LAMA2; (-) strand; PAM type: NRG; PAM sequence: TGG
ataacctgaaggaccgtcag

SEQ ID NO: 77141 - DNA, 20 bp, Artificial Sequence
  Description of Artificial Sequence: Synthetic oligonucleotide
  Target: LAMA2; (-) strand; PAM type: NRG; PAM sequence: CAG
gaaataacctgaaggaccgt

SEQ ID NO: 77142 - DNA, 20 bp, Artificial Sequence
  Description of Artificial Sequence: Synthetic oligonucleotide
  Target: LAMA2; (-) strand; PAM type: NRG; PAM sequence: AGG
aaaagttagaaataacctga

SEQ ID NO: 77143 - DNA, 20 bp, Artificial Sequence
  Description of Artificial Sequence: Synthetic oligonucleotide
  Target: LAMA2; (-) strand; PAM type: NRG; PAM sequence: AAG
gaaaagttagaaataacctg

SEQ ID NO: 77144 - DNA, 20 bp, Artificial Sequence
  Description of Artificial Sequence: Synthetic oligonucleotide
  Target: LAMA2; (-) strand; PAM type: NRG; PAM sequence: TAG
tgcttataatcaagaaaagt

SEQ ID NO: 77145 - DNA, 20 bp, Artificial Sequence
  Description of Artificial Sequence: Synthetic oligonucleotide
  Target: LAMA2; (-) strand; PAM type: NRG; PAM sequence: AAG
acattgcttataatcaagaa

SEQ ID NO: 77146 - DNA, 20 bp, Artificial Sequence
  Description of Artificial Sequence: Synthetic oligonucleotide
  Target: LAMA2; (-) strand; PAM type: NRG; PAM sequence: AAG
ttacaacattgcttataatc

SEQ ID NO: 77147 - DNA, 20 bp, Artificial Sequence
  Description of Artificial Sequence: Synthetic oligonucleotide
  Target: LAMA2; (-) strand; PAM type: NRG; PAM sequence: TAG
ataaacatacttgtacaaga

SEQ ID NO: 77148 - DNA, 20 bp, Artificial Sequence
  Description of Artificial Sequence: Synthetic oligonucleotide
  Target: LAMA2; (-) strand; PAM type: NRG; PAM sequence: AAG
gagtataaacatacttgtac

SEQ ID NO: 77149 - DNA, 20 bp, Artificial Sequence
  Description of Artificial Sequence: Synthetic oligonucleotide
  Target: LAMA2; (-) strand; PAM type: NRG; PAM sequence: GAG
ttacataagtattaatggaa

SEQ ID NO: 77150 - DNA, 20 bp, Artificial Sequence
  Description of Artificial Sequence: Synthetic oligonucleotide
  Target: LAMA2; (-) strand; PAM type: NRG; PAM sequence: AAG
atttacataagtattaatgg

SEQ ID NO: 77151 - DNA, 20 bp, Artificial Sequence
  Description of Artificial Sequence: Synthetic oligonucleotide
  Target: LAMA2; (-) strand; PAM type: NRG; PAM sequence: TGG
tttatttacataagtattaa

SEQ ID NO: 77152 - DNA, 20 bp, Artificial Sequence
  Description of Artificial Sequence: Synthetic oligonucleotide
  Target: LAMA2; (-) strand; PAM type: NRG; PAM sequence: AAG
cttatcagatttatttacat

SEQ ID NO: 77153 - DNA, 20 bp, Artificial Sequence
  Description of Artificial Sequence: Synthetic oligonucleotide
  Target: LAMA2; (-) strand; PAM type: NRG; PAM sequence: CAG
tagcctacaatttcccttat

SEQ ID NO: 77154 - DNA, 20 bp, Artificial Sequence
  Description of Artificial Sequence: Synthetic oligonucleotide
  Target: LAMA2; (-) strand; PAM type: NRG; PAM sequence: TAG
aaaatgtataatatatgctt

SEQ ID NO: 77155 - DNA, 20 bp, Artificial Sequence
  Description of Artificial Sequence: Synthetic oligonucleotide
  Target: LAMA2; (-) strand; PAM type: NRG; PAM sequence: GAG
tccagcctgggcgacagatc

SEQ ID NO: 77156 - DNA, 20 bp, Artificial Sequence
  Description of Artificial Sequence: Synthetic oligonucleotide
  Target: LAMA2; (-) strand; PAM type: NRG; PAM sequence: CAG
ctgcagtccagcctgggcga

SEQ ID NO: 77157 - DNA, 20 bp, Artificial Sequence
  Description of Artificial Sequence: Synthetic oligonucleotide
  Target: LAMA2; (-) strand; PAM type: NRG; PAM sequence: GGG
gagccactgcagtccagcct

SEQ ID NO: 77158 - DNA, 20 bp, Artificial Sequence
  Description of Artificial Sequence: Synthetic oligonucleotide
  Target: LAMA2; (-) strand; PAM type: NRG; PAM sequence: TGG
cgagccactgcagtccagcc

SEQ ID NO: 77159 - DNA, 20 bp, Artificial Sequence
  Description of Artificial Sequence: Synthetic oligonucleotide
  Target: LAMA2; (-) strand; PAM type: NRG; PAM sequence: CAG
aagatcgagccactgcagtc

SEQ ID NO: 77160 - DNA, 20 bp, Artificial Sequence
  Description of Artificial Sequence: Synthetic oligonucleotide
  Target: LAMA2; (-) strand; PAM type: NRG; PAM sequence: CAG
gagccaagatcgagccactg

SEQ ID NO: 77161 - DNA, 20 bp, Artificial Sequence
  Description of Artificial Sequence: Synthetic oligonucleotide
  Target: LAMA2; (-) strand; PAM type: NRG; PAM sequence: GAG
gcttgcagtgagccaagatc

SEQ ID NO: 77162 - DNA, 20 bp, Artificial Sequence
  Description of Artificial Sequence: Synthetic oligonucleotide
  Target: LAMA2; (-) strand; PAM type: NRG; PAM sequence: AAG
ggcggagcttgcagtgagcc

SEQ ID NO: 77163 - DNA, 20 bp, Artificial Sequence
  Description of Artificial Sequence: Synthetic oligonucleotide
  Target: LAMA2; (-) strand; PAM type: NRG; PAM sequence: GAG
cgggaggcggagcttgcagt

SEQ ID NO: 77164 - DNA, 20 bp, Artificial Sequence
  Description of Artificial Sequence: Synthetic oligonucleotide
  Target: LAMA2; (-) strand; PAM type: NRG; PAM sequence: CAG
aacccgggaggcggagcttg

SEQ ID NO: 77165 - DNA, 20 bp, Artificial Sequence
  Description of Artificial Sequence: Synthetic oligonucleotide
  Target: LAMA2; (-) strand; PAM type: NRG; PAM sequence: GAG
tggcgtgaacccgggaggcg

SEQ ID NO: 77166 - DNA, 20 bp, Artificial Sequence
  Description of Artificial Sequence: Synthetic oligonucleotide
  Target: LAMA2; (-) strand; PAM type: NRG; PAM sequence: CGG
aatggcgtgaacccgggagg

SEQ ID NO: 77167 - DNA, 20 bp, Artificial Sequence
  Description of Artificial Sequence: Synthetic oligonucleotide
  Target: LAMA2; (-) strand; PAM type: NRG; PAM sequence: AGG
gagaatggcgtgaacccggg

SEQ ID NO: 77168 - DNA, 20 bp, Artificial Sequence
  Description of Artificial Sequence: Synthetic oligonucleotide
  Target: LAMA2; (-) strand; PAM type: NRG; PAM sequence: GAG
ggagaatggcgtgaacccgg

SEQ ID NO: 77169 - DNA, 20 bp, Artificial Sequence
  Description of Artificial Sequence: Synthetic oligonucleotide
  Target: LAMA2; (-) strand; PAM type: NRG; PAM sequence: GGG
caggagaatggcgtgaaccc

SEQ ID NO: 77170 - DNA, 20 bp, Artificial Sequence
  Description of Artificial Sequence: Synthetic oligonucleotide
  Target: LAMA2; (-) strand; PAM type: NRG; PAM sequence: CGG
gcaggagaatggcgtgaacc

SEQ ID NO: 77171 - DNA, 20 bp, Artificial Sequence
  Description of Artificial Sequence: Synthetic oligonucleotide
  Target: LAMA2; (-) strand; PAM type: NRG; PAM sequence: TGG
aggaggctgaggcaggagaa

SEQ ID NO: 77172 - DNA, 20 bp, Artificial Sequence
  Description of Artificial Sequence: Synthetic oligonucleotide
  Target: LAMA2; (-) strand; PAM type: NRG; PAM sequence: GAG
tactcaggaggctgaggcag

SEQ ID NO: 77173 - DNA, 20 bp, Artificial Sequence
  Description of Artificial Sequence: Synthetic oligonucleotide
  Target: LAMA2; (-) strand; PAM type: NRG; PAM sequence: AGG
gctactcaggaggctgaggc

SEQ ID NO: 77174 - DNA, 20 bp, Artificial Sequence
  Description of Artificial Sequence: Synthetic oligonucleotide
  Target: LAMA2; (-) strand; PAM type: NRG; PAM sequence: CAG
agctactcaggaggctgagg

SEQ ID NO: 77175 - DNA, 20 bp, Artificial Sequence
  Description of Artificial Sequence: Synthetic oligonucleotide
  Target: LAMA2; (-) strand; PAM type: NRG; PAM sequence: AGG
tccagctactcaggaggctg

SEQ ID NO: 77176 - DNA, 20 bp, Artificial Sequence
  Description of Artificial Sequence: Synthetic oligonucleotide
  Target: LAMA2; (-) strand; PAM type: NRG; PAM sequence: GAG
ttccagctactcaggaggct

SEQ ID NO: 77177 - DNA, 20 bp, Artificial Sequence
  Description of Artificial Sequence: Synthetic oligonucleotide
  Target: LAMA2; (-) strand; PAM type: NRG; PAM sequence: AGG
tgtagttccagctactcagg

SEQ ID NO: 77178 - DNA, 20 bp, Artificial Sequence
  Description of Artificial Sequence: Synthetic oligonucleotide
  Target: LAMA2; (-) strand; PAM type: NRG; PAM sequence: GAG
ctgtagttccagctactcag

SEQ ID NO: 77179 - DNA, 20 bp, Artificial Sequence
  Description of Artificial Sequence: Synthetic oligonucleotide
  Target: LAMA2; (-) strand; PAM type: NRG; PAM sequence: AGG
gcctgtagttccagctactc

SEQ ID NO: 77180 - DNA, 20 bp, Artificial Sequence
  Description of Artificial Sequence: Synthetic oligonucleotide
  Target: LAMA2; (-) strand; PAM type: NRG; PAM sequence: CAG
cgcctgtagttccagctact

SEQ ID NO: 77181 - DNA, 20 bp, Artificial Sequence
  Description of Artificial Sequence: Synthetic oligonucleotide
  Target: LAMA2; (-) strand; PAM type: NRG; PAM sequence: CAG
gtggcgggcgcctgtagttc

SEQ ID NO: 77182 - DNA, 20 bp, Artificial Sequence
  Description of Artificial Sequence: Synthetic oligonucleotide
  Target: LAMA2; (-) strand; PAM type: NRG; PAM sequence: TAG
ggcgtggtggcgggcgcctg

SEQ ID NO: 77183 - DNA, 20 bp, Artificial Sequence
  Description of Artificial Sequence: Synthetic oligonucleotide
  Target: LAMA2; (-) strand; PAM type: NRG; PAM sequence: GGG
aattagccaggcgtggtggc

SEQ ID NO: 77184 - DNA, 20 bp, Artificial Sequence
  Description of Artificial Sequence: Synthetic oligonucleotide
  Target: LAMA2; (-) strand; PAM type: NRG; PAM sequence: CGG
aaattagccaggcgtggtgg

SEQ ID NO: 77185 - DNA, 20 bp, Artificial Sequence
  Description of Artificial Sequence: Synthetic oligonucleotide
  Target: LAMA2; (-) strand; PAM type: NRG; PAM sequence: TGG
aaaaaattagccaggcgtgg

SEQ ID NO: 77186 - DNA, 20 bp, Artificial Sequence
  Description of Artificial Sequence: Synthetic oligonucleotide
  Target: LAMA2; (-) strand; PAM type: NRG; PAM sequence: TGG
acaaaaaaattagccaggcg

SEQ ID NO: 77187 - DNA, 20 bp, Artificial Sequence
  Description of Artificial Sequence: Synthetic oligonucleotide
  Target: LAMA2; (-) strand; PAM type: NRG; PAM sequence: AGG
aaaatacaaaaaaattagcc

SEQ ID NO: 77188 - DNA, 20 bp, Artificial Sequence
  Description of Artificial Sequence: Synthetic oligonucleotide
  Target: LAMA2; (-) strand; PAM type: NRG; PAM sequence: CAG
aaaaatacaaaaaaattagc

SEQ ID NO: 77189 - DNA, 20 bp, Artificial Sequence
  Description of Artificial Sequence: Synthetic oligonucleotide
  Target: LAMA2; (-) strand; PAM type: NRG; PAM sequence: TAG
tactaaaaatacaaaaaaat

SEQ ID NO: 77190 - DNA, 20 bp, Artificial Sequence
  Description of Artificial Sequence: Synthetic oligonucleotide
  Target: LAMA2; (-) strand; PAM type: NRG; PAM sequence: CGG
cgagaccatcctggctaaca

SEQ ID NO: 77191 - DNA, 20 bp, Artificial Sequence
  Description of Artificial Sequence: Synthetic oligonucleotide
  Target: LAMA2; (-) strand; PAM type: NRG; PAM sequence: TGG
tcagaagatcgagaccatcc

SEQ ID NO: 77192 - DNA, 20 bp, Artificial Sequence
  Description of Artificial Sequence: Synthetic oligonucleotide
  Target: LAMA2; (-) strand; PAM type: NRG; PAM sequence: GAG
gatcacgaggtcagaagatc

SEQ ID NO: 77193 - DNA, 20 bp, Artificial Sequence
  Description of Artificial Sequence: Synthetic oligonucleotide
  Target: LAMA2; (-) strand; PAM type: NRG; PAM sequence: AAG
tgggcagatcacgaggtcag

SEQ ID NO: 77194 - DNA, 20 bp, Artificial Sequence
  Description of Artificial Sequence: Synthetic oligonucleotide
  Target: LAMA2; (-) strand; PAM type: NRG; PAM sequence: CAG
aggtgggcagatcacgaggt

SEQ ID NO: 77195 - DNA, 20 bp, Artificial Sequence
  Description of Artificial Sequence: Synthetic oligonucleotide
  Target: LAMA2; (-) strand; PAM type: NRG; PAM sequence: AGG
gccgaggtgggcagatcacg

SEQ ID NO: 77196 - DNA, 20 bp, Artificial Sequence
  Description of Artificial Sequence: Synthetic oligonucleotide
  Target: LAMA2; (-) strand; PAM type: NRG; PAM sequence: GAG
ggccgaggtgggcagatcac

SEQ ID NO: 77197 - DNA, 20 bp, Artificial Sequence
  Description of Artificial Sequence: Synthetic oligonucleotide
  Target: LAMA2; (-) strand; PAM type: NRG; PAM sequence: CAG
ctttaagaggccgaggtggg

SEQ ID NO: 77198 - DNA, 20 bp, Artificial Sequence
  Description of Artificial Sequence: Synthetic oligonucleotide
  Target: LAMA2; (-) strand; PAM type: NRG; PAM sequence: GGG
gcactttaagaggccgaggt

SEQ ID NO: 77199 - DNA, 20 bp, Artificial Sequence
  Description of Artificial Sequence: Synthetic oligonucleotide
  Target: LAMA2; (-) strand; PAM type: NRG; PAM sequence: TGG
agcactttaagaggccgagg

SEQ ID NO: 77200 - DNA, 20 bp, Artificial Sequence
  Description of Artificial Sequence: Synthetic oligonucleotide
  Target: LAMA2; (-) strand; PAM type: NRG; PAM sequence: AGG
ctcagcactttaagaggccg

SEQ ID NO: 77201 - DNA, 20 bp, Artificial Sequence
  Description of Artificial Sequence: Synthetic oligonucleotide
  Target: LAMA2; (-) strand; PAM type: NRG; PAM sequence: GAG
tctcagcactttaagaggcc

SEQ ID NO: 77202 - DNA, 20 bp, Artificial Sequence
  Description of Artificial Sequence: Synthetic oligonucleotide
  Target: LAMA2; (-) strand; PAM type: NRG; PAM sequence: AGG
tgtaatctcagcactttaag

SEQ ID NO: 77203 - DNA, 20 bp, Artificial Sequence
  Description of Artificial Sequence: Synthetic oligonucleotide
  Target: LAMA2; (-) strand; PAM type: NRG; PAM sequence: GAG
ctgtaatctcagcactttaa

SEQ ID NO: 77204 - DNA, 20 bp, Artificial Sequence
  Description of Artificial Sequence: Synthetic oligonucleotide
  Target: LAMA2; (-) strand; PAM type: NRG; PAM sequence: AAG
gcctgtaatctcagcacttt

SEQ ID NO: 77205 - DNA, 20 bp, Artificial Sequence
  Description of Artificial Sequence: Synthetic oligonucleotide
  Target: LAMA2; (-) strand; PAM type: NRG; PAM sequence: CAG
gtggctcacgcctgtaatct

SEQ ID NO: 77206 - DNA, 20 bp, Artificial Sequence
  Description of Artificial Sequence: Synthetic oligonucleotide
  Target: LAMA2; (-) strand; PAM type: NRG; PAM sequence: TGG
aaaatgtgggccgggagcag

SEQ ID NO: 77207 - DNA, 20 bp, Artificial Sequence
  Description of Artificial Sequence: Synthetic oligonucleotide
  Target: LAMA2; (-) strand; PAM type: NRG; PAM sequence: CAG
aataaaatgtgggccgggag

SEQ ID NO: 77208 - DNA, 20 bp, Artificial Sequence
  Description of Artificial Sequence: Synthetic oligonucleotide
  Target: LAMA2; (-) strand; PAM type: NRG; PAM sequence: GAG
aaaaataaaatgtgggccgg

SEQ ID NO: 77209 - DNA, 20 bp, Artificial Sequence
  Description of Artificial Sequence: Synthetic oligonucleotide
  Target: LAMA2; (-) strand; PAM type: NRG; PAM sequence: GGG
tcaaaaataaaatgtgggcc

SEQ ID NO: 77210 - DNA, 20 bp, Artificial Sequence
  Description of Artificial Sequence: Synthetic oligonucleotide
  Target: LAMA2; (-) strand; PAM type: NRG; PAM sequence: CGG
atcaaaaataaaatgtgggc

SEQ ID NO: 77211 - DNA, 20 bp, Artificial Sequence
  Description of Artificial Sequence: Synthetic oligonucleotide
  Target: LAMA2; (-) strand; PAM type: NRG; PAM sequence: GGG
gcatatcaaaaataaaatgt

SEQ ID NO: 77212 - DNA, 20 bp, Artificial Sequence
  Description of Artificial Sequence: Synthetic oligonucleotide
  Target: LAMA2; (-) strand; PAM type: NRG; PAM sequence: TGG
tgcatatcaaaaataaaatg

SEQ ID NO: 77213 - DNA, 20 bp, Artificial Sequence
  Description of Artificial Sequence: Synthetic oligonucleotide
  Target: LAMA2; (-) strand; PAM type: NRG; PAM sequence: CAG
ttcttcacacaattttgtgc

SEQ ID NO: 77214 - DNA, 20 bp, Artificial Sequence
  Description of Artificial Sequence: Synthetic oligonucleotide
  Target: LAMA2; (-) strand; PAM type: NRG; PAM sequence: TGG
ccttagacatatttattaat

SEQ ID NO: 77215 - DNA, 20 bp, Artificial Sequence
  Description of Artificial Sequence: Synthetic oligonucleotide
  Target: LAMA2; (-) strand; PAM type: NRG; PAM sequence: TAG
acaatggaaactatattcct

SEQ ID NO: 77216 - DNA, 20 bp, Artificial Sequence
  Description of Artificial Sequence: Synthetic oligonucleotide
  Target: LAMA2; (-) strand; PAM type: NRG; PAM sequence: TGG
ttttttgataattaaaacaa

SEQ ID NO: 77217 - DNA, 20 bp, Artificial Sequence
  Description of Artificial Sequence: Synthetic oligonucleotide
  Target: LAMA2; (-) strand; PAM type: NRG; PAM sequence: AAG
ggtataactagagcccatgt

SEQ ID NO: 77218 - DNA, 20 bp, Artificial Sequence
  Description of Artificial Sequence: Synthetic oligonucleotide
  Target: LAMA2; (-) strand; PAM type: NRG; PAM sequence: GAG
tcatatcatgggtataacta

SEQ ID NO: 77219 - DNA, 20 bp, Artificial Sequence
  Description of Artificial Sequence: Synthetic oligonucleotide
  Target: LAMA2; (-) strand; PAM type: NRG; PAM sequence: TAG
ggtcatatcatgggtataac

SEQ ID NO: 77220 - DNA, 20 bp, Artificial Sequence
  Description of Artificial Sequence: Synthetic oligonucleotide
  Target: LAMA2; (-) strand; PAM type: NRG; PAM sequence: GGG
tcttaaattggtcatatcat

SEQ ID NO: 77221 - DNA, 20 bp, Artificial Sequence
  Description of Artificial Sequence: Synthetic oligonucleotide
  Target: LAMA2; (-) strand; PAM type: NRG; PAM sequence: TGG
ttcttaaattggtcatatca

SEQ ID NO: 77222 - DNA, 20 bp, Artificial Sequence
  Description of Artificial Sequence: Synthetic oligonucleotide
  Target: LAMA2; (-) strand; PAM type: NRG; PAM sequence: TGG
tattttcaagtttcttaaat

SEQ ID NO: 77223 - DNA, 20 bp, Artificial Sequence
  Description of Artificial Sequence: Synthetic oligonucleotide
  Target: LAMA2; (-) strand; PAM type: NRG; PAM sequence: AAG
gtgctagaaattatattttc

SEQ ID NO: 77224 - DNA, 20 bp, Artificial Sequence
  Description of Artificial Sequence: Synthetic oligonucleotide
  Target: LAMA2; (-) strand; PAM type: NRG; PAM sequence: TAG
tcgcattagtatacacgtgc

SEQ ID NO: 77225 - DNA, 20 bp, Artificial Sequence
  Description of Artificial Sequence: Synthetic oligonucleotide
  Target: LAMA2; (-) strand; PAM type: NRG; PAM sequence: TAG
aaaacttctctatctcgcat

SEQ ID NO: 77226 - DNA, 20 bp, Artificial Sequence
  Description of Artificial Sequence: Synthetic oligonucleotide
  Target: LAMA2; (-) strand; PAM type: NRG; PAM sequence: TGG
tttatggacccaacaatttc

SEQ ID NO: 77227 - DNA, 20 bp, Artificial Sequence
  Description of Artificial Sequence: Synthetic oligonucleotide
  Target: LAMA2; (-) strand; PAM type: NRG; PAM sequence: TGG
agacatatttgtttctttta

SEQ ID NO: 77228 - DNA, 20 bp, Artificial Sequence
  Description of Artificial Sequence: Synthetic oligonucleotide
  Target: LAMA2; (-) strand; PAM type: NRG; PAM sequence: TAG
ctggcaactttaaaatgttc

SEQ ID NO: 77229 - DNA, 20 bp, Artificial Sequence
  Description of Artificial Sequence: Synthetic oligonucleotide
  Target: LAMA2; (-) strand; PAM type: NRG; PAM sequence: TGG
gaatatcttgaaatctgctc

SEQ ID NO: 77230 - DNA, 20 bp, Artificial Sequence
  Description of Artificial Sequence: Synthetic oligonucleotide
  Target: LAMA2; (-) strand; PAM type: NRG; PAM sequence: TGG
catatctgagggactcaggc

SEQ ID NO: 77231 - DNA, 20 bp, Artificial Sequence
  Description of Artificial Sequence: Synthetic oligonucleotide
  Target: LAMA2; (-) strand; PAM type: NRG; PAM sequence: AGG
aatacatatctgagggactc

SEQ ID NO: 77232 - DNA, 20 bp, Artificial Sequence
  Description of Artificial Sequence: Synthetic oligonucleotide
  Target: LAMA2; (-) strand; PAM type: NRG; PAM sequence: CAG
aaatacatatctgagggact

SEQ ID NO: 77233 - DNA, 20 bp, Artificial Sequence
  Description of Artificial Sequence: Synthetic oligonucleotide
  Target: LAMA2; (-) strand; PAM type: NRG; PAM sequence: GGG
tcaccaaaatacatatctga

SEQ ID NO: 77234 - DNA, 20 bp, Artificial Sequence
  Description of Artificial Sequence: Synthetic oligonucleotide
  Target: LAMA2; (-) strand; PAM type: NRG; PAM sequence: AGG
atcaccaaaatacatatctg

SEQ ID NO: 77235 - DNA, 20 bp, Artificial Sequence
  Description of Artificial Sequence: Synthetic oligonucleotide
  Target: LAMA2; (-) strand; PAM type: NRG; PAM sequence: GAG
aatcaccaaaatacatatct

SEQ ID NO: 77236 - DNA, 20 bp, Artificial Sequence
  Description of Artificial Sequence: Synthetic oligonucleotide
  Target: LAMA2; (-) strand; PAM type: NRG; PAM sequence: CGG
ctcacgcatattgtgacttt

SEQ ID NO: 77237 - DNA, 20 bp, Artificial Sequence
  Description of Artificial Sequence: Synthetic oligonucleotide
  Target: LAMA2; (-) strand; PAM type: NRG; PAM sequence: TAG
aaatatctgaaactcaattt

SEQ ID NO: 77238 - DNA, 20 bp, Artificial Sequence
  Description of Artificial Sequence: Synthetic oligonucleotide
  Target: LAMA2; (-) strand; PAM type: NRG; PAM sequence: CAG
ggatttttataaattttttt

SEQ ID NO: 77239 - DNA, 20 bp, Artificial Sequence
  Description of Artificial Sequence: Synthetic oligonucleotide
  Target: LAMA2; (-) strand; PAM type: NRG; PAM sequence: TGG
ttttacaaatgattacatta

SEQ ID NO: 77240 - DNA, 20 bp, Artificial Sequence
  Description of Artificial Sequence: Synthetic oligonucleotide
  Target: LAMA2; (-) strand; PAM type: NRG; PAM sequence: AAG
tgacactatcccatggaaca

SEQ ID NO: 77241 - DNA, 20 bp, Artificial Sequence
  Description of Artificial Sequence: Synthetic oligonucleotide
  Target: LAMA2; (-) strand; PAM type: NRG; PAM sequence: TGG
ttatgactgacactatccca

SEQ ID NO: 77242 - DNA, 20 bp, Artificial Sequence
  Description of Artificial Sequence: Synthetic oligonucleotide
  Target: LAMA2; (-) strand; PAM type: NRG; PAM sequence: AAG
tgaattagcacctaactagt

SEQ ID NO: 77243 - DNA, 20 bp, Artificial Sequence
  Description of Artificial Sequence: Synthetic oligonucleotide
  Target: LAMA2; (-) strand; PAM type: NRG; PAM sequence: TAG
aaaatgaattagcacctaac

SEQ ID NO: 77244 - DNA, 20 bp, Artificial Sequence
  Description of Artificial Sequence: Synthetic oligonucleotide
  Target: LAMA2; (-) strand; PAM type: NRG; PAM sequence: TAG
cctgtaagctcaaaatgaat

SEQ ID NO: 77245 - DNA, 20 bp, Artificial Sequence
  Description of Artificial Sequence: Synthetic oligonucleotide
  Target: LAMA2; (-) strand; PAM type: NRG; PAM sequence: AAG
tgatcctgataaaaccctgt

SEQ ID NO: 77246 - DNA, 20 bp, Artificial Sequence
  Description of Artificial Sequence: Synthetic oligonucleotide
  Target: LAMA2; (-) strand; PAM type: NRG; PAM sequence: TAG
aataattatacatttttact

SEQ ID NO: 77247 - DNA, 20 bp, Artificial Sequence
  Description of Artificial Sequence: Synthetic oligonucleotide
  Target: LAMA2; (-) strand; PAM type: NRG; PAM sequence: TAG
ggtatactaatcgtaatctt

SEQ ID NO: 77248 - DNA, 20 bp, Artificial Sequence
  Description of Artificial Sequence: Synthetic oligonucleotide
  Target: LAMA2; (-) strand; PAM type: NRG; PAM sequence: TGG
tctaaagttcagatgttttg

SEQ ID NO: 77249 - DNA, 20 bp, Artificial Sequence
  Description of Artificial Sequence: Synthetic oligonucleotide
  Target: LAMA2; (-) strand; PAM type: NRG; PAM sequence: CAG
tataaataatatctaaagtt

SEQ ID NO: 77250 - DNA, 20 bp, Artificial Sequence
  Description of Artificial Sequence: Synthetic oligonucleotide
  Target: LAMA2; (-) strand; PAM type: NRG; PAM sequence: AAG
ggtcatataaataatatcta

SEQ ID NO: 77251 - DNA, 20 bp, Artificial Sequence
  Description of Artificial Sequence: Synthetic oligonucleotide
  Target: LAMA2; (-) strand; PAM type: NRG; PAM sequence: AGG
agggaaaggtctgactttta

SEQ ID NO: 77252 - DNA, 20 bp, Artificial Sequence
  Description of Artificial Sequence: Synthetic oligonucleotide
  Target: LAMA2; (-) strand; PAM type: NRG; PAM sequence: AAG
cagggaaaggtctgactttt

SEQ ID NO: 77253 - DNA, 20 bp, Artificial Sequence
  Description of Artificial Sequence: Synthetic oligonucleotide
  Target: LAMA2; (-) strand; PAM type: NRG; PAM sequence: AGG
gttaagtcattggcagggaa

SEQ ID NO: 77254 - DNA, 20 bp, Artificial Sequence
  Description of Artificial Sequence: Synthetic oligonucleotide
  Target: LAMA2; (-) strand; PAM type: NRG; PAM sequence: AAG
agttaagtcattggcaggga

SEQ ID NO: 77255 - DNA, 20 bp, Artificial Sequence
  Description of Artificial Sequence: Synthetic oligonucleotide
  Target: LAMA2; (-) strand; PAM type: NRG; PAM sequence: GGG
cagaagttaagtcattggca

SEQ ID NO: 77256 - DNA, 20 bp, Artificial Sequence
  Description of Artificial Sequence: Synthetic oligonucleotide
  Target: LAMA2; (-) strand; PAM type: NRG; PAM sequence: AGG
acagaagttaagtcattggc

SEQ ID NO: 77257 - DNA, 20 bp, Artificial Sequence
  Description of Artificial Sequence: Synthetic oligonucleotide
  Target: LAMA2; (-) strand; PAM type: NRG; PAM sequence: CAG
gacagaagttaagtcattgg

SEQ ID NO: 77258 - DNA, 20 bp, Artificial Sequence
  Description of Artificial Sequence: Synthetic oligonucleotide
  Target: LAMA2; (-) strand; PAM type: NRG; PAM sequence: TGG
aaagacagaagttaagtcat

SEQ ID NO: 77259 - DNA, 20 bp, Artificial Sequence
  Description of Artificial Sequence: Synthetic oligonucleotide
  Target: LAMA2; (-) strand; PAM type: NRG; PAM sequence: AAG
tagcactaaagacagaagtt

SEQ ID NO: 77260 - DNA, 20 bp, Artificial Sequence
  Description of Artificial Sequence: Synthetic oligonucleotide
  Target: LAMA2; (-) strand; PAM type: NRG; PAM sequence: AAG
caaaatagcactaaagacag

SEQ ID NO: 77261 - DNA, 20 bp, Artificial Sequence
  Description of Artificial Sequence: Synthetic oligonucleotide
  Target: LAMA2; (-) strand; PAM type: NRG; PAM sequence: CAG
aaacaaaatagcactaaaga

SEQ ID NO: 77262 - DNA, 20 bp, Artificial Sequence
  Description of Artificial Sequence: Synthetic oligonucleotide
  Target: LAMA2; (-) strand; PAM type: NRG; PAM sequence: AAG
cttcaaacaaaatagcacta

SEQ ID NO: 77263 - DNA, 20 bp, Artificial Sequence
  Description of Artificial Sequence: Synthetic oligonucleotide
  Target: LAMA2; (-) strand; PAM type: NRG; PAM sequence: TAG
aaataagccttcaaacaaaa

SEQ ID NO: 77264 - DNA, 20 bp, Artificial Sequence
  Description of Artificial Sequence: Synthetic oligonucleotide
  Target: LAMA2; (-) strand; PAM type: NRG; PAM sequence: AAG
tcacttcatagcagataaat

SEQ ID NO: 77265 - DNA, 20 bp, Artificial Sequence
  Description of Artificial Sequence: Synthetic oligonucleotide
  Target: LAMA2; (-) strand; PAM type: NRG; PAM sequence: CAG
gtagaaaaatcacttcatag

SEQ ID NO: 77266 - DNA, 20 bp, Artificial Sequence
  Description of Artificial Sequence: Synthetic oligonucleotide
  Target: LAMA2; (-) strand; PAM type: NRG; PAM sequence: TAG
gtcgtagaaaaatcacttca

SEQ ID NO: 77267 - DNA, 20 bp, Artificial Sequence
  Description of Artificial Sequence: Synthetic oligonucleotide
  Target: LAMA2; (-) strand; PAM type: NRG; PAM sequence: TAG
aagagacatgtagaaagtcg

SEQ ID NO: 77268 - DNA, 20 bp, Artificial Sequence
  Description of Artificial Sequence: Synthetic oligonucleotide
  Target: LAMA2; (-) strand; PAM type: NRG; PAM sequence: AAG
aatgtgaagagacatgtaga

SEQ ID NO: 77269 - DNA, 20 bp, Artificial Sequence
  Description of Artificial Sequence: Synthetic oligonucleotide
  Target: LAMA2; (-) strand; PAM type: NRG; PAM sequence: TAG
acccaatgtgaagagacatg

SEQ ID NO: 77270 - DNA, 20 bp, Artificial Sequence
  Description of Artificial Sequence: Synthetic oligonucleotide
  Target: LAMA2; (-) strand; PAM type: NRG; PAM sequence: GAG
atttcctaacccaatgtgaa

SEQ ID NO: 77271 - DNA, 20 bp, Artificial Sequence
  Description of Artificial Sequence: Synthetic oligonucleotide
  Target: LAMA2; (-) strand; PAM type: NRG; PAM sequence: AAG
agatttcctaacccaatgtg

SEQ ID NO: 77272 - DNA, 20 bp, Artificial Sequence
  Description of Artificial Sequence: Synthetic oligonucleotide
  Target: LAMA2; (-) strand; PAM type: NRG; PAM sequence: AAG
cgaggatattaatttccttg

SEQ ID NO: 77273 - DNA, 20 bp, Artificial Sequence
  Description of Artificial Sequence: Synthetic oligonucleotide
  Target: LAMA2; (-) strand; PAM type: NRG; PAM sequence: AGG
caaaaggttgtgtatacccg

SEQ ID NO: 77274 - DNA, 20 bp, Artificial Sequence
  Description of Artificial Sequence: Synthetic oligonucleotide
  Target: LAMA2; (-) strand; PAM type: NRG; PAM sequence: GAG
gcaaaaggttgtgtataccc

SEQ ID NO: 77275 - DNA, 20 bp, Artificial Sequence
  Description of Artificial Sequence: Synthetic oligonucleotide
  Target: LAMA2; (-) strand; PAM type: NRG; PAM sequence: AGG
agagcaaataccacagcaaa

SEQ ID NO: 77276 - DNA, 20 bp, Artificial Sequence
  Description of Artificial Sequence: Synthetic oligonucleotide
  Target: LAMA2; (-) strand; PAM type: NRG; PAM sequence: AAG
cagagcaaataccacagcaa

SEQ ID NO: 77277 - DNA, 20 bp, Artificial Sequence
  Description of Artificial Sequence: Synthetic oligonucleotide
  Target: LAMA2; (-) strand; PAM type: NRG; PAM sequence: CAG
ccatgtcagagcaaatacca

SEQ ID NO: 77278 - DNA, 20 bp, Artificial Sequence
  Description of Artificial Sequence: Synthetic oligonucleotide
  Target: LAMA2; (-) strand; PAM type: NRG; PAM sequence: GAG
tttgcctttgttccatgtca

SEQ ID NO: 77279 - DNA, 20 bp, Artificial Sequence
  Description of Artificial Sequence: Synthetic oligonucleotide
  Target: LAMA2; (-) strand; PAM type: NRG; PAM sequence: CAG
cttttgcctttgttccatgt

SEQ ID NO: 77280 - DNA, 20 bp, Artificial Sequence
  Description of Artificial Sequence: Synthetic oligonucleotide
  Target: LAMA2; (-) strand; PAM type: NRG; PAM sequence: TGG
aagaagacattagacacatt

SEQ ID NO: 77281 - DNA, 20 bp, Artificial Sequence
  Description of Artificial Sequence: Synthetic oligonucleotide
  Target: LAMA2; (-) strand; PAM type: NRG; PAM sequence: TAG
aattagtatgaagaagacat

SEQ ID NO: 77282 - DNA, 20 bp, Artificial Sequence
  Description of Artificial Sequence: Synthetic oligonucleotide
  Target: LAMA2; (-) strand; PAM type: NRG; PAM sequence: AAG
tagaaggaattagtatgaag

SEQ ID NO: 77283 - DNA, 20 bp, Artificial Sequence
  Description of Artificial Sequence: Synthetic oligonucleotide
  Target: LAMA2; (-) strand; PAM type: NRG; PAM sequence: AAG
ggctagaaggaattagtatg

SEQ ID NO: 77284 - DNA, 20 bp, Artificial Sequence
  Description of Artificial Sequence: Synthetic oligonucleotide
  Target: LAMA2; (-) strand; PAM type: NRG; PAM sequence: TAG
aaataaaggctagaaggaat

SEQ ID NO: 77285 - DNA, 20 bp, Artificial Sequence
  Description of Artificial Sequence: Synthetic oligonucleotide
  Target: LAMA2; (-) strand; PAM type: NRG; PAM sequence: AGG
ttttttaaataaaggctaga

SEQ ID NO: 77286 - DNA, 20 bp, Artificial Sequence
  Description of Artificial Sequence: Synthetic oligonucleotide
  Target: LAMA2; (-) strand; PAM type: NRG; PAM sequence: AAG
attttttaaataaaggctag

SEQ ID NO: 77287 - DNA, 20 bp, Artificial Sequence
  Description of Artificial Sequence: Synthetic oligonucleotide
  Target: LAMA2; (-) strand; PAM type: NRG; PAM sequence: TAG
gctattttttaaataaaggc

SEQ ID NO: 77288 - DNA, 20 bp, Artificial Sequence
  Description of Artificial Sequence: Synthetic oligonucleotide
  Target: LAMA2; (-) strand; PAM type: NRG; PAM sequence: AGG
agaagctattttttaaataa

SEQ ID NO: 77289 - DNA, 20 bp, Artificial Sequence
  Description of Artificial Sequence: Synthetic oligonucleotide
  Target: LAMA2; (-) strand; PAM type: NRG; PAM sequence: AAG
cagaagctattttttaaata

SEQ ID NO: 77290 - DNA, 20 bp, Artificial Sequence
  Description of Artificial Sequence: Synthetic oligonucleotide
  Target: LAMA2; (-) strand; PAM type: NRG; PAM sequence: AAG
aaaatatccttgcaattcag

SEQ ID NO: 77291 - DNA, 20 bp, Artificial Sequence
  Description of Artificial Sequence: Synthetic oligonucleotide
  Target: LAMA2; (-) strand; PAM type: NRG; PAM sequence: CAG
ttaaaaatatccttgcaatt

SEQ ID NO: 77292 - DNA, 20 bp, Artificial Sequence
  Description of Artificial Sequence: Synthetic oligonucleotide
  Target: LAMA2; (-) strand; PAM type: NRG; PAM sequence: TGG
aaggggcatactgattcatg

SEQ ID NO: 77293 - DNA, 20 bp, Artificial Sequence
  Description of Artificial Sequence: Synthetic oligonucleotide
  Target: LAMA2; (-) strand; PAM type: NRG; PAM sequence: GGG
cttgaaaagtccagctgaag

SEQ ID NO: 77294 - DNA, 20 bp, Artificial Sequence
  Description of Artificial Sequence: Synthetic oligonucleotide
  Target: LAMA2; (-) strand; PAM type: NRG; PAM sequence: GGG
ccttgaaaagtccagctgaa

SEQ ID NO: 77295 - DNA, 20 bp, Artificial Sequence
  Description of Artificial Sequence: Synthetic oligonucleotide
  Target: LAMA2; (-) strand; PAM type: NRG; PAM sequence: AGG
tccttgaaaagtccagctga

SEQ ID NO: 77296 - DNA, 20 bp, Artificial Sequence
  Description of Artificial Sequence: Synthetic oligonucleotide
  Target: LAMA2; (-) strand; PAM type: NRG; PAM sequence: AAG
ctccttgaaaagtccagctg

SEQ ID NO: 77297 - DNA, 20 bp, Artificial Sequence
  Description of Artificial Sequence: Synthetic oligonucleotide
  Target: LAMA2; (-) strand; PAM type: NRG; PAM sequence: CAG
cacaggctccttgaaaagtc

SEQ ID NO: 77298 - DNA, 20 bp, Artificial Sequence
  Description of Artificial Sequence: Synthetic oligonucleotide
  Target: LAMA2; (-) strand; PAM type: NRG; PAM sequence: AAG
gcattcacaggctccttgaa

SEQ ID NO: 77299 - DNA, 20 bp, Artificial Sequence
  Description of Artificial Sequence: Synthetic oligonucleotide
  Target: LAMA2; (-) strand; PAM type: NRG; PAM sequence: AGG
ttaatcatttcagcattcac

SEQ ID NO: 77300 - DNA, 20 bp, Artificial Sequence
  Description of Artificial Sequence: Synthetic oligonucleotide
  Target: LAMA2; (-) strand; PAM type: NRG; PAM sequence: CAG
gttaatcatttcagcattca

SEQ ID NO: 77301 - DNA, 20 bp, Artificial Sequence
  Description of Artificial Sequence: Synthetic oligonucleotide
  Target: LAMA2; (-) strand; PAM type: NRG; PAM sequence: CAG
tcacataatgttaatcattt

SEQ ID NO: 77302 - DNA, 20 bp, Artificial Sequence
  Description of Artificial Sequence: Synthetic oligonucleotide
  Target: LAMA2; (-) strand; PAM type: NRG; PAM sequence: TAG
ttccacggttcagtgcaatt

SEQ ID NO: 77303 - DNA, 20 bp, Artificial Sequence
  Description of Artificial Sequence: Synthetic oligonucleotide
  Target: LAMA2; (-) strand; PAM type: NRG; PAM sequence: CAG
caccacatggttccacggtt

SEQ ID NO: 77304 - DNA, 20 bp, Artificial Sequence
  Description of Artificial Sequence: Synthetic oligonucleotide
  Target: LAMA2; (-) strand; PAM type: NRG; PAM sequence: CGG
tgccacaccacatggttcca

SEQ ID NO: 77305 - DNA, 20 bp, Artificial Sequence
  Description of Artificial Sequence: Synthetic oligonucleotide
  Target: LAMA2; (-) strand; PAM type: NRG; PAM sequence: TGG
cccactattgccacaccaca

SEQ ID NO: 77306 - DNA, 20 bp, Artificial Sequence
  Description of Artificial Sequence: Synthetic oligonucleotide
  Target: LAMA2; (-) strand; PAM type: NRG; PAM sequence: TAG
ttttgctcagcagggacctc

SEQ ID NO: 77307 - DNA, 20 bp, Artificial Sequence
  Description of Artificial Sequence: Synthetic oligonucleotide
  Target: LAMA2; (-) strand; PAM type: NRG; PAM sequence: GGG
tctttgtcttttgctcagca

SEQ ID NO: 77308 - DNA, 20 bp, Artificial Sequence
  Description of Artificial Sequence: Synthetic oligonucleotide
  Target: LAMA2; (-) strand; PAM type: NRG; PAM sequence: AGG
gtctttgtcttttgctcagc

SEQ ID NO: 77309 - DNA, 20 bp, Artificial Sequence
  Description of Artificial Sequence: Synthetic oligonucleotide
  Target: LAMA2; (-) strand; PAM type: NRG; PAM sequence: CAG
ggtctttgtcttttgctcag

SEQ ID NO: 77310 - DNA, 20 bp, Artificial Sequence
  Description of Artificial Sequence: Synthetic oligonucleotide
  Target: LAMA2; (-) strand; PAM type: NRG; PAM sequence: CAG
ggaggtctttgtcttttgct

SEQ ID NO: 77311 - DNA, 20 bp, Artificial Sequence
  Description of Artificial Sequence: Synthetic oligonucleotide
  Target: LAMA2; (-) strand; PAM type: NRG; PAM sequence: AGG
gtgcgggacaatggagaagg

SEQ ID NO: 77312 - DNA, 20 bp, Artificial Sequence
  Description of Artificial Sequence: Synthetic oligonucleotide
  Target: LAMA2; (-) strand; PAM type: NRG; PAM sequence: GAG
agtgcgggacaatggagaag

SEQ ID NO: 77313 - DNA, 20 bp, Artificial Sequence
  Description of Artificial Sequence: Synthetic oligonucleotide
  Target: LAMA2; (-) strand; PAM type: NRG; PAM sequence: AGG
tcagtgcgggacaatggaga

SEQ ID NO: 77314 - DNA, 20 bp, Artificial Sequence
  Description of Artificial Sequence: Synthetic oligonucleotide
  Target: LAMA2; (-) strand; PAM type: NRG; PAM sequence: AAG
atcagtgcgggacaatggag

SEQ ID NO: 77315 - DNA, 20 bp, Artificial Sequence
  Description of Artificial Sequence: Synthetic oligonucleotide
  Target: LAMA2; (-) strand; PAM type: NRG; PAM sequence: GAG
accatcagtgcgggacaatg

SEQ ID NO: 77316 - DNA, 20 bp, Artificial Sequence
  Description of Artificial Sequence: Synthetic oligonucleotide
  Target: LAMA2; (-) strand; PAM type: NRG; PAM sequence: TGG
ccaccatcagtgcgggacaa

SEQ ID NO: 77317 - DNA, 20 bp, Artificial Sequence
  Description of Artificial Sequence: Synthetic oligonucleotide
  Target: LAMA2; (-) strand; PAM type: NRG; PAM sequence: GGG
cccaagcccaccatcagtgc

SEQ ID NO: 77318 - DNA, 20 bp, Artificial Sequence
  Description of Artificial Sequence: Synthetic oligonucleotide
  Target: LAMA2; (-) strand; PAM type: NRG; PAM sequence: CGG
tcccaagcccaccatcagtg

SEQ ID NO: 77319 - DNA, 20 bp, Artificial Sequence
  Description of Artificial Sequence: Synthetic oligonucleotide
  Target: LAMA2; (-) strand; PAM type: NRG; PAM sequence: CAG
atacatcccaagcccaccat

SEQ ID NO: 77320 - DNA, 20 bp, Artificial Sequence
  Description of Artificial Sequence: Synthetic oligonucleotide
  Target: LAMA2; (-) strand; PAM type: NRG; PAM sequence: AAG
tatttctgaaaatacatccc

SEQ ID NO: 77321 - DNA, 20 bp, Artificial Sequence
  Description of Artificial Sequence: Synthetic oligonucleotide
  Target: LAMA2; (-) strand; PAM type: NRG; PAM sequence: AAG
ggtgattcatttgtttttat

SEQ ID NO: 77322 - DNA, 20 bp, Artificial Sequence
  Description of Artificial Sequence: Synthetic oligonucleotide
  Target: LAMA2; (-) strand; PAM type: NRG; PAM sequence: GGG
cggaacaagcacagtgatga

SEQ ID NO: 77323 - DNA, 20 bp, Artificial Sequence
  Description of Artificial Sequence: Synthetic oligonucleotide
  Target: LAMA2; (-) strand; PAM type: NRG; PAM sequence: AGG
acggaacaagcacagtgatg

SEQ ID NO: 77324 - DNA, 20 bp, Artificial Sequence
  Description of Artificial Sequence: Synthetic oligonucleotide
  Target: LAMA2; (-) strand; PAM type: NRG; PAM sequence: GAG
aacggaacaagcacagtgat

SEQ ID NO: 77325 - DNA, 20 bp, Artificial Sequence
  Description of Artificial Sequence: Synthetic oligonucleotide
  Target: LAMA2; (-) strand; PAM type: NRG; PAM sequence: CAG
atcccaaaacggaacaagca

SEQ ID NO: 77326 - DNA, 20 bp, Artificial Sequence
  Description of Artificial Sequence: Synthetic oligonucleotide
  Target: LAMA2; (-) strand; PAM type: NRG; PAM sequence: AAG
caaacatcccaaaacggaac

SEQ ID NO: 77327 - DNA, 20 bp, Artificial Sequence
  Description of Artificial Sequence: Synthetic oligonucleotide
  Target: LAMA2; (-) strand; PAM type: NRG; PAM sequence: CGG
agtagacaaacatcccaaaa

SEQ ID NO: 77328 - DNA, 20 bp, Artificial Sequence
  Description of Artificial Sequence: Synthetic oligonucleotide
  Target: LAMA2; (-) strand; PAM type: NRG; PAM sequence: TAG
tcccaatttagaaagtctag

SEQ ID NO: 77329 - DNA, 20 bp, Artificial Sequence
  Description of Artificial Sequence: Synthetic oligonucleotide
  Target: LAMA2; (-) strand; PAM type: NRG; PAM sequence: TAG
atctcccaatttagaaagtc

SEQ ID NO: 77330 - DNA, 20 bp, Artificial Sequence
  Description of Artificial Sequence: Synthetic oligonucleotide
  Target: LAMA2; (-) strand; PAM type: NRG; PAM sequence: AAG
tctaaatctcccaatttaga

SEQ ID NO: 77331 - DNA, 20 bp, Artificial Sequence
  Description of Artificial Sequence: Synthetic oligonucleotide
  Target: LAMA2; (-) strand; PAM type: NRG; PAM sequence: TAG
aatttctaaatctcccaatt

SEQ ID NO: 77332 - DNA, 20 bp, Artificial Sequence
  Description of Artificial Sequence: Synthetic oligonucleotide
  Target: LAMA2; (-) strand; PAM type: NRG; PAM sequence: AGG
tgtacttgcagaagacactg

SEQ ID NO: 77333 - DNA, 20 bp, Artificial Sequence
  Description of Artificial Sequence: Synthetic oligonucleotide
  Target: LAMA2; (-) strand; PAM type: NRG; PAM sequence: GAG
gtgtacttgcagaagacact

SEQ ID NO: 77334 - DNA, 20 bp, Artificial Sequence
  Description of Artificial Sequence: Synthetic oligonucleotide
  Target: LAMA2; (-) strand; PAM type: NRG; PAM sequence: AAG
aattgaaagtgtacttgcag

SEQ ID NO: 77335 - DNA, 20 bp, Artificial Sequence
  Description of Artificial Sequence: Synthetic oligonucleotide
  Target: LAMA2; (-) strand; PAM type: NRG; PAM sequence: CAG
aaaaattgaaagtgtacttg

SEQ ID NO: 77336 - DNA, 20 bp, Artificial Sequence
  Description of Artificial Sequence: Synthetic oligonucleotide
  Target: LAMA2; (-) strand; PAM type: NRG; PAM sequence: AAG
ctgtctgtaataaaaattga

SEQ ID NO: 77337 - DNA, 20 bp, Artificial Sequence
  Description of Artificial Sequence: Synthetic oligonucleotide
  Target: LAMA2; (-) strand; PAM type: NRG; PAM sequence: GAG
ggtaaacaacagcatcaaga

SEQ ID NO: 77338 - DNA, 20 bp, Artificial Sequence
  Description of Artificial Sequence: Synthetic oligonucleotide
  Target: LAMA2; (-) strand; PAM type: NRG; PAM sequence: GAG
atggtaaacaacagcatcaa

SEQ ID NO: 77339 - DNA, 20 bp, Artificial Sequence
  Description of Artificial Sequence: Synthetic oligonucleotide
  Target: LAMA2; (-) strand; PAM type: NRG; PAM sequence: AAG
caatggtaaacaacagcatc

SEQ ID NO: 77340 - DNA, 20 bp, Artificial Sequence
  Description of Artificial Sequence: Synthetic oligonucleotide
  Target: LAMA2; (-) strand; PAM type: NRG; PAM sequence: CAG
aaaaatgcaatggtaaacaa

SEQ ID NO: 77341 - DNA, 20 bp, Artificial Sequence
  Description of Artificial Sequence: Synthetic oligonucleotide
  Target: LAMA2; (-) strand; PAM type: NRG; PAM sequence: TGG
caagttaaataaaaatgcaa

SEQ ID NO: 77342 - DNA, 20 bp, Artificial Sequence
  Description of Artificial Sequence: Synthetic oligonucleotide
  Target: LAMA2; (-) strand; PAM type: NRG; PAM sequence: AAG
catgctaaattaaaatattc

SEQ ID NO: 77343 - DNA, 20 bp, Artificial Sequence
  Description of Artificial Sequence: Synthetic oligonucleotide
  Target: LAMA2; (-) strand; PAM type: NRG; PAM sequence: GGG
atacaaagttgctaatccat

SEQ ID NO: 77344 - DNA, 20 bp, Artificial Sequence
  Description of Artificial Sequence: Synthetic oligonucleotide
  Target: LAMA2; (-) strand; PAM type: NRG; PAM sequence: TGG
catacaaagttgctaatcca

SEQ ID NO: 77345 - DNA, 20 bp, Artificial Sequence
  Description of Artificial Sequence: Synthetic oligonucleotide
  Target: LAMA2; (-) strand; PAM type: NRG; PAM sequence: AAG
actagatatgctagcataca

SEQ ID NO: 77346 - DNA, 20 bp, Artificial Sequence
  Description of Artificial Sequence: Synthetic oligonucleotide
  Target: LAMA2; (-) strand; PAM type: NRG; PAM sequence: TAG
gaagatacaactagatatgc

SEQ ID NO: 77347 - DNA, 20 bp, Artificial Sequence
  Description of Artificial Sequence: Synthetic oligonucleotide
  Target: LAMA2; (-) strand; PAM type: NRG; PAM sequence: TAG
aaacacacagaagatacaac

SEQ ID NO: 77348 - DNA, 20 bp, Artificial Sequence
  Description of Artificial Sequence: Synthetic oligonucleotide
  Target: LAMA2; (-) strand; PAM type: NRG; PAM sequence: AAG
acaccattgaaaacacacag

SEQ ID NO: 77349 - DNA, 20 bp, Artificial Sequence
  Description of Artificial Sequence: Synthetic oligonucleotide
  Target: LAMA2; (-) strand; PAM type: NRG; PAM sequence: CAG
gacacaccattgaaaacaca

SEQ ID NO: 77350 - DNA, 20 bp, Artificial Sequence
  Description of Artificial Sequence: Synthetic oligonucleotide
  Target: LAMA2; (-) strand; PAM type: NRG; PAM sequence: CAG
caggaagatctttggagtag

SEQ ID NO: 77351 - DNA, 20 bp, Artificial Sequence
  Description of Artificial Sequence: Synthetic oligonucleotide
  Target: LAMA2; (-) strand; PAM type: NRG; PAM sequence: TAG
attcaggaagatctttggag

SEQ ID NO: 77352 - DNA, 20 bp, Artificial Sequence
  Description of Artificial Sequence: Synthetic oligonucleotide
  Target: LAMA2; (-) strand; PAM type: NRG; PAM sequence: GAG
aaaattcaggaagatctttg

SEQ ID NO: 77353 - DNA, 20 bp, Artificial Sequence
  Description of Artificial Sequence: Synthetic oligonucleotide
  Target: LAMA2; (-) strand; PAM type: NRG; PAM sequence: TGG
gtaaaattcaggaagatctt

SEQ ID NO: 77354 - DNA, 20 bp, Artificial Sequence
  Description of Artificial Sequence: Synthetic oligonucleotide
  Target: LAMA2; (-) strand; PAM type: NRG; PAM sequence: AAG
tctaatatgtaaaattcagg

SEQ ID NO: 77355 - DNA, 20 bp, Artificial Sequence
  Description of Artificial Sequence: Synthetic oligonucleotide
  Target: LAMA2; (-) strand; PAM type: NRG; PAM sequence: AGG
acttctaatatgtaaaattc

SEQ ID NO: 77356 - DNA, 20 bp, Artificial Sequence
  Description of Artificial Sequence: Synthetic oligonucleotide
  Target: LAMA2; (-) strand; PAM type: NRG; PAM sequence: CAG
cacttctaatatgtaaaatt

SEQ ID NO: 77357 - DNA, 20 bp, Artificial Sequence
  Description of Artificial Sequence: Synthetic oligonucleotide
  Target: LAMA2; (-) strand; PAM type: NRG; PAM sequence: AGG
gcttgatataaagtgtcatg

SEQ ID NO: 77358 - DNA, 20 bp, Artificial Sequence
  Description of Artificial Sequence: Synthetic oligonucleotide
  Target: LAMA2; (-) strand; PAM type: NRG; PAM sequence: GAG
tgcttgatataaagtgtcat

SEQ ID NO: 77359 - DNA, 20 bp, Artificial Sequence
  Description of Artificial Sequence: Synthetic oligonucleotide
  Target: LAMA2; (-) strand; PAM type: NRG; PAM sequence: AAG
agaacttcctgcttgatata

SEQ ID NO: 77360 - DNA, 20 bp, Artificial Sequence
  Description of Artificial Sequence: Synthetic oligonucleotide
  Target: LAMA2; (-) strand; PAM type: NRG; PAM sequence: CAG
tatttgttagcatcatcttc

SEQ ID NO: 77361 - DNA, 20 bp, Artificial Sequence
  Description of Artificial Sequence: Synthetic oligonucleotide
  Target: LAMA2; (-) strand; PAM type: NRG; PAM sequence: TAG
tccagatttgaggtatttgt

SEQ ID NO: 77362 - DNA, 20 bp, Artificial Sequence
  Description of Artificial Sequence: Synthetic oligonucleotide
  Target: LAMA2; (-) strand; PAM type: NRG; PAM sequence: AGG
gcctacaatttccagatttg

SEQ ID NO: 77363 - DNA, 20 bp, Artificial Sequence
  Description of Artificial Sequence: Synthetic oligonucleotide
  Target: LAMA2; (-) strand; PAM type: NRG; PAM sequence: GAG
agcctacaatttccagattt

SEQ ID NO: 77364 - DNA, 20 bp, Artificial Sequence
  Description of Artificial Sequence: Synthetic oligonucleotide
  Target: LAMA2; (-) strand; PAM type: NRG; PAM sequence: CAG
tttctaaagcctacaatttc

SEQ ID NO: 77365 - DNA, 20 bp, Artificial Sequence
  Description of Artificial Sequence: Synthetic oligonucleotide
  Target: LAMA2; (-) strand; PAM type: NRG; PAM sequence: AAG
aagatgactttatttttcta

SEQ ID NO: 77366 - DNA, 20 bp, Artificial Sequence
  Description of Artificial Sequence: Synthetic oligonucleotide
  Target: LAMA2; (-) strand; PAM type: NRG; PAM sequence: AAG
taatatagagattcactaac

SEQ ID NO: 77367 - DNA, 20 bp, Artificial Sequence
  Description of Artificial Sequence: Synthetic oligonucleotide
  Target: LAMA2; (-) strand; PAM type: NRG; PAM sequence: GAG
gtattagaaagtctaatata

SEQ ID NO: 77368 - DNA, 20 bp, Artificial Sequence
  Description of Artificial Sequence: Synthetic oligonucleotide
  Target: LAMA2; (-) strand; PAM type: NRG; PAM sequence: TAG
aggtattagaaagtctaata

SEQ ID NO: 77369 - DNA, 20 bp, Artificial Sequence
  Description of Artificial Sequence: Synthetic oligonucleotide
  Target: LAMA2; (-) strand; PAM type: NRG; PAM sequence: AAG
cctgtttataaggtattaga

SEQ ID NO: 77370 - DNA, 20 bp, Artificial Sequence
  Description of Artificial Sequence: Synthetic oligonucleotide
  Target: LAMA2; (-) strand; PAM type: NRG; PAM sequence: TAG
aaaacctgtttataaggtat

SEQ ID NO: 77371 - DNA, 20 bp, Artificial Sequence
  Description of Artificial Sequence: Synthetic oligonucleotide
  Target: LAMA2; (-) strand; PAM type: NRG; PAM sequence: AGG
tttctgaaaacctgtttata

SEQ ID NO: 77372 - DNA, 20 bp, Artificial Sequence
  Description of Artificial Sequence: Synthetic oligonucleotide
  Target: LAMA2; (-) strand; PAM type: NRG; PAM sequence: AAG
atttctgaaaacctgtttat

SEQ ID NO: 77373 - DNA, 20 bp, Artificial Sequence
  Description of Artificial Sequence: Synthetic oligonucleotide
  Target: LAMA2; (-) strand; PAM type: NRG; PAM sequence: AGG
gctttttccctagtttctcg

SEQ ID NO: 77374 - DNA, 20 bp, Artificial Sequence
  Description of Artificial Sequence: Synthetic oligonucleotide
  Target: LAMA2; (-) strand; PAM type: NRG; PAM sequence: GAG
agctttttccctagtttctc

SEQ ID NO: 77375 - DNA, 20 bp, Artificial Sequence
  Description of Artificial Sequence: Synthetic oligonucleotide
  Target: LAMA2; (-) strand; PAM type: NRG; PAM sequence: TAG
ttgagatccagctttttccc

SEQ ID NO: 77376 - DNA, 20 bp, Artificial Sequence
  Description of Artificial Sequence: Synthetic oligonucleotide
  Target: LAMA2; (-) strand; PAM type: NRG; PAM sequence: CAG
gtaataatgtctttgagatc

SEQ ID NO: 77377 - DNA, 20 bp, Artificial Sequence
  Description of Artificial Sequence: Synthetic oligonucleotide
  Target: LAMA2; (-) strand; PAM type: NRG; PAM sequence: GAG
tgctttgtaataatgtcttt

SEQ ID NO: 77378 - DNA, 20 bp, Artificial Sequence
  Description of Artificial Sequence: Synthetic oligonucleotide
  Target: LAMA2; (-) strand; PAM type: NRG; PAM sequence: CAG
tctttaataggtcaatgcct

SEQ ID NO: 77379 - DNA, 20 bp, Artificial Sequence
  Description of Artificial Sequence: Synthetic oligonucleotide
  Target: LAMA2; (-) strand; PAM type: NRG; PAM sequence: AGG
gtaactcataaatctttaat

SEQ ID NO: 77380 - DNA, 20 bp, Artificial Sequence
  Description of Artificial Sequence: Synthetic oligonucleotide
  Target: LAMA2; (-) strand; PAM type: NRG; PAM sequence: TAG
ggtaactcataaatctttaa

SEQ ID NO: 77381 - DNA, 20 bp, Artificial Sequence
  Description of Artificial Sequence: Synthetic oligonucleotide
  Target: LAMA2; (-) strand; PAM type: NRG; PAM sequence: AGG
cagggaagatttgggatttt

SEQ ID NO: 77382 - DNA, 20 bp, Artificial Sequence
  Description of Artificial Sequence: Synthetic oligonucleotide
  Target: LAMA2; (-) strand; PAM type: NRG; PAM sequence: TAG
tcagggaagatttgggattt

SEQ ID NO: 77383 - DNA, 20 bp, Artificial Sequence
  Description of Artificial Sequence: Synthetic oligonucleotide
  Target: LAMA2; (-) strand; PAM type: NRG; PAM sequence: GGG
tattacctcagggaagattt

SEQ ID NO: 77384 - DNA, 20 bp, Artificial Sequence
  Description of Artificial Sequence: Synthetic oligonucleotide
  Target: LAMA2; (-) strand; PAM type: NRG; PAM sequence: TGG
ctattacctcagggaagatt

SEQ ID NO: 77385 - DNA, 20 bp, Artificial Sequence
  Description of Artificial Sequence: Synthetic oligonucleotide
  Target: LAMA2; (-) strand; PAM type: NRG; PAM sequence: AAG
ctgaagctattacctcaggg

SEQ ID NO: 77386 - DNA, 20 bp, Artificial Sequence
  Description of Artificial Sequence: Synthetic oligonucleotide
  Target: LAMA2; (-) strand; PAM type: NRG; PAM sequence: GGG
caactgaagctattacctca

SEQ ID NO: 77387 - DNA, 20 bp, Artificial Sequence
  Description of Artificial Sequence: Synthetic oligonucleotide
  Target: LAMA2; (-) strand; PAM type: NRG; PAM sequence: AGG
tcaactgaagctattacctc

SEQ ID NO: 77388 - DNA, 20 bp, Artificial Sequence
  Description of Artificial Sequence: Synthetic oligonucleotide
  Target: LAMA2; (-) strand; PAM type: NRG; PAM sequence: CAG
ctcaactgaagctattacct

SEQ ID NO: 77389 - DNA, 20 bp, Artificial Sequence
  Description of Artificial Sequence: Synthetic oligonucleotide
  Target: LAMA2; (-) strand; PAM type: NRG; PAM sequence: AAG
ccttccctttatctcaactg

SEQ ID NO: 77390 - DNA, 20 bp, Artificial Sequence
  Description of Artificial Sequence: Synthetic oligonucleotide
  Target: LAMA2; (-) strand; PAM type: NRG; PAM sequence: AAG
cctgcagtgaagcgacaaat

SEQ ID NO: 77391 - DNA, 20 bp, Artificial Sequence
  Description of Artificial Sequence: Synthetic oligonucleotide
  Target: LAMA2; (-) strand; PAM type: NRG; PAM sequence: AAG
ttttattttttcctgcagtg

SEQ ID NO: 77392 - DNA, 20 bp, Artificial Sequence
  Description of Artificial Sequence: Synthetic oligonucleotide
  Target: LAMA2; (-) strand; PAM type: NRG; PAM sequence: CAG
acaaattttattttttcctg

SEQ ID NO: 77393 - DNA, 20 bp, Artificial Sequence
  Description of Artificial Sequence: Synthetic oligonucleotide
  Target: LAMA2; (-) strand; PAM type: NRG; PAM sequence: GAG
gcaataggcatcatgataat

SEQ ID NO: 77394 - DNA, 20 bp, Artificial Sequence
  Description of Artificial Sequence: Synthetic oligonucleotide
  Target: LAMA2; (-) strand; PAM type: NRG; PAM sequence: AGG
gtgagctgtaattttgcaat

SEQ ID NO: 77395 - DNA, 20 bp, Artificial Sequence
  Description of Artificial Sequence: Synthetic oligonucleotide
  Target: LAMA2; (-) strand; PAM type: NRG; PAM sequence: TAG
agtgagctgtaattttgcaa

SEQ ID NO: 77396 - DNA, 20 bp, Artificial Sequence
  Description of Artificial Sequence: Synthetic oligonucleotide
  Target: LAMA2; (-) strand; PAM type: NRG; PAM sequence: GAG
tttcacataattttaagagt

SEQ ID NO: 77397 - DNA, 20 bp, Artificial Sequence
  Description of Artificial Sequence: Synthetic oligonucleotide
  Target: LAMA2; (-) strand; PAM type: NRG; PAM sequence: GAG
cttttttcacataattttaa

SEQ ID NO: 77398 - DNA, 20 bp, Artificial Sequence
  Description of Artificial Sequence: Synthetic oligonucleotide
  Target: LAMA2; (-) strand; PAM type: NRG; PAM sequence: AAG
atcttttttcacataatttt

SEQ ID NO: 77399 - DNA, 20 bp, Artificial Sequence
  Description of Artificial Sequence: Synthetic oligonucleotide
  Target: LAMA2; (-) strand; PAM type: NRG; PAM sequence: AAG
aagttttgcttataagtttt

SEQ ID NO: 77400 - DNA, 20 bp, Artificial Sequence
  Description of Artificial Sequence: Synthetic oligonucleotide
  Target: LAMA2; (-) strand; PAM type: NRG; PAM sequence: AAG
aacttgaaagttttgcttat

SEQ ID NO: 77401 - DNA, 20 bp, Artificial Sequence
  Description of Artificial Sequence: Synthetic oligonucleotide
  Target: LAMA2; (-) strand; PAM type: NRG; PAM sequence: AAG
aatcagtttaaaaaacttga

SEQ ID NO: 77402 - DNA, 20 bp, Artificial Sequence
  Description of Artificial Sequence: Synthetic oligonucleotide
  Target: LAMA2; (-) strand; PAM type: NRG; PAM sequence: CAG
tacatatacaaccagtaaat

SEQ ID NO: 77403 - DNA, 20 bp, Artificial Sequence
  Description of Artificial Sequence: Synthetic oligonucleotide
  Target: LAMA2; (-) strand; PAM type: NRG; PAM sequence: CAG
caattagctacatatacaac

SEQ ID NO: 77404 - DNA, 20 bp, Artificial Sequence
  Description of Artificial Sequence: Synthetic oligonucleotide
  Target: LAMA2; (-) strand; PAM type: NRG; PAM sequence: TAG
ttcaagttttcatagtcaat

SEQ ID NO: 77405 - DNA, 20 bp, Artificial Sequence
  Description of Artificial Sequence: Synthetic oligonucleotide
  Target: LAMA2; (-) strand; PAM type: NRG; PAM sequence: TAG
agttaagcttcaagttttca

SEQ ID NO: 77406 - DNA, 20 bp, Artificial Sequence
  Description of Artificial Sequence: Synthetic oligonucleotide
  Target: LAMA2; (-) strand; PAM type: NRG; PAM sequence: AAG
tctacaaagagttaagcttc

SEQ ID NO: 77407 - DNA, 20 bp, Artificial Sequence
  Description of Artificial Sequence: Synthetic oligonucleotide
  Target: LAMA2; (-) strand; PAM type: NRG; PAM sequence: AAG
tggaaggtctacaaagagtt

SEQ ID NO: 77408 - DNA, 20 bp, Artificial Sequence
  Description of Artificial Sequence: Synthetic oligonucleotide
  Target: LAMA2; (-) strand; PAM type: NRG; PAM sequence: GAG
tatgatggaaggtctacaaa

SEQ ID NO: 77409 - DNA, 20 bp, Artificial Sequence
  Description of Artificial Sequence: Synthetic oligonucleotide
  Target: LAMA2; (-) strand; PAM type: NRG; PAM sequence: AAG
ggtatgatggaaggtctaca

SEQ ID NO: 77410 - DNA, 20 bp, Artificial Sequence
  Description of Artificial Sequence: Synthetic oligonucleotide
  Target: LAMA2; (-) strand; PAM type: NRG; PAM sequence: AGG
taaagcaatggtatgatgga

SEQ ID NO: 77411 - DNA, 20 bp, Artificial Sequence
  Description of Artificial Sequence: Synthetic oligonucleotide
  Target: LAMA2; (-) strand; PAM type: NRG; PAM sequence: AAG
ataaagcaatggtatgatgg

SEQ ID NO: 77412 - DNA, 20 bp, Artificial Sequence
  Description of Artificial Sequence: Synthetic oligonucleotide
  Target: LAMA2; (-) strand; PAM type: NRG; PAM sequence: TGG
tttataaagcaatggtatga

SEQ ID NO: 77413 - DNA, 20 bp, Artificial Sequence
  Description of Artificial Sequence: Synthetic oligonucleotide
  Target: LAMA2; (-) strand; PAM type: NRG; PAM sequence: TGG
ggtaataatttataaagcaa

SEQ ID NO: 77414 - DNA, 20 bp, Artificial Sequence
  Description of Artificial Sequence: Synthetic oligonucleotide
  Target: LAMA2; (-) strand; PAM type: NRG; PAM sequence: AAG
tattctggtaataatttata

SEQ ID NO: 77415 - DNA, 20 bp, Artificial Sequence
  Description of Artificial Sequence: Synthetic oligonucleotide
  Target: LAMA2; (-) strand; PAM type: NRG; PAM sequence: TGG
gtttatttccttcaatattc

SEQ ID NO: 77416 - DNA, 20 bp, Artificial Sequence
  Description of Artificial Sequence: Synthetic oligonucleotide
  Target: LAMA2; (-) strand; PAM type: NRG; PAM sequence: AAG
gcataaatatggttagaaaa

SEQ ID NO: 77417 - DNA, 20 bp, Artificial Sequence
  Description of Artificial Sequence: Synthetic oligonucleotide
  Target: LAMA2; (-) strand; PAM type: NRG; PAM sequence: TAG
attgattgcataaatatggt

SEQ ID NO: 77418 - DNA, 20 bp, Artificial Sequence
  Description of Artificial Sequence: Synthetic oligonucleotide
  Target: LAMA2; (-) strand; PAM type: NRG; PAM sequence: TGG
aaatattgattgcataaata

SEQ ID NO: 77419 - DNA, 20 bp, Artificial Sequence
  Description of Artificial Sequence: Synthetic oligonucleotide
  Target: LAMA2; (-) strand; PAM type: NRG; PAM sequence: AAG
caaggaataagttctcatat

SEQ ID NO: 77420 - DNA, 20 bp, Artificial Sequence
  Description of Artificial Sequence: Synthetic oligonucleotide
  Target: LAMA2; (-) strand; PAM type: NRG; PAM sequence: AAG
acatttggtatacaaggaat

SEQ ID NO: 77421 - DNA, 20 bp, Artificial Sequence
  Description of Artificial Sequence: Synthetic oligonucleotide
  Target: LAMA2; (-) strand; PAM type: NRG; PAM sequence: AGG
catgaaacatttggtataca

SEQ ID NO: 77422 - DNA, 20 bp, Artificial Sequence
  Description of Artificial Sequence: Synthetic oligonucleotide
  Target: LAMA2; (-) strand; PAM type: NRG; PAM sequence: AAG
ccatgaaacatttggtatac

SEQ ID NO: 77423 - DNA, 20 bp, Artificial Sequence
  Description of Artificial Sequence: Synthetic oligonucleotide
  Target: LAMA2; (-) strand; PAM type: NRG; PAM sequence: TGG
gtggtgttccatgaaacatt

SEQ ID NO: 77424 - DNA, 20 bp, Artificial Sequence
  Description of Artificial Sequence: Synthetic oligonucleotide
  Target: LAMA2; (-) strand; PAM type: NRG; PAM sequence: TGG
aacaaaaatgtctatgctgg

SEQ ID NO: 77425 - DNA, 20 bp, Artificial Sequence
  Description of Artificial Sequence: Synthetic oligonucleotide
  Target: LAMA2; (-) strand; PAM type: NRG; PAM sequence: TGG
gtaaacaaaaatgtctatgc

SEQ ID NO: 77426 - DNA, 20 bp, Artificial Sequence
  Description of Artificial Sequence: Synthetic oligonucleotide
  Target: LAMA2; (-) strand; PAM type: NRG; PAM sequence: GAG
gaacgaaatccagttgcaca

SEQ ID NO: 77427 - DNA, 20 bp, Artificial Sequence
  Description of Artificial Sequence: Synthetic oligonucleotide
  Target: LAMA2; (-) strand; PAM type: NRG; PAM sequence: CAG
cagaacgaaatccagttgca

SEQ ID NO: 77428 - DNA, 20 bp, Artificial Sequence
  Description of Artificial Sequence: Synthetic oligonucleotide
  Target: LAMA2; (-) strand; PAM type: NRG; PAM sequence: CAG
aagctccccagaacgaaatc

SEQ ID NO: 77429 - DNA, 20 bp, Artificial Sequence
  Description of Artificial Sequence: Synthetic oligonucleotide
  Target: LAMA2; (-) strand; PAM type: NRG; PAM sequence: CAG
atgtacaaattgaagctccc

SEQ ID NO: 77430 - DNA, 20 bp, Artificial Sequence
  Description of Artificial Sequence: Synthetic oligonucleotide
  Target: LAMA2; (-) strand; PAM type: NRG; PAM sequence: AAG
atgagctcatgtacaaattg

SEQ ID NO: 77431 - DNA, 20 bp, Artificial Sequence
  Description of Artificial Sequence: Synthetic oligonucleotide
  Target: LAMA2; (-) strand; PAM type: NRG; PAM sequence: GAG
gtaagatggtttgtgaaaat

SEQ ID NO: 77432 - DNA, 20 bp, Artificial Sequence
  Description of Artificial Sequence: Synthetic oligonucleotide
  Target: LAMA2; (-) strand; PAM type: NRG; PAM sequence: TGG
gactctaagtatcggtaaga

SEQ ID NO: 77433 - DNA, 20 bp, Artificial Sequence
  Description of Artificial Sequence: Synthetic oligonucleotide
  Target: LAMA2; (-) strand; PAM type: NRG; PAM sequence: AAG
tttggactctaagtatcggt

SEQ ID NO: 77434 - DNA, 20 bp, Artificial Sequence
  Description of Artificial Sequence: Synthetic oligonucleotide
  Target: LAMA2; (-) strand; PAM type: NRG; PAM sequence: CGG
tcactttggactctaagtat

SEQ ID NO: 77435 - DNA, 20 bp, Artificial Sequence
  Description of Artificial Sequence: Synthetic oligonucleotide
  Target: LAMA2; (-) strand; PAM type: NRG; PAM sequence: AAG
tgaatttcactttggactct

SEQ ID NO: 77436 - DNA, 20 bp, Artificial Sequence
  Description of Artificial Sequence: Synthetic oligonucleotide
  Target: LAMA2; (-) strand; PAM type: NRG; PAM sequence: TGG
atagttcctgaatttcactt

SEQ ID NO: 77437 - DNA, 20 bp, Artificial Sequence
  Description of Artificial Sequence: Synthetic oligonucleotide
  Target: LAMA2; (-) strand; PAM type: NRG; PAM sequence: TAG
catgaaagcttgctgggcca

SEQ ID NO: 77438 - DNA, 20 bp, Artificial Sequence
  Description of Artificial Sequence: Synthetic oligonucleotide
  Target: LAMA2; (-) strand; PAM type: NRG; PAM sequence: GGG
atagcacatgaaagcttgct

SEQ ID NO: 77439 - DNA, 20 bp, Artificial Sequence
  Description of Artificial Sequence: Synthetic oligonucleotide
  Target: LAMA2; (-) strand; PAM type: NRG; PAM sequence: TGG
aatagcacatgaaagcttgc

SEQ ID NO: 77440 - DNA, 20 bp, Artificial Sequence
  Description of Artificial Sequence: Synthetic oligonucleotide
  Target: LAMA2; (-) strand; PAM type: NRG; PAM sequence: AAG
aagcaaagaatagcacatga

SEQ ID NO: 77441 - DNA, 20 bp, Artificial Sequence
  Description of Artificial Sequence: Synthetic oligonucleotide
  Target: LAMA2; (-) strand; PAM type: NRG; PAM sequence: TAG
caaagtcatgaagcaaagaa

SEQ ID NO: 77442 - DNA, 20 bp, Artificial Sequence
  Description of Artificial Sequence: Synthetic oligonucleotide
  Target: LAMA2; (-) strand; PAM type: NRG; PAM sequence: AAG
atttccaaagtcatgaagca

SEQ ID NO: 77443 - DNA, 20 bp, Artificial Sequence
  Description of Artificial Sequence: Synthetic oligonucleotide
  Target: LAMA2; (-) strand; PAM type: NRG; PAM sequence: AAG
catagatttccaaagtcatg

SEQ ID NO: 77444 - DNA, 20 bp, Artificial Sequence
  Description of Artificial Sequence: Synthetic oligonucleotide
  Target: LAMA2; (-) strand; PAM type: NRG; PAM sequence: AAG
gggtctcccatagatttcca

SEQ ID NO: 77445 - DNA, 20 bp, Artificial Sequence
  Description of Artificial Sequence: Synthetic oligonucleotide
  Target: LAMA2; (-) strand; PAM type: NRG; PAM sequence: TAG
tagtgatacagggtctccca

SEQ ID NO: 77446 - DNA, 20 bp, Artificial Sequence
  Description of Artificial Sequence: Synthetic oligonucleotide
  Target: LAMA2; (-) strand; PAM type: NRG; PAM sequence: GGG
gtattctgtctagtgataca

SEQ ID NO: 77447 - DNA, 20 bp, Artificial Sequence
  Description of Artificial Sequence: Synthetic oligonucleotide
  Target: LAMA2; (-) strand; PAM type: NRG; PAM sequence: AGG
agtattctgtctagtgatac

SEQ ID NO: 77448 - DNA, 20 bp, Artificial Sequence
  Description of Artificial Sequence: Synthetic oligonucleotide
  Target: LAMA2; (-) strand; PAM type: NRG; PAM sequence: CAG
cagtattctgtctagtgata

SEQ ID NO: 77449 - DNA, 20 bp, Artificial Sequence
  Description of Artificial Sequence: Synthetic oligonucleotide
  Target: LAMA2; (-) strand; PAM type: NRG; PAM sequence: TAG
ctgcttttcagtattctgtc

SEQ ID NO: 77450 - DNA, 20 bp, Artificial Sequence
  Description of Artificial Sequence: Synthetic oligonucleotide
  Target: LAMA2; (-) strand; PAM type: NRG; PAM sequence: CAG
tcatatgtaatcctgctttt

SEQ ID NO: 77451 - DNA, 20 bp, Artificial Sequence
  Description of Artificial Sequence: Synthetic oligonucleotide
  Target: LAMA2; (-) strand; PAM type: NRG; PAM sequence: TGG
cccttaggaaaaaaatcaga

SEQ ID NO: 77452 - DNA, 20 bp, Artificial Sequence
  Description of Artificial Sequence: Synthetic oligonucleotide
  Target: LAMA2; (-) strand; PAM type: NRG; PAM sequence: CAG
aaaacccttaggaaaaaaat

SEQ ID NO: 77453 - DNA, 20 bp, Artificial Sequence
  Description of Artificial Sequence: Synthetic oligonucleotide
  Target: LAMA2; (-) strand; PAM type: NRG; PAM sequence: AGG
acgttcatgtaaaaaccctt

SEQ ID NO: 77454 - DNA, 20 bp, Artificial Sequence
  Description of Artificial Sequence: Synthetic oligonucleotide
  Target: LAMA2; (-) strand; PAM type: NRG; PAM sequence: TAG
aacgttcatgtaaaaaccct

SEQ ID NO: 77455 - DNA, 20 bp, Artificial Sequence
  Description of Artificial Sequence: Synthetic oligonucleotide
  Target: LAMA2; (-) strand; PAM type: NRG; PAM sequence: AGG
tgaatccacacaaaaagaca

SEQ ID NO: 77456 - DNA, 20 bp, Artificial Sequence
  Description of Artificial Sequence: Synthetic oligonucleotide
  Target: LAMA2; (-) strand; PAM type: NRG; PAM sequence: AAG
ctgaatccacacaaaaagac

SEQ ID NO: 77457 - DNA, 20 bp, Artificial Sequence
  Description of Artificial Sequence: Synthetic oligonucleotide
  Target: LAMA2; (-) strand; PAM type: NRG; PAM sequence: AAG
gattgctgaatccacacaaa

SEQ ID NO: 77458 - DNA, 20 bp, Artificial Sequence
  Description of Artificial Sequence: Synthetic oligonucleotide
  Target: LAMA2; (-) strand; PAM type: NRG; PAM sequence: GAG
acccctgttcagtaaacctg

SEQ ID NO: 77459 - DNA, 20 bp, Artificial Sequence
  Description of Artificial Sequence: Synthetic oligonucleotide
  Target: LAMA2; (-) strand; PAM type: NRG; PAM sequence: TGG
caacccctgttcagtaaacc

SEQ ID NO: 77460 - DNA, 20 bp, Artificial Sequence
  Description of Artificial Sequence: Synthetic oligonucleotide
  Target: LAMA2; (-) strand; PAM type: NRG; PAM sequence: CAG
tgcccttcacaacccctgtt

SEQ ID NO: 77461 - DNA, 20 bp, Artificial Sequence
  Description of Artificial Sequence: Synthetic oligonucleotide
  Target: LAMA2; (-) strand; PAM type: NRG; PAM sequence: CAG
caacacagtgggaatgagct

SEQ ID NO: 77462 - DNA, 20 bp, Artificial Sequence
  Description of Artificial Sequence: Synthetic oligonucleotide
  Target: LAMA2; (-) strand; PAM type: NRG; PAM sequence: GAG
tatatcaacacagtgggaat

SEQ ID NO: 77463 - DNA, 20 bp, Artificial Sequence
  Description of Artificial Sequence: Synthetic oligonucleotide
  Target: LAMA2; (-) strand; PAM type: NRG; PAM sequence: GGG
ccggagtatatcaacacagt

SEQ ID NO: 77464 - DNA, 20 bp, Artificial Sequence
  Description of Artificial Sequence: Synthetic oligonucleotide
  Target: LAMA2; (-) strand; PAM type: NRG; PAM sequence: TGG
accggagtatatcaacacag

SEQ ID NO: 77465 - DNA, 20 bp, Artificial Sequence
  Description of Artificial Sequence: Synthetic oligonucleotide
  Target: LAMA2; (-) strand; PAM type: NRG; PAM sequence: CAG
ggaaccggagtatatcaaca

SEQ ID NO: 77466 - DNA, 20 bp, Artificial Sequence
  Description of Artificial Sequence: Synthetic oligonucleotide
  Target: LAMA2; (-) strand; PAM type: NRG; PAM sequence: GAG
ggagctatgtgggggaaccg

SEQ ID NO: 77467 - DNA, 20 bp, Artificial Sequence
  Description of Artificial Sequence: Synthetic oligonucleotide
  Target: LAMA2; (-) strand; PAM type: NRG; PAM sequence: CGG
gtggagctatgtgggggaac

SEQ ID NO: 77468 - DNA, 20 bp, Artificial Sequence
  Description of Artificial Sequence: Synthetic oligonucleotide
  Target: LAMA2; (-) strand; PAM type: NRG; PAM sequence: GGG
agcggggtggagctatgtgg

SEQ ID NO: 77469 - DNA, 20 bp, Artificial Sequence
  Description of Artificial Sequence: Synthetic oligonucleotide
  Target: LAMA2; (-) strand; PAM type: NRG; PAM sequence: GGG
tagcggggtggagctatgtg

SEQ ID NO: 77470 - DNA, 20 bp, Artificial Sequence
  Description of Artificial Sequence: Synthetic oligonucleotide
  Target: LAMA2; (-) strand; PAM type: NRG; PAM sequence: GGG
ttagcggggtggagctatgt

SEQ ID NO: 77471 - DNA, 20 bp, Artificial Sequence
  Description of Artificial Sequence: Synthetic oligonucleotide
  Target: LAMA2; (-) strand; PAM type: NRG; PAM sequence: TGG
gttagcggggtggagctatg

SEQ ID NO: 77472 - DNA, 20 bp, Artificial Sequence
  Description of Artificial Sequence: Synthetic oligonucleotide
  Target: LAMA2; (-) strand; PAM type: NRG; PAM sequence: GAG
ggttgggagttagcggggtg

SEQ ID NO: 77473 - DNA, 20 bp, Artificial Sequence
  Description of Artificial Sequence: Synthetic oligonucleotide
  Target: LAMA2; (-) strand; PAM type: NRG; PAM sequence: TGG
gaggttgggagttagcgggg

SEQ ID NO: 77474 - DNA, 20 bp, Artificial Sequence
  Description of Artificial Sequence: Synthetic oligonucleotide
  Target: LAMA2; (-) strand; PAM type: NRG; PAM sequence: GGG
catgaggttgggagttagcg

SEQ ID NO: 77475 - DNA, 20 bp, Artificial Sequence
  Description of Artificial Sequence: Synthetic oligonucleotide
  Target: LAMA2; (-) strand; PAM type: NRG; PAM sequence: GGG
gcatgaggttgggagttagc

SEQ ID NO: 77476 - DNA, 20 bp, Artificial Sequence
  Description of Artificial Sequence: Synthetic oligonucleotide
  Target: LAMA2; (-) strand; PAM type: NRG; PAM sequence: CGG
tgcatgaggttgggagttag

SEQ ID NO: 77477 - DNA, 20 bp, Artificial Sequence
  Description of Artificial Sequence: Synthetic oligonucleotide
  Target: LAMA2; (-) strand; PAM type: NRG; PAM sequence: TAG
ctatgcatgaggttgggagt

SEQ ID NO: 77478 - DNA, 20 bp, Artificial Sequence
  Description of Artificial Sequence: Synthetic oligonucleotide
  Target: LAMA2; (-) strand; PAM type: NRG; PAM sequence: GAG
ggagctatgcatgaggttgg

SEQ ID NO: 77479 - DNA, 20 bp, Artificial Sequence
  Description of Artificial Sequence: Synthetic oligonucleotide
  Target: LAMA2; (-) strand; PAM type: NRG; PAM sequence: GGG
gtggagctatgcatgaggtt

SEQ ID NO: 77480 - DNA, 20 bp, Artificial Sequence
  Description of Artificial Sequence: Synthetic oligonucleotide
  Target: LAMA2; (-) strand; PAM type: NRG; PAM sequence: TGG
ggtggagctatgcatgaggt

SEQ ID NO: 77481 - DNA, 20 bp, Artificial Sequence
  Description of Artificial Sequence: Synthetic oligonucleotide
  Target: LAMA2; (-) strand; PAM type: NRG; PAM sequence: AGG
gtgtggtggagctatgcatg

SEQ ID NO: 77482 - DNA, 20 bp, Artificial Sequence
  Description of Artificial Sequence: Synthetic oligonucleotide
  Target: LAMA2; (-) strand; PAM type: NRG; PAM sequence: GAG
agtgtggtggagctatgcat

SEQ ID NO: 77483 - DNA, 20 bp, Artificial Sequence
  Description of Artificial Sequence: Synthetic oligonucleotide
  Target: LAMA2; (-) strand; PAM type: NRG; PAM sequence: GAG
tcaagcccaatagtgtggtg

SEQ ID NO: 77484 - DNA, 20 bp, Artificial Sequence
  Description of Artificial Sequence: Synthetic oligonucleotide
  Target: LAMA2; (-) strand; PAM type: NRG; PAM sequence: TGG
attcaagcccaatagtgtgg

SEQ ID NO: 77485 - DNA, 20 bp, Artificial Sequence
  Description of Artificial Sequence: Synthetic oligonucleotide
  Target: LAMA2; (-) strand; PAM type: NRG; PAM sequence: TGG
tagattcaagcccaatagtg

SEQ ID NO: 77486 - DNA, 20 bp, Artificial Sequence
  Description of Artificial Sequence: Synthetic oligonucleotide
  Target: LAMA2; (-) strand; PAM type: NRG; PAM sequence: TAG
gagcctagattcaagcccaa

SEQ ID NO: 77487 - DNA, 20 bp, Artificial Sequence
  Description of Artificial Sequence: Synthetic oligonucleotide
  Target: LAMA2; (-) strand; PAM type: NRG; PAM sequence: AAG
aagtggcagagcctagattc

SEQ ID NO: 77488 - DNA, 20 bp, Artificial Sequence
  Description of Artificial Sequence: Synthetic oligonucleotide
  Target: LAMA2; (-) strand; PAM type: NRG; PAM sequence: TAG
agctagaaagtggcagagcc

SEQ ID NO: 77489 - DNA, 20 bp, Artificial Sequence
  Description of Artificial Sequence: Synthetic oligonucleotide
  Target: LAMA2; (-) strand; PAM type: NRG; PAM sequence: GAG
gaaccagctagaaagtggca

SEQ ID NO: 77490 - DNA, 20 bp, Artificial Sequence
  Description of Artificial Sequence: Synthetic oligonucleotide
  Target: LAMA2; (-) strand; PAM type: NRG; PAM sequence: CAG
aggaaccagctagaaagtgg

SEQ ID NO: 77491 - DNA, 20 bp, Artificial Sequence
  Description of Artificial Sequence: Synthetic oligonucleotide
  Target: LAMA2; (-) strand; PAM type: NRG; PAM sequence: TGG
ctcaggaaccagctagaaag

SEQ ID NO: 77492 - DNA, 20 bp, Artificial Sequence
  Description of Artificial Sequence: Synthetic oligonucleotide
  Target: LAMA2; (-) strand; PAM type: NRG; PAM sequence: AAG
ttgctcaggaaccagctaga

SEQ ID NO: 77493 - DNA, 20 bp, Artificial Sequence
  Description of Artificial Sequence: Synthetic oligonucleotide
  Target: LAMA2; (-) strand; PAM type: NRG; PAM sequence: TAG
gaacttgctcaggaaccagc

SEQ ID NO: 77494 - DNA, 20 bp, Artificial Sequence
  Description of Artificial Sequence: Synthetic oligonucleotide
  Target: LAMA2; (-) strand; PAM type: NRG; PAM sequence: CAG
taaagaacttgctcaggaac

SEQ ID NO: 77495 - DNA, 20 bp, Artificial Sequence
  Description of Artificial Sequence: Synthetic oligonucleotide
  Target: LAMA2; (-) strand; PAM type: NRG; PAM sequence: AGG
agaggttaaagaacttgctc

SEQ ID NO: 77496 - DNA, 20 bp, Artificial Sequence
  Description of Artificial Sequence: Synthetic oligonucleotide
  Target: LAMA2; (-) strand; PAM type: NRG; PAM sequence: CAG
gagaggttaaagaacttgct

SEQ ID NO: 77497 - DNA, 20 bp, Artificial Sequence
  Description of Artificial Sequence: Synthetic oligonucleotide
  Target: LAMA2; (-) strand; PAM type: NRG; PAM sequence: AAG
aaacaggctcagagaggtta

SEQ ID NO: 77498 - DNA, 20 bp, Artificial Sequence
  Description of Artificial Sequence: Synthetic oligonucleotide
  Target: LAMA2; (-) strand; PAM type: NRG; PAM sequence: AGG
atgaggaaacaggctcagag

SEQ ID NO: 77499 - DNA, 20 bp, Artificial Sequence
  Description of Artificial Sequence: Synthetic oligonucleotide
  Target: LAMA2; (-) strand; PAM type: NRG; PAM sequence: GAG
gatgaggaaacaggctcaga

SEQ ID NO: 77500 - DNA, 20 bp, Artificial Sequence
  Description of Artificial Sequence: Synthetic oligonucleotide
  Target: LAMA2; (-) strand; PAM type: NRG; PAM sequence: GAG
tggatgaggaaacaggctca

SEQ ID NO: 77501 - DNA, 20 bp, Artificial Sequence
  Description of Artificial Sequence: Synthetic oligonucleotide
  Target: LAMA2; (-) strand; PAM type: NRG; PAM sequence: CAG
tgtggatgaggaaacaggct

SEQ ID NO: 77502 - DNA, 20 bp, Artificial Sequence
  Description of Artificial Sequence: Synthetic oligonucleotide
  Target: LAMA2; (-) strand; PAM type: NRG; PAM sequence: AGG
ctttttgtggatgaggaaac

SEQ ID NO: 77503 - DNA, 20 bp, Artificial Sequence
  Description of Artificial Sequence: Synthetic oligonucleotide
  Target: LAMA2; (-) strand; PAM type: NRG; PAM sequence: CAG
cctttttgtggatgaggaaa

SEQ ID NO: 77504 - DNA, 20 bp, Artificial Sequence
  Description of Artificial Sequence: Synthetic oligonucleotide
  Target: LAMA2; (-) strand; PAM type: NRG; PAM sequence: AGG
cttcatcctttttgtggatg

SEQ ID NO: 77505 - DNA, 20 bp, Artificial Sequence
  Description of Artificial Sequence: Synthetic oligonucleotide
  Target: LAMA2; (-) strand; PAM type: NRG; PAM sequence: GAG
tcttcatcctttttgtggat

SEQ ID NO: 77506 - DNA, 20 bp, Artificial Sequence
  Description of Artificial Sequence: Synthetic oligonucleotide
  Target: LAMA2; (-) strand; PAM type: NRG; PAM sequence: TGG
tttgttcttcatcctttttg

SEQ ID NO: 77507 - DNA, 20 bp, Artificial Sequence
  Description of Artificial Sequence: Synthetic oligonucleotide
  Target: LAMA2; (-) strand; PAM type: NRG; PAM sequence: AGG
tttaattatcagtgttaaga

SEQ ID NO: 77508 - DNA, 20 bp, Artificial Sequence
  Description of Artificial Sequence: Synthetic oligonucleotide
  Target: LAMA2; (-) strand; PAM type: NRG; PAM sequence: AAG
atttaattatcagtgttaag

SEQ ID NO: 77509 - DNA, 20 bp, Artificial Sequence
  Description of Artificial Sequence: Synthetic oligonucleotide
  Target: LAMA2; (-) strand; PAM type: NRG; PAM sequence: AAG
cttatttaattatcagtgtt

SEQ ID NO: 77510 - DNA, 20 bp, Artificial Sequence
  Description of Artificial Sequence: Synthetic oligonucleotide
  Target: LAMA2; (-) strand; PAM type: NRG; PAM sequence: CAG
agcttatcttatttaattat

SEQ ID NO: 77511 - DNA, 20 bp, Artificial Sequence
  Description of Artificial Sequence: Synthetic oligonucleotide
  Target: LAMA2; (-) strand; PAM type: NRG; PAM sequence: AAG
ctgtgctgattttataattt

SEQ ID NO: 77512 - DNA, 20 bp, Artificial Sequence
  Description of Artificial Sequence: Synthetic oligonucleotide
  Target: LAMA2; (-) strand; PAM type: NRG; PAM sequence: TGG
ctacttttttccttccataa

SEQ ID NO: 77513 - DNA, 20 bp, Artificial Sequence
  Description of Artificial Sequence: Synthetic oligonucleotide
  Target: LAMA2; (-) strand; PAM type: NRG; PAM sequence: AGG
gtcccattttgaattttttg

SEQ ID NO: 77514 - DNA, 20 bp, Artificial Sequence
  Description of Artificial Sequence: Synthetic oligonucleotide
  Target: LAMA2; (-) strand; PAM type: NRG; PAM sequence: GAG
agtcccattttgaatttttt

SEQ ID NO: 77515 - DNA, 20 bp, Artificial Sequence
  Description of Artificial Sequence: Synthetic oligonucleotide
  Target: LAMA2; (-) strand; PAM type: NRG; PAM sequence: CAG
agccaccacacccggcctcg

SEQ ID NO: 77516 - DNA, 20 bp, Artificial Sequence
  Description of Artificial Sequence: Synthetic oligonucleotide
  Target: LAMA2; (-) strand; PAM type: NRG; PAM sequence: CGG
caggcttgagccaccacacc

SEQ ID NO: 77517 - DNA, 20 bp, Artificial Sequence
  Description of Artificial Sequence: Synthetic oligonucleotide
  Target: LAMA2; (-) strand; PAM type: NRG; PAM sequence: GAG
agtgctgagattacaggctt

SEQ ID NO: 77518 - DNA, 20 bp, Artificial Sequence
  Description of Artificial Sequence: Synthetic oligonucleotide
  Target: LAMA2; (-) strand; PAM type: NRG; PAM sequence: AGG
tcccaaagtgctgagattac

SEQ ID NO: 77519 - DNA, 20 bp, Artificial Sequence
  Description of Artificial Sequence: Synthetic oligonucleotide
  Target: LAMA2; (-) strand; PAM type: NRG; PAM sequence: CAG
ctcccaaagtgctgagatta

SEQ ID NO: 77520 - DNA, 20 bp, Artificial Sequence
  Description of Artificial Sequence: Synthetic oligonucleotide
  Target: LAMA2; (-) strand; PAM type: NRG; PAM sequence: GAG
cctcagcctcccaaagtgct

SEQ ID NO: 77521 - DNA, 20 bp, Artificial Sequence
  Description of Artificial Sequence: Synthetic oligonucleotide
  Target: LAMA2; (-) strand; PAM type: NRG; PAM sequence: AAG
ctgcctgcctcagcctccca

SEQ ID NO: 77522 - DNA, 20 bp, Artificial Sequence
  Description of Artificial Sequence: Synthetic oligonucleotide
  Target: LAMA2; (-) strand; PAM type: NRG; PAM sequence: CAG
tcaaaatgctctgcctgcct

SEQ ID NO: 77523 - DNA, 20 bp, Artificial Sequence
  Description of Artificial Sequence: Synthetic oligonucleotide
  Target: LAMA2; (-) strand; PAM type: NRG; PAM sequence: AGG
agggtttcaccatgttggcc

SEQ ID NO: 77524 - DNA, 20 bp, Artificial Sequence
  Description of Artificial Sequence: Synthetic oligonucleotide
  Target: LAMA2; (-) strand; PAM type: NRG; PAM sequence: CAG
cagggtttcaccatgttggc

SEQ ID NO: 77525 - DNA, 20 bp, Artificial Sequence
  Description of Artificial Sequence: Synthetic oligonucleotide
  Target: LAMA2; (-) strand; PAM type: NRG; PAM sequence: TGG
gagacagggtttcaccatgt

SEQ ID NO: 77526 - DNA, 20 bp, Artificial Sequence
  Description of Artificial Sequence: Synthetic oligonucleotide
  Target: LAMA2; (-) strand; PAM type: NRG; PAM sequence: GGG
gatgttttttagtagagaca

SEQ ID NO: 77527 - DNA, 20 bp, Artificial Sequence
  Description of Artificial Sequence: Synthetic oligonucleotide
  Target: LAMA2; (-) strand; PAM type: NRG; PAM sequence: AGG
ggatgttttttagtagagac

SEQ ID NO: 77528 - DNA, 20 bp, Artificial Sequence
  Description of Artificial Sequence: Synthetic oligonucleotide
  Target: LAMA2; (-) strand; PAM type: NRG; PAM sequence: CAG
tggatgttttttagtagaga

SEQ ID NO: 77529 - DNA, 20 bp, Artificial Sequence
  Description of Artificial Sequence: Synthetic oligonucleotide
  Target: LAMA2; (-) strand; PAM type: NRG; PAM sequence: GAG
tttttggatgttttttagta

SEQ ID NO: 77530 - DNA, 20 bp, Artificial Sequence
  Description of Artificial Sequence: Synthetic oligonucleotide
  Target: LAMA2; (-) strand; PAM type: NRG; PAM sequence: TAG
aatttttggatgttttttag

SEQ ID NO: 77531 - DNA, 20 bp, Artificial Sequence
  Description of Artificial Sequence: Synthetic oligonucleotide
  Target: LAMA2; (-) strand; PAM type: NRG; PAM sequence: TAG
gctaatttttggatgttttt

SEQ ID NO: 77532 - DNA, 20 bp, Artificial Sequence
  Description of Artificial Sequence: Synthetic oligonucleotide
  Target: LAMA2; (-) strand; PAM type: NRG; PAM sequence: TGG
cactatgcctggctaatttt

SEQ ID NO: 77533 - DNA, 20 bp, Artificial Sequence
  Description of Artificial Sequence: Synthetic oligonucleotide
  Target: LAMA2; (-) strand; PAM type: NRG; PAM sequence: TGG
cagacgtgcaccactatgcc

SEQ ID NO: 77534 - DNA, 20 bp, Artificial Sequence
  Description of Artificial Sequence: Synthetic oligonucleotide
  Target: LAMA2; (-) strand; PAM type: NRG; PAM sequence: CAG
ctcccaagtagctgggatta

SEQ ID NO: 77535 - DNA, 20 bp, Artificial Sequence
  Description of Artificial Sequence: Synthetic oligonucleotide
  Target: LAMA2; (-) strand; PAM type: NRG; PAM sequence: GGG
cctcagcctcccaagtagct

SEQ ID NO: 77536 - DNA, 20 bp, Artificial Sequence
  Description of Artificial Sequence: Synthetic oligonucleotide
  Target: LAMA2; (-) strand; PAM type: NRG; PAM sequence: TGG
gcctcagcctcccaagtagc

SEQ ID NO: 77537 - DNA, 20 bp, Artificial Sequence
  Description of Artificial Sequence: Synthetic oligonucleotide
  Target: LAMA2; (-) strand; PAM type: NRG; PAM sequence: TAG
ttctgcctcagcctcccaag

SEQ ID NO: 77538 - DNA, 20 bp, Artificial Sequence
  Description of Artificial Sequence: Synthetic oligonucleotide
  Target: LAMA2; (-) strand; PAM type: NRG; PAM sequence: AAG
ttcttctgcctcagcctccc

SEQ ID NO: 77539 - DNA, 20 bp, Artificial Sequence
  Description of Artificial Sequence: Synthetic oligonucleotide
  Target: LAMA2; (-) strand; PAM type: NRG; PAM sequence: CAG
ttcacacaattcttctgcct

SEQ ID NO: 77540 - DNA, 20 bp, Artificial Sequence
  Description of Artificial Sequence: Synthetic oligonucleotide
  Target: LAMA2; (-) strand; PAM type: NRG; PAM sequence: CGG
cactgcaacctctgcctgcc

SEQ ID NO: 77541 - DNA, 20 bp, Artificial Sequence
  Description of Artificial Sequence: Synthetic oligonucleotide
  Target: LAMA2; (-) strand; PAM type: NRG; PAM sequence: CAG
gaagtgcagtggcaccatct

SEQ ID NO: 77542 - DNA, 20 bp, Artificial Sequence
  Description of Artificial Sequence: Synthetic oligonucleotide
  Target: LAMA2; (-) strand; PAM type: NRG; PAM sequence: TGG
tcgctcaggctgaagtgcag

SEQ ID NO: 77543 - DNA, 20 bp, Artificial Sequence
  Description of Artificial Sequence: Synthetic oligonucleotide
  Target: LAMA2; (-) strand; PAM type: NRG; PAM sequence: CAG
ctatcgctcaggctgaagtg

SEQ ID NO: 77544 - DNA, 20 bp, Artificial Sequence
  Description of Artificial Sequence: Synthetic oligonucleotide
  Target: LAMA2; (-) strand; PAM type: NRG; PAM sequence: AAG
ttactctatcgctcaggctg

SEQ ID NO: 77545 - DNA, 20 bp, Artificial Sequence
  Description of Artificial Sequence: Synthetic oligonucleotide
  Target: LAMA2; (-) strand; PAM type: NRG; PAM sequence: AGG
agagtcttactctatcgctc

SEQ ID NO: 77546 - DNA, 20 bp, Artificial Sequence
  Description of Artificial Sequence: Synthetic oligonucleotide
  Target: LAMA2; (-) strand; PAM type: NRG; PAM sequence: CAG
cagagtcttactctatcgct

SEQ ID NO: 77547 - DNA, 20 bp, Artificial Sequence
  Description of Artificial Sequence: Synthetic oligonucleotide
  Target: LAMA2; (-) strand; PAM type: NRG; PAM sequence: GAG
ttttttttttttttgagaca

SEQ ID NO: 77548 - DNA, 20 bp, Artificial Sequence
  Description of Artificial Sequence: Synthetic oligonucleotide
  Target: LAMA2; (-) strand; PAM type: NRG; PAM sequence: CAG
ctttttttttttttttgaga

SEQ ID NO: 77549 - DNA, 20 bp, Artificial Sequence
  Description of Artificial Sequence: Synthetic oligonucleotide
  Target: LAMA2; (-) strand; PAM type: NRG; PAM sequence: GAG
gttccttttttttttttttt

SEQ ID NO: 77550 - DNA, 20 bp, Artificial Sequence
  Description of Artificial Sequence: Synthetic oligonucleotide
  Target: LAMA2; (-) strand; PAM type: NRG; PAM sequence: TAG
gagaaggctggatcatatgg

SEQ ID NO: 77551 - DNA, 20 bp, Artificial Sequence
  Description of Artificial Sequence: Synthetic oligonucleotide
  Target: LAMA2; (-) strand; PAM type: NRG; PAM sequence: TGG
tgtgagaaggctggatcata

SEQ ID NO: 77552 - DNA, 20 bp, Artificial Sequence
  Description of Artificial Sequence: Synthetic oligonucleotide
  Target: LAMA2; (-) strand; PAM type: NRG; PAM sequence: TGG
atatatatgtgtgagaaggc

SEQ ID NO: 77553 - DNA, 20 bp, Artificial Sequence
  Description of Artificial Sequence: Synthetic oligonucleotide
  Target: LAMA2; (-) strand; PAM type: NRG; PAM sequence: AGG
acatatatatatgtgtgaga

SEQ ID NO: 77554 - DNA, 20 bp, Artificial Sequence
  Description of Artificial Sequence: Synthetic oligonucleotide
  Target: LAMA2; (-) strand; PAM type: NRG; PAM sequence: AAG
cacatatatatatgtgtgag

SEQ ID NO: 77555 - DNA, 20 bp, Artificial Sequence
  Description of Artificial Sequence: Synthetic oligonucleotide
  Target: LAMA2; (-) strand; PAM type: NRG; PAM sequence: GAG
acacacatatatatatgtgt

SEQ ID NO: 77556 - DNA, 20 bp, Artificial Sequence
  Description of Artificial Sequence: Synthetic oligonucleotide
  Target: LAMA2; (-) strand; PAM type: NRG; PAM sequence: GAG
ggaaatgcagatatctcttt

SEQ ID NO: 77557 - DNA, 20 bp, Artificial Sequence
  Description of Artificial Sequence: Synthetic oligonucleotide
  Target: LAMA2; (-) strand; PAM type: NRG; PAM sequence: CAG
ctaaaatgaatacggaaatg

SEQ ID NO: 77558 - DNA, 20 bp, Artificial Sequence
  Description of Artificial Sequence: Synthetic oligonucleotide
  Target: LAMA2; (-) strand; PAM type: NRG; PAM sequence: CGG
gaataatgctaaaatgaata

SEQ ID NO: 77559 - DNA, 20 bp, Artificial Sequence
  Description of Artificial Sequence: Synthetic oligonucleotide
  Target: LAMA2; (-) strand; PAM type: NRG; PAM sequence: AGG
tcatctgtcaacagatattt

SEQ ID NO: 77560 - DNA, 20 bp, Artificial Sequence
  Description of Artificial Sequence: Synthetic oligonucleotide
  Target: LAMA2; (-) strand; PAM type: NRG; PAM sequence: TAG
ttcatctgtcaacagatatt

SEQ ID NO: 77561 - DNA, 20 bp, Artificial Sequence
  Description of Artificial Sequence: Synthetic oligonucleotide
  Target: LAMA2; (-) strand; PAM type: NRG; PAM sequence: CAG
cttatttattcatctgtcaa

SEQ ID NO: 77562 - DNA, 20 bp, Artificial Sequence
  Description of Artificial Sequence: Synthetic oligonucleotide
  Target: LAMA2; (-) strand; PAM type: NRG; PAM sequence: AAG
ttccttctttttctaaggct

SEQ ID NO: 77563 - DNA, 20 bp, Artificial Sequence
  Description of Artificial Sequence: Synthetic oligonucleotide
  Target: LAMA2; (-) strand; PAM type: NRG; PAM sequence: AGG
aggatttccttctttttcta

SEQ ID NO: 77564 - DNA, 20 bp, Artificial Sequence
  Description of Artificial Sequence: Synthetic oligonucleotide
  Target: LAMA2; (-) strand; PAM type: NRG; PAM sequence: AAG
caggatttccttctttttct

SEQ ID NO: 77565 - DNA, 20 bp, Artificial Sequence
  Description of Artificial Sequence: Synthetic oligonucleotide
  Target: LAMA2; (-) strand; PAM type: NRG; PAM sequence: AGG
tccacattgcctgaaatggc

SEQ ID NO: 77566 - DNA, 20 bp, Artificial Sequence
  Description of Artificial Sequence: Synthetic oligonucleotide
  Target: LAMA2; (-) strand; PAM type: NRG; PAM sequence: CAG
gtccacattgcctgaaatgg

SEQ ID NO: 77567 - DNA, 20 bp, Artificial Sequence
  Description of Artificial Sequence: Synthetic oligonucleotide
  Target: LAMA2; (-) strand; PAM type: NRG; PAM sequence: TGG
gttgtccacattgcctgaaa

SEQ ID NO: 77568 - DNA, 20 bp, Artificial Sequence
  Description of Artificial Sequence: Synthetic oligonucleotide
  Target: LAMA2; (-) strand; PAM type: NRG; PAM sequence: TGG
aatatttgtccttccactcc

SEQ ID NO: 77569 - DNA, 20 bp, Artificial Sequence
  Description of Artificial Sequence: Synthetic oligonucleotide
  Target: LAMA2; (-) strand; PAM type: NRG; PAM sequence: TAG
tttctgagttttgactattt

SEQ ID NO: 77570 - DNA, 20 bp, Artificial Sequence
  Description of Artificial Sequence: Synthetic oligonucleotide
  Target: LAMA2; (-) strand; PAM type: NRG; PAM sequence: GAG
cattctactctcatgtttct

SEQ ID NO: 77571 - DNA, 20 bp, Artificial Sequence
  Description of Artificial Sequence: Synthetic oligonucleotide
  Target: LAMA2; (-) strand; PAM type: NRG; PAM sequence: TGG
tccccctccaacccagaccc

SEQ ID NO: 77572 - DNA, 20 bp, Artificial Sequence
  Description of Artificial Sequence: Synthetic oligonucleotide
  Target: LAMA2; (-) strand; PAM type: NRG; PAM sequence: CAG
tcctgtttccccctccaacc

SEQ ID NO: 77573 - DNA, 20 bp, Artificial Sequence
  Description of Artificial Sequence: Synthetic oligonucleotide
  Target: LAMA2; (-) strand; PAM type: NRG; PAM sequence: AGG
atgcggtacagtagatctcg

SEQ ID NO: 77574 - DNA, 20 bp, Artificial Sequence
  Description of Artificial Sequence: Synthetic oligonucleotide
  Target: LAMA2; (-) strand; PAM type: NRG; PAM sequence: GAG
tatgcggtacagtagatctc

SEQ ID NO: 77575 - DNA, 20 bp, Artificial Sequence
  Description of Artificial Sequence: Synthetic oligonucleotide
  Target: LAMA2; (-) strand; PAM type: NRG; PAM sequence: TAG
ctaggcactatgcggtacag

SEQ ID NO: 77576 - DNA, 20 bp, Artificial Sequence
  Description of Artificial Sequence: Synthetic oligonucleotide
  Target: LAMA2; (-) strand; PAM type: NRG; PAM sequence: CAG
agtctaggcactatgcggta

SEQ ID NO: 77577 - DNA, 20 bp, Artificial Sequence
  Description of Artificial Sequence: Synthetic oligonucleotide
  Target: LAMA2; (-) strand; PAM type: NRG; PAM sequence: CGG
tgttaagtctaggcactatg

SEQ ID NO: 77578 - DNA, 20 bp, Artificial Sequence
  Description of Artificial Sequence: Synthetic oligonucleotide
  Target: LAMA2; (-) strand; PAM type: NRG; PAM sequence: AGG
gatacagtaatgttaagtct

SEQ ID NO: 77579 - DNA, 20 bp, Artificial Sequence
  Description of Artificial Sequence: Synthetic oligonucleotide
  Target: LAMA2; (-) strand; PAM type: NRG; PAM sequence: TAG
cgatacagtaatgttaagtc

SEQ ID NO: 77580 - DNA, 20 bp, Artificial Sequence
  Description of Artificial Sequence: Synthetic oligonucleotide
  Target: LAMA2; (-) strand; PAM type: NRG; PAM sequence: AAG
gcatacgatacagtaatgtt

SEQ ID NO: 77581 - DNA, 20 bp, Artificial Sequence
  Description of Artificial Sequence: Synthetic oligonucleotide
  Target: LAMA2; (-) strand; PAM type: NRG; PAM sequence: CAG
aaaatttcaagcatacgata

SEQ ID NO: 77582 - DNA, 20 bp, Artificial Sequence
  Description of Artificial Sequence: Synthetic oligonucleotide
  Target: LAMA2; (-) strand; PAM type: NRG; PAM sequence: AAG
gactttgttaggaaaatttc

SEQ ID NO: 77583 - DNA, 20 bp, Artificial Sequence
  Description of Artificial Sequence: Synthetic oligonucleotide
  Target: LAMA2; (-) strand; PAM type: NRG; PAM sequence: AGG
tttgtaagattgactttgtt

SEQ ID NO: 77584 - DNA, 20 bp, Artificial Sequence
  Description of Artificial Sequence: Synthetic oligonucleotide
  Target: LAMA2; (-) strand; PAM type: NRG; PAM sequence: TAG
atttgtaagattgactttgt

SEQ ID NO: 77585 - DNA, 20 bp, Artificial Sequence
  Description of Artificial Sequence: Synthetic oligonucleotide
  Target: LAMA2; (-) strand; PAM type: NRG; PAM sequence: AAG
tttgtgataagaacatttgt

SEQ ID NO: 77586 - DNA, 20 bp, Artificial Sequence
  Description of Artificial Sequence: Synthetic oligonucleotide
  Target: LAMA2; (-) strand; PAM type: NRG; PAM sequence: AAG
tattattattattttgtgat

SEQ ID NO: 77587 - DNA, 20 bp, Artificial Sequence
  Description of Artificial Sequence: Synthetic oligonucleotide
  Target: LAMA2; (-) strand; PAM type: NRG; PAM sequence: AAG
tatatatcaataacctccaa

SEQ ID NO: 77588 - DNA, 20 bp, Artificial Sequence
  Description of Artificial Sequence: Synthetic oligonucleotide
  Target: LAMA2; (-) strand; PAM type: NRG; PAM sequence: CAG
gtttggagataagtatgcac

SEQ ID NO: 77589 - DNA, 20 bp, Artificial Sequence
  Description of Artificial Sequence: Synthetic oligonucleotide
  Target: LAMA2; (-) strand; PAM type: NRG; PAM sequence: AAG
aacctaatgagtttggagat

SEQ ID NO: 77590 - DNA, 20 bp, Artificial Sequence
  Description of Artificial Sequence: Synthetic oligonucleotide
  Target: LAMA2; (-) strand; PAM type: NRG; PAM sequence: GAG
tatacaacctaatgagtttg

SEQ ID NO: 77591 - DNA, 20 bp, Artificial Sequence
  Description of Artificial Sequence: Synthetic oligonucleotide
  Target: LAMA2; (-) strand; PAM type: NRG; PAM sequence: TGG
tgtatacaacctaatgagtt

SEQ ID NO: 77592 - DNA, 20 bp, Artificial Sequence
  Description of Artificial Sequence: Synthetic oligonucleotide
  Target: LAMA2; (-) strand; PAM type: NRG; PAM sequence: GAG
tttgatgtatacaacctaat

SEQ ID NO: 77593 - DNA, 20 bp, Artificial Sequence
  Description of Artificial Sequence: Synthetic oligonucleotide
  Target: LAMA2; (-) strand; PAM type: NRG; PAM sequence: AAG
gaggttgattgacatacaaa

SEQ ID NO: 77594 - DNA, 20 bp, Artificial Sequence
  Description of Artificial Sequence: Synthetic oligonucleotide
  Target: LAMA2; (-) strand; PAM type: NRG; PAM sequence: AGG
gctttaaaaaaaacatgttg

SEQ ID NO: 77595 - DNA, 20 bp, Artificial Sequence
  Description of Artificial Sequence: Synthetic oligonucleotide
  Target: LAMA2; (-) strand; PAM type: NRG; PAM sequence: GAG
tgctttaaaaaaaacatgtt

SEQ ID NO: 77596 - DNA, 20 bp, Artificial Sequence
  Description of Artificial Sequence: Synthetic oligonucleotide
  Target: LAMA2; (-) strand; PAM type: NRG; PAM sequence: AGG
ttgtaataattttaaaaaat

SEQ ID NO: 77597 - DNA, 20 bp, Artificial Sequence
  Description of Artificial Sequence: Synthetic oligonucleotide
  Target: LAMA2; (-) strand; PAM type: NRG; PAM sequence: TAG
gttgtaataattttaaaaaa

SEQ ID NO: 77598 - DNA, 20 bp, Artificial Sequence
  Description of Artificial Sequence: Synthetic oligonucleotide
  Target: LAMA2; (-) strand; PAM type: NRG; PAM sequence: CAG
accacaagttagaaggcttt

SEQ ID NO: 77599 - DNA, 20 bp, Artificial Sequence
  Description of Artificial Sequence: Synthetic oligonucleotide
  Target: LAMA2; (-) strand; PAM type: NRG; PAM sequence: AGG
agaaaacaccacaagttaga

SEQ ID NO: 77600 - DNA, 20 bp, Artificial Sequence
  Description of Artificial Sequence: Synthetic oligonucleotide
  Target: LAMA2; (-) strand; PAM type: NRG; PAM sequence: AAG
aagaaaacaccacaagttag

SEQ ID NO: 77601 - DNA, 20 bp, Artificial Sequence
  Description of Artificial Sequence: Synthetic oligonucleotide
  Target: LAMA2; (-) strand; PAM type: NRG; PAM sequence: TAG
ttcaagaaaacaccacaagt

SEQ ID NO: 77602 - DNA, 20 bp, Artificial Sequence
  Description of Artificial Sequence: Synthetic oligonucleotide
  Target: LAMA2; (-) strand; PAM type: NRG; PAM sequence: AAG
ttatttcaagaaaacaccac

SEQ ID NO: 77603 - DNA, 20 bp, Artificial Sequence
  Description of Artificial Sequence: Synthetic oligonucleotide
  Target: LAMA2; (-) strand; PAM type: NRG; PAM sequence: AAG
caagatacgattattatttc

SEQ ID NO: 77604 - DNA, 20 bp, Artificial Sequence
  Description of Artificial Sequence: Synthetic oligonucleotide
  Target: LAMA2; (-) strand; PAM type: NRG; PAM sequence: AAG
ttagatctcaactattaacc

SEQ ID NO: 77605 - DNA, 20 bp, Artificial Sequence
  Description of Artificial Sequence: Synthetic oligonucleotide
  Target: LAMA2; (-) strand; PAM type: NRG; PAM sequence: TAG
tgaatttaggcctaagcttt

SEQ ID NO: 77606 - DNA, 20 bp, Artificial Sequence
  Description of Artificial Sequence: Synthetic oligonucleotide
  Target: LAMA2; (-) strand; PAM type: NRG; PAM sequence: AAG
ttctatctgaatttaggcct

SEQ ID NO: 77607 - DNA, 20 bp, Artificial Sequence
  Description of Artificial Sequence: Synthetic oligonucleotide
  Target: LAMA2; (-) strand; PAM type: NRG; PAM sequence: AGG
caagctttctatctgaattt

SEQ ID NO: 77608 - DNA, 20 bp, Artificial Sequence
  Description of Artificial Sequence: Synthetic oligonucleotide
  Target: LAMA2; (-) strand; PAM type: NRG; PAM sequence: TAG
ccaagctttctatctgaatt

SEQ ID NO: 77609 - DNA, 20 bp, Artificial Sequence
  Description of Artificial Sequence: Synthetic oligonucleotide
  Target: LAMA2; (-) strand; PAM type: NRG; PAM sequence: AAG
aaacttacaacagatgtgcc

SEQ ID NO: 77610 - DNA, 20 bp, Artificial Sequence
  Description of Artificial Sequence: Synthetic oligonucleotide
  Target: LAMA2; (-) strand; PAM type: NRG; PAM sequence: CAG
cctggtttcaaaacttacaa

SEQ ID NO: 77611 - DNA, 20 bp, Artificial Sequence
  Description of Artificial Sequence: Synthetic oligonucleotide
  Target: LAMA2; (-) strand; PAM type: NRG; PAM sequence: TGG
acaaagatggtctgtgcacc

SEQ ID NO: 77612 - DNA, 20 bp, Artificial Sequence
  Description of Artificial Sequence: Synthetic oligonucleotide
  Target: LAMA2; (-) strand; PAM type: NRG; PAM sequence: TGG
aagatcgtctggaacaaaga

SEQ ID NO: 77613 - DNA, 20 bp, Artificial Sequence
  Description of Artificial Sequence: Synthetic oligonucleotide
  Target: LAMA2; (-) strand; PAM type: NRG; PAM sequence: AAG
tgagaagatcgtctggaaca

SEQ ID NO: 77614 - DNA, 20 bp, Artificial Sequence
  Description of Artificial Sequence: Synthetic oligonucleotide
  Target: LAMA2; (-) strand; PAM type: NRG; PAM sequence: TGG
acatccctgagaagatcgtc

SEQ ID NO: 77615 - DNA, 20 bp, Artificial Sequence
  Description of Artificial Sequence: Synthetic oligonucleotide
  Target: LAMA2; (-) strand; PAM type: NRG; PAM sequence: AAG
actttacaaacatccctgag

SEQ ID NO: 77616 - DNA, 20 bp, Artificial Sequence
  Description of Artificial Sequence: Synthetic oligonucleotide
  Target: LAMA2; (-) strand; PAM type: NRG; PAM sequence: GAG
ttcactttacaaacatccct

SEQ ID NO: 77617 - DNA, 20 bp, Artificial Sequence
  Description of Artificial Sequence: Synthetic oligonucleotide
  Target: LAMA2; (-) strand; PAM type: NRG; PAM sequence: AGG
gacatcatctctaccttcca

SEQ ID NO: 77618 - DNA, 20 bp, Artificial Sequence
  Description of Artificial Sequence: Synthetic oligonucleotide
  Target: LAMA2; (-) strand; PAM type: NRG; PAM sequence: AAG
ggacatcatctctaccttcc

SEQ ID NO: 77619 - DNA, 20 bp, Artificial Sequence
  Description of Artificial Sequence: Synthetic oligonucleotide
  Target: LAMA2; (-) strand; PAM type: NRG; PAM sequence: GGG
cctaccctttgcttcccagg

SEQ ID NO: 77620 - DNA, 20 bp, Artificial Sequence
  Description of Artificial Sequence: Synthetic oligonucleotide
  Target: LAMA2; (-) strand; PAM type: NRG; PAM sequence: GGG
acctaccctttgcttcccag

SEQ ID NO: 77621 - DNA, 20 bp, Artificial Sequence
  Description of Artificial Sequence: Synthetic oligonucleotide
  Target: LAMA2; (-) strand; PAM type: NRG; PAM sequence: GGG
aacctaccctttgcttccca

SEQ ID NO: 77622 - DNA, 20 bp, Artificial Sequence
  Description of Artificial Sequence: Synthetic oligonucleotide
  Target: LAMA2; (-) strand; PAM type: NRG; PAM sequence: AGG
aaacctaccctttgcttccc

SEQ ID NO: 77623 - DNA, 20 bp, Artificial Sequence
  Description of Artificial Sequence: Synthetic oligonucleotide
  Target: LAMA2; (-) strand; PAM type: NRG; PAM sequence: CAG
taaacctaccctttgcttcc

SEQ ID NO: 77624 - DNA, 20 bp, Artificial Sequence
  Description of Artificial Sequence: Synthetic oligonucleotide
  Target: LAMA2; (-) strand; PAM type: NRG; PAM sequence: GAG
tctctctcttcccaagctat

SEQ ID NO: 77625 - DNA, 20 bp, Artificial Sequence
  Description of Artificial Sequence: Synthetic oligonucleotide
  Target: LAMA2; (-) strand; PAM type: NRG; PAM sequence: AAG
gacaccatctctctcttccc

SEQ ID NO: 77626 - DNA, 20 bp, Artificial Sequence
  Description of Artificial Sequence: Synthetic oligonucleotide
  Target: LAMA2; (-) strand; PAM type: NRG; PAM sequence: GAG
atattcccctcatctggagg

SEQ ID NO: 77627 - DNA, 20 bp, Artificial Sequence
  Description of Artificial Sequence: Synthetic oligonucleotide
  Target: LAMA2; (-) strand; PAM type: NRG; PAM sequence: GGG
atatattcccctcatctgga

SEQ ID NO: 77628 - DNA, 20 bp, Artificial Sequence
  Description of Artificial Sequence: Synthetic oligonucleotide
  Target: LAMA2; (-) strand; PAM type: NRG; PAM sequence: AGG
aatatattcccctcatctgg

SEQ ID NO: 77629 - DNA, 20 bp, Artificial Sequence
  Description of Artificial Sequence: Synthetic oligonucleotide
  Target: LAMA2; (-) strand; PAM type: NRG; PAM sequence: GAG
aaatatattcccctcatctg

SEQ ID NO: 77630 - DNA, 20 bp, Artificial Sequence
  Description of Artificial Sequence: Synthetic oligonucleotide
  Target: LAMA2; (-) strand; PAM type: NRG; PAM sequence: TGG
gtaaatatattcccctcatc

SEQ ID NO: 77631 - DNA, 20 bp, Artificial Sequence
  Description of Artificial Sequence: Synthetic oligonucleotide
  Target: LAMA2; (-) strand; PAM type: NRG; PAM sequence: TGG
ttcaaatcttttcttatggg

SEQ ID NO: 77632 - DNA, 20 bp, Artificial Sequence
  Description of Artificial Sequence: Synthetic oligonucleotide
  Target: LAMA2; (-) strand; PAM type: NRG; PAM sequence: GGG
gggttcaaatcttttcttat

SEQ ID NO: 77633 - DNA, 20 bp, Artificial Sequence
  Description of Artificial Sequence: Synthetic oligonucleotide
  Target: LAMA2; (-) strand; PAM type: NRG; PAM sequence: TGG
tgggttcaaatcttttctta

SEQ ID NO: 77634 - DNA, 20 bp, Artificial Sequence
  Description of Artificial Sequence: Synthetic oligonucleotide
  Target: LAMA2; (-) strand; PAM type: NRG; PAM sequence: GGG
agaggaaccctcagcttaat

SEQ ID NO: 77635 - DNA, 20 bp, Artificial Sequence
  Description of Artificial Sequence: Synthetic oligonucleotide
  Target: LAMA2; (-) strand; PAM type: NRG; PAM sequence: TGG
aagaggaaccctcagcttaa

SEQ ID NO: 77636 - DNA, 20 bp, Artificial Sequence
  Description of Artificial Sequence: Synthetic oligonucleotide
  Target: LAMA2; (-) strand; PAM type: NRG; PAM sequence: CAG
tgttacagaagaggaaccct

SEQ ID NO: 77637 - DNA, 20 bp, Artificial Sequence
  Description of Artificial Sequence: Synthetic oligonucleotide
  Target: LAMA2; (-) strand; PAM type: NRG; PAM sequence: AGG
agtgggtggtgttacagaag

SEQ ID NO: 77638 - DNA, 20 bp, Artificial Sequence
  Description of Artificial Sequence: Synthetic oligonucleotide
  Target: LAMA2; (-) strand; PAM type: NRG; PAM sequence: GAG
cagtgggtggtgttacagaa

SEQ ID NO: 77639 - DNA, 20 bp, Artificial Sequence
  Description of Artificial Sequence: Synthetic oligonucleotide
  Target: LAMA2; (-) strand; PAM type: NRG; PAM sequence: AAG
cacagtgggtggtgttacag

SEQ ID NO: 77640 - DNA, 20 bp, Artificial Sequence
  Description of Artificial Sequence: Synthetic oligonucleotide
  Target: LAMA2; (-) strand; PAM type: NRG; PAM sequence: CAG
actcacagtgggtggtgtta

SEQ ID NO: 77641 - DNA, 20 bp, Artificial Sequence
  Description of Artificial Sequence: Synthetic oligonucleotide
  Target: LAMA2; (-) strand; PAM type: NRG; PAM sequence: TGG
atgcctccactcacagtggg

SEQ ID NO: 77642 - DNA, 20 bp, Artificial Sequence
  Description of Artificial Sequence: Synthetic oligonucleotide
  Target: LAMA2; (-) strand; PAM type: NRG; PAM sequence: GGG
ctgatgcctccactcacagt

SEQ ID NO: 77643 - DNA, 20 bp, Artificial Sequence
  Description of Artificial Sequence: Synthetic oligonucleotide
  Target: LAMA2; (-) strand; PAM type: NRG; PAM sequence: TGG
gctgatgcctccactcacag

SEQ ID NO: 77644 - DNA, 20 bp, Artificial Sequence
  Description of Artificial Sequence: Synthetic oligonucleotide
  Target: LAMA2; (-) strand; PAM type: NRG; PAM sequence: CAG
ccagctgatgcctccactca

SEQ ID NO: 77645 - DNA, 20 bp, Artificial Sequence
  Description of Artificial Sequence: Synthetic oligonucleotide
  Target: LAMA2; (-) strand; PAM type: NRG; PAM sequence: CAG
cagagagatagaaagcaggc

SEQ ID NO: 77646 - DNA, 20 bp, Artificial Sequence
  Description of Artificial Sequence: Synthetic oligonucleotide
  Target: LAMA2; (-) strand; PAM type: NRG; PAM sequence: AGG
cctgcagagagatagaaagc

SEQ ID NO: 77647 - DNA, 20 bp, Artificial Sequence
  Description of Artificial Sequence: Synthetic oligonucleotide
  Target: LAMA2; (-) strand; PAM type: NRG; PAM sequence: CAG
tcctgcagagagatagaaag

SEQ ID NO: 77648 - DNA, 20 bp, Artificial Sequence
  Description of Artificial Sequence: Synthetic oligonucleotide
  Target: LAMA2; (-) strand; PAM type: NRG; PAM sequence: AAG
acttcctgcagagagataga

SEQ ID NO: 77649 - DNA, 20 bp, Artificial Sequence
  Description of Artificial Sequence: Synthetic oligonucleotide
  Target: LAMA2; (-) strand; PAM type: NRG; PAM sequence: TAG
ctctacttcctgcagagaga

SEQ ID NO: 77650 - DNA, 20 bp, Artificial Sequence
  Description of Artificial Sequence: Synthetic oligonucleotide
  Target: LAMA2; (-) strand; PAM type: NRG; PAM sequence: GAG
tgggctctacttcctgcaga

SEQ ID NO: 77651 - DNA, 20 bp, Artificial Sequence
  Description of Artificial Sequence: Synthetic oligonucleotide
  Target: LAMA2; (-) strand; PAM type: NRG; PAM sequence: GAG
cctgggctctacttcctgca

SEQ ID NO: 77652 - DNA, 20 bp, Artificial Sequence
  Description of Artificial Sequence: Synthetic oligonucleotide
  Target: LAMA2; (-) strand; PAM type: NRG; PAM sequence: CAG
tgcctgggctctacttcctg

SEQ ID NO: 77653 - DNA, 20 bp, Artificial Sequence
  Description of Artificial Sequence: Synthetic oligonucleotide
  Target: LAMA2; (-) strand; PAM type: NRG; PAM sequence: GGG
atatttggtgccagttgcct

SEQ ID NO: 77654 - DNA, 20 bp, Artificial Sequence
  Description of Artificial Sequence: Synthetic oligonucleotide
  Target: LAMA2; (-) strand; PAM type: NRG; PAM sequence: TGG
catatttggtgccagttgcc

SEQ ID NO: 77655 - DNA, 20 bp, Artificial Sequence
  Description of Artificial Sequence: Synthetic oligonucleotide
  Target: LAMA2; (-) strand; PAM type: NRG; PAM sequence: CAG
agctttggcatatttggtgc

SEQ ID NO: 77656 - DNA, 20 bp, Artificial Sequence
  Description of Artificial Sequence: Synthetic oligonucleotide
  Target: LAMA2; (-) strand; PAM type: NRG; PAM sequence: TGG
agcataagctttggcatatt

SEQ ID NO: 77657 - DNA, 20 bp, Artificial Sequence
  Description of Artificial Sequence: Synthetic oligonucleotide
  Target: LAMA2; (-) strand; PAM type: NRG; PAM sequence: TGG
ccaggaagcagcataagctt

SEQ ID NO: 77658 - DNA, 20 bp, Artificial Sequence
  Description of Artificial Sequence: Synthetic oligonucleotide
  Target: LAMA2; (-) strand; PAM type: NRG; PAM sequence: AAG
cacagcccaggaagcagcat

SEQ ID NO: 77659 - DNA, 20 bp, Artificial Sequence
  Description of Artificial Sequence: Synthetic oligonucleotide
  Target: LAMA2; (-) strand; PAM type: NRG; PAM sequence: CAG
attactcacagcccaggaag

SEQ ID NO: 77660 - DNA, 20 bp, Artificial Sequence
  Description of Artificial Sequence: Synthetic oligonucleotide
  Target: LAMA2; (-) strand; PAM type: NRG; PAM sequence: AAG
tttattactcacagcccagg

SEQ ID NO: 77661 - DNA, 20 bp, Artificial Sequence
  Description of Artificial Sequence: Synthetic oligonucleotide
  Target: LAMA2; (-) strand; PAM type: NRG; PAM sequence: AGG
gactttattactcacagccc

SEQ ID NO: 77662 - DNA, 20 bp, Artificial Sequence
  Description of Artificial Sequence: Synthetic oligonucleotide
  Target: LAMA2; (-) strand; PAM type: NRG; PAM sequence: CAG
ggactttattactcacagcc

SEQ ID NO: 77663 - DNA, 20 bp, Artificial Sequence
  Description of Artificial Sequence: Synthetic oligonucleotide
  Target: LAMA2; (-) strand; PAM type: NRG; PAM sequence: CAG
aaaagggactttattactca

SEQ ID NO: 77664 - DNA, 20 bp, Artificial Sequence
  Description of Artificial Sequence: Synthetic oligonucleotide
  Target: LAMA2; (-) strand; PAM type: NRG; PAM sequence: GGG
gacttctaaaagagggaaaa

SEQ ID NO: 77665 - DNA, 20 bp, Artificial Sequence
  Description of Artificial Sequence: Synthetic oligonucleotide
  Target: LAMA2; (-) strand; PAM type: NRG; PAM sequence: AGG
agacttctaaaagagggaaa

SEQ ID NO: 77666 - DNA, 20 bp, Artificial Sequence
  Description of Artificial Sequence: Synthetic oligonucleotide
  Target: LAMA2; (-) strand; PAM type: NRG; PAM sequence: AAG
gagacttctaaaagagggaa

SEQ ID NO: 77667 - DNA, 20 bp, Artificial Sequence
  Description of Artificial Sequence: Synthetic oligonucleotide
  Target: LAMA2; (-) strand; PAM type: NRG; PAM sequence: GGG
catatgagacttctaaaaga

SEQ ID NO: 77668 - DNA, 20 bp, Artificial Sequence
  Description of Artificial Sequence: Synthetic oligonucleotide
  Target: LAMA2; (-) strand; PAM type: NRG; PAM sequence: AGG
acatatgagacttctaaaag

SEQ ID NO: 77669 - DNA, 20 bp, Artificial Sequence
  Description of Artificial Sequence: Synthetic oligonucleotide
  Target: LAMA2; (-) strand; PAM type: NRG; PAM sequence: GAG
aacatatgagacttctaaaa

SEQ ID NO: 77670 - DNA, 20 bp, Artificial Sequence
  Description of Artificial Sequence: Synthetic oligonucleotide
  Target: LAMA2; (-) strand; PAM type: NRG; PAM sequence: AAG
agaacatatgagacttctaa

SEQ ID NO: 77671 - DNA, 20 bp, Artificial Sequence
  Description of Artificial Sequence: Synthetic oligonucleotide
  Target: LAMA2; (-) strand; PAM type: NRG; PAM sequence: GAG
tggctgctgacagaacatat

SEQ ID NO: 77672 - DNA, 20 bp, Artificial Sequence
  Description of Artificial Sequence: Synthetic oligonucleotide
  Target: LAMA2; (-) strand; PAM type: NRG; PAM sequence: CAG
cacagcttggtggctgctga

SEQ ID NO: 77673 - DNA, 20 bp, Artificial Sequence
  Description of Artificial Sequence: Synthetic oligonucleotide
  Target: LAMA2; (-) strand; PAM type: NRG; PAM sequence: TGG
tttagcctgacacagcttgg

SEQ ID NO: 77674 - DNA, 20 bp, Artificial Sequence
  Description of Artificial Sequence: Synthetic oligonucleotide
  Target: LAMA2; (-) strand; PAM type: NRG; PAM sequence: TGG
caatttagcctgacacagct

SEQ ID NO: 77675 - DNA, 20 bp, Artificial Sequence
  Description of Artificial Sequence: Synthetic oligonucleotide
  Target: LAMA2; (-) strand; PAM type: NRG; PAM sequence: CAG
gacagcaatttagcctgaca

SEQ ID NO: 77676 - DNA, 20 bp, Artificial Sequence
  Description of Artificial Sequence: Synthetic oligonucleotide
  Target: LAMA2; (-) strand; PAM type: NRG; PAM sequence: TAG
ctacttgcaagacagcaatt

SEQ ID NO: 77677 - DNA, 20 bp, Artificial Sequence
  Description of Artificial Sequence: Synthetic oligonucleotide
  Target: LAMA2; (-) strand; PAM type: NRG; PAM sequence: CAG
attttattctacttgcaaga

SEQ ID NO: 77678 - DNA, 20 bp, Artificial Sequence
  Description of Artificial Sequence: Synthetic oligonucleotide
  Target: LAMA2; (-) strand; PAM type: NRG; PAM sequence: AAG
tgggattttattctacttgc

SEQ ID NO: 77679 - DNA, 20 bp, Artificial Sequence
  Description of Artificial Sequence: Synthetic oligonucleotide
  Target: LAMA2; (-) strand; PAM type: NRG; PAM sequence: GGG
aaaaagattgcaaagggtct

SEQ ID NO: 77680 - DNA, 20 bp, Artificial Sequence
  Description of Artificial Sequence: Synthetic oligonucleotide
  Target: LAMA2; (-) strand; PAM type: NRG; PAM sequence: TGG
gaaaaagattgcaaagggtc

SEQ ID NO: 77681 - DNA, 20 bp, Artificial Sequence
  Description of Artificial Sequence: Synthetic oligonucleotide
  Target: LAMA2; (-) strand; PAM type: NRG; PAM sequence: GGG
tttatgaaaaagattgcaaa

SEQ ID NO: 77682 - DNA, 20 bp, Artificial Sequence
  Description of Artificial Sequence: Synthetic oligonucleotide
  Target: LAMA2; (-) strand; PAM type: NRG; PAM sequence: AGG
ttttatgaaaaagattgcaa

SEQ ID NO: 77683 - DNA, 20 bp, Artificial Sequence
  Description of Artificial Sequence: Synthetic oligonucleotide
  Target: LAMA2; (-) strand; PAM type: NRG; PAM sequence: AAG
tttttatgaaaaagattgca

SEQ ID NO: 77684 - DNA, 20 bp, Artificial Sequence
  Description of Artificial Sequence: Synthetic oligonucleotide
  Target: LAMA2; (-) strand; PAM type: NRG; PAM sequence: AAG
ttaaaattttttttatgaaa

SEQ ID NO: 77685 - DNA, 20 bp, Artificial Sequence
  Description of Artificial Sequence: Synthetic oligonucleotide
  Target: LAMA2; (-) strand; PAM type: NRG; PAM sequence: TGG
aactgtatgcggtaaatata

SEQ ID NO: 77686 - DNA, 20 bp, Artificial Sequence
  Description of Artificial Sequence: Synthetic oligonucleotide
  Target: LAMA2; (-) strand; PAM type: NRG; PAM sequence: CGG
aaataattctgaactgtatg

SEQ ID NO: 77687 - DNA, 20 bp, Artificial Sequence
  Description of Artificial Sequence: Synthetic oligonucleotide
  Target: LAMA2; (-) strand; PAM type: NRG; PAM sequence: TGG
ctaaaattggattgtggtgg

SEQ ID NO: 77688 - DNA, 20 bp, Artificial Sequence
  Description of Artificial Sequence: Synthetic oligonucleotide
  Target: LAMA2; (-) strand; PAM type: NRG; PAM sequence: TGG
gatctaaaattggattgtgg

SEQ ID NO: 77689 - DNA, 20 bp, Artificial Sequence
  Description of Artificial Sequence: Synthetic oligonucleotide
  Target: LAMA2; (-) strand; PAM type: NRG; PAM sequence: TGG
aatgatctaaaattggattg

SEQ ID NO: 77690 - DNA, 20 bp, Artificial Sequence
  Description of Artificial Sequence: Synthetic oligonucleotide
  Target: LAMA2; (-) strand; PAM type: NRG; PAM sequence: TGG
ttgttgaaatgatctaaaat

SEQ ID NO: 77691 - DNA, 20 bp, Artificial Sequence
  Description of Artificial Sequence: Synthetic oligonucleotide
  Target: LAMA2; (-) strand; PAM type: NRG; PAM sequence: GAG
cgtgtacaaggtttcttttt

SEQ ID NO: 77692 - DNA, 20 bp, Artificial Sequence
  Description of Artificial Sequence: Synthetic oligonucleotide
  Target: LAMA2; (-) strand; PAM type: NRG; PAM sequence: AGG
aatgacacttaacgtgtaca

SEQ ID NO: 77693 - DNA, 20 bp, Artificial Sequence
  Description of Artificial Sequence: Synthetic oligonucleotide
  Target: LAMA2; (-) strand; PAM type: NRG; PAM sequence: AAG
gaatgacacttaacgtgtac

SEQ ID NO: 77694 - DNA, 20 bp, Artificial Sequence
  Description of Artificial Sequence: Synthetic oligonucleotide
  Target: LAMA2; (-) strand; PAM type: NRG; PAM sequence: AGG
gattttcagggagtgggtac

SEQ ID NO: 77695 - DNA, 20 bp, Artificial Sequence
  Description of Artificial Sequence: Synthetic oligonucleotide
  Target: LAMA2; (-) strand; PAM type: NRG; PAM sequence: CAG
agattttcagggagtgggta

SEQ ID NO: 77696 - DNA, 20 bp, Artificial Sequence
  Description of Artificial Sequence: Synthetic oligonucleotide
  Target: LAMA2; (-) strand; PAM type: NRG; PAM sequence: GGG
caagcagattttcagggagt

SEQ ID NO: 77697 - DNA, 20 bp, Artificial Sequence
  Description of Artificial Sequence: Synthetic oligonucleotide
  Target: LAMA2; (-) strand; PAM type: NRG; PAM sequence: TGG
gcaagcagattttcagggag

SEQ ID NO: 77698 - DNA, 20 bp, Artificial Sequence
  Description of Artificial Sequence: Synthetic oligonucleotide
  Target: LAMA2; (-) strand; PAM type: NRG; PAM sequence: GAG
agagcaagcagattttcagg

SEQ ID NO: 77699 - DNA, 20 bp, Artificial Sequence
  Description of Artificial Sequence: Synthetic oligonucleotide
  Target: LAMA2; (-) strand; PAM type: NRG; PAM sequence: GGG
ctagagcaagcagattttca

SEQ ID NO: 77700 - DNA, 20 bp, Artificial Sequence
  Description of Artificial Sequence: Synthetic oligonucleotide
  Target: LAMA2; (-) strand; PAM type: NRG; PAM sequence: AGG
gctagagcaagcagattttc

SEQ ID NO: 77701 - DNA, 20 bp, Artificial Sequence
  Description of Artificial Sequence: Synthetic oligonucleotide
  Target: LAMA2; (-) strand; PAM type: NRG; PAM sequence: CAG
agctagagcaagcagatttt

SEQ ID NO: 77702 - DNA, 20 bp, Artificial Sequence
  Description of Artificial Sequence: Synthetic oligonucleotide
  Target: LAMA2; (-) strand; PAM type: NRG; PAM sequence: CAG
tccaacacagctagagcaag

SEQ ID NO: 77703 - DNA, 20 bp, Artificial Sequence
  Description of Artificial Sequence: Synthetic oligonucleotide
  Target: LAMA2; (-) strand; PAM type: NRG; PAM sequence: AAG
caatccaacacagctagagc

SEQ ID NO: 77704 - DNA, 20 bp, Artificial Sequence
  Description of Artificial Sequence: Synthetic oligonucleotide
  Target: LAMA2; (-) strand; PAM type: NRG; PAM sequence: GAG
acatcaatccaacacagcta

SEQ ID NO: 77705 - DNA, 20 bp, Artificial Sequence
  Description of Artificial Sequence: Synthetic oligonucleotide
  Target: LAMA2; (-) strand; PAM type: NRG; PAM sequence: TAG
tgacatcaatccaacacagc

SEQ ID NO: 77706 - DNA, 20 bp, Artificial Sequence
  Description of Artificial Sequence: Synthetic oligonucleotide
  Target: LAMA2; (-) strand; PAM type: NRG; PAM sequence: CAG
gttctgacatcaatccaaca

SEQ ID NO: 77707 - DNA, 20 bp, Artificial Sequence
  Description of Artificial Sequence: Synthetic oligonucleotide
  Target: LAMA2; (-) strand; PAM type: NRG; PAM sequence: AAG
tttgtcccgagttgctgtga

SEQ ID NO: 77708 - DNA, 20 bp, Artificial Sequence
  Description of Artificial Sequence: Synthetic oligonucleotide
  Target: LAMA2; (-) strand; PAM type: NRG; PAM sequence: GAG
aagccactatcatttgtccc

SEQ ID NO: 77709 - DNA, 20 bp, Artificial Sequence
  Description of Artificial Sequence: Synthetic oligonucleotide
  Target: LAMA2; (-) strand; PAM type: NRG; PAM sequence: AAG
tcatgctgctaccctgctcc

SEQ ID NO: 77710 - DNA, 20 bp, Artificial Sequence
  Description of Artificial Sequence: Synthetic oligonucleotide
  Target: LAMA2; (-) strand; PAM type: NRG; PAM sequence: TGG
aattggtcaggaaatactat

SEQ ID NO: 77711 - DNA, 20 bp, Artificial Sequence
  Description of Artificial Sequence: Synthetic oligonucleotide
  Target: LAMA2; (-) strand; PAM type: NRG; PAM sequence: AGG
cttggcagagccaattggtc

SEQ ID NO: 77712 - DNA, 20 bp, Artificial Sequence
  Description of Artificial Sequence: Synthetic oligonucleotide
  Target: LAMA2; (-) strand; PAM type: NRG; PAM sequence: CAG
tcttggcagagccaattggt

SEQ ID NO: 77713 - DNA, 20 bp, Artificial Sequence
  Description of Artificial Sequence: Synthetic oligonucleotide
  Target: LAMA2; (-) strand; PAM type: NRG; PAM sequence: TGG
atcctcttggcagagccaat

SEQ ID NO: 77714 - DNA, 20 bp, Artificial Sequence
  Description of Artificial Sequence: Synthetic oligonucleotide
  Target: LAMA2; (-) strand; PAM type: NRG; PAM sequence: GAG
atcagcacatcctcttggca

SEQ ID NO: 77715 - DNA, 20 bp, Artificial Sequence
  Description of Artificial Sequence: Synthetic oligonucleotide
  Target: LAMA2; (-) strand; PAM type: NRG; PAM sequence: CAG
tgatcagcacatcctcttgg

SEQ ID NO: 77716 - DNA, 20 bp, Artificial Sequence
  Description of Artificial Sequence: Synthetic oligonucleotide
  Target: LAMA2; (-) strand; PAM type: NRG; PAM sequence: TGG
aattgatcagcacatcctct

SEQ ID NO: 77717 - DNA, 20 bp, Artificial Sequence
  Description of Artificial Sequence: Synthetic oligonucleotide
  Target: LAMA2; (-) strand; PAM type: NRG; PAM sequence: CAG
acacctcacggaaaattgat

SEQ ID NO: 77718 - DNA, 20 bp, Artificial Sequence
  Description of Artificial Sequence: Synthetic oligonucleotide
  Target: LAMA2; (-) strand; PAM type: NRG; PAM sequence: CGG
catctcattctcacacctca

SEQ ID NO: 77719 - DNA, 20 bp, Artificial Sequence
  Description of Artificial Sequence: Synthetic oligonucleotide
  Target: LAMA2; (-) strand; PAM type: NRG; PAM sequence: CAG
aaaaccatggactcatccct

SEQ ID NO: 77720 - DNA, 20 bp, Artificial Sequence
  Description of Artificial Sequence: Synthetic oligonucleotide
  Target: LAMA2; (-) strand; PAM type: NRG; PAM sequence: TGG
ctttgctcatgccaaaacca

SEQ ID NO: 77721 - DNA, 20 bp, Artificial Sequence
  Description of Artificial Sequence: Synthetic oligonucleotide
  Target: LAMA2; (-) strand; PAM type: NRG; PAM sequence: AAG
gtcttccccaactcatttca

SEQ ID NO: 77722 - DNA, 20 bp, Artificial Sequence
  Description of Artificial Sequence: Synthetic oligonucleotide
  Target: LAMA2; (-) strand; PAM type: NRG; PAM sequence: CAG
gtcaaaacctgctatgccca

SEQ ID NO: 77723 - DNA, 20 bp, Artificial Sequence
  Description of Artificial Sequence: Synthetic oligonucleotide
  Target: LAMA2; (-) strand; PAM type: NRG; PAM sequence: CAG
aaatgtctaatagacatttt

SEQ ID NO: 77724 - DNA, 20 bp, Artificial Sequence
  Description of Artificial Sequence: Synthetic oligonucleotide
  Target: LAMA2; (-) strand; PAM type: NRG; PAM sequence: TAG
agcttcaccaaaatgtctaa

SEQ ID NO: 77725 - DNA, 20 bp, Artificial Sequence
  Description of Artificial Sequence: Synthetic oligonucleotide
  Target: LAMA2; (-) strand; PAM type: NRG; PAM sequence: CAG
aatactatacactatctatt

SEQ ID NO: 77726 - DNA, 20 bp, Artificial Sequence
  Description of Artificial Sequence: Synthetic oligonucleotide
  Target: LAMA2; (-) strand; PAM type: NRG; PAM sequence: CAG
agcatttctcatctgaattc

SEQ ID NO: 77727 - DNA, 20 bp, Artificial Sequence
  Description of Artificial Sequence: Synthetic oligonucleotide
  Target: LAMA2; (-) strand; PAM type: NRG; PAM sequence: CAG
ctctaattcgtatctttaag

SEQ ID NO: 77728 - DNA, 20 bp, Artificial Sequence
  Description of Artificial Sequence: Synthetic oligonucleotide
  Target: LAMA2; (-) strand; PAM type: NRG; PAM sequence: AAG
attctctaattcgtatcttt

SEQ ID NO: 77729 - DNA, 20 bp, Artificial Sequence
  Description of Artificial Sequence: Synthetic oligonucleotide
  Target: LAMA2; (-) strand; PAM type: NRG; PAM sequence: CAG
acttcctgggtgatattatg

SEQ ID NO: 77730 - DNA, 20 bp, Artificial Sequence
  Description of Artificial Sequence: Synthetic oligonucleotide
  Target: LAMA2; (-) strand; PAM type: NRG; PAM sequence: GGG
taggtcttcttgtacttcct

SEQ ID NO: 77731 - DNA, 20 bp, Artificial Sequence
  Description of Artificial Sequence: Synthetic oligonucleotide
  Target: LAMA2; (-) strand; PAM type: NRG; PAM sequence: TGG
ctaggtcttcttgtacttcc

SEQ ID NO: 77732 - DNA, 20 bp, Artificial Sequence
  Description of Artificial Sequence: Synthetic oligonucleotide
  Target: LAMA2; (-) strand; PAM type: NRG; PAM sequence: AGG
tctcagactgttacttttct

SEQ ID NO: 77733 - DNA, 20 bp, Artificial Sequence
  Description of Artificial Sequence: Synthetic oligonucleotide
  Target: LAMA2; (-) strand; PAM type: NRG; PAM sequence: TAG
ttctcagactgttacttttc

SEQ ID NO: 77734 - DNA, 20 bp, Artificial Sequence
  Description of Artificial Sequence: Synthetic oligonucleotide
  Target: LAMA2; (-) strand; PAM type: NRG; PAM sequence: CAG
gttccttagagctcagttct

SEQ ID NO: 77735 - DNA, 20 bp, Artificial Sequence
  Description of Artificial Sequence: Synthetic oligonucleotide
  Target: LAMA2; (-) strand; PAM type: NRG; PAM sequence: CAG
ggtagatgttccttagagct

SEQ ID NO: 77736 - DNA, 20 bp, Artificial Sequence
  Description of Artificial Sequence: Synthetic oligonucleotide
  Target: LAMA2; (-) strand; PAM type: NRG; PAM sequence: GAG
ctaaaggtagatgttcctta

SEQ ID NO: 77737 - DNA, 20 bp, Artificial Sequence
  Description of Artificial Sequence: Synthetic oligonucleotide
  Target: LAMA2; (-) strand; PAM type: NRG; PAM sequence: TAG
ctctaaaggtagatgttcct

SEQ ID NO: 77738 - DNA, 20 bp, Artificial Sequence
  Description of Artificial Sequence: Synthetic oligonucleotide
  Target: LAMA2; (-) strand; PAM type: NRG; PAM sequence: TAG
atctctctgacctctaaagg

SEQ ID NO: 77739 - DNA, 20 bp, Artificial Sequence
  Description of Artificial Sequence: Synthetic oligonucleotide
  Target: LAMA2; (-) strand; PAM type: NRG; PAM sequence: AGG
ttcatctctctgacctctaa

SEQ ID NO: 77740 - DNA, 20 bp, Artificial Sequence
  Description of Artificial Sequence: Synthetic oligonucleotide
  Target: LAMA2; (-) strand; PAM type: NRG; PAM sequence: AAG
cttcatctctctgacctcta

SEQ ID NO: 77741 - DNA, 20 bp, Artificial Sequence
  Description of Artificial Sequence: Synthetic oligonucleotide
  Target: LAMA2; (-) strand; PAM type: NRG; PAM sequence: AAG
tgcttgctccttggttttac

SEQ ID NO: 77742 - DNA, 20 bp, Artificial Sequence
  Description of Artificial Sequence: Synthetic oligonucleotide
  Target: LAMA2; (-) strand; PAM type: NRG; PAM sequence: TGG
aactgtgtgtgcttgctcct

SEQ ID NO: 77743 - DNA, 20 bp, Artificial Sequence
  Description of Artificial Sequence: Synthetic oligonucleotide
  Target: LAMA2; (-) strand; PAM type: NRG; PAM sequence: GGG
aacgtttgcaatgctcttat

SEQ ID NO: 77744 - DNA, 20 bp, Artificial Sequence
  Description of Artificial Sequence: Synthetic oligonucleotide
  Target: LAMA2; (-) strand; PAM type: NRG; PAM sequence: TGG
taacgtttgcaatgctctta

SEQ ID NO: 77745 - DNA, 20 bp, Artificial Sequence
  Description of Artificial Sequence: Synthetic oligonucleotide
  Target: LAMA2; (-) strand; PAM type: NRG; PAM sequence: GAG
ttattttcacatccaacaaa

SEQ ID NO: 77746 - DNA, 20 bp, Artificial Sequence
  Description of Artificial Sequence: Synthetic oligonucleotide
  Target: LAMA2; (-) strand; PAM type: NRG; PAM sequence: AAG
gattattttcacatccaaca

SEQ ID NO: 77747 - DNA, 20 bp, Artificial Sequence
  Description of Artificial Sequence: Synthetic oligonucleotide
  Target: LAMA2; (-) strand; PAM type: NRG; PAM sequence: AAG
tctaagcacacatttcccaa

SEQ ID NO: 77748 - DNA, 20 bp, Artificial Sequence
  Description of Artificial Sequence: Synthetic oligonucleotide
  Target: LAMA2; (-) strand; PAM type: NRG; PAM sequence: AAG
tatgcatcacatcaaggtct

SEQ ID NO: 77749 - DNA, 20 bp, Artificial Sequence
  Description of Artificial Sequence: Synthetic oligonucleotide
  Target: LAMA2; (-) strand; PAM type: NRG; PAM sequence: AGG
tgtccctatgcatcacatca

SEQ ID NO: 77750 - DNA, 20 bp, Artificial Sequence
  Description of Artificial Sequence: Synthetic oligonucleotide
  Target: LAMA2; (-) strand; PAM type: NRG; PAM sequence: AAG
ttgtccctatgcatcacatc

SEQ ID NO: 77751 - DNA, 20 bp, Artificial Sequence
  Description of Artificial Sequence: Synthetic oligonucleotide
  Target: LAMA2; (-) strand; PAM type: NRG; PAM sequence: TAG
tcttaggaagcaaatagaat

SEQ ID NO: 77752 - DNA, 20 bp, Artificial Sequence
  Description of Artificial Sequence: Synthetic oligonucleotide
  Target: LAMA2; (-) strand; PAM type: NRG; PAM sequence: TAG
tcattttcttaggaagcaaa

SEQ ID NO: 77753 - DNA, 20 bp, Artificial Sequence
  Description of Artificial Sequence: Synthetic oligonucleotide
  Target: LAMA2; (-) strand; PAM type: NRG; PAM sequence: AAG
taacatttcattttcttagg

SEQ ID NO: 77754 - DNA, 20 bp, Artificial Sequence
  Description of Artificial Sequence: Synthetic oligonucleotide
  Target: LAMA2; (-) strand; PAM type: NRG; PAM sequence: AGG
tagtaacatttcattttctt

SEQ ID NO: 77755 - DNA, 20 bp, Artificial Sequence
  Description of Artificial Sequence: Synthetic oligonucleotide
  Target: LAMA2; (-) strand; PAM type: NRG; PAM sequence: TAG
ttagtaacatttcattttct

SEQ ID NO: 77756 - DNA, 20 bp, Artificial Sequence
  Description of Artificial Sequence: Synthetic oligonucleotide
  Target: LAMA2; (-) strand; PAM type: NRG; PAM sequence: TAG
ttgccctgacgctgtttatt

SEQ ID NO: 77757 - DNA, 20 bp, Artificial Sequence
  Description of Artificial Sequence: Synthetic oligonucleotide
  Target: LAMA2; (-) strand; PAM type: NRG; PAM sequence: TGG
caagtttttctttatggacc

SEQ ID NO: 77758 - DNA, 20 bp, Artificial Sequence
  Description of Artificial Sequence: Synthetic oligonucleotide
  Target: LAMA2; (-) strand; PAM type: NRG; PAM sequence: TGG
gctgtgcaagtttttcttta

SEQ ID NO: 77759 - DNA, 20 bp, Artificial Sequence
  Description of Artificial Sequence: Synthetic oligonucleotide
  Target: LAMA2; (-) strand; PAM type: NRG; PAM sequence: AAG
ttttattcaccatgctgtgc

SEQ ID NO: 77760 - DNA, 20 bp, Artificial Sequence
  Description of Artificial Sequence: Synthetic oligonucleotide
  Target: LAMA2; (-) strand; PAM type: NRG; PAM sequence: TAG
gcatttgaaatttactcttt

SEQ ID NO: 77761 - DNA, 20 bp, Artificial Sequence
  Description of Artificial Sequence: Synthetic oligonucleotide
  Target: LAMA2; (-) strand; PAM type: NRG; PAM sequence: GAG
actaatattttttatgatga

SEQ ID NO: 77762 - DNA, 20 bp, Artificial Sequence
  Description of Artificial Sequence: Synthetic oligonucleotide
  Target: LAMA2; (-) strand; PAM type: NRG; PAM sequence: GAG
atactaatattttttatgat

SEQ ID NO: 77763 - DNA, 20 bp, Artificial Sequence
  Description of Artificial Sequence: Synthetic oligonucleotide
  Target: LAMA2; (-) strand; PAM type: NRG; PAM sequence: TAG
gtggaataattcaattaagc

SEQ ID NO: 77764 - DNA, 20 bp, Artificial Sequence
  Description of Artificial Sequence: Synthetic oligonucleotide
  Target: LAMA2; (-) strand; PAM type: NRG; PAM sequence: AAG
caatgtggaataattcaatt

SEQ ID NO: 77765 - DNA, 20 bp, Artificial Sequence
  Description of Artificial Sequence: Synthetic oligonucleotide
  Target: LAMA2; (-) strand; PAM type: NRG; PAM sequence: TGG
tataatatatgaatgcaatg

SEQ ID NO: 77766 - DNA, 20 bp, Artificial Sequence
  Description of Artificial Sequence: Synthetic oligonucleotide
  Target: LAMA2; (-) strand; PAM type: NRG; PAM sequence: AAG
atgtaaatttatggggtaca

SEQ ID NO: 77767 - DNA, 20 bp, Artificial Sequence
  Description of Artificial Sequence: Synthetic oligonucleotide
  Target: LAMA2; (-) strand; PAM type: NRG; PAM sequence: GGG
tctaattatgtaaatttatg

SEQ ID NO: 77768 - DNA, 20 bp, Artificial Sequence
  Description of Artificial Sequence: Synthetic oligonucleotide
  Target: LAMA2; (-) strand; PAM type: NRG; PAM sequence: GGG
ttctaattatgtaaatttat

SEQ ID NO: 77769 - DNA, 20 bp, Artificial Sequence
  Description of Artificial Sequence: Synthetic oligonucleotide
  Target: LAMA2; (-) strand; PAM type: NRG; PAM sequence: TGG
tttctaattatgtaaattta

SEQ ID NO: 77770 - DNA, 20 bp, Artificial Sequence
  Description of Artificial Sequence: Synthetic oligonucleotide
  Target: LAMA2; (-) strand; PAM type: NRG; PAM sequence: TGG
ttttgcctggcgttttttga

SEQ ID NO: 77771 - DNA, 20 bp, Artificial Sequence
  Description of Artificial Sequence: Synthetic oligonucleotide
  Target: LAMA2; (-) strand; PAM type: NRG; PAM sequence: TGG
gtatatcacatatttttgcc

SEQ ID NO: 77772 - DNA, 20 bp, Artificial Sequence
  Description of Artificial Sequence: Synthetic oligonucleotide
  Target: LAMA2; (-) strand; PAM type: NRG; PAM sequence: AAG
gtaggtttaaatatgggtat

SEQ ID NO: 77773 - DNA, 20 bp, Artificial Sequence
  Description of Artificial Sequence: Synthetic oligonucleotide
  Target: LAMA2; (-) strand; PAM type: NRG; PAM sequence: GGG
tatggtgtaggtttaaatat

SEQ ID NO: 77774 - DNA, 20 bp, Artificial Sequence
  Description of Artificial Sequence: Synthetic oligonucleotide
  Target: LAMA2; (-) strand; PAM type: NRG; PAM sequence: TGG
ttatggtgtaggtttaaata

SEQ ID NO: 77775 - DNA, 20 bp, Artificial Sequence
  Description of Artificial Sequence: Synthetic oligonucleotide
  Target: LAMA2; (-) strand; PAM type: NRG; PAM sequence: AGG
ttaaatataatttatggtgt

SEQ ID NO: 77776 - DNA, 20 bp, Artificial Sequence
  Description of Artificial Sequence: Synthetic oligonucleotide
  Target: LAMA2; (-) strand; PAM type: NRG; PAM sequence: TAG
tttaaatataatttatggtg

SEQ ID NO: 77777 - DNA, 20 bp, Artificial Sequence
  Description of Artificial Sequence: Synthetic oligonucleotide
  Target: LAMA2; (-) strand; PAM type: NRG; PAM sequence: TGG
ataaatttaaatataattta

SEQ ID NO: 77778 - DNA, 20 bp, Artificial Sequence
  Description of Artificial Sequence: Synthetic oligonucleotide
  Target: LAMA2; (-) strand; PAM type: NRG; PAM sequence: CAG
ttactgaaaacagcagcagg

SEQ ID NO: 77779 - DNA, 20 bp, Artificial Sequence
  Description of Artificial Sequence: Synthetic oligonucleotide
  Target: LAMA2; (-) strand; PAM type: NRG; PAM sequence: AGG
taattactgaaaacagcagc

SEQ ID NO: 77780 - DNA, 20 bp, Artificial Sequence
  Description of Artificial Sequence: Synthetic oligonucleotide
  Target: LAMA2; (-) strand; PAM type: NRG; PAM sequence: CAG
ttaattactgaaaacagcag

SEQ ID NO: 77781 - DNA, 20 bp, Artificial Sequence
  Description of Artificial Sequence: Synthetic oligonucleotide
  Target: LAMA2; (-) strand; PAM type: NRG; PAM sequence: CAG
atattaattactgaaaacag

SEQ ID NO: 77782 - DNA, 20 bp, Artificial Sequence
  Description of Artificial Sequence: Synthetic oligonucleotide
  Target: LAMA2; (-) strand; PAM type: NRG; PAM sequence: CAG
atgatattaattactgaaaa

SEQ ID NO: 77783 - DNA, 20 bp, Artificial Sequence
  Description of Artificial Sequence: Synthetic oligonucleotide
  Target: LAMA2; (-) strand; PAM type: NRG; PAM sequence: GAG
gtttgttttattcaaaatat

SEQ ID NO: 77784 - DNA, 20 bp, Artificial Sequence
  Description of Artificial Sequence: Synthetic oligonucleotide
  Target: LAMA2; (-) strand; PAM type: NRG; PAM sequence: AAG
agttcatttaataatgtgta

SEQ ID NO: 77785 - DNA, 20 bp, Artificial Sequence
  Description of Artificial Sequence: Synthetic oligonucleotide
  Target: LAMA2; (-) strand; PAM type: NRG; PAM sequence: TAG
agaaacaaaatttgtcagcg

SEQ ID NO: 77786 - DNA, 20 bp, Artificial Sequence
  Description of Artificial Sequence: Synthetic oligonucleotide
  Target: LAMA2; (-) strand; PAM type: NRG; PAM sequence: CAG
aaaaaagaaacaaaatttgt

SEQ ID NO: 77787 - DNA, 20 bp, Artificial Sequence
  Description of Artificial Sequence: Synthetic oligonucleotide
  Target: LAMA2; (-) strand; PAM type: NRG; PAM sequence: AAG
gtttttctggttctcaaaaa

SEQ ID NO: 77788 - DNA, 20 bp, Artificial Sequence
  Description of Artificial Sequence: Synthetic oligonucleotide
  Target: LAMA2; (-) strand; PAM type: NRG; PAM sequence: TGG
tctaagtataattgtttttc

SEQ ID NO: 77789 - DNA, 20 bp, Artificial Sequence
  Description of Artificial Sequence: Synthetic oligonucleotide
  Target: LAMA2; (-) strand; PAM type: NRG; PAM sequence: AAG
acattttagatggcccatct

SEQ ID NO: 77790 - DNA, 20 bp, Artificial Sequence
  Description of Artificial Sequence: Synthetic oligonucleotide
  Target: LAMA2; (-) strand; PAM type: NRG; PAM sequence: TGG
agctggaaggacattttaga

SEQ ID NO: 77791 - DNA, 20 bp, Artificial Sequence
  Description of Artificial Sequence: Synthetic oligonucleotide
  Target: LAMA2; (-) strand; PAM type: NRG; PAM sequence: TAG
cacaagctggaaggacattt

SEQ ID NO: 77792 - DNA, 20 bp, Artificial Sequence
  Description of Artificial Sequence: Synthetic oligonucleotide
  Target: LAMA2; (-) strand; PAM type: NRG; PAM sequence: AGG
aacctactccacaagctgga

SEQ ID NO: 77793 - DNA, 20 bp, Artificial Sequence
  Description of Artificial Sequence: Synthetic oligonucleotide
  Target: LAMA2; (-) strand; PAM type: NRG; PAM sequence: AAG
caacctactccacaagctgg

SEQ ID NO: 77794 - DNA, 20 bp, Artificial Sequence
  Description of Artificial Sequence: Synthetic oligonucleotide
  Target: LAMA2; (-) strand; PAM type: NRG; PAM sequence: TGG
acacaacctactccacaagc

SEQ ID NO: 77795 - DNA, 20 bp, Artificial Sequence
  Description of Artificial Sequence: Synthetic oligonucleotide
  Target: LAMA2; (-) strand; PAM type: NRG; PAM sequence: AAG
acaaacacaacctactccac

SEQ ID NO: 77796 - DNA, 20 bp, Artificial Sequence
  Description of Artificial Sequence: Synthetic oligonucleotide
  Target: LAMA2; (-) strand; PAM type: NRG; PAM sequence: CAG
tagcatttcaatttgtcaaa

SEQ ID NO: 77797 - DNA, 20 bp, Artificial Sequence
  Description of Artificial Sequence: Synthetic oligonucleotide
  Target: LAMA2; (-) strand; PAM type: NRG; PAM sequence: TAG
tggaaatgataaatcataat

SEQ ID NO: 77798 - DNA, 20 bp, Artificial Sequence
  Description of Artificial Sequence: Synthetic oligonucleotide
  Target: LAMA2; (-) strand; PAM type: NRG; PAM sequence: TGG
tatctggatatttgatgtca

SEQ ID NO: 77799 - DNA, 20 bp, Artificial Sequence
  Description of Artificial Sequence: Synthetic oligonucleotide
  Target: LAMA2; (-) strand; PAM type: NRG; PAM sequence: TGG
catcaacgtttattactatc

SEQ ID NO: 77800 - DNA, 20 bp, Artificial Sequence
  Description of Artificial Sequence: Synthetic oligonucleotide
  Target: LAMA2; (-) strand; PAM type: NRG; PAM sequence: TAG
ctgaaactgaaaaatatagt

SEQ ID NO: 77801 - DNA, 20 bp, Artificial Sequence
  Description of Artificial Sequence: Synthetic oligonucleotide
  Target: LAMA2; (-) strand; PAM type: NRG; PAM sequence: TAG
ctggctgaaactgaaaaata

SEQ ID NO: 77802 - DNA, 20 bp, Artificial Sequence
  Description of Artificial Sequence: Synthetic oligonucleotide
  Target: LAMA2; (-) strand; PAM type: NRG; PAM sequence: TGG
cttacgtgatgccaaacatc

SEQ ID NO: 77803 - DNA, 20 bp, Artificial Sequence
  Description of Artificial Sequence: Synthetic oligonucleotide
  Target: LAMA2; (-) strand; PAM type: NRG; PAM sequence: TGG
atttttatgtaaaactaagg

SEQ ID NO: 77804 - DNA, 20 bp, Artificial Sequence
  Description of Artificial Sequence: Synthetic oligonucleotide
  Target: LAMA2; (-) strand; PAM type: NRG; PAM sequence: AGG
tttatttttatgtaaaacta

SEQ ID NO: 77805 - DNA, 20 bp, Artificial Sequence
  Description of Artificial Sequence: Synthetic oligonucleotide
  Target: LAMA2; (-) strand; PAM type: NRG; PAM sequence: AAG
ttttatttttatgtaaaact

SEQ ID NO: 77806 - DNA, 20 bp, Artificial Sequence
  Description of Artificial Sequence: Synthetic oligonucleotide
  Target: LAMA2; (-) strand; PAM type: NRG; PAM sequence: AAG
cattatgataagccagactc

SEQ ID NO: 77807 - DNA, 20 bp, Artificial Sequence
  Description of Artificial Sequence: Synthetic oligonucleotide
  Target: LAMA2; (-) strand; PAM type: NRG; PAM sequence: CAG
tcctccccattatgataagc

SEQ ID NO: 77808 - DNA, 20 bp, Artificial Sequence
  Description of Artificial Sequence: Synthetic oligonucleotide
  Target: LAMA2; (-) strand; PAM type: NRG; PAM sequence: AAG
agtttcctccccattatgat

SEQ ID NO: 77809 - DNA, 20 bp, Artificial Sequence
  Description of Artificial Sequence: Synthetic oligonucleotide
  Target: LAMA2; (-) strand; PAM type: NRG; PAM sequence: TAG
ccattctgcttcattcatat

SEQ ID NO: 77810 - DNA, 20 bp, Artificial Sequence
  Description of Artificial Sequence: Synthetic oligonucleotide
  Target: LAMA2; (-) strand; PAM type: NRG; PAM sequence: GAG
ccagtagaattgtacacatt

SEQ ID NO: 77811 - DNA, 20 bp, Artificial Sequence
  Description of Artificial Sequence: Synthetic oligonucleotide
  Target: LAMA2; (-) strand; PAM type: NRG; PAM sequence: TAG
tattgtaaaagtcttaccag

SEQ ID NO: 77812 - DNA, 20 bp, Artificial Sequence
  Description of Artificial Sequence: Synthetic oligonucleotide
  Target: LAMA2; (-) strand; PAM type: NRG; PAM sequence: CAG
tgatattgtaaaagtcttac

SEQ ID NO: 77813 - DNA, 20 bp, Artificial Sequence
  Description of Artificial Sequence: Synthetic oligonucleotide
  Target: LAMA2; (-) strand; PAM type: NRG; PAM sequence: AAG
ttttatttatgatattgtaa

SEQ ID NO: 77814 - DNA, 20 bp, Artificial Sequence
  Description of Artificial Sequence: Synthetic oligonucleotide
  Target: LAMA2; (-) strand; PAM type: NRG; PAM sequence: AAG
tttgaaagacacttatttta

SEQ ID NO: 77815 - DNA, 20 bp, Artificial Sequence
  Description of Artificial Sequence: Synthetic oligonucleotide
  Target: LAMA2; (-) strand; PAM type: NRG; PAM sequence: AAG
ttgtatttgtaaaagtttga

SEQ ID NO: 77816 - DNA, 20 bp, Artificial Sequence
  Description of Artificial Sequence: Synthetic oligonucleotide
  Target: LAMA2; (-) strand; PAM type: NRG; PAM sequence: AAG
ggctttctttgtatttgtaa

SEQ ID NO: 77817 - DNA, 20 bp, Artificial Sequence
  Description of Artificial Sequence: Synthetic oligonucleotide
  Target: LAMA2; (-) strand; PAM type: NRG; PAM sequence: TGG
tcaaaattgggttttgattc

SEQ ID NO: 77818 - DNA, 20 bp, Artificial Sequence
  Description of Artificial Sequence: Synthetic oligonucleotide
  Target: LAMA2; (-) strand; PAM type: NRG; PAM sequence: GGG
aacacttgatattcaaaatt

SEQ ID NO: 77819 - DNA, 20 bp, Artificial Sequence
  Description of Artificial Sequence: Synthetic oligonucleotide
  Target: LAMA2; (-) strand; PAM type: NRG; PAM sequence: TGG
taacacttgatattcaaaat

SEQ ID NO: 77820 - DNA, 20 bp, Artificial Sequence
  Description of Artificial Sequence: Synthetic oligonucleotide
  Target: LAMA2; (-) strand; PAM type: NRG; PAM sequence: CAG
atttgtattgatgatatatt

SEQ ID NO: 77821 - DNA, 20 bp, Artificial Sequence
  Description of Artificial Sequence: Synthetic oligonucleotide
  Target: LAMA2; (-) strand; PAM type: NRG; PAM sequence: GGG
atgcttgaaataacatctga

SEQ ID NO: 77822 - DNA, 20 bp, Artificial Sequence
  Description of Artificial Sequence: Synthetic oligonucleotide
  Target: LAMA2; (-) strand; PAM type: NRG; PAM sequence: AGG
tatgcttgaaataacatctg

SEQ ID NO: 77823 - DNA, 20 bp, Artificial Sequence
  Description of Artificial Sequence: Synthetic oligonucleotide
  Target: LAMA2; (-) strand; PAM type: NRG; PAM sequence: GAG
atatgcttgaaataacatct

SEQ ID NO: 77824 - DNA, 20 bp, Artificial Sequence
  Description of Artificial Sequence: Synthetic oligonucleotide
  Target: LAMA2; (-) strand; PAM type: NRG; PAM sequence: AGG
ggatcttaaatatatattca

SEQ ID NO: 77825 - DNA, 20 bp, Artificial Sequence
  Description of Artificial Sequence: Synthetic oligonucleotide
  Target: LAMA2; (-) strand; PAM type: NRG; PAM sequence: AAG
cggatcttaaatatatattc

SEQ ID NO: 77826 - DNA, 20 bp, Artificial Sequence
  Description of Artificial Sequence: Synthetic oligonucleotide
  Target: LAMA2; (-) strand; PAM type: NRG; PAM sequence: CGG
caactgtgcccagtccctat

SEQ ID NO: 77827 - DNA, 20 bp, Artificial Sequence
  Description of Artificial Sequence: Synthetic oligonucleotide
  Target: LAMA2; (-) strand; PAM type: NRG; PAM sequence: CAG
ctggtgtgagcaactgtgcc

SEQ ID NO: 77828 - DNA, 20 bp, Artificial Sequence
  Description of Artificial Sequence: Synthetic oligonucleotide
  Target: LAMA2; (-) strand; PAM type: NRG; PAM sequence: GAG
gcctcccaaaatgctggtgt

SEQ ID NO: 77829 - DNA, 20 bp, Artificial Sequence
  Description of Artificial Sequence: Synthetic oligonucleotide
  Target: LAMA2; (-) strand; PAM type: NRG; PAM sequence: TGG
gcctcagcctcccaaaatgc

SEQ ID NO: 77830 - DNA, 20 bp, Artificial Sequence
  Description of Artificial Sequence: Synthetic oligonucleotide
  Target: LAMA2; (-) strand; PAM type: NRG; PAM sequence: CAG
ctcaagcaatccatctgcct

SEQ ID NO: 77831 - DNA, 20 bp, Artificial Sequence
  Description of Artificial Sequence: Synthetic oligonucleotide
  Target: LAMA2; (-) strand; PAM type: NRG; PAM sequence: AAG
ggtctcaaactcctgagctc

SEQ ID NO: 77832 - DNA, 20 bp, Artificial Sequence
  Description of Artificial Sequence: Synthetic oligonucleotide
  Target: LAMA2; (-) strand; PAM type: NRG; PAM sequence: GAG
cattctggtctcaaactcct

SEQ ID NO: 77833 - DNA, 20 bp, Artificial Sequence
  Description of Artificial Sequence: Synthetic oligonucleotide
  Target: LAMA2; (-) strand; PAM type: NRG; PAM sequence: TGG
tttcaccatgttgcccattc

SEQ ID NO: 77834 - DNA, 20 bp, Artificial Sequence
  Description of Artificial Sequence: Synthetic oligonucleotide
  Target: LAMA2; (-) strand; PAM type: NRG; PAM sequence: TGG
taattttgcattttttctgg

SEQ ID NO: 77835 - DNA, 20 bp, Artificial Sequence
  Description of Artificial Sequence: Synthetic oligonucleotide
  Target: LAMA2; (-) strand; PAM type: NRG; PAM sequence: TGG
tgctaattttgcattttttc

SEQ ID NO: 77836 - DNA, 20 bp, Artificial Sequence
  Description of Artificial Sequence: Synthetic oligonucleotide
  Target: LAMA2; (-) strand; PAM type: NRG; PAM sequence: AGG
tccgaagtcgctgggactac

SEQ ID NO: 77837 - DNA, 20 bp, Artificial Sequence
  Description of Artificial Sequence: Synthetic oligonucleotide
  Target: LAMA2; (-) strand; PAM type: NRG; PAM sequence: CAG
ctccgaagtcgctgggacta

SEQ ID NO: 77838 - DNA, 20 bp, Artificial Sequence
  Description of Artificial Sequence: Synthetic oligonucleotide
  Target: LAMA2; (-) strand; PAM type: NRG; PAM sequence: GGG
gctcaacctccgaagtcgct

SEQ ID NO: 77839 - DNA, 20 bp, Artificial Sequence
  Description of Artificial Sequence: Synthetic oligonucleotide
  Target: LAMA2; (-) strand; PAM type: NRG; PAM sequence: TGG
agctcaacctccgaagtcgc

SEQ ID NO: 77840 - DNA, 20 bp, Artificial Sequence
  Description of Artificial Sequence: Synthetic oligonucleotide
  Target: LAMA2; (-) strand; PAM type: NRG; PAM sequence: AAG
tcctcccagctcaacctccg

SEQ ID NO: 77841 - DNA, 20 bp, Artificial Sequence
  Description of Artificial Sequence: Synthetic oligonucleotide
  Target: LAMA2; (-) strand; PAM type: NRG; PAM sequence: CAG
ccaggctcaagcaatcctcc

SEQ ID NO: 77842 - DNA, 20 bp, Artificial Sequence
  Description of Artificial Sequence: Synthetic oligonucleotide
  Target: LAMA2; (-) strand; PAM type: NRG; PAM sequence: AAG
aacctctgcctaccaggctc

SEQ ID NO: 77843 - DNA, 20 bp, Artificial Sequence
  Description of Artificial Sequence: Synthetic oligonucleotide
  Target: LAMA2; (-) strand; PAM type: NRG; PAM sequence: AGG
tactgcaacctctgcctacc

SEQ ID NO: 77844 - DNA, 20 bp, Artificial Sequence
  Description of Artificial Sequence: Synthetic oligonucleotide
  Target: LAMA2; (-) strand; PAM type: NRG; PAM sequence: CAG
ttactgcaacctctgcctac

SEQ ID NO: 77845 - DNA, 20 bp, Artificial Sequence
  Description of Artificial Sequence: Synthetic oligonucleotide
  Target: LAMA2; (-) strand; PAM type: NRG; PAM sequence: CAG
gaagtgcagtagcacagtct

SEQ ID NO: 77846 - DNA, 20 bp, Artificial Sequence
  Description of Artificial Sequence: Synthetic oligonucleotide
  Target: LAMA2; (-) strand; PAM type: NRG; PAM sequence: CAG
caggctgaagtgcagtagca

SEQ ID NO: 77847 - DNA, 20 bp, Artificial Sequence
  Description of Artificial Sequence: Synthetic oligonucleotide
  Target: LAMA2; (-) strand; PAM type: NRG; PAM sequence: TAG
tcatccaggctgaagtgcag

SEQ ID NO: 77848 - DNA, 20 bp, Artificial Sequence
  Description of Artificial Sequence: Synthetic oligonucleotide
  Target: LAMA2; (-) strand; PAM type: NRG; PAM sequence: CAG
gtgtcatccaggctgaagtg

SEQ ID NO: 77849 - DNA, 20 bp, Artificial Sequence
  Description of Artificial Sequence: Synthetic oligonucleotide
  Target: LAMA2; (-) strand; PAM type: NRG; PAM sequence: AAG
tgcctgtgtcatccaggctg

SEQ ID NO: 77850 - DNA, 20 bp, Artificial Sequence
  Description of Artificial Sequence: Synthetic oligonucleotide
  Target: LAMA2; (-) strand; PAM type: NRG; PAM sequence: AGG
agggtctgcctgtgtcatcc

SEQ ID NO: 77851 - DNA, 20 bp, Artificial Sequence
  Description of Artificial Sequence: Synthetic oligonucleotide
  Target: LAMA2; (-) strand; PAM type: NRG; PAM sequence: CAG
cagggtctgcctgtgtcatc

SEQ ID NO: 77852 - DNA, 20 bp, Artificial Sequence
  Description of Artificial Sequence: Synthetic oligonucleotide
  Target: LAMA2; (-) strand; PAM type: NRG; PAM sequence: GGG
tctttttttcttttgagaca

SEQ ID NO: 77853 - DNA, 20 bp, Artificial Sequence
  Description of Artificial Sequence: Synthetic oligonucleotide
  Target: LAMA2; (-) strand; PAM type: NRG; PAM sequence: AGG
ttctttttttcttttgagac

SEQ ID NO: 77854 - DNA, 20 bp, Artificial Sequence
  Description of Artificial Sequence: Synthetic oligonucleotide
  Target: LAMA2; (-) strand; PAM type: NRG; PAM sequence: CAG
tttctttttttcttttgaga

SEQ ID NO: 77855 - DNA, 20 bp, Artificial Sequence
  Description of Artificial Sequence: Synthetic oligonucleotide
  Target: LAMA2; (-) strand; PAM type: NRG; PAM sequence: GAG
gatttttctttttttctttt

SEQ ID NO: 77856 - DNA, 20 bp, Artificial Sequence
  Description of Artificial Sequence: Synthetic oligonucleotide
  Target: LAMA2; (-) strand; PAM type: NRG; PAM sequence: CAG
catattctaaattatcatat

SEQ ID NO: 77857 - DNA, 20 bp, Artificial Sequence
  Description of Artificial Sequence: Synthetic oligonucleotide
  Target: LAMA2; (-) strand; PAM type: NRG; PAM sequence: AGG
tatgctgttttatggccctg

SEQ ID NO: 77858 - DNA, 20 bp, Artificial Sequence
  Description of Artificial Sequence: Synthetic oligonucleotide
  Target: LAMA2; (-) strand; PAM type: NRG; PAM sequence: GAG
atatgctgttttatggccct

SEQ ID NO: 77859 - DNA, 20 bp, Artificial Sequence
  Description of Artificial Sequence: Synthetic oligonucleotide
  Target: LAMA2; (-) strand; PAM type: NRG; PAM sequence: TGG
aactagcatatgctgtttta

SEQ ID NO: 77860 - DNA, 20 bp, Artificial Sequence
  Description of Artificial Sequence: Synthetic oligonucleotide
  Target: LAMA2; (-) strand; PAM type: NRG; PAM sequence: TAG
gtgagtaaaagccaacaaac

SEQ ID NO: 77861 - DNA, 20 bp, Artificial Sequence
  Description of Artificial Sequence: Synthetic oligonucleotide
  Target: LAMA2; (-) strand; PAM type: NRG; PAM sequence: AAG
gtgcacagcatggtgagtaa

SEQ ID NO: 77862 - DNA, 20 bp, Artificial Sequence
  Description of Artificial Sequence: Synthetic oligonucleotide
  Target: LAMA2; (-) strand; PAM type: NRG; PAM sequence: GAG
cttttagtgcacagcatggt

SEQ ID NO: 77863 - DNA, 20 bp, Artificial Sequence
  Description of Artificial Sequence: Synthetic oligonucleotide
  Target: LAMA2; (-) strand; PAM type: NRG; PAM sequence: TGG
tttacttttagtgcacagca

SEQ ID NO: 77864 - DNA, 20 bp, Artificial Sequence
  Description of Artificial Sequence: Synthetic oligonucleotide
  Target: LAMA2; (-) strand; PAM type: NRG; PAM sequence: CAG
atttttttacttttagtgca

SEQ ID NO: 77865 - DNA, 20 bp, Artificial Sequence
  Description of Artificial Sequence: Synthetic oligonucleotide
  Target: LAMA2; (-) strand; PAM type: NRG; PAM sequence: TAG
actttatatttttttacttt

SEQ ID NO: 77866 - DNA, 20 bp, Artificial Sequence
  Description of Artificial Sequence: Synthetic oligonucleotide
  Target: LAMA2; (-) strand; PAM type: NRG; PAM sequence: GGG
aaaatctcagttaaaagaat

SEQ ID NO: 77867 - DNA, 20 bp, Artificial Sequence
  Description of Artificial Sequence: Synthetic oligonucleotide
  Target: LAMA2; (-) strand; PAM type: NRG; PAM sequence: TGG
caaaatctcagttaaaagaa

SEQ ID NO: 77868 - DNA, 20 bp, Artificial Sequence
  Description of Artificial Sequence: Synthetic oligonucleotide
  Target: LAMA2; (-) strand; PAM type: NRG; PAM sequence: AAG
gggcacaaaatctcagttaa

SEQ ID NO: 77869 - DNA, 20 bp, Artificial Sequence
  Description of Artificial Sequence: Synthetic oligonucleotide
  Target: LAMA2; (-) strand; PAM type: NRG; PAM sequence: CAG
tgtcaaagggcacaaaatct

SEQ ID NO: 77870 - DNA, 20 bp, Artificial Sequence
  Description of Artificial Sequence: Synthetic oligonucleotide
  Target: LAMA2; (-) strand; PAM type: NRG; PAM sequence: GGG
aatggagagattatgtcaaa

SEQ ID NO: 77871 - DNA, 20 bp, Artificial Sequence
  Description of Artificial Sequence: Synthetic oligonucleotide
  Target: LAMA2; (-) strand; PAM type: NRG; PAM sequence: AGG
gaatggagagattatgtcaa

SEQ ID NO: 77872 - DNA, 20 bp, Artificial Sequence
  Description of Artificial Sequence: Synthetic oligonucleotide
  Target: LAMA2; (-) strand; PAM type: NRG; PAM sequence: AAG
ggaatggagagattatgtca

SEQ ID NO: 77873 - DNA, 20 bp, Artificial Sequence
  Description of Artificial Sequence: Synthetic oligonucleotide
  Target: LAMA2; (-) strand; PAM type: NRG; PAM sequence: GAG
ctgagggctgtgggaatgga

SEQ ID NO: 77874 - DNA, 20 bp, Artificial Sequence
  Description of Artificial Sequence: Synthetic oligonucleotide
  Target: LAMA2; (-) strand; PAM type: NRG; PAM sequence: GAG
ggctgagggctgtgggaatg

SEQ ID NO: 77875 - DNA, 20 bp, Artificial Sequence
  Description of Artificial Sequence: Synthetic oligonucleotide
  Target: LAMA2; (-) strand; PAM type: NRG; PAM sequence: TGG
gaggctgagggctgtgggaa

SEQ ID NO: 77876 - DNA, 20 bp, Artificial Sequence
  Description of Artificial Sequence: Synthetic oligonucleotide
  Target: LAMA2; (-) strand; PAM type: NRG; PAM sequence: GGG
ttacagaggctgagggctgt

SEQ ID NO: 77877 - DNA, 20 bp, Artificial Sequence
  Description of Artificial Sequence: Synthetic oligonucleotide
  Target: LAMA2; (-) strand; PAM type: NRG; PAM sequence: TGG
gttacagaggctgagggctg

SEQ ID NO: 77878 - DNA, 20 bp, Artificial Sequence
  Description of Artificial Sequence: Synthetic oligonucleotide
  Target: LAMA2; (-) strand; PAM type: NRG; PAM sequence: GGG
atagaagttacagaggctga

SEQ ID NO: 77879 - DNA, 20 bp, Artificial Sequence
  Description of Artificial Sequence: Synthetic oligonucleotide
  Target: LAMA2; (-) strand; PAM type: NRG; PAM sequence: AGG
aatagaagttacagaggctg

SEQ ID NO: 77880 - DNA, 20 bp, Artificial Sequence
  Description of Artificial Sequence: Synthetic oligonucleotide
  Target: LAMA2; (-) strand; PAM type: NRG; PAM sequence: GAG
aaatagaagttacagaggct

SEQ ID NO: 77881 - DNA, 20 bp, Artificial Sequence
  Description of Artificial Sequence: Synthetic oligonucleotide
  Target: LAMA2; (-) strand; PAM type: NRG; PAM sequence: AGG
gagtgaaatagaagttacag

SEQ ID NO: 77882 - DNA, 20 bp, Artificial Sequence
  Description of Artificial Sequence: Synthetic oligonucleotide
  Target: LAMA2; (-) strand; PAM type: NRG; PAM sequence: GAG
tgagtgaaatagaagttaca

SEQ ID NO: 77883 - DNA, 20 bp, Artificial Sequence
  Description of Artificial Sequence: Synthetic oligonucleotide
  Target: LAMA2; (-) strand; PAM type: NRG; PAM sequence: CAG
agtgagtgaaatagaagtta

SEQ ID NO: 77884 - DNA, 20 bp, Artificial Sequence
  Description of Artificial Sequence: Synthetic oligonucleotide
  Target: LAMA2; (-) strand; PAM type: NRG; PAM sequence: AAG
agaaggagtgagtgaaatag

SEQ ID NO: 77885 - DNA, 20 bp, Artificial Sequence
  Description of Artificial Sequence: Synthetic oligonucleotide
  Target: LAMA2; (-) strand; PAM type: NRG; PAM sequence: TAG
cttagaaggagtgagtgaaa

SEQ ID NO: 77886 - DNA, 20 bp, Artificial Sequence
  Description of Artificial Sequence: Synthetic oligonucleotide
  Target: LAMA2; (-) strand; PAM type: NRG; PAM sequence: GAG
atcaaattcttagaaggagt

SEQ ID NO: 77887 - DNA, 20 bp, Artificial Sequence
  Description of Artificial Sequence: Synthetic oligonucleotide
  Target: LAMA2; (-) strand; PAM type: NRG; PAM sequence: GAG
aacaatcaaattcttagaag

SEQ ID NO: 77888 - DNA, 20 bp, Artificial Sequence
  Description of Artificial Sequence: Synthetic oligonucleotide
  Target: LAMA2; (-) strand; PAM type: NRG; PAM sequence: AGG
aaaacaatcaaattcttaga

SEQ ID NO: 77889 - DNA, 20 bp, Artificial Sequence
  Description of Artificial Sequence: Synthetic oligonucleotide
  Target: LAMA2; (-) strand; PAM type: NRG; PAM sequence: AAG
taaaacaatcaaattcttag

SEQ ID NO: 77890 - DNA, 20 bp, Artificial Sequence
  Description of Artificial Sequence: Synthetic oligonucleotide
  Target: LAMA2; (-) strand; PAM type: NRG; PAM sequence: TAG
atgtaaaacaatcaaattct

SEQ ID NO: 77891 - DNA, 20 bp, Artificial Sequence
  Description of Artificial Sequence: Synthetic oligonucleotide
  Target: LAMA2; (-) strand; PAM type: NRG; PAM sequence: AAG
agaaaattctgtcatttgga

SEQ ID NO: 77892 - DNA, 20 bp, Artificial Sequence
  Description of Artificial Sequence: Synthetic oligonucleotide
  Target: LAMA2; (-) strand; PAM type: NRG; PAM sequence: TGG
aaaaagaaaattctgtcatt

SEQ ID NO: 77893 - DNA, 20 bp, Artificial Sequence
  Description of Artificial Sequence: Synthetic oligonucleotide
  Target: LAMA2; (-) strand; PAM type: NRG; PAM sequence: AAG
aatactatttagctttaaaa

SEQ ID NO: 77894 - DNA, 20 bp, Artificial Sequence
  Description of Artificial Sequence: Synthetic oligonucleotide
  Target: LAMA2; (-) strand; PAM type: NRG; PAM sequence: TAG
atacacgatgaaatactatt

SEQ ID NO: 77895 - DNA, 20 bp, Artificial Sequence
  Description of Artificial Sequence: Synthetic oligonucleotide
  Target: LAMA2; (-) strand; PAM type: NRG; PAM sequence: AAG
catcaacagatgaatggata

SEQ ID NO: 77896 - DNA, 20 bp, Artificial Sequence
  Description of Artificial Sequence: Synthetic oligonucleotide
  Target: LAMA2; (-) strand; PAM type: NRG; PAM sequence: TGG
cctgtccatcaacagatgaa

SEQ ID NO: 77897 - DNA, 20 bp, Artificial Sequence
  Description of Artificial Sequence: Synthetic oligonucleotide
  Target: LAMA2; (-) strand; PAM type: NRG; PAM sequence: CAG
gaaatcaacctgtccatcaa

SEQ ID NO: 77898 - DNA, 20 bp, Artificial Sequence
  Description of Artificial Sequence: Synthetic oligonucleotide
  Target: LAMA2; (-) strand; PAM type: NRG; PAM sequence: TAG
ttcactgcagcacttcacat

SEQ ID NO: 77899 - DNA, 20 bp, Artificial Sequence
  Description of Artificial Sequence: Synthetic oligonucleotide
  Target: LAMA2; (-) strand; PAM type: NRG; PAM sequence: CAG
ctgcactcccatgttcactg

SEQ ID NO: 77900 - DNA, 20 bp, Artificial Sequence
  Description of Artificial Sequence: Synthetic oligonucleotide
  Target: LAMA2; (-) strand; PAM type: NRG; PAM sequence: AAG
gtgaaatcagttttgccgaa

SEQ ID NO: 77901 - DNA, 20 bp, Artificial Sequence
  Description of Artificial Sequence: Synthetic oligonucleotide
  Target: LAMA2; (-) strand; PAM type: NRG; PAM sequence: CAG
ttacccaaaagatgtgaaat

SEQ ID NO: 77902 - DNA, 20 bp, Artificial Sequence
  Description of Artificial Sequence: Synthetic oligonucleotide
  Target: LAMA2; (-) strand; PAM type: NRG; PAM sequence: AAG
acttccaggtatttacccaa

SEQ ID NO: 77903 - DNA, 20 bp, Artificial Sequence
  Description of Artificial Sequence: Synthetic oligonucleotide
  Target: LAMA2; (-) strand; PAM type: NRG; PAM sequence: AGG
gatctagcaatctcacttcc

SEQ ID NO: 77904 - DNA, 20 bp, Artificial Sequence
  Description of Artificial Sequence: Synthetic oligonucleotide
  Target: LAMA2; (-) strand; PAM type: NRG; PAM sequence: CAG
cgatctagcaatctcacttc

SEQ ID NO: 77905 - DNA, 20 bp, Artificial Sequence
  Description of Artificial Sequence: Synthetic oligonucleotide
  Target: LAMA2; (-) strand; PAM type: NRG; PAM sequence: TAG
agtagaatcacgatgcgatc

SEQ ID NO: 77906 - DNA, 20 bp, Artificial Sequence
  Description of Artificial Sequence: Synthetic oligonucleotide
  Target: LAMA2; (-) strand; PAM type: NRG; PAM sequence: TAG
ttttccaaaacaactaaaag

SEQ ID NO: 77907 - DNA, 20 bp, Artificial Sequence
  Description of Artificial Sequence: Synthetic oligonucleotide
  Target: LAMA2; (-) strand; PAM type: NRG; PAM sequence: AAG
gagttttccaaaacaactaa

SEQ ID NO: 77908 - DNA, 20 bp, Artificial Sequence
  Description of Artificial Sequence: Synthetic oligonucleotide
  Target: LAMA2; (-) strand; PAM type: NRG; PAM sequence: GAG
ccattatggaaaactacatg

SEQ ID NO: 77909 - DNA, 20 bp, Artificial Sequence
  Description of Artificial Sequence: Synthetic oligonucleotide
  Target: LAMA2; (-) strand; PAM type: NRG; PAM sequence: TGG
agccattatggaaaactaca

SEQ ID NO: 77910 - DNA, 20 bp, Artificial Sequence
  Description of Artificial Sequence: Synthetic oligonucleotide
  Target: LAMA2; (-) strand; PAM type: NRG; PAM sequence: TGG
gtaaattagtacagccatta

SEQ ID NO: 77911 - DNA, 20 bp, Artificial Sequence
  Description of Artificial Sequence: Synthetic oligonucleotide
  Target: LAMA2; (-) strand; PAM type: NRG; PAM sequence: CAG
ggtgggaatgtaaattagta

SEQ ID NO: 77912 - DNA, 20 bp, Artificial Sequence
  Description of Artificial Sequence: Synthetic oligonucleotide
  Target: LAMA2; (-) strand; PAM type: NRG; PAM sequence: TAG
ctgttggtgggaatgtaaat

SEQ ID NO: 77913 - DNA, 20 bp, Artificial Sequence
  Description of Artificial Sequence: Synthetic oligonucleotide
  Target: LAMA2; (-) strand; PAM type: NRG; PAM sequence: GGG
aatccttgtacactgttggt

SEQ ID NO: 77914 - DNA, 20 bp, Artificial Sequence
  Description of Artificial Sequence: Synthetic oligonucleotide
  Target: LAMA2; (-) strand; PAM type: NRG; PAM sequence: TGG
gaatccttgtacactgttgg

SEQ ID NO: 77915 - DNA, 20 bp, Artificial Sequence
  Description of Artificial Sequence: Synthetic oligonucleotide
  Target: LAMA2; (-) strand; PAM type: NRG; PAM sequence: TGG
acagaatccttgtacactgt

SEQ ID NO: 77916 - DNA, 20 bp, Artificial Sequence
  Description of Artificial Sequence: Synthetic oligonucleotide
  Target: LAMA2; (-) strand; PAM type: NRG; PAM sequence: CAG
tggcgagaatatggaaaaaa

SEQ ID NO: 77917 - DNA, 20 bp, Artificial Sequence
  Description of Artificial Sequence: Synthetic oligonucleotide
  Target: LAMA2; (-) strand; PAM type: NRG; PAM sequence: TGG
aacaaatgttggcgagaata

SEQ ID NO: 77918 - DNA, 20 bp, Artificial Sequence
  Description of Artificial Sequence: Synthetic oligonucleotide
  Target: LAMA2; (-) strand; PAM type: NRG; PAM sequence: GAG
agaagataacaaatgttggc

SEQ ID NO: 77919 - DNA, 20 bp, Artificial Sequence
  Description of Artificial Sequence: Synthetic oligonucleotide
  Target: LAMA2; (-) strand; PAM type: NRG; PAM sequence: TGG
aaaaagaagataacaaatgt

SEQ ID NO: 77920 - DNA, 20 bp, Artificial Sequence
  Description of Artificial Sequence: Synthetic oligonucleotide
  Target: LAMA2; (-) strand; PAM type: NRG; PAM sequence: AAG
gaataggtaatatcaaaaag

SEQ ID NO: 77921 - DNA, 20 bp, Artificial Sequence
  Description of Artificial Sequence: Synthetic oligonucleotide
  Target: LAMA2; (-) strand; PAM type: NRG; PAM sequence: AAG
tcagaataggtaatatcaaa

SEQ ID NO: 77922 - DNA, 20 bp, Artificial Sequence
  Description of Artificial Sequence: Synthetic oligonucleotide
  Target: LAMA2; (-) strand; PAM type: NRG; PAM sequence: AGG
catctcacacctgtcagaat

SEQ ID NO: 77923 - DNA, 20 bp, Artificial Sequence
  Description of Artificial Sequence: Synthetic oligonucleotide
  Target: LAMA2; (-) strand; PAM type: NRG; PAM sequence: TAG
tcatctcacacctgtcagaa

SEQ ID NO: 77924 - DNA, 20 bp, Artificial Sequence
  Description of Artificial Sequence: Synthetic oligonucleotide
  Target: LAMA2; (-) strand; PAM type: NRG; PAM sequence: CAG
agatatcatctcacacctgt

SEQ ID NO: 77925 - DNA, 20 bp, Artificial Sequence
  Description of Artificial Sequence: Synthetic oligonucleotide
  Target: LAMA2; (-) strand; PAM type: NRG; PAM sequence: GAG
atgcaaattaaaattacaat

SEQ ID NO: 77926 - DNA, 20 bp, Artificial Sequence
  Description of Artificial Sequence: Synthetic oligonucleotide
  Target: LAMA2; (-) strand; PAM type: NRG; PAM sequence: GGG
gaaaaaatcactaatcatta

SEQ ID NO: 77927 - DNA, 20 bp, Artificial Sequence
  Description of Artificial Sequence: Synthetic oligonucleotide
  Target: LAMA2; (-) strand; PAM type: NRG; PAM sequence: AGG
tgaaaaaatcactaatcatt

SEQ ID NO: 77928 - DNA, 20 bp, Artificial Sequence
  Description of Artificial Sequence: Synthetic oligonucleotide
  Target: LAMA2; (-) strand; PAM type: NRG; PAM sequence: TAG
atgaaaaaatcactaatcat

SEQ ID NO: 77929 - DNA, 20 bp, Artificial Sequence
  Description of Artificial Sequence: Synthetic oligonucleotide
  Target: LAMA2; (-) strand; PAM type: NRG; PAM sequence: GAG
gaagactaacaaatggccaa

SEQ ID NO: 77930 - DNA, 20 bp, Artificial Sequence
  Description of Artificial Sequence: Synthetic oligonucleotide
  Target: LAMA2; (-) strand; PAM type: NRG; PAM sequence: AAG
aagaagactaacaaatggcc

SEQ ID NO: 77931 - DNA, 20 bp, Artificial Sequence
  Description of Artificial Sequence: Synthetic oligonucleotide
  Target: LAMA2; (-) strand; PAM type: NRG; PAM sequence: TGG
ctcaaaagaagactaacaaa

SEQ ID NO: 77932 - DNA, 20 bp, Artificial Sequence
  Description of Artificial Sequence: Synthetic oligonucleotide
  Target: LAMA2; (-) strand; PAM type: NRG; PAM sequence: AAG
gaatagacattgctcaaaag

SEQ ID NO: 77933 - DNA, 20 bp, Artificial Sequence
  Description of Artificial Sequence: Synthetic oligonucleotide
  Target: LAMA2; (-) strand; PAM type: NRG; PAM sequence: AAG
gctgaatagacattgctcaa

SEQ ID NO: 77934 - DNA, 20 bp, Artificial Sequence
  Description of Artificial Sequence: Synthetic oligonucleotide
  Target: LAMA2; (-) strand; PAM type: NRG; PAM sequence: TAG
aaatgagcaaggaagctgaa

SEQ ID NO: 77935 - DNA, 20 bp, Artificial Sequence
  Description of Artificial Sequence: Synthetic oligonucleotide
  Target: LAMA2; (-) strand; PAM type: NRG; PAM sequence: AAG
aaaattaaaaatgagcaagg

SEQ ID NO: 77936 - DNA, 20 bp, Artificial Sequence
  Description of Artificial Sequence: Synthetic oligonucleotide
  Target: LAMA2; (-) strand; PAM type: NRG; PAM sequence: AGG
aaaaaaattaaaaatgagca

SEQ ID NO: 77937 - DNA, 20 bp, Artificial Sequence
  Description of Artificial Sequence: Synthetic oligonucleotide
  Target: LAMA2; (-) strand; PAM type: NRG; PAM sequence: AAG
aaaaaaaattaaaaatgagc

SEQ ID NO: 77938 - DNA, 20 bp, Artificial Sequence
  Description of Artificial Sequence: Synthetic oligonucleotide
  Target: LAMA2; (-) strand; PAM type: NRG; PAM sequence: GAG
aagaaaaaaaaattaaaaat

SEQ ID NO: 77939 - DNA, 20 bp, Artificial Sequence
  Description of Artificial Sequence: Synthetic oligonucleotide
  Target: LAMA2; (-) strand; PAM type: NRG; PAM sequence: AAG
agttccatcaacttaagagg

SEQ ID NO: 77940 - DNA, 20 bp, Artificial Sequence
  Description of Artificial Sequence: Synthetic oligonucleotide
  Target: LAMA2; (-) strand; PAM type: NRG; PAM sequence: AGG
aagagttccatcaacttaag

SEQ ID NO: 77941 - DNA, 20 bp, Artificial Sequence
  Description of Artificial Sequence: Synthetic oligonucleotide
  Target: LAMA2; (-) strand; PAM type: NRG; PAM sequence: GAG
aaagagttccatcaacttaa

SEQ ID NO: 77942 - DNA, 20 bp, Artificial Sequence
  Description of Artificial Sequence: Synthetic oligonucleotide
  Target: LAMA2; (-) strand; PAM type: NRG; PAM sequence: AAG
ataaagagttccatcaactt

SEQ ID NO: 77943 - DNA, 20 bp, Artificial Sequence
  Description of Artificial Sequence: Synthetic oligonucleotide
  Target: LAMA2; (-) strand; PAM type: NRG; PAM sequence: GAG
aatatccacaaatatataaa

SEQ ID NO: 77944 - DNA, 20 bp, Artificial Sequence
  Description of Artificial Sequence: Synthetic oligonucleotide
  Target: LAMA2; (-) strand; PAM type: NRG; PAM sequence: AAG
ttaatatccacaaatatata

SEQ ID NO: 77945 - DNA, 20 bp, Artificial Sequence
  Description of Artificial Sequence: Synthetic oligonucleotide
  Target: LAMA2; (-) strand; PAM type: NRG; PAM sequence: AAG
taagccatatattcaataaa

SEQ ID NO: 77946 - DNA, 20 bp, Artificial Sequence
  Description of Artificial Sequence: Synthetic oligonucleotide
  Target: LAMA2; (-) strand; PAM type: NRG; PAM sequence: AAG
aatgtggagaaaatatttgt

SEQ ID NO: 77947 - DNA, 20 bp, Artificial Sequence
  Description of Artificial Sequence: Synthetic oligonucleotide
  Target: LAMA2; (-) strand; PAM type: NRG; PAM sequence: GAG
agagacaaactatgaatgtg

SEQ ID NO: 77948 - DNA, 20 bp, Artificial Sequence
  Description of Artificial Sequence: Synthetic oligonucleotide
  Target: LAMA2; (-) strand; PAM type: NRG; PAM sequence: TGG
gaagagacaaactatgaatg

SEQ ID NO: 77949 - DNA, 20 bp, Artificial Sequence
  Description of Artificial Sequence: Synthetic oligonucleotide
  Target: LAMA2; (-) strand; PAM type: NRG; PAM sequence: GAG
aaaggaagcaacaatgtgaa

SEQ ID NO: 77950 - DNA, 20 bp, Artificial Sequence
  Description of Artificial Sequence: Synthetic oligonucleotide
  Target: LAMA2; (-) strand; PAM type: NRG; PAM sequence: AAG
acaaaggaagcaacaatgtg

SEQ ID NO: 77951 - DNA, 20 bp, Artificial Sequence
  Description of Artificial Sequence: Synthetic oligonucleotide
  Target: LAMA2; (-) strand; PAM type: NRG; PAM sequence: AAG
aagcttctgcacaacaaagg

SEQ ID NO: 77952 - DNA, 20 bp, Artificial Sequence
  Description of Artificial Sequence: Synthetic oligonucleotide
  Target: LAMA2; (-) strand; PAM type: NRG; PAM sequence: AGG
aaaaagcttctgcacaacaa

SEQ ID NO: 77953 - DNA, 20 bp, Artificial Sequence
  Description of Artificial Sequence: Synthetic oligonucleotide
  Target: LAMA2; (-) strand; PAM type: NRG; PAM sequence: AAG
taaaaagcttctgcacaaca

SEQ ID NO: 77954 - DNA, 20 bp, Artificial Sequence
  Description of Artificial Sequence: Synthetic oligonucleotide
  Target: LAMA2; (-) strand; PAM type: NRG; PAM sequence: AAG
ttgggtcatatcaaactaaa

SEQ ID NO: 77955 - DNA, 20 bp, Artificial Sequence
  Description of Artificial Sequence: Synthetic oligonucleotide
  Target: LAMA2; (-) strand; PAM type: NRG; PAM sequence: GGG
aaagtaaaaacaaacaaatt

SEQ ID NO: 77956 - DNA, 20 bp, Artificial Sequence
  Description of Artificial Sequence: Synthetic oligonucleotide
  Target: LAMA2; (-) strand; PAM type: NRG; PAM sequence: TGG
aaaagtaaaaacaaacaaat

SEQ ID NO: 77957 - DNA, 20 bp, Artificial Sequence
  Description of Artificial Sequence: Synthetic oligonucleotide
  Target: LAMA2; (-) strand; PAM type: NRG; PAM sequence: AAG
ccccaaagtataggccacaa

SEQ ID NO: 77958 - DNA, 20 bp, Artificial Sequence
  Description of Artificial Sequence: Synthetic oligonucleotide
  Target: LAMA2; (-) strand; PAM type: NRG; PAM sequence: AGG
gaatttgacccccaaagtat

SEQ ID NO: 77959 - DNA, 20 bp, Artificial Sequence
  Description of Artificial Sequence: Synthetic oligonucleotide
  Target: LAMA2; (-) strand; PAM type: NRG; PAM sequence: TAG
tgaatttgacccccaaagta

SEQ ID NO: 77960 - DNA, 20 bp, Artificial Sequence
  Description of Artificial Sequence: Synthetic oligonucleotide
  Target: LAMA2; (-) strand; PAM type: NRG; PAM sequence: AAG
tgttttgaatttgaccccca

SEQ ID NO: 77961 - DNA, 20 bp, Artificial Sequence
  Description of Artificial Sequence: Synthetic oligonucleotide
  Target: LAMA2; (-) strand; PAM type: NRG; PAM sequence: GGG
aaagtatatgacattgatct

SEQ ID NO: 77962 - DNA, 20 bp, Artificial Sequence
  Description of Artificial Sequence: Synthetic oligonucleotide
  Target: LAMA2; (-) strand; PAM type: NRG; PAM sequence: TGG
gaaagtatatgacattgatc

SEQ ID NO: 77963 - DNA, 20 bp, Artificial Sequence
  Description of Artificial Sequence: Synthetic oligonucleotide
  Target: LAMA2; (-) strand; PAM type: NRG; PAM sequence: AAG
agaagaaaacacaggggaga

SEQ ID NO: 77964 - DNA, 20 bp, Artificial Sequence
  Description of Artificial Sequence: Synthetic oligonucleotide
  Target: LAMA2; (-) strand; PAM type: NRG; PAM sequence: GAG
tgctagaagaaaacacaggg

SEQ ID NO: 77965 - DNA, 20 bp, Artificial Sequence
  Description of Artificial Sequence: Synthetic oligonucleotide
  Target: LAMA2; (-) strand; PAM type: NRG; PAM sequence: GGG
attgctagaagaaaacacag

SEQ ID NO: 77966 - DNA, 20 bp, Artificial Sequence
  Description of Artificial Sequence: Synthetic oligonucleotide
  Target: LAMA2; (-) strand; PAM type: NRG; PAM sequence: GGG
aattgctagaagaaaacaca

SEQ ID NO: 77967 - DNA, 20 bp, Artificial Sequence
  Description of Artificial Sequence: Synthetic oligonucleotide
  Target: LAMA2; (-) strand; PAM type: NRG; PAM sequence: AGG
aaattgctagaagaaaacac

SEQ ID NO: 77968 - DNA, 20 bp, Artificial Sequence
  Description of Artificial Sequence: Synthetic oligonucleotide
  Target: LAMA2; (-) strand; PAM type: NRG; PAM sequence: CAG
caaattgctagaagaaaaca

SEQ ID NO: 77969 - DNA, 20 bp, Artificial Sequence
  Description of Artificial Sequence: Synthetic oligonucleotide
  Target: LAMA2; (-) strand; PAM type: NRG; PAM sequence: AAG
cagcaactccaaattgctag

SEQ ID NO: 77970 - DNA, 20 bp, Artificial Sequence
  Description of Artificial Sequence: Synthetic oligonucleotide
  Target: LAMA2; (-) strand; PAM type: NRG; PAM sequence: TAG
ggccagcaactccaaattgc

SEQ ID NO: 77971 - DNA, 20 bp, Artificial Sequence
  Description of Artificial Sequence: Synthetic oligonucleotide
  Target: LAMA2; (-) strand; PAM type: NRG; PAM sequence: CAG
taaagccttaagtataaggc

SEQ ID NO: 77972 - DNA, 20 bp, Artificial Sequence
  Description of Artificial Sequence: Synthetic oligonucleotide
  Target: LAMA2; (-) strand; PAM type: NRG; PAM sequence: AGG
gaattaaagccttaagtata

SEQ ID NO: 77973 - DNA, 20 bp, Artificial Sequence
  Description of Artificial Sequence: Synthetic oligonucleotide
  Target: LAMA2; (-) strand; PAM type: NRG; PAM sequence: AAG
tgaattaaagccttaagtat

SEQ ID NO: 77974 - DNA, 20 bp, Artificial Sequence
  Description of Artificial Sequence: Synthetic oligonucleotide
  Target: LAMA2; (-) strand; PAM type: NRG; PAM sequence: AAG
tcgaaatgaattaaagcctt

SEQ ID NO: 77975 - DNA, 20 bp, Artificial Sequence
  Description of Artificial Sequence: Synthetic oligonucleotide
  Target: LAMA2; (-) strand; PAM type: NRG; PAM sequence: AAG
actcaattcgaaatgaatta

SEQ ID NO: 77976 - DNA, 20 bp, Artificial Sequence
  Description of Artificial Sequence: Synthetic oligonucleotide
  Target: LAMA2; (-) strand; PAM type: NRG; PAM sequence: TGG
cacatgcagaagaataaaat

SEQ ID NO: 77977 - DNA, 20 bp, Artificial Sequence
  Description of Artificial Sequence: Synthetic oligonucleotide
  Target: LAMA2; (-) strand; PAM type: NRG; PAM sequence: AAG
aactaggtatccacatgcag

SEQ ID NO: 77978 - DNA, 20 bp, Artificial Sequence
  Description of Artificial Sequence: Synthetic oligonucleotide
  Target: LAMA2; (-) strand; PAM type: NRG; PAM sequence: CAG
ggaaactaggtatccacatg

SEQ ID NO: 77979 - DNA, 20 bp, Artificial Sequence
  Description of Artificial Sequence: Synthetic oligonucleotide
  Target: LAMA2; (-) strand; PAM type: NRG; PAM sequence: AGG
tgaatggtgttggggaaact

SEQ ID NO: 77980 - DNA, 20 bp, Artificial Sequence
  Description of Artificial Sequence: Synthetic oligonucleotide
  Target: LAMA2; (-) strand; PAM type: NRG; PAM sequence: TAG
atgaatggtgttggggaaac

SEQ ID NO: 77981 - DNA, 20 bp, Artificial Sequence
  Description of Artificial Sequence: Synthetic oligonucleotide
  Target: LAMA2; (-) strand; PAM type: NRG; PAM sequence: GGG
ctgttcaatgaatggtgttg

SEQ ID NO: 77982 - DNA, 20 bp, Artificial Sequence
  Description of Artificial Sequence: Synthetic oligonucleotide
  Target: LAMA2; (-) strand; PAM type: NRG; PAM sequence: GGG
tctgttcaatgaatggtgtt

SEQ ID NO: 77983 - DNA, 20 bp, Artificial Sequence
  Description of Artificial Sequence: Synthetic oligonucleotide
  Target: LAMA2; (-) strand; PAM type: NRG; PAM sequence: TGG
gtctgttcaatgaatggtgt

SEQ ID NO: 77984 - DNA, 20 bp, Artificial Sequence
  Description of Artificial Sequence: Synthetic oligonucleotide
  Target: LAMA2; (-) strand; PAM type: NRG; PAM sequence: TGG
aggatagtctgttcaatgaa

SEQ ID NO: 77985 - DNA, 20 bp, Artificial Sequence
  Description of Artificial Sequence: Synthetic oligonucleotide
  Target: LAMA2; (-) strand; PAM type: NRG; PAM sequence: TAG
aatacacaatgagaaaagga

SEQ ID NO: 77986 - DNA, 20 bp, Artificial Sequence
  Description of Artificial Sequence: Synthetic oligonucleotide
  Target: LAMA2; (-) strand; PAM type: NRG; PAM sequence: AGG
taagaatacacaatgagaaa

SEQ ID NO: 77987 - DNA, 20 bp, Artificial Sequence
  Description of Artificial Sequence: Synthetic oligonucleotide
  Target: LAMA2; (-) strand; PAM type: NRG; PAM sequence: AAG
ctaagaatacacaatgagaa

SEQ ID NO: 77988 - DNA, 20 bp, Artificial Sequence
  Description of Artificial Sequence: Synthetic oligonucleotide
  Target: LAMA2; (-) strand; PAM type: NRG; PAM sequence: GAG
agatgctaagaatacacaat

SEQ ID NO: 77989 - DNA, 20 bp, Artificial Sequence
  Description of Artificial Sequence: Synthetic oligonucleotide
  Target: LAMA2; (-) strand; PAM type: NRG; PAM sequence: AAG
ttatttttgacaaagatgct

SEQ ID NO: 77990 - DNA, 20 bp, Artificial Sequence
  Description of Artificial Sequence: Synthetic oligonucleotide
  Target: LAMA2; (-) strand; PAM type: NRG; PAM sequence: AAG
caaccaatttatttttgaca

SEQ ID NO: 77991 - DNA, 20 bp, Artificial Sequence
  Description of Artificial Sequence: Synthetic oligonucleotide
  Target: LAMA2; (-) strand; PAM type: NRG; PAM sequence: CAG
gtcaatgcagcataatagcc

SEQ ID NO: 77992 - DNA, 20 bp, Artificial Sequence
  Description of Artificial Sequence: Synthetic oligonucleotide
  Target: LAMA2; (-) strand; PAM type: NRG; PAM sequence: TAG
tataggtcaatgcagcataa

SEQ ID NO: 77993 - DNA, 20 bp, Artificial Sequence
  Description of Artificial Sequence: Synthetic oligonucleotide
  Target: LAMA2; (-) strand; PAM type: NRG; PAM sequence: CAG
aaaagaaatataggtcaatg

SEQ ID NO: 77994 - DNA, 20 bp, Artificial Sequence
  Description of Artificial Sequence: Synthetic oligonucleotide
  Target: LAMA2; (-) strand; PAM type: NRG; PAM sequence: AGG
tactggcaaaaaagaaatat

SEQ ID NO: 77995 - DNA, 20 bp, Artificial Sequence
  Description of Artificial Sequence: Synthetic oligonucleotide
  Target: LAMA2; (-) strand; PAM type: NRG; PAM sequence: TAG
gtactggcaaaaaagaaata

SEQ ID NO: 77996 - DNA, 20 bp, Artificial Sequence
  Description of Artificial Sequence: Synthetic oligonucleotide
  Target: LAMA2; (-) strand; PAM type: NRG; PAM sequence: AAG
atagcatggtactggcaaaa

SEQ ID NO: 77997 - DNA, 20 bp, Artificial Sequence
  Description of Artificial Sequence: Synthetic oligonucleotide
  Target: LAMA2; (-) strand; PAM type: NRG; PAM sequence: TGG
taattaaaatagcatggtac

SEQ ID NO: 77998 - DNA, 20 bp, Artificial Sequence
  Description of Artificial Sequence: Synthetic oligonucleotide
  Target: LAMA2; (-) strand; PAM type: NRG; PAM sequence: TGG
tagtattaattaaaatagca

SEQ ID NO: 77999 - DNA, 20 bp, Artificial Sequence
  Description of Artificial Sequence: Synthetic oligonucleotide
  Target: LAMA2; (-) strand; PAM type: NRG; PAM sequence: TAG
tattgtagtattaattaaaa

SEQ ID NO: 78000 - DNA, 20 bp, Artificial Sequence
  Description of Artificial Sequence: Synthetic oligonucleotide
  Target: LAMA2; (-) strand; PAM type: NRG; PAM sequence: TAG
acaatactacaaagctattg

SEQ ID NO: 78001 - DNA, 20 bp, Artificial Sequence
  Description of Artificial Sequence: Synthetic oligonucleotide
  Target: LAMA2; (-) strand; PAM type: NRG; PAM sequence: AAG
tgacttcaaacaatactaca

SEQ ID NO: 78002 - DNA, 20 bp, Artificial Sequence
  Description of Artificial Sequence: Synthetic oligonucleotide
  Target: LAMA2; (-) strand; PAM type: NRG; PAM sequence: AAG
gagcaaacaaaacaaaaata

SEQ ID NO: 78003 - DNA, 20 bp, Artificial Sequence
  Description of Artificial Sequence: Synthetic oligonucleotide
  Target: LAMA2; (-) strand; PAM type: NRG; PAM sequence: GAG
agaacagtcaaaatcatcat

SEQ ID NO: 78004 - DNA, 20 bp, Artificial Sequence
  Description of Artificial Sequence: Synthetic oligonucleotide
  Target: LAMA2; (-) strand; PAM type: NRG; PAM sequence: CAG
gaaccacaacaaaccaagaa

SEQ ID NO: 78005 - DNA, 20 bp, Artificial Sequence
  Description of Artificial Sequence: Synthetic oligonucleotide
  Target: LAMA2; (-) strand; PAM type: NRG; PAM sequence: AAG
gcacggaaccacaacaaacc

SEQ ID NO: 78006 - DNA, 20 bp, Artificial Sequence
  Description of Artificial Sequence: Synthetic oligonucleotide
  Target: LAMA2; (-) strand; PAM type: NRG; PAM sequence: CGG
aaaacaattttaaaatcgca

SEQ ID NO: 78007 - DNA, 20 bp, Artificial Sequence
  Description of Artificial Sequence: Synthetic oligonucleotide
  Target: LAMA2; (-) strand; PAM type: NRG; PAM sequence: TAG
ttgatgtcatttttcagata

SEQ ID NO: 78008 - DNA, 20 bp, Artificial Sequence
  Description of Artificial Sequence: Synthetic oligonucleotide
  Target: LAMA2; (-) strand; PAM type: NRG; PAM sequence: CAG
aagattttgatgtcattttt

SEQ ID NO: 78009 - DNA, 20 bp, Artificial Sequence
  Description of Artificial Sequence: Synthetic oligonucleotide
  Target: LAMA2; (-) strand; PAM type: NRG; PAM sequence: AAG
atttcagtgcaaccactatc

SEQ ID NO: 78010 - DNA, 20 bp, Artificial Sequence
  Description of Artificial Sequence: Synthetic oligonucleotide
  Target: LAMA2; (-) strand; PAM type: NRG; PAM sequence: CAG
ccaaagcaatctacagattt

SEQ ID NO: 78011 - DNA, 20 bp, Artificial Sequence
  Description of Artificial Sequence: Synthetic oligonucleotide
  Target: LAMA2; (-) strand; PAM type: NRG; PAM sequence: CAG
ataatacccaaagcaatcta

SEQ ID NO: 78012 - DNA, 20 bp, Artificial Sequence
  Description of Artificial Sequence: Synthetic oligonucleotide
  Target: LAMA2; (-) strand; PAM type: NRG; PAM sequence: AAG
taaaatgttcataataccca

SEQ ID NO: 78013 - DNA, 20 bp, Artificial Sequence
  Description of Artificial Sequence: Synthetic oligonucleotide
  Target: LAMA2; (-) strand; PAM type: NRG; PAM sequence: AAG
atcctgtgttcatggattgg

SEQ ID NO: 78014 - DNA, 20 bp, Artificial Sequence
  Description of Artificial Sequence: Synthetic oligonucleotide
  Target: LAMA2; (-) strand; PAM type: NRG; PAM sequence: TGG
gatatcctgtgttcatggat

SEQ ID NO: 78015 - DNA, 20 bp, Artificial Sequence
  Description of Artificial Sequence: Synthetic oligonucleotide
  Target: LAMA2; (-) strand; PAM type: NRG; PAM sequence: TGG
ggaaagatatcctgtgttca

SEQ ID NO: 78016 - DNA, 20 bp, Artificial Sequence
  Description of Artificial Sequence: Synthetic oligonucleotide
  Target: LAMA2; (-) strand; PAM type: NRG; PAM sequence: AAG
agaaggcatgaataaatgga

SEQ ID NO: 78017 - DNA, 20 bp, Artificial Sequence
  Description of Artificial Sequence: Synthetic oligonucleotide
  Target: LAMA2; (-) strand; PAM type: NRG; PAM sequence: TGG
ttgaagaaggcatgaataaa

SEQ ID NO: 78018 - DNA, 20 bp, Artificial Sequence
  Description of Artificial Sequence: Synthetic oligonucleotide
  Target: LAMA2; (-) strand; PAM type: NRG; PAM sequence: AGG
ttgatgaaagaaattgaaga

SEQ ID NO: 78019 - DNA, 20 bp, Artificial Sequence
  Description of Artificial Sequence: Synthetic oligonucleotide
  Target: LAMA2; (-) strand; PAM type: NRG; PAM sequence: AAG
gttgatgaaagaaattgaag

SEQ ID NO: 78020 - DNA, 20 bp, Artificial Sequence
  Description of Artificial Sequence: Synthetic oligonucleotide
  Target: LAMA2; (-) strand; PAM type: NRG; PAM sequence: AAG
aatgttgatgaaagaaattg

SEQ ID NO: 78021 - DNA, 20 bp, Artificial Sequence
  Description of Artificial Sequence: Synthetic oligonucleotide
  Target: LAMA2; (-) strand; PAM type: NRG; PAM sequence: AAG
aaactgtaaaatgttgatga

SEQ ID NO: 78022 - DNA, 20 bp, Artificial Sequence
  Description of Artificial Sequence: Synthetic oligonucleotide
  Target: LAMA2; (-) strand; PAM type: NRG; PAM sequence: AAG
aatttaaccaaggagttgaa

SEQ ID NO: 78023 - DNA, 20 bp, Artificial Sequence
  Description of Artificial Sequence: Synthetic oligonucleotide
  Target: LAMA2; (-) strand; PAM type: NRG; PAM sequence: GAG
taggaataaatttaaccaag

SEQ ID NO: 78024 - DNA, 20 bp, Artificial Sequence
  Description of Artificial Sequence: Synthetic oligonucleotide
  Target: LAMA2; (-) strand; PAM type: NRG; PAM sequence: AGG
cttaggaataaatttaacca

SEQ ID NO: 78025 - DNA, 20 bp, Artificial Sequence
  Description of Artificial Sequence: Synthetic oligonucleotide
  Target: LAMA2; (-) strand; PAM type: NRG; PAM sequence: AAG
gcttaggaataaatttaacc

SEQ ID NO: 78026 - DNA, 20 bp, Artificial Sequence
  Description of Artificial Sequence: Synthetic oligonucleotide
  Target: LAMA2; (-) strand; PAM type: NRG; PAM sequence: AGG
ataaaaaagattaaatgctt

SEQ ID NO: 78027 - DNA, 20 bp, Artificial Sequence
  Description of Artificial Sequence: Synthetic oligonucleotide
  Target: LAMA2; (-) strand; PAM type: NRG; PAM sequence: TAG
tataaaaaagattaaatgct

SEQ ID NO: 78028 - DNA, 20 bp, Artificial Sequence
  Description of Artificial Sequence: Synthetic oligonucleotide
  Target: LAMA2; (-) strand; PAM type: NRG; PAM sequence: AAG
catttacaatagctataaaa

SEQ ID NO: 78029 - DNA, 20 bp, Artificial Sequence
  Description of Artificial Sequence: Synthetic oligonucleotide
  Target: LAMA2; (-) strand; PAM type: NRG; PAM sequence: TAG
ttaaaaaatcccatttacaa

SEQ ID NO: 78030 - DNA, 20 bp, Artificial Sequence
  Description of Artificial Sequence: Synthetic oligonucleotide
  Target: LAMA2; (-) strand; PAM type: NRG; PAM sequence: GAG
ccatctatgaaatatacttg

SEQ ID NO: 78031 - DNA, 20 bp, Artificial Sequence
  Description of Artificial Sequence: Synthetic oligonucleotide
  Target: LAMA2; (-) strand; PAM type: NRG; PAM sequence: TGG
tgccatctatgaaatatact

SEQ ID NO: 78032 - DNA, 20 bp, Artificial Sequence
  Description of Artificial Sequence: Synthetic oligonucleotide
  Target: LAMA2; (-) strand; PAM type: NRG; PAM sequence: AGG
aaatgccatttacagaataa

SEQ ID NO: 78033 - DNA, 20 bp, Artificial Sequence
  Description of Artificial Sequence: Synthetic oligonucleotide
  Target: LAMA2; (-) strand; PAM type: NRG; PAM sequence: AAG
taaatgccatttacagaata

SEQ ID NO: 78034 - DNA, 20 bp, Artificial Sequence
  Description of Artificial Sequence: Synthetic oligonucleotide
  Target: LAMA2; (-) strand; PAM type: NRG; PAM sequence: CAG
tactatataaatgccattta

SEQ ID NO: 78035 - DNA, 20 bp, Artificial Sequence
  Description of Artificial Sequence: Synthetic oligonucleotide
  Target: LAMA2; (-) strand; PAM type: NRG; PAM sequence: AAG
aataatcattcaccatggaa

SEQ ID NO: 78036 - DNA, 20 bp, Artificial Sequence
  Description of Artificial Sequence: Synthetic oligonucleotide
  Target: LAMA2; (-) strand; PAM type: NRG; PAM sequence: TGG
agactaataatcattcacca

SEQ ID NO: 78037 - DNA, 20 bp, Artificial Sequence
  Description of Artificial Sequence: Synthetic oligonucleotide
  Target: LAMA2; (-) strand; PAM type: NRG; PAM sequence: AAG
caaatctttgtatttcactt

SEQ ID NO: 78038 - DNA, 20 bp, Artificial Sequence
  Description of Artificial Sequence: Synthetic oligonucleotide
  Target: LAMA2; (-) strand; PAM type: NRG; PAM sequence: AAG
cagccaaggatagtttactt

SEQ ID NO: 78039 - DNA, 20 bp, Artificial Sequence
  Description of Artificial Sequence: Synthetic oligonucleotide
  Target: LAMA2; (-) strand; PAM type: NRG; PAM sequence: TAG
aagaaactggcagccaagga

SEQ ID NO: 78040 - DNA, 20 bp, Artificial Sequence
  Description of Artificial Sequence: Synthetic oligonucleotide
  Target: LAMA2; (-) strand; PAM type: NRG; PAM sequence: AGG
aagaaagaaactggcagcca

SEQ ID NO: 78041 - DNA, 20 bp, Artificial Sequence
  Description of Artificial Sequence: Synthetic oligonucleotide
  Target: LAMA2; (-) strand; PAM type: NRG; PAM sequence: AAG
taagaaagaaactggcagcc

SEQ ID NO: 78042 - DNA, 20 bp, Artificial Sequence
  Description of Artificial Sequence: Synthetic oligonucleotide
  Target: LAMA2; (-) strand; PAM type: NRG; PAM sequence: CAG
acttttaagaaagaaactgg

SEQ ID NO: 78043 - DNA, 20 bp, Artificial Sequence
  Description of Artificial Sequence: Synthetic oligonucleotide
  Target: LAMA2; (-) strand; PAM type: NRG; PAM sequence: TGG
taaacttttaagaaagaaac

SEQ ID NO: 78044 - DNA, 20 bp, Artificial Sequence
  Description of Artificial Sequence: Synthetic oligonucleotide
  Target: LAMA2; (-) strand; PAM type: NRG; PAM sequence: AAG
gaaatattaaacttttaaga

SEQ ID NO: 78045 - DNA, 20 bp, Artificial Sequence
  Description of Artificial Sequence: Synthetic oligonucleotide
  Target: LAMA2; (-) strand; PAM type: NRG; PAM sequence: AAG
ctgggaaatattaaactttt

SEQ ID NO: 78046 - DNA, 20 bp, Artificial Sequence
  Description of Artificial Sequence: Synthetic oligonucleotide
  Target: LAMA2; (-) strand; PAM type: NRG; PAM sequence: GGG
gtcaaccacaggaagttgct

SEQ ID NO: 78047 - DNA, 20 bp, Artificial Sequence
  Description of Artificial Sequence: Synthetic oligonucleotide
  Target: LAMA2; (-) strand; PAM type: NRG; PAM sequence: TGG
agtcaaccacaggaagttgc

SEQ ID NO: 78048 - DNA, 20 bp, Artificial Sequence
  Description of Artificial Sequence: Synthetic oligonucleotide
  Target: LAMA2; (-) strand; PAM type: NRG; PAM sequence: AAG
ccttaagagtcaaccacagg

SEQ ID NO: 78049 - DNA, 20 bp, Artificial Sequence
  Description of Artificial Sequence: Synthetic oligonucleotide
  Target: LAMA2; (-) strand; PAM type: NRG; PAM sequence: AGG
tatccttaagagtcaaccac

SEQ ID NO: 78050 - DNA, 20 bp, Artificial Sequence
  Description of Artificial Sequence: Synthetic oligonucleotide
  Target: LAMA2; (-) strand; PAM type: NRG; PAM sequence: CAG
gtatccttaagagtcaacca

SEQ ID NO: 78051 - DNA, 20 bp, Artificial Sequence
  Description of Artificial Sequence: Synthetic oligonucleotide
  Target: LAMA2; (-) strand; PAM type: NRG; PAM sequence: GAG
ttcagcttcagtatccttaa

SEQ ID NO: 78052 - DNA, 20 bp, Artificial Sequence
  Description of Artificial Sequence: Synthetic oligonucleotide
  Target: LAMA2; (-) strand; PAM type: NRG; PAM sequence: AAG
ctttcagcttcagtatcctt

SEQ ID NO: 78053 - DNA, 20 bp, Artificial Sequence
  Description of Artificial Sequence: Synthetic oligonucleotide
  Target: LAMA2; (-) strand; PAM type: NRG; PAM sequence: CAG
tgctgggctcctttcagctt

SEQ ID NO: 78054 - DNA, 20 bp, Artificial Sequence
  Description of Artificial Sequence: Synthetic oligonucleotide
  Target: LAMA2; (-) strand; PAM type: NRG; PAM sequence: CAG
cagaattgctgggctccttt

SEQ ID NO: 78055 - DNA, 20 bp, Artificial Sequence
  Description of Artificial Sequence: Synthetic oligonucleotide
  Target: LAMA2; (-) strand; PAM type: NRG; PAM sequence: GGG
ctccatcacccagaattgct

SEQ ID NO: 78056 - DNA, 20 bp, Artificial Sequence
  Description of Artificial Sequence: Synthetic oligonucleotide
  Target: LAMA2; (-) strand; PAM type: NRG; PAM sequence: TGG
cctccatcacccagaattgc

SEQ ID NO: 78057 - DNA, 20 bp, Artificial Sequence
  Description of Artificial Sequence: Synthetic oligonucleotide
  Target: LAMA2; (-) strand; PAM type: NRG; PAM sequence: CAG
cacgtatttcctccatcacc

SEQ ID NO: 78058 - DNA, 20 bp, Artificial Sequence
  Description of Artificial Sequence: Synthetic oligonucleotide
  Target: LAMA2; (-) strand; PAM type: NRG; PAM sequence: TGG
aagatacggacagcagagcc

SEQ ID NO: 78059 - DNA, 20 bp, Artificial Sequence
  Description of Artificial Sequence: Synthetic oligonucleotide
  Target: LAMA2; (-) strand; PAM type: NRG; PAM sequence: GAG
tgaggaagatacggacagca

SEQ ID NO: 78060 - DNA, 20 bp, Artificial Sequence
  Description of Artificial Sequence: Synthetic oligonucleotide
  Target: LAMA2; (-) strand; PAM type: NRG; PAM sequence: CAG
attgaggaagatacggacag

SEQ ID NO: 78061 - DNA, 20 bp, Artificial Sequence
  Description of Artificial Sequence: Synthetic oligonucleotide
  Target: LAMA2; (-) strand; PAM type: NRG; PAM sequence: CAG
aaaattgaggaagatacgga

SEQ ID NO: 78062 - DNA, 20 bp, Artificial Sequence
  Description of Artificial Sequence: Synthetic oligonucleotide
  Target: LAMA2; (-) strand; PAM type: NRG; PAM sequence: CGG
gttgaaaattgaggaagata

SEQ ID NO: 78063 - DNA, 20 bp, Artificial Sequence
  Description of Artificial Sequence: Synthetic oligonucleotide
  Target: LAMA2; (-) strand; PAM type: NRG; PAM sequence: AAG
attcaagttgaaaattgagg

SEQ ID NO: 78064 - DNA, 20 bp, Artificial Sequence
  Description of Artificial Sequence: Synthetic oligonucleotide
  Target: LAMA2; (-) strand; PAM type: NRG; PAM sequence: AGG
aaaattcaagttgaaaattg

SEQ ID NO: 78065 - DNA, 20 bp, Artificial Sequence
  Description of Artificial Sequence: Synthetic oligonucleotide
  Target: LAMA2; (-) strand; PAM type: NRG; PAM sequence: GAG
taaaattcaagttgaaaatt

SEQ ID NO: 78066 - DNA, 20 bp, Artificial Sequence
  Description of Artificial Sequence: Synthetic oligonucleotide
  Target: LAMA2; (-) strand; PAM type: NRG; PAM sequence: AAG
agagtagaagtataaaattc

SEQ ID NO: 78067 - DNA, 20 bp, Artificial Sequence
  Description of Artificial Sequence: Synthetic oligonucleotide
  Target: LAMA2; (-) strand; PAM type: NRG; PAM sequence: AAG
aaaattaaaggtcagagtag

SEQ ID NO: 78068 - DNA, 20 bp, Artificial Sequence
  Description of Artificial Sequence: Synthetic oligonucleotide
  Target: LAMA2; (-) strand; PAM type: NRG; PAM sequence: TAG
acaaaaattaaaggtcagag

SEQ ID NO: 78069 - DNA, 20 bp, Artificial Sequence
  Description of Artificial Sequence: Synthetic oligonucleotide
  Target: LAMA2; (-) strand; PAM type: NRG; PAM sequence: GAG
atcacaaaaattaaaggtca

SEQ ID NO: 78070 - DNA, 20 bp, Artificial Sequence
  Description of Artificial Sequence: Synthetic oligonucleotide
  Target: LAMA2; (-) strand; PAM type: NRG; PAM sequence: CAG
agatcacaaaaattaaaggt

SEQ ID NO: 78071 - DNA, 20 bp, Artificial Sequence
  Description of Artificial Sequence: Synthetic oligonucleotide
  Target: LAMA2; (-) strand; PAM type: NRG; PAM sequence: AGG
aattagatcacaaaaattaa

SEQ ID NO: 78072 - DNA, 20 bp, Artificial Sequence
  Description of Artificial Sequence: Synthetic oligonucleotide
  Target: LAMA2; (-) strand; PAM type: NRG; PAM sequence: AAG
aaattagatcacaaaaatta

SEQ ID NO: 78073 - DNA, 20 bp, Artificial Sequence
  Description of Artificial Sequence: Synthetic oligonucleotide
  Target: LAMA2; (-) strand; PAM type: NRG; PAM sequence: TAG
attattggggaaaaggaaat

SEQ ID NO: 78074 - DNA, 20 bp, Artificial Sequence
  Description of Artificial Sequence: Synthetic oligonucleotide
  Target: LAMA2; (-) strand; PAM type: NRG; PAM sequence: AGG
aacaaatattattggggaaa

SEQ ID NO: 78075 - DNA, 20 bp, Artificial Sequence
  Description of Artificial Sequence: Synthetic oligonucleotide
  Target: LAMA2; (-) strand; PAM type: NRG; PAM sequence: AAG
aaacaaatattattggggaa

SEQ ID NO: 78076 - DNA, 20 bp, Artificial Sequence
  Description of Artificial Sequence: Synthetic oligonucleotide
  Target: LAMA2; (-) strand; PAM type: NRG; PAM sequence: GGG
ttcaaaaacaaatattattg

SEQ ID NO: 78077 - DNA, 20 bp, Artificial Sequence
  Description of Artificial Sequence: Synthetic oligonucleotide
  Target: LAMA2; (-) strand; PAM type: NRG; PAM sequence: GGG
gttcaaaaacaaatattatt

SEQ ID NO: 78078 - DNA, 20 bp, Artificial Sequence
  Description of Artificial Sequence: Synthetic oligonucleotide
  Target: LAMA2; (-) strand; PAM type: NRG; PAM sequence: TGG
agttcaaaaacaaatattat

SEQ ID NO: 78079 - DNA, 20 bp, Artificial Sequence
  Description of Artificial Sequence: Synthetic oligonucleotide
  Target: LAMA2; (-) strand; PAM type: NRG; PAM sequence: TAG
ttaaatggcatgaggaagac

SEQ ID NO: 78080 - DNA, 20 bp, Artificial Sequence
  Description of Artificial Sequence: Synthetic oligonucleotide
  Target: LAMA2; (-) strand; PAM type: NRG; PAM sequence: AAG
tttctttaaatggcatgagg

SEQ ID NO: 78081 - DNA, 20 bp, Artificial Sequence
  Description of Artificial Sequence: Synthetic oligonucleotide
  Target: LAMA2; (-) strand; PAM type: NRG; PAM sequence: AGG
atttttctttaaatggcatg

SEQ ID NO: 78082 - DNA, 20 bp, Artificial Sequence
  Description of Artificial Sequence: Synthetic oligonucleotide
  Target: LAMA2; (-) strand; PAM type: NRG; PAM sequence: GAG
aatttttctttaaatggcat

SEQ ID NO: 78083 - DNA, 20 bp, Artificial Sequence
  Description of Artificial Sequence: Synthetic oligonucleotide
  Target: LAMA2; (-) strand; PAM type: NRG; PAM sequence: TGG
tcctgaaatttttctttaaa

SEQ ID NO: 78084 - DNA, 20 bp, Artificial Sequence
  Description of Artificial Sequence: Synthetic oligonucleotide
  Target: LAMA2; (-) strand; PAM type: NRG; PAM sequence: GGG
ctttcaaaataattattttg

SEQ ID NO: 78085 - DNA, 20 bp, Artificial Sequence
  Description of Artificial Sequence: Synthetic oligonucleotide
  Target: LAMA2; (-) strand; PAM type: NRG; PAM sequence: GGG
tctttcaaaataattatttt

SEQ ID NO: 78086 - DNA, 20 bp, Artificial Sequence
  Description of Artificial Sequence: Synthetic oligonucleotide
  Target: LAMA2; (-) strand; PAM type: NRG; PAM sequence: TGG
ctctttcaaaataattattt

SEQ ID NO: 78087 - DNA, 20 bp, Artificial Sequence
  Description of Artificial Sequence: Synthetic oligonucleotide
  Target: LAMA2; (-) strand; PAM type: NRG; PAM sequence: GAG
cagagtttataaattcaaat

SEQ ID NO: 78088 - DNA, 20 bp, Artificial Sequence
  Description of Artificial Sequence: Synthetic oligonucleotide
  Target: LAMA2; (-) strand; PAM type: NRG; PAM sequence: GAG
attttaaaataagcattcca

SEQ ID NO: 78089 - DNA, 20 bp, Artificial Sequence
  Description of Artificial Sequence: Synthetic oligonucleotide
  Target: LAMA2; (-) strand; PAM type: NRG; PAM sequence: CAG
taattttaaaataagcattc

SEQ ID NO: 78090 - DNA, 20 bp, Artificial Sequence
  Description of Artificial Sequence: Synthetic oligonucleotide
  Target: LAMA2; (-) strand; PAM type: NRG; PAM sequence: AAG
acattagttaattttaaaat

SEQ ID NO: 78091 - DNA, 20 bp, Artificial Sequence
  Description of Artificial Sequence: Synthetic oligonucleotide
  Target: LAMA2; (-) strand; PAM type: NRG; PAM sequence: TAG
ttgtatgtaggttaacacat

SEQ ID NO: 78092 - DNA, 20 bp, Artificial Sequence
  Description of Artificial Sequence: Synthetic oligonucleotide
  Target: LAMA2; (-) strand; PAM type: NRG; PAM sequence: AGG
aaaaatacaaatttgtatgt

SEQ ID NO: 78093 - DNA, 20 bp, Artificial Sequence
  Description of Artificial Sequence: Synthetic oligonucleotide
  Target: LAMA2; (-) strand; PAM type: NRG; PAM sequence: TAG
taaaaatacaaatttgtatg

SEQ ID NO: 78094 - DNA, 20 bp, Artificial Sequence
  Description of Artificial Sequence: Synthetic oligonucleotide
  Target: LAMA2; (-) strand; PAM type: NRG; PAM sequence: AAG
agcaatgctgcttttccttc

SEQ ID NO: 78095 - DNA, 20 bp, Artificial Sequence
  Description of Artificial Sequence: Synthetic oligonucleotide
  Target: LAMA2; (-) strand; PAM type: NRG; PAM sequence: CAG
cagaagcacatgtgcactac

SEQ ID NO: 78096 - DNA, 20 bp, Artificial Sequence
  Description of Artificial Sequence: Synthetic oligonucleotide
  Target: LAMA2; (-) strand; PAM type: NRG; PAM sequence: AAG
tgtacaatctgtatgtacag

SEQ ID NO: 78097 - DNA, 20 bp, Artificial Sequence
  Description of Artificial Sequence: Synthetic oligonucleotide
  Target: LAMA2; (-) strand; PAM type: NRG; PAM sequence: CAG
atgtgtacaatctgtatgta

SEQ ID NO: 78098 - DNA, 20 bp, Artificial Sequence
  Description of Artificial Sequence: Synthetic oligonucleotide
  Target: LAMA2; (-) strand; PAM type: NRG; PAM sequence: TGG
gagaggaaatgattctctta

SEQ ID NO: 78099 - DNA, 20 bp, Artificial Sequence
  Description of Artificial Sequence: Synthetic oligonucleotide
  Target: LAMA2; (-) strand; PAM type: NRG; PAM sequence: AGG
aatggccctgataaaaagag

SEQ ID NO: 78100 - DNA, 20 bp, Artificial Sequence
  Description of Artificial Sequence: Synthetic oligonucleotide
  Target: LAMA2; (-) strand; PAM type: NRG; PAM sequence: GAG
taatggccctgataaaaaga

SEQ ID NO: 78101 - DNA, 20 bp, Artificial Sequence
  Description of Artificial Sequence: Synthetic oligonucleotide
  Target: LAMA2; (-) strand; PAM type: NRG; PAM sequence: GAG
tgtaatggccctgataaaaa

SEQ ID NO: 78102 - DNA, 20 bp, Artificial Sequence
  Description of Artificial Sequence: Synthetic oligonucleotide
  Target: LAMA2; (-) strand; PAM type: NRG; PAM sequence: AAG
gatgtaatggccctgataaa

SEQ ID NO: 78103 - DNA, 20 bp, Artificial Sequence
  Description of Artificial Sequence: Synthetic oligonucleotide
  Target: LAMA2; (-) strand; PAM type: NRG; PAM sequence: TGG
ctatttgagaaatgatgtaa

SEQ ID NO: 78104 - DNA, 20 bp, Artificial Sequence
  Description of Artificial Sequence: Synthetic oligonucleotide
  Target: LAMA2; (-) strand; PAM type: NRG; PAM sequence: GAG
ttcctaacagtggtctattt

SEQ ID NO: 78105 - DNA, 20 bp, Artificial Sequence
  Description of Artificial Sequence: Synthetic oligonucleotide
  Target: LAMA2; (-) strand; PAM type: NRG; PAM sequence: TGG
atatccctacttcctaacag

SEQ ID NO: 78106 - DNA, 20 bp, Artificial Sequence
  Description of Artificial Sequence: Synthetic oligonucleotide
  Target: LAMA2; (-) strand; PAM type: NRG; PAM sequence: CAG
tatatatccctacttcctaa

SEQ ID NO: 78107 - DNA, 20 bp, Artificial Sequence
  Description of Artificial Sequence: Synthetic oligonucleotide
  Target: LAMA2; (-) strand; PAM type: NRG; PAM sequence: GAG
gcaccactctggttttactt

SEQ ID NO: 78108 - DNA, 20 bp, Artificial Sequence
  Description of Artificial Sequence: Synthetic oligonucleotide
  Target: LAMA2; (-) strand; PAM type: NRG; PAM sequence: TGG
ttgtaggatatgcaccactc

SEQ ID NO: 78109 - DNA, 20 bp, Artificial Sequence
  Description of Artificial Sequence: Synthetic oligonucleotide
  Target: LAMA2; (-) strand; PAM type: NRG; PAM sequence: AGG
atgccttattctcaatttgt

SEQ ID NO: 78110 - DNA, 20 bp, Artificial Sequence
  Description of Artificial Sequence: Synthetic oligonucleotide
  Target: LAMA2; (-) strand; PAM type: NRG; PAM sequence: TAG
tatgccttattctcaatttg

SEQ ID NO: 78111 - DNA, 20 bp, Artificial Sequence
  Description of Artificial Sequence: Synthetic oligonucleotide
  Target: LAMA2; (-) strand; PAM type: NRG; PAM sequence: AAG
gccaaaatatgttattttaa

SEQ ID NO: 78112 - DNA, 20 bp, Artificial Sequence
  Description of Artificial Sequence: Synthetic oligonucleotide
  Target: LAMA2; (-) strand; PAM type: NRG; PAM sequence: CGG
caggcgtgagccaccgcgcc

SEQ ID NO: 78113 - DNA, 20 bp, Artificial Sequence
  Description of Artificial Sequence: Synthetic oligonucleotide
  Target: LAMA2; (-) strand; PAM type: NRG; PAM sequence: GAG
agtgctgggattacaggcgt

SEQ ID NO: 78114 - DNA, 20 bp, Artificial Sequence
  Description of Artificial Sequence: Synthetic oligonucleotide
  Target: LAMA2; (-) strand; PAM type: NRG; PAM sequence: AGG
tcccaaagtgctgggattac

SEQ ID NO: 78115 - DNA, 20 bp, Artificial Sequence
  Description of Artificial Sequence: Synthetic oligonucleotide
  Target: LAMA2; (-) strand; PAM type: NRG; PAM sequence: CAG
ctcccaaagtgctgggatta

SEQ ID NO: 78116 - DNA, 20 bp, Artificial Sequence
  Description of Artificial Sequence: Synthetic oligonucleotide
  Target: LAMA2; (-) strand; PAM type: NRG; PAM sequence: GGG
cctcggcctcccaaagtgct

SEQ ID NO: 78117 - DNA, 20 bp, Artificial Sequence
  Description of Artificial Sequence: Synthetic oligonucleotide
  Target: LAMA2; (-) strand; PAM type: NRG; PAM sequence: TGG
gcctcggcctcccaaagtgc

SEQ ID NO: 78118 - DNA, 20 bp, Artificial Sequence
  Description of Artificial Sequence: Synthetic oligonucleotide
  Target: LAMA2; (-) strand; PAM type: NRG; PAM sequence: AAG
ccgcccgcctcggcctccca

SEQ ID NO: 78119 - DNA, 20 bp, Artificial Sequence
  Description of Artificial Sequence: Synthetic oligonucleotide
  Target: LAMA2; (-) strand; PAM type: NRG; PAM sequence: CGG
acctcgtgatccgcccgcct

SEQ ID NO: 78120 - DNA, 20 bp, Artificial Sequence
  Description of Artificial Sequence: Synthetic oligonucleotide
  Target: LAMA2; (-) strand; PAM type: NRG; PAM sequence: TGG
tttcaccgttttagccggga

SEQ ID NO: 78121 - DNA, 20 bp, Artificial Sequence
  Description of Artificial Sequence: Synthetic oligonucleotide
  Target: LAMA2; (-) strand; PAM type: NRG; PAM sequence: GGG
ggggtttcaccgttttagcc

SEQ ID NO: 78122 - DNA, 20 bp, Artificial Sequence
  Description of Artificial Sequence: Synthetic oligonucleotide
  Target: LAMA2; (-) strand; PAM type: NRG; PAM sequence: CGG
cggggtttcaccgttttagc

SEQ ID NO: 78123 - DNA, 20 bp, Artificial Sequence
  Description of Artificial Sequence: Synthetic oligonucleotide
  Target: LAMA2; (-) strand; PAM type: NRG; PAM sequence: TAG
gagacggggtttcaccgttt

SEQ ID NO: 78124 - DNA, 20 bp, Artificial Sequence
  Description of Artificial Sequence: Synthetic oligonucleotide
  Target: LAMA2; (-) strand; PAM type: NRG; PAM sequence: GGG
ttgtatttttagtagagacg

SEQ ID NO: 78125 - DNA, 20 bp, Artificial Sequence
  Description of Artificial Sequence: Synthetic oligonucleotide
  Target: LAMA2; (-) strand; PAM type: NRG; PAM sequence: GGG
tttgtatttttagtagagac

SEQ ID NO: 78126 - DNA, 20 bp, Artificial Sequence
  Description of Artificial Sequence: Synthetic oligonucleotide
  Target: LAMA2; (-) strand; PAM type: NRG; PAM sequence: CGG
ttttgtatttttagtagaga

SEQ ID NO: 78127 - DNA, 20 bp, Artificial Sequence
  Description of Artificial Sequence: Synthetic oligonucleotide
  Target: LAMA2; (-) strand; PAM type: NRG; PAM sequence: GAG
aattttttgtatttttagta

SEQ ID NO: 78128 - DNA, 20 bp, Artificial Sequence
  Description of Artificial Sequence: Synthetic oligonucleotide
  Target: LAMA2; (-) strand; PAM type: NRG; PAM sequence: TAG
ctaattttttgtatttttag

SEQ ID NO: 78129 - DNA, 20 bp, Artificial Sequence
  Description of Artificial Sequence: Synthetic oligonucleotide
  Target: LAMA2; (-) strand; PAM type: NRG; PAM sequence: TAG
tggctaattttttgtatttt

SEQ ID NO: 78130 - DNA, 20 bp, Artificial Sequence
  Description of Artificial Sequence: Synthetic oligonucleotide
  Target: LAMA2; (-) strand; PAM type: NRG; PAM sequence: TGG
caggcgcccgccactacgcc

SEQ ID NO: 78131 - DNA, 20 bp, Artificial Sequence
  Description of Artificial Sequence: Synthetic oligonucleotide
  Target: LAMA2; (-) strand; PAM type: NRG; PAM sequence: AGG
tcccaagtagctgggactac

SEQ ID NO: 78132 - DNA, 20 bp, Artificial Sequence
  Description of Artificial Sequence: Synthetic oligonucleotide
  Target: LAMA2; (-) strand; PAM type: NRG; PAM sequence: CAG
ctcccaagtagctgggacta

SEQ ID NO: 78133 - DNA, 20 bp, Artificial Sequence
  Description of Artificial Sequence: Synthetic oligonucleotide
  Target: LAMA2; (-) strand; PAM type: NRG; PAM sequence: GGG
cctcagcctcccaagtagct

SEQ ID NO: 78134 - DNA, 20 bp, Artificial Sequence
  Description of Artificial Sequence: Synthetic oligonucleotide
  Target: LAMA2; (-) strand; PAM type: NRG; PAM sequence: TGG
gcctcagcctcccaagtagc

SEQ ID NO: 78135 - DNA, 20 bp, Artificial Sequence
  Description of Artificial Sequence: Synthetic oligonucleotide
  Target: LAMA2; (-) strand; PAM type: NRG; PAM sequence: TAG
tcctgcctcagcctcccaag

SEQ ID NO: 78136 - DNA, 20 bp, Artificial Sequence
  Description of Artificial Sequence: Synthetic oligonucleotide
  Target: LAMA2; (-) strand; PAM type: NRG; PAM sequence: AAG
ttctcctgcctcagcctccc

SEQ ID NO: 78137 - DNA, 20 bp, Artificial Sequence
  Description of Artificial Sequence: Synthetic oligonucleotide
  Target: LAMA2; (-) strand; PAM type: NRG; PAM sequence: CAG
ttcacgccattctcctgcct

SEQ ID NO: 78138 - DNA, 20 bp, Artificial Sequence
  Description of Artificial Sequence: Synthetic oligonucleotide
  Target: LAMA2; (-) strand; PAM type: NRG; PAM sequence: GGG
cactgcaagctccgcctccc

SEQ ID NO: 78139 - DNA, 20 bp, Artificial Sequence
  Description of Artificial Sequence: Synthetic oligonucleotide
  Target: LAMA2; (-) strand; PAM type: NRG; PAM sequence: CGG
tcactgcaagctccgcctcc

SEQ ID NO: 78140 - DNA, 20 bp, Artificial Sequence
  Description of Artificial Sequence: Synthetic oligonucleotide
  Target: LAMA2; (-) strand; PAM type: NRG; PAM sequence: AAG
gcgggatctcggctcactgc

SEQ ID NO: 78141 - DNA, 20 bp, Artificial Sequence
  Description of Artificial Sequence: Synthetic oligonucleotide
  Target: LAMA2; (-) strand; PAM type: NRG; PAM sequence: CGG
ggagtgcagtggcgggatct

SEQ ID NO: 78142 - DNA, 20 bp, Artificial Sequence
  Description of Artificial Sequence: Synthetic oligonucleotide
  Target: LAMA2; (-) strand; PAM type: NRG; PAM sequence: GGG
ccaggctggagtgcagtggc

SEQ ID NO: 78143 - DNA, 20 bp, Artificial Sequence
  Description of Artificial Sequence: Synthetic oligonucleotide
  Target: LAMA2; (-) strand; PAM type: NRG; PAM sequence: CGG
cccaggctggagtgcagtgg

SEQ ID NO: 78144 - DNA, 20 bp, Artificial Sequence
  Description of Artificial Sequence: Synthetic oligonucleotide
  Target: LAMA2; (-) strand; PAM type: NRG; PAM sequence: TGG
tcgcccaggctggagtgcag

SEQ ID NO: 78145 - DNA, 20 bp, Artificial Sequence
  Description of Artificial Sequence: Synthetic oligonucleotide
  Target: LAMA2; (-) strand; PAM type: NRG; PAM sequence: CAG
ctgtcgcccaggctggagtg

SEQ ID NO: 78146 - DNA, 20 bp, Artificial Sequence
  Description of Artificial Sequence: Synthetic oligonucleotide
  Target: LAMA2; (-) strand; PAM type: NRG; PAM sequence: GAG
tcgctctgtcgcccaggctg

SEQ ID NO: 78147 - DNA, 20 bp, Artificial Sequence
  Description of Artificial Sequence: Synthetic oligonucleotide
  Target: LAMA2; (-) strand; PAM type: NRG; PAM sequence: TGG
tctcgctctgtcgcccaggc

SEQ ID NO: 78148 - DNA, 20 bp, Artificial Sequence
  Description of Artificial Sequence: Synthetic oligonucleotide
  Target: LAMA2; (-) strand; PAM type: NRG; PAM sequence: AGG
ggaatctcgctctgtcgccc

SEQ ID NO: 78149 - DNA, 20 bp, Artificial Sequence
  Description of Artificial Sequence: Synthetic oligonucleotide
  Target: LAMA2; (-) strand; PAM type: NRG; PAM sequence: CAG
cggaatctcgctctgtcgcc

SEQ ID NO: 78150 - DNA, 20 bp, Artificial Sequence
  Description of Artificial Sequence: Synthetic oligonucleotide
  Target: LAMA2; (-) strand; PAM type: NRG; PAM sequence: CGG
ttttttttttttttttgaga

SEQ ID NO: 78151 - DNA, 20 bp, Artificial Sequence
  Description of Artificial Sequence: Synthetic oligonucleotide
  Target: LAMA2; (-) strand; PAM type: NRG; PAM sequence: GAG
tttttttttttttttttttt

SEQ ID NO: 78152 - DNA, 20 bp, Artificial Sequence
  Description of Artificial Sequence: Synthetic oligonucleotide
  Target: LAMA2; (-) strand; PAM type: NRG; PAM sequence: GAG
ccctttaaaattattttact

SEQ ID NO: 78153 - DNA, 20 bp, Artificial Sequence
  Description of Artificial Sequence: Synthetic oligonucleotide
  Target: LAMA2; (-) strand; PAM type: NRG; PAM sequence: CAG
gaaataatgcttcctcctaa

SEQ ID NO: 78154 - DNA, 20 bp, Artificial Sequence
  Description of Artificial Sequence: Synthetic oligonucleotide
  Target: LAMA2; (-) strand; PAM type: NRG; PAM sequence: TAG
tatcctccaataatgtgctg

SEQ ID NO: 78155 - DNA, 20 bp, Artificial Sequence
  Description of Artificial Sequence: Synthetic oligonucleotide
  Target: LAMA2; (-) strand; PAM type: NRG; PAM sequence: TGG
ttataattaagctctttcac

SEQ ID NO: 78156 - DNA, 20 bp, Artificial Sequence
  Description of Artificial Sequence: Synthetic oligonucleotide
  Target: LAMA2; (-) strand; PAM type: NRG; PAM sequence: AAG
ctttctgctctattataatt

SEQ ID NO: 78157 - DNA, 20 bp, Artificial Sequence
  Description of Artificial Sequence: Synthetic oligonucleotide
  Target: LAMA2; (-) strand; PAM type: NRG; PAM sequence: CAG
ctgaaaatctgatcaatatt

SEQ ID NO: 78158 - DNA, 20 bp, Artificial Sequence
  Description of Artificial Sequence: Synthetic oligonucleotide
  Target: LAMA2; (-) strand; PAM type: NRG; PAM sequence: AGG
atgtggtggggtttgtttgc

SEQ ID NO: 78159 - DNA, 20 bp, Artificial Sequence
  Description of Artificial Sequence: Synthetic oligonucleotide
  Target: LAMA2; (-) strand; PAM type: NRG; PAM sequence: CAG
tatgtggtggggtttgtttg

SEQ ID NO: 78160 - DNA, 20 bp, Artificial Sequence
  Description of Artificial Sequence: Synthetic oligonucleotide
  Target: LAMA2; (-) strand; PAM type: NRG; PAM sequence: GGG
actagtgctagtatgtggtg

SEQ ID NO: 78161 - DNA, 20 bp, Artificial Sequence
  Description of Artificial Sequence: Synthetic oligonucleotide
  Target: LAMA2; (-) strand; PAM type: NRG; PAM sequence: GGG
gactagtgctagtatgtggt

SEQ ID NO: 78162 - DNA, 20 bp, Artificial Sequence
  Description of Artificial Sequence: Synthetic oligonucleotide
  Target: LAMA2; (-) strand; PAM type: NRG; PAM sequence: TGG
tgactagtgctagtatgtgg

SEQ ID NO: 78163 - DNA, 20 bp, Artificial Sequence
  Description of Artificial Sequence: Synthetic oligonucleotide
  Target: LAMA2; (-) strand; PAM type: NRG; PAM sequence: TGG
ctatgactagtgctagtatg

SEQ ID NO: 78164 - DNA, 20 bp, Artificial Sequence
  Description of Artificial Sequence: Synthetic oligonucleotide
  Target: LAMA2; (-) strand; PAM type: NRG; PAM sequence: TAG
ctcagtcctatgactagtgc

SEQ ID NO: 78165 - DNA, 20 bp, Artificial Sequence
  Description of Artificial Sequence: Synthetic oligonucleotide
  Target: LAMA2; (-) strand; PAM type: NRG; PAM sequence: TAG
acaaatctcagtcctatgac

SEQ ID NO: 78166 - DNA, 20 bp, Artificial Sequence
  Description of Artificial Sequence: Synthetic oligonucleotide
  Target: LAMA2; (-) strand; PAM type: NRG; PAM sequence: CAG
gagctagctttgacaaatct

SEQ ID NO: 78167 - DNA, 20 bp, Artificial Sequence
  Description of Artificial Sequence: Synthetic oligonucleotide
  Target: LAMA2; (-) strand; PAM type: NRG; PAM sequence: TAG
agagtgcaccagaagagagc

SEQ ID NO: 78168 - DNA, 20 bp, Artificial Sequence
  Description of Artificial Sequence: Synthetic oligonucleotide
  Target: LAMA2; (-) strand; PAM type: NRG; PAM sequence: GAG
aaccagagtgcaccagaaga

SEQ ID NO: 78169 - DNA, 20 bp, Artificial Sequence
  Description of Artificial Sequence: Synthetic oligonucleotide
  Target: LAMA2; (-) strand; PAM type: NRG; PAM sequence: GAG
tgaaccagagtgcaccagaa

SEQ ID NO: 78170 - DNA, 20 bp, Artificial Sequence
  Description of Artificial Sequence: Synthetic oligonucleotide
  Target: LAMA2; (-) strand; PAM type: NRG; PAM sequence: AAG
agtgaaccagagtgcaccag

SEQ ID NO: 78171 - DNA, 20 bp, Artificial Sequence
  Description of Artificial Sequence: Synthetic oligonucleotide
  Target: LAMA2; (-) strand; PAM type: NRG; PAM sequence: CAG
cacagtgaaccagagtgcac

SEQ ID NO: 78172 - DNA, 20 bp, Artificial Sequence
  Description of Artificial Sequence: Synthetic oligonucleotide
  Target: LAMA2; (-) strand; PAM type: NRG; PAM sequence: GAG
cttatattcacagtgaacca

SEQ ID NO: 78173 - DNA, 20 bp, Artificial Sequence
  Description of Artificial Sequence: Synthetic oligonucleotide
  Target: LAMA2; (-) strand; PAM type: NRG; PAM sequence: CAG
cacttatattcacagtgaac

SEQ ID NO: 78174 - DNA, 20 bp, Artificial Sequence
  Description of Artificial Sequence: Synthetic oligonucleotide
  Target: LAMA2; (-) strand; PAM type: NRG; PAM sequence: CAG
ctatggcccacttatattca

SEQ ID NO: 78175 - DNA, 20 bp, Artificial Sequence
  Description of Artificial Sequence: Synthetic oligonucleotide
  Target: LAMA2; (-) strand; PAM type: NRG; PAM sequence: TGG
accacaatggtcacactcta

SEQ ID NO: 78176 - DNA, 20 bp, Artificial Sequence
  Description of Artificial Sequence: Synthetic oligonucleotide
  Target: LAMA2; (-) strand; PAM type: NRG; PAM sequence: TGG
cctagggccagagaccacaa

SEQ ID NO: 78177 - DNA, 20 bp, Artificial Sequence
  Description of Artificial Sequence: Synthetic oligonucleotide
  Target: LAMA2; (-) strand; PAM type: NRG; PAM sequence: GAG
cactccatggcctagggcca

SEQ ID NO: 78178 - DNA, 20 bp, Artificial Sequence
  Description of Artificial Sequence: Synthetic oligonucleotide
  Target: LAMA2; (-) strand; PAM type: NRG; PAM sequence: CAG
ctcactccatggcctagggc

SEQ ID NO: 78179 - DNA, 20 bp, Artificial Sequence
  Description of Artificial Sequence: Synthetic oligonucleotide
  Target: LAMA2; (-) strand; PAM type: NRG; PAM sequence: GGG
ttatctcactccatggccta

SEQ ID NO: 78180 - DNA, 20 bp, Artificial Sequence
  Description of Artificial Sequence: Synthetic oligonucleotide
  Target: LAMA2; (-) strand; PAM type: NRG; PAM sequence: AGG
attatctcactccatggcct

SEQ ID NO: 78181 - DNA, 20 bp, Artificial Sequence
  Description of Artificial Sequence: Synthetic oligonucleotide
  Target: LAMA2; (-) strand; PAM type: NRG; PAM sequence: TAG
aattatctcactccatggcc

SEQ ID NO: 78182 - DNA, 20 bp, Artificial Sequence
  Description of Artificial Sequence: Synthetic oligonucleotide
  Target: LAMA2; (-) strand; PAM type: NRG; PAM sequence: TGG
gtctcaattatctcactcca

SEQ ID NO: 78183 - DNA, 20 bp, Artificial Sequence
  Description of Artificial Sequence: Synthetic oligonucleotide
  Target: LAMA2; (-) strand; PAM type: NRG; PAM sequence: CAG
ttatgtggagagatgatata

SEQ ID NO: 78184 - DNA, 20 bp, Artificial Sequence
  Description of Artificial Sequence: Synthetic oligonucleotide
  Target: LAMA2; (-) strand; PAM type: NRG; PAM sequence: GAG
agctctattgcttatgtgga

SEQ ID NO: 78185 - DNA, 20 bp, Artificial Sequence
  Description of Artificial Sequence: Synthetic oligonucleotide
  Target: LAMA2; (-) strand; PAM type: NRG; PAM sequence: GAG
tcagctctattgcttatgtg

SEQ ID NO: 78186 - DNA, 20 bp, Artificial Sequence
  Description of Artificial Sequence: Synthetic oligonucleotide
  Target: LAMA2; (-) strand; PAM type: NRG; PAM sequence: TGG
aatcagctctattgcttatg

SEQ ID NO: 78187 - DNA, 20 bp, Artificial Sequence
  Description of Artificial Sequence: Synthetic oligonucleotide
  Target: LAMA2; (-) strand; PAM type: NRG; PAM sequence: CAG
ttgtttacaggcagcccaat

SEQ ID NO: 78188 - DNA, 20 bp, Artificial Sequence
  Description of Artificial Sequence: Synthetic oligonucleotide
  Target: LAMA2; (-) strand; PAM type: NRG; PAM sequence: CAG
tctaaaatcttgtttacagg

SEQ ID NO: 78189 - DNA, 20 bp, Artificial Sequence
  Description of Artificial Sequence: Synthetic oligonucleotide
  Target: LAMA2; (-) strand; PAM type: NRG; PAM sequence: AGG
gtctctaaaatcttgtttac

SEQ ID NO: 78190 - DNA, 20 bp, Artificial Sequence
  Description of Artificial Sequence: Synthetic oligonucleotide
  Target: LAMA2; (-) strand; PAM type: NRG; PAM sequence: CAG
agtctctaaaatcttgttta

SEQ ID NO: 78191 - DNA, 20 bp, Artificial Sequence
  Description of Artificial Sequence: Synthetic oligonucleotide
  Target: LAMA2; (-) strand; PAM type: NRG; PAM sequence: GAG
cttttaagaaaaagaaaagt

SEQ ID NO: 78192 - DNA, 20 bp, Artificial Sequence
  Description of Artificial Sequence: Synthetic oligonucleotide
  Target: LAMA2; (-) strand; PAM type: NRG; PAM sequence: AAG
cagtcttttaagaaaaagaa

SEQ ID NO: 78193 - DNA, 20 bp, Artificial Sequence
  Description of Artificial Sequence: Synthetic oligonucleotide
  Target: LAMA2; (-) strand; PAM type: NRG; PAM sequence: AAG
tgtggcagtcttttaagaaa

SEQ ID NO: 78194 - DNA, 20 bp, Artificial Sequence
  Description of Artificial Sequence: Synthetic oligonucleotide
  Target: LAMA2; (-) strand; PAM type: NRG; PAM sequence: AAG
gctaagtgtggcagtctttt

SEQ ID NO: 78195 - DNA, 20 bp, Artificial Sequence
  Description of Artificial Sequence: Synthetic oligonucleotide
  Target: LAMA2; (-) strand; PAM type: NRG; PAM sequence: CAG
tatcagatggctaagtgtgg

SEQ ID NO: 78196 - DNA, 20 bp, Artificial Sequence
  Description of Artificial Sequence: Synthetic oligonucleotide
  Target: LAMA2; (-) strand; PAM type: NRG; PAM sequence: TGG
ccatatcagatggctaagtg

SEQ ID NO: 78197 - DNA, 20 bp, Artificial Sequence
  Description of Artificial Sequence: Synthetic oligonucleotide
  Target: LAMA2; (-) strand; PAM type: NRG; PAM sequence: AAG
ccattccatatcagatggct

SEQ ID NO: 78198 - DNA, 20 bp, Artificial Sequence
  Description of Artificial Sequence: Synthetic oligonucleotide
  Target: LAMA2; (-) strand; PAM type: NRG; PAM sequence: TGG
agatgccattccatatcaga

SEQ ID NO: 78199 - DNA, 20 bp, Artificial Sequence
  Description of Artificial Sequence: Synthetic oligonucleotide
  Target: LAMA2; (-) strand; PAM type: NRG; PAM sequence: CAG
gaggagatgccattccatat

SEQ ID NO: 78200 - DNA, 20 bp, Artificial Sequence
  Description of Artificial Sequence: Synthetic oligonucleotide
  Target: LAMA2; (-) strand; PAM type: NRG; PAM sequence: GAG
agacacaggctcattaagag

SEQ ID NO: 78201 - DNA, 20 bp, Artificial Sequence
  Description of Artificial Sequence: Synthetic oligonucleotide
  Target: LAMA2; (-) strand; PAM type: NRG; PAM sequence: AGG
aaagacacaggctcattaag

SEQ ID NO: 78202 - DNA, 20 bp, Artificial Sequence
  Description of Artificial Sequence: Synthetic oligonucleotide
  Target: LAMA2; (-) strand; PAM type: NRG; PAM sequence: GAG
taaagacacaggctcattaa

SEQ ID NO: 78203 - DNA, 20 bp, Artificial Sequence
  Description of Artificial Sequence: Synthetic oligonucleotide
  Target: LAMA2; (-) strand; PAM type: NRG; PAM sequence: AAG
aataaagacacaggctcatt

SEQ ID NO: 78204 - DNA, 20 bp, Artificial Sequence
  Description of Artificial Sequence: Synthetic oligonucleotide
  Target: LAMA2; (-) strand; PAM type: NRG; PAM sequence: AGG
taaggtgcaaataaagacac

SEQ ID NO: 78205 - DNA, 20 bp, Artificial Sequence
  Description of Artificial Sequence: Synthetic oligonucleotide
  Target: LAMA2; (-) strand; PAM type: NRG; PAM sequence: CAG
ataaggtgcaaataaagaca

SEQ ID NO: 78206 - DNA, 20 bp, Artificial Sequence
  Description of Artificial Sequence: Synthetic oligonucleotide
  Target: LAMA2; (-) strand; PAM type: NRG; PAM sequence: AAG
agtttgataaggtgcaaata

SEQ ID NO: 78207 - DNA, 20 bp, Artificial Sequence
  Description of Artificial Sequence: Synthetic oligonucleotide
  Target: LAMA2; (-) strand; PAM type: NRG; PAM sequence: AGG
cagtatctcccagtttgata

SEQ ID NO: 78208 - DNA, 20 bp, Artificial Sequence
  Description of Artificial Sequence: Synthetic oligonucleotide
  Target: LAMA2; (-) strand; PAM type: NRG; PAM sequence: AAG
tcagtatctcccagtttgat

SEQ ID NO: 78209 - DNA, 20 bp, Artificial Sequence
  Description of Artificial Sequence: Synthetic oligonucleotide
  Target: LAMA2; (-) strand; PAM type: NRG; PAM sequence: CAG
ctgccatcttcagtatctcc

SEQ ID NO: 78210 - DNA, 20 bp, Artificial Sequence
  Description of Artificial Sequence: Synthetic oligonucleotide
  Target: LAMA2; (-) strand; PAM type: NRG; PAM sequence: CAG
atcagcatcactgccatctt

SEQ ID NO: 78211 - DNA, 20 bp, Artificial Sequence
  Description of Artificial Sequence: Synthetic oligonucleotide
  Target: LAMA2; (-) strand; PAM type: NRG; PAM sequence: CAG
cttccatgtctcaccactat

SEQ ID NO: 78212 - DNA, 20 bp, Artificial Sequence
  Description of Artificial Sequence: Synthetic oligonucleotide
  Target: LAMA2; (-) strand; PAM type: NRG; PAM sequence: AGG
cctatctcaggcttctttgt

SEQ ID NO: 78213 - DNA, 20 bp, Artificial Sequence
  Description of Artificial Sequence: Synthetic oligonucleotide
  Target: LAMA2; (-) strand; PAM type: NRG; PAM sequence: TAG
tcctatctcaggcttctttg

SEQ ID NO: 78214 - DNA, 20 bp, Artificial Sequence
  Description of Artificial Sequence: Synthetic oligonucleotide
  Target: LAMA2; (-) strand; PAM type: NRG; PAM sequence: AGG
taccctttctctcctatctc

SEQ ID NO: 78215 - DNA, 20 bp, Artificial Sequence
  Description of Artificial Sequence: Synthetic oligonucleotide
  Target: LAMA2; (-) strand; PAM type: NRG; PAM sequence: CAG
ttaccctttctctcctatct

SEQ ID NO: 78216 - DNA, 20 bp, Artificial Sequence
  Description of Artificial Sequence: Synthetic oligonucleotide
  Target: LAMA2; (-) strand; PAM type: NRG; PAM sequence: CAG
aatatttattgcccagaatg

SEQ ID NO: 78217 - DNA, 20 bp, Artificial Sequence
  Description of Artificial Sequence: Synthetic oligonucleotide
  Target: LAMA2; (-) strand; PAM type: NRG; PAM sequence: CAG
tccagtgaatatttattgcc

SEQ ID NO: 78218 - DNA, 20 bp, Artificial Sequence
  Description of Artificial Sequence: Synthetic oligonucleotide
  Target: LAMA2; (-) strand; PAM type: NRG; PAM sequence: CAG
aaaggaatacgctgtaagtc

SEQ ID NO: 78219 - DNA, 20 bp, Artificial Sequence
  Description of Artificial Sequence: Synthetic oligonucleotide
  Target: LAMA2; (-) strand; PAM type: NRG; PAM sequence: AAG
taaaaaaaggaatacgctgt

SEQ ID NO: 78220 - DNA, 20 bp, Artificial Sequence
  Description of Artificial Sequence: Synthetic oligonucleotide
  Target: LAMA2; (-) strand; PAM type: NRG; PAM sequence: AGG
gaacttggttccttaaaaaa

SEQ ID NO: 78221 - DNA, 20 bp, Artificial Sequence
  Description of Artificial Sequence: Synthetic oligonucleotide
  Target: LAMA2; (-) strand; PAM type: NRG; PAM sequence: AAG
tgaacttggttccttaaaaa

SEQ ID NO: 78222 - DNA, 20 bp, Artificial Sequence
  Description of Artificial Sequence: Synthetic oligonucleotide
  Target: LAMA2; (-) strand; PAM type: NRG; PAM sequence: TGG
agttctaacaactgtgaact

SEQ ID NO: 78223 - DNA, 20 bp, Artificial Sequence
  Description of Artificial Sequence: Synthetic oligonucleotide
  Target: LAMA2; (-) strand; PAM type: NRG; PAM sequence: TAG
tatgtaatgttgtgctcttg

SEQ ID NO: 78224 - DNA, 20 bp, Artificial Sequence
  Description of Artificial Sequence: Synthetic oligonucleotide
  Target: LAMA2; (-) strand; PAM type: NRG; PAM sequence: AAG
cacctgtaaaaattaaaaat

SEQ ID NO: 78225 - DNA, 20 bp, Artificial Sequence
  Description of Artificial Sequence: Synthetic oligonucleotide
  Target: LAMA2; (-) strand; PAM type: NRG; PAM sequence: TGG
tatagagatagtttataaaa

SEQ ID NO: 78226 - DNA, 20 bp, Artificial Sequence
  Description of Artificial Sequence: Synthetic oligonucleotide
  Target: LAMA2; (-) strand; PAM type: NRG; PAM sequence: TAG
cattaatctctttatagaga

SEQ ID NO: 78227 - DNA, 20 bp, Artificial Sequence
  Description of Artificial Sequence: Synthetic oligonucleotide
  Target: LAMA2; (-) strand; PAM type: NRG; PAM sequence: GAG
ctaacattaatctctttata

SEQ ID NO: 78228 - DNA, 20 bp, Artificial Sequence
  Description of Artificial Sequence: Synthetic oligonucleotide
  Target: LAMA2; (-) strand; PAM type: NRG; PAM sequence: TAG
agctaacattaatctcttta

SEQ ID NO: 78229 - DNA, 20 bp, Artificial Sequence
  Description of Artificial Sequence: Synthetic oligonucleotide
  Target: LAMA2; (-) strand; PAM type: NRG; PAM sequence: AAG
tatcttatttccaaaacaag

SEQ ID NO: 78230 - DNA, 20 bp, Artificial Sequence
  Description of Artificial Sequence: Synthetic oligonucleotide
  Target: LAMA2; (-) strand; PAM type: NRG; PAM sequence: AAG
cattatcttatttccaaaac

SEQ ID NO: 78231 - DNA, 20 bp, Artificial Sequence
  Description of Artificial Sequence: Synthetic oligonucleotide
  Target: LAMA2; (-) strand; PAM type: NRG; PAM sequence: TGG
aactggctcacaatgagaga

SEQ ID NO: 78232 - DNA, 20 bp, Artificial Sequence
  Description of Artificial Sequence: Synthetic oligonucleotide
  Target: LAMA2; (-) strand; PAM type: NRG; PAM sequence: GAG
tctaaactggctcacaatga

SEQ ID NO: 78233 - DNA, 20 bp, Artificial Sequence
  Description of Artificial Sequence: Synthetic oligonucleotide
  Target: LAMA2; (-) strand; PAM type: NRG; PAM sequence: GAG
tttctaaactggctcacaat

SEQ ID NO: 78234 - DNA, 20 bp, Artificial Sequence
  Description of Artificial Sequence: Synthetic oligonucleotide
  Target: LAMA2; (-) strand; PAM type: NRG; PAM sequence: TGG
gtttgttttcatttctaaac

SEQ ID NO: 78235 - DNA, 20 bp, Artificial Sequence
  Description of Artificial Sequence: Synthetic oligonucleotide
  Target: LAMA2; (-) strand; PAM type: NRG; PAM sequence: GAG
aatgttgctgttgggcttaa

SEQ ID NO: 78236 - DNA, 20 bp, Artificial Sequence
  Description of Artificial Sequence: Synthetic oligonucleotide
  Target: LAMA2; (-) strand; PAM type: NRG; PAM sequence: AAG
tgaatgttgctgttgggctt

SEQ ID NO: 78237 - DNA, 20 bp, Artificial Sequence
  Description of Artificial Sequence: Synthetic oligonucleotide
  Target: LAMA2; (-) strand; PAM type: NRG; PAM sequence: GGG
ttataatgaatgttgctgtt

SEQ ID NO: 78238 - DNA, 20 bp, Artificial Sequence
  Description of Artificial Sequence: Synthetic oligonucleotide
  Target: LAMA2; (-) strand; PAM type: NRG; PAM sequence: TGG
attataatgaatgttgctgt

SEQ ID NO: 78239 - DNA, 20 bp, Artificial Sequence
  Description of Artificial Sequence: Synthetic oligonucleotide
  Target: LAMA2; (-) strand; PAM type: NRG; PAM sequence: AGG
aaagaaaagggagtgtaatt

SEQ ID NO: 78240 - DNA, 20 bp, Artificial Sequence
  Description of Artificial Sequence: Synthetic oligonucleotide
  Target: LAMA2; (-) strand; PAM type: NRG; PAM sequence: TAG
aaaagaaaagggagtgtaat

SEQ ID NO: 78241 - DNA, 20 bp, Artificial Sequence
  Description of Artificial Sequence: Synthetic oligonucleotide
  Target: LAMA2; (-) strand; PAM type: NRG; PAM sequence: GAG
ttcttagcaaaaagaaaagg

SEQ ID NO: 78242 - DNA, 20 bp, Artificial Sequence
  Description of Artificial Sequence: Synthetic oligonucleotide
  Target: LAMA2; (-) strand; PAM type: NRG; PAM sequence: GGG
ctttcttagcaaaaagaaaa

SEQ ID NO: 78243 - DNA, 20 bp, Artificial Sequence
  Description of Artificial Sequence: Synthetic oligonucleotide
  Target: LAMA2; (-) strand; PAM type: NRG; PAM sequence: AGG
tctttcttagcaaaaagaaa

SEQ ID NO: 78244 - DNA, 20 bp, Artificial Sequence
  Description of Artificial Sequence: Synthetic oligonucleotide
  Target: LAMA2; (-) strand; PAM type: NRG; PAM sequence: AAG
ttctttcttagcaaaaagaa

SEQ ID NO: 78245 - DNA, 20 bp, Artificial Sequence
  Description of Artificial Sequence: Synthetic oligonucleotide
  Target: LAMA2; (-) strand; PAM type: NRG; PAM sequence: AAG
aaccgttctttcttagcaaa

SEQ ID NO: 78246 - DNA, 20 bp, Artificial Sequence
  Description of Artificial Sequence: Synthetic oligonucleotide
  Target: LAMA2; (-) strand; PAM type: NRG; PAM sequence: TAG
aaaatacaaccgttctttct

SEQ ID NO: 78247 - DNA, 20 bp, Artificial Sequence
  Description of Artificial Sequence: Synthetic oligonucleotide
  Target: LAMA2; (-) strand; PAM type: NRG; PAM sequence: AGG
cactgttcccttttctatta

SEQ ID NO: 78248 - DNA, 20 bp, Artificial Sequence
  Description of Artificial Sequence: Synthetic oligonucleotide
  Target: LAMA2; (-) strand; PAM type: NRG; PAM sequence: AAG
gcactgttcccttttctatt

SEQ ID NO: 78249 - DNA, 20 bp, Artificial Sequence
  Description of Artificial Sequence: Synthetic oligonucleotide
  Target: LAMA2; (-) strand; PAM type: NRG; PAM sequence: AGG
gaatttataataggttgttt

SEQ ID NO: 78250 - DNA, 20 bp, Artificial Sequence
  Description of Artificial Sequence: Synthetic oligonucleotide
  Target: LAMA2; (-) strand; PAM type: NRG; PAM sequence: TAG
agaatttataataggttgtt

SEQ ID NO: 78251 - DNA, 20 bp, Artificial Sequence
  Description of Artificial Sequence: Synthetic oligonucleotide
  Target: LAMA2; (-) strand; PAM type: NRG; PAM sequence: AGG
ttcccagaagaatttataat

SEQ ID NO: 78252 - DNA, 20 bp, Artificial Sequence
  Description of Artificial Sequence: Synthetic oligonucleotide
  Target: LAMA2; (-) strand; PAM type: NRG; PAM sequence: TAG
tttcccagaagaatttataa

SEQ ID NO: 78253 - DNA, 20 bp, Artificial Sequence
  Description of Artificial Sequence: Synthetic oligonucleotide
  Target: LAMA2; (-) strand; PAM type: NRG; PAM sequence: AAG
tttgtaatatgctttcccag

SEQ ID NO: 78254 - DNA, 20 bp, Artificial Sequence
  Description of Artificial Sequence: Synthetic oligonucleotide
  Target: LAMA2; (-) strand; PAM type: NRG; PAM sequence: CAG
ttatttgtaatatgctttcc

SEQ ID NO: 78255 - DNA, 20 bp, Artificial Sequence
  Description of Artificial Sequence: Synthetic oligonucleotide
  Target: LAMA2; (-) strand; PAM type: NRG; PAM sequence: GGG
ctgccaagttcacagaatca

SEQ ID NO: 78256 - DNA, 20 bp, Artificial Sequence
  Description of Artificial Sequence: Synthetic oligonucleotide
  Target: LAMA2; (-) strand; PAM type: NRG; PAM sequence: AGG
gctgccaagttcacagaatc

SEQ ID NO: 78257 - DNA, 20 bp, Artificial Sequence
  Description of Artificial Sequence: Synthetic oligonucleotide
  Target: LAMA2; (-) strand; PAM type: NRG; PAM sequence: CAG
tgctgccaagttcacagaat

SEQ ID NO: 78258 - DNA, 20 bp, Artificial Sequence
  Description of Artificial Sequence: Synthetic oligonucleotide
  Target: LAMA2; (-) strand; PAM type: NRG; PAM sequence: CAG
tacatttgctgccaagttca

SEQ ID NO: 78259 - DNA, 20 bp, Artificial Sequence
  Description of Artificial Sequence: Synthetic oligonucleotide
  Target: LAMA2; (-) strand; PAM type: NRG; PAM sequence: AAG
tcttttatacatttgctgcc

SEQ ID NO: 78260 - DNA, 20 bp, Artificial Sequence
  Description of Artificial Sequence: Synthetic oligonucleotide
  Target: LAMA2; (-) strand; PAM type: NRG; PAM sequence: GGG
aatcaatcatccaggggcca

SEQ ID NO: 78261 - DNA, 20 bp, Artificial Sequence
  Description of Artificial Sequence: Synthetic oligonucleotide
  Target: LAMA2; (-) strand; PAM type: NRG; PAM sequence: AGG
taatcaatcatccaggggcc

SEQ ID NO: 78262 - DNA, 20 bp, Artificial Sequence
  Description of Artificial Sequence: Synthetic oligonucleotide
  Target: LAMA2; (-) strand; PAM type: NRG; PAM sequence: CAG
ttaatcaatcatccaggggc

SEQ ID NO: 78263 - DNA, 20 bp, Artificial Sequence
  Description of Artificial Sequence: Synthetic oligonucleotide
  Target: LAMA2; (-) strand; PAM type: NRG; PAM sequence: GGG
acatttaatcaatcatccag

SEQ ID NO: 78264 - DNA, 20 bp, Artificial Sequence
  Description of Artificial Sequence: Synthetic oligonucleotide
  Target: LAMA2; (-) strand; PAM type: NRG; PAM sequence: GGG
aacatttaatcaatcatcca

SEQ ID NO: 78265 - DNA, 20 bp, Artificial Sequence
  Description of Artificial Sequence: Synthetic oligonucleotide
  Target: LAMA2; (-) strand; PAM type: NRG; PAM sequence: AGG
aaacatttaatcaatcatcc

SEQ ID NO: 78266 - DNA, 20 bp, Artificial Sequence
  Description of Artificial Sequence: Synthetic oligonucleotide
  Target: LAMA2; (-) strand; PAM type: NRG; PAM sequence: CAG
aaaacatttaatcaatcatc

SEQ ID NO: 78267 - DNA, 20 bp, Artificial Sequence
  Description of Artificial Sequence: Synthetic oligonucleotide
  Target: LAMA2; (-) strand; PAM type: NRG; PAM sequence: AAG
cagcatgaatgaaaggtaaa

SEQ ID NO: 78268 - DNA, 20 bp, Artificial Sequence
  Description of Artificial Sequence: Synthetic oligonucleotide
  Target: LAMA2; (-) strand; PAM type: NRG; PAM sequence: AGG
acaaacacagcatgaatgaa

SEQ ID NO: 78269 - DNA, 20 bp, Artificial Sequence
  Description of Artificial Sequence: Synthetic oligonucleotide
  Target: LAMA2; (-) strand; PAM type: NRG; PAM sequence: AAG
gacaaacacagcatgaatga

SEQ ID NO: 78270 - DNA, 20 bp, Artificial Sequence
  Description of Artificial Sequence: Synthetic oligonucleotide
  Target: LAMA2; (-) strand; PAM type: NRG; PAM sequence: CAG
ctctttcctcttgacaaaca

SEQ ID NO: 78271 - DNA, 20 bp, Artificial Sequence
  Description of Artificial Sequence: Synthetic oligonucleotide
  Target: LAMA2; (-) strand; PAM type: NRG; PAM sequence: TGG
tgtaagttatttgtctaaag

SEQ ID NO: 78272 - DNA, 20 bp, Artificial Sequence
  Description of Artificial Sequence: Synthetic oligonucleotide
  Target: LAMA2; (-) strand; PAM type: NRG; PAM sequence: AAG
tattgtaagttatttgtcta

SEQ ID NO: 78273 - DNA, 20 bp, Artificial Sequence
  Description of Artificial Sequence: Synthetic oligonucleotide
  Target: LAMA2; (-) strand; PAM type: NRG; PAM sequence: AAG
aagtcactgatcattattgt

SEQ ID NO: 78274 - DNA, 20 bp, Artificial Sequence
  Description of Artificial Sequence: Synthetic oligonucleotide
  Target: LAMA2; (-) strand; PAM type: NRG; PAM sequence: AAG
atgaataaacagctgatgag

SEQ ID NO: 78275 - DNA, 20 bp, Artificial Sequence
  Description of Artificial Sequence: Synthetic oligonucleotide
  Target: LAMA2; (-) strand; PAM type: NRG; PAM sequence: GAG
aaaatgaataaacagctgat

SEQ ID NO: 78276 - DNA, 20 bp, Artificial Sequence
  Description of Artificial Sequence: Synthetic oligonucleotide
  Target: LAMA2; (-) strand; PAM type: NRG; PAM sequence: CAG
actcaagaaaaatgaataaa

SEQ ID NO: 78277 - DNA, 20 bp, Artificial Sequence
  Description of Artificial Sequence: Synthetic oligonucleotide
  Target: LAMA2; (-) strand; PAM type: NRG; PAM sequence: AAG
attaagaaatattacaactc

SEQ ID NO: 78278 - DNA, 20 bp, Artificial Sequence
  Description of Artificial Sequence: Synthetic oligonucleotide
  Target: LAMA2; (-) strand; PAM type: NRG; PAM sequence: AAG
catgcaggatagctaatatt

SEQ ID NO: 78279 - DNA, 20 bp, Artificial Sequence
  Description of Artificial Sequence: Synthetic oligonucleotide
  Target: LAMA2; (-) strand; PAM type: NRG; PAM sequence: TAG
tctgtcgggtccatgcagga

SEQ ID NO: 78280 - DNA, 20 bp, Artificial Sequence
  Description of Artificial Sequence: Synthetic oligonucleotide
  Target: LAMA2; (-) strand; PAM type: NRG; PAM sequence: AGG
attttctgtcgggtccatgc

SEQ ID NO: 78281 - DNA, 20 bp, Artificial Sequence
  Description of Artificial Sequence: Synthetic oligonucleotide
  Target: LAMA2; (-) strand; PAM type: NRG; PAM sequence: CAG
tattttctgtcgggtccatg

SEQ ID NO: 78282 - DNA, 20 bp, Artificial Sequence
  Description of Artificial Sequence: Synthetic oligonucleotide
  Target: LAMA2; (-) strand; PAM type: NRG; PAM sequence: GGG
tcaggaccttattttctgtc

SEQ ID NO: 78283 - DNA, 20 bp, Artificial Sequence
  Description of Artificial Sequence: Synthetic oligonucleotide
  Target: LAMA2; (-) strand; PAM type: NRG; PAM sequence: CGG
ctcaggaccttattttctgt

SEQ ID NO: 78284 - DNA, 20 bp, Artificial Sequence
  Description of Artificial Sequence: Synthetic oligonucleotide
  Target: LAMA2; (-) strand; PAM type: NRG; PAM sequence: AGG
ttggggacaagctaaaactc

SEQ ID NO: 78285 - DNA, 20 bp, Artificial Sequence
  Description of Artificial Sequence: Synthetic oligonucleotide
  Target: LAMA2; (-) strand; PAM type: NRG; PAM sequence: CAG
gttggggacaagctaaaact

SEQ ID NO: 78286 - DNA, 20 bp, Artificial Sequence
  Description of Artificial Sequence: Synthetic oligonucleotide
  Target: LAMA2; (-) strand; PAM type: NRG; PAM sequence: AAG
gctggcagggagttggggac

SEQ ID NO: 78287 - DNA, 20 bp, Artificial Sequence
  Description of Artificial Sequence: Synthetic oligonucleotide
  Target: LAMA2; (-) strand; PAM type: NRG; PAM sequence: GGG
ggttagctggcagggagttg

SEQ ID NO: 78288 - DNA, 20 bp, Artificial Sequence
  Description of Artificial Sequence: Synthetic oligonucleotide
  Target: LAMA2; (-) strand; PAM type: NRG; PAM sequence: GGG
tggttagctggcagggagtt

SEQ ID NO: 78289 - DNA, 20 bp, Artificial Sequence
  Description of Artificial Sequence: Synthetic oligonucleotide
  Target: LAMA2; (-) strand; PAM type: NRG; PAM sequence: TGG
atggttagctggcagggagt

SEQ ID NO: 78290 - DNA, 20 bp, Artificial Sequence
  Description of Artificial Sequence: Synthetic oligonucleotide
  Target: LAMA2; (-) strand; PAM type: NRG; PAM sequence: GAG
gttgatggttagctggcagg

SEQ ID NO: 78291 - DNA, 20 bp, Artificial Sequence
  Description of Artificial Sequence: Synthetic oligonucleotide
  Target: LAMA2; (-) strand; PAM type: NRG; PAM sequence: GGG
gtgttgatggttagctggca

SEQ ID NO: 78292 - DNA, 20 bp, Artificial Sequence
  Description of Artificial Sequence: Synthetic oligonucleotide
  Target: LAMA2; (-) strand; PAM type: NRG; PAM sequence: AGG
tgtgttgatggttagctggc

SEQ ID NO: 78293 - DNA, 20 bp, Artificial Sequence
  Description of Artificial Sequence: Synthetic oligonucleotide
  Target: LAMA2; (-) strand; PAM type: NRG; PAM sequence: CAG
ttgtgttgatggttagctgg

SEQ ID NO: 78294 - DNA, 20 bp, Artificial Sequence
  Description of Artificial Sequence: Synthetic oligonucleotide
  Target: LAMA2; (-) strand; PAM type: NRG; PAM sequence: TGG
agcttgtgttgatggttagc

SEQ ID NO: 78295 - DNA, 20 bp, Artificial Sequence
  Description of Artificial Sequence: Synthetic oligonucleotide
  Target: LAMA2; (-) strand; PAM type: NRG; PAM sequence: TAG
atacagcttgtgttgatggt

SEQ ID NO: 78296 - DNA, 20 bp, Artificial Sequence
  Description of Artificial Sequence: Synthetic oligonucleotide
  Target: LAMA2; (-) strand; PAM type: NRG; PAM sequence: TGG
tcagatacagcttgtgttga

SEQ ID NO: 78297 - DNA, 20 bp, Artificial Sequence
  Description of Artificial Sequence: Synthetic oligonucleotide
  Target: LAMA2; (-) strand; PAM type: NRG; PAM sequence: CAG
ccctcaaagaagctcagata

SEQ ID NO: 78298 - DNA, 20 bp, Artificial Sequence
  Description of Artificial Sequence: Synthetic oligonucleotide
  Target: LAMA2; (-) strand; PAM type: NRG; PAM sequence: CAG
gccatgccctcaaagaagct

SEQ ID NO: 78299 - DNA, 20 bp, Artificial Sequence
  Description of Artificial Sequence: Synthetic oligonucleotide
  Target: LAMA2; (-) strand; PAM type: NRG; PAM sequence: AAG
gcagggccatgccctcaaag

SEQ ID NO: 78300 - DNA, 20 bp, Artificial Sequence
  Description of Artificial Sequence: Synthetic oligonucleotide
  Target: LAMA2; (-) strand; PAM type: NRG; PAM sequence: AAG
gctgcagggccatgccctca

SEQ ID NO: 78301 - DNA, 20 bp, Artificial Sequence
  Description of Artificial Sequence: Synthetic oligonucleotide
  Target: LAMA2; (-) strand; PAM type: NRG; PAM sequence: GGG
actgaccacagggagctgca

SEQ ID NO: 78302 - DNA, 20 bp, Artificial Sequence
  Description of Artificial Sequence: Synthetic oligonucleotide
  Target: LAMA2; (-) strand; PAM type: NRG; PAM sequence: AGG
aactgaccacagggagctgc

SEQ ID NO: 78303 - DNA, 20 bp, Artificial Sequence
  Description of Artificial Sequence: Synthetic oligonucleotide
  Target: LAMA2; (-) strand; PAM type: NRG; PAM sequence: CAG
taactgaccacagggagctg

SEQ ID NO: 78304 - DNA, 20 bp, Artificial Sequence
  Description of Artificial Sequence: Synthetic oligonucleotide
  Target: LAMA2; (-) strand; PAM type: NRG; PAM sequence: GAG
gactaataactgaccacagg

SEQ ID NO: 78305 - DNA, 20 bp, Artificial Sequence
  Description of Artificial Sequence: Synthetic oligonucleotide
  Target: LAMA2; (-) strand; PAM type: NRG; PAM sequence: GGG
cagactaataactgaccaca

SEQ ID NO: 78306 - DNA, 20 bp, Artificial Sequence
  Description of Artificial Sequence: Synthetic oligonucleotide
  Target: LAMA2; (-) strand; PAM type: NRG; PAM sequence: AGG
tcagactaataactgaccac

SEQ ID NO: 78307 - DNA, 20 bp, Artificial Sequence
  Description of Artificial Sequence: Synthetic oligonucleotide
  Target: LAMA2; (-) strand; PAM type: NRG; PAM sequence: CAG
ctcagactaataactgacca

SEQ ID NO: 78308 - DNA, 20 bp, Artificial Sequence
  Description of Artificial Sequence: Synthetic oligonucleotide
  Target: LAMA2; (-) strand; PAM type: NRG; PAM sequence: CAG
tcttgttcctttgctggact

SEQ ID NO: 78309 - DNA, 20 bp, Artificial Sequence
  Description of Artificial Sequence: Synthetic oligonucleotide
  Target: LAMA2; (-) strand; PAM type: NRG; PAM sequence: TGG
cagtgttcttgttcctttgc

SEQ ID NO: 78310 - DNA, 20 bp, Artificial Sequence
  Description of Artificial Sequence: Synthetic oligonucleotide
  Target: LAMA2; (-) strand; PAM type: NRG; PAM sequence: CAG
ctgtagatttagcaagcaca

SEQ ID NO: 78311 - DNA, 20 bp, Artificial Sequence
  Description of Artificial Sequence: Synthetic oligonucleotide
  Target: LAMA2; (-) strand; PAM type: NRG; PAM sequence: AAG
aagttttctgtagatttagc

SEQ ID NO: 78312 - DNA, 20 bp, Artificial Sequence
  Description of Artificial Sequence: Synthetic oligonucleotide
  Target: LAMA2; (-) strand; PAM type: NRG; PAM sequence: TAG
gatgaagttttctgtagatt

SEQ ID NO: 78313 - DNA, 20 bp, Artificial Sequence
  Description of Artificial Sequence: Synthetic oligonucleotide
  Target: LAMA2; (-) strand; PAM type: NRG; PAM sequence: TAG
ccagaagatgaagttttctg

SEQ ID NO: 78314 - DNA, 20 bp, Artificial Sequence
  Description of Artificial Sequence: Synthetic oligonucleotide
  Target: LAMA2; (-) strand; PAM type: NRG; PAM sequence: AAG
tcccacacaaccagaagatg

SEQ ID NO: 78315 - DNA, 20 bp, Artificial Sequence
  Description of Artificial Sequence: Synthetic oligonucleotide
  Target: LAMA2; (-) strand; PAM type: NRG; PAM sequence: AAG
ctctcctcccacacaaccag

SEQ ID NO: 78316 - DNA, 20 bp, Artificial Sequence
  Description of Artificial Sequence: Synthetic oligonucleotide
  Target: LAMA2; (-) strand; PAM type: NRG; PAM sequence: CAG
gacctctcctcccacacaac

SEQ ID NO: 78317 - DNA, 20 bp, Artificial Sequence
  Description of Artificial Sequence: Synthetic oligonucleotide
  Target: LAMA2; (-) strand; PAM type: NRG; PAM sequence: GGG
aaagaaacagagtacacaaa

SEQ ID NO: 78318 - DNA, 20 bp, Artificial Sequence
  Description of Artificial Sequence: Synthetic oligonucleotide
  Target: LAMA2; (-) strand; PAM type: NRG; PAM sequence: AGG
caaagaaacagagtacacaa

SEQ ID NO: 78319 - DNA, 20 bp, Artificial Sequence
  Description of Artificial Sequence: Synthetic oligonucleotide
  Target: LAMA2; (-) strand; PAM type: NRG; PAM sequence: AAG
tcaaagaaacagagtacaca

SEQ ID NO: 78320 - DNA, 20 bp, Artificial Sequence
  Description of Artificial Sequence: Synthetic oligonucleotide
  Target: LAMA2; (-) strand; PAM type: NRG; PAM sequence: GAG
ctagttccttcaaagaaaca

SEQ ID NO: 78321 - DNA, 20 bp, Artificial Sequence
  Description of Artificial Sequence: Synthetic oligonucleotide
  Target: LAMA2; (-) strand; PAM type: NRG; PAM sequence: CAG
ccctagttccttcaaagaaa

SEQ ID NO: 78322 - DNA, 20 bp, Artificial Sequence
  Description of Artificial Sequence: Synthetic oligonucleotide
  Target: LAMA2; (-) strand; PAM type: NRG; PAM sequence: AAG
acagatccctagttccttca

SEQ ID NO: 78323 - DNA, 20 bp, Artificial Sequence
  Description of Artificial Sequence: Synthetic oligonucleotide
  Target: LAMA2; (-) strand; PAM type: NRG; PAM sequence: TAG
gtacagcaccaacagatccc

SEQ ID NO: 78324 - DNA, 20 bp, Artificial Sequence
  Description of Artificial Sequence: Synthetic oligonucleotide
  Target: LAMA2; (-) strand; PAM type: NRG; PAM sequence: CAG
cgacatctgtacagcaccaa

SEQ ID NO: 78325 - DNA, 20 bp, Artificial Sequence
  Description of Artificial Sequence: Synthetic oligonucleotide
  Target: LAMA2; (-) strand; PAM type: NRG; PAM sequence: CAG
tgtgcacctcgacatctgta

SEQ ID NO: 78326 - DNA, 20 bp, Artificial Sequence
  Description of Artificial Sequence: Synthetic oligonucleotide
  Target: LAMA2; (-) strand; PAM type: NRG; PAM sequence: TGG
ttactagttttgtaggatgt

SEQ ID NO: 78327 - DNA, 20 bp, Artificial Sequence
  Description of Artificial Sequence: Synthetic oligonucleotide
  Target: LAMA2; (-) strand; PAM type: NRG; PAM sequence: AGG
catctatttactagttttgt

SEQ ID NO: 78328 - DNA, 20 bp, Artificial Sequence
  Description of Artificial Sequence: Synthetic oligonucleotide
  Target: LAMA2; (-) strand; PAM type: NRG; PAM sequence: TAG
tcatctatttactagttttg

SEQ ID NO: 78329 - DNA, 20 bp, Artificial Sequence
  Description of Artificial Sequence: Synthetic oligonucleotide
  Target: LAMA2; (-) strand; PAM type: NRG; PAM sequence: TAG
gatcctaatcatctatttac

SEQ ID NO: 78330 - DNA, 20 bp, Artificial Sequence
  Description of Artificial Sequence: Synthetic oligonucleotide
  Target: LAMA2; (-) strand; PAM type: NRG; PAM sequence: TGG
accattattctgtacagagt

SEQ ID NO: 78331 - DNA, 20 bp, Artificial Sequence
  Description of Artificial Sequence: Synthetic oligonucleotide
  Target: LAMA2; (-) strand; PAM type: NRG; PAM sequence: GAG
tcctaccattattctgtaca

SEQ ID NO: 78332 - DNA, 20 bp, Artificial Sequence
  Description of Artificial Sequence: Synthetic oligonucleotide
  Target: LAMA2; (-) strand; PAM type: NRG; PAM sequence: CAG
gttcctaccattattctgta

SEQ ID NO: 78333 - DNA, 20 bp, Artificial Sequence
  Description of Artificial Sequence: Synthetic oligonucleotide
  Target: LAMA2; (-) strand; PAM type: NRG; PAM sequence: AGG
taaacagtaccccaaggttt

SEQ ID NO: 78334 - DNA, 20 bp, Artificial Sequence
  Description of Artificial Sequence: Synthetic oligonucleotide
  Target: LAMA2; (-) strand; PAM type: NRG; PAM sequence: TAG
gtaaacagtaccccaaggtt

SEQ ID NO: 78335 - DNA, 20 bp, Artificial Sequence
  Description of Artificial Sequence: Synthetic oligonucleotide
  Target: LAMA2; (-) strand; PAM type: NRG; PAM sequence: AGG
tacaagtaaacagtacccca

SEQ ID NO: 78336 - DNA, 20 bp, Artificial Sequence
  Description of Artificial Sequence: Synthetic oligonucleotide
  Target: LAMA2; (-) strand; PAM type: NRG; PAM sequence: AAG
atacaagtaaacagtacccc

SEQ ID NO: 78337 - DNA, 20 bp, Artificial Sequence
  Description of Artificial Sequence: Synthetic oligonucleotide
  Target: LAMA2; (-) strand; PAM type: NRG; PAM sequence: CAG
acaattttgatacaagtaaa

SEQ ID NO: 78338 - DNA, 20 bp, Artificial Sequence
  Description of Artificial Sequence: Synthetic oligonucleotide
  Target: LAMA2; (-) strand; PAM type: NRG; PAM sequence: AAG
gacaacaacaattttgatac

SEQ ID NO: 78339 - DNA, 20 bp, Artificial Sequence
  Description of Artificial Sequence: Synthetic oligonucleotide
  Target: LAMA2; (-) strand; PAM type: NRG; PAM sequence: AGG
gttaattttacatggcttat

SEQ ID NO: 78340 - DNA, 20 bp, Artificial Sequence
  Description of Artificial Sequence: Synthetic oligonucleotide
  Target: LAMA2; (-) strand; PAM type: NRG; PAM sequence: TAG
agttaattttacatggctta

SEQ ID NO: 78341 - DNA, 20 bp, Artificial Sequence
  Description of Artificial Sequence: Synthetic oligonucleotide
  Target: LAMA2; (-) strand; PAM type: NRG; PAM sequence: TGG
gatttgtagttaattttaca

SEQ ID NO: 78342 - DNA, 20 bp, Artificial Sequence
  Description of Artificial Sequence: Synthetic oligonucleotide
  Target: LAMA2; (-) strand; PAM type: NRG; PAM sequence: TAG
tgtttcattgaggagatttg

SEQ ID NO: 78343 - DNA, 20 bp, Artificial Sequence
  Description of Artificial Sequence: Synthetic oligonucleotide
  Target: LAMA2; (-) strand; PAM type: NRG; PAM sequence: GAG
taagaaagtgtttcattgag

SEQ ID NO: 78344 - DNA, 20 bp, Artificial Sequence
  Description of Artificial Sequence: Synthetic oligonucleotide
  Target: LAMA2; (-) strand; PAM type: NRG; PAM sequence: AGG
tctaagaaagtgtttcattg

SEQ ID NO: 78345 - DNA, 20 bp, Artificial Sequence
  Description of Artificial Sequence: Synthetic oligonucleotide
  Target: LAMA2; (-) strand; PAM type: NRG; PAM sequence: GAG
ttctaagaaagtgtttcatt

SEQ ID NO: 78346 - DNA, 20 bp, Artificial Sequence
  Description of Artificial Sequence: Synthetic oligonucleotide
  Target: LAMA2; (-) strand; PAM type: NRG; PAM sequence: AAG
aaaatatcaaagttctaaga

SEQ ID NO: 78347 - DNA, 20 bp, Artificial Sequence
  Description of Artificial Sequence: Synthetic oligonucleotide
  Target: LAMA2; (-) strand; PAM type: NRG; PAM sequence: AAG
tttaaaaatatcaaagttct

SEQ ID NO: 78348 - DNA, 20 bp, Artificial Sequence
  Description of Artificial Sequence: Synthetic oligonucleotide
  Target: LAMA2; (-) strand; PAM type: NRG; PAM sequence: AAG
gatatcatttaaaaatatca

SEQ ID NO: 78349 - DNA, 20 bp, Artificial Sequence
  Description of Artificial Sequence: Synthetic oligonucleotide
  Target: LAMA2; (-) strand; PAM type: NRG; PAM sequence: GAG
ttgtgatgtacacagatggt

SEQ ID NO: 78350 - DNA, 20 bp, Artificial Sequence
  Description of Artificial Sequence: Synthetic oligonucleotide
  Target: LAMA2; (-) strand; PAM type: NRG; PAM sequence: TGG
aacattgtgatgtacacaga

SEQ ID NO: 78351 - DNA, 20 bp, Artificial Sequence
  Description of Artificial Sequence: Synthetic oligonucleotide
  Target: LAMA2; (-) strand; PAM type: NRG; PAM sequence: CAG
gctcaacattgtgatgtaca

SEQ ID NO: 78352 - DNA, 20 bp, Artificial Sequence
  Description of Artificial Sequence: Synthetic oligonucleotide
  Target: LAMA2; (-) strand; PAM type: NRG; PAM sequence: TAG
tgttagagccaccacatttg

SEQ ID NO: 78353 - DNA, 20 bp, Artificial Sequence
  Description of Artificial Sequence: Synthetic oligonucleotide
  Target: LAMA2; (-) strand; PAM type: NRG; PAM sequence: GAG
tcatacttaaaattttgtta

SEQ ID NO: 78354 - DNA, 20 bp, Artificial Sequence
  Description of Artificial Sequence: Synthetic oligonucleotide
  Target: LAMA2; (-) strand; PAM type: NRG; PAM sequence: TAG
cttcatacttaaaattttgt

SEQ ID NO: 78355 - DNA, 20 bp, Artificial Sequence
  Description of Artificial Sequence: Synthetic oligonucleotide
  Target: LAMA2; (-) strand; PAM type: NRG; PAM sequence: GGG
cagaagaacgtgatggagaa

SEQ ID NO: 78356 - DNA, 20 bp, Artificial Sequence
  Description of Artificial Sequence: Synthetic oligonucleotide
  Target: LAMA2; (-) strand; PAM type: NRG; PAM sequence: AGG
acagaagaacgtgatggaga

SEQ ID NO: 78357 - DNA, 20 bp, Artificial Sequence
  Description of Artificial Sequence: Synthetic oligonucleotide
  Target: LAMA2; (-) strand; PAM type: NRG; PAM sequence: AAG
aacagaagaacgtgatggag

SEQ ID NO: 78358 - DNA, 20 bp, Artificial Sequence
  Description of Artificial Sequence: Synthetic oligonucleotide
  Target: LAMA2; (-) strand; PAM type: NRG; PAM sequence: GAG
aaaaacagaagaacgtgatg

SEQ ID NO: 78359 - DNA, 20 bp, Artificial Sequence
  Description of Artificial Sequence: Synthetic oligonucleotide
  Target: LAMA2; (-) strand; PAM type: NRG; PAM sequence: TGG
tgaaaaacagaagaacgtga

SEQ ID NO: 78360 - DNA, 20 bp, Artificial Sequence
  Description of Artificial Sequence: Synthetic oligonucleotide
  Target: LAMA2; (-) strand; PAM type: NRG; PAM sequence: AAG
aagcgggaaatgaaaaacag

SEQ ID NO: 78361 - DNA, 20 bp, Artificial Sequence
  Description of Artificial Sequence: Synthetic oligonucleotide
  Target: LAMA2; (-) strand; PAM type: NRG; PAM sequence: CAG
gagaagcgggaaatgaaaaa

SEQ ID NO: 78362 - DNA, 20 bp, Artificial Sequence
  Description of Artificial Sequence: Synthetic oligonucleotide
  Target: LAMA2; (-) strand; PAM type: NRG; PAM sequence: GGG
gggagtagtttgtgagaagc

SEQ ID NO: 78363 - DNA, 20 bp, Artificial Sequence
  Description of Artificial Sequence: Synthetic oligonucleotide
  Target: LAMA2; (-) strand; PAM type: NRG; PAM sequence: CGG
ggggagtagtttgtgagaag

SEQ ID NO: 78364 - DNA, 20 bp, Artificial Sequence
  Description of Artificial Sequence: Synthetic oligonucleotide
  Target: LAMA2; (-) strand; PAM type: NRG; PAM sequence: AAG
tctggggagtagtttgtgag

SEQ ID NO: 78365 - DNA, 20 bp, Artificial Sequence
  Description of Artificial Sequence: Synthetic oligonucleotide
  Target: LAMA2; (-) strand; PAM type: NRG; PAM sequence: GAG
acatctggggagtagtttgt

SEQ ID NO: 78366 - DNA, 20 bp, Artificial Sequence
  Description of Artificial Sequence: Synthetic oligonucleotide
  Target: LAMA2; (-) strand; PAM type: NRG; PAM sequence: TAG
aattattgacatctggggag

SEQ ID NO: 78367 - DNA, 20 bp, Artificial Sequence
  Description of Artificial Sequence: Synthetic oligonucleotide
  Target: LAMA2; (-) strand; PAM type: NRG; PAM sequence: GAG
tagaattattgacatctggg

SEQ ID NO: 78368 - DNA, 20 bp, Artificial Sequence
  Description of Artificial Sequence: Synthetic oligonucleotide
  Target: LAMA2; (-) strand; PAM type: NRG; PAM sequence: GGG
tgtagaattattgacatctg

SEQ ID NO: 78369 - DNA, 20 bp, Artificial Sequence
  Description of Artificial Sequence: Synthetic oligonucleotide
  Target: LAMA2; (-) strand; PAM type: NRG; PAM sequence: GGG
ttgtagaattattgacatct

SEQ ID NO: 78370 - DNA, 20 bp, Artificial Sequence
  Description of Artificial Sequence: Synthetic oligonucleotide
  Target: LAMA2; (-) strand; PAM type: NRG; PAM sequence: TGG
attgtagaattattgacatc

SEQ ID NO: 78371 - DNA, 20 bp, Artificial Sequence
  Description of Artificial Sequence: Synthetic oligonucleotide
  Target: LAMA2; (-) strand; PAM type: NRG; PAM sequence: TAG
gttgtaggaagaggagattg

SEQ ID NO: 78372 - DNA, 20 bp, Artificial Sequence
  Description of Artificial Sequence: Synthetic oligonucleotide
  Target: LAMA2; (-) strand; PAM type: NRG; PAM sequence: GAG
cacgaaggttgtaggaagag

SEQ ID NO: 78373 - DNA, 20 bp, Artificial Sequence
  Description of Artificial Sequence: Synthetic oligonucleotide
  Target: LAMA2; (-) strand; PAM type: NRG; PAM sequence: AGG
aacacgaaggttgtaggaag

SEQ ID NO: 78374 - DNA, 20 bp, Artificial Sequence
  Description of Artificial Sequence: Synthetic oligonucleotide
  Target: LAMA2; (-) strand; PAM type: NRG; PAM sequence: GAG
caacacgaaggttgtaggaa

SEQ ID NO: 78375 - DNA, 20 bp, Artificial Sequence
  Description of Artificial Sequence: Synthetic oligonucleotide
  Target: LAMA2; (-) strand; PAM type: NRG; PAM sequence: AAG
accaacacgaaggttgtagg

SEQ ID NO: 78376 - DNA, 20 bp, Artificial Sequence
  Description of Artificial Sequence: Synthetic oligonucleotide
  Target: LAMA2; (-) strand; PAM type: NRG; PAM sequence: AGG
aggaccaacacgaaggttgt

SEQ ID NO: 78377 - DNA, 20 bp, Artificial Sequence
  Description of Artificial Sequence: Synthetic oligonucleotide
  Target: LAMA2; (-) strand; PAM type: NRG; PAM sequence: TAG
aaggaccaacacgaaggttg

SEQ ID NO: 78378 - DNA, 20 bp, Artificial Sequence
  Description of Artificial Sequence: Synthetic oligonucleotide
  Target: LAMA2; (-) strand; PAM type: NRG; PAM sequence: AGG
acgactaaggaccaacacga

SEQ ID NO: 78379 - DNA, 20 bp, Artificial Sequence
  Description of Artificial Sequence: Synthetic oligonucleotide
  Target: LAMA2; (-) strand; PAM type: NRG; PAM sequence: AAG
gacgactaaggaccaacacg

SEQ ID NO: 78380 - DNA, 20 bp, Artificial Sequence
  Description of Artificial Sequence: Synthetic oligonucleotide
  Target: LAMA2; (-) strand; PAM type: NRG; PAM sequence: AGG
gagatcagagtagacgacta

SEQ ID NO: 78381 - DNA, 20 bp, Artificial Sequence
  Description of Artificial Sequence: Synthetic oligonucleotide
  Target: LAMA2; (-) strand; PAM type: NRG; PAM sequence: AAG
tgagatcagagtagacgact

SEQ ID NO: 78382 - DNA, 20 bp, Artificial Sequence
  Description of Artificial Sequence: Synthetic oligonucleotide
  Target: LAMA2; (-) strand; PAM type: NRG; PAM sequence: TAG
ttttgcggttgagatcagag

SEQ ID NO: 78383 - DNA, 20 bp, Artificial Sequence
  Description of Artificial Sequence: Synthetic oligonucleotide
  Target: LAMA2; (-) strand; PAM type: NRG; PAM sequence: GAG
gacttttgcggttgagatca

SEQ ID NO: 78384 - DNA, 20 bp, Artificial Sequence
  Description of Artificial Sequence: Synthetic oligonucleotide
  Target: LAMA2; (-) strand; PAM type: NRG; PAM sequence: CAG
ctgacttttgcggttgagat

SEQ ID NO: 78385 - DNA, 20 bp, Artificial Sequence
  Description of Artificial Sequence: Synthetic oligonucleotide
  Target: LAMA2; (-) strand; PAM type: NRG; PAM sequence: GAG
atcccctgacttttgcggtt

SEQ ID NO: 78386 - DNA, 20 bp, Artificial Sequence
  Description of Artificial Sequence: Synthetic oligonucleotide
  Target: LAMA2; (-) strand; PAM type: NRG; PAM sequence: CGG
gtctcatcccctgacttttg

SEQ ID NO: 78387 - DNA, 20 bp, Artificial Sequence
  Description of Artificial Sequence: Synthetic oligonucleotide
  Target: LAMA2; (-) strand; PAM type: NRG; PAM sequence: TAG
gttgctctggggatggccta

SEQ ID NO: 78388 - DNA, 20 bp, Artificial Sequence
  Description of Artificial Sequence: Synthetic oligonucleotide
  Target: LAMA2; (-) strand; PAM type: NRG; PAM sequence: TGG
tgaggctgttgctctgggga

SEQ ID NO: 78389 - DNA, 20 bp, Artificial Sequence
  Description of Artificial Sequence: Synthetic oligonucleotide
  Target: LAMA2; (-) strand; PAM type: NRG; PAM sequence: GGG
gtgctgaggctgttgctctg

SEQ ID NO: 78390 - DNA, 20 bp, Artificial Sequence
  Description of Artificial Sequence: Synthetic oligonucleotide
  Target: LAMA2; (-) strand; PAM type: NRG; PAM sequence: GGG
ggtgctgaggctgttgctct

SEQ ID NO: 78391 - DNA, 20 bp, Artificial Sequence
  Description of Artificial Sequence: Synthetic oligonucleotide
  Target: LAMA2; (-) strand; PAM type: NRG; PAM sequence: TGG
aggtgctgaggctgttgctc

SEQ ID NO: 78392 - DNA, 20 bp, Artificial Sequence
  Description of Artificial Sequence: Synthetic oligonucleotide
  Target: LAMA2; (-) strand; PAM type: NRG; PAM sequence: AGG
agatctgtgctgaggtgctg

SEQ ID NO: 78393 - DNA, 20 bp, Artificial Sequence
  Description of Artificial Sequence: Synthetic oligonucleotide
  Target: LAMA2; (-) strand; PAM type: NRG; PAM sequence: GAG
cagatctgtgctgaggtgct

SEQ ID NO: 78394 - DNA, 20 bp, Artificial Sequence
  Description of Artificial Sequence: Synthetic oligonucleotide
  Target: LAMA2; (-) strand; PAM type: NRG; PAM sequence: AGG
tcccctccagatctgtgctg

SEQ ID NO: 78395 - DNA, 20 bp, Artificial Sequence
  Description of Artificial Sequence: Synthetic oligonucleotide
  Target: LAMA2; (-) strand; PAM type: NRG; PAM sequence: GAG
atcccctccagatctgtgct

SEQ ID NO: 78396 - DNA, 20 bp, Artificial Sequence
  Description of Artificial Sequence: Synthetic oligonucleotide
  Target: LAMA2; (-) strand; PAM type: NRG; PAM sequence: CAG
tttctagctcaaatcccctc

SEQ ID NO: 78397 - DNA, 20 bp, Artificial Sequence
  Description of Artificial Sequence: Synthetic oligonucleotide
  Target: LAMA2; (-) strand; PAM type: NRG; PAM sequence: TAG
agtaaggtcagagttctttc

SEQ ID NO: 78398 - DNA, 20 bp, Artificial Sequence
  Description of Artificial Sequence: Synthetic oligonucleotide
  Target: LAMA2; (-) strand; PAM type: NRG; PAM sequence: GAG
aaaaaaaaagagtaaggtca

SEQ ID NO: 78399 - DNA, 20 bp, Artificial Sequence
  Description of Artificial Sequence: Synthetic oligonucleotide
  Target: LAMA2; (-) strand; PAM type: NRG; PAM sequence: CAG
aaaaaaaaaaagagtaaggt

SEQ ID NO: 78400 - DNA, 20 bp, Artificial Sequence
  Description of Artificial Sequence: Synthetic oligonucleotide
  Target: LAMA2; (-) strand; PAM type: NRG; PAM sequence: AGG
aaaaaaaaaaaaaaagagta

SEQ ID NO: 78401 - DNA, 20 bp, Artificial Sequence
  Description of Artificial Sequence: Synthetic oligonucleotide
  Target: LAMA2; (-) strand; PAM type: NRG; PAM sequence: AAG
aaaaaaaaaaaaaaaagagt

SEQ ID NO: 78402 - DNA, 20 bp, Artificial Sequence
  Description of Artificial Sequence: Synthetic oligonucleotide
  Target: LAMA2; (-) strand; PAM type: NRG; PAM sequence: GAG
tctcaaaaaaaaaaaaaaaa

SEQ ID NO: 78403 - DNA, 20 bp, Artificial Sequence
  Description of Artificial Sequence: Synthetic oligonucleotide
  Target: LAMA2; (-) strand; PAM type: NRG; PAM sequence: AAG
tgtctcaaaaaaaaaaaaaa

SEQ ID NO: 78404 - DNA, 20 bp, Artificial Sequence
  Description of Artificial Sequence: Synthetic oligonucleotide
  Target: LAMA2; (-) strand; PAM type: NRG; PAM sequence: GAG
tccagcctgggtgacagagc

SEQ ID NO: 78405 - DNA, 20 bp, Artificial Sequence
  Description of Artificial Sequence: Synthetic oligonucleotide
  Target: LAMA2; (-) strand; PAM type: NRG; PAM sequence: GAG
gcactccagcctgggtgaca

SEQ ID NO: 78406 - DNA, 20 bp, Artificial Sequence
  Description of Artificial Sequence: Synthetic oligonucleotide
  Target: LAMA2; (-) strand; PAM type: NRG; PAM sequence: CAG
ctgcactccagcctgggtga

SEQ ID NO: 78407 - DNA, 20 bp, Artificial Sequence
  Description of Artificial Sequence: Synthetic oligonucleotide
  Target: LAMA2; (-) strand; PAM type: NRG; PAM sequence: GGG
gtgccactgcactccagcct

SEQ ID NO: 78408 - DNA, 20 bp, Artificial Sequence
  Description of Artificial Sequence: Synthetic oligonucleotide
  Target: LAMA2; (-) strand; PAM type: NRG; PAM sequence: TGG
tgtgccactgcactccagcc

SEQ ID NO: 78409 - DNA, 20 bp, Artificial Sequence
  Description of Artificial Sequence: Synthetic oligonucleotide
  Target: LAMA2; (-) strand; PAM type: NRG; PAM sequence: CAG
gagattgtgccactgcactc

SEQ ID NO: 78410 - DNA, 20 bp, Artificial Sequence
  Description of Artificial Sequence: Synthetic oligonucleotide
  Target: LAMA2; (-) strand; PAM type: NRG; PAM sequence: GAG
ggtggagcttgcagtgagcc

SEQ ID NO: 78411 - DNA, 20 bp, Artificial Sequence
  Description of Artificial Sequence: Synthetic oligonucleotide
  Target: LAMA2; (-) strand; PAM type: NRG; PAM sequence: GAG
cgggaggtggagcttgcagt

SEQ ID NO: 78412 - DNA, 20 bp, Artificial Sequence
  Description of Artificial Sequence: Synthetic oligonucleotide
  Target: LAMA2; (-) strand; PAM type: NRG; PAM sequence: CAG
aacccgggaggtggagcttg

SEQ ID NO: 78413 - DNA, 20 bp, Artificial Sequence
  Description of Artificial Sequence: Synthetic oligonucleotide
  Target: LAMA2; (-) strand; PAM type: NRG; PAM sequence: GAG
tggcatgaacccgggaggtg

SEQ ID NO: 78414 - DNA, 20 bp, Artificial Sequence
  Description of Artificial Sequence: Synthetic oligonucleotide
  Target: LAMA2; (-) strand; PAM type: NRG; PAM sequence: TGG
aatggcatgaacccgggagg

SEQ ID NO: 78415 - DNA, 20 bp, Artificial Sequence
  Description of Artificial Sequence: Synthetic oligonucleotide
  Target: LAMA2; (-) strand; PAM type: NRG; PAM sequence: AGG
gagaatggcatgaacccggg

SEQ ID NO: 78416 - DNA, 20 bp, Artificial Sequence
  Description of Artificial Sequence: Synthetic oligonucleotide
  Target: LAMA2; (-) strand; PAM type: NRG; PAM sequence: GAG
ggagaatggcatgaacccgg

SEQ ID NO: 78417 - DNA, 20 bp, Artificial Sequence
  Description of Artificial Sequence: Synthetic oligonucleotide
  Target: LAMA2; (-) strand; PAM type: NRG; PAM sequence: GGG
tgggagaatggcatgaaccc

SEQ ID NO: 78418 - DNA, 20 bp, Artificial Sequence
  Description of Artificial Sequence: Synthetic oligonucleotide
  Target: LAMA2; (-) strand; PAM type: NRG; PAM sequence: CGG
gtgggagaatggcatgaacc

SEQ ID NO: 78419 - DNA, 20 bp, Artificial Sequence
  Description of Artificial Sequence: Synthetic oligonucleotide
  Target: LAMA2; (-) strand; PAM type: NRG; PAM sequence: TGG
aggaggctgaggtgggagaa

SEQ ID NO: 78420 - DNA, 20 bp, Artificial Sequence
  Description of Artificial Sequence: Synthetic oligonucleotide
  Target: LAMA2; (-) strand; PAM type: NRG; PAM sequence: GAG
tactcaggaggctgaggtgg

SEQ ID NO: 78421 - DNA, 20 bp, Artificial Sequence
  Description of Artificial Sequence: Synthetic oligonucleotide
  Target: LAMA2; (-) strand; PAM type: NRG; PAM sequence: GGG
gctactcaggaggctgaggt

SEQ ID NO: 78422 - DNA, 20 bp, Artificial Sequence
  Description of Artificial Sequence: Synthetic oligonucleotide
  Target: LAMA2; (-) strand; PAM type: NRG; PAM sequence: TGG
agctactcaggaggctgagg

SEQ ID NO: 78423 - DNA, 20 bp, Artificial Sequence
  Description of Artificial Sequence: Synthetic oligonucleotide
  Target: LAMA2; (-) strand; PAM type: NRG; PAM sequence: AGG
cctagctactcaggaggctg

SEQ ID NO: 78424 - DNA, 20 bp, Artificial Sequence
  Description of Artificial Sequence: Synthetic oligonucleotide
  Target: LAMA2; (-) strand; PAM type: NRG; PAM sequence: GAG
tcctagctactcaggaggct

SEQ ID NO: 78425 - DNA, 20 bp, Artificial Sequence
  Description of Artificial Sequence: Synthetic oligonucleotide
  Target: LAMA2; (-) strand; PAM type: NRG; PAM sequence: AGG
tgtagtcctagctactcagg

SEQ ID NO: 78426 - DNA, 20 bp, Artificial Sequence
  Description of Artificial Sequence: Synthetic oligonucleotide
  Target: LAMA2; (-) strand; PAM type: NRG; PAM sequence: GAG
ctgtagtcctagctactcag

SEQ ID NO: 78427 - DNA, 20 bp, Artificial Sequence
  Description of Artificial Sequence: Synthetic oligonucleotide
  Target: LAMA2; (-) strand; PAM type: NRG; PAM sequence: AGG
gcctgtagtcctagctactc

SEQ ID NO: 78428 - DNA, 20 bp, Artificial Sequence
  Description of Artificial Sequence: Synthetic oligonucleotide
  Target: LAMA2; (-) strand; PAM type: NRG; PAM sequence: CAG
cgcctgtagtcctagctact

SEQ ID NO: 78429 - DNA, 20 bp, Artificial Sequence
  Description of Artificial Sequence: Synthetic oligonucleotide
  Target: LAMA2; (-) strand; PAM type: NRG; PAM sequence: TAG
gtggcgggcgcctgtagtcc

SEQ ID NO: 78430 - DNA, 20 bp, Artificial Sequence
  Description of Artificial Sequence: Synthetic oligonucleotide
  Target: LAMA2; (-) strand; PAM type: NRG; PAM sequence: TAG
ggcgtggtggcgggcgcctg

SEQ ID NO: 78431 - DNA, 20 bp, Artificial Sequence
  Description of Artificial Sequence: Synthetic oligonucleotide
  Target: LAMA2; (-) strand; PAM type: NRG; PAM sequence: GGG
aattagccaggcgtggtggc

SEQ ID NO: 78432 - DNA, 20 bp, Artificial Sequence
  Description of Artificial Sequence: Synthetic oligonucleotide
  Target: LAMA2; (-) strand; PAM type: NRG; PAM sequence: CGG
aaattagccaggcgtggtgg

SEQ ID NO: 78433 - DNA, 20 bp, Artificial Sequence
  Description of Artificial Sequence: Synthetic oligonucleotide
  Target: LAMA2; (-) strand; PAM type: NRG; PAM sequence: TGG
aaaaaattagccaggcgtgg

SEQ ID NO: 78434 - DNA, 20 bp, Artificial Sequence
  Description of Artificial Sequence: Synthetic oligonucleotide
  Target: LAMA2; (-) strand; PAM type: NRG; PAM sequence: TGG
tacaaaaaattagccaggcg

SEQ ID NO: 78435 - DNA, 20 bp, Artificial Sequence
  Description of Artificial Sequence: Synthetic oligonucleotide
  Target: LAMA2; (-) strand; PAM type: NRG; PAM sequence: AGG
aaaaatacaaaaaattagcc

SEQ ID NO: 78436 - DNA, 20 bp, Artificial Sequence
  Description of Artificial Sequence: Synthetic oligonucleotide
  Target: LAMA2; (-) strand; PAM type: NRG; PAM sequence: CAG
taaaaatacaaaaaattagc

SEQ ID NO: 78437 - DNA, 20 bp, Artificial Sequence
  Description of Artificial Sequence: Synthetic oligonucleotide
  Target: LAMA2; (-) strand; PAM type: NRG; PAM sequence: TAG
ctactaaaaatacaaaaaat

SEQ ID NO: 78438 - DNA, 20 bp, Artificial Sequence
  Description of Artificial Sequence: Synthetic oligonucleotide
  Target: LAMA2; (-) strand; PAM type: NRG; PAM sequence: CAG
cgagaccatcctggctaaca

SEQ ID NO: 78439 - DNA, 20 bp, Artificial Sequence
  Description of Artificial Sequence: Synthetic oligonucleotide
  Target: LAMA2; (-) strand; PAM type: NRG; PAM sequence: TGG
tcaggagatcgagaccatcc

SEQ ID NO: 78440 - DNA, 20 bp, Artificial Sequence
  Description of Artificial Sequence: Synthetic oligonucleotide
  Target: LAMA2; (-) strand; PAM type: NRG; PAM sequence: GAG
gatcacgaggtcaggagatc

SEQ ID NO: 78441 - DNA, 20 bp, Artificial Sequence
  Description of Artificial Sequence: Synthetic oligonucleotide
  Target: LAMA2; (-) strand; PAM type: NRG; PAM sequence: GAG
cgggccgatcacgaggtcag

SEQ ID NO: 78442 - DNA, 20 bp, Artificial Sequence
  Description of Artificial Sequence: Synthetic oligonucleotide
  Target: LAMA2; (-) strand; PAM type: NRG; PAM sequence: AGG
ggcgggccgatcacgaggtc

SEQ ID NO: 78443 - DNA, 20 bp, Artificial Sequence
  Description of Artificial Sequence: Synthetic oligonucleotide
  Target: LAMA2; (-) strand; PAM type: NRG; PAM sequence: CAG
aggcgggccgatcacgaggt

SEQ ID NO: 78444 - DNA, 20 bp, Artificial Sequence
  Description of Artificial Sequence: Synthetic oligonucleotide
  Target: LAMA2; (-) strand; PAM type: NRG; PAM sequence: AGG
gccgaggcgggccgatcacg

SEQ ID NO: 78445 - DNA, 20 bp, Artificial Sequence
  Description of Artificial Sequence: Synthetic oligonucleotide
  Target: LAMA2; (-) strand; PAM type: NRG; PAM sequence: GAG
ggccgaggcgggccgatcac

SEQ ID NO: 78446 - DNA, 20 bp, Artificial Sequence
  Description of Artificial Sequence: Synthetic oligonucleotide
  Target: LAMA2; (-) strand; PAM type: NRG; PAM sequence: GGG
gcactttgggaggccgaggc

SEQ ID NO: 78447 - DNA, 20 bp, Artificial Sequence
  Description of Artificial Sequence: Synthetic oligonucleotide
  Target: LAMA2; (-) strand; PAM type: NRG; PAM sequence: CGG
agcactttgggaggccgagg

SEQ ID NO: 78448 - DNA, 20 bp, Artificial Sequence
  Description of Artificial Sequence: Synthetic oligonucleotide
  Target: LAMA2; (-) strand; PAM type: NRG; PAM sequence: AGG
cccagcactttgggaggccg

SEQ ID NO: 78449 - DNA, 20 bp, Artificial Sequence
  Description of Artificial Sequence: Synthetic oligonucleotide
  Target: LAMA2; (-) strand; PAM type: NRG; PAM sequence: GAG
tcccagcactttgggaggcc

SEQ ID NO: 78450 - DNA, 20 bp, Artificial Sequence
  Description of Artificial Sequence: Synthetic oligonucleotide
  Target: LAMA2; (-) strand; PAM type: NRG; PAM sequence: AGG
tgtaatcccagcactttggg

SEQ ID NO: 78451 - DNA, 20 bp, Artificial Sequence
  Description of Artificial Sequence: Synthetic oligonucleotide
  Target: LAMA2; (-) strand; PAM type: NRG; PAM sequence: GAG
ctgtaatcccagcactttgg

SEQ ID NO: 78452 - DNA, 20 bp, Artificial Sequence
  Description of Artificial Sequence: Synthetic oligonucleotide
  Target: LAMA2; (-) strand; PAM type: NRG; PAM sequence: GGG
gcctgtaatcccagcacttt

SEQ ID NO: 78453 - DNA, 20 bp, Artificial Sequence
  Description of Artificial Sequence: Synthetic oligonucleotide
  Target: LAMA2; (-) strand; PAM type: NRG; PAM sequence: TGG
cgcctgtaatcccagcactt

SEQ ID NO: 78454 - DNA, 20 bp, Artificial Sequence
  Description of Artificial Sequence: Synthetic oligonucleotide
  Target: LAMA2; (-) strand; PAM type: NRG; PAM sequence: CAG
gtggctcacgcctgtaatcc

SEQ ID NO: 78455 - DNA, 20 bp, Artificial Sequence
  Description of Artificial Sequence: Synthetic oligonucleotide
  Target: LAMA2; (-) strand; PAM type: NRG; PAM sequence: TGG
aaggtcagaggctggtgcgg

SEQ ID NO: 78456 - DNA, 20 bp, Artificial Sequence
  Description of Artificial Sequence: Synthetic oligonucleotide
  Target: LAMA2; (-) strand; PAM type: NRG; PAM sequence: CGG
agtaaggtcagaggctggtg

SEQ ID NO: 78457 - DNA, 20 bp, Artificial Sequence
  Description of Artificial Sequence: Synthetic oligonucleotide
  Target: LAMA2; (-) strand; PAM type: NRG; PAM sequence: TGG
ttaagagtaaggtcagaggc

SEQ ID NO: 78458 - DNA, 20 bp, Artificial Sequence
  Description of Artificial Sequence: Synthetic oligonucleotide
  Target: LAMA2; (-) strand; PAM type: NRG; PAM sequence: AGG
gcaattaagagtaaggtcag

SEQ ID NO: 78459 - DNA, 20 bp, Artificial Sequence
  Description of Artificial Sequence: Synthetic oligonucleotide
  Target: LAMA2; (-) strand; PAM type: NRG; PAM sequence: GAG
agcaattaagagtaaggtca

SEQ ID NO: 78460 - DNA, 20 bp, Artificial Sequence
  Description of Artificial Sequence: Synthetic oligonucleotide
  Target: LAMA2; (-) strand; PAM type: NRG; PAM sequence: CAG
caagcaattaagagtaaggt

SEQ ID NO: 78461 - DNA, 20 bp, Artificial Sequence
  Description of Artificial Sequence: Synthetic oligonucleotide
  Target: LAMA2; (-) strand; PAM type: NRG; PAM sequence: AGG
catgcaagcaattaagagta

SEQ ID NO: 78462 - DNA, 20 bp, Artificial Sequence
  Description of Artificial Sequence: Synthetic oligonucleotide
  Target: LAMA2; (-) strand; PAM type: NRG; PAM sequence: AAG
tcatgcaagcaattaagagt

SEQ ID NO: 78463 - DNA, 20 bp, Artificial Sequence
  Description of Artificial Sequence: Synthetic oligonucleotide
  Target: LAMA2; (-) strand; PAM type: NRG; PAM sequence: GAG
attttcatgcaagcaattaa

SEQ ID NO: 78464 - DNA, 20 bp, Artificial Sequence
  Description of Artificial Sequence: Synthetic oligonucleotide
  Target: LAMA2; (-) strand; PAM type: NRG; PAM sequence: AAG
caattttcatgcaagcaatt

SEQ ID NO: 78465 - DNA, 20 bp, Artificial Sequence
  Description of Artificial Sequence: Synthetic oligonucleotide
  Target: LAMA2; (-) strand; PAM type: NRG; PAM sequence: AAG
tccatatccaattttcatgc

SEQ ID NO: 78466 - DNA, 20 bp, Artificial Sequence
  Description of Artificial Sequence: Synthetic oligonucleotide
  Target: LAMA2; (-) strand; PAM type: NRG; PAM sequence: GGG
ggaaagcaggacatgttctt

SEQ ID NO: 78467 - DNA, 20 bp, Artificial Sequence
  Description of Artificial Sequence: Synthetic oligonucleotide
  Target: LAMA2; (-) strand; PAM type: NRG; PAM sequence: TGG
aggaaagcaggacatgttct

SEQ ID NO: 78468 - DNA, 20 bp, Artificial Sequence
  Description of Artificial Sequence: Synthetic oligonucleotide
  Target: LAMA2; (-) strand; PAM type: NRG; PAM sequence: AGG
gaatgtgcatcaaggaaagc

SEQ ID NO: 78469 - DNA, 20 bp, Artificial Sequence
  Description of Artificial Sequence: Synthetic oligonucleotide
  Target: LAMA2; (-) strand; PAM type: NRG; PAM sequence: CAG
agaatgtgcatcaaggaaag

SEQ ID NO: 78470 - DNA, 20 bp, Artificial Sequence
  Description of Artificial Sequence: Synthetic oligonucleotide
  Target: LAMA2; (-) strand; PAM type: NRG; PAM sequence: AAG
aggagaatgtgcatcaagga

SEQ ID NO: 78471 - DNA, 20 bp, Artificial Sequence
  Description of Artificial Sequence: Synthetic oligonucleotide
  Target: LAMA2; (-) strand; PAM type: NRG; PAM sequence: AGG
caataggagaatgtgcatca

SEQ ID NO: 78472 - DNA, 20 bp, Artificial Sequence
  Description of Artificial Sequence: Synthetic oligonucleotide
  Target: LAMA2; (-) strand; PAM type: NRG; PAM sequence: AAG
tcaataggagaatgtgcatc

SEQ ID NO: 78473 - DNA, 20 bp, Artificial Sequence
  Description of Artificial Sequence: Synthetic oligonucleotide
  Target: LAMA2; (-) strand; PAM type: NRG; PAM sequence: GAG
aggtcactgaacatcaatag

SEQ ID NO: 78474 - DNA, 20 bp, Artificial Sequence
  Description of Artificial Sequence: Synthetic oligonucleotide
  Target: LAMA2; (-) strand; PAM type: NRG; PAM sequence: AGG
taaggtcactgaacatcaat

SEQ ID NO: 78475 - DNA, 20 bp, Artificial Sequence
  Description of Artificial Sequence: Synthetic oligonucleotide
  Target: LAMA2; (-) strand; PAM type: NRG; PAM sequence: TAG
ctaaggtcactgaacatcaa

SEQ ID NO: 78476 - DNA, 20 bp, Artificial Sequence
  Description of Artificial Sequence: Synthetic oligonucleotide
  Target: LAMA2; (-) strand; PAM type: NRG; PAM sequence: AGG
aggtgcttctggaaatgcta

SEQ ID NO: 78477 - DNA, 20 bp, Artificial Sequence
  Description of Artificial Sequence: Synthetic oligonucleotide
  Target: LAMA2; (-) strand; PAM type: NRG; PAM sequence: AAG
gaggtgcttctggaaatgct

SEQ ID NO: 78478 - DNA, 20 bp, Artificial Sequence
  Description of Artificial Sequence: Synthetic oligonucleotide
  Target: LAMA2; (-) strand; PAM type: NRG; PAM sequence: TGG
ccacaataaagaggtgcttc

SEQ ID NO: 78479 - DNA, 20 bp, Artificial Sequence
  Description of Artificial Sequence: Synthetic oligonucleotide
  Target: LAMA2; (-) strand; PAM type: NRG; PAM sequence: AGG
agtttccatccacaataaag

SEQ ID NO: 78480 - DNA, 20 bp, Artificial Sequence
  Description of Artificial Sequence: Synthetic oligonucleotide
  Target: LAMA2; (-) strand; PAM type: NRG; PAM sequence: GAG
aagtttccatccacaataaa

SEQ ID NO: 78481 - DNA, 20 bp, Artificial Sequence
  Description of Artificial Sequence: Synthetic oligonucleotide
  Target: LAMA2; (-) strand; PAM type: NRG; PAM sequence: AAG
gtaagtttccatccacaata

SEQ ID NO: 78482 - DNA, 20 bp, Artificial Sequence
  Description of Artificial Sequence: Synthetic oligonucleotide
  Target: LAMA2; (-) strand; PAM type: NRG; PAM sequence: AAG
ctgagacaacatgaataagt

SEQ ID NO: 78483 - DNA, 20 bp, Artificial Sequence
  Description of Artificial Sequence: Synthetic oligonucleotide
  Target: LAMA2; (-) strand; PAM type: NRG; PAM sequence: AAG
cagcctgagacaacatgaat

SEQ ID NO: 78484 - DNA, 20 bp, Artificial Sequence
  Description of Artificial Sequence: Synthetic oligonucleotide
  Target: LAMA2; (-) strand; PAM type: NRG; PAM sequence: GAG
gttaccaacctggacagcct

SEQ ID NO: 78485 - DNA, 20 bp, Artificial Sequence
  Description of Artificial Sequence: Synthetic oligonucleotide
  Target: LAMA2; (-) strand; PAM type: NRG; PAM sequence: CAG
ttacctgttaccaacctgga

SEQ ID NO: 78486 - DNA, 20 bp, Artificial Sequence
  Description of Artificial Sequence: Synthetic oligonucleotide
  Target: LAMA2; (-) strand; PAM type: NRG; PAM sequence: TGG
gcagttacctgttaccaacc

SEQ ID NO: 78487 - DNA, 20 bp, Artificial Sequence
  Description of Artificial Sequence: Synthetic oligonucleotide
  Target: LAMA2; (-) strand; PAM type: NRG; PAM sequence: CAG
atgtgctccaccctttatag

SEQ ID NO: 78488 - DNA, 20 bp, Artificial Sequence
  Description of Artificial Sequence: Synthetic oligonucleotide
  Target: LAMA2; (-) strand; PAM type: NRG; PAM sequence: TAG
aggatgtgctccacccttta

SEQ ID NO: 78489 - DNA, 20 bp, Artificial Sequence
  Description of Artificial Sequence: Synthetic oligonucleotide
  Target: LAMA2; (-) strand; PAM type: NRG; PAM sequence: AGG
actggatctctccatttagc

SEQ ID NO: 78490 - DNA, 20 bp, Artificial Sequence
  Description of Artificial Sequence: Synthetic oligonucleotide
  Target: LAMA2; (-) strand; PAM type: NRG; PAM sequence: CAG
cactggatctctccatttag

SEQ ID NO: 78491 - DNA, 20 bp, Artificial Sequence
  Description of Artificial Sequence: Synthetic oligonucleotide
  Target: LAMA2; (-) strand; PAM type: NRG; PAM sequence: TAG
tgacactggatctctccatt

SEQ ID NO: 78492 - DNA, 20 bp, Artificial Sequence
  Description of Artificial Sequence: Synthetic oligonucleotide
  Target: LAMA2; (-) strand; PAM type: NRG; PAM sequence: TGG
aaaaaaaatgtaaatgacac

SEQ ID NO: 78493 - DNA, 20 bp, Artificial Sequence
  Description of Artificial Sequence: Synthetic oligonucleotide
  Target: LAMA2; (-) strand; PAM type: NRG; PAM sequence: GAG
agttgccattacccttgaaa

SEQ ID NO: 78494 - DNA, 20 bp, Artificial Sequence
  Description of Artificial Sequence: Synthetic oligonucleotide
  Target: LAMA2; (-) strand; PAM type: NRG; PAM sequence: AAG
ttagttgccattacccttga

SEQ ID NO: 78495 - DNA, 20 bp, Artificial Sequence
  Description of Artificial Sequence: Synthetic oligonucleotide
  Target: LAMA2; (-) strand; PAM type: NRG; PAM sequence: TAG
cacacaggagaaactattgt

SEQ ID NO: 78496 - DNA, 20 bp, Artificial Sequence
  Description of Artificial Sequence: Synthetic oligonucleotide
  Target: LAMA2; (-) strand; PAM type: NRG; PAM sequence: GAG
gaacaatatctagcacacag

SEQ ID NO: 78497 - DNA, 20 bp, Artificial Sequence
  Description of Artificial Sequence: Synthetic oligonucleotide
  Target: LAMA2; (-) strand; PAM type: NRG; PAM sequence: AGG
tagaacaatatctagcacac

SEQ ID NO: 78498 - DNA, 20 bp, Artificial Sequence
  Description of Artificial Sequence: Synthetic oligonucleotide
  Target: LAMA2; (-) strand; PAM type: NRG; PAM sequence: CAG
ttagaacaatatctagcaca

SEQ ID NO: 78499 - DNA, 20 bp, Artificial Sequence
  Description of Artificial Sequence: Synthetic oligonucleotide
  Target: LAMA2; (-) strand; PAM type: NRG; PAM sequence: TAG
aaaatgattagaacaatatc

SEQ ID NO: 78500 - DNA, 20 bp, Artificial Sequence
  Description of Artificial Sequence: Synthetic oligonucleotide
  Target: LAMA2; (-) strand; PAM type: NRG; PAM sequence: TAG
aataatttatgtaaaatgat

SEQ ID NO: 78501 - DNA, 20 bp, Artificial Sequence
  Description of Artificial Sequence: Synthetic oligonucleotide
  Target: LAMA2; (-) strand; PAM type: NRG; PAM sequence: AAG
agtgctgtttggtggattaa

SEQ ID NO: 78502 - DNA, 20 bp, Artificial Sequence
  Description of Artificial Sequence: Synthetic oligonucleotide
  Target: LAMA2; (-) strand; PAM type: NRG; PAM sequence: TGG
tatcttatagtgctgtttgg

SEQ ID NO: 78503 - DNA, 20 bp, Artificial Sequence
  Description of Artificial Sequence: Synthetic oligonucleotide
  Target: LAMA2; (-) strand; PAM type: NRG; PAM sequence: TGG
atctatcttatagtgctgtt

SEQ ID NO: 78504 - DNA, 20 bp, Artificial Sequence
  Description of Artificial Sequence: Synthetic oligonucleotide
  Target: LAMA2; (-) strand; PAM type: NRG; PAM sequence: TAG
taaaaataatatctatctta

SEQ ID NO: 78505 - DNA, 20 bp, Artificial Sequence
  Description of Artificial Sequence: Synthetic oligonucleotide
  Target: LAMA2; (-) strand; PAM type: NRG; PAM sequence: AGG
acctcagttttctctaacaa

SEQ ID NO: 78506 - DNA, 20 bp, Artificial Sequence
  Description of Artificial Sequence: Synthetic oligonucleotide
  Target: LAMA2; (-) strand; PAM type: NRG; PAM sequence: AAG
tacctcagttttctctaaca

SEQ ID NO: 78507 - DNA, 20 bp, Artificial Sequence
  Description of Artificial Sequence: Synthetic oligonucleotide
  Target: LAMA2; (-) strand; PAM type: NRG; PAM sequence: CAG
tacttaatctctctatacct

SEQ ID NO: 78508 - DNA, 20 bp, Artificial Sequence
  Description of Artificial Sequence: Synthetic oligonucleotide
  Target: LAMA2; (-) strand; PAM type: NRG; PAM sequence: TAG
acttactatctgtgtgaatt

SEQ ID NO: 78509 - DNA, 20 bp, Artificial Sequence
  Description of Artificial Sequence: Synthetic oligonucleotide
  Target: LAMA2; (-) strand; PAM type: NRG; PAM sequence: TGG
aattgcttgtgttcaaattc

SEQ ID NO: 78510 - DNA, 20 bp, Artificial Sequence
  Description of Artificial Sequence: Synthetic oligonucleotide
  Target: LAMA2; (-) strand; PAM type: NRG; PAM sequence: GAG
gtttaagatcaaatttgttg

SEQ ID NO: 78511 - DNA, 20 bp, Artificial Sequence
  Description of Artificial Sequence: Synthetic oligonucleotide
  Target: LAMA2; (-) strand; PAM type: NRG; PAM sequence: TGG
tagtttaagatcaaatttgt

SEQ ID NO: 78512 - DNA, 20 bp, Artificial Sequence
  Description of Artificial Sequence: Synthetic oligonucleotide
  Target: LAMA2; (-) strand; PAM type: NRG; PAM sequence: AAG
cagagagttaaccatagttt

SEQ ID NO: 78513 - DNA, 20 bp, Artificial Sequence
  Description of Artificial Sequence: Synthetic oligonucleotide
  Target: LAMA2; (-) strand; PAM type: NRG; PAM sequence: TAG
tgtgttcagagagttaacca

SEQ ID NO: 78514 - DNA, 20 bp, Artificial Sequence
  Description of Artificial Sequence: Synthetic oligonucleotide
  Target: LAMA2; (-) strand; PAM type: NRG; PAM sequence: GAG
tgtttgtgtgtgtgttcaga

SEQ ID NO: 78515 - DNA, 20 bp, Artificial Sequence
  Description of Artificial Sequence: Synthetic oligonucleotide
  Target: LAMA2; (-) strand; PAM type: NRG; PAM sequence: GAG
tgtgtttgtgtgtgtgttca

SEQ ID NO: 78516 - DNA, 20 bp, Artificial Sequence
  Description of Artificial Sequence: Synthetic oligonucleotide
  Target: LAMA2; (-) strand; PAM type: NRG; PAM sequence: CAG
tgtgtgtttgtgtgtgtgtt

SEQ ID NO: 78517 - DNA, 20 bp, Artificial Sequence
  Description of Artificial Sequence: Synthetic oligonucleotide
  Target: LAMA2; (-) strand; PAM type: NRG; PAM sequence: AGG
agtctatgtgtacaactgta

SEQ ID NO: 78518 - DNA, 20 bp, Artificial Sequence
  Description of Artificial Sequence: Synthetic oligonucleotide
  Target: LAMA2; (-) strand; PAM type: NRG; PAM sequence: AAG
gagtctatgtgtacaactgt

SEQ ID NO: 78519 - DNA, 20 bp, Artificial Sequence
  Description of Artificial Sequence: Synthetic oligonucleotide
  Target: LAMA2; (-) strand; PAM type: NRG; PAM sequence: GAG
ttcagtgggtttataaacct

SEQ ID NO: 78520 - DNA, 20 bp, Artificial Sequence
  Description of Artificial Sequence: Synthetic oligonucleotide
  Target: LAMA2; (-) strand; PAM type: NRG; PAM sequence: GGG
tgatgagtcttcacttcagt

SEQ ID NO: 78521 - DNA, 20 bp, Artificial Sequence
  Description of Artificial Sequence: Synthetic oligonucleotide
  Target: LAMA2; (-) strand; PAM type: NRG; PAM sequence: TGG
atgatgagtcttcacttcag

SEQ ID NO: 78522 - DNA, 20 bp, Artificial Sequence
  Description of Artificial Sequence: Synthetic oligonucleotide
  Target: LAMA2; (-) strand; PAM type: NRG; PAM sequence: CAG
taaatgatgagtcttcactt

SEQ ID NO: 78523 - DNA, 20 bp, Artificial Sequence
  Description of Artificial Sequence: Synthetic oligonucleotide
  Target: LAMA2; (-) strand; PAM type: NRG; PAM sequence: GAG
tgtatattttcataaatgat

SEQ ID NO: 78524 - DNA, 20 bp, Artificial Sequence
  Description of Artificial Sequence: Synthetic oligonucleotide
  Target: LAMA2; (-) strand; PAM type: NRG; PAM sequence: CAG
taaaaaattaaattattttg

SEQ ID NO: 78525 - DNA, 20 bp, Artificial Sequence
  Description of Artificial Sequence: Synthetic oligonucleotide
  Target: LAMA2; (-) strand; PAM type: NRG; PAM sequence: AGG
tgatcttttctcattgcaca

SEQ ID NO: 78526 - DNA, 20 bp, Artificial Sequence
  Description of Artificial Sequence: Synthetic oligonucleotide
  Target: LAMA2; (-) strand; PAM type: NRG; PAM sequence: AAG
ctgatcttttctcattgcac

SEQ ID NO: 78527 - DNA, 20 bp, Artificial Sequence
  Description of Artificial Sequence: Synthetic oligonucleotide
  Target: LAMA2; (-) strand; PAM type: NRG; PAM sequence: AGG
gctctgtaaaaggaaactgt

SEQ ID NO: 78528 - DNA, 20 bp, Artificial Sequence
  Description of Artificial Sequence: Synthetic oligonucleotide
  Target: LAMA2; (-) strand; PAM type: NRG; PAM sequence: TAG
agctctgtaaaaggaaactg

SEQ ID NO: 78529 - DNA, 20 bp, Artificial Sequence
  Description of Artificial Sequence: Synthetic oligonucleotide
  Target: LAMA2; (-) strand; PAM type: NRG; PAM sequence: AGG
ccctggcctagctctgtaaa

SEQ ID NO: 78530 - DNA, 20 bp, Artificial Sequence
  Description of Artificial Sequence: Synthetic oligonucleotide
  Target: LAMA2; (-) strand; PAM type: NRG; PAM sequence: AAG
cccctggcctagctctgtaa

SEQ ID NO: 78531 - DNA, 20 bp, Artificial Sequence
  Description of Artificial Sequence: Synthetic oligonucleotide
  Target: LAMA2; (-) strand; PAM type: NRG; PAM sequence: TAG
tctaaatacagcccctggcc

SEQ ID NO: 78532 - DNA, 20 bp, Artificial Sequence
  Description of Artificial Sequence: Synthetic oligonucleotide
  Target: LAMA2; (-) strand; PAM type: NRG; PAM sequence: TGG
attactctaaatacagcccc

SEQ ID NO: 78533 - DNA, 20 bp, Artificial Sequence
  Description of Artificial Sequence: Synthetic oligonucleotide
  Target: LAMA2; (-) strand; PAM type: NRG; PAM sequence: CAG
gtgttcaattactctaaata

SEQ ID NO: 78534 - DNA, 20 bp, Artificial Sequence
  Description of Artificial Sequence: Synthetic oligonucleotide
  Target: LAMA2; (-) strand; PAM type: NRG; PAM sequence: AAG
ggtcaagtttctccgcattc

SEQ ID NO: 78535 - DNA, 20 bp, Artificial Sequence
  Description of Artificial Sequence: Synthetic oligonucleotide
  Target: LAMA2; (-) strand; PAM type: NRG; PAM sequence: AAG
ttgcatattcacagttggtc

SEQ ID NO: 78536 - DNA, 20 bp, Artificial Sequence
  Description of Artificial Sequence: Synthetic oligonucleotide
  Target: LAMA2; (-) strand; PAM type: NRG; PAM sequence: TGG
tgaaattgcatattcacagt

SEQ ID NO: 78537 - DNA, 20 bp, Artificial Sequence
  Description of Artificial Sequence: Synthetic oligonucleotide
  Target: LAMA2; (-) strand; PAM type: NRG; PAM sequence: CAG
agagtgaaattgcatattca

SEQ ID NO: 78538 - DNA, 20 bp, Artificial Sequence
  Description of Artificial Sequence: Synthetic oligonucleotide
  Target: LAMA2; (-) strand; PAM type: NRG; PAM sequence: GAG
ttaattttatttcatctgta

SEQ ID NO: 78539 - DNA, 20 bp, Artificial Sequence
  Description of Artificial Sequence: Synthetic oligonucleotide
  Target: LAMA2; (-) strand; PAM type: NRG; PAM sequence: TAG
gtttaattttatttcatctg

SEQ ID NO: 78540 - DNA, 20 bp, Artificial Sequence
  Description of Artificial Sequence: Synthetic oligonucleotide
  Target: LAMA2; (-) strand; PAM type: NRG; PAM sequence: TAG
tctctttccatcactttacc

SEQ ID NO: 78541 - DNA, 20 bp, Artificial Sequence
  Description of Artificial Sequence: Synthetic oligonucleotide
  Target: LAMA2; (-) strand; PAM type: NRG; PAM sequence: TGG
ctttcacatgactaattttt

SEQ ID NO: 78542 - DNA, 20 bp, Artificial Sequence
  Description of Artificial Sequence: Synthetic oligonucleotide
  Target: LAMA2; (-) strand; PAM type: NRG; PAM sequence: TAG
gccacctttccctctcctct

SEQ ID NO: 78543 - DNA, 20 bp, Artificial Sequence
  Description of Artificial Sequence: Synthetic oligonucleotide
  Target: LAMA2; (-) strand; PAM type: NRG; PAM sequence: TAG
tgtatgcaaactggagttcc

SEQ ID NO: 78544 - DNA, 20 bp, Artificial Sequence
  Description of Artificial Sequence: Synthetic oligonucleotide
  Target: LAMA2; (-) strand; PAM type: NRG; PAM sequence: GAG
cattgtgtgtatgcaaactg

SEQ ID NO: 78545 - DNA, 20 bp, Artificial Sequence
  Description of Artificial Sequence: Synthetic oligonucleotide
  Target: LAMA2; (-) strand; PAM type: NRG; PAM sequence: TGG
aacattgtgtgtatgcaaac

SEQ ID NO: 78546 - DNA, 20 bp, Artificial Sequence
  Description of Artificial Sequence: Synthetic oligonucleotide
  Target: LAMA2; (-) strand; PAM type: NRG; PAM sequence: TAG
agactgagcattccattggc

SEQ ID NO: 78547 - DNA, 20 bp, Artificial Sequence
  Description of Artificial Sequence: Synthetic oligonucleotide
  Target: LAMA2; (-) strand; PAM type: NRG; PAM sequence: TGG
ttcaagactgagcattccat

SEQ ID NO: 78548 - DNA, 20 bp, Artificial Sequence
  Description of Artificial Sequence: Synthetic oligonucleotide
  Target: LAMA2; (-) strand; PAM type: NRG; PAM sequence: GAG
gacacaagctcttcaagact

SEQ ID NO: 78549 - DNA, 20 bp, Artificial Sequence
  Description of Artificial Sequence: Synthetic oligonucleotide
  Target: LAMA2; (-) strand; PAM type: NRG; PAM sequence: AAG
agcagagacacaagctcttc

SEQ ID NO: 78550 - DNA, 20 bp, Artificial Sequence
  Description of Artificial Sequence: Synthetic oligonucleotide
  Target: LAMA2; (-) strand; PAM type: NRG; PAM sequence: AAG
aggagtttaagcagagacac

SEQ ID NO: 78551 - DNA, 20 bp, Artificial Sequence
  Description of Artificial Sequence: Synthetic oligonucleotide
  Target: LAMA2; (-) strand; PAM type: NRG; PAM sequence: GAG
tgcatacaggagtttaagca

SEQ ID NO: 78552 - DNA, 20 bp, Artificial Sequence
  Description of Artificial Sequence: Synthetic oligonucleotide
  Target: LAMA2; (-) strand; PAM type: NRG; PAM sequence: CAG
aatgcatacaggagtttaag

SEQ ID NO: 78553 - DNA, 20 bp, Artificial Sequence
  Description of Artificial Sequence: Synthetic oligonucleotide
  Target: LAMA2; (-) strand; PAM type: NRG; PAM sequence: AAG
actaatgcatacaggagttt

SEQ ID NO: 78554 - DNA, 20 bp, Artificial Sequence
  Description of Artificial Sequence: Synthetic oligonucleotide
  Target: LAMA2; (-) strand; PAM type: NRG; PAM sequence: GAG
aatcatactaatgcatacag

SEQ ID NO: 78555 - DNA, 20 bp, Artificial Sequence
  Description of Artificial Sequence: Synthetic oligonucleotide
  Target: LAMA2; (-) strand; PAM type: NRG; PAM sequence: AGG
ggaatcatactaatgcatac

SEQ ID NO: 78556 - DNA, 20 bp, Artificial Sequence
  Description of Artificial Sequence: Synthetic oligonucleotide
  Target: LAMA2; (-) strand; PAM type: NRG; PAM sequence: CAG
tggaatcatactaatgcata

SEQ ID NO: 78557 - DNA, 20 bp, Artificial Sequence
  Description of Artificial Sequence: Synthetic oligonucleotide
  Target: LAMA2; (-) strand; PAM type: NRG; PAM sequence: TGG
tgtcagagactttaaattta

SEQ ID NO: 78558 - DNA, 20 bp, Artificial Sequence
  Description of Artificial Sequence: Synthetic oligonucleotide
  Target: LAMA2; (-) strand; PAM type: NRG; PAM sequence: GAG
gcttaaaactcaagatgtca

SEQ ID NO: 78559 - DNA, 20 bp, Artificial Sequence
  Description of Artificial Sequence: Synthetic oligonucleotide
  Target: LAMA2; (-) strand; PAM type: NRG; PAM sequence: CAG
aagcttaaaactcaagatgt

SEQ ID NO: 78560 - DNA, 20 bp, Artificial Sequence
  Description of Artificial Sequence: Synthetic oligonucleotide
  Target: LAMA2; (-) strand; PAM type: NRG; PAM sequence: AAG
gttcagaaagcttaaaactc

SEQ ID NO: 78561 - DNA, 20 bp, Artificial Sequence
  Description of Artificial Sequence: Synthetic oligonucleotide
  Target: LAMA2; (-) strand; PAM type: NRG; PAM sequence: AAG
ccactgatttaatgttcaga

SEQ ID NO: 78562 - DNA, 20 bp, Artificial Sequence
  Description of Artificial Sequence: Synthetic oligonucleotide
  Target: LAMA2; (-) strand; PAM type: NRG; PAM sequence: CAG
gcctccactgatttaatgtt

SEQ ID NO: 78563 - DNA, 20 bp, Artificial Sequence
  Description of Artificial Sequence: Synthetic oligonucleotide
  Target: LAMA2; (-) strand; PAM type: NRG; PAM sequence: CAG
catttcaggatagctactag

SEQ ID NO: 78564 - DNA, 20 bp, Artificial Sequence
  Description of Artificial Sequence: Synthetic oligonucleotide
  Target: LAMA2; (-) strand; PAM type: NRG; PAM sequence: TAG
cagcatttcaggatagctac

SEQ ID NO: 78565 - DNA, 20 bp, Artificial Sequence
  Description of Artificial Sequence: Synthetic oligonucleotide
  Target: LAMA2; (-) strand; PAM type: NRG; PAM sequence: TAG
atagaagcagcatttcagga

SEQ ID NO: 78566 - DNA, 20 bp, Artificial Sequence
  Description of Artificial Sequence: Synthetic oligonucleotide
  Target: LAMA2; (-) strand; PAM type: NRG; PAM sequence: AGG
atgtatagaagcagcatttc

SEQ ID NO: 78567 - DNA, 20 bp, Artificial Sequence
  Description of Artificial Sequence: Synthetic oligonucleotide
  Target: LAMA2; (-) strand; PAM type: NRG; PAM sequence: CAG
tatgtatagaagcagcattt

SEQ ID NO: 78568 - DNA, 20 bp, Artificial Sequence
  Description of Artificial Sequence: Synthetic oligonucleotide
  Target: LAMA2; (-) strand; PAM type: NRG; PAM sequence: CAG
tttactcatatgtatagaag

SEQ ID NO: 78569 - DNA, 20 bp, Artificial Sequence
  Description of Artificial Sequence: Synthetic oligonucleotide
  Target: LAMA2; (-) strand; PAM type: NRG; PAM sequence: AAG
atttttactcatatgtatag

SEQ ID NO: 78570 - DNA, 20 bp, Artificial Sequence
  Description of Artificial Sequence: Synthetic oligonucleotide
  Target: LAMA2; (-) strand; PAM type: NRG; PAM sequence: TAG
tggatttttactcatatgta

SEQ ID NO: 78571 - DNA, 20 bp, Artificial Sequence
  Description of Artificial Sequence: Synthetic oligonucleotide
  Target: LAMA2; (-) strand; PAM type: NRG; PAM sequence: TGG
gctgtataaatacattaatt

SEQ ID NO: 78572 - DNA, 20 bp, Artificial Sequence
  Description of Artificial Sequence: Synthetic oligonucleotide
  Target: LAMA2; (-) strand; PAM type: NRG; PAM sequence: AAG
tttacgagtacacaaatgaa

SEQ ID NO: 78573 - DNA, 20 bp, Artificial Sequence
  Description of Artificial Sequence: Synthetic oligonucleotide
  Target: LAMA2; (-) strand; PAM type: NRG; PAM sequence: GAG
tgtgtgtgtgtgtattttac

SEQ ID NO: 78574 - DNA, 20 bp, Artificial Sequence
  Description of Artificial Sequence: Synthetic oligonucleotide
  Target: LAMA2; (-) strand; PAM type: NRG; PAM sequence: AAG
ctcaaaggttcttcagagaa

SEQ ID NO: 78575 - DNA, 20 bp, Artificial Sequence
  Description of Artificial Sequence: Synthetic oligonucleotide
  Target: LAMA2; (-) strand; PAM type: NRG; PAM sequence: GAG
tctgactcaaaggttcttca

SEQ ID NO: 78576 - DNA, 20 bp, Artificial Sequence
  Description of Artificial Sequence: Synthetic oligonucleotide
  Target: LAMA2; (-) strand; PAM type: NRG; PAM sequence: CAG
tctctgactcaaaggttctt

SEQ ID NO: 78577 - DNA, 20 bp, Artificial Sequence
  Description of Artificial Sequence: Synthetic oligonucleotide
  Target: LAMA2; (-) strand; PAM type: NRG; PAM sequence: AGG
attctcattctctgactcaa

SEQ ID NO: 78578 - DNA, 20 bp, Artificial Sequence
  Description of Artificial Sequence: Synthetic oligonucleotide
  Target: LAMA2; (-) strand; PAM type: NRG; PAM sequence: AAG
cattctcattctctgactca

SEQ ID NO: 78579 - DNA, 20 bp, Artificial Sequence
  Description of Artificial Sequence: Synthetic oligonucleotide
  Target: LAMA2; (-) strand; PAM type: NRG; PAM sequence: CAG
aggaacttaaaagagaaatt

SEQ ID NO: 78580 - DNA, 20 bp, Artificial Sequence
  Description of Artificial Sequence: Synthetic oligonucleotide
  Target: LAMA2; (-) strand; PAM type: NRG; PAM sequence: GAG
acctagacaggaacttaaaa

SEQ ID NO: 78581 - DNA, 20 bp, Artificial Sequence
  Description of Artificial Sequence: Synthetic oligonucleotide
  Target: LAMA2; (-) strand; PAM type: NRG; PAM sequence: AAG
aaacctagacaggaacttaa

SEQ ID NO: 78582 - DNA, 20 bp, Artificial Sequence
  Description of Artificial Sequence: Synthetic oligonucleotide
  Target: LAMA2; (-) strand; PAM type: NRG; PAM sequence: AGG
gattggaacaaaacctagac

SEQ ID NO: 78583 - DNA, 20 bp, Artificial Sequence
  Description of Artificial Sequence: Synthetic oligonucleotide
  Target: LAMA2; (-) strand; PAM type: NRG; PAM sequence: CAG
agattggaacaaaacctaga

SEQ ID NO: 78584 - DNA, 20 bp, Artificial Sequence
  Description of Artificial Sequence: Synthetic oligonucleotide
  Target: LAMA2; (-) strand; PAM type: NRG; PAM sequence: TAG
cattagattggaacaaaacc

SEQ ID NO: 78585 - DNA, 20 bp, Artificial Sequence
  Description of Artificial Sequence: Synthetic oligonucleotide
  Target: LAMA2; (-) strand; PAM type: NRG; PAM sequence: TGG
cagatcctgtgtcattagat

SEQ ID NO: 78586 - DNA, 20 bp, Artificial Sequence
  Description of Artificial Sequence: Synthetic oligonucleotide
  Target: LAMA2; (-) strand; PAM type: NRG; PAM sequence: TAG
agtgccagatcctgtgtcat

SEQ ID NO: 78587 - DNA, 20 bp, Artificial Sequence
  Description of Artificial Sequence: Synthetic oligonucleotide
  Target: LAMA2; (-) strand; PAM type: NRG; PAM sequence: CAG
aggaggtctaaatacagtgc

SEQ ID NO: 78588 - DNA, 20 bp, Artificial Sequence
  Description of Artificial Sequence: Synthetic oligonucleotide
  Target: LAMA2; (-) strand; PAM type: NRG; PAM sequence: CAG
tggagcaggaggtctaaata

SEQ ID NO: 78589 - DNA, 20 bp, Artificial Sequence
  Description of Artificial Sequence: Synthetic oligonucleotide
  Target: LAMA2; (-) strand; PAM type: NRG; PAM sequence: AGG
aaataaaatcttggagcagg

SEQ ID NO: 78590 - DNA, 20 bp, Artificial Sequence
  Description of Artificial Sequence: Synthetic oligonucleotide
  Target: LAMA2; (-) strand; PAM type: NRG; PAM sequence: GAG
aaaataaaatcttggagcag

SEQ ID NO: 78591 - DNA, 20 bp, Artificial Sequence
  Description of Artificial Sequence: Synthetic oligonucleotide
  Target: LAMA2; (-) strand; PAM type: NRG; PAM sequence: AGG
taaaaataaaatcttggagc

SEQ ID NO: 78592 - DNA, 20 bp, Artificial Sequence
  Description of Artificial Sequence: Synthetic oligonucleotide
  Target: LAMA2; (-) strand; PAM type: NRG; PAM sequence: CAG
ataaaaataaaatcttggag

SEQ ID NO: 78593 - DNA, 20 bp, Artificial Sequence
  Description of Artificial Sequence: Synthetic oligonucleotide
  Target: LAMA2; (-) strand; PAM type: NRG; PAM sequence: GAG
aaaataaaaataaaatcttg

SEQ ID NO: 78594 - DNA, 20 bp, Artificial Sequence
  Description of Artificial Sequence: Synthetic oligonucleotide
  Target: LAMA2; (-) strand; PAM type: NRG; PAM sequence: TGG
ttaaaataaaaataaaatct

SEQ ID NO: 78595 - DNA, 20 bp, Artificial Sequence
  Description of Artificial Sequence: Synthetic oligonucleotide
  Target: LAMA2; (-) strand; PAM type: NRG; PAM sequence: GGG
tttgttttcagtccccgtgt

SEQ ID NO: 78596 - DNA, 20 bp, Artificial Sequence
  Description of Artificial Sequence: Synthetic oligonucleotide
  Target: LAMA2; (-) strand; PAM type: NRG; PAM sequence: TGG
ttttgttttcagtccccgtg

SEQ ID NO: 78597 - DNA, 20 bp, Artificial Sequence
  Description of Artificial Sequence: Synthetic oligonucleotide
  Target: LAMA2; (-) strand; PAM type: NRG; PAM sequence: CAG
acattttcctgttttgtttt

SEQ ID NO: 78598 - DNA, 20 bp, Artificial Sequence
  Description of Artificial Sequence: Synthetic oligonucleotide
  Target: LAMA2; (-) strand; PAM type: NRG; PAM sequence: AAG
agcagctcaaaggaaaactt

SEQ ID NO: 78599 - DNA, 20 bp, Artificial Sequence
  Description of Artificial Sequence: Synthetic oligonucleotide
  Target: LAMA2; (-) strand; PAM type: NRG; PAM sequence: AGG
gtcagataacagcagctcaa

SEQ ID NO: 78600 - DNA, 20 bp, Artificial Sequence
  Description of Artificial Sequence: Synthetic oligonucleotide
  Target: LAMA2; (-) strand; PAM type: NRG; PAM sequence: AAG
agtcagataacagcagctca

SEQ ID NO: 78601 - DNA, 20 bp, Artificial Sequence
  Description of Artificial Sequence: Synthetic oligonucleotide
  Target: LAMA2; (-) strand; PAM type: NRG; PAM sequence: CAG
acttgaaagtcagataacag

SEQ ID NO: 78602 - DNA, 20 bp, Artificial Sequence
  Description of Artificial Sequence: Synthetic oligonucleotide
  Target: LAMA2; (-) strand; PAM type: NRG; PAM sequence: CAG
tacacttgaaagtcagataa

SEQ ID NO: 78603 - DNA, 20 bp, Artificial Sequence
  Description of Artificial Sequence: Synthetic oligonucleotide
  Target: LAMA2; (-) strand; PAM type: NRG; PAM sequence: CAG
caatcagtacacttgaaagt

SEQ ID NO: 78604 - DNA, 20 bp, Artificial Sequence
  Description of Artificial Sequence: Synthetic oligonucleotide
  Target: LAMA2; (-) strand; PAM type: NRG; PAM sequence: AAG
ggaacaatcagtacacttga

SEQ ID NO: 78605 - DNA, 20 bp, Artificial Sequence
  Description of Artificial Sequence: Synthetic oligonucleotide
  Target: LAMA2; (-) strand; PAM type: NRG; PAM sequence: CAG
cattggtgagacggaacaat

SEQ ID NO: 78606 - DNA, 20 bp, Artificial Sequence
  Description of Artificial Sequence: Synthetic oligonucleotide
  Target: LAMA2; (-) strand; PAM type: NRG; PAM sequence: CGG
aatgacctacattggtgaga

SEQ ID NO: 78607 - DNA, 20 bp, Artificial Sequence
  Description of Artificial Sequence: Synthetic oligonucleotide
  Target: LAMA2; (-) strand; PAM type: NRG; PAM sequence: GAG
gtacaatgacctacattggt

SEQ ID NO: 78608 - DNA, 20 bp, Artificial Sequence
  Description of Artificial Sequence: Synthetic oligonucleotide
  Target: LAMA2; (-) strand; PAM type: NRG; PAM sequence: TGG
gagagtacaatgacctacat

SEQ ID NO: 78609 - DNA, 20 bp, Artificial Sequence
  Description of Artificial Sequence: Synthetic oligonucleotide
  Target: LAMA2; (-) strand; PAM type: NRG; PAM sequence: GAG
atagaaaacaaagtaactga

SEQ ID NO: 78610 - DNA, 20 bp, Artificial Sequence
  Description of Artificial Sequence: Synthetic oligonucleotide
  Target: LAMA2; (-) strand; PAM type: NRG; PAM sequence: GAG
cgatagaaaacaaagtaact

SEQ ID NO: 78611 - DNA, 20 bp, Artificial Sequence
  Description of Artificial Sequence: Synthetic oligonucleotide
  Target: LAMA2; (-) strand; PAM type: NRG; PAM sequence: AAG
gaaagttccgatagaaaaca

SEQ ID NO: 78612 - DNA, 20 bp, Artificial Sequence
  Description of Artificial Sequence: Synthetic oligonucleotide
  Target: LAMA2; (-) strand; PAM type: NRG; PAM sequence: TAG
gctgctagagaaagttccga

SEQ ID NO: 78613 - DNA, 20 bp, Artificial Sequence
  Description of Artificial Sequence: Synthetic oligonucleotide
  Target: LAMA2; (-) strand; PAM type: NRG; PAM sequence: AAG
atgtggagagctgctagaga

SEQ ID NO: 78614 - DNA, 20 bp, Artificial Sequence
  Description of Artificial Sequence: Synthetic oligonucleotide
  Target: LAMA2; (-) strand; PAM type: NRG; PAM sequence: GAG
cttaatgtggagagctgcta

SEQ ID NO: 78615 - DNA, 20 bp, Artificial Sequence
  Description of Artificial Sequence: Synthetic oligonucleotide
  Target: LAMA2; (-) strand; PAM type: NRG; PAM sequence: TAG
cccttaatgtggagagctgc

SEQ ID NO: 78616 - DNA, 20 bp, Artificial Sequence
  Description of Artificial Sequence: Synthetic oligonucleotide
  Target: LAMA2; (-) strand; PAM type: NRG; PAM sequence: GAG
atgatctcccttaatgtgga

SEQ ID NO: 78617 - DNA, 20 bp, Artificial Sequence
  Description of Artificial Sequence: Synthetic oligonucleotide
  Target: LAMA2; (-) strand; PAM type: NRG; PAM sequence: GAG
acatgatctcccttaatgtg

SEQ ID NO: 78618 - DNA, 20 bp, Artificial Sequence
  Description of Artificial Sequence: Synthetic oligonucleotide
  Target: LAMA2; (-) strand; PAM type: NRG; PAM sequence: TGG
taacatgatctcccttaatg

SEQ ID NO: 78619 - DNA, 20 bp, Artificial Sequence
  Description of Artificial Sequence: Synthetic oligonucleotide
  Target: LAMA2; (-) strand; PAM type: NRG; PAM sequence: AAG
cctcaaattatagggagatg

SEQ ID NO: 78620 - DNA, 20 bp, Artificial Sequence
  Description of Artificial Sequence: Synthetic oligonucleotide
  Target: LAMA2; (-) strand; PAM type: NRG; PAM sequence: GAG
ctaaaacctcaaattatagg

SEQ ID NO: 78621 - DNA, 20 bp, Artificial Sequence
  Description of Artificial Sequence: Synthetic oligonucleotide
  Target: LAMA2; (-) strand; PAM type: NRG; PAM sequence: GGG
tgctaaaacctcaaattata

SEQ ID NO: 78622 - DNA, 20 bp, Artificial Sequence
  Description of Artificial Sequence: Synthetic oligonucleotide
  Target: LAMA2; (-) strand; PAM type: NRG; PAM sequence: AGG
gtgctaaaacctcaaattat

SEQ ID NO: 78623 - DNA, 20 bp, Artificial Sequence
  Description of Artificial Sequence: Synthetic oligonucleotide
  Target: LAMA2; (-) strand; PAM type: NRG; PAM sequence: TAG
agtgctaaaacctcaaatta

SEQ ID NO: 78624 - DNA, 20 bp, Artificial Sequence
  Description of Artificial Sequence: Synthetic oligonucleotide
  Target: LAMA2; (-) strand; PAM type: NRG; PAM sequence: AAG
ggtaaattctacaaagaaga

SEQ ID NO: 78625 - DNA, 20 bp, Artificial Sequence
  Description of Artificial Sequence: Synthetic oligonucleotide
  Target: LAMA2; (-) strand; PAM type: NRG; PAM sequence: AAG
ttatggtaaattctacaaag

SEQ ID NO: 78626 - DNA, 20 bp, Artificial Sequence
  Description of Artificial Sequence: Synthetic oligonucleotide
  Target: LAMA2; (-) strand; PAM type: NRG; PAM sequence: AAG
gctttatggtaaattctaca

SEQ ID NO: 78627 - DNA, 20 bp, Artificial Sequence
  Description of Artificial Sequence: Synthetic oligonucleotide
  Target: LAMA2; (-) strand; PAM type: NRG; PAM sequence: TGG
tcaaaaatacgtatgcttta

SEQ ID NO: 78628 - DNA, 20 bp, Artificial Sequence
  Description of Artificial Sequence: Synthetic oligonucleotide
  Target: LAMA2; (-) strand; PAM type: NRG; PAM sequence: TAG
agtaagtaaaagctattccc

SEQ ID NO: 78629 - DNA, 20 bp, Artificial Sequence
  Description of Artificial Sequence: Synthetic oligonucleotide
  Target: LAMA2; (-) strand; PAM type: NRG; PAM sequence: AAG
ttaagtactttagtaagtaa

SEQ ID NO: 78630 - DNA, 20 bp, Artificial Sequence
  Description of Artificial Sequence: Synthetic oligonucleotide
  Target: LAMA2; (-) strand; PAM type: NRG; PAM sequence: AAG
tagtacttaagtactttagt

SEQ ID NO: 78631 - DNA, 20 bp, Artificial Sequence
  Description of Artificial Sequence: Synthetic oligonucleotide
  Target: LAMA2; (-) strand; PAM type: NRG; PAM sequence: TAG
ggtttagtacttaagtactt

SEQ ID NO: 78632 - DNA, 20 bp, Artificial Sequence
  Description of Artificial Sequence: Synthetic oligonucleotide
  Target: LAMA2; (-) strand; PAM type: NRG; PAM sequence: AAG
ttatgataggtttagtactt

SEQ ID NO: 78633 - DNA, 20 bp, Artificial Sequence
  Description of Artificial Sequence: Synthetic oligonucleotide
  Target: LAMA2; (-) strand; PAM type: NRG; PAM sequence: TAG
gaaattggttatgataggtt

SEQ ID NO: 78634 - DNA, 20 bp, Artificial Sequence
  Description of Artificial Sequence: Synthetic oligonucleotide
  Target: LAMA2; (-) strand; PAM type: NRG; PAM sequence: AGG
taaatgaaattggttatgat

SEQ ID NO: 78635 - DNA, 20 bp, Artificial Sequence
  Description of Artificial Sequence: Synthetic oligonucleotide
  Target: LAMA2; (-) strand; PAM type: NRG; PAM sequence: TAG
ataaatgaaattggttatga

SEQ ID NO: 78636 - DNA, 20 bp, Artificial Sequence
  Description of Artificial Sequence: Synthetic oligonucleotide
  Target: LAMA2; (-) strand; PAM type: NRG; PAM sequence: TGG
aacatcttaataaatgaaat

SEQ ID NO: 78637 - DNA, 20 bp, Artificial Sequence
  Description of Artificial Sequence: Synthetic oligonucleotide
  Target: LAMA2; (-) strand; PAM type: NRG; PAM sequence: AAG
aaaagaaccaacaactccta

SEQ ID NO: 78638 - DNA, 20 bp, Artificial Sequence
  Description of Artificial Sequence: Synthetic oligonucleotide
  Target: LAMA2; (-) strand; PAM type: NRG; PAM sequence: AAG
taaagcattattctccggaa

SEQ ID NO: 78639 - DNA, 20 bp, Artificial Sequence
  Description of Artificial Sequence: Synthetic oligonucleotide
  Target: LAMA2; (-) strand; PAM type: NRG; PAM sequence: CGG
tgggctaaagcattattctc

SEQ ID NO: 78640 - DNA, 20 bp, Artificial Sequence
  Description of Artificial Sequence: Synthetic oligonucleotide
  Target: LAMA2; (-) strand; PAM type: NRG; PAM sequence: AAG
ggttggggactgctgggcta

SEQ ID NO: 78641 - DNA, 20 bp, Artificial Sequence
  Description of Artificial Sequence: Synthetic oligonucleotide
  Target: LAMA2; (-) strand; PAM type: NRG; PAM sequence: GGG
caaaaaggttggggactgct

SEQ ID NO: 78642 - DNA, 20 bp, Artificial Sequence
  Description of Artificial Sequence: Synthetic oligonucleotide
  Target: LAMA2; (-) strand; PAM type: NRG; PAM sequence: TGG
ccaaaaaggttggggactgc

SEQ ID NO: 78643 - DNA, 20 bp, Artificial Sequence
  Description of Artificial Sequence: Synthetic oligonucleotide
  Target: LAMA2; (-) strand; PAM type: NRG; PAM sequence: GGG
ccctggtaccaaaaaggttg

SEQ ID NO: 78644 - DNA, 20 bp, Artificial Sequence
  Description of Artificial Sequence: Synthetic oligonucleotide
  Target: LAMA2; (-) strand; PAM type: NRG; PAM sequence: GGG
tccctggtaccaaaaaggtt

SEQ ID NO: 78645 - DNA, 20 bp, Artificial Sequence
  Description of Artificial Sequence: Synthetic oligonucleotide
  Target: LAMA2; (-) strand; PAM type: NRG; PAM sequence: TGG
atccctggtaccaaaaaggt

SEQ ID NO: 78646 - DNA, 20 bp, Artificial Sequence
  Description of Artificial Sequence: Synthetic oligonucleotide
  Target: LAMA2; (-) strand; PAM type: NRG; PAM sequence: AGG
accaatccctggtaccaaaa

SEQ ID NO: 78647 - DNA, 20 bp, Artificial Sequence
  Description of Artificial Sequence: Synthetic oligonucleotide
  Target: LAMA2; (-) strand; PAM type: NRG; PAM sequence: AAG
aaccaatccctggtaccaaa

SEQ ID NO: 78648 - DNA, 20 bp, Artificial Sequence
  Description of Artificial Sequence: Synthetic oligonucleotide
  Target: LAMA2; (-) strand; PAM type: NRG; PAM sequence: TGG
tcttccacaaaaccaatccc

SEQ ID NO: 78649 - DNA, 20 bp, Artificial Sequence
  Description of Artificial Sequence: Synthetic oligonucleotide
  Target: LAMA2; (-) strand; PAM type: NRG; PAM sequence: TGG
catcccccctgtcaattcca

SEQ ID NO: 78650 - DNA, 20 bp, Artificial Sequence
  Description of Artificial Sequence: Synthetic oligonucleotide
  Target: LAMA2; (-) strand; PAM type: NRG; PAM sequence: TGG
tgaggtaaaacagtttcatc

SEQ ID NO: 78651 - DNA, 20 bp, Artificial Sequence
  Description of Artificial Sequence: Synthetic oligonucleotide
  Target: LAMA2; (-) strand; PAM type: NRG; PAM sequence: CAG
cttgatgatatgaggtaaaa

SEQ ID NO: 78652 - DNA, 20 bp, Artificial Sequence
  Description of Artificial Sequence: Synthetic oligonucleotide
  Target: LAMA2; (-) strand; PAM type: NRG; PAM sequence: AGG
aactaatgcttgatgatatg

SEQ ID NO: 78653 - DNA, 20 bp, Artificial Sequence
  Description of Artificial Sequence: Synthetic oligonucleotide
  Target: LAMA2; (-) strand; PAM type: NRG; PAM sequence: GAG
taactaatgcttgatgatat

SEQ ID NO: 78654 - DNA, 20 bp, Artificial Sequence
  Description of Artificial Sequence: Synthetic oligonucleotide
  Target: LAMA2; (-) strand; PAM type: NRG; PAM sequence: GAG
ctagcttgcaggctccttat

SEQ ID NO: 78655 - DNA, 20 bp, Artificial Sequence
  Description of Artificial Sequence: Synthetic oligonucleotide
  Target: LAMA2; (-) strand; PAM type: NRG; PAM sequence: AGG
atgtgagggacctagcttgc

SEQ ID NO: 78656 - DNA, 20 bp, Artificial Sequence
  Description of Artificial Sequence: Synthetic oligonucleotide
  Target: LAMA2; (-) strand; PAM type: NRG; PAM sequence: CAG
catgtgagggacctagcttg

SEQ ID NO: 78657 - DNA, 20 bp, Artificial Sequence
  Description of Artificial Sequence: Synthetic oligonucleotide
  Target: LAMA2; (-) strand; PAM type: NRG; PAM sequence: TAG
aactgtgcatgtgagggacc

SEQ ID NO: 78658 - DNA, 20 bp, Artificial Sequence
  Description of Artificial Sequence: Synthetic oligonucleotide
  Target: LAMA2; (-) strand; PAM type: NRG; PAM sequence: GGG
attgtaaactgtgcatgtga

SEQ ID NO: 78659 - DNA, 20 bp, Artificial Sequence
  Description of Artificial Sequence: Synthetic oligonucleotide
  Target: LAMA2; (-) strand; PAM type: NRG; PAM sequence: AGG
tattgtaaactgtgcatgtg

SEQ ID NO: 78660 - DNA, 20 bp, Artificial Sequence
  Description of Artificial Sequence: Synthetic oligonucleotide
  Target: LAMA2; (-) strand; PAM type: NRG; PAM sequence: GAG
ctattgtaaactgtgcatgt

SEQ ID NO: 78661 - DNA, 20 bp, Artificial Sequence
  Description of Artificial Sequence: Synthetic oligonucleotide
  Target: LAMA2; (-) strand; PAM type: NRG; PAM sequence: AAG
ttaggttctcaaaggagcac

SEQ ID NO: 78662 - DNA, 20 bp, Artificial Sequence
  Description of Artificial Sequence: Synthetic oligonucleotide
  Target: LAMA2; (-) strand; PAM type: NRG; PAM sequence: GAG
gtggcattaggttctcaaag

SEQ ID NO: 78663 - DNA, 20 bp, Artificial Sequence
  Description of Artificial Sequence: Synthetic oligonucleotide
  Target: LAMA2; (-) strand; PAM type: NRG; PAM sequence: AGG
ctgtggcattaggttctcaa

SEQ ID NO: 78664 - DNA, 20 bp, Artificial Sequence
  Description of Artificial Sequence: Synthetic oligonucleotide
  Target: LAMA2; (-) strand; PAM type: NRG; PAM sequence: AAG
gctgtggcattaggttctca

SEQ ID NO: 78665 - DNA, 20 bp, Artificial Sequence
  Description of Artificial Sequence: Synthetic oligonucleotide
  Target: LAMA2; (-) strand; PAM type: NRG; PAM sequence: AGG
agatcagcagctgtggcatt

SEQ ID NO: 78666 - DNA, 20 bp, Artificial Sequence
  Description of Artificial Sequence: Synthetic oligonucleotide
  Target: LAMA2; (-) strand; PAM type: NRG; PAM sequence: TAG
cagatcagcagctgtggcat

SEQ ID NO: 78667 - DNA, 20 bp, Artificial Sequence
  Description of Artificial Sequence: Synthetic oligonucleotide
  Target: LAMA2; (-) strand; PAM type: NRG; PAM sequence: TGG
tcctgtcagatcagcagctg

SEQ ID NO: 78668 - DNA, 20 bp, Artificial Sequence
  Description of Artificial Sequence: Synthetic oligonucleotide
  Target: LAMA2; (-) strand; PAM type: NRG; PAM sequence: CAG
tccacctcctgtcagatcag

SEQ ID NO: 78669 - DNA, 20 bp, Artificial Sequence
  Description of Artificial Sequence: Synthetic oligonucleotide
  Target: LAMA2; (-) strand; PAM type: NRG; PAM sequence: CAG
agctccacctcctgtcagat

SEQ ID NO: 78670 - DNA, 20 bp, Artificial Sequence
  Description of Artificial Sequence: Synthetic oligonucleotide
  Target: LAMA2; (-) strand; PAM type: NRG; PAM sequence: CAG
gtctgagctccacctcctgt

SEQ ID NO: 78671 - DNA, 20 bp, Artificial Sequence
  Description of Artificial Sequence: Synthetic oligonucleotide
  Target: LAMA2; (-) strand; PAM type: NRG; PAM sequence: GAG
ctgcacagaaggaggtgtct

SEQ ID NO: 78672 - DNA, 20 bp, Artificial Sequence
  Description of Artificial Sequence: Synthetic oligonucleotide
  Target: LAMA2; (-) strand; PAM type: NRG; PAM sequence: AGG
gaaccaggctgcacagaagg

SEQ ID NO: 78673 - DNA, 20 bp, Artificial Sequence
  Description of Artificial Sequence: Synthetic oligonucleotide
  Target: LAMA2; (-) strand; PAM type: NRG; PAM sequence: GAG
ggaaccaggctgcacagaag

SEQ ID NO: 78674 - DNA, 20 bp, Artificial Sequence
  Description of Artificial Sequence: Synthetic oligonucleotide
  Target: LAMA2; (-) strand; PAM type: NRG; PAM sequence: AGG
taggaaccaggctgcacaga

SEQ ID NO: 78675 - DNA, 20 bp, Artificial Sequence
  Description of Artificial Sequence: Synthetic oligonucleotide
  Target: LAMA2; (-) strand; PAM type: NRG; PAM sequence: AAG
ttaggaaccaggctgcacag

SEQ ID NO: 78676 - DNA, 20 bp, Artificial Sequence
  Description of Artificial Sequence: Synthetic oligonucleotide
  Target: LAMA2; (-) strand; PAM type: NRG; PAM sequence: CAG
ctgttaggaaccaggctgca

SEQ ID NO: 78677 - DNA, 20 bp, Artificial Sequence
  Description of Artificial Sequence: Synthetic oligonucleotide
  Target: LAMA2; (-) strand; PAM type: NRG; PAM sequence: AGG
tctgtggcctgttaggaacc

SEQ ID NO: 78678 - DNA, 20 bp, Artificial Sequence
  Description of Artificial Sequence: Synthetic oligonucleotide
  Target: LAMA2; (-) strand; PAM type: NRG; PAM sequence: CAG
atctgtggcctgttaggaac

SEQ ID NO: 78679 - DNA, 20 bp, Artificial Sequence
  Description of Artificial Sequence: Synthetic oligonucleotide
  Target: LAMA2; (-) strand; PAM type: NRG; PAM sequence: AGG
agtactatctgtggcctgtt

SEQ ID NO: 78680 - DNA, 20 bp, Artificial Sequence
  Description of Artificial Sequence: Synthetic oligonucleotide
  Target: LAMA2; (-) strand; PAM type: NRG; PAM sequence: TAG
cagtactatctgtggcctgt

SEQ ID NO: 78681 - DNA, 20 bp, Artificial Sequence
  Description of Artificial Sequence: Synthetic oligonucleotide
  Target: LAMA2; (-) strand; PAM type: NRG; PAM sequence: TGG
ccatggaccagtactatctg

SEQ ID NO: 78682 - DNA, 20 bp, Artificial Sequence
  Description of Artificial Sequence: Synthetic oligonucleotide
  Target: LAMA2; (-) strand; PAM type: NRG; PAM sequence: CAG
ccaactgctgggccatggac

SEQ ID NO: 78683 - DNA, 20 bp, Artificial Sequence
  Description of Artificial Sequence: Synthetic oligonucleotide
  Target: LAMA2; (-) strand; PAM type: NRG; PAM sequence: TGG
ggtccccaactgctgggcca

SEQ ID NO: 78684 - DNA, 20 bp, Artificial Sequence
  Description of Artificial Sequence: Synthetic oligonucleotide
  Target: LAMA2; (-) strand; PAM type: NRG; PAM sequence: GGG
agcaggggtccccaactgct

SEQ ID NO: 78685 - DNA, 20 bp, Artificial Sequence
  Description of Artificial Sequence: Synthetic oligonucleotide
  Target: LAMA2; (-) strand; PAM type: NRG; PAM sequence: TGG
aagcaggggtccccaactgc

SEQ ID NO: 78686 - DNA, 20 bp, Artificial Sequence
  Description of Artificial Sequence: Synthetic oligonucleotide
  Target: LAMA2; (-) strand; PAM type: NRG; PAM sequence: GGG
agagttgagggctaaagcag

SEQ ID NO: 78687 - DNA, 20 bp, Artificial Sequence
  Description of Artificial Sequence: Synthetic oligonucleotide
  Target: LAMA2; (-) strand; PAM type: NRG; PAM sequence: GGG
aagagttgagggctaaagca

SEQ ID NO: 78688 - DNA, 20 bp, Artificial Sequence
  Description of Artificial Sequence: Synthetic oligonucleotide
  Target: LAMA2; (-) strand; PAM type: NRG; PAM sequence: AGG
taagagttgagggctaaagc

SEQ ID NO: 78689 - DNA, 20 bp, Artificial Sequence
  Description of Artificial Sequence: Synthetic oligonucleotide
  Target: LAMA2; (-) strand; PAM type: NRG; PAM sequence: CAG
ctaagagttgagggctaaag

SEQ ID NO: 78690 - DNA, 20 bp, Artificial Sequence
  Description of Artificial Sequence: Synthetic oligonucleotide
  Target: LAMA2; (-) strand; PAM type: NRG; PAM sequence: AAG
tgcctaagagttgagggcta

SEQ ID NO: 78691 - DNA, 20 bp, Artificial Sequence
  Description of Artificial Sequence: Synthetic oligonucleotide
  Target: LAMA2; (-) strand; PAM type: NRG; PAM sequence: GGG
gaaacatgcctaagagttga

SEQ ID NO: 78692 - DNA, 20 bp, Artificial Sequence
  Description of Artificial Sequence: Synthetic oligonucleotide
  Target: LAMA2; (-) strand; PAM type: NRG; PAM sequence: AGG
tgaaacatgcctaagagttg

SEQ ID NO: 78693 - DNA, 20 bp, Artificial Sequence
  Description of Artificial Sequence: Synthetic oligonucleotide
  Target: LAMA2; (-) strand; PAM type: NRG; PAM sequence: GAG
ctgaaacatgcctaagagtt

SEQ ID NO: 78694 - DNA, 20 bp, Artificial Sequence
  Description of Artificial Sequence: Synthetic oligonucleotide
  Target: LAMA2; (-) strand; PAM type: NRG; PAM sequence: GAG
cagaactgaaacatgcctaa

SEQ ID NO: 78695 - DNA, 20 bp, Artificial Sequence
  Description of Artificial Sequence: Synthetic oligonucleotide
  Target: LAMA2; (-) strand; PAM type: NRG; PAM sequence: AAG
atcagaactgaaacatgcct

SEQ ID NO: 78696 - DNA, 20 bp, Artificial Sequence
  Description of Artificial Sequence: Synthetic oligonucleotide
  Target: LAMA2; (-) strand; PAM type: NRG; PAM sequence: CAG
agctctatgctgaccaaaat

SEQ ID NO: 78697 - DNA, 20 bp, Artificial Sequence
  Description of Artificial Sequence: Synthetic oligonucleotide
  Target: LAMA2; (-) strand; PAM type: NRG; PAM sequence: AAG
cctcctggtaaatagaagga

SEQ ID NO: 78698 - DNA, 20 bp, Artificial Sequence
  Description of Artificial Sequence: Synthetic oligonucleotide
  Target: LAMA2; (-) strand; PAM type: NRG; PAM sequence: AGG
agaccctcctggtaaataga

SEQ ID NO: 78699 - DNA, 20 bp, Artificial Sequence
  Description of Artificial Sequence: Synthetic oligonucleotide
  Target: LAMA2; (-) strand; PAM type: NRG; PAM sequence: AAG
gagaccctcctggtaaatag

SEQ ID NO: 78700 - DNA, 20 bp, Artificial Sequence
  Description of Artificial Sequence: Synthetic oligonucleotide
  Target: LAMA2; (-) strand; PAM type: NRG; PAM sequence: TAG
gtagagaccctcctggtaaa

SEQ ID NO: 78701 - DNA, 20 bp, Artificial Sequence
  Description of Artificial Sequence: Synthetic oligonucleotide
  Target: LAMA2; (-) strand; PAM type: NRG; PAM sequence: TGG
catatcagtagagaccctcc

SEQ ID NO: 78702 - DNA, 20 bp, Artificial Sequence
  Description of Artificial Sequence: Synthetic oligonucleotide
  Target: LAMA2; (-) strand; PAM type: NRG; PAM sequence: GAG
gccattgatccatatcagta

SEQ ID NO: 78703 - DNA, 20 bp, Artificial Sequence
  Description of Artificial Sequence: Synthetic oligonucleotide
  Target: LAMA2; (-) strand; PAM type: NRG; PAM sequence: TAG
ctgccattgatccatatcag

SEQ ID NO: 78704 - DNA, 20 bp, Artificial Sequence
  Description of Artificial Sequence: Synthetic oligonucleotide
  Target: LAMA2; (-) strand; PAM type: NRG; PAM sequence: CAG
ctcctgccattgatccatat

SEQ ID NO: 78705 - DNA, 20 bp, Artificial Sequence
  Description of Artificial Sequence: Synthetic oligonucleotide
  Target: LAMA2; (-) strand; PAM type: NRG; PAM sequence: CAG
actaagccaaaggatagttc

SEQ ID NO: 78706 - DNA, 20 bp, Artificial Sequence
  Description of Artificial Sequence: Synthetic oligonucleotide
  Target: LAMA2; (-) strand; PAM type: NRG; PAM sequence: TAG
aatgtcactaagccaaagga

SEQ ID NO: 78707 - DNA, 20 bp, Artificial Sequence
  Description of Artificial Sequence: Synthetic oligonucleotide
  Target: LAMA2; (-) strand; PAM type: NRG; PAM sequence: AGG
tacaaatgtcactaagccaa

SEQ ID NO: 78708 - DNA, 20 bp, Artificial Sequence
  Description of Artificial Sequence: Synthetic oligonucleotide
  Target: LAMA2; (-) strand; PAM type: NRG; PAM sequence: AAG
gtacaaatgtcactaagcca

SEQ ID NO: 78709 - DNA, 20 bp, Artificial Sequence
  Description of Artificial Sequence: Synthetic oligonucleotide
  Target: LAMA2; (-) strand; PAM type: NRG; PAM sequence: AAG
attagagtacaaatgtcact

SEQ ID NO: 78710 - DNA, 20 bp, Artificial Sequence
  Description of Artificial Sequence: Synthetic oligonucleotide
  Target: LAMA2; (-) strand; PAM type: NRG; PAM sequence: GAG
ggcaggagtgaggcagatta

SEQ ID NO: 78711 - DNA, 20 bp, Artificial Sequence
  Description of Artificial Sequence: Synthetic oligonucleotide
  Target: LAMA2; (-) strand; PAM type: NRG; PAM sequence: TAG
ggggcaggagtgaggcagat

SEQ ID NO: 78712 - DNA, 20 bp, Artificial Sequence
  Description of Artificial Sequence: Synthetic oligonucleotide
  Target: LAMA2; (-) strand; PAM type: NRG; PAM sequence: CAG
gagaaggggcaggagtgagg

SEQ ID NO: 78713 - DNA, 20 bp, Artificial Sequence
  Description of Artificial Sequence: Synthetic oligonucleotide
  Target: LAMA2; (-) strand; PAM type: NRG; PAM sequence: AGG
cctgagaaggggcaggagtg

SEQ ID NO: 78714 - DNA, 20 bp, Artificial Sequence
  Description of Artificial Sequence: Synthetic oligonucleotide
  Target: LAMA2; (-) strand; PAM type: NRG; PAM sequence: GAG
ccctgagaaggggcaggagt

SEQ ID NO: 78715 - DNA, 20 bp, Artificial Sequence
  Description of Artificial Sequence: Synthetic oligonucleotide
  Target: LAMA2; (-) strand; PAM type: NRG; PAM sequence: GAG
ggtcccctgagaaggggcag

SEQ ID NO: 78716 - DNA, 20 bp, Artificial Sequence
  Description of Artificial Sequence: Synthetic oligonucleotide
  Target: LAMA2; (-) strand; PAM type: NRG; PAM sequence: AGG
caggtcccctgagaaggggc

SEQ ID NO: 78717 - DNA, 20 bp, Artificial Sequence
  Description of Artificial Sequence: Synthetic oligonucleotide
  Target: LAMA2; (-) strand; PAM type: NRG; PAM sequence: CAG
ccaggtcccctgagaagggg

SEQ ID NO: 78718 - DNA, 20 bp, Artificial Sequence
  Description of Artificial Sequence: Synthetic oligonucleotide
  Target: LAMA2; (-) strand; PAM type: NRG; PAM sequence: GGG
tgcccaggtcccctgagaag

SEQ ID NO: 78719 - DNA, 20 bp, Artificial Sequence
  Description of Artificial Sequence: Synthetic oligonucleotide
  Target: LAMA2; (-) strand; PAM type: NRG; PAM sequence: GGG
gtgcccaggtcccctgagaa

SEQ ID NO: 78720 - DNA, 20 bp, Artificial Sequence
  Description of Artificial Sequence: Synthetic oligonucleotide
  Target: LAMA2; (-) strand; PAM type: NRG; PAM sequence: AGG
ggtgcccaggtcccctgaga

SEQ ID NO: 78721 - DNA, 20 bp, Artificial Sequence
  Description of Artificial Sequence: Synthetic oligonucleotide
  Target: LAMA2; (-) strand; PAM type: NRG; PAM sequence: AAG
cggtgcccaggtcccctgag

SEQ ID NO: 78722 - DNA, 20 bp, Artificial Sequence
  Description of Artificial Sequence: Synthetic oligonucleotide
  Target: LAMA2; (-) strand; PAM type: NRG; PAM sequence: GAG
cgacggtgcccaggtcccct

SEQ ID NO: 78723 - DNA, 20 bp, Artificial Sequence
  Description of Artificial Sequence: Synthetic oligonucleotide
  Target: LAMA2; (-) strand; PAM type: NRG; PAM sequence: AGG
catgggatccgacggtgccc

SEQ ID NO: 78724 - DNA, 20 bp, Artificial Sequence
  Description of Artificial Sequence: Synthetic oligonucleotide
  Target: LAMA2; (-) strand; PAM type: NRG; PAM sequence: CAG
tcatgggatccgacggtgcc

SEQ ID NO: 78725 - DNA, 20 bp, Artificial Sequence
  Description of Artificial Sequence: Synthetic oligonucleotide
  Target: LAMA2; (-) strand; PAM type: NRG; PAM sequence: CGG
ggacctgtcatgggatccga

SEQ ID NO: 78726 - DNA, 20 bp, Artificial Sequence
  Description of Artificial Sequence: Synthetic oligonucleotide
  Target: LAMA2; (-) strand; PAM type: NRG; PAM sequence: GGG
caccatgtaggacctgtcat

SEQ ID NO: 78727 - DNA, 20 bp, Artificial Sequence
  Description of Artificial Sequence: Synthetic oligonucleotide
  Target: LAMA2; (-) strand; PAM type: NRG; PAM sequence: TGG
tcaccatgtaggacctgtca

SEQ ID NO: 78728 - DNA, 20 bp, Artificial Sequence
  Description of Artificial Sequence: Synthetic oligonucleotide
  Target: LAMA2; (-) strand; PAM type: NRG; PAM sequence: AGG
cgtgccctaggtcaccatgt

SEQ ID NO: 78729 - DNA, 20 bp, Artificial Sequence
  Description of Artificial Sequence: Synthetic oligonucleotide
  Target: LAMA2; (-) strand; PAM type: NRG; PAM sequence: TAG
ccgtgccctaggtcaccatg

SEQ ID NO: 78730 - DNA, 20 bp, Artificial Sequence
  Description of Artificial Sequence: Synthetic oligonucleotide
  Target: LAMA2; (-) strand; PAM type: NRG; PAM sequence: AGG
tagactttttaccgtgccct

SEQ ID NO: 78731 - DNA, 20 bp, Artificial Sequence
  Description of Artificial Sequence: Synthetic oligonucleotide
  Target: LAMA2; (-) strand; PAM type: NRG; PAM sequence: TAG
gtagactttttaccgtgccc

SEQ ID NO: 78732 - DNA, 20 bp, Artificial Sequence
  Description of Artificial Sequence: Synthetic oligonucleotide
  Target: LAMA2; (-) strand; PAM type: NRG; PAM sequence: TAG
ccattctaggcttcctgggg

SEQ ID NO: 78733 - DNA, 20 bp, Artificial Sequence
  Description of Artificial Sequence: Synthetic oligonucleotide
  Target: LAMA2; (-) strand; PAM type: NRG; PAM sequence: GGG
tatccattctaggcttcctg

SEQ ID NO: 78734 - DNA, 20 bp, Artificial Sequence
  Description of Artificial Sequence: Synthetic oligonucleotide
  Target: LAMA2; (-) strand; PAM type: NRG; PAM sequence: GGG
ctatccattctaggcttcct

SEQ ID NO: 78735 - DNA, 20 bp, Artificial Sequence
  Description of Artificial Sequence: Synthetic oligonucleotide
  Target: LAMA2; (-) strand; PAM type: NRG; PAM sequence: TGG
tctatccattctaggcttcc

SEQ ID NO: 78736 - DNA, 20 bp, Artificial Sequence
  Description of Artificial Sequence: Synthetic oligonucleotide
  Target: LAMA2; (-) strand; PAM type: NRG; PAM sequence: AGG
atttgtattctatccattct

SEQ ID NO: 78737 - DNA, 20 bp, Artificial Sequence
  Description of Artificial Sequence: Synthetic oligonucleotide
  Target: LAMA2; (-) strand; PAM type: NRG; PAM sequence: TAG
aatttgtattctatccattc

SEQ ID NO: 78738 - DNA, 20 bp, Artificial Sequence
  Description of Artificial Sequence: Synthetic oligonucleotide
  Target: LAMA2; (-) strand; PAM type: NRG; PAM sequence: TGG
ttttcttcatgaatttgtgt

SEQ ID NO: 78739 - DNA, 20 bp, Artificial Sequence
  Description of Artificial Sequence: Synthetic oligonucleotide
  Target: LAMA2; (-) strand; PAM type: NRG; PAM sequence: TGG
gtttgattttctgcagatct

SEQ ID NO: 78740 - DNA, 20 bp, Artificial Sequence
  Description of Artificial Sequence: Synthetic oligonucleotide
  Target: LAMA2; (-) strand; PAM type: NRG; PAM sequence: CAG
ctttactgtttgattttctg

SEQ ID NO: 78741 - DNA, 20 bp, Artificial Sequence
  Description of Artificial Sequence: Synthetic oligonucleotide
  Target: LAMA2; (-) strand; PAM type: NRG; PAM sequence: TAG
ctcctgttgctcttctggaa

SEQ ID NO: 78742 - DNA, 20 bp, Artificial Sequence
  Description of Artificial Sequence: Synthetic oligonucleotide
  Target: LAMA2; (-) strand; PAM type: NRG; PAM sequence: TGG
tcgtcctcctgttgctcttc

SEQ ID NO: 78743 - DNA, 20 bp, Artificial Sequence
  Description of Artificial Sequence: Synthetic oligonucleotide
  Target: LAMA2; (-) strand; PAM type: NRG; PAM sequence: CAG
aatcctgtctatgacagacc

SEQ ID NO: 78744 - DNA, 20 bp, Artificial Sequence
  Description of Artificial Sequence: Synthetic oligonucleotide
  Target: LAMA2; (-) strand; PAM type: NRG; PAM sequence: CAG
cattccaatcctgtctatga

SEQ ID NO: 78745 - DNA, 20 bp, Artificial Sequence
  Description of Artificial Sequence: Synthetic oligonucleotide
  Target: LAMA2; (-) strand; PAM type: NRG; PAM sequence: GGG
ttcattctatcatctgattt

SEQ ID NO: 78746 - DNA, 20 bp, Artificial Sequence
  Description of Artificial Sequence: Synthetic oligonucleotide
  Target: LAMA2; (-) strand; PAM type: NRG; PAM sequence: TGG
cttcattctatcatctgatt

SEQ ID NO: 78747 - DNA, 20 bp, Artificial Sequence
  Description of Artificial Sequence: Synthetic oligonucleotide
  Target: LAMA2; (-) strand; PAM type: NRG; PAM sequence: GAG
cgaaagctcaccactagtga

SEQ ID NO: 78748 - DNA, 20 bp, Artificial Sequence
  Description of Artificial Sequence: Synthetic oligonucleotide
  Target: LAMA2; (-) strand; PAM type: NRG; PAM sequence: GAG
accgaaagctcaccactagt

SEQ ID NO: 78749 - DNA, 20 bp, Artificial Sequence
  Description of Artificial Sequence: Synthetic oligonucleotide
  Target: LAMA2; (-) strand; PAM type: NRG; PAM sequence: TAG
agtgaccgaaagctcaccac

SEQ ID NO: 78750 - DNA, 20 bp, Artificial Sequence
  Description of Artificial Sequence: Synthetic oligonucleotide
  Target: LAMA2; (-) strand; PAM type: NRG; PAM sequence: AAG
tgaagacttgtagtgaccga

SEQ ID NO: 78751 - DNA, 20 bp, Artificial Sequence
  Description of Artificial Sequence: Synthetic oligonucleotide
  Target: LAMA2; (-) strand; PAM type: NRG; PAM sequence: TAG
aggccccttttgaagacttg

SEQ ID NO: 78752 - DNA, 20 bp, Artificial Sequence
  Description of Artificial Sequence: Synthetic oligonucleotide
  Target: LAMA2; (-) strand; PAM type: NRG; PAM sequence: AAG
ggtcatctaggccccttttg

SEQ ID NO: 78753 - DNA, 20 bp, Artificial Sequence
  Description of Artificial Sequence: Synthetic oligonucleotide
  Target: LAMA2; (-) strand; PAM type: NRG; PAM sequence: AGG
tgaaaaagaactggtcatct

SEQ ID NO: 78754 - DNA, 20 bp, Artificial Sequence
  Description of Artificial Sequence: Synthetic oligonucleotide
  Target: LAMA2; (-) strand; PAM type: NRG; PAM sequence: TAG
atgaaaaagaactggtcatc

SEQ ID NO: 78755 - DNA, 20 bp, Artificial Sequence
  Description of Artificial Sequence: Synthetic oligonucleotide
  Target: LAMA2; (-) strand; PAM type: NRG; PAM sequence: TGG
tttgttggatgaaaaagaac

SEQ ID NO: 78756 - DNA, 20 bp, Artificial Sequence
  Description of Artificial Sequence: Synthetic oligonucleotide
  Target: LAMA2; (-) strand; PAM type: NRG; PAM sequence: AAG
taagcatttgttggatgaaa

SEQ ID NO: 78757 - DNA, 20 bp, Artificial Sequence
  Description of Artificial Sequence: Synthetic oligonucleotide
  Target: LAMA2; (-) strand; PAM type: NRG; PAM sequence: TGG
agggttcaataagcatttgt

SEQ ID NO: 78758 - DNA, 20 bp, Artificial Sequence
  Description of Artificial Sequence: Synthetic oligonucleotide
  Target: LAMA2; (-) strand; PAM type: NRG; PAM sequence: AAG
ccacagaggaagggttcaat

SEQ ID NO: 78759 - DNA, 20 bp, Artificial Sequence
  Description of Artificial Sequence: Synthetic oligonucleotide
  Target: LAMA2; (-) strand; PAM type: NRG; PAM sequence: GGG
catcactacccacagaggaa

SEQ ID NO: 78760 - DNA, 20 bp, Artificial Sequence
  Description of Artificial Sequence: Synthetic oligonucleotide
  Target: LAMA2; (-) strand; PAM type: NRG; PAM sequence: AGG
ccatcactacccacagagga

SEQ ID NO: 78761 - DNA, 20 bp, Artificial Sequence
  Description of Artificial Sequence: Synthetic oligonucleotide
  Target: LAMA2; (-) strand; PAM type: NRG; PAM sequence: AAG
cccatcactacccacagagg

SEQ ID NO: 78762 - DNA, 20 bp, Artificial Sequence
  Description of Artificial Sequence: Synthetic oligonucleotide
  Target: LAMA2; (-) strand; PAM type: NRG; PAM sequence: AGG
gtgcccatcactacccacag

SEQ ID NO: 78763 - DNA, 20 bp, Artificial Sequence
  Description of Artificial Sequence: Synthetic oligonucleotide
  Target: LAMA2; (-) strand; PAM type: NRG; PAM sequence: GAG
tgtgcccatcactacccaca

SEQ ID NO: 78764 - DNA, 20 bp, Artificial Sequence
  Description of Artificial Sequence: Synthetic oligonucleotide
  Target: LAMA2; (-) strand; PAM type: NRG; PAM sequence: CAG
aatgtgcccatcactaccca

SEQ ID NO: 78765 - DNA, 20 bp, Artificial Sequence
  Description of Artificial Sequence: Synthetic oligonucleotide
  Target: LAMA2; (-) strand; PAM type: NRG; PAM sequence: CAG
ggttacaatgtgttcgattc

SEQ ID NO: 78766 - DNA, 20 bp, Artificial Sequence
  Description of Artificial Sequence: Synthetic oligonucleotide
  Target: LAMA2; (-) strand; PAM type: NRG; PAM sequence: TGG
tataagattaactcatttaa

SEQ ID NO: 78767 - DNA, 20 bp, Artificial Sequence
  Description of Artificial Sequence: Synthetic oligonucleotide
  Target: LAMA2; (-) strand; PAM type: NRG; PAM sequence: AAG
ctgtatgtatgaactcatat

SEQ ID NO: 78768 - DNA, 20 bp, Artificial Sequence
  Description of Artificial Sequence: Synthetic oligonucleotide
  Target: LAMA2; (-) strand; PAM type: NRG; PAM sequence: GAG
cttgcaaacttactggatat

SEQ ID NO: 78769 - DNA, 20 bp, Artificial Sequence
  Description of Artificial Sequence: Synthetic oligonucleotide
  Target: LAMA2; (-) strand; PAM type: NRG; PAM sequence: TGG
agttattcttgcaaacttac

SEQ ID NO: 78770 - DNA, 20 bp, Artificial Sequence
  Description of Artificial Sequence: Synthetic oligonucleotide
  Target: LAMA2; (-) strand; PAM type: NRG; PAM sequence: TAG
cttgtacacaaaaacaatag

SEQ ID NO: 78771 - DNA, 20 bp, Artificial Sequence
  Description of Artificial Sequence: Synthetic oligonucleotide
  Target: LAMA2; (-) strand; PAM type: NRG; PAM sequence: TAG
gatcttgtacacaaaaacaa

SEQ ID NO: 78772 - DNA, 20 bp, Artificial Sequence
  Description of Artificial Sequence: Synthetic oligonucleotide
  Target: LAMA2; (-) strand; PAM type: NRG; PAM sequence: AAG
tttcagaaattacaatacac

SEQ ID NO: 78773 - DNA, 20 bp, Artificial Sequence
  Description of Artificial Sequence: Synthetic oligonucleotide
  Target: LAMA2; (-) strand; PAM type: NRG; PAM sequence: CAG
ttccaacctcattgctattt

SEQ ID NO: 78774 - DNA, 20 bp, Artificial Sequence
  Description of Artificial Sequence: Synthetic oligonucleotide
  Target: LAMA2; (-) strand; PAM type: NRG; PAM sequence: TAG
tcataagaggataaaatcat

SEQ ID NO: 78775 - DNA, 20 bp, Artificial Sequence
  Description of Artificial Sequence: Synthetic oligonucleotide
  Target: LAMA2; (-) strand; PAM type: NRG; PAM sequence: AGG
ccaaccagagatatcataag

SEQ ID NO: 78776 - DNA, 20 bp, Artificial Sequence
  Description of Artificial Sequence: Synthetic oligonucleotide
  Target: LAMA2; (-) strand; PAM type: NRG; PAM sequence: GAG
cccaaccagagatatcataa

SEQ ID NO: 78777 - DNA, 20 bp, Artificial Sequence
  Description of Artificial Sequence: Synthetic oligonucleotide
  Target: LAMA2; (-) strand; PAM type: NRG; PAM sequence: AAG
gccccaaccagagatatcat

SEQ ID NO: 78778 - DNA, 20 bp, Artificial Sequence
  Description of Artificial Sequence: Synthetic oligonucleotide
  Target: LAMA2; (-) strand; PAM type: NRG; PAM sequence: GAG
ttttgggtgtgccccaacca

SEQ ID NO: 78779 - DNA, 20 bp, Artificial Sequence
  Description of Artificial Sequence: Synthetic oligonucleotide
  Target: LAMA2; (-) strand; PAM type: NRG; PAM sequence: CAG
tgttttgggtgtgccccaac

SEQ ID NO: 78780 - DNA, 20 bp, Artificial Sequence
  Description of Artificial Sequence: Synthetic oligonucleotide
  Target: LAMA2; (-) strand; PAM type: NRG; PAM sequence: GGG
attgctccaaattttgtttt

SEQ ID NO: 78781 - DNA, 20 bp, Artificial Sequence
  Description of Artificial Sequence: Synthetic oligonucleotide
  Target: LAMA2; (-) strand; PAM type: NRG; PAM sequence: TGG
cattgctccaaattttgttt

SEQ ID NO: 78782 - DNA, 20 bp, Artificial Sequence
  Description of Artificial Sequence: Synthetic oligonucleotide
  Target: LAMA2; (-) strand; PAM type: NRG; PAM sequence: AAG
tagagaaaaacaccagaagg

SEQ ID NO: 78783 - DNA, 20 bp, Artificial Sequence
  Description of Artificial Sequence: Synthetic oligonucleotide
  Target: LAMA2; (-) strand; PAM type: NRG; PAM sequence: AGG
cattagagaaaaacaccaga

SEQ ID NO: 78784 - DNA, 20 bp, Artificial Sequence
  Description of Artificial Sequence: Synthetic oligonucleotide
  Target: LAMA2; (-) strand; PAM type: NRG; PAM sequence: AAG
tcattagagaaaaacaccag

SEQ ID NO: 78785 - DNA, 20 bp, Artificial Sequence
  Description of Artificial Sequence: Synthetic oligonucleotide
  Target: LAMA2; (-) strand; PAM type: NRG; PAM sequence: CAG
aagtcattagagaaaaacac

SEQ ID NO: 78786 - DNA, 20 bp, Artificial Sequence
  Description of Artificial Sequence: Synthetic oligonucleotide
  Target: LAMA2; (-) strand; PAM type: NRG; PAM sequence: GAG
agcttcagagcaagtcatta

SEQ ID NO: 78787 - DNA, 20 bp, Artificial Sequence
  Description of Artificial Sequence: Synthetic oligonucleotide
  Target: LAMA2; (-) strand; PAM type: NRG; PAM sequence: TAG
gtagcttcagagcaagtcat

SEQ ID NO: 78788 - DNA, 20 bp, Artificial Sequence
  Description of Artificial Sequence: Synthetic oligonucleotide
  Target: LAMA2; (-) strand; PAM type: NRG; PAM sequence: AAG
aagaggagtagcttcagagc

SEQ ID NO: 78789 - DNA, 20 bp, Artificial Sequence
  Description of Artificial Sequence: Synthetic oligonucleotide
  Target: LAMA2; (-) strand; PAM type: NRG; PAM sequence: GAG
atctaagaggagtagcttca

SEQ ID NO: 78790 - DNA, 20 bp, Artificial Sequence
  Description of Artificial Sequence: Synthetic oligonucleotide
  Target: LAMA2; (-) strand; PAM type: NRG; PAM sequence: CAG
gaatctaagaggagtagctt

SEQ ID NO: 78791 - DNA, 20 bp, Artificial Sequence
  Description of Artificial Sequence: Synthetic oligonucleotide
  Target: LAMA2; (-) strand; PAM type: NRG; PAM sequence: TAG
aggaaagaatctaagaggag

SEQ ID NO: 78792 - DNA, 20 bp, Artificial Sequence
  Description of Artificial Sequence: Synthetic oligonucleotide
  Target: LAMA2; (-) strand; PAM type: NRG; PAM sequence: GAG
gctaggaaagaatctaagag

SEQ ID NO: 78793 - DNA, 20 bp, Artificial Sequence
  Description of Artificial Sequence: Synthetic oligonucleotide
  Target: LAMA2; (-) strand; PAM type: NRG; PAM sequence: AGG
cagctaggaaagaatctaag

SEQ ID NO: 78794 - DNA, 20 bp, Artificial Sequence
  Description of Artificial Sequence: Synthetic oligonucleotide
  Target: LAMA2; (-) strand; PAM type: NRG; PAM sequence: GAG
acagctaggaaagaatctaa

SEQ ID NO: 78795 - DNA, 20 bp, Artificial Sequence
  Description of Artificial Sequence: Synthetic oligonucleotide
  Target: LAMA2; (-) strand; PAM type: NRG; PAM sequence: AAG
acacagctaggaaagaatct

SEQ ID NO: 78796 - DNA, 20 bp, Artificial Sequence
  Description of Artificial Sequence: Synthetic oligonucleotide
  Target: LAMA2; (-) strand; PAM type: NRG; PAM sequence: AAG
ataggaatacacagctagga

SEQ ID NO: 78797 - DNA, 20 bp, Artificial Sequence
  Description of Artificial Sequence: Synthetic oligonucleotide
  Target: LAMA2; (-) strand; PAM type: NRG; PAM sequence: AGG
ctatataggaatacacagct

SEQ ID NO: 78798 - DNA, 20 bp, Artificial Sequence
  Description of Artificial Sequence: Synthetic oligonucleotide
  Target: LAMA2; (-) strand; PAM type: NRG; PAM sequence: TAG
actatataggaatacacagc

SEQ ID NO: 78799 - DNA, 20 bp, Artificial Sequence
  Description of Artificial Sequence: Synthetic oligonucleotide
  Target: LAMA2; (-) strand; PAM type: NRG; PAM sequence: CAG
taagactatataggaataca

SEQ ID NO: 78800 - DNA, 20 bp, Artificial Sequence
  Description of Artificial Sequence: Synthetic oligonucleotide
  Target: LAMA2; (-) strand; PAM type: NRG; PAM sequence: AGG
ctgttaagctaagactatat

SEQ ID NO: 78801 - DNA, 20 bp, Artificial Sequence
  Description of Artificial Sequence: Synthetic oligonucleotide
  Target: LAMA2; (-) strand; PAM type: NRG; PAM sequence: TAG
gctgttaagctaagactata

SEQ ID NO: 78802 - DNA, 20 bp, Artificial Sequence
  Description of Artificial Sequence: Synthetic oligonucleotide
  Target: LAMA2; (-) strand; PAM type: NRG; PAM sequence: AAG
aatctttgtgctgttaagct

SEQ ID NO: 78803 - DNA, 20 bp, Artificial Sequence
  Description of Artificial Sequence: Synthetic oligonucleotide
  Target: LAMA2; (-) strand; PAM type: NRG; PAM sequence: AAG
tgttaaatctttgtgctgtt

SEQ ID NO: 78804 - DNA, 20 bp, Artificial Sequence
  Description of Artificial Sequence: Synthetic oligonucleotide
  Target: LAMA2; (-) strand; PAM type: NRG; PAM sequence: CAG
catttacattttatcaaatg

SEQ ID NO: 78805 - DNA, 20 bp, Artificial Sequence
  Description of Artificial Sequence: Synthetic oligonucleotide
  Target: LAMA2; (-) strand; PAM type: NRG; PAM sequence: GAG
agcttctcaatctcttttgg

SEQ ID NO: 78806 - DNA, 20 bp, Artificial Sequence
  Description of Artificial Sequence: Synthetic oligonucleotide
  Target: LAMA2; (-) strand; PAM type: NRG; PAM sequence: GGG
agagcttctcaatctctttt

SEQ ID NO: 78807 - DNA, 20 bp, Artificial Sequence
  Description of Artificial Sequence: Synthetic oligonucleotide
  Target: LAMA2; (-) strand; PAM type: NRG; PAM sequence: TGG
tagagcttctcaatctcttt

SEQ ID NO: 78808 - DNA, 20 bp, Artificial Sequence
  Description of Artificial Sequence: Synthetic oligonucleotide
  Target: LAMA2; (-) strand; PAM type: NRG; PAM sequence: GAG
aaagaagagttgtcaaaata

SEQ ID NO: 78809 - DNA, 20 bp, Artificial Sequence
  Description of Artificial Sequence: Synthetic oligonucleotide
  Target: LAMA2; (-) strand; PAM type: NRG; PAM sequence: TAG
taaaagaagagttgtcaaaa

SEQ ID NO: 78810 - DNA, 20 bp, Artificial Sequence
  Description of Artificial Sequence: Synthetic oligonucleotide
  Target: LAMA2; (-) strand; PAM type: NRG; PAM sequence: GAG
taattacacagataaaagaa

SEQ ID NO: 78811 - DNA, 20 bp, Artificial Sequence
  Description of Artificial Sequence: Synthetic oligonucleotide
  Target: LAMA2; (-) strand; PAM type: NRG; PAM sequence: AAG
aataattacacagataaaag

SEQ ID NO: 78812 - DNA, 20 bp, Artificial Sequence
  Description of Artificial Sequence: Synthetic oligonucleotide
  Target: LAMA2; (-) strand; PAM type: NRG; PAM sequence: AAG
tataataattacacagataa

SEQ ID NO: 78813 - DNA, 20 bp, Artificial Sequence
  Description of Artificial Sequence: Synthetic oligonucleotide
  Target: LAMA2; (-) strand; PAM type: NRG; PAM sequence: CAG
taaagtatataataattaca

SEQ ID NO: 78814 - DNA, 20 bp, Artificial Sequence
  Description of Artificial Sequence: Synthetic oligonucleotide
  Target: LAMA2; (-) strand; PAM type: NRG; PAM sequence: AAG
tgtttttctttcttcagtta

SEQ ID NO: 78815 - DNA, 20 bp, Artificial Sequence
  Description of Artificial Sequence: Synthetic oligonucleotide
  Target: LAMA2; (-) strand; PAM type: NRG; PAM sequence: CAG
tctttgtgtttttctttctt

SEQ ID NO: 78816 - DNA, 20 bp, Artificial Sequence
  Description of Artificial Sequence: Synthetic oligonucleotide
  Target: LAMA2; (-) strand; PAM type: NRG; PAM sequence: AAG
taatttttaaaaagtactcg

SEQ ID NO: 78817 - DNA, 20 bp, Artificial Sequence
  Description of Artificial Sequence: Synthetic oligonucleotide
  Target: LAMA2; (-) strand; PAM type: NRG; PAM sequence: AAG
gctttcaaataatttttaaa

SEQ ID NO: 78818 - DNA, 20 bp, Artificial Sequence
  Description of Artificial Sequence: Synthetic oligonucleotide
  Target: LAMA2; (-) strand; PAM type: NRG; PAM sequence: GAG
gaaaggaatttgacatacag

SEQ ID NO: 78819 - DNA, 20 bp, Artificial Sequence
  Description of Artificial Sequence: Synthetic oligonucleotide
  Target: LAMA2; (-) strand; PAM type: NRG; PAM sequence: AGG
ctgaaaggaatttgacatac

SEQ ID NO: 78820 - DNA, 20 bp, Artificial Sequence
  Description of Artificial Sequence: Synthetic oligonucleotide
  Target: LAMA2; (-) strand; PAM type: NRG; PAM sequence: CAG
tctgaaaggaatttgacata

SEQ ID NO: 78821 - DNA, 20 bp, Artificial Sequence
  Description of Artificial Sequence: Synthetic oligonucleotide
  Target: LAMA2; (-) strand; PAM type: NRG; PAM sequence: AGG
cacttttttttttctctgaa

SEQ ID NO: 78822 - DNA, 20 bp, Artificial Sequence
  Description of Artificial Sequence: Synthetic oligonucleotide
  Target: LAMA2; (-) strand; PAM type: NRG; PAM sequence: AAG
tcacttttttttttctctga

SEQ ID NO: 78823 - DNA, 20 bp, Artificial Sequence
  Description of Artificial Sequence: Synthetic oligonucleotide
  Target: LAMA2; (-) strand; PAM type: NRG; PAM sequence: AAG
caaaaggaacagtgattact

SEQ ID NO: 78824 - DNA, 20 bp, Artificial Sequence
  Description of Artificial Sequence: Synthetic oligonucleotide
  Target: LAMA2; (-) strand; PAM type: NRG; PAM sequence: CAG
ggcatgacgtacaaaaggaa

SEQ ID NO: 78825 - DNA, 20 bp, Artificial Sequence
  Description of Artificial Sequence: Synthetic oligonucleotide
  Target: LAMA2; (-) strand; PAM type: NRG; PAM sequence: AGG
cattgggcatgacgtacaaa

SEQ ID NO: 78826 - DNA, 20 bp, Artificial Sequence
  Description of Artificial Sequence: Synthetic oligonucleotide
  Target: LAMA2; (-) strand; PAM type: NRG; PAM sequence: AAG
ccattgggcatgacgtacaa

SEQ ID NO: 78827 - DNA, 20 bp, Artificial Sequence
  Description of Artificial Sequence: Synthetic oligonucleotide
  Target: LAMA2; (-) strand; PAM type: NRG; PAM sequence: GGG
atcctggtatcgttcccatt

SEQ ID NO: 78828 - DNA, 20 bp, Artificial Sequence
  Description of Artificial Sequence: Synthetic oligonucleotide
  Target: LAMA2; (-) strand; PAM type: NRG; PAM sequence: TGG
gatcctggtatcgttcccat

SEQ ID NO: 78829 - DNA, 20 bp, Artificial Sequence
  Description of Artificial Sequence: Synthetic oligonucleotide
  Target: LAMA2; (-) strand; PAM type: NRG; PAM sequence: TGG
cagaattgagtgaaagatcc

SEQ ID NO: 78830 - DNA, 20 bp, Artificial Sequence
  Description of Artificial Sequence: Synthetic oligonucleotide
  Target: LAMA2; (-) strand; PAM type: NRG; PAM sequence: AAG
taatccacagaattgagtga

SEQ ID NO: 78831 - DNA, 20 bp, Artificial Sequence
  Description of Artificial Sequence: Synthetic oligonucleotide
  Target: LAMA2; (-) strand; PAM type: NRG; PAM sequence: GAG
gacctgtaatccacagaatt

SEQ ID NO: 78832 - DNA, 20 bp, Artificial Sequence
  Description of Artificial Sequence: Synthetic oligonucleotide
  Target: LAMA2; (-) strand; PAM type: NRG; PAM sequence: CAG
ggtgggtgacctgtaatcca

SEQ ID NO: 78833 - DNA, 20 bp, Artificial Sequence
  Description of Artificial Sequence: Synthetic oligonucleotide
  Target: LAMA2; (-) strand; PAM type: NRG; PAM sequence: GGG
catctgaaacatgcccaggt

SEQ ID NO: 78834 - DNA, 20 bp, Artificial Sequence
  Description of Artificial Sequence: Synthetic oligonucleotide
  Target: LAMA2; (-) strand; PAM type: NRG; PAM sequence: TGG
tcatctgaaacatgcccagg

SEQ ID NO: 78835 - DNA, 20 bp, Artificial Sequence
  Description of Artificial Sequence: Synthetic oligonucleotide
  Target: LAMA2; (-) strand; PAM type: NRG; PAM sequence: AGG
gtttcatctgaaacatgccc

SEQ ID NO: 78836 - DNA, 20 bp, Artificial Sequence
  Description of Artificial Sequence: Synthetic oligonucleotide
  Target: LAMA2; (-) strand; PAM type: NRG; PAM sequence: CAG
agtttcatctgaaacatgcc

SEQ ID NO: 78837 - DNA, 20 bp, Artificial Sequence
  Description of Artificial Sequence: Synthetic oligonucleotide
  Target: LAMA2; (-) strand; PAM type: NRG; PAM sequence: TAG
tactcaagatgagcttaggt

SEQ ID NO: 78838 - DNA, 20 bp, Artificial Sequence
  Description of Artificial Sequence: Synthetic oligonucleotide
  Target: LAMA2; (-) strand; PAM type: NRG; PAM sequence: AGG
cccttactcaagatgagctt

SEQ ID NO: 78839 - DNA, 20 bp, Artificial Sequence
  Description of Artificial Sequence: Synthetic oligonucleotide
  Target: LAMA2; (-) strand; PAM type: NRG; PAM sequence: TAG
ccccttactcaagatgagct

SEQ ID NO: 78840 - DNA, 20 bp, Artificial Sequence
  Description of Artificial Sequence: Synthetic oligonucleotide
  Target: LAMA2; (-) strand; PAM type: NRG; PAM sequence: GAG
ctaagccccttactcaagat

SEQ ID NO: 78841 - DNA, 20 bp, Artificial Sequence
  Description of Artificial Sequence: Synthetic oligonucleotide
  Target: LAMA2; (-) strand; PAM type: NRG; PAM sequence: AAG
tacttctaagccccttactc

SEQ ID NO: 78842 - DNA, 20 bp, Artificial Sequence
  Description of Artificial Sequence: Synthetic oligonucleotide
  Target: LAMA2; (-) strand; PAM type: NRG; PAM sequence: AAG
ccaacaaagcatttacttct

SEQ ID NO: 78843 - DNA, 20 bp, Artificial Sequence
  Description of Artificial Sequence: Synthetic oligonucleotide
  Target: LAMA2; (-) strand; PAM type: NRG; PAM sequence: AAG
acaactcaaagcaaccaaca

SEQ ID NO: 78844 - DNA, 20 bp, Artificial Sequence
  Description of Artificial Sequence: Synthetic oligonucleotide
  Target: LAMA2; (-) strand; PAM type: NRG; PAM sequence: AAG
gtcctgctttgtacaactca

SEQ ID NO: 78845 - DNA, 20 bp, Artificial Sequence
  Description of Artificial Sequence: Synthetic oligonucleotide
  Target: LAMA2; (-) strand; PAM type: NRG; PAM sequence: TGG
ttttcttagaaagcctctgg

SEQ ID NO: 78846 - DNA, 20 bp, Artificial Sequence
  Description of Artificial Sequence: Synthetic oligonucleotide
  Target: LAMA2; (-) strand; PAM type: NRG; PAM sequence: TGG
tctttttcttagaaagcctc

SEQ ID NO: 78847 - DNA, 20 bp, Artificial Sequence
  Description of Artificial Sequence: Synthetic oligonucleotide
  Target: LAMA2; (-) strand; PAM type: NRG; PAM sequence: AAG
ctatgattctttttcttaga

SEQ ID NO: 78848 - DNA, 20 bp, Artificial Sequence
  Description of Artificial Sequence: Synthetic oligonucleotide
  Target: LAMA2; (-) strand; PAM type: NRG; PAM sequence: TAG
gtctctatgattctttttct

SEQ ID NO: 78849 - DNA, 20 bp, Artificial Sequence
  Description of Artificial Sequence: Synthetic oligonucleotide
  Target: LAMA2; (-) strand; PAM type: NRG; PAM sequence: AAG
taggagttccaattttatca

SEQ ID NO: 78850 - DNA, 20 bp, Artificial Sequence
  Description of Artificial Sequence: Synthetic oligonucleotide
  Target: LAMA2; (-) strand; PAM type: NRG; PAM sequence: GAG
caaagccttagctgctttag

SEQ ID NO: 78851 - DNA, 20 bp, Artificial Sequence
  Description of Artificial Sequence: Synthetic oligonucleotide
  Target: LAMA2; (-) strand; PAM type: NRG; PAM sequence: AGG
agcaaagccttagctgcttt

SEQ ID NO: 78852 - DNA, 20 bp, Artificial Sequence
  Description of Artificial Sequence: Synthetic oligonucleotide
  Target: LAMA2; (-) strand; PAM type: NRG; PAM sequence: TAG
aagcaaagccttagctgctt

SEQ ID NO: 78853 - DNA, 20 bp, Artificial Sequence
  Description of Artificial Sequence: Synthetic oligonucleotide
  Target: LAMA2; (-) strand; PAM type: NRG; PAM sequence: TAG
caaaaatagaagcaaagcct

SEQ ID NO: 78854 - DNA, 20 bp, Artificial Sequence
  Description of Artificial Sequence: Synthetic oligonucleotide
  Target: LAMA2; (-) strand; PAM type: NRG; PAM sequence: AAG
aatgatcaaaaatagaagca

SEQ ID NO: 78855 - DNA, 20 bp, Artificial Sequence
  Description of Artificial Sequence: Synthetic oligonucleotide
  Target: LAMA2; (-) strand; PAM type: NRG; PAM sequence: AAG
ttaaaaatgatcaaaaatag

SEQ ID NO: 78856 - DNA, 20 bp, Artificial Sequence
  Description of Artificial Sequence: Synthetic oligonucleotide
  Target: LAMA2; (-) strand; PAM type: NRG; PAM sequence: TAG
tttttaaaaatgatcaaaaa

SEQ ID NO: 78857 - DNA, 20 bp, Artificial Sequence
  Description of Artificial Sequence: Synthetic oligonucleotide
  Target: LAMA2; (-) strand; PAM type: NRG; PAM sequence: AAG
atggaactaccaaacaccag

SEQ ID NO: 78858 - DNA, 20 bp, Artificial Sequence
  Description of Artificial Sequence: Synthetic oligonucleotide
  Target: LAMA2; (-) strand; PAM type: NRG; PAM sequence: CAG
actatggaactaccaaacac

SEQ ID NO: 78859 - DNA, 20 bp, Artificial Sequence
  Description of Artificial Sequence: Synthetic oligonucleotide
  Target: LAMA2; (-) strand; PAM type: NRG; PAM sequence: TGG
gcagtgctttctaactacta

SEQ ID NO: 78860 - DNA, 20 bp, Artificial Sequence
  Description of Artificial Sequence: Synthetic oligonucleotide
  Target: LAMA2; (-) strand; PAM type: NRG; PAM sequence: CAG
caatagcagatttcatgtgg

SEQ ID NO: 78861 - DNA, 20 bp, Artificial Sequence
  Description of Artificial Sequence: Synthetic oligonucleotide
  Target: LAMA2; (-) strand; PAM type: NRG; PAM sequence: TGG
taccaatagcagatttcatg

SEQ ID NO: 78862 - DNA, 20 bp, Artificial Sequence
  Description of Artificial Sequence: Synthetic oligonucleotide
  Target: LAMA2; (-) strand; PAM type: NRG; PAM sequence: CAG
ttttctttttctaccaatag

SEQ ID NO: 78863 - DNA, 20 bp, Artificial Sequence
  Description of Artificial Sequence: Synthetic oligonucleotide
  Target: LAMA2; (-) strand; PAM type: NRG; PAM sequence: TAG
acattttctttttctaccaa

SEQ ID NO: 78864 - DNA, 20 bp, Artificial Sequence
  Description of Artificial Sequence: Synthetic oligonucleotide
  Target: LAMA2; (-) strand; PAM type: NRG; PAM sequence: TGG
ctctcatgttgtatcagagt

SEQ ID NO: 78865 - DNA, 20 bp, Artificial Sequence
  Description of Artificial Sequence: Synthetic oligonucleotide
  Target: LAMA2; (-) strand; PAM type: NRG; PAM sequence: GAG
ctctctctcatgttgtatca

SEQ ID NO: 78866 - DNA, 20 bp, Artificial Sequence
  Description of Artificial Sequence: Synthetic oligonucleotide
  Target: LAMA2; (-) strand; PAM type: NRG; PAM sequence: CAG
gtctctctctcatgttgtat

SEQ ID NO: 78867 - DNA, 20 bp, Artificial Sequence
  Description of Artificial Sequence: Synthetic oligonucleotide
  Target: LAMA2; (-) strand; PAM type: NRG; PAM sequence: AAG
ttttttcctgctggtcaaag

SEQ ID NO: 78868 - DNA, 20 bp, Artificial Sequence
  Description of Artificial Sequence: Synthetic oligonucleotide
  Target: LAMA2; (-) strand; PAM type: NRG; PAM sequence: AAG
tttttttttcctgctggtca

SEQ ID NO: 78869 - DNA, 20 bp, Artificial Sequence
  Description of Artificial Sequence: Synthetic oligonucleotide
  Target: LAMA2; (-) strand; PAM type: NRG; PAM sequence: TGG
agcttttttttttttcctgc

SEQ ID NO: 78870 - DNA, 20 bp, Artificial Sequence
  Description of Artificial Sequence: Synthetic oligonucleotide
  Target: LAMA2; (-) strand; PAM type: NRG; PAM sequence: CAG
aactagttaaaaggtttgtg

SEQ ID NO: 78871 - DNA, 20 bp, Artificial Sequence
  Description of Artificial Sequence: Synthetic oligonucleotide
  Target: LAMA2; (-) strand; PAM type: NRG; PAM sequence: AGG
tgctagtgaaactagttaaa

SEQ ID NO: 78872 - DNA, 20 bp, Artificial Sequence
  Description of Artificial Sequence: Synthetic oligonucleotide
  Target: LAMA2; (-) strand; PAM type: NRG; PAM sequence: AAG
ctgctagtgaaactagttaa

SEQ ID NO: 78873 - DNA, 20 bp, Artificial Sequence
  Description of Artificial Sequence: Synthetic oligonucleotide
  Target: LAMA2; (-) strand; PAM type: NRG; PAM sequence: TAG
ttcttttctgctagtgaaac

SEQ ID NO: 78874 - DNA, 20 bp, Artificial Sequence
  Description of Artificial Sequence: Synthetic oligonucleotide
  Target: LAMA2; (-) strand; PAM type: NRG; PAM sequence: TAG
tttttatttttcttttctgc

SEQ ID NO: 78875 - DNA, 20 bp, Artificial Sequence
  Description of Artificial Sequence: Synthetic oligonucleotide
  Target: LAMA2; (-) strand; PAM type: NRG; PAM sequence: AAG
aagaaaatcagttttcttta

SEQ ID NO: 78876 - DNA, 20 bp, Artificial Sequence
  Description of Artificial Sequence: Synthetic oligonucleotide
  Target: LAMA2; (-) strand; PAM type: NRG; PAM sequence: CAG
tttcagcataataagaaaat

SEQ ID NO: 78877 - DNA, 20 bp, Artificial Sequence
  Description of Artificial Sequence: Synthetic oligonucleotide
  Target: LAMA2; (-) strand; PAM type: NRG; PAM sequence: AAG
ttaataaatttcagcataat

SEQ ID NO: 78878 - DNA, 20 bp, Artificial Sequence
  Description of Artificial Sequence: Synthetic oligonucleotide
  Target: LAMA2; (-) strand; PAM type: NRG; PAM sequence: CAG
caacagtctttaataaattt

SEQ ID NO: 78879 - DNA, 20 bp, Artificial Sequence
  Description of Artificial Sequence: Synthetic oligonucleotide
  Target: LAMA2; (-) strand; PAM type: NRG; PAM sequence: CAG
atattcttcagtcaacacaa

SEQ ID NO: 78880 - DNA, 20 bp, Artificial Sequence
  Description of Artificial Sequence: Synthetic oligonucleotide
  Target: LAMA2; (-) strand; PAM type: NRG; PAM sequence: CAG
aaatatttaaacatattctt

SEQ ID NO: 78881 - DNA, 20 bp, Artificial Sequence
  Description of Artificial Sequence: Synthetic oligonucleotide
  Target: LAMA2; (-) strand; PAM type: NRG; PAM sequence: AAG
cacttgtcattcctgaatga

SEQ ID NO: 78882 - DNA, 20 bp, Artificial Sequence
  Description of Artificial Sequence: Synthetic oligonucleotide
  Target: LAMA2; (-) strand; PAM type: NRG; PAM sequence: CAG
ctttaatttctttagaatta

SEQ ID NO: 78883 - DNA, 20 bp, Artificial Sequence
  Description of Artificial Sequence: Synthetic oligonucleotide
  Target: LAMA2; (-) strand; PAM type: NRG; PAM sequence: TAG
cttcttttctttaatttctt

SEQ ID NO: 78884 - DNA, 20 bp, Artificial Sequence
  Description of Artificial Sequence: Synthetic oligonucleotide
  Target: LAMA2; (-) strand; PAM type: NRG; PAM sequence: AAG
aagtgcctgaaaattttaaa

SEQ ID NO: 78885 - DNA, 20 bp, Artificial Sequence
  Description of Artificial Sequence: Synthetic oligonucleotide
  Target: LAMA2; (-) strand; PAM type: NRG; PAM sequence: AAG
taaaaggaacactgaccact

SEQ ID NO: 78886 - DNA, 20 bp, Artificial Sequence
  Description of Artificial Sequence: Synthetic oligonucleotide
  Target: LAMA2; (-) strand; PAM type: NRG; PAM sequence: AGG
cactggtcataacgcataaa

SEQ ID NO: 78887 - DNA, 20 bp, Artificial Sequence
  Description of Artificial Sequence: Synthetic oligonucleotide
  Target: LAMA2; (-) strand; PAM type: NRG; PAM sequence: AAG
ccactggtcataacgcataa

SEQ ID NO: 78888 - DNA, 20 bp, Artificial Sequence
  Description of Artificial Sequence: Synthetic oligonucleotide
  Target: LAMA2; (-) strand; PAM type: NRG; PAM sequence: TGG
gatcctggtatccttcccac

SEQ ID NO: 78889 - DNA, 20 bp, Artificial Sequence
  Description of Artificial Sequence: Synthetic oligonucleotide
  Target: LAMA2; (-) strand; PAM type: NRG; PAM sequence: TGG
aataactgaatggaagatcc

SEQ ID NO: 78890 - DNA, 20 bp, Artificial Sequence
  Description of Artificial Sequence: Synthetic oligonucleotide
  Target: LAMA2; (-) strand; PAM type: NRG; PAM sequence: AAG
aacccataataactgaatgg

SEQ ID NO: 78891 - DNA, 20 bp, Artificial Sequence
  Description of Artificial Sequence: Synthetic oligonucleotide
  Target: LAMA2; (-) strand; PAM type: NRG; PAM sequence: TGG
tgtaacccataataactgaa

SEQ ID NO: 78892 - DNA, 20 bp, Artificial Sequence
  Description of Artificial Sequence: Synthetic oligonucleotide
  Target: LAMA2; (-) strand; PAM type: NRG; PAM sequence: GGG
tgtgaccacaggtcacggat

SEQ ID NO: 78893 - DNA, 20 bp, Artificial Sequence
  Description of Artificial Sequence: Synthetic oligonucleotide
  Target: LAMA2; (-) strand; PAM type: NRG; PAM sequence: TGG
ctgtgaccacaggtcacgga

SEQ ID NO: 78894 - DNA, 20 bp, Artificial Sequence
  Description of Artificial Sequence: Synthetic oligonucleotide
  Target: LAMA2; (-) strand; PAM type: NRG; PAM sequence: CGG
aacactgtgaccacaggtca

SEQ ID NO: 78895 - DNA, 20 bp, Artificial Sequence
  Description of Artificial Sequence: Synthetic oligonucleotide
  Target: LAMA2; (-) strand; PAM type: NRG; PAM sequence: AGG
atacctaacactgtgaccac

SEQ ID NO: 78896 - DNA, 20 bp, Artificial Sequence
  Description of Artificial Sequence: Synthetic oligonucleotide
  Target: LAMA2; (-) strand; PAM type: NRG; PAM sequence: CAG
gatacctaacactgtgacca

SEQ ID NO: 78897 - DNA, 20 bp, Artificial Sequence
  Description of Artificial Sequence: Synthetic oligonucleotide
  Target: LAMA2; (-) strand; PAM type: NRG; PAM sequence: AGG
tctttccttcttagataaga

SEQ ID NO: 78898 - DNA, 20 bp, Artificial Sequence
  Description of Artificial Sequence: Synthetic oligonucleotide
  Target: LAMA2; (-) strand; PAM type: NRG; PAM sequence: AAG
gtctttccttcttagataag

SEQ ID NO: 78899 - DNA, 20 bp, Artificial Sequence
  Description of Artificial Sequence: Synthetic oligonucleotide
  Target: LAMA2; (-) strand; PAM type: NRG; PAM sequence: AAG
caggtctttccttcttagat

SEQ ID NO: 78900 - DNA, 20 bp, Artificial Sequence
  Description of Artificial Sequence: Synthetic oligonucleotide
  Target: LAMA2; (-) strand; PAM type: NRG; PAM sequence: TAG
cttaacaggtctttccttct

SEQ ID NO: 78901 - DNA, 20 bp, Artificial Sequence
  Description of Artificial Sequence: Synthetic oligonucleotide
  Target: LAMA2; (-) strand; PAM type: NRG; PAM sequence: AGG
cccctaagcttagacttaac

SEQ ID NO: 78902 - DNA, 20 bp, Artificial Sequence
  Description of Artificial Sequence: Synthetic oligonucleotide
  Target: LAMA2; (-) strand; PAM type: NRG; PAM sequence: CAG
acccctaagcttagacttaa

SEQ ID NO: 78903 - DNA, 20 bp, Artificial Sequence
  Description of Artificial Sequence: Synthetic oligonucleotide
  Target: LAMA2; (-) strand; PAM type: NRG; PAM sequence: TAG
gacaactctacccctaagct

SEQ ID NO: 78904 - DNA, 20 bp, Artificial Sequence
  Description of Artificial Sequence: Synthetic oligonucleotide
  Target: LAMA2; (-) strand; PAM type: NRG; PAM sequence: AAG
tcgttgacaactctacccct

SEQ ID NO: 78905 - DNA, 20 bp, Artificial Sequence
  Description of Artificial Sequence: Synthetic oligonucleotide
  Target: LAMA2; (-) strand; PAM type: NRG; PAM sequence: TGG
tcttccaagaatacaagaaa

SEQ ID NO: 78906 - DNA, 20 bp, Artificial Sequence
  Description of Artificial Sequence: Synthetic oligonucleotide
  Target: LAMA2; (-) strand; PAM type: NRG; PAM sequence: AAG
cttacctcttccaagaatac

SEQ ID NO: 78907 - DNA, 20 bp, Artificial Sequence
  Description of Artificial Sequence: Synthetic oligonucleotide
  Target: LAMA2; (-) strand; PAM type: NRG; PAM sequence: AAG
ttctttaacttacctcttcc

SEQ ID NO: 78908 - DNA, 20 bp, Artificial Sequence
  Description of Artificial Sequence: Synthetic oligonucleotide
  Target: LAMA2; (-) strand; PAM type: NRG; PAM sequence: AAG
tgctgtaataataaaatgtc

SEQ ID NO: 78909 - DNA, 20 bp, Artificial Sequence
  Description of Artificial Sequence: Synthetic oligonucleotide
  Target: LAMA2; (-) strand; PAM type: NRG; PAM sequence: TAG
ctactgagtggcttgaaagg

SEQ ID NO: 78910 - DNA, 20 bp, Artificial Sequence
  Description of Artificial Sequence: Synthetic oligonucleotide
  Target: LAMA2; (-) strand; PAM type: NRG; PAM sequence: AGG
tgactactgagtggcttgaa

SEQ ID NO: 78911 - DNA, 20 bp, Artificial Sequence
  Description of Artificial Sequence: Synthetic oligonucleotide
  Target: LAMA2; (-) strand; PAM type: NRG; PAM sequence: AAG
atgactactgagtggcttga

SEQ ID NO: 78912 - DNA, 20 bp, Artificial Sequence
  Description of Artificial Sequence: Synthetic oligonucleotide
  Target: LAMA2; (-) strand; PAM type: NRG; PAM sequence: TGG
catgtccgatgactactgag

SEQ ID NO: 78913 - DNA, 20 bp, Artificial Sequence
  Description of Artificial Sequence: Synthetic oligonucleotide
  Target: LAMA2; (-) strand; PAM type: NRG; PAM sequence: GAG
ttacatgtccgatgactact

SEQ ID NO: 78914 - DNA, 20 bp, Artificial Sequence
  Description of Artificial Sequence: Synthetic oligonucleotide
  Target: LAMA2; (-) strand; PAM type: NRG; PAM sequence: TAG
tagaaatttacacgaccaaa

SEQ ID NO: 78915 - DNA, 20 bp, Artificial Sequence
  Description of Artificial Sequence: Synthetic oligonucleotide
  Target: LAMA2; (-) strand; PAM type: NRG; PAM sequence: TAG
tttttttttcctactgtcac

SEQ ID NO: 78916 - DNA, 20 bp, Artificial Sequence
  Description of Artificial Sequence: Synthetic oligonucleotide
  Target: LAMA2; (-) strand; PAM type: NRG; PAM sequence: AGG
gtttggaaggtctttaataa

SEQ ID NO: 78917 - DNA, 20 bp, Artificial Sequence
  Description of Artificial Sequence: Synthetic oligonucleotide
  Target: LAMA2; (-) strand; PAM type: NRG; PAM sequence: AAG
agtttggaaggtctttaata

SEQ ID NO: 78918 - DNA, 20 bp, Artificial Sequence
  Description of Artificial Sequence: Synthetic oligonucleotide
  Target: LAMA2; (-) strand; PAM type: NRG; PAM sequence: AGG
gggcactgaattagtttgga

SEQ ID NO: 78919 - DNA, 20 bp, Artificial Sequence
  Description of Artificial Sequence: Synthetic oligonucleotide
  Target: LAMA2; (-) strand; PAM type: NRG; PAM sequence: AAG
agggcactgaattagtttgg

SEQ ID NO: 78920 - DNA, 20 bp, Artificial Sequence
  Description of Artificial Sequence: Synthetic oligonucleotide
  Target: LAMA2; (-) strand; PAM type: NRG; PAM sequence: TGG
tgtagggcactgaattagtt

SEQ ID NO: 78921 - DNA, 20 bp, Artificial Sequence
  Description of Artificial Sequence: Synthetic oligonucleotide
  Target: LAMA2; (-) strand; PAM type: NRG; PAM sequence: TAG
cagcatgtagggcactgaat

SEQ ID NO: 78922 - DNA, 20 bp, Artificial Sequence
  Description of Artificial Sequence: Synthetic oligonucleotide
  Target: LAMA2; (-) strand; PAM type: NRG; PAM sequence: GGG
tcattttcatgcagcatgta

SEQ ID NO: 78923 - DNA, 20 bp, Artificial Sequence
  Description of Artificial Sequence: Synthetic oligonucleotide
  Target: LAMA2; (-) strand; PAM type: NRG; PAM sequence: AGG
ctcattttcatgcagcatgt

SEQ ID NO: 78924 - DNA, 20 bp, Artificial Sequence
  Description of Artificial Sequence: Synthetic oligonucleotide
  Target: LAMA2; (-) strand; PAM type: NRG; PAM sequence: TAG
cctcattttcatgcagcatg

SEQ ID NO: 78925 - DNA, 20 bp, Artificial Sequence
  Description of Artificial Sequence: Synthetic oligonucleotide
  Target: LAMA2; (-) strand; PAM type: NRG; PAM sequence: CAG
ggaaagtcctcattttcatg

SEQ ID NO: 78926 - DNA, 20 bp, Artificial Sequence
  Description of Artificial Sequence: Synthetic oligonucleotide
  Target: LAMA2; (-) strand; PAM type: NRG; PAM sequence: AAG
tccttctactcagaactgga

SEQ ID NO: 78927 - DNA, 20 bp, Artificial Sequence
  Description of Artificial Sequence: Synthetic oligonucleotide
  Target: LAMA2; (-) strand; PAM type: NRG; PAM sequence: TGG
atattccttctactcagaac

SEQ ID NO: 78928 - DNA, 20 bp, Artificial Sequence
  Description of Artificial Sequence: Synthetic oligonucleotide
  Target: LAMA2; (-) strand; PAM type: NRG; PAM sequence: CAG
gccttaatattccttctact

SEQ ID NO: 78929 - DNA, 20 bp, Artificial Sequence
  Description of Artificial Sequence: Synthetic oligonucleotide
  Target: LAMA2; (-) strand; PAM type: NRG; PAM sequence: AGG
ataaatggatttgtcccttc

SEQ ID NO: 78930 - DNA, 20 bp, Artificial Sequence
  Description of Artificial Sequence: Synthetic oligonucleotide
  Target: LAMA2; (-) strand; PAM type: NRG; PAM sequence: CAG
tataaatggatttgtccctt

SEQ ID NO: 78931 - DNA, 20 bp, Artificial Sequence
  Description of Artificial Sequence: Synthetic oligonucleotide
  Target: LAMA2; (-) strand; PAM type: NRG; PAM sequence: TGG
aagaaaaataattttataaa

SEQ ID NO: 78932 - DNA, 20 bp, Artificial Sequence
  Description of Artificial Sequence: Synthetic oligonucleotide
  Target: LAMA2; (-) strand; PAM type: NRG; PAM sequence: AAG
atttatatttttatcacaaa

SEQ ID NO: 78933 - DNA, 20 bp, Artificial Sequence
  Description of Artificial Sequence: Synthetic oligonucleotide
  Target: LAMA2; (-) strand; PAM type: NRG; PAM sequence: GAG
tattttttagtatactagca

SEQ ID NO: 78934 - DNA, 20 bp, Artificial Sequence
  Description of Artificial Sequence: Synthetic oligonucleotide
  Target: LAMA2; (-) strand; PAM type: NRG; PAM sequence: CAG
tatattttttagtatactag

SEQ ID NO: 78935 - DNA, 20 bp, Artificial Sequence
  Description of Artificial Sequence: Synthetic oligonucleotide
  Target: LAMA2; (-) strand; PAM type: NRG; PAM sequence: TAG
atttatattttttagtatac

SEQ ID NO: 78936 - DNA, 20 bp, Artificial Sequence
  Description of Artificial Sequence: Synthetic oligonucleotide
  Target: LAMA2; (-) strand; PAM type: NRG; PAM sequence: TAG
gtagagccatttatattttt

SEQ ID NO: 78937 - DNA, 20 bp, Artificial Sequence
  Description of Artificial Sequence: Synthetic oligonucleotide
  Target: LAMA2; (-) strand; PAM type: NRG; PAM sequence: GAG
gattattaaatatactagta

SEQ ID NO: 78938 - DNA, 20 bp, Artificial Sequence
  Description of Artificial Sequence: Synthetic oligonucleotide
  Target: LAMA2; (-) strand; PAM type: NRG; PAM sequence: TAG
aggattattaaatatactag

SEQ ID NO: 78939 - DNA, 20 bp, Artificial Sequence
  Description of Artificial Sequence: Synthetic oligonucleotide
  Target: LAMA2; (-) strand; PAM type: NRG; PAM sequence: TAG
tgaaggattattaaatatac

SEQ ID NO: 78940 - DNA, 20 bp, Artificial Sequence
  Description of Artificial Sequence: Synthetic oligonucleotide
  Target: LAMA2; (-) strand; PAM type: NRG; PAM sequence: AGG
acgtttaggtaaatcaatga

SEQ ID NO: 78941 - DNA, 20 bp, Artificial Sequence
  Description of Artificial Sequence: Synthetic oligonucleotide
  Target: LAMA2; (-) strand; PAM type: NRG; PAM sequence: AAG
tacgtttaggtaaatcaatg

SEQ ID NO: 78942 - DNA, 20 bp, Artificial Sequence
  Description of Artificial Sequence: Synthetic oligonucleotide
  Target: LAMA2; (-) strand; PAM type: NRG; PAM sequence: AGG
atgggtatcttcatacgttt

SEQ ID NO: 78943 - DNA, 20 bp, Artificial Sequence
  Description of Artificial Sequence: Synthetic oligonucleotide
  Target: LAMA2; (-) strand; PAM type: NRG; PAM sequence: TAG
tatgggtatcttcatacgtt

SEQ ID NO: 78944 - DNA, 20 bp, Artificial Sequence
  Description of Artificial Sequence: Synthetic oligonucleotide
  Target: LAMA2; (-) strand; PAM type: NRG; PAM sequence: GGG
tatttttaaaaatattatat

SEQ ID NO: 78945 - DNA, 20 bp, Artificial Sequence
  Description of Artificial Sequence: Synthetic oligonucleotide
  Target: LAMA2; (-) strand; PAM type: NRG; PAM sequence: TGG
ttatttttaaaaatattata

SEQ ID NO: 78946 - DNA, 20 bp, Artificial Sequence
  Description of Artificial Sequence: Synthetic oligonucleotide
  Target: LAMA2; (-) strand; PAM type: NRG; PAM sequence: GAG
tagtctaataaattatttta

SEQ ID NO: 78947 - DNA, 20 bp, Artificial Sequence
  Description of Artificial Sequence: Synthetic oligonucleotide
  Target: LAMA2; (-) strand; PAM type: NRG; PAM sequence: TAG
tctagtctaataaattattt

SEQ ID NO: 78948 - DNA, 20 bp, Artificial Sequence
  Description of Artificial Sequence: Synthetic oligonucleotide
  Target: LAMA2; (-) strand; PAM type: NRG; PAM sequence: TAG
tagtataaatttatttattc

SEQ ID NO: 78949 - DNA, 20 bp, Artificial Sequence
  Description of Artificial Sequence: Synthetic oligonucleotide
  Target: LAMA2; (-) strand; PAM type: NRG; PAM sequence: TAG
tgactgttcatcataaattc

SEQ ID NO: 78950 - DNA, 20 bp, Artificial Sequence
  Description of Artificial Sequence: Synthetic oligonucleotide
  Target: LAMA2; (-) strand; PAM type: NRG; PAM sequence: TAG
gactagagcttccaatgaat

SEQ ID NO: 78951 - DNA, 20 bp, Artificial Sequence
  Description of Artificial Sequence: Synthetic oligonucleotide
  Target: LAMA2; (-) strand; PAM type: NRG; PAM sequence: GAG
aaatactatagactggacta

SEQ ID NO: 78952 - DNA, 20 bp, Artificial Sequence
  Description of Artificial Sequence: Synthetic oligonucleotide
  Target: LAMA2; (-) strand; PAM type: NRG; PAM sequence: TAG
ccaaatactatagactggac

SEQ ID NO: 78953 - DNA, 20 bp, Artificial Sequence
  Description of Artificial Sequence: Synthetic oligonucleotide
  Target: LAMA2; (-) strand; PAM type: NRG; PAM sequence: TGG
agtccccaaatactatagac

SEQ ID NO: 78954 - DNA, 20 bp, Artificial Sequence
  Description of Artificial Sequence: Synthetic oligonucleotide
  Target: LAMA2; (-) strand; PAM type: NRG; PAM sequence: TAG
atagcagtccccaaatacta

SEQ ID NO: 78955 - DNA, 20 bp, Artificial Sequence
  Description of Artificial Sequence: Synthetic oligonucleotide
  Target: LAMA2; (-) strand; PAM type: NRG; PAM sequence: CAG
ttgaatgaacatatcaatag

SEQ ID NO: 78956 - DNA, 20 bp, Artificial Sequence
  Description of Artificial Sequence: Synthetic oligonucleotide
  Target: LAMA2; (-) strand; PAM type: NRG; PAM sequence: TAG
ttgttgaatgaacatatcaa

SEQ ID NO: 78957 - DNA, 20 bp, Artificial Sequence
  Description of Artificial Sequence: Synthetic oligonucleotide
  Target: LAMA2; (-) strand; PAM type: NRG; PAM sequence: CAG
ttcagtacatactatattat

SEQ ID NO: 78958 - DNA, 20 bp, Artificial Sequence
  Description of Artificial Sequence: Synthetic oligonucleotide
  Target: LAMA2; (-) strand; PAM type: NRG; PAM sequence: CAG
agtgtttagcataatgattt

SEQ ID NO: 78959 - DNA, 20 bp, Artificial Sequence
  Description of Artificial Sequence: Synthetic oligonucleotide
  Target: LAMA2; (-) strand; PAM type: NRG; PAM sequence: TAG
tattgtaaaccctcagtgtt

SEQ ID NO: 78960 - DNA, 20 bp, Artificial Sequence
  Description of Artificial Sequence: Synthetic oligonucleotide
  Target: LAMA2; (-) strand; PAM type: NRG; PAM sequence: CAG
tcttatttattgtaaaccct

SEQ ID NO: 78961 - DNA, 20 bp, Artificial Sequence
  Description of Artificial Sequence: Synthetic oligonucleotide
  Target: LAMA2; (-) strand; PAM type: NRG; PAM sequence: AGG
tactagatttaagttcaatg

SEQ ID NO: 78962 - DNA, 20 bp, Artificial Sequence
  Description of Artificial Sequence: Synthetic oligonucleotide
  Target: LAMA2; (-) strand; PAM type: NRG; PAM sequence: GAG
ctactagatttaagttcaat

SEQ ID NO: 78963 - DNA, 20 bp, Artificial Sequence
  Description of Artificial Sequence: Synthetic oligonucleotide
  Target: LAMA2; (-) strand; PAM type: NRG; PAM sequence: AAG
ttgtgtctgctactagattt

SEQ ID NO: 78964 - DNA, 20 bp, Artificial Sequence
  Description of Artificial Sequence: Synthetic oligonucleotide
  Target: LAMA2; (-) strand; PAM type: NRG; PAM sequence: TAG
tacttgcttgtgtctgctac

SEQ ID NO: 78965 - DNA, 20 bp, Artificial Sequence
  Description of Artificial Sequence: Synthetic oligonucleotide
  Target: LAMA2; (-) strand; PAM type: NRG; PAM sequence: GAG
tacctccatggactgtctag

SEQ ID NO: 78966 - DNA, 20 bp, Artificial Sequence
  Description of Artificial Sequence: Synthetic oligonucleotide
  Target: LAMA2; (-) strand; PAM type: NRG; PAM sequence: AGG
aatacctccatggactgtct

SEQ ID NO: 78967 - DNA, 20 bp, Artificial Sequence
  Description of Artificial Sequence: Synthetic oligonucleotide
  Target: LAMA2; (-) strand; PAM type: NRG; PAM sequence: TAG
aaatacctccatggactgtc

SEQ ID NO: 78968 - DNA, 20 bp, Artificial Sequence
  Description of Artificial Sequence: Synthetic oligonucleotide
  Target: LAMA2; (-) strand; PAM type: NRG; PAM sequence: TGG
tcctcccacaaatacctcca

SEQ ID NO: 78969 - DNA, 20 bp, Artificial Sequence
  Description of Artificial Sequence: Synthetic oligonucleotide
  Target: LAMA2; (-) strand; PAM type: NRG; PAM sequence: CAG
tttatatatctttaaaatct

SEQ ID NO: 78970 - DNA, 20 bp, Artificial Sequence
  Description of Artificial Sequence: Synthetic oligonucleotide
  Target: LAMA2; (-) strand; PAM type: NRG; PAM sequence: CAG
ctcactgcttgccatttaca

SEQ ID NO: 78971 - DNA, 20 bp, Artificial Sequence
  Description of Artificial Sequence: Synthetic oligonucleotide
  Target: LAMA2; (-) strand; PAM type: NRG; PAM sequence: AGG
tcatggtctatcttatcttt

SEQ ID NO: 78972 - DNA, 20 bp, Artificial Sequence
  Description of Artificial Sequence: Synthetic oligonucleotide
  Target: LAMA2; (-) strand; PAM type: NRG; PAM sequence: TAG
gtcatggtctatcttatctt

SEQ ID NO: 78973 - DNA, 20 bp, Artificial Sequence
  Description of Artificial Sequence: Synthetic oligonucleotide
  Target: LAMA2; (-) strand; PAM type: NRG; PAM sequence: TGG
ttactttcctttctgtgtca

SEQ ID NO: 78974 - DNA, 20 bp, Artificial Sequence
  Description of Artificial Sequence: Synthetic oligonucleotide
  Target: LAMA2; (-) strand; PAM type: NRG; PAM sequence: TGG
tgtattggatatctactaga

SEQ ID NO: 78975 - DNA, 20 bp, Artificial Sequence
  Description of Artificial Sequence: Synthetic oligonucleotide
  Target: LAMA2; (-) strand; PAM type: NRG; PAM sequence: TAG
tatatgtattggatatctac

SEQ ID NO: 78976 - DNA, 20 bp, Artificial Sequence
  Description of Artificial Sequence: Synthetic oligonucleotide
  Target: LAMA2; (-) strand; PAM type: NRG; PAM sequence: TGG
attcactcaaatatatgtat

SEQ ID NO: 78977 - DNA, 20 bp, Artificial Sequence
  Description of Artificial Sequence: Synthetic oligonucleotide
  Target: LAMA2; (-) strand; PAM type: NRG; PAM sequence: CAG
atatttcccattcatatagt

SEQ ID NO: 78978 - DNA, 20 bp, Artificial Sequence
  Description of Artificial Sequence: Synthetic oligonucleotide
  Target: LAMA2; (-) strand; PAM type: NRG; PAM sequence: TAG
ttcaatatttcccattcata

SEQ ID NO: 78979 - DNA, 20 bp, Artificial Sequence
  Description of Artificial Sequence: Synthetic oligonucleotide
  Target: LAMA2; (-) strand; PAM type: NRG; PAM sequence: TGG
acctttcagagctttatctc

SEQ ID NO: 78980 - DNA, 20 bp, Artificial Sequence
  Description of Artificial Sequence: Synthetic oligonucleotide
  Target: LAMA2; (-) strand; PAM type: NRG; PAM sequence: GAG
aaatatatgcttacctttca

SEQ ID NO: 78981 - DNA, 20 bp, Artificial Sequence
  Description of Artificial Sequence: Synthetic oligonucleotide
  Target: LAMA2; (-) strand; PAM type: NRG; PAM sequence: CAG
taaaatatatgcttaccttt

SEQ ID NO: 78982 - DNA, 20 bp, Artificial Sequence
  Description of Artificial Sequence: Synthetic oligonucleotide
  Target: LAMA2; (-) strand; PAM type: NRG; PAM sequence: AAG
tcagaaaattaggtactctg

SEQ ID NO: 78983 - DNA, 20 bp, Artificial Sequence
  Description of Artificial Sequence: Synthetic oligonucleotide
  Target: LAMA2; (-) strand; PAM type: NRG; PAM sequence: AGG
atttgcatattcagaaaatt

SEQ ID NO: 78984 - DNA, 20 bp, Artificial Sequence
  Description of Artificial Sequence: Synthetic oligonucleotide
  Target: LAMA2; (-) strand; PAM type: NRG; PAM sequence: TAG
catttgcatattcagaaaat

SEQ ID NO: 78985 - DNA, 20 bp, Artificial Sequence
  Description of Artificial Sequence: Synthetic oligonucleotide
  Target: LAMA2; (-) strand; PAM type: NRG; PAM sequence: CAG
atactgctcatttgcatatt

SEQ ID NO: 78986 - DNA, 20 bp, Artificial Sequence
  Description of Artificial Sequence: Synthetic oligonucleotide
  Target: LAMA2; (-) strand; PAM type: NRG; PAM sequence: GGG
accaagagttctcattttta

SEQ ID NO: 78987 - DNA, 20 bp, Artificial Sequence
  Description of Artificial Sequence: Synthetic oligonucleotide
  Target: LAMA2; (-) strand; PAM type: NRG; PAM sequence: AGG
aaccaagagttctcattttt

SEQ ID NO: 78988 - DNA, 20 bp, Artificial Sequence
  Description of Artificial Sequence: Synthetic oligonucleotide
  Target: LAMA2; (-) strand; PAM type: NRG; PAM sequence: TAG
caaccaagagttctcatttt

SEQ ID NO: 78989 - DNA, 20 bp, Artificial Sequence
  Description of Artificial Sequence: Synthetic oligonucleotide
  Target: LAMA2; (-) strand; PAM type: NRG; PAM sequence: GAG
ttgttattttctccaaccaa

SEQ ID NO: 78990 - DNA, 20 bp, Artificial Sequence
  Description of Artificial Sequence: Synthetic oligonucleotide
  Target: LAMA2; (-) strand; PAM type: NRG; PAM sequence: AAG
ttttgttattttctccaacc

SEQ ID NO: 78991 - DNA, 20 bp, Artificial Sequence
  Description of Artificial Sequence: Synthetic oligonucleotide
  Target: LAMA2; (-) strand; PAM type: NRG; PAM sequence: AAG
tatatcaggcacagtttttg

SEQ ID NO: 78992 - DNA, 20 bp, Artificial Sequence
  Description of Artificial Sequence: Synthetic oligonucleotide
  Target: LAMA2; (-) strand; PAM type: NRG; PAM sequence: CAG
atttccaattatatcaggca

SEQ ID NO: 78993 - DNA, 20 bp, Artificial Sequence
  Description of Artificial Sequence: Synthetic oligonucleotide
  Target: LAMA2; (-) strand; PAM type: NRG; PAM sequence: AGG
gcattatttccaattatatc

SEQ ID NO: 78994 - DNA, 20 bp, Artificial Sequence
  Description of Artificial Sequence: Synthetic oligonucleotide
  Target: LAMA2; (-) strand; PAM type: NRG; PAM sequence: CAG
ggcattatttccaattatat

SEQ ID NO: 78995 - DNA, 20 bp, Artificial Sequence
  Description of Artificial Sequence: Synthetic oligonucleotide
  Target: LAMA2; (-) strand; PAM type: NRG; PAM sequence: AGG
tatggactcaatctgtttcc

SEQ ID NO: 78996 - DNA, 20 bp, Artificial Sequence
  Description of Artificial Sequence: Synthetic oligonucleotide
  Target: LAMA2; (-) strand; PAM type: NRG; PAM sequence: CAG
ttatggactcaatctgtttc

SEQ ID NO: 78997 - DNA, 20 bp, Artificial Sequence
  Description of Artificial Sequence: Synthetic oligonucleotide
  Target: LAMA2; (-) strand; PAM type: NRG; PAM sequence: TGG
aatgaacacatacaggatta

SEQ ID NO: 78998 - DNA, 20 bp, Artificial Sequence
  Description of Artificial Sequence: Synthetic oligonucleotide
  Target: LAMA2; (-) strand; PAM type: NRG; PAM sequence: AGG
tggccttaatgaacacatac

SEQ ID NO: 78999 - DNA, 20 bp, Artificial Sequence
  Description of Artificial Sequence: Synthetic oligonucleotide
  Target: LAMA2; (-) strand; PAM type: NRG; PAM sequence: CAG
ctggccttaatgaacacata

SEQ ID NO: 79000 - DNA, 20 bp, Artificial Sequence
  Description of Artificial Sequence: Synthetic oligonucleotide
  Target: LAMA2; (-) strand; PAM type: NRG; PAM sequence: TGG
ttccttaccaagaatcttcc

SEQ ID NO: 79001 - DNA, 20 bp, Artificial Sequence
  Description of Artificial Sequence: Synthetic oligonucleotide
  Target: LAMA2; (-) strand; PAM type: NRG; PAM sequence: AAG
agactagacatttccttacc

SEQ ID NO: 79002 - DNA, 20 bp, Artificial Sequence
  Description of Artificial Sequence: Synthetic oligonucleotide
  Target: LAMA2; (-) strand; PAM type: NRG; PAM sequence: TAG
aatctttagacctttcagac

SEQ ID NO: 79003 - DNA, 20 bp, Artificial Sequence
  Description of Artificial Sequence: Synthetic oligonucleotide
  Target: LAMA2; (-) strand; PAM type: NRG; PAM sequence: CAG
aataaaatctttagaccttt

SEQ ID NO: 79004 - DNA, 20 bp, Artificial Sequence
  Description of Artificial Sequence: Synthetic oligonucleotide
  Target: LAMA2; (-) strand; PAM type: NRG; PAM sequence: TAG
atacagattaataaaatctt

SEQ ID NO: 79005 - DNA, 20 bp, Artificial Sequence
  Description of Artificial Sequence: Synthetic oligonucleotide
  Target: LAMA2; (-) strand; PAM type: NRG; PAM sequence: CAG
ataagatataatttattata

SEQ ID NO: 79006 - DNA, 20 bp, Artificial Sequence
  Description of Artificial Sequence: Synthetic oligonucleotide
  Target: LAMA2; (-) strand; PAM type: NRG; PAM sequence: AAG
ataaatgacaagagtttcat

SEQ ID NO: 79007 - DNA, 20 bp, Artificial Sequence
  Description of Artificial Sequence: Synthetic oligonucleotide
  Target: LAMA2; (-) strand; PAM type: NRG; PAM sequence: GAG
atatactggataaatgacaa

SEQ ID NO: 79008 - DNA, 20 bp, Artificial Sequence
  Description of Artificial Sequence: Synthetic oligonucleotide
  Target: LAMA2; (-) strand; PAM type: NRG; PAM sequence: AAG
aaatatactggataaatgac

SEQ ID NO: 79009 - DNA, 20 bp, Artificial Sequence
  Description of Artificial Sequence: Synthetic oligonucleotide
  Target: LAMA2; (-) strand; PAM type: NRG; PAM sequence: TGG
cacgggtaattcaaatatac

SEQ ID NO: 79010 - DNA, 20 bp, Artificial Sequence
  Description of Artificial Sequence: Synthetic oligonucleotide
  Target: LAMA2; (-) strand; PAM type: NRG; PAM sequence: GGG
tatatgaaacagtaatgcac

SEQ ID NO: 79011 - DNA, 20 bp, Artificial Sequence
  Description of Artificial Sequence: Synthetic oligonucleotide
  Target: LAMA2; (-) strand; PAM type: NRG; PAM sequence: CGG
atatatgaaacagtaatgca

SEQ ID NO: 79012 - DNA, 20 bp, Artificial Sequence
  Description of Artificial Sequence: Synthetic oligonucleotide
  Target: LAMA2; (-) strand; PAM type: NRG; PAM sequence: CAG
agtaccatgaatatatgaaa

SEQ ID NO: 79013 - DNA, 20 bp, Artificial Sequence
  Description of Artificial Sequence: Synthetic oligonucleotide
  Target: LAMA2; (-) strand; PAM type: NRG; PAM sequence: AAG
ttaaatgttataaaatatga

SEQ ID NO: 79014 - DNA, 20 bp, Artificial Sequence
  Description of Artificial Sequence: Synthetic oligonucleotide
  Target: LAMA2; (-) strand; PAM type: NRG; PAM sequence: TGG
aagaatcttattcaaatcaa

SEQ ID NO: 79015 - DNA, 20 bp, Artificial Sequence
  Description of Artificial Sequence: Synthetic oligonucleotide
  Target: LAMA2; (-) strand; PAM type: NRG; PAM sequence: AAG
aaagctttcactgtaattta

SEQ ID NO: 79016 - DNA, 20 bp, Artificial Sequence
  Description of Artificial Sequence: Synthetic oligonucleotide
  Target: LAMA2; (-) strand; PAM type: NRG; PAM sequence: AAG
tcttaccataccttatcaga

SEQ ID NO: 79017 - DNA, 20 bp, Artificial Sequence
  Description of Artificial Sequence: Synthetic oligonucleotide
  Target: LAMA2; (-) strand; PAM type: NRG; PAM sequence: CAG
ataatcttaccataccttat

SEQ ID NO: 79018 - DNA, 20 bp, Artificial Sequence
  Description of Artificial Sequence: Synthetic oligonucleotide
  Target: LAMA2; (-) strand; PAM type: NRG; PAM sequence: CAG
agtagctttattatatgtat

SEQ ID NO: 79019 - DNA, 20 bp, Artificial Sequence
  Description of Artificial Sequence: Synthetic oligonucleotide
  Target: LAMA2; (-) strand; PAM type: NRG; PAM sequence: TAG
tcatctttatgaattgtcag

SEQ ID NO: 79020 - DNA, 20 bp, Artificial Sequence
  Description of Artificial Sequence: Synthetic oligonucleotide
  Target: LAMA2; (-) strand; PAM type: NRG; PAM sequence: CAG
ttatcatctttatgaattgt

SEQ ID NO: 79021 - DNA, 20 bp, Artificial Sequence
  Description of Artificial Sequence: Synthetic oligonucleotide
  Target: LAMA2; (-) strand; PAM type: NRG; PAM sequence: AAG
attgaagctcagtttgtact

SEQ ID NO: 79022 - DNA, 20 bp, Artificial Sequence
  Description of Artificial Sequence: Synthetic oligonucleotide
  Target: LAMA2; (-) strand; PAM type: NRG; PAM sequence: CAG
ttagtaatcccattgaagct

SEQ ID NO: 79023 - DNA, 20 bp, Artificial Sequence
  Description of Artificial Sequence: Synthetic oligonucleotide
  Target: LAMA2; (-) strand; PAM type: NRG; PAM sequence: AAG
ctcatttagtaatcccattg

SEQ ID NO: 79024 - DNA, 20 bp, Artificial Sequence
  Description of Artificial Sequence: Synthetic oligonucleotide
  Target: LAMA2; (-) strand; PAM type: NRG; PAM sequence: TAG
tctgtcctcacatactcatt

SEQ ID NO: 79025 - DNA, 20 bp, Artificial Sequence
  Description of Artificial Sequence: Synthetic oligonucleotide
  Target: LAMA2; (-) strand; PAM type: NRG; PAM sequence: TGG
gcaccacagtgctcaaccct

SEQ ID NO: 79026 - DNA, 20 bp, Artificial Sequence
  Description of Artificial Sequence: Synthetic oligonucleotide
  Target: LAMA2; (-) strand; PAM type: NRG; PAM sequence: CAG
tttctcataatagagcacca

SEQ ID NO: 79027 - DNA, 20 bp, Artificial Sequence
  Description of Artificial Sequence: Synthetic oligonucleotide
  Target: LAMA2; (-) strand; PAM type: NRG; PAM sequence: GAG
ttcctaactttctcataata

SEQ ID NO: 79028 - DNA, 20 bp, Artificial Sequence
  Description of Artificial Sequence: Synthetic oligonucleotide
  Target: LAMA2; (-) strand; PAM type: NRG; PAM sequence: TAG
ccttcctaactttctcataa

SEQ ID NO: 79029 - DNA, 20 bp, Artificial Sequence
  Description of Artificial Sequence: Synthetic oligonucleotide
  Target: LAMA2; (-) strand; PAM type: NRG; PAM sequence: CAG
tactccttctcaatcccctt

SEQ ID NO: 79030 - DNA, 20 bp, Artificial Sequence
  Description of Artificial Sequence: Synthetic oligonucleotide
  Target: LAMA2; (-) strand; PAM type: NRG; PAM sequence: CAG
ttgttttccttctaccgctt

SEQ ID NO: 79031 - DNA, 20 bp, Artificial Sequence
  Description of Artificial Sequence: Synthetic oligonucleotide
  Target: LAMA2; (-) strand; PAM type: NRG; PAM sequence: AGG
tgattactccactgacttcc

SEQ ID NO: 79032 - DNA, 20 bp, Artificial Sequence
  Description of Artificial Sequence: Synthetic oligonucleotide
  Target: LAMA2; (-) strand; PAM type: NRG; PAM sequence: CAG
gtgattactccactgacttc

SEQ ID NO: 79033 - DNA, 20 bp, Artificial Sequence
  Description of Artificial Sequence: Synthetic oligonucleotide
  Target: LAMA2; (-) strand; PAM type: NRG; PAM sequence: AAG
ctattagcagcatttgagac

SEQ ID NO: 79034 - DNA, 20 bp, Artificial Sequence
  Description of Artificial Sequence: Synthetic oligonucleotide
  Target: LAMA2; (-) strand; PAM type: NRG; PAM sequence: GAG
ttgacctattagcagcattt

SEQ ID NO: 79035 - DNA, 20 bp, Artificial Sequence
  Description of Artificial Sequence: Synthetic oligonucleotide
  Target: LAMA2; (-) strand; PAM type: NRG; PAM sequence: CAG
caccatatttgacctattag

SEQ ID NO: 79036 - DNA, 20 bp, Artificial Sequence
  Description of Artificial Sequence: Synthetic oligonucleotide
  Target: LAMA2; (-) strand; PAM type: NRG; PAM sequence: TAG
tctcaccatatttgacctat

SEQ ID NO: 79037 - DNA, 20 bp, Artificial Sequence
  Description of Artificial Sequence: Synthetic oligonucleotide
  Target: LAMA2; (-) strand; PAM type: NRG; PAM sequence: CAG
taaatgaaatgtccagttct

SEQ ID NO: 79038 - DNA, 20 bp, Artificial Sequence
  Description of Artificial Sequence: Synthetic oligonucleotide
  Target: LAMA2; (-) strand; PAM type: NRG; PAM sequence: CAG
acattactaaatgaaatgtc

SEQ ID NO: 79039 - DNA, 20 bp, Artificial Sequence
  Description of Artificial Sequence: Synthetic oligonucleotide
  Target: LAMA2; (-) strand; PAM type: NRG; PAM sequence: AAG
cactgaaactgctcttggga

SEQ ID NO: 79040 - DNA, 20 bp, Artificial Sequence
  Description of Artificial Sequence: Synthetic oligonucleotide
  Target: LAMA2; (-) strand; PAM type: NRG; PAM sequence: GGG
attccactgaaactgctctt

SEQ ID NO: 79041 - DNA, 20 bp, Artificial Sequence
  Description of Artificial Sequence: Synthetic oligonucleotide
  Target: LAMA2; (-) strand; PAM type: NRG; PAM sequence: TGG
cattccactgaaactgctct

SEQ ID NO: 79042 - DNA, 20 bp, Artificial Sequence
  Description of Artificial Sequence: Synthetic oligonucleotide
  Target: LAMA2; (-) strand; PAM type: NRG; PAM sequence: TGG
caatgctcctattattccat

SEQ ID NO: 79043 - DNA, 20 bp, Artificial Sequence
  Description of Artificial Sequence: Synthetic oligonucleotide
  Target: LAMA2; (-) strand; PAM type: NRG; PAM sequence: TGG
gatggtaaataggtacattt

SEQ ID NO: 79044 - DNA, 20 bp, Artificial Sequence
  Description of Artificial Sequence: Synthetic oligonucleotide
  Target: LAMA2; (-) strand; PAM type: NRG; PAM sequence: AGG
tctggctctggatggtaaat

SEQ ID NO: 79045 - DNA, 20 bp, Artificial Sequence
  Description of Artificial Sequence: Synthetic oligonucleotide
  Target: LAMA2; (-) strand; PAM type: NRG; PAM sequence: TAG
gtctggctctggatggtaaa

SEQ ID NO: 79046 - DNA, 20 bp, Artificial Sequence
  Description of Artificial Sequence: Synthetic oligonucleotide
  Target: LAMA2; (-) strand; PAM type: NRG; PAM sequence: TGG
gctctgagtctggctctgga

SEQ ID NO: 79047 - DNA, 20 bp, Artificial Sequence
  Description of Artificial Sequence: Synthetic oligonucleotide
  Target: LAMA2; (-) strand; PAM type: NRG; PAM sequence: TGG
aaaggctctgagtctggctc

SEQ ID NO: 79048 - DNA, 20 bp, Artificial Sequence
  Description of Artificial Sequence: Synthetic oligonucleotide
  Target: LAMA2; (-) strand; PAM type: NRG; PAM sequence: TGG
cagagtaaaggctctgagtc

SEQ ID NO: 79049 - DNA, 20 bp, Artificial Sequence
  Description of Artificial Sequence: Synthetic oligonucleotide
  Target: LAMA2; (-) strand; PAM type: NRG; PAM sequence: GAG
tagcacagagtaaaggctct

SEQ ID NO: 79050 - DNA, 20 bp, Artificial Sequence
  Description of Artificial Sequence: Synthetic oligonucleotide
  Target: LAMA2; (-) strand; PAM type: NRG; PAM sequence: AGG
gtgtttctagcacagagtaa

SEQ ID NO: 79051 - DNA, 20 bp, Artificial Sequence
  Description of Artificial Sequence: Synthetic oligonucleotide
  Target: LAMA2; (-) strand; PAM type: NRG; PAM sequence: AAG
tgtgtttctagcacagagta

SEQ ID NO: 79052 - DNA, 20 bp, Artificial Sequence
  Description of Artificial Sequence: Synthetic oligonucleotide
  Target: LAMA2; (-) strand; PAM type: NRG; PAM sequence: GAG
gtcattgtgtttctagcaca

SEQ ID NO: 79053 - DNA, 20 bp, Artificial Sequence
  Description of Artificial Sequence: Synthetic oligonucleotide
  Target: LAMA2; (-) strand; PAM type: NRG; PAM sequence: CAG
tggtcattgtgtttctagca

SEQ ID NO: 79054 - DNA, 20 bp, Artificial Sequence
  Description of Artificial Sequence: Synthetic oligonucleotide
  Target: LAMA2; (-) strand; PAM type: NRG; PAM sequence: TAG
acaattggtcattgtgtttc

SEQ ID NO: 79055 - DNA, 20 bp, Artificial Sequence
  Description of Artificial Sequence: Synthetic oligonucleotide
  Target: LAMA2; (-) strand; PAM type: NRG; PAM sequence: TGG
aaagggaacaatgcaacaat

SEQ ID NO: 79056 - DNA, 20 bp, Artificial Sequence
  Description of Artificial Sequence: Synthetic oligonucleotide
  Target: LAMA2; (-) strand; PAM type: NRG; PAM sequence: GGG
ctgtagaaagctcaaggaaa

SEQ ID NO: 79057 - DNA, 20 bp, Artificial Sequence
  Description of Artificial Sequence: Synthetic oligonucleotide
  Target: LAMA2; (-) strand; PAM type: NRG; PAM sequence: AGG
gctgtagaaagctcaaggaa

SEQ ID NO: 79058 - DNA, 20 bp, Artificial Sequence
  Description of Artificial Sequence: Synthetic oligonucleotide
  Target: LAMA2; (-) strand; PAM type: NRG; PAM sequence: AAG
agctgtagaaagctcaagga

SEQ ID NO: 79059 - DNA, 20 bp, Artificial Sequence
  Description of Artificial Sequence: Synthetic oligonucleotide
  Target: LAMA2; (-) strand; PAM type: NRG; PAM sequence: AGG
ggtgagctgtagaaagctca

SEQ ID NO: 79060 - DNA, 20 bp, Artificial Sequence
  Description of Artificial Sequence: Synthetic oligonucleotide
  Target: LAMA2; (-) strand; PAM type: NRG; PAM sequence: AAG
aggtgagctgtagaaagctc

SEQ ID NO: 79061 - DNA, 20 bp, Artificial Sequence
  Description of Artificial Sequence: Synthetic oligonucleotide
  Target: LAMA2; (-) strand; PAM type: NRG; PAM sequence: AAG
gaagcgaggtgagctgtaga

SEQ ID NO: 79062 - DNA, 20 bp, Artificial Sequence
  Description of Artificial Sequence: Synthetic oligonucleotide
  Target: LAMA2; (-) strand; PAM type: NRG; PAM sequence: TAG
tgaagaagcgaggtgagctg

SEQ ID NO: 79063 - DNA, 20 bp, Artificial Sequence
  Description of Artificial Sequence: Synthetic oligonucleotide
  Target: LAMA2; (-) strand; PAM type: NRG; PAM sequence: GAG
catgtttgaagaagcgaggt

SEQ ID NO: 79064 - DNA, 20 bp, Artificial Sequence
  Description of Artificial Sequence: Synthetic oligonucleotide
  Target: LAMA2; (-) strand; PAM type: NRG; PAM sequence: AGG
tgtacatgtttgaagaagcg

SEQ ID NO: 79065 - DNA, 20 bp, Artificial Sequence
  Description of Artificial Sequence: Synthetic oligonucleotide
  Target: LAMA2; (-) strand; PAM type: NRG; PAM sequence: GAG
ttgtacatgtttgaagaagc

SEQ ID NO: 79066 - DNA, 20 bp, Artificial Sequence
  Description of Artificial Sequence: Synthetic oligonucleotide
  Target: LAMA2; (-) strand; PAM type: NRG; PAM sequence: AAG
ctgattgtacatgtttgaag

SEQ ID NO: 79067 - DNA, 20 bp, Artificial Sequence
  Description of Artificial Sequence: Synthetic oligonucleotide
  Target: LAMA2; (-) strand; PAM type: NRG; PAM sequence: AAG
ggtctgattgtacatgtttg

SEQ ID NO: 79068 - DNA, 20 bp, Artificial Sequence
  Description of Artificial Sequence: Synthetic oligonucleotide
  Target: LAMA2; (-) strand; PAM type: NRG; PAM sequence: AGG
tgtggaatccacagattcag

SEQ ID NO: 79069 - DNA, 20 bp, Artificial Sequence
  Description of Artificial Sequence: Synthetic oligonucleotide
  Target: LAMA2; (-) strand; PAM type: NRG; PAM sequence: GAG
atgtggaatccacagattca

SEQ ID NO: 79070 - DNA, 20 bp, Artificial Sequence
  Description of Artificial Sequence: Synthetic oligonucleotide
  Target: LAMA2; (-) strand; PAM type: NRG; PAM sequence: CAG
ggatgtggaatccacagatt

SEQ ID NO: 79071 - DNA, 20 bp, Artificial Sequence
  Description of Artificial Sequence: Synthetic oligonucleotide
  Target: LAMA2; (-) strand; PAM type: NRG; PAM sequence: CAG
atccatggatgtggaatcca

SEQ ID NO: 79072 - DNA, 20 bp, Artificial Sequence
  Description of Artificial Sequence: Synthetic oligonucleotide
  Target: LAMA2; (-) strand; PAM type: NRG; PAM sequence: TGG
gtcagttgaatccatggatg

SEQ ID NO: 79073 - DNA, 20 bp, Artificial Sequence
  Description of Artificial Sequence: Synthetic oligonucleotide
  Target: LAMA2; (-) strand; PAM type: NRG; PAM sequence: TGG
tctgcagtcagttgaatcca

SEQ ID NO: 79074 - DNA, 20 bp, Artificial Sequence
  Description of Artificial Sequence: Synthetic oligonucleotide
  Target: LAMA2; (-) strand; PAM type: NRG; PAM sequence: CAG
taacatttttcttctgcagt

SEQ ID NO: 79075 - DNA, 20 bp, Artificial Sequence
  Description of Artificial Sequence: Synthetic oligonucleotide
  Target: LAMA2; (-) strand; PAM type: NRG; PAM sequence: CAG
tttctaacatttttcttctg

SEQ ID NO: 79076 - DNA, 20 bp, Artificial Sequence
  Description of Artificial Sequence: Synthetic oligonucleotide
  Target: LAMA2; (-) strand; PAM type: NRG; PAM sequence: CAG
gcacatgttcggtacagatg

SEQ ID NO: 79077 - DNA, 20 bp, Artificial Sequence
  Description of Artificial Sequence: Synthetic oligonucleotide
  Target: LAMA2; (-) strand; PAM type: NRG; PAM sequence: CAG
aagtctgcacatgttcggta

SEQ ID NO: 79078 - DNA, 20 bp, Artificial Sequence
  Description of Artificial Sequence: Synthetic oligonucleotide
  Target: LAMA2; (-) strand; PAM type: NRG; PAM sequence: CGG
gaaaaaagtctgcacatgtt

SEQ ID NO: 79079 - DNA, 20 bp, Artificial Sequence
  Description of Artificial Sequence: Synthetic oligonucleotide
  Target: LAMA2; (-) strand; PAM type: NRG; PAM sequence: AAG
agggaataatgacaagaaaa

SEQ ID NO: 79080 - DNA, 20 bp, Artificial Sequence
  Description of Artificial Sequence: Synthetic oligonucleotide
  Target: LAMA2; (-) strand; PAM type: NRG; PAM sequence: AAG
attatttagggaataatgac

SEQ ID NO: 79081 - DNA, 20 bp, Artificial Sequence
  Description of Artificial Sequence: Synthetic oligonucleotide
  Target: LAMA2; (-) strand; PAM type: NRG; PAM sequence: GGG
ttgttataccatattattta

SEQ ID NO: 79082 - DNA, 20 bp, Artificial Sequence
  Description of Artificial Sequence: Synthetic oligonucleotide
  Target: LAMA2; (-) strand; PAM type: NRG; PAM sequence: AGG
gttgttataccatattattt

SEQ ID NO: 79083 - DNA, 20 bp, Artificial Sequence
  Description of Artificial Sequence: Synthetic oligonucleotide
  Target: LAMA2; (-) strand; PAM type: NRG; PAM sequence: TAG
agttgttataccatattatt

SEQ ID NO: 79084 - DNA, 20 bp, Artificial Sequence
  Description of Artificial Sequence: Synthetic oligonucleotide
  Target: LAMA2; (-) strand; PAM type: NRG; PAM sequence: TAG
caatgtaaaggctatgtaaa

SEQ ID NO: 79085 - DNA, 20 bp, Artificial Sequence
  Description of Artificial Sequence: Synthetic oligonucleotide
  Target: LAMA2; (-) strand; PAM type: NRG; PAM sequence: AGG
aaatacccaatacaatgtaa

SEQ ID NO: 79086 - DNA, 20 bp, Artificial Sequence
  Description of Artificial Sequence: Synthetic oligonucleotide
  Target: LAMA2; (-) strand; PAM type: NRG; PAM sequence: AAG
taaatacccaatacaatgta

SEQ ID NO: 79087 - DNA, 20 bp, Artificial Sequence
  Description of Artificial Sequence: Synthetic oligonucleotide
  Target: LAMA2; (-) strand; PAM type: NRG; PAM sequence: TAG
gtccttgaaatgaaatggca

SEQ ID NO: 79088 - DNA, 20 bp, Artificial Sequence
  Description of Artificial Sequence: Synthetic oligonucleotide
  Target: LAMA2; (-) strand; PAM type: NRG; PAM sequence: TGG
ctcaagtccttgaaatgaaa

SEQ ID NO: 79089 - DNA, 20 bp, Artificial Sequence
  Description of Artificial Sequence: Synthetic oligonucleotide
  Target: LAMA2; (-) strand; PAM type: NRG; PAM sequence: AAG
atcaaaatctgaggatgctc

SEQ ID NO: 79090 - DNA, 20 bp, Artificial Sequence
  Description of Artificial Sequence: Synthetic oligonucleotide
  Target: LAMA2; (-) strand; PAM type: NRG; PAM sequence: AGG
cctgtggatatcaaaatctg

SEQ ID NO: 79091 - DNA, 20 bp, Artificial Sequence
  Description of Artificial Sequence: Synthetic oligonucleotide
  Target: LAMA2; (-) strand; PAM type: NRG; PAM sequence: GAG
tcctgtggatatcaaaatct

SEQ ID NO: 79092 - DNA, 20 bp, Artificial Sequence
  Description of Artificial Sequence: Synthetic oligonucleotide
  Target: LAMA2; (-) strand; PAM type: NRG; PAM sequence: TGG
attggttccaggacctcctg

SEQ ID NO: 79093 - DNA, 20 bp, Artificial Sequence
  Description of Artificial Sequence: Synthetic oligonucleotide
  Target: LAMA2; (-) strand; PAM type: NRG; PAM sequence: AGG
gatttgtggggattggttcc

SEQ ID NO: 79094 - DNA, 20 bp, Artificial Sequence
  Description of Artificial Sequence: Synthetic oligonucleotide
  Target: LAMA2; (-) strand; PAM type: NRG; PAM sequence: CAG
ggatttgtggggattggttc

SEQ ID NO: 79095 - DNA, 20 bp, Artificial Sequence
  Description of Artificial Sequence: Synthetic oligonucleotide
  Target: LAMA2; (-) strand; PAM type: NRG; PAM sequence: TGG
ttcaggggatttgtggggat

SEQ ID NO: 79096 - DNA, 20 bp, Artificial Sequence
  Description of Artificial Sequence: Synthetic oligonucleotide
  Target: LAMA2; (-) strand; PAM type: NRG; PAM sequence: GGG
atagtttcaggggatttgtg

SEQ ID NO: 79097 - DNA, 20 bp, Artificial Sequence
  Description of Artificial Sequence: Synthetic oligonucleotide
  Target: LAMA2; (-) strand; PAM type: NRG; PAM sequence: GGG
tatagtttcaggggatttgt

SEQ ID NO: 79098 - DNA, 20 bp, Artificial Sequence
  Description of Artificial Sequence: Synthetic oligonucleotide
  Target: LAMA2; (-) strand; PAM type: NRG; PAM sequence: TGG
ttatagtttcaggggatttg

SEQ ID NO: 79099 - DNA, 20 bp, Artificial Sequence
  Description of Artificial Sequence: Synthetic oligonucleotide
  Target: LAMA2; (-) strand; PAM type: NRG; PAM sequence: GGG
ctcatcagttatagtttcag

SEQ ID NO: 79100 - DNA, 20 bp, Artificial Sequence
  Description of Artificial Sequence: Synthetic oligonucleotide
  Target: LAMA2; (-) strand; PAM type: NRG; PAM sequence: GGG
cctcatcagttatagtttca

SEQ ID NO: 79101 - DNA, 20 bp, Artificial Sequence
  Description of Artificial Sequence: Synthetic oligonucleotide
  Target: LAMA2; (-) strand; PAM type: NRG; PAM sequence: AGG
ccctcatcagttatagtttc

SEQ ID NO: 79102 - DNA, 20 bp, Artificial Sequence
  Description of Artificial Sequence: Synthetic oligonucleotide
  Target: LAMA2; (-) strand; PAM type: NRG; PAM sequence: CAG
cccctcatcagttatagttt

SEQ ID NO: 79103 - DNA, 20 bp, Artificial Sequence
  Description of Artificial Sequence: Synthetic oligonucleotide
  Target: LAMA2; (-) strand; PAM type: NRG; PAM sequence: TAG
ccatcacccctcatcagtta

SEQ ID NO: 79104 - DNA, 20 bp, Artificial Sequence
  Description of Artificial Sequence: Synthetic oligonucleotide
  Target: LAMA2; (-) strand; PAM type: NRG; PAM sequence: CAG
gaagtaccatcacccctcat

SEQ ID NO: 79105 - DNA, 20 bp, Artificial Sequence
  Description of Artificial Sequence: Synthetic oligonucleotide
  Target: LAMA2; (-) strand; PAM type: NRG; PAM sequence: AAG
ttttgactgtgtaaaaaaag

SEQ ID NO: 79106 - DNA, 20 bp, Artificial Sequence
  Description of Artificial Sequence: Synthetic oligonucleotide
  Target: LAMA2; (-) strand; PAM type: NRG; PAM sequence: AAG
ttattttgactgtgtaaaaa

SEQ ID NO: 79107 - DNA, 20 bp, Artificial Sequence
  Description of Artificial Sequence: Synthetic oligonucleotide
  Target: LAMA2; (-) strand; PAM type: NRG; PAM sequence: AAG
tggggagaaataacaaaaac

SEQ ID NO: 79108 - DNA, 20 bp, Artificial Sequence
  Description of Artificial Sequence: Synthetic oligonucleotide
  Target: LAMA2; (-) strand; PAM type: NRG; PAM sequence: GAG
tcaatatggcattatttggg

SEQ ID NO: 79109 - DNA, 20 bp, Artificial Sequence
  Description of Artificial Sequence: Synthetic oligonucleotide
  Target: LAMA2; (-) strand; PAM type: NRG; PAM sequence: GGG
gctcaatatggcattatttg

SEQ ID NO: 79110 - DNA, 20 bp, Artificial Sequence
  Description of Artificial Sequence: Synthetic oligonucleotide
  Target: LAMA2; (-) strand; PAM type: NRG; PAM sequence: GGG
tgctcaatatggcattattt

SEQ ID NO: 79111 - DNA, 20 bp, Artificial Sequence
  Description of Artificial Sequence: Synthetic oligonucleotide
  Target: LAMA2; (-) strand; PAM type: NRG; PAM sequence: TGG
atgctcaatatggcattatt

SEQ ID NO: 79112 - DNA, 20 bp, Artificial Sequence
  Description of Artificial Sequence: Synthetic oligonucleotide
  Target: LAMA2; (-) strand; PAM type: NRG; PAM sequence: TGG
aaatccagtcatgctcaata

SEQ ID NO: 79113 - DNA, 20 bp, Artificial Sequence
  Description of Artificial Sequence: Synthetic oligonucleotide
  Target: LAMA2; (-) strand; PAM type: NRG; PAM sequence: CAG
atctggggacctcttaaatc

SEQ ID NO: 79114 - DNA, 20 bp, Artificial Sequence
  Description of Artificial Sequence: Synthetic oligonucleotide
  Target: LAMA2; (-) strand; PAM type: NRG; PAM sequence: GGG
atgagtggctgagacatctg

SEQ ID NO: 79115 - DNA, 20 bp, Artificial Sequence
  Description of Artificial Sequence: Synthetic oligonucleotide
  Target: LAMA2; (-) strand; PAM type: NRG; PAM sequence: GGG
aatgagtggctgagacatct

SEQ ID NO: 79116 - DNA, 20 bp, Artificial Sequence
  Description of Artificial Sequence: Synthetic oligonucleotide
  Target: LAMA2; (-) strand; PAM type: NRG; PAM sequence: TGG
aaatgagtggctgagacatc

SEQ ID NO: 79117 - DNA, 20 bp, Artificial Sequence
  Description of Artificial Sequence: Synthetic oligonucleotide
  Target: LAMA2; (-) strand; PAM type: NRG; PAM sequence: GAG
ttttatgtaaatgagtggct

SEQ ID NO: 79118 - DNA, 20 bp, Artificial Sequence
  Description of Artificial Sequence: Synthetic oligonucleotide
  Target: LAMA2; (-) strand; PAM type: NRG; PAM sequence: TGG
agaatttttatgtaaatgag

SEQ ID NO: 79119 - DNA, 20 bp, Artificial Sequence
  Description of Artificial Sequence: Synthetic oligonucleotide
  Target: LAMA2; (-) strand; PAM type: NRG; PAM sequence: GAG
caaagaatttttatgtaaat

SEQ ID NO: 79120 - DNA, 20 bp, Artificial Sequence
  Description of Artificial Sequence: Synthetic oligonucleotide
  Target: LAMA2; (-) strand; PAM type: NRG; PAM sequence: AAG
aggatgtacagatatggaca

SEQ ID NO: 79121 - DNA, 20 bp, Artificial Sequence
  Description of Artificial Sequence: Synthetic oligonucleotide
  Target: LAMA2; (-) strand; PAM type: NRG; PAM sequence: TGG
agattaaggatgtacagata

SEQ ID NO: 79122 - DNA, 20 bp, Artificial Sequence
  Description of Artificial Sequence: Synthetic oligonucleotide
  Target: LAMA2; (-) strand; PAM type: NRG; PAM sequence: CAG
agcttgagattaaggatgta

SEQ ID NO: 79123 - DNA, 20 bp, Artificial Sequence
  Description of Artificial Sequence: Synthetic oligonucleotide
  Target: LAMA2; (-) strand; PAM type: NRG; PAM sequence: AGG
atatgtgtagcttgagatta

SEQ ID NO: 79124 - DNA, 20 bp, Artificial Sequence
  Description of Artificial Sequence: Synthetic oligonucleotide
  Target: LAMA2; (-) strand; PAM type: NRG; PAM sequence: AAG
catatgtgtagcttgagatt

SEQ ID NO: 79125 - DNA, 20 bp, Artificial Sequence
  Description of Artificial Sequence: Synthetic oligonucleotide
  Target: LAMA2; (-) strand; PAM type: NRG; PAM sequence: GAG
taaatccatatgtgtagctt

SEQ ID NO: 79126 - DNA, 20 bp, Artificial Sequence
  Description of Artificial Sequence: Synthetic oligonucleotide
  Target: LAMA2; (-) strand; PAM type: NRG; PAM sequence: TAG
gaacagtaaatccatatgtg

SEQ ID NO: 79127 - DNA, 20 bp, Artificial Sequence
  Description of Artificial Sequence: Synthetic oligonucleotide
  Target: LAMA2; (-) strand; PAM type: NRG; PAM sequence: CAG
gctgacaccaggagacagaa

SEQ ID NO: 79128 - DNA, 20 bp, Artificial Sequence
  Description of Artificial Sequence: Synthetic oligonucleotide
  Target: LAMA2; (-) strand; PAM type: NRG; PAM sequence: CAG
agtaagctgacaccaggaga

SEQ ID NO: 79129 - DNA, 20 bp, Artificial Sequence
  Description of Artificial Sequence: Synthetic oligonucleotide
  Target: LAMA2; (-) strand; PAM type: NRG; PAM sequence: GAG
tgaaagtaagctgacaccag

SEQ ID NO: 79130 - DNA, 20 bp, Artificial Sequence
  Description of Artificial Sequence: Synthetic oligonucleotide
  Target: LAMA2; (-) strand; PAM type: NRG; PAM sequence: AGG
attgaaagtaagctgacacc

SEQ ID NO: 79131 - DNA, 20 bp, Artificial Sequence
  Description of Artificial Sequence: Synthetic oligonucleotide
  Target: LAMA2; (-) strand; PAM type: NRG; PAM sequence: CAG
aattgaaagtaagctgacac

SEQ ID NO: 79132 - DNA, 20 bp, Artificial Sequence
  Description of Artificial Sequence: Synthetic oligonucleotide
  Target: LAMA2; (-) strand; PAM type: NRG; PAM sequence: AAG
aggtaaaacaaattgaaagt

SEQ ID NO: 79133 - DNA, 20 bp, Artificial Sequence
  Description of Artificial Sequence: Synthetic oligonucleotide
  Target: LAMA2; (-) strand; PAM type: NRG; PAM sequence: AAG
aaacaggtaaaacaaattga

SEQ ID NO: 79134 - DNA, 20 bp, Artificial Sequence
  Description of Artificial Sequence: Synthetic oligonucleotide
  Target: LAMA2; (-) strand; PAM type: NRG; PAM sequence: AGG
tacaagtgtgccaatgaaac

SEQ ID NO: 79135 - DNA, 20 bp, Artificial Sequence
  Description of Artificial Sequence: Synthetic oligonucleotide
  Target: LAMA2; (-) strand; PAM type: NRG; PAM sequence: CAG
ctacaagtgtgccaatgaaa

SEQ ID NO: 79136 - DNA, 20 bp, Artificial Sequence
  Description of Artificial Sequence: Synthetic oligonucleotide
  Target: LAMA2; (-) strand; PAM type: NRG; PAM sequence: AAG
tttgtattatcaatctctac

SEQ ID NO: 79137 - DNA, 20 bp, Artificial Sequence
  Description of Artificial Sequence: Synthetic oligonucleotide
  Target: LAMA2; (-) strand; PAM type: NRG; PAM sequence: TGG
gaagttgacaacttgatgtg

SEQ ID NO: 79138 - DNA, 20 bp, Artificial Sequence
  Description of Artificial Sequence: Synthetic oligonucleotide
  Target: LAMA2; (-) strand; PAM type: NRG; PAM sequence: AAG
ataagtagcagaagtggatg

SEQ ID NO: 79139 - DNA, 20 bp, Artificial Sequence
  Description of Artificial Sequence: Synthetic oligonucleotide
  Target: LAMA2; (-) strand; PAM type: NRG; PAM sequence: TGG
tttgaaataagtagcagaag

SEQ ID NO: 79140 - DNA, 20 bp, Artificial Sequence
  Description of Artificial Sequence: Synthetic oligonucleotide
  Target: LAMA2; (-) strand; PAM type: NRG; PAM sequence: AAG
aactttgaaataagtagcag

SEQ ID NO: 79141 - DNA, 20 bp, Artificial Sequence
  Description of Artificial Sequence: Synthetic oligonucleotide
  Target: LAMA2; (-) strand; PAM type: NRG; PAM sequence: CAG
agaaactttgaaataagtag

SEQ ID NO: 79142 - DNA, 20 bp, Artificial Sequence
  Description of Artificial Sequence: Synthetic oligonucleotide
  Target: LAMA2; (-) strand; PAM type: NRG; PAM sequence: TAG
atcagaaactttgaaataag

SEQ ID NO: 79143 - DNA, 20 bp, Artificial Sequence
  Description of Artificial Sequence: Synthetic oligonucleotide
  Target: LAMA2; (-) strand; PAM type: NRG; PAM sequence: AAG
agtatcagaaactttgaaat

SEQ ID NO: 79144 - DNA, 20 bp, Artificial Sequence
  Description of Artificial Sequence: Synthetic oligonucleotide
  Target: LAMA2; (-) strand; PAM type: NRG; PAM sequence: CAG
gaaagatcatgaataagtat

SEQ ID NO: 79145 - DNA, 20 bp, Artificial Sequence
  Description of Artificial Sequence: Synthetic oligonucleotide
  Target: LAMA2; (-) strand; PAM type: NRG; PAM sequence: AAG
gctactgaaagatcatgaat

SEQ ID NO: 79146 - DNA, 20 bp, Artificial Sequence
  Description of Artificial Sequence: Synthetic oligonucleotide
  Target: LAMA2; (-) strand; PAM type: NRG; PAM sequence: AAG
gggagaatgaaggctactga

SEQ ID NO: 79147 - DNA, 20 bp, Artificial Sequence
  Description of Artificial Sequence: Synthetic oligonucleotide
  Target: LAMA2; (-) strand; PAM type: NRG; PAM sequence: AGG
atggatggatgggagaatga

SEQ ID NO: 79148 - DNA, 20 bp, Artificial Sequence
  Description of Artificial Sequence: Synthetic oligonucleotide
  Target: LAMA2; (-) strand; PAM type: NRG; PAM sequence: AAG
aatggatggatgggagaatg

SEQ ID NO: 79149 - DNA, 20 bp, Artificial Sequence
  Description of Artificial Sequence: Synthetic oligonucleotide
  Target: LAMA2; (-) strand; PAM type: NRG; PAM sequence: GAG
ttgagtgaatggatggatgg

SEQ ID NO: 79150 - DNA, 20 bp, Artificial Sequence
  Description of Artificial Sequence: Synthetic oligonucleotide
  Target: LAMA2; (-) strand; PAM type: NRG; PAM sequence: GGG
tcttgagtgaatggatggat

SEQ ID NO: 79151 - DNA, 20 bp, Artificial Sequence
  Description of Artificial Sequence: Synthetic oligonucleotide
  Target: LAMA2; (-) strand; PAM type: NRG; PAM sequence: TGG
ttcttgagtgaatggatgga

SEQ ID NO: 79152 - DNA, 20 bp, Artificial Sequence
  Description of Artificial Sequence: Synthetic oligonucleotide
  Target: LAMA2; (-) strand; PAM type: NRG; PAM sequence: TGG
aagtttcttgagtgaatgga

SEQ ID NO: 79153 - DNA, 20 bp, Artificial Sequence
  Description of Artificial Sequence: Synthetic oligonucleotide
  Target: LAMA2; (-) strand; PAM type: NRG; PAM sequence: TGG
atacaagtttcttgagtgaa

SEQ ID NO: 79154 - DNA, 20 bp, Artificial Sequence
  Description of Artificial Sequence: Synthetic oligonucleotide
  Target: LAMA2; (-) strand; PAM type: NRG; PAM sequence: GAG
cctaacaatacaagtttctt

SEQ ID NO: 79155 - DNA, 20 bp, Artificial Sequence
  Description of Artificial Sequence: Synthetic oligonucleotide
  Target: LAMA2; (-) strand; PAM type: NRG; PAM sequence: AAG
aatacattccctaacaatac

SEQ ID NO: 79156 - DNA, 20 bp, Artificial Sequence
  Description of Artificial Sequence: Synthetic oligonucleotide
  Target: LAMA2; (-) strand; PAM type: NRG; PAM sequence: GAG
tttgttttggaaagcttgaa

SEQ ID NO: 79157 - DNA, 20 bp, Artificial Sequence
  Description of Artificial Sequence: Synthetic oligonucleotide
  Target: LAMA2; (-) strand; PAM type: NRG; PAM sequence: AAG
catttgttttggaaagcttg

SEQ ID NO: 79158 - DNA, 20 bp, Artificial Sequence
  Description of Artificial Sequence: Synthetic oligonucleotide
  Target: LAMA2; (-) strand; PAM type: NRG; PAM sequence: AAG
gttgctacatttgttttgga

SEQ ID NO: 79159 - DNA, 20 bp, Artificial Sequence
  Description of Artificial Sequence: Synthetic oligonucleotide
  Target: LAMA2; (-) strand; PAM type: NRG; PAM sequence: TGG
ttatgttgctacatttgttt

SEQ ID NO: 79160 - DNA, 20 bp, Artificial Sequence
  Description of Artificial Sequence: Synthetic oligonucleotide
  Target: LAMA2; (-) strand; PAM type: NRG; PAM sequence: TAG
aaataattagatttctcgta

SEQ ID NO: 79161 - DNA, 20 bp, Artificial Sequence
  Description of Artificial Sequence: Synthetic oligonucleotide
  Target: LAMA2; (-) strand; PAM type: NRG; PAM sequence: TAG
tgatttgtgcctaaaataat

SEQ ID NO: 79162 - DNA, 20 bp, Artificial Sequence
  Description of Artificial Sequence: Synthetic oligonucleotide
  Target: LAMA2; (-) strand; PAM type: NRG; PAM sequence: TAG
cctcaatggcatttttattt

SEQ ID NO: 79163 - DNA, 20 bp, Artificial Sequence
  Description of Artificial Sequence: Synthetic oligonucleotide
  Target: LAMA2; (-) strand; PAM type: NRG; PAM sequence: TGG
gtaagacctctgtgcctcaa

SEQ ID NO: 79164 - DNA, 20 bp, Artificial Sequence
  Description of Artificial Sequence: Synthetic oligonucleotide
  Target: LAMA2; (-) strand; PAM type: NRG; PAM sequence: AAG
tgtttgctttacagattagt

SEQ ID NO: 79165 - DNA, 20 bp, Artificial Sequence
  Description of Artificial Sequence: Synthetic oligonucleotide
  Target: LAMA2; (-) strand; PAM type: NRG; PAM sequence: TAG
atcatgtttgctttacagat

SEQ ID NO: 79166 - DNA, 20 bp, Artificial Sequence
  Description of Artificial Sequence: Synthetic oligonucleotide
  Target: LAMA2; (-) strand; PAM type: NRG; PAM sequence: CAG
tataaatcatgtttgcttta

SEQ ID NO: 79167 - DNA, 20 bp, Artificial Sequence
  Description of Artificial Sequence: Synthetic oligonucleotide
  Target: LAMA2; (-) strand; PAM type: NRG; PAM sequence: AAG
taatcctgatttactaatgt

SEQ ID NO: 79168 - DNA, 20 bp, Artificial Sequence
  Description of Artificial Sequence: Synthetic oligonucleotide
  Target: LAMA2; (-) strand; PAM type: NRG; PAM sequence: CAG
taaagggggggaaaccttat

SEQ ID NO: 79169 - DNA, 20 bp, Artificial Sequence
  Description of Artificial Sequence: Synthetic oligonucleotide
  Target: LAMA2; (-) strand; PAM type: NRG; PAM sequence: GGG
ttccaaggcaaataaagggg

SEQ ID NO: 79170 - DNA, 20 bp, Artificial Sequence
  Description of Artificial Sequence: Synthetic oligonucleotide
  Target: LAMA2; (-) strand; PAM type: NRG; PAM sequence: GGG
tttccaaggcaaataaaggg

SEQ ID NO: 79171 - DNA, 20 bp, Artificial Sequence
  Description of Artificial Sequence: Synthetic oligonucleotide
  Target: LAMA2; (-) strand; PAM type: NRG; PAM sequence: GGG
ttttccaaggcaaataaagg

SEQ ID NO: 79172 - DNA, 20 bp, Artificial Sequence
  Description of Artificial Sequence: Synthetic oligonucleotide
  Target: LAMA2; (-) strand; PAM type: NRG; PAM sequence: GGG
gttttccaaggcaaataaag

SEQ ID NO: 79173 - DNA, 20 bp, Artificial Sequence
  Description of Artificial Sequence: Synthetic oligonucleotide
  Target: LAMA2; (-) strand; PAM type: NRG; PAM sequence: GGG
tgttttccaaggcaaataaa

SEQ ID NO: 79174 - DNA, 20 bp, Artificial Sequence
  Description of Artificial Sequence: Synthetic oligonucleotide
  Target: LAMA2; (-) strand; PAM type: NRG; PAM sequence: AGG
ttgttttccaaggcaaataa

SEQ ID NO: 79175 - DNA, 20 bp, Artificial Sequence
  Description of Artificial Sequence: Synthetic oligonucleotide
  Target: LAMA2; (-) strand; PAM type: NRG; PAM sequence: AAG
tttgttttccaaggcaaata

SEQ ID NO: 79176 - DNA, 20 bp, Artificial Sequence
  Description of Artificial Sequence: Synthetic oligonucleotide
  Target: LAMA2; (-) strand; PAM type: NRG; PAM sequence: AGG
tctttgaaatttgttttcca

SEQ ID NO: 79177 - DNA, 20 bp, Artificial Sequence
  Description of Artificial Sequence: Synthetic oligonucleotide
  Target: LAMA2; (-) strand; PAM type: NRG; PAM sequence: AAG
ttctttgaaatttgttttcc

SEQ ID NO: 79178 - DNA, 20 bp, Artificial Sequence
  Description of Artificial Sequence: Synthetic oligonucleotide
  Target: LAMA2; (-) strand; PAM type: NRG; PAM sequence: GAG
ggttatcaactggtttttta

SEQ ID NO: 79179 - DNA, 20 bp, Artificial Sequence
  Description of Artificial Sequence: Synthetic oligonucleotide
  Target: LAMA2; (-) strand; PAM type: NRG; PAM sequence: TAG
atggttatcaactggttttt

SEQ ID NO: 79180 - DNA, 20 bp, Artificial Sequence
  Description of Artificial Sequence: Synthetic oligonucleotide
  Target: LAMA2; (-) strand; PAM type: NRG; PAM sequence: TGG
atcagactatggttatcaac

SEQ ID NO: 79181 - DNA, 20 bp, Artificial Sequence
  Description of Artificial Sequence: Synthetic oligonucleotide
  Target: LAMA2; (-) strand; PAM type: NRG; PAM sequence: TGG
caactgcaaatatcagacta

SEQ ID NO: 79182 - DNA, 20 bp, Artificial Sequence
  Description of Artificial Sequence: Synthetic oligonucleotide
  Target: LAMA2; (-) strand; PAM type: NRG; PAM sequence: CAG
ttcattccaactgcaaatat

SEQ ID NO: 79183 - DNA, 20 bp, Artificial Sequence
  Description of Artificial Sequence: Synthetic oligonucleotide
  Target: LAMA2; (-) strand; PAM type: NRG; PAM sequence: AGG
gtgtatgttcatgctgtcac

SEQ ID NO: 79184 - DNA, 20 bp, Artificial Sequence
  Description of Artificial Sequence: Synthetic oligonucleotide
  Target: LAMA2; (-) strand; PAM type: NRG; PAM sequence: CAG
ggtgtatgttcatgctgtca

SEQ ID NO: 79185 - DNA, 20 bp, Artificial Sequence
  Description of Artificial Sequence: Synthetic oligonucleotide
  Target: LAMA2; (-) strand; PAM type: NRG; PAM sequence: GGG
tctattacagacatgttggt

SEQ ID NO: 79186 - DNA, 20 bp, Artificial Sequence
  Description of Artificial Sequence: Synthetic oligonucleotide
  Target: LAMA2; (-) strand; PAM type: NRG; PAM sequence: TGG
ttctattacagacatgttgg

SEQ ID NO: 79187 - DNA, 20 bp, Artificial Sequence
  Description of Artificial Sequence: Synthetic oligonucleotide
  Target: LAMA2; (-) strand; PAM type: NRG; PAM sequence: TGG
ggtttctattacagacatgt

SEQ ID NO: 79188 - DNA, 20 bp, Artificial Sequence
  Description of Artificial Sequence: Synthetic oligonucleotide
  Target: LAMA2; (-) strand; PAM type: NRG; PAM sequence: CAG
ttccaaagtggtttctatta

SEQ ID NO: 79189 - DNA, 20 bp, Artificial Sequence
  Description of Artificial Sequence: Synthetic oligonucleotide
  Target: LAMA2; (-) strand; PAM type: NRG; PAM sequence: TGG
gcctctagtgtcttccaaag

SEQ ID NO: 79190 - DNA, 20 bp, Artificial Sequence
  Description of Artificial Sequence: Synthetic oligonucleotide
  Target: LAMA2; (-) strand; PAM type: NRG; PAM sequence: AAG
gcagcctctagtgtcttcca

SEQ ID NO: 79191 - DNA, 20 bp, Artificial Sequence
  Description of Artificial Sequence: Synthetic oligonucleotide
  Target: LAMA2; (-) strand; PAM type: NRG; PAM sequence: TAG
gagaaatctgtggcagcctc

SEQ ID NO: 79192 - DNA, 20 bp, Artificial Sequence
  Description of Artificial Sequence: Synthetic oligonucleotide
  Target: LAMA2; (-) strand; PAM type: NRG; PAM sequence: CAG
aggacctgagaaatctgtgg

SEQ ID NO: 79193 - DNA, 20 bp, Artificial Sequence
  Description of Artificial Sequence: Synthetic oligonucleotide
  Target: LAMA2; (-) strand; PAM type: NRG; PAM sequence: TGG
gtgaggacctgagaaatctg

SEQ ID NO: 79194 - DNA, 20 bp, Artificial Sequence
  Description of Artificial Sequence: Synthetic oligonucleotide
  Target: LAMA2; (-) strand; PAM type: NRG; PAM sequence: GAG
ctgtcttgctgtgaggacct

SEQ ID NO: 79195 - DNA, 20 bp, Artificial Sequence
  Description of Artificial Sequence: Synthetic oligonucleotide
  Target: LAMA2; (-) strand; PAM type: NRG; PAM sequence: AGG
accaccactgtcttgctgtg

SEQ ID NO: 79196 - DNA, 20 bp, Artificial Sequence
  Description of Artificial Sequence: Synthetic oligonucleotide
  Target: LAMA2; (-) strand; PAM type: NRG; PAM sequence: GAG
gaccaccactgtcttgctgt

SEQ ID NO: 79197 - DNA, 20 bp, Artificial Sequence
  Description of Artificial Sequence: Synthetic oligonucleotide
  Target: LAMA2; (-) strand; PAM type: NRG; PAM sequence: AAG
gatgaaatgtatccatcccc

SEQ ID NO: 79198 - DNA, 20 bp, Artificial Sequence
  Description of Artificial Sequence: Synthetic oligonucleotide
  Target: LAMA2; (-) strand; PAM type: NRG; PAM sequence: AAG
ggtggtatctgtcttcaagg

SEQ ID NO: 79199 - DNA, 20 bp, Artificial Sequence
  Description of Artificial Sequence: Synthetic oligonucleotide
  Target: LAMA2; (-) strand; PAM type: NRG; PAM sequence: AGG
gagggtggtatctgtcttca

SEQ ID NO: 79200 - DNA, 20 bp, Artificial Sequence
  Description of Artificial Sequence: Synthetic oligonucleotide
  Target: LAMA2; (-) strand; PAM type: NRG; PAM sequence: AAG
agagggtggtatctgtcttc

SEQ ID NO: 79201 - DNA, 20 bp, Artificial Sequence
  Description of Artificial Sequence: Synthetic oligonucleotide
  Target: LAMA2; (-) strand; PAM type: NRG; PAM sequence: TGG
atggggtgacagccagaggg

SEQ ID NO: 79202 - DNA, 20 bp, Artificial Sequence
  Description of Artificial Sequence: Synthetic oligonucleotide
  Target: LAMA2; (-) strand; PAM type: NRG; PAM sequence: GGG
cctatggggtgacagccaga

SEQ ID NO: 79203 - DNA, 20 bp, Artificial Sequence
  Description of Artificial Sequence: Synthetic oligonucleotide
  Target: LAMA2; (-) strand; PAM type: NRG; PAM sequence: AGG
tcctatggggtgacagccag

SEQ ID NO: 79204 - DNA, 20 bp, Artificial Sequence
  Description of Artificial Sequence: Synthetic oligonucleotide
  Target: LAMA2; (-) strand; PAM type: NRG; PAM sequence: GAG
ttcctatggggtgacagcca

SEQ ID NO: 79205 - DNA, 20 bp, Artificial Sequence
  Description of Artificial Sequence: Synthetic oligonucleotide
  Target: LAMA2; (-) strand; PAM type: NRG; PAM sequence: CAG
atttcctatggggtgacagc

SEQ ID NO: 79206 - DNA, 20 bp, Artificial Sequence
  Description of Artificial Sequence: Synthetic oligonucleotide
  Target: LAMA2; (-) strand; PAM type: NRG; PAM sequence: CAG
cctgatttcctatggggtga

SEQ ID NO: 79207 - DNA, 20 bp, Artificial Sequence
  Description of Artificial Sequence: Synthetic oligonucleotide
  Target: LAMA2; (-) strand; PAM type: NRG; PAM sequence: GGG
atacttcctgatttcctatg

SEQ ID NO: 79208 - DNA, 20 bp, Artificial Sequence
  Description of Artificial Sequence: Synthetic oligonucleotide
  Target: LAMA2; (-) strand; PAM type: NRG; PAM sequence: GGG
catacttcctgatttcctat

SEQ ID NO: 79209 - DNA, 20 bp, Artificial Sequence
  Description of Artificial Sequence: Synthetic oligonucleotide
  Target: LAMA2; (-) strand; PAM type: NRG; PAM sequence: TGG
gcatacttcctgatttccta

SEQ ID NO: 79210 - DNA, 20 bp, Artificial Sequence
  Description of Artificial Sequence: Synthetic oligonucleotide
  Target: LAMA2; (-) strand; PAM type: NRG; PAM sequence: TAG
tccaagtccactggatagct

SEQ ID NO: 79211 - DNA, 20 bp, Artificial Sequence
  Description of Artificial Sequence: Synthetic oligonucleotide
  Target: LAMA2; (-) strand; PAM type: NRG; PAM sequence: TAG
gtaattccaagtccactgga

SEQ ID NO: 79212 - DNA, 20 bp, Artificial Sequence
  Description of Artificial Sequence: Synthetic oligonucleotide
  Target: LAMA2; (-) strand; PAM type: NRG; PAM sequence: TGG
cagtgtaattccaagtccac

SEQ ID NO: 79213 - DNA, 20 bp, Artificial Sequence
  Description of Artificial Sequence: Synthetic oligonucleotide
  Target: LAMA2; (-) strand; PAM type: NRG; PAM sequence: AAG
gcacagcacagtgtaattcc

SEQ ID NO: 79214 - DNA, 20 bp, Artificial Sequence
  Description of Artificial Sequence: Synthetic oligonucleotide
  Target: LAMA2; (-) strand; PAM type: NRG; PAM sequence: CAG
atatttccactagcacagca

SEQ ID NO: 79215 - DNA, 20 bp, Artificial Sequence
  Description of Artificial Sequence: Synthetic oligonucleotide
  Target: LAMA2; (-) strand; PAM type: NRG; PAM sequence: CAG
ataggatatttccactagca

SEQ ID NO: 79216 - DNA, 20 bp, Artificial Sequence
  Description of Artificial Sequence: Synthetic oligonucleotide
  Target: LAMA2; (-) strand; PAM type: NRG; PAM sequence: TAG
gttggataggatatttccac

SEQ ID NO: 79217 - DNA, 20 bp, Artificial Sequence
  Description of Artificial Sequence: Synthetic oligonucleotide
  Target: LAMA2; (-) strand; PAM type: NRG; PAM sequence: AGG
aataaatcataatgttggat

SEQ ID NO: 79218 - DNA, 20 bp, Artificial Sequence
  Description of Artificial Sequence: Synthetic oligonucleotide
  Target: LAMA2; (-) strand; PAM type: NRG; PAM sequence: TAG
aaataaatcataatgttgga

SEQ ID NO: 79219 - DNA, 20 bp, Artificial Sequence
  Description of Artificial Sequence: Synthetic oligonucleotide
  Target: LAMA2; (-) strand; PAM type: NRG; PAM sequence: TGG
ttcaaaataaatcataatgt

SEQ ID NO: 79220 - DNA, 20 bp, Artificial Sequence
  Description of Artificial Sequence: Synthetic oligonucleotide
  Target: LAMA2; (-) strand; PAM type: NRG; PAM sequence: CAG
ctgtttggcgatgttgtgtg

SEQ ID NO: 79221 - DNA, 20 bp, Artificial Sequence
  Description of Artificial Sequence: Synthetic oligonucleotide
  Target: LAMA2; (-) strand; PAM type: NRG; PAM sequence: TGG
tataaaacaagccagctgtt

SEQ ID NO: 79222 - DNA, 20 bp, Artificial Sequence
  Description of Artificial Sequence: Synthetic oligonucleotide
  Target: LAMA2; (-) strand; PAM type: NRG; PAM sequence: CAG
ttctgggatataaaacaagc

SEQ ID NO: 79223 - DNA, 20 bp, Artificial Sequence
  Description of Artificial Sequence: Synthetic oligonucleotide
  Target: LAMA2; (-) strand; PAM type: NRG; PAM sequence: AAG
ctgtttctgggatataaaac

SEQ ID NO: 79224 - DNA, 20 bp, Artificial Sequence
  Description of Artificial Sequence: Synthetic oligonucleotide
  Target: LAMA2; (-) strand; PAM type: NRG; PAM sequence: GGG
gttagtcccaagctgtttct

SEQ ID NO: 79225 - DNA, 20 bp, Artificial Sequence
  Description of Artificial Sequence: Synthetic oligonucleotide
  Target: LAMA2; (-) strand; PAM type: NRG; PAM sequence: TGG
agttagtcccaagctgtttc

SEQ ID NO: 79226 - DNA, 20 bp, Artificial Sequence
  Description of Artificial Sequence: Synthetic oligonucleotide
  Target: LAMA2; (-) strand; PAM type: NRG; PAM sequence: AAG
ttgtgaatatagttagtccc

SEQ ID NO: 79227 - DNA, 20 bp, Artificial Sequence
  Description of Artificial Sequence: Synthetic oligonucleotide
  Target: LAMA2; (-) strand; PAM type: NRG; PAM sequence: TAG
agagatcttgtgaatatagt

SEQ ID NO: 79228 - DNA, 20 bp, Artificial Sequence
  Description of Artificial Sequence: Synthetic oligonucleotide
  Target: LAMA2; (-) strand; PAM type: NRG; PAM sequence: TAG
gccaagagatcttgtgaata

SEQ ID NO: 79229 - DNA, 20 bp, Artificial Sequence
  Description of Artificial Sequence: Synthetic oligonucleotide
  Target: LAMA2; (-) strand; PAM type: NRG; PAM sequence: GAG
tcatcaagctactctgccaa

SEQ ID NO: 79230 - DNA, 20 bp, Artificial Sequence
  Description of Artificial Sequence: Synthetic oligonucleotide
  Target: LAMA2; (-) strand; PAM type: NRG; PAM sequence: AAG
tttcatcaagctactctgcc

SEQ ID NO: 79231 - DNA, 20 bp, Artificial Sequence
  Description of Artificial Sequence: Synthetic oligonucleotide
  Target: LAMA2; (-) strand; PAM type: NRG; PAM sequence: AAG
acagctttggtattttcatc

SEQ ID NO: 79232 - DNA, 20 bp, Artificial Sequence
  Description of Artificial Sequence: Synthetic oligonucleotide
  Target: LAMA2; (-) strand; PAM type: NRG; PAM sequence: TGG
aagaacacttctcacagctt

SEQ ID NO: 79233 - DNA, 20 bp, Artificial Sequence
  Description of Artificial Sequence: Synthetic oligonucleotide
  Target: LAMA2; (-) strand; PAM type: NRG; PAM sequence: CAG
cagcaaaagaacacttctca

SEQ ID NO: 79234 - DNA, 20 bp, Artificial Sequence
  Description of Artificial Sequence: Synthetic oligonucleotide
  Target: LAMA2; (-) strand; PAM type: NRG; PAM sequence: AAG
ctacatgaaggattcagcaa

SEQ ID NO: 79235 - DNA, 20 bp, Artificial Sequence
  Description of Artificial Sequence: Synthetic oligonucleotide
  Target: LAMA2; (-) strand; PAM type: NRG; PAM sequence: CAG
tgatagctacatgaaggatt

SEQ ID NO: 79236 - DNA, 20 bp, Artificial Sequence
  Description of Artificial Sequence: Synthetic oligonucleotide
  Target: LAMA2; (-) strand; PAM type: NRG; PAM sequence: AGG
accgtgtgatagctacatga

SEQ ID NO: 79237 - DNA, 20 bp, Artificial Sequence
  Description of Artificial Sequence: Synthetic oligonucleotide
  Target: LAMA2; (-) strand; PAM type: NRG; PAM sequence: AAG
aaccgtgtgatagctacatg

SEQ ID NO: 79238 - DNA, 20 bp, Artificial Sequence
  Description of Artificial Sequence: Synthetic oligonucleotide
  Target: LAMA2; (-) strand; PAM type: NRG; PAM sequence: TAG
taggttaataaaccgtgtga

SEQ ID NO: 79239 - DNA, 20 bp, Artificial Sequence
  Description of Artificial Sequence: Synthetic oligonucleotide
  Target: LAMA2; (-) strand; PAM type: NRG; PAM sequence: AGG
aggtgtacatattctcattt

SEQ ID NO: 79240 - DNA, 20 bp, Artificial Sequence
  Description of Artificial Sequence: Synthetic oligonucleotide
  Target: LAMA2; (-) strand; PAM type: NRG; PAM sequence: TAG
aaggtgtacatattctcatt

SEQ ID NO: 79241 - DNA, 20 bp, Artificial Sequence
  Description of Artificial Sequence: Synthetic oligonucleotide
  Target: LAMA2; (-) strand; PAM type: NRG; PAM sequence: AGG
aaaggacctttttggaaaaa

SEQ ID NO: 79242 - DNA, 20 bp, Artificial Sequence
  Description of Artificial Sequence: Synthetic oligonucleotide
  Target: LAMA2; (-) strand; PAM type: NRG; PAM sequence: AAG
caaaggacctttttggaaaa

SEQ ID NO: 79243 - DNA, 20 bp, Artificial Sequence
  Description of Artificial Sequence: Synthetic oligonucleotide
  Target: LAMA2; (-) strand; PAM type: NRG; PAM sequence: TGG
aaacatacaaaggacctttt

SEQ ID NO: 79244 - DNA, 20 bp, Artificial Sequence
  Description of Artificial Sequence: Synthetic oligonucleotide
  Target: LAMA2; (-) strand; PAM type: NRG; PAM sequence: AGG
tttctcacttaaacatacaa

SEQ ID NO: 79245 - DNA, 20 bp, Artificial Sequence
  Description of Artificial Sequence: Synthetic oligonucleotide
  Target: LAMA2; (-) strand; PAM type: NRG; PAM sequence: AAG
gtttctcacttaaacataca

SEQ ID NO: 79246 - DNA, 20 bp, Artificial Sequence
  Description of Artificial Sequence: Synthetic oligonucleotide
  Target: LAMA2; (-) strand; PAM type: NRG; PAM sequence: AAG
gtgccgtatgaagaatcagt

SEQ ID NO: 79247 - DNA, 20 bp, Artificial Sequence
  Description of Artificial Sequence: Synthetic oligonucleotide
  Target: LAMA2; (-) strand; PAM type: NRG; PAM sequence: CAG
gtttgtgccgtatgaagaat

SEQ ID NO: 79248 - DNA, 20 bp, Artificial Sequence
  Description of Artificial Sequence: Synthetic oligonucleotide
  Target: LAMA2; (-) strand; PAM type: NRG; PAM sequence: AAG
aatcatgtttgtgccgtatg

SEQ ID NO: 79249 - DNA, 20 bp, Artificial Sequence
  Description of Artificial Sequence: Synthetic oligonucleotide
  Target: LAMA2; (-) strand; PAM type: NRG; PAM sequence: TGG
tttatttggtgtgaatgctg

SEQ ID NO: 79250 - DNA, 20 bp, Artificial Sequence
  Description of Artificial Sequence: Synthetic oligonucleotide
  Target: LAMA2; (-) strand; PAM type: NRG; PAM sequence: TGG
gaacattattagagtttatt

SEQ ID NO: 79251 - DNA, 20 bp, Artificial Sequence
  Description of Artificial Sequence: Synthetic oligonucleotide
  Target: LAMA2; (-) strand; PAM type: NRG; PAM sequence: GAG
atagtttctgaacattatta

SEQ ID NO: 79252 - DNA, 20 bp, Artificial Sequence
  Description of Artificial Sequence: Synthetic oligonucleotide
  Target: LAMA2; (-) strand; PAM type: NRG; PAM sequence: TAG
ttatagtttctgaacattat

SEQ ID NO: 79253 - DNA, 20 bp, Artificial Sequence
  Description of Artificial Sequence: Synthetic oligonucleotide
  Target: LAMA2; (-) strand; PAM type: NRG; PAM sequence: TAG
tcgctacatgtctaggatta

SEQ ID NO: 79254 - DNA, 20 bp, Artificial Sequence
  Description of Artificial Sequence: Synthetic oligonucleotide
  Target: LAMA2; (-) strand; PAM type: NRG; PAM sequence: AGG
gaggaaatcgctacatgtct

SEQ ID NO: 79255 - DNA, 20 bp, Artificial Sequence
  Description of Artificial Sequence: Synthetic oligonucleotide
  Target: LAMA2; (-) strand; PAM type: NRG; PAM sequence: TAG
ggaggaaatcgctacatgtc

SEQ ID NO: 79256 - DNA, 20 bp, Artificial Sequence
  Description of Artificial Sequence: Synthetic oligonucleotide
  Target: LAMA2; (-) strand; PAM type: NRG; PAM sequence: AGG
aatactacttgaaagaaagg

SEQ ID NO: 79257 - DNA, 20 bp, Artificial Sequence
  Description of Artificial Sequence: Synthetic oligonucleotide
  Target: LAMA2; (-) strand; PAM type: NRG; PAM sequence: GAG
aaatactacttgaaagaaag

SEQ ID NO: 79258 - DNA, 20 bp, Artificial Sequence
  Description of Artificial Sequence: Synthetic oligonucleotide
  Target: LAMA2; (-) strand; PAM type: NRG; PAM sequence: AGG
aaaaatactacttgaaagaa

SEQ ID NO: 79259 - DNA, 20 bp, Artificial Sequence
  Description of Artificial Sequence: Synthetic oligonucleotide
  Target: LAMA2; (-) strand; PAM type: NRG; PAM sequence: AAG
caaaaatactacttgaaaga

SEQ ID NO: 79260 - DNA, 20 bp, Artificial Sequence
  Description of Artificial Sequence: Synthetic oligonucleotide
  Target: LAMA2; (-) strand; PAM type: NRG; PAM sequence: AAG
tccccaaaaatactacttga

SEQ ID NO: 79261 - DNA, 20 bp, Artificial Sequence
  Description of Artificial Sequence: Synthetic oligonucleotide
  Target: LAMA2; (-) strand; PAM type: NRG; PAM sequence: AGG
tcaccagtgccattgaactc

SEQ ID NO: 79262 - DNA, 20 bp, Artificial Sequence
  Description of Artificial Sequence: Synthetic oligonucleotide
  Target: LAMA2; (-) strand; PAM type: NRG; PAM sequence: CAG
gtcaccagtgccattgaact

SEQ ID NO: 79263 - DNA, 20 bp, Artificial Sequence
  Description of Artificial Sequence: Synthetic oligonucleotide
  Target: LAMA2; (-) strand; PAM type: NRG; PAM sequence: CAG
ttggcacctaaaaaagtcac

SEQ ID NO: 79264 - DNA, 20 bp, Artificial Sequence
  Description of Artificial Sequence: Synthetic oligonucleotide
  Target: LAMA2; (-) strand; PAM type: NRG; PAM sequence: AAG
attaaccttggcacctaaaa

SEQ ID NO: 79265 - DNA, 20 bp, Artificial Sequence
  Description of Artificial Sequence: Synthetic oligonucleotide
  Target: LAMA2; (-) strand; PAM type: NRG; PAM sequence: TGG
tttccctctgagattaacct

SEQ ID NO: 79266 - DNA, 20 bp, Artificial Sequence
  Description of Artificial Sequence: Synthetic oligonucleotide
  Target: LAMA2; (-) strand; PAM type: NRG; PAM sequence: GAG
attaaaactaatttccctct

SEQ ID NO: 79267 - DNA, 20 bp, Artificial Sequence
  Description of Artificial Sequence: Synthetic oligonucleotide
  Target: LAMA2; (-) strand; PAM type: NRG; PAM sequence: AAG
aatggataaatatatggatg

SEQ ID NO: 79268 - DNA, 20 bp, Artificial Sequence
  Description of Artificial Sequence: Synthetic oligonucleotide
  Target: LAMA2; (-) strand; PAM type: NRG; PAM sequence: TGG
taaaagaatggataaatata

SEQ ID NO: 79269 - DNA, 20 bp, Artificial Sequence
  Description of Artificial Sequence: Synthetic oligonucleotide
  Target: LAMA2; (-) strand; PAM type: NRG; PAM sequence: TGG
agagttaaatgttaaaagaa

SEQ ID NO: 79270 - DNA, 20 bp, Artificial Sequence
  Description of Artificial Sequence: Synthetic oligonucleotide
  Target: LAMA2; (-) strand; PAM type: NRG; PAM sequence: AAG
aggttagagttaaatgttaa

SEQ ID NO: 79271 - DNA, 20 bp, Artificial Sequence
  Description of Artificial Sequence: Synthetic oligonucleotide
  Target: LAMA2; (-) strand; PAM type: NRG; PAM sequence: GAG
tttttggcttaaggaggtta

SEQ ID NO: 79272 - DNA, 20 bp, Artificial Sequence
  Description of Artificial Sequence: Synthetic oligonucleotide
  Target: LAMA2; (-) strand; PAM type: NRG; PAM sequence: TAG
tatttttggcttaaggaggt

SEQ ID NO: 79273 - DNA, 20 bp, Artificial Sequence
  Description of Artificial Sequence: Synthetic oligonucleotide
  Target: LAMA2; (-) strand; PAM type: NRG; PAM sequence: AGG
gttatatttttggcttaagg

SEQ ID NO: 79274 - DNA, 20 bp, Artificial Sequence
  Description of Artificial Sequence: Synthetic oligonucleotide
  Target: LAMA2; (-) strand; PAM type: NRG; PAM sequence: GAG
agttatatttttggcttaag

SEQ ID NO: 79275 - DNA, 20 bp, Artificial Sequence
  Description of Artificial Sequence: Synthetic oligonucleotide
  Target: LAMA2; (-) strand; PAM type: NRG; PAM sequence: AGG
tgagttatatttttggctta

SEQ ID NO: 79276 - DNA, 20 bp, Artificial Sequence
  Description of Artificial Sequence: Synthetic oligonucleotide
  Target: LAMA2; (-) strand; PAM type: NRG; PAM sequence: AAG
ttgagttatatttttggctt

SEQ ID NO: 79277 - DNA, 20 bp, Artificial Sequence
  Description of Artificial Sequence: Synthetic oligonucleotide
  Target: LAMA2; (-) strand; PAM type: NRG; PAM sequence: TGG
ttagaattgagttatatttt

SEQ ID NO: 79278 - DNA, 20 bp, Artificial Sequence
  Description of Artificial Sequence: Synthetic oligonucleotide
  Target: LAMA2; (-) strand; PAM type: NRG; PAM sequence: GAG
ccagaaatgtgtttagaatt

SEQ ID NO: 79279 - DNA, 20 bp, Artificial Sequence
  Description of Artificial Sequence: Synthetic oligonucleotide
  Target: LAMA2; (-) strand; PAM type: NRG; PAM sequence: TAG
aggtgagccagaaatgtgtt

SEQ ID NO: 79280 - DNA, 20 bp, Artificial Sequence
  Description of Artificial Sequence: Synthetic oligonucleotide
  Target: LAMA2; (-) strand; PAM type: NRG; PAM sequence: CAG
ctggcacctagcaggtgagc

SEQ ID NO: 79281 - DNA, 20 bp, Artificial Sequence
  Description of Artificial Sequence: Synthetic oligonucleotide
  Target: LAMA2; (-) strand; PAM type: NRG; PAM sequence: GAG
atttctggcacctagcaggt

SEQ ID NO: 79282 - DNA, 20 bp, Artificial Sequence
  Description of Artificial Sequence: Synthetic oligonucleotide
  Target: LAMA2; (-) strand; PAM type: NRG; PAM sequence: AGG
ccgcatttctggcacctagc

SEQ ID NO: 79283 - DNA, 20 bp, Artificial Sequence
  Description of Artificial Sequence: Synthetic oligonucleotide
  Target: LAMA2; (-) strand; PAM type: NRG; PAM sequence: CAG
tccgcatttctggcacctag

SEQ ID NO: 79284 - DNA, 20 bp, Artificial Sequence
  Description of Artificial Sequence: Synthetic oligonucleotide
  Target: LAMA2; (-) strand; PAM type: NRG; PAM sequence: TAG
agatccgcatttctggcacc

SEQ ID NO: 79285 - DNA, 20 bp, Artificial Sequence
  Description of Artificial Sequence: Synthetic oligonucleotide
  Target: LAMA2; (-) strand; PAM type: NRG; PAM sequence: TGG
ttcctcaagatccgcatttc

SEQ ID NO: 79286 - DNA, 20 bp, Artificial Sequence
  Description of Artificial Sequence: Synthetic oligonucleotide
  Target: LAMA2; (-) strand; PAM type: NRG; PAM sequence: AAG
gcagatcttgtatattcctc

SEQ ID NO: 79287 - DNA, 20 bp, Artificial Sequence
  Description of Artificial Sequence: Synthetic oligonucleotide
  Target: LAMA2; (-) strand; PAM type: NRG; PAM sequence: CAG
gggattctaaaagagtgaag

SEQ ID NO: 79288 - DNA, 20 bp, Artificial Sequence
  Description of Artificial Sequence: Synthetic oligonucleotide
  Target: LAMA2; (-) strand; PAM type: NRG; PAM sequence: AAG
gcagggattctaaaagagtg

SEQ ID NO: 79289 - DNA, 20 bp, Artificial Sequence
  Description of Artificial Sequence: Synthetic oligonucleotide
  Target: LAMA2; (-) strand; PAM type: NRG; PAM sequence: GAG
ctaatgcagggattctaaaa

SEQ ID NO: 79290 - DNA, 20 bp, Artificial Sequence
  Description of Artificial Sequence: Synthetic oligonucleotide
  Target: LAMA2; (-) strand; PAM type: NRG; PAM sequence: AAG
ctctaatgcagggattctaa

SEQ ID NO: 79291 - DNA, 20 bp, Artificial Sequence
  Description of Artificial Sequence: Synthetic oligonucleotide
  Target: LAMA2; (-) strand; PAM type: NRG; PAM sequence: GGG
actgaatcctctctaatgca

SEQ ID NO: 79292 - DNA, 20 bp, Artificial Sequence
  Description of Artificial Sequence: Synthetic oligonucleotide
  Target: LAMA2; (-) strand; PAM type: NRG; PAM sequence: AGG
tactgaatcctctctaatgc

SEQ ID NO: 79293 - DNA, 20 bp, Artificial Sequence
  Description of Artificial Sequence: Synthetic oligonucleotide
  Target: LAMA2; (-) strand; PAM type: NRG; PAM sequence: CAG
atactgaatcctctctaatg

SEQ ID NO: 79294 - DNA, 20 bp, Artificial Sequence
  Description of Artificial Sequence: Synthetic oligonucleotide
  Target: LAMA2; (-) strand; PAM type: NRG; PAM sequence: TAG
ctgggatgcttagtaaggaa

SEQ ID NO: 79295 - DNA, 20 bp, Artificial Sequence
  Description of Artificial Sequence: Synthetic oligonucleotide
  Target: LAMA2; (-) strand; PAM type: NRG; PAM sequence: AGG
tctacctgggatgcttagta

SEQ ID NO: 79296 - DNA, 20 bp, Artificial Sequence
  Description of Artificial Sequence: Synthetic oligonucleotide
  Target: LAMA2; (-) strand; PAM type: NRG; PAM sequence: AAG
atctacctgggatgcttagt

SEQ ID NO: 79297 - DNA, 20 bp, Artificial Sequence
  Description of Artificial Sequence: Synthetic oligonucleotide
  Target: LAMA2; (-) strand; PAM type: NRG; PAM sequence: TAG
ttgaatctacctgggatgct

SEQ ID NO: 79298 - DNA, 20 bp, Artificial Sequence
  Description of Artificial Sequence: Synthetic oligonucleotide
  Target: LAMA2; (-) strand; PAM type: NRG; PAM sequence: GGG
ccacctaattgaatctacct

SEQ ID NO: 79299 - DNA, 20 bp, Artificial Sequence
  Description of Artificial Sequence: Synthetic oligonucleotide
  Target: LAMA2; (-) strand; PAM type: NRG; PAM sequence: TGG
tccacctaattgaatctacc

SEQ ID NO: 79300 - DNA, 20 bp, Artificial Sequence
  Description of Artificial Sequence: Synthetic oligonucleotide
  Target: LAMA2; (-) strand; PAM type: NRG; PAM sequence: TAG
aattctggtgtcacaaagaa

SEQ ID NO: 79301 - DNA, 20 bp, Artificial Sequence
  Description of Artificial Sequence: Synthetic oligonucleotide
  Target: LAMA2; (-) strand; PAM type: NRG; PAM sequence: AAG
aaactaattctggtgtcaca

SEQ ID NO: 79302 - DNA, 20 bp, Artificial Sequence
  Description of Artificial Sequence: Synthetic oligonucleotide
  Target: LAMA2; (-) strand; PAM type: NRG; PAM sequence: TGG
ctgagatgagaaactaattc

SEQ ID NO: 79303 - DNA, 20 bp, Artificial Sequence
  Description of Artificial Sequence: Synthetic oligonucleotide
  Target: LAMA2; (-) strand; PAM type: NRG; PAM sequence: GAG
aatacagcaaactctgagat

SEQ ID NO: 79304 - DNA, 20 bp, Artificial Sequence
  Description of Artificial Sequence: Synthetic oligonucleotide
  Target: LAMA2; (-) strand; PAM type: NRG; PAM sequence: GAG
agagaaatacagcaaactct

SEQ ID NO: 79305 - DNA, 20 bp, Artificial Sequence
  Description of Artificial Sequence: Synthetic oligonucleotide
  Target: LAMA2; (-) strand; PAM type: NRG; PAM sequence: CAG
cttgagtcaccagagaaata

SEQ ID NO: 79306 - DNA, 20 bp, Artificial Sequence
  Description of Artificial Sequence: Synthetic oligonucleotide
  Target: LAMA2; (-) strand; PAM type: NRG; PAM sequence: GAG
ataaactacttgagtcacca

SEQ ID NO: 79307 - DNA, 20 bp, Artificial Sequence
  Description of Artificial Sequence: Synthetic oligonucleotide
  Target: LAMA2; (-) strand; PAM type: NRG; PAM sequence: CAG
caataaactacttgagtcac

SEQ ID NO: 79308 - DNA, 20 bp, Artificial Sequence
  Description of Artificial Sequence: Synthetic oligonucleotide
  Target: LAMA2; (-) strand; PAM type: NRG; PAM sequence: GAG
tgactgccaataaactactt

SEQ ID NO: 79309 - DNA, 20 bp, Artificial Sequence
  Description of Artificial Sequence: Synthetic oligonucleotide
  Target: LAMA2; (-) strand; PAM type: NRG; PAM sequence: GAG
tgcatttagataatcccagg

SEQ ID NO: 79310 - DNA, 20 bp, Artificial Sequence
  Description of Artificial Sequence: Synthetic oligonucleotide
  Target: LAMA2; (-) strand; PAM type: NRG; PAM sequence: GGG
cctgcatttagataatccca

SEQ ID NO: 79311 - DNA, 20 bp, Artificial Sequence
  Description of Artificial Sequence: Synthetic oligonucleotide
  Target: LAMA2; (-) strand; PAM type: NRG; PAM sequence: AGG
tcctgcatttagataatccc

SEQ ID NO: 79312 - DNA, 20 bp, Artificial Sequence
  Description of Artificial Sequence: Synthetic oligonucleotide
  Target: LAMA2; (-) strand; PAM type: NRG; PAM sequence: CAG
gtcctgcatttagataatcc

SEQ ID NO: 79313 - DNA, 20 bp, Artificial Sequence
  Description of Artificial Sequence: Synthetic oligonucleotide
  Target: LAMA2; (-) strand; PAM type: NRG; PAM sequence: TAG
cattcctaacgtcctgcatt

SEQ ID NO: 79314 - DNA, 20 bp, Artificial Sequence
  Description of Artificial Sequence: Synthetic oligonucleotide
  Target: LAMA2; (-) strand; PAM type: NRG; PAM sequence: AGG
attacattttttgacaggag

SEQ ID NO: 79315 - DNA, 20 bp, Artificial Sequence
  Description of Artificial Sequence: Synthetic oligonucleotide
  Target: LAMA2; (-) strand; PAM type: NRG; PAM sequence: GAG
aattacattttttgacagga

SEQ ID NO: 79316 - DNA, 20 bp, Artificial Sequence
  Description of Artificial Sequence: Synthetic oligonucleotide
  Target: LAMA2; (-) strand; PAM type: NRG; PAM sequence: GAG
ttaattacattttttgacag

SEQ ID NO: 79317 - DNA, 20 bp, Artificial Sequence
  Description of Artificial Sequence: Synthetic oligonucleotide
  Target: LAMA2; (-) strand; PAM type: NRG; PAM sequence: AGG
tgttaattacattttttgac

SEQ ID NO: 79318 - DNA, 20 bp, Artificial Sequence
  Description of Artificial Sequence: Synthetic oligonucleotide
  Target: LAMA2; (-) strand; PAM type: NRG; PAM sequence: CAG
gtgttaattacattttttga

SEQ ID NO: 79319 - DNA, 20 bp, Artificial Sequence
  Description of Artificial Sequence: Synthetic oligonucleotide
  Target: LAMA2; (-) strand; PAM type: NRG; PAM sequence: AAG
ggaattttcatccactttgt

SEQ ID NO: 79320 - DNA, 20 bp, Artificial Sequence
  Description of Artificial Sequence: Synthetic oligonucleotide
  Target: LAMA2; (-) strand; PAM type: NRG; PAM sequence: TGG
tgtgactcaaggtcacccac

SEQ ID NO: 79321 - DNA, 20 bp, Artificial Sequence
  Description of Artificial Sequence: Synthetic oligonucleotide
  Target: LAMA2; (-) strand; PAM type: NRG; PAM sequence: AGG
cactgaggagctgtgactca

SEQ ID NO: 79322 - DNA, 20 bp, Artificial Sequence
  Description of Artificial Sequence: Synthetic oligonucleotide
  Target: LAMA2; (-) strand; PAM type: NRG; PAM sequence: AAG
gcactgaggagctgtgactc

SEQ ID NO: 79323 - DNA, 20 bp, Artificial Sequence
  Description of Artificial Sequence: Synthetic oligonucleotide
  Target: LAMA2; (-) strand; PAM type: NRG; PAM sequence: GAG
aggacagtgtgtgcactgag

SEQ ID NO: 79324 - DNA, 20 bp, Artificial Sequence
  Description of Artificial Sequence: Synthetic oligonucleotide
  Target: LAMA2; (-) strand; PAM type: NRG; PAM sequence: AGG
acaggacagtgtgtgcactg

SEQ ID NO: 79325 - DNA, 20 bp, Artificial Sequence
  Description of Artificial Sequence: Synthetic oligonucleotide
  Target: LAMA2; (-) strand; PAM type: NRG; PAM sequence: GAG
tacaggacagtgtgtgcact

SEQ ID NO: 79326 - DNA, 20 bp, Artificial Sequence
  Description of Artificial Sequence: Synthetic oligonucleotide
  Target: LAMA2; (-) strand; PAM type: NRG; PAM sequence: CAG
ggagatgcttgggtacagga

SEQ ID NO: 79327 - DNA, 20 bp, Artificial Sequence
  Description of Artificial Sequence: Synthetic oligonucleotide
  Target: LAMA2; (-) strand; PAM type: NRG; PAM sequence: AGG
tctgggagatgcttgggtac

SEQ ID NO: 79328 - DNA, 20 bp, Artificial Sequence
  Description of Artificial Sequence: Synthetic oligonucleotide
  Target: LAMA2; (-) strand; PAM type: NRG; PAM sequence: CAG
atctgggagatgcttgggta

SEQ ID NO: 79329 - DNA, 20 bp, Artificial Sequence
  Description of Artificial Sequence: Synthetic oligonucleotide
  Target: LAMA2; (-) strand; PAM type: NRG; PAM sequence: GGG
gtgctatctgggagatgctt

SEQ ID NO: 79330 - DNA, 20 bp, Artificial Sequence
  Description of Artificial Sequence: Synthetic oligonucleotide
  Target: LAMA2; (-) strand; PAM type: NRG; PAM sequence: TGG
tgtgctatctgggagatgct

SEQ ID NO: 79331 - DNA, 20 bp, Artificial Sequence
  Description of Artificial Sequence: Synthetic oligonucleotide
  Target: LAMA2; (-) strand; PAM type: NRG; PAM sequence: GAG
gggagttctgtgctatctgg

SEQ ID NO: 79332 - DNA, 20 bp, Artificial Sequence
  Description of Artificial Sequence: Synthetic oligonucleotide
  Target: LAMA2; (-) strand; PAM type: NRG; PAM sequence: GGG
gtgggagttctgtgctatct

SEQ ID NO: 79333 - DNA, 20 bp, Artificial Sequence
  Description of Artificial Sequence: Synthetic oligonucleotide
  Target: LAMA2; (-) strand; PAM type: NRG; PAM sequence: TGG
agtgggagttctgtgctatc

SEQ ID NO: 79334 - DNA, 20 bp, Artificial Sequence
  Description of Artificial Sequence: Synthetic oligonucleotide
  Target: LAMA2; (-) strand; PAM type: NRG; PAM sequence: GAG
tacagggatgcaggaagtgg

SEQ ID NO: 79335 - DNA, 20 bp, Artificial Sequence
  Description of Artificial Sequence: Synthetic oligonucleotide
  Target: LAMA2; (-) strand; PAM type: NRG; PAM sequence: GGG
ggtacagggatgcaggaagt

SEQ ID NO: 79336 - DNA, 20 bp, Artificial Sequence
  Description of Artificial Sequence: Synthetic oligonucleotide
  Target: LAMA2; (-) strand; PAM type: NRG; PAM sequence: TGG
aggtacagggatgcaggaag

SEQ ID NO: 79337 - DNA, 20 bp, Artificial Sequence
  Description of Artificial Sequence: Synthetic oligonucleotide
  Target: LAMA2; (-) strand; PAM type: NRG; PAM sequence: AAG
taaaggtacagggatgcagg

SEQ ID NO: 79338 - DNA, 20 bp, Artificial Sequence
  Description of Artificial Sequence: Synthetic oligonucleotide
  Target: LAMA2; (-) strand; PAM type: NRG; PAM sequence: AGG
tgctaaaggtacagggatgc

SEQ ID NO: 79339 - DNA, 20 bp, Artificial Sequence
  Description of Artificial Sequence: Synthetic oligonucleotide
  Target: LAMA2; (-) strand; PAM type: NRG; PAM sequence: CAG
gtgctaaaggtacagggatg

SEQ ID NO: 79340 - DNA, 20 bp, Artificial Sequence
  Description of Artificial Sequence: Synthetic oligonucleotide
  Target: LAMA2; (-) strand; PAM type: NRG; PAM sequence: GGG
cacacagtgctaaaggtaca

SEQ ID NO: 79341 - DNA, 20 bp, Artificial Sequence
  Description of Artificial Sequence: Synthetic oligonucleotide
  Target: LAMA2; (-) strand; PAM type: NRG; PAM sequence: AGG
gcacacagtgctaaaggtac

SEQ ID NO: 79342 - DNA, 20 bp, Artificial Sequence
  Description of Artificial Sequence: Synthetic oligonucleotide
  Target: LAMA2; (-) strand; PAM type: NRG; PAM sequence: CAG
tgcacacagtgctaaaggta

SEQ ID NO: 79343 - DNA, 20 bp, Artificial Sequence
  Description of Artificial Sequence: Synthetic oligonucleotide
  Target: LAMA2; (-) strand; PAM type: NRG; PAM sequence: AGG
aaacatgcacacagtgctaa

SEQ ID NO: 79344 - DNA, 20 bp, Artificial Sequence
  Description of Artificial Sequence: Synthetic oligonucleotide
  Target: LAMA2; (-) strand; PAM type: NRG; PAM sequence: AAG
caaacatgcacacagtgcta

SEQ ID NO: 79345 - DNA, 20 bp, Artificial Sequence
  Description of Artificial Sequence: Synthetic oligonucleotide
  Target: LAMA2; (-) strand; PAM type: NRG; PAM sequence: CAG
tacacacacaaacatgcaca

SEQ ID NO: 79346 - DNA, 20 bp, Artificial Sequence
  Description of Artificial Sequence: Synthetic oligonucleotide
  Target: LAMA2; (-) strand; PAM type: NRG; PAM sequence: TAG
aagaaagtgaaattgagtgg

SEQ ID NO: 79347 - DNA, 20 bp, Artificial Sequence
  Description of Artificial Sequence: Synthetic oligonucleotide
  Target: LAMA2; (-) strand; PAM type: NRG; PAM sequence: TGG
ttaaagaaagtgaaattgag

SEQ ID NO: 79348 - DNA, 20 bp, Artificial Sequence
  Description of Artificial Sequence: Synthetic oligonucleotide
  Target: LAMA2; (-) strand; PAM type: NRG; PAM sequence: GAG
ttgttaaagaaagtgaaatt

SEQ ID NO: 79349 - DNA, 20 bp, Artificial Sequence
  Description of Artificial Sequence: Synthetic oligonucleotide
  Target: LAMA2; (-) strand; PAM type: NRG; PAM sequence: AAG
caaaccaaaattgttaaaga

SEQ ID NO: 79350 - DNA, 20 bp, Artificial Sequence
  Description of Artificial Sequence: Synthetic oligonucleotide
  Target: LAMA2; (-) strand; PAM type: NRG; PAM sequence: AAG
gaaccaaaccaaaattgtta

SEQ ID NO: 79351 - DNA, 20 bp, Artificial Sequence
  Description of Artificial Sequence: Synthetic oligonucleotide
  Target: LAMA2; (-) strand; PAM type: NRG; PAM sequence: TGG
ctatttttgtattctgtaaa

SEQ ID NO: 79352 - DNA, 20 bp, Artificial Sequence
  Description of Artificial Sequence: Synthetic oligonucleotide
  Target: LAMA2; (-) strand; PAM type: NRG; PAM sequence: AAG
ctcaacatacagataggaag

SEQ ID NO: 79353 - DNA, 20 bp, Artificial Sequence
  Description of Artificial Sequence: Synthetic oligonucleotide
  Target: LAMA2; (-) strand; PAM type: NRG; PAM sequence: AAG
tctctcaacatacagatagg

SEQ ID NO: 79354 - DNA, 20 bp, Artificial Sequence
  Description of Artificial Sequence: Synthetic oligonucleotide
  Target: LAMA2; (-) strand; PAM type: NRG; PAM sequence: AGG
gaatctctcaacatacagat

SEQ ID NO: 79355 - DNA, 20 bp, Artificial Sequence
  Description of Artificial Sequence: Synthetic oligonucleotide
  Target: LAMA2; (-) strand; PAM type: NRG; PAM sequence: TAG
ggaatctctcaacatacaga

SEQ ID NO: 79356 - DNA, 20 bp, Artificial Sequence
  Description of Artificial Sequence: Synthetic oligonucleotide
  Target: LAMA2; (-) strand; PAM type: NRG; PAM sequence: CAG
atgaggaatctctcaacata

SEQ ID NO: 79357 - DNA, 20 bp, Artificial Sequence
  Description of Artificial Sequence: Synthetic oligonucleotide
  Target: LAMA2; (-) strand; PAM type: NRG; PAM sequence: AGG
tgcaaccataaaaaagaatg

SEQ ID NO: 79358 - DNA, 20 bp, Artificial Sequence
  Description of Artificial Sequence: Synthetic oligonucleotide
  Target: LAMA2; (-) strand; PAM type: NRG; PAM sequence: GAG
ctgcaaccataaaaaagaat

SEQ ID NO: 79359 - DNA, 20 bp, Artificial Sequence
  Description of Artificial Sequence: Synthetic oligonucleotide
  Target: LAMA2; (-) strand; PAM type: NRG; PAM sequence: AAG
aattatctgcaaccataaaa

SEQ ID NO: 79360 - DNA, 20 bp, Artificial Sequence
  Description of Artificial Sequence: Synthetic oligonucleotide
  Target: LAMA2; (-) strand; PAM type: NRG; PAM sequence: TGG
aatatccatcaatatgggac

SEQ ID NO: 79361 - DNA, 20 bp, Artificial Sequence
  Description of Artificial Sequence: Synthetic oligonucleotide
  Target: LAMA2; (-) strand; PAM type: NRG; PAM sequence: GGG
aacctaatatccatcaatat

SEQ ID NO: 79362 - DNA, 20 bp, Artificial Sequence
  Description of Artificial Sequence: Synthetic oligonucleotide
  Target: LAMA2; (-) strand; PAM type: NRG; PAM sequence: TGG
taacctaatatccatcaata

SEQ ID NO: 79363 - DNA, 20 bp, Artificial Sequence
  Description of Artificial Sequence: Synthetic oligonucleotide
  Target: LAMA2; (-) strand; PAM type: NRG; PAM sequence: TGG
ttttggtcacatcaaaggac

SEQ ID NO: 79364 - DNA, 20 bp, Artificial Sequence
  Description of Artificial Sequence: Synthetic oligonucleotide
  Target: LAMA2; (-) strand; PAM type: NRG; PAM sequence: AGG
atcttttttggtcacatcaa

SEQ ID NO: 79365 - DNA, 20 bp, Artificial Sequence
  Description of Artificial Sequence: Synthetic oligonucleotide
  Target: LAMA2; (-) strand; PAM type: NRG; PAM sequence: AAG
aatcttttttggtcacatca

SEQ ID NO: 79366 - DNA, 20 bp, Artificial Sequence
  Description of Artificial Sequence: Synthetic oligonucleotide
  Target: LAMA2; (-) strand; PAM type: NRG; PAM sequence: TGG
ttttttattataatcttttt

SEQ ID NO: 79367 - DNA, 20 bp, Artificial Sequence
  Description of Artificial Sequence: Synthetic oligonucleotide
  Target: LAMA2; (-) strand; PAM type: NRG; PAM sequence: CAG
caaagacaatattattcttt

SEQ ID NO: 79368 - DNA, 20 bp, Artificial Sequence
  Description of Artificial Sequence: Synthetic oligonucleotide
  Target: LAMA2; (-) strand; PAM type: NRG; PAM sequence: AAG
tatggccgcccaaactgaca

SEQ ID NO: 79369 - DNA, 20 bp, Artificial Sequence
  Description of Artificial Sequence: Synthetic oligonucleotide
  Target: LAMA2; (-) strand; PAM type: NRG; PAM sequence: TGG
tagtctatggaactttctta

SEQ ID NO: 79370 - DNA, 20 bp, Artificial Sequence
  Description of Artificial Sequence: Synthetic oligonucleotide
  Target: LAMA2; (-) strand; PAM type: NRG; PAM sequence: TGG
tttacaacccacctagtcta

SEQ ID NO: 79371 - DNA, 20 bp, Artificial Sequence
  Description of Artificial Sequence: Synthetic oligonucleotide
  Target: LAMA2; (-) strand; PAM type: NRG; PAM sequence: TAG
tctcttgtttacaacccacc

SEQ ID NO: 79372 - DNA, 20 bp, Artificial Sequence
  Description of Artificial Sequence: Synthetic oligonucleotide
  Target: LAMA2; (-) strand; PAM type: NRG; PAM sequence: GGG
tttcagcctccagtactgtg

SEQ ID NO: 79373 - DNA, 20 bp, Artificial Sequence
  Description of Artificial Sequence: Synthetic oligonucleotide
  Target: LAMA2; (-) strand; PAM type: NRG; PAM sequence: GGG
ttttcagcctccagtactgt

SEQ ID NO: 79374 - DNA, 20 bp, Artificial Sequence
  Description of Artificial Sequence: Synthetic oligonucleotide
  Target: LAMA2; (-) strand; PAM type: NRG; PAM sequence: TGG
attttcagcctccagtactg

SEQ ID NO: 79375 - DNA, 20 bp, Artificial Sequence
  Description of Artificial Sequence: Synthetic oligonucleotide
  Target: LAMA2; (-) strand; PAM type: NRG; PAM sequence: CAG
gatctcagattttcagcctc

SEQ ID NO: 79376 - DNA, 20 bp, Artificial Sequence
  Description of Artificial Sequence: Synthetic oligonucleotide
  Target: LAMA2; (-) strand; PAM type: NRG; PAM sequence: CAG
acaccctgatctcagatttt

SEQ ID NO: 79377 - DNA, 20 bp, Artificial Sequence
  Description of Artificial Sequence: Synthetic oligonucleotide
  Target: LAMA2; (-) strand; PAM type: NRG; PAM sequence: CAG
ccatgcggacaccctgatct

SEQ ID NO: 79378 - DNA, 20 bp, Artificial Sequence
  Description of Artificial Sequence: Synthetic oligonucleotide
  Target: LAMA2; (-) strand; PAM type: NRG; PAM sequence: CGG
ctcaccaaagcataaccatg

SEQ ID NO: 79379 - DNA, 20 bp, Artificial Sequence
  Description of Artificial Sequence: Synthetic oligonucleotide
  Target: LAMA2; (-) strand; PAM type: NRG; PAM sequence: AAG
ccccgaaacagtcctcacca

SEQ ID NO: 79380 - DNA, 20 bp, Artificial Sequence
  Description of Artificial Sequence: Synthetic oligonucleotide
  Target: LAMA2; (-) strand; PAM type: NRG; PAM sequence: CAG
gcagtctgcaagccccgaaa

SEQ ID NO: 79381 - DNA, 20 bp, Artificial Sequence
  Description of Artificial Sequence: Synthetic oligonucleotide
  Target: LAMA2; (-) strand; PAM type: NRG; PAM sequence: AAG
acaagaagtcagcagtctgc

SEQ ID NO: 79382 - DNA, 20 bp, Artificial Sequence
  Description of Artificial Sequence: Synthetic oligonucleotide
  Target: LAMA2; (-) strand; PAM type: NRG; PAM sequence: CAG
gtgaggctacaagaagtcag

SEQ ID NO: 79383 - DNA, 20 bp, Artificial Sequence
  Description of Artificial Sequence: Synthetic oligonucleotide
  Target: LAMA2; (-) strand; PAM type: NRG; PAM sequence: CAG
catgtgaggctacaagaagt

SEQ ID NO: 79384 - DNA, 20 bp, Artificial Sequence
  Description of Artificial Sequence: Synthetic oligonucleotide
  Target: LAMA2; (-) strand; PAM type: NRG; PAM sequence: AAG
caaccatgtgaggctacaag

SEQ ID NO: 79385 - DNA, 20 bp, Artificial Sequence
  Description of Artificial Sequence: Synthetic oligonucleotide
  Target: LAMA2; (-) strand; PAM type: NRG; PAM sequence: AAG
tttcaaccatgtgaggctac

SEQ ID NO: 79386 - DNA, 20 bp, Artificial Sequence
  Description of Artificial Sequence: Synthetic oligonucleotide
  Target: LAMA2; (-) strand; PAM type: NRG; PAM sequence: AGG
agctctctttcaaccatgtg

SEQ ID NO: 79387 - DNA, 20 bp, Artificial Sequence
  Description of Artificial Sequence: Synthetic oligonucleotide
  Target: LAMA2; (-) strand; PAM type: NRG; PAM sequence: GAG
tagctctctttcaaccatgt

SEQ ID NO: 79388 - DNA, 20 bp, Artificial Sequence
  Description of Artificial Sequence: Synthetic oligonucleotide
  Target: LAMA2; (-) strand; PAM type: NRG; PAM sequence: TAG
aaagaggccagagagctagc

SEQ ID NO: 79389 - DNA, 20 bp, Artificial Sequence
  Description of Artificial Sequence: Synthetic oligonucleotide
  Target: LAMA2; (-) strand; PAM type: NRG; PAM sequence: TAG
ataaaaagaggccagagagc

SEQ ID NO: 79390 - DNA, 20 bp, Artificial Sequence
  Description of Artificial Sequence: Synthetic oligonucleotide
  Target: LAMA2; (-) strand; PAM type: NRG; PAM sequence: GAG
cctaataaaaagaggccaga

SEQ ID NO: 79391 - DNA, 20 bp, Artificial Sequence
  Description of Artificial Sequence: Synthetic oligonucleotide
  Target: LAMA2; (-) strand; PAM type: NRG; PAM sequence: GAG
gacctaataaaaagaggcca

SEQ ID NO: 79392 - DNA, 20 bp, Artificial Sequence
  Description of Artificial Sequence: Synthetic oligonucleotide
  Target: LAMA2; (-) strand; PAM type: NRG; PAM sequence: CAG
gtgacctaataaaaagaggc

SEQ ID NO: 79393 - DNA, 20 bp, Artificial Sequence
  Description of Artificial Sequence: Synthetic oligonucleotide
  Target: LAMA2; (-) strand; PAM type: NRG; PAM sequence: AGG
attagtgacctaataaaaag

SEQ ID NO: 79394 - DNA, 20 bp, Artificial Sequence
  Description of Artificial Sequence: Synthetic oligonucleotide
  Target: LAMA2; (-) strand; PAM type: NRG; PAM sequence: GAG
gattagtgacctaataaaaa

SEQ ID NO: 79395 - DNA, 20 bp, Artificial Sequence
  Description of Artificial Sequence: Synthetic oligonucleotide
  Target: LAMA2; (-) strand; PAM type: NRG; PAM sequence: AAG
gagattagtgacctaataaa

SEQ ID NO: 79396 - DNA, 20 bp, Artificial Sequence
  Description of Artificial Sequence: Synthetic oligonucleotide
  Target: LAMA2; (-) strand; PAM type: NRG; PAM sequence: TAG
ggagccctcctgaatgagat

SEQ ID NO: 79397 - DNA, 20 bp, Artificial Sequence
  Description of Artificial Sequence: Synthetic oligonucleotide
  Target: LAMA2; (-) strand; PAM type: NRG; PAM sequence: GAG
agggtggagccctcctgaat

SEQ ID NO: 79398 - DNA, 20 bp, Artificial Sequence
  Description of Artificial Sequence: Synthetic oligonucleotide
  Target: LAMA2; (-) strand; PAM type: NRG; PAM sequence: GAG
gtaattagatcctgagggtg

SEQ ID NO: 79399 - DNA, 20 bp, Artificial Sequence
  Description of Artificial Sequence: Synthetic oligonucleotide
  Target: LAMA2; (-) strand; PAM type: NRG; PAM sequence: TGG
aggtaattagatcctgaggg

SEQ ID NO: 79400 - DNA, 20 bp, Artificial Sequence
  Description of Artificial Sequence: Synthetic oligonucleotide
  Target: LAMA2; (-) strand; PAM type: NRG; PAM sequence: GGG
ggtaggtaattagatcctga

SEQ ID NO: 79401 - DNA, 20 bp, Artificial Sequence
  Description of Artificial Sequence: Synthetic oligonucleotide
  Target: LAMA2; (-) strand; PAM type: NRG; PAM sequence: AGG
tggtaggtaattagatcctg

SEQ ID NO: 79402 - DNA, 20 bp, Artificial Sequence
  Description of Artificial Sequence: Synthetic oligonucleotide
  Target: LAMA2; (-) strand; PAM type: NRG; PAM sequence: GAG
ttggtaggtaattagatcct

SEQ ID NO: 79403 - DNA, 20 bp, Artificial Sequence
  Description of Artificial Sequence: Synthetic oligonucleotide
  Target: LAMA2; (-) strand; PAM type: NRG; PAM sequence: TAG
caaggcgtttggtaggtaat

SEQ ID NO: 79404 - DNA, 20 bp, Artificial Sequence
  Description of Artificial Sequence: Synthetic oligonucleotide
  Target: LAMA2; (-) strand; PAM type: NRG; PAM sequence: AGG
ttgggggcaaggcgtttggt

SEQ ID NO: 79405 - DNA, 20 bp, Artificial Sequence
  Description of Artificial Sequence: Synthetic oligonucleotide
  Target: LAMA2; (-) strand; PAM type: NRG; PAM sequence: TAG
tttgggggcaaggcgtttgg

SEQ ID NO: 79406 - DNA, 20 bp, Artificial Sequence
  Description of Artificial Sequence: Synthetic oligonucleotide
  Target: LAMA2; (-) strand; PAM type: NRG; PAM sequence: TGG
atatttgggggcaaggcgtt

SEQ ID NO: 79407 - DNA, 20 bp, Artificial Sequence
  Description of Artificial Sequence: Synthetic oligonucleotide
  Target: LAMA2; (-) strand; PAM type: NRG; PAM sequence: AGG
tgtgatgatatttgggggca

SEQ ID NO: 79408 - DNA, 20 bp, Artificial Sequence
  Description of Artificial Sequence: Synthetic oligonucleotide
  Target: LAMA2; (-) strand; PAM type: NRG; PAM sequence: AAG
atgtgatgatatttgggggc

SEQ ID NO: 79409 - DNA, 20 bp, Artificial Sequence
  Description of Artificial Sequence: Synthetic oligonucleotide
  Target: LAMA2; (-) strand; PAM type: NRG; PAM sequence: GGG
ccaaatgtgatgatatttgg

SEQ ID NO: 79410 - DNA, 20 bp, Artificial Sequence
  Description of Artificial Sequence: Synthetic oligonucleotide
  Target: LAMA2; (-) strand; PAM type: NRG; PAM sequence: GGG
cccaaatgtgatgatatttg

SEQ ID NO: 79411 - DNA, 20 bp, Artificial Sequence
  Description of Artificial Sequence: Synthetic oligonucleotide
  Target: LAMA2; (-) strand; PAM type: NRG; PAM sequence: GGG
tcccaaatgtgatgatattt

SEQ ID NO: 79412 - DNA, 20 bp, Artificial Sequence
  Description of Artificial Sequence: Synthetic oligonucleotide
  Target: LAMA2; (-) strand; PAM type: NRG; PAM sequence: TGG
atcccaaatgtgatgatatt

SEQ ID NO: 79413 - DNA, 20 bp, Artificial Sequence
  Description of Artificial Sequence: Synthetic oligonucleotide
  Target: LAMA2; (-) strand; PAM type: NRG; PAM sequence: TGG
ggtgaactgaatatggctaa

SEQ ID NO: 79414 - DNA, 20 bp, Artificial Sequence
  Description of Artificial Sequence: Synthetic oligonucleotide
  Target: LAMA2; (-) strand; PAM type: NRG; PAM sequence: TGG
tattacaggtgaactgaata

SEQ ID NO: 79415 - DNA, 20 bp, Artificial Sequence
  Description of Artificial Sequence: Synthetic oligonucleotide
  Target: LAMA2; (-) strand; PAM type: NRG; PAM sequence: AGG
taatacagatactatattac

SEQ ID NO: 79416 - DNA, 20 bp, Artificial Sequence
  Description of Artificial Sequence: Synthetic oligonucleotide
  Target: LAMA2; (-) strand; PAM type: NRG; PAM sequence: CAG
ataatacagatactatatta

SEQ ID NO: 79417 - DNA, 20 bp, Artificial Sequence
  Description of Artificial Sequence: Synthetic oligonucleotide
  Target: LAMA2; (-) strand; PAM type: NRG; PAM sequence: CAG
tctacagacataaaataata

SEQ ID NO: 79418 - DNA, 20 bp, Artificial Sequence
  Description of Artificial Sequence: Synthetic oligonucleotide
  Target: LAMA2; (-) strand; PAM type: NRG; PAM sequence: CAG
cacttctaggaattattcta

SEQ ID NO: 79419 - DNA, 20 bp, Artificial Sequence
  Description of Artificial Sequence: Synthetic oligonucleotide
  Target: LAMA2; (-) strand; PAM type: NRG; PAM sequence: AGG
gagctagcaattccacttct

SEQ ID NO: 79420 - DNA, 20 bp, Artificial Sequence
  Description of Artificial Sequence: Synthetic oligonucleotide
  Target: LAMA2; (-) strand; PAM type: NRG; PAM sequence: TAG
tgagctagcaattccacttc

SEQ ID NO: 79421 - DNA, 20 bp, Artificial Sequence
  Description of Artificial Sequence: Synthetic oligonucleotide
  Target: LAMA2; (-) strand; PAM type: NRG; PAM sequence: TAG
aacacacagtaattctgagc

SEQ ID NO: 79422 - DNA, 20 bp, Artificial Sequence
  Description of Artificial Sequence: Synthetic oligonucleotide
  Target: LAMA2; (-) strand; PAM type: NRG; PAM sequence: GAG
tagaaacacacagtaattct

SEQ ID NO: 79423 - DNA, 20 bp, Artificial Sequence
  Description of Artificial Sequence: Synthetic oligonucleotide
  Target: LAMA2; (-) strand; PAM type: NRG; PAM sequence: CAG
ctatcaaaattagaaacaca

SEQ ID NO: 79424 - DNA, 20 bp, Artificial Sequence
  Description of Artificial Sequence: Synthetic oligonucleotide
  Target: LAMA2; (-) strand; PAM type: NRG; PAM sequence: TAG
tgagcagtaactatcaaaat

SEQ ID NO: 79425 - DNA, 20 bp, Artificial Sequence
  Description of Artificial Sequence: Synthetic oligonucleotide
  Target: LAMA2; (-) strand; PAM type: NRG; PAM sequence: CAG
tttcaagaaagtcaattgag

SEQ ID NO: 79426 - DNA, 20 bp, Artificial Sequence
  Description of Artificial Sequence: Synthetic oligonucleotide
  Target: LAMA2; (-) strand; PAM type: NRG; PAM sequence: GAG
aaatttcaagaaagtcaatt

SEQ ID NO: 79427 - DNA, 20 bp, Artificial Sequence
  Description of Artificial Sequence: Synthetic oligonucleotide
  Target: LAMA2; (-) strand; PAM type: NRG; PAM sequence: AAG
aaatgatacaaatttcaaga

SEQ ID NO: 79428 - DNA, 20 bp, Artificial Sequence
  Description of Artificial Sequence: Synthetic oligonucleotide
  Target: LAMA2; (-) strand; PAM type: NRG; PAM sequence: AAG
tgtaaaatgatacaaatttc

SEQ ID NO: 79429 - DNA, 20 bp, Artificial Sequence
  Description of Artificial Sequence: Synthetic oligonucleotide
  Target: LAMA2; (-) strand; PAM type: NRG; PAM sequence: AGG
tacatacctcttacatttac

SEQ ID NO: 79430 - DNA, 20 bp, Artificial Sequence
  Description of Artificial Sequence: Synthetic oligonucleotide
  Target: LAMA2; (-) strand; PAM type: NRG; PAM sequence: CAG
atacatacctcttacattta

SEQ ID NO: 79431 - DNA, 20 bp, Artificial Sequence
  Description of Artificial Sequence: Synthetic oligonucleotide
  Target: LAMA2; (-) strand; PAM type: NRG; PAM sequence: TAG
tgatggttagactaagagag

SEQ ID NO: 79432 - DNA, 20 bp, Artificial Sequence
  Description of Artificial Sequence: Synthetic oligonucleotide
  Target: LAMA2; (-) strand; PAM type: NRG; PAM sequence: GAG
ctctgatggttagactaaga

SEQ ID NO: 79433 - DNA, 20 bp, Artificial Sequence
  Description of Artificial Sequence: Synthetic oligonucleotide
  Target: LAMA2; (-) strand; PAM type: NRG; PAM sequence: GAG
ctctctgatggttagactaa

SEQ ID NO: 79434 - DNA, 20 bp, Artificial Sequence
  Description of Artificial Sequence: Synthetic oligonucleotide
  Target: LAMA2; (-) strand; PAM type: NRG; PAM sequence: AAG
tactctctgatggttagact

SEQ ID NO: 79435 - DNA, 20 bp, Artificial Sequence
  Description of Artificial Sequence: Synthetic oligonucleotide
  Target: LAMA2; (-) strand; PAM type: NRG; PAM sequence: TAG
tggtaatactctctgatggt

SEQ ID NO: 79436 - DNA, 20 bp, Artificial Sequence
  Description of Artificial Sequence: Synthetic oligonucleotide
  Target: LAMA2; (-) strand; PAM type: NRG; PAM sequence: TGG
atattggtaatactctctga

SEQ ID NO: 79437 - DNA, 20 bp, Artificial Sequence
  Description of Artificial Sequence: Synthetic oligonucleotide
  Target: LAMA2; (-) strand; PAM type: NRG; PAM sequence: TGG
ttggcaaaccccacaaatat

SEQ ID NO: 79438 - DNA, 20 bp, Artificial Sequence
  Description of Artificial Sequence: Synthetic oligonucleotide
  Target: LAMA2; (-) strand; PAM type: NRG; PAM sequence: TGG
aacttcccattttttcaggt

SEQ ID NO: 79439 - DNA, 20 bp, Artificial Sequence
  Description of Artificial Sequence: Synthetic oligonucleotide
  Target: LAMA2; (-) strand; PAM type: NRG; PAM sequence: AGG
gataaacttcccattttttc

SEQ ID NO: 79440 - DNA, 20 bp, Artificial Sequence
  Description of Artificial Sequence: Synthetic oligonucleotide
  Target: LAMA2; (-) strand; PAM type: NRG; PAM sequence: CAG
tgataaacttcccatttttt

SEQ ID NO: 79441 - DNA, 20 bp, Artificial Sequence
  Description of Artificial Sequence: Synthetic oligonucleotide
  Target: LAMA2; (-) strand; PAM type: NRG; PAM sequence: AGG
tactgatcctccctcataat

SEQ ID NO: 79442 - DNA, 20 bp, Artificial Sequence
  Description of Artificial Sequence: Synthetic oligonucleotide
  Target: LAMA2; (-) strand; PAM type: NRG; PAM sequence: TAG
atactgatcctccctcataa

SEQ ID NO: 79443 - DNA, 20 bp, Artificial Sequence
  Description of Artificial Sequence: Synthetic oligonucleotide
  Target: LAMA2; (-) strand; PAM type: NRG; PAM sequence: AAG
aatgactgttaaaagtttat

SEQ ID NO: 79444 - DNA, 20 bp, Artificial Sequence
  Description of Artificial Sequence: Synthetic oligonucleotide
  Target: LAMA2; (-) strand; PAM type: NRG; PAM sequence: AAG
aaaattaaaatgactgttaa

SEQ ID NO: 79445 - DNA, 20 bp, Artificial Sequence
  Description of Artificial Sequence: Synthetic oligonucleotide
  Target: LAMA2; (-) strand; PAM type: NRG; PAM sequence: AAG
tgagggccctattcaaagaa

SEQ ID NO: 79446 - DNA, 20 bp, Artificial Sequence
  Description of Artificial Sequence: Synthetic oligonucleotide
  Target: LAMA2; (-) strand; PAM type: NRG; PAM sequence: AAG
atatatgagggccctattca

SEQ ID NO: 79447 - DNA, 20 bp, Artificial Sequence
  Description of Artificial Sequence: Synthetic oligonucleotide
  Target: LAMA2; (-) strand; PAM type: NRG; PAM sequence: GGG
caaaatgcacaaatatatga

SEQ ID NO: 79448 - DNA, 20 bp, Artificial Sequence
  Description of Artificial Sequence: Synthetic oligonucleotide
  Target: LAMA2; (-) strand; PAM type: NRG; PAM sequence: AGG
acaaaatgcacaaatatatg

SEQ ID NO: 79449 - DNA, 20 bp, Artificial Sequence
  Description of Artificial Sequence: Synthetic oligonucleotide
  Target: LAMA2; (-) strand; PAM type: NRG; PAM sequence: GAG
aacaaaatgcacaaatatat

SEQ ID NO: 79450 - DNA, 20 bp, Artificial Sequence
  Description of Artificial Sequence: Synthetic oligonucleotide
  Target: LAMA2; (-) strand; PAM type: NRG; PAM sequence: AAG
agaactcttgtaaatcaata

SEQ ID NO: 79451 - DNA, 20 bp, Artificial Sequence
  Description of Artificial Sequence: Synthetic oligonucleotide
  Target: LAMA2; (-) strand; PAM type: NRG; PAM sequence: AAG
aaggatgttcctaatactca

SEQ ID NO: 79452 - DNA, 20 bp, Artificial Sequence
  Description of Artificial Sequence: Synthetic oligonucleotide
  Target: LAMA2; (-) strand; PAM type: NRG; PAM sequence: AGG
ctgttggcacggataaagga

SEQ ID NO: 79453 - DNA, 20 bp, Artificial Sequence
  Description of Artificial Sequence: Synthetic oligonucleotide
  Target: LAMA2; (-) strand; PAM type: NRG; PAM sequence: AAG
actgttggcacggataaagg

SEQ ID NO: 79454 - DNA, 20 bp, Artificial Sequence
  Description of Artificial Sequence: Synthetic oligonucleotide
  Target: LAMA2; (-) strand; PAM type: NRG; PAM sequence: AGG
ggtactgttggcacggataa

SEQ ID NO: 79455 - DNA, 20 bp, Artificial Sequence
  Description of Artificial Sequence: Synthetic oligonucleotide
  Target: LAMA2; (-) strand; PAM type: NRG; PAM sequence: AAG
aggtactgttggcacggata

SEQ ID NO: 79456 - DNA, 20 bp, Artificial Sequence
  Description of Artificial Sequence: Synthetic oligonucleotide
  Target: LAMA2; (-) strand; PAM type: NRG; PAM sequence: CGG
aataaaaggtactgttggca

SEQ ID NO: 79457 - DNA, 20 bp, Artificial Sequence
  Description of Artificial Sequence: Synthetic oligonucleotide
  Target: LAMA2; (-) strand; PAM type: NRG; PAM sequence: TGG
gacaaaataaaaggtactgt

SEQ ID NO: 79458 - DNA, 20 bp, Artificial Sequence
  Description of Artificial Sequence: Synthetic oligonucleotide
  Target: LAMA2; (-) strand; PAM type: NRG; PAM sequence: AGG
aaactgtgtgacaaaataaa

SEQ ID NO: 79459 - DNA, 20 bp, Artificial Sequence
  Description of Artificial Sequence: Synthetic oligonucleotide
  Target: LAMA2; (-) strand; PAM type: NRG; PAM sequence: AAG
taaactgtgtgacaaaataa

SEQ ID NO: 79460 - DNA, 20 bp, Artificial Sequence
  Description of Artificial Sequence: Synthetic oligonucleotide
  Target: LAMA2; (-) strand; PAM type: NRG; PAM sequence: AAG
aagagcaaagaattctgatg

SEQ ID NO: 79461 - DNA, 20 bp, Artificial Sequence
  Description of Artificial Sequence: Synthetic oligonucleotide
  Target: LAMA2; (-) strand; PAM type: NRG; PAM sequence: AAG
acagggacttctcaagagca

SEQ ID NO: 79462 - DNA, 20 bp, Artificial Sequence
  Description of Artificial Sequence: Synthetic oligonucleotide
  Target: LAMA2; (-) strand; PAM type: NRG; PAM sequence: GAG
ctctcacagggacttctcaa

SEQ ID NO: 79463 - DNA, 20 bp, Artificial Sequence
  Description of Artificial Sequence: Synthetic oligonucleotide
  Target: LAMA2; (-) strand; PAM type: NRG; PAM sequence: AAG
ggctctcacagggacttctc

SEQ ID NO: 79464 - DNA, 20 bp, Artificial Sequence
  Description of Artificial Sequence: Synthetic oligonucleotide
  Target: LAMA2; (-) strand; PAM type: NRG; PAM sequence: GGG
aaggctggcaggctctcaca

SEQ ID NO: 79465 - DNA, 20 bp, Artificial Sequence
  Description of Artificial Sequence: Synthetic oligonucleotide
  Target: LAMA2; (-) strand; PAM type: NRG; PAM sequence: AGG
gaaggctggcaggctctcac

SEQ ID NO: 79466 - DNA, 20 bp, Artificial Sequence
  Description of Artificial Sequence: Synthetic oligonucleotide
  Target: LAMA2; (-) strand; PAM type: NRG; PAM sequence: CAG
agaaggctggcaggctctca

SEQ ID NO: 79467 - DNA, 20 bp, Artificial Sequence
  Description of Artificial Sequence: Synthetic oligonucleotide
  Target: LAMA2; (-) strand; PAM type: NRG; PAM sequence: AGG
caaaggtgtagaaggctggc

SEQ ID NO: 79468 - DNA, 20 bp, Artificial Sequence
  Description of Artificial Sequence: Synthetic oligonucleotide
  Target: LAMA2; (-) strand; PAM type: NRG; PAM sequence: CAG
ccaaaggtgtagaaggctgg

SEQ ID NO: 79469 - DNA, 20 bp, Artificial Sequence
  Description of Artificial Sequence: Synthetic oligonucleotide
  Target: LAMA2; (-) strand; PAM type: NRG; PAM sequence: TGG
cctccaaaggtgtagaaggc

SEQ ID NO: 79470 - DNA, 20 bp, Artificial Sequence
  Description of Artificial Sequence: Synthetic oligonucleotide
  Target: LAMA2; (-) strand; PAM type: NRG; PAM sequence: AGG
ctgccctccaaaggtgtaga

SEQ ID NO: 79471 - DNA, 20 bp, Artificial Sequence
  Description of Artificial Sequence: Synthetic oligonucleotide
  Target: LAMA2; (-) strand; PAM type: NRG; PAM sequence: AAG
actgccctccaaaggtgtag

SEQ ID NO: 79472 - DNA, 20 bp, Artificial Sequence
  Description of Artificial Sequence: Synthetic oligonucleotide
  Target: LAMA2; (-) strand; PAM type: NRG; PAM sequence: TAG
caaactgccctccaaaggtg

SEQ ID NO: 79473 - DNA, 20 bp, Artificial Sequence
  Description of Artificial Sequence: Synthetic oligonucleotide
  Target: LAMA2; (-) strand; PAM type: NRG; PAM sequence: AGG
gccaacaaactgccctccaa

SEQ ID NO: 79474 - DNA, 20 bp, Artificial Sequence
  Description of Artificial Sequence: Synthetic oligonucleotide
  Target: LAMA2; (-) strand; PAM type: NRG; PAM sequence: AAG
tgccaacaaactgccctcca

SEQ ID NO: 79475 - DNA, 20 bp, Artificial Sequence
  Description of Artificial Sequence: Synthetic oligonucleotide
  Target: LAMA2; (-) strand; PAM type: NRG; PAM sequence: GAG
ttctatgtgaaagaaaaatt

SEQ ID NO: 79476 - DNA, 20 bp, Artificial Sequence
  Description of Artificial Sequence: Synthetic oligonucleotide
  Target: LAMA2; (-) strand; PAM type: NRG; PAM sequence: AAG
tcagatcattttctatgtga

SEQ ID NO: 79477 - DNA, 20 bp, Artificial Sequence
  Description of Artificial Sequence: Synthetic oligonucleotide
  Target: LAMA2; (-) strand; PAM type: NRG; PAM sequence: CAG
caagagaaataaaattcagt

SEQ ID NO: 79478 - DNA, 20 bp, Artificial Sequence
  Description of Artificial Sequence: Synthetic oligonucleotide
  Target: LAMA2; (-) strand; PAM type: NRG; PAM sequence: CAG
acatcaagagaaataaaatt

SEQ ID NO: 79479 - DNA, 20 bp, Artificial Sequence
  Description of Artificial Sequence: Synthetic oligonucleotide
  Target: LAMA2; (-) strand; PAM type: NRG; PAM sequence: GAG
ttcagcacagttgacatcaa

SEQ ID NO: 79480 - DNA, 20 bp, Artificial Sequence
  Description of Artificial Sequence: Synthetic oligonucleotide
  Target: LAMA2; (-) strand; PAM type: NRG; PAM sequence: AAG
aattcagcacagttgacatc

SEQ ID NO: 79481 - DNA, 20 bp, Artificial Sequence
  Description of Artificial Sequence: Synthetic oligonucleotide
  Target: LAMA2; (-) strand; PAM type: NRG; PAM sequence: CAG
tttaagacaataattcagca

SEQ ID NO: 79482 - DNA, 20 bp, Artificial Sequence
  Description of Artificial Sequence: Synthetic oligonucleotide
  Target: LAMA2; (-) strand; PAM type: NRG; PAM sequence: CAG
aattttttaagacaataatt

SEQ ID NO: 79483 - DNA, 20 bp, Artificial Sequence
  Description of Artificial Sequence: Synthetic oligonucleotide
  Target: LAMA2; (-) strand; PAM type: NRG; PAM sequence: AAG
aatggaatggtgaatttttt

SEQ ID NO: 79484 - DNA, 20 bp, Artificial Sequence
  Description of Artificial Sequence: Synthetic oligonucleotide
  Target: LAMA2; (-) strand; PAM type: NRG; PAM sequence: TGG
tatgttaaacctgaatggaa

SEQ ID NO: 79485 - DNA, 20 bp, Artificial Sequence
  Description of Artificial Sequence: Synthetic oligonucleotide
  Target: LAMA2; (-) strand; PAM type: NRG; PAM sequence: TGG
aaaaatatgttaaacctgaa

SEQ ID NO: 79486 - DNA, 20 bp, Artificial Sequence
  Description of Artificial Sequence: Synthetic oligonucleotide
  Target: LAMA2; (-) strand; PAM type: NRG; PAM sequence: AAG
caagaagataaaaattcatc

SEQ ID NO: 79487 - DNA, 20 bp, Artificial Sequence
  Description of Artificial Sequence: Synthetic oligonucleotide
  Target: LAMA2; (-) strand; PAM type: NRG; PAM sequence: AAG
ttagtaattaataggtcaag

SEQ ID NO: 79488 - DNA, 20 bp, Artificial Sequence
  Description of Artificial Sequence: Synthetic oligonucleotide
  Target: LAMA2; (-) strand; PAM type: NRG; PAM sequence: AAG
tttttagtaattaataggtc

SEQ ID NO: 79489 - DNA, 20 bp, Artificial Sequence
  Description of Artificial Sequence: Synthetic oligonucleotide
  Target: LAMA2; (-) strand; PAM type: NRG; PAM sequence: AGG
ttttttttttagtaattaat

SEQ ID NO: 79490 - DNA, 20 bp, Artificial Sequence
  Description of Artificial Sequence: Synthetic oligonucleotide
  Target: LAMA2; (-) strand; PAM type: NRG; PAM sequence: TAG
tttttttttttagtaattaa

SEQ ID NO: 79491 - DNA, 20 bp, Artificial Sequence
  Description of Artificial Sequence: Synthetic oligonucleotide
  Target: LAMA2; (-) strand; PAM type: NRG; PAM sequence: TAG
gttatctgtatttttttttt

SEQ ID NO: 79492 - DNA, 20 bp, Artificial Sequence
  Description of Artificial Sequence: Synthetic oligonucleotide
  Target: LAMA2; (-) strand; PAM type: NRG; PAM sequence: AGG
atatttcaataggttgtttt

SEQ ID NO: 79493 - DNA, 20 bp, Artificial Sequence
  Description of Artificial Sequence: Synthetic oligonucleotide
  Target: LAMA2; (-) strand; PAM type: NRG; PAM sequence: TAG
gatatttcaataggttgttt

SEQ ID NO: 79494 - DNA, 20 bp, Artificial Sequence
  Description of Artificial Sequence: Synthetic oligonucleotide
  Target: LAMA2; (-) strand; PAM type: NRG; PAM sequence: AGG
tcacagtgagatatttcaat

SEQ ID NO: 79495 - DNA, 20 bp, Artificial Sequence
  Description of Artificial Sequence: Synthetic oligonucleotide
  Target: LAMA2; (-) strand; PAM type: NRG; PAM sequence: TAG
atcacagtgagatatttcaa

SEQ ID NO: 79496 - DNA, 20 bp, Artificial Sequence
  Description of Artificial Sequence: Synthetic oligonucleotide
  Target: LAMA2; (-) strand; PAM type: NRG; PAM sequence: GAG
gacaaatctatcatcacagt

SEQ ID NO: 79497 - DNA, 20 bp, Artificial Sequence
  Description of Artificial Sequence: Synthetic oligonucleotide
  Target: LAMA2; (-) strand; PAM type: NRG; PAM sequence: CAG
actagacaaatctatcatca

SEQ ID NO: 79498 - DNA, 20 bp, Artificial Sequence
  Description of Artificial Sequence: Synthetic oligonucleotide
  Target: LAMA2; (-) strand; PAM type: NRG; PAM sequence: TAG
acaaaaattacaaggaaaac

SEQ ID NO: 79499 - DNA, 20 bp, Artificial Sequence
  Description of Artificial Sequence: Synthetic oligonucleotide
  Target: LAMA2; (-) strand; PAM type: NRG; PAM sequence: AGG
tatggagaacaaaaattaca

SEQ ID NO: 79500 - DNA, 20 bp, Artificial Sequence
  Description of Artificial Sequence: Synthetic oligonucleotide
  Target: LAMA2; (-) strand; PAM type: NRG; PAM sequence: AAG
atatggagaacaaaaattac

SEQ ID NO: 79501 - DNA, 20 bp, Artificial Sequence
  Description of Artificial Sequence: Synthetic oligonucleotide
  Target: LAMA2; (-) strand; PAM type: NRG; PAM sequence: GAG
ttatatagccttaaaatatg

SEQ ID NO: 79502 - DNA, 20 bp, Artificial Sequence
  Description of Artificial Sequence: Synthetic oligonucleotide
  Target: LAMA2; (-) strand; PAM type: NRG; PAM sequence: TGG
cattatatagccttaaaata

SEQ ID NO: 79503 - DNA, 20 bp, Artificial Sequence
  Description of Artificial Sequence: Synthetic oligonucleotide
  Target: LAMA2; (-) strand; PAM type: NRG; PAM sequence: TAG
cttgaaaacatcacattata

SEQ ID NO: 79504 - DNA, 20 bp, Artificial Sequence
  Description of Artificial Sequence: Synthetic oligonucleotide
  Target: LAMA2; (-) strand; PAM type: NRG; PAM sequence: AGG
gattaaaaaaggaacccatt

SEQ ID NO: 79505 - DNA, 20 bp, Artificial Sequence
  Description of Artificial Sequence: Synthetic oligonucleotide
  Target: LAMA2; (-) strand; PAM type: NRG; PAM sequence: TAG
agattaaaaaaggaacccat

SEQ ID NO: 79506 - DNA, 20 bp, Artificial Sequence
  Description of Artificial Sequence: Synthetic oligonucleotide
  Target: LAMA2; (-) strand; PAM type: NRG; PAM sequence: AGG
ataaaatatcagattaaaaa

SEQ ID NO: 79507 - DNA, 20 bp, Artificial Sequence
  Description of Artificial Sequence: Synthetic oligonucleotide
  Target: LAMA2; (-) strand; PAM type: NRG; PAM sequence: AAG
tataaaatatcagattaaaa

SEQ ID NO: 79508 - DNA, 20 bp, Artificial Sequence
  Description of Artificial Sequence: Synthetic oligonucleotide
  Target: LAMA2; (-) strand; PAM type: NRG; PAM sequence: CAG
gggaaaaagttataaaatat

SEQ ID NO: 79509 - DNA, 20 bp, Artificial Sequence
  Description of Artificial Sequence: Synthetic oligonucleotide
  Target: LAMA2; (-) strand; PAM type: NRG; PAM sequence: AAG
aaccagaaaacttggggaaa

SEQ ID NO: 79510 - DNA, 20 bp, Artificial Sequence
  Description of Artificial Sequence: Synthetic oligonucleotide
  Target: LAMA2; (-) strand; PAM type: NRG; PAM sequence: GGG
gtgggaaaccagaaaacttg

SEQ ID NO: 79511 - DNA, 20 bp, Artificial Sequence
  Description of Artificial Sequence: Synthetic oligonucleotide
  Target: LAMA2; (-) strand; PAM type: NRG; PAM sequence: GGG
ggtgggaaaccagaaaactt

SEQ ID NO: 79512 - DNA, 20 bp, Artificial Sequence
  Description of Artificial Sequence: Synthetic oligonucleotide
  Target: LAMA2; (-) strand; PAM type: NRG; PAM sequence: TGG
tggtgggaaaccagaaaact

SEQ ID NO: 79513 - DNA, 20 bp, Artificial Sequence
  Description of Artificial Sequence: Synthetic oligonucleotide
  Target: LAMA2; (-) strand; PAM type: NRG; PAM sequence: CAG
tctggggtatggtgggaaac

SEQ ID NO: 79514 - DNA, 20 bp, Artificial Sequence
  Description of Artificial Sequence: Synthetic oligonucleotide
  Target: LAMA2; (-) strand; PAM type: NRG; PAM sequence: GGG
ttaagaatctggggtatggt

SEQ ID NO: 79515 - DNA, 20 bp, Artificial Sequence
  Description of Artificial Sequence: Synthetic oligonucleotide
  Target: LAMA2; (-) strand; PAM type: NRG; PAM sequence: TGG
cttaagaatctggggtatgg

SEQ ID NO: 79516 - DNA, 20 bp, Artificial Sequence
  Description of Artificial Sequence: Synthetic oligonucleotide
  Target: LAMA2; (-) strand; PAM type: NRG; PAM sequence: TGG
ttacttaagaatctggggta

SEQ ID NO: 79517 - DNA, 20 bp, Artificial Sequence
  Description of Artificial Sequence: Synthetic oligonucleotide
  Target: LAMA2; (-) strand; PAM type: NRG; PAM sequence: GGG
ctaaattacttaagaatctg

SEQ ID NO: 79518 - DNA, 20 bp, Artificial Sequence
  Description of Artificial Sequence: Synthetic oligonucleotide
  Target: LAMA2; (-) strand; PAM type: NRG; PAM sequence: GGG
cctaaattacttaagaatct

SEQ ID NO: 79519 - DNA, 20 bp, Artificial Sequence
  Description of Artificial Sequence: Synthetic oligonucleotide
  Target: LAMA2; (-) strand; PAM type: NRG; PAM sequence: TGG
ccctaaattacttaagaatc

SEQ ID NO: 79520 - DNA, 20 bp, Artificial Sequence
  Description of Artificial Sequence: Synthetic oligonucleotide
  Target: LAMA2; (-) strand; PAM type: NRG; PAM sequence: AAG
tattgtgccctaaattactt

SEQ ID NO: 79521 - DNA, 20 bp, Artificial Sequence
  Description of Artificial Sequence: Synthetic oligonucleotide
  Target: LAMA2; (-) strand; PAM type: NRG; PAM sequence: AAG
tgcgtcaattcgaccttcct

SEQ ID NO: 79522 - DNA, 20 bp, Artificial Sequence
  Description of Artificial Sequence: Synthetic oligonucleotide
  Target: LAMA2; (-) strand; PAM type: NRG; PAM sequence: AGG
acctatatttctctcttcca

SEQ ID NO: 79523 - DNA, 20 bp, Artificial Sequence
  Description of Artificial Sequence: Synthetic oligonucleotide
  Target: LAMA2; (-) strand; PAM type: NRG; PAM sequence: AAG
tacctatatttctctcttcc

SEQ ID NO: 79524 - DNA, 20 bp, Artificial Sequence
  Description of Artificial Sequence: Synthetic oligonucleotide
  Target: LAMA2; (-) strand; PAM type: NRG; PAM sequence: AGG
aatttgtttgtttatatcat

SEQ ID NO: 79525 - DNA, 20 bp, Artificial Sequence
  Description of Artificial Sequence: Synthetic oligonucleotide
  Target: LAMA2; (-) strand; PAM type: NRG; PAM sequence: TAG
caatttgtttgtttatatca

SEQ ID NO: 79526 - DNA, 20 bp, Artificial Sequence
  Description of Artificial Sequence: Synthetic oligonucleotide
  Target: LAMA2; (-) strand; PAM type: NRG; PAM sequence: TAG
gaagtaactgatatatgtta

SEQ ID NO: 79527 - DNA, 20 bp, Artificial Sequence
  Description of Artificial Sequence: Synthetic oligonucleotide
  Target: LAMA2; (-) strand; PAM type: NRG; PAM sequence: AAG
ctatgcactggcatctagtg

SEQ ID NO: 79528 - DNA, 20 bp, Artificial Sequence
  Description of Artificial Sequence: Synthetic oligonucleotide
  Target: LAMA2; (-) strand; PAM type: NRG; PAM sequence: TAG
catgcctatgcactggcatc

SEQ ID NO: 79529 - DNA, 20 bp, Artificial Sequence
  Description of Artificial Sequence: Synthetic oligonucleotide
  Target: LAMA2; (-) strand; PAM type: NRG; PAM sequence: TGG
tcaggtacatgcctatgcac

SEQ ID NO: 79530 - DNA, 20 bp, Artificial Sequence
  Description of Artificial Sequence: Synthetic oligonucleotide
  Target: LAMA2; (-) strand; PAM type: NRG; PAM sequence: AGG
ccaattagttacgcagattc

SEQ ID NO: 79531 - DNA, 20 bp, Artificial Sequence
  Description of Artificial Sequence: Synthetic oligonucleotide
  Target: LAMA2; (-) strand; PAM type: NRG; PAM sequence: CAG
cccaattagttacgcagatt

SEQ ID NO: 79532 - DNA, 20 bp, Artificial Sequence
  Description of Artificial Sequence: Synthetic oligonucleotide
  Target: LAMA2; (-) strand; PAM type: NRG; PAM sequence: CAG
cattctcccaattagttacg

SEQ ID NO: 79533 - DNA, 20 bp, Artificial Sequence
  Description of Artificial Sequence: Synthetic oligonucleotide
  Target: LAMA2; (-) strand; PAM type: NRG; PAM sequence: TAG
taacttcccattctcccaat

SEQ ID NO: 79534 - DNA, 20 bp, Artificial Sequence
  Description of Artificial Sequence: Synthetic oligonucleotide
  Target: LAMA2; (-) strand; PAM type: NRG; PAM sequence: AAG
ttctttttcttggaaaaata

SEQ ID NO: 79535 - DNA, 20 bp, Artificial Sequence
  Description of Artificial Sequence: Synthetic oligonucleotide
  Target: LAMA2; (-) strand; PAM type: NRG; PAM sequence: TGG
ttgattttgtttctttttct

SEQ ID NO: 79536 - DNA, 20 bp, Artificial Sequence
  Description of Artificial Sequence: Synthetic oligonucleotide
  Target: LAMA2; (-) strand; PAM type: NRG; PAM sequence: GAG
ttggtctcccattgattaaa

SEQ ID NO: 79537 - DNA, 20 bp, Artificial Sequence
  Description of Artificial Sequence: Synthetic oligonucleotide
  Target: LAMA2; (-) strand; PAM type: NRG; PAM sequence: AAG
acttggtctcccattgatta

SEQ ID NO: 79538 - DNA, 20 bp, Artificial Sequence
  Description of Artificial Sequence: Synthetic oligonucleotide
  Target: LAMA2; (-) strand; PAM type: NRG; PAM sequence: TGG
ggagaaggatcatcggcact

SEQ ID NO: 79539 - DNA, 20 bp, Artificial Sequence
  Description of Artificial Sequence: Synthetic oligonucleotide
  Target: LAMA2; (-) strand; PAM type: NRG; PAM sequence: CGG
cagttctggagaaggatcat

SEQ ID NO: 79540 - DNA, 20 bp, Artificial Sequence
  Description of Artificial Sequence: Synthetic oligonucleotide
  Target: LAMA2; (-) strand; PAM type: NRG; PAM sequence: AGG
aattctagcagttctggaga

SEQ ID NO: 79541 - DNA, 20 bp, Artificial Sequence
  Description of Artificial Sequence: Synthetic oligonucleotide
  Target: LAMA2; (-) strand; PAM type: NRG; PAM sequence: AAG
aaattctagcagttctggag

SEQ ID NO: 79542 - DNA, 20 bp, Artificial Sequence
  Description of Artificial Sequence: Synthetic oligonucleotide
  Target: LAMA2; (-) strand; PAM type: NRG; PAM sequence: GAG
ggtaaattctagcagttctg

SEQ ID NO: 79543 - DNA, 20 bp, Artificial Sequence
  Description of Artificial Sequence: Synthetic oligonucleotide
  Target: LAMA2; (-) strand; PAM type: NRG; PAM sequence: TGG
gaggtaaattctagcagttc

SEQ ID NO: 79544 - DNA, 20 bp, Artificial Sequence
  Description of Artificial Sequence: Synthetic oligonucleotide
  Target: LAMA2; (-) strand; PAM type: NRG; PAM sequence: CAG
cgagcggaggtaaattctag

SEQ ID NO: 79545 - DNA, 20 bp, Artificial Sequence
  Description of Artificial Sequence: Synthetic oligonucleotide
  Target: LAMA2; (-) strand; PAM type: NRG; PAM sequence: TAG
tagcgagcggaggtaaattc

SEQ ID NO: 79546 - DNA, 20 bp, Artificial Sequence
  Description of Artificial Sequence: Synthetic oligonucleotide
  Target: LAMA2; (-) strand; PAM type: NRG; PAM sequence: AGG
caggcgaatatagcgagcgg

SEQ ID NO: 79547 - DNA, 20 bp, Artificial Sequence
  Description of Artificial Sequence: Synthetic oligonucleotide
  Target: LAMA2; (-) strand; PAM type: NRG; PAM sequence: GAG
tcaggcgaatatagcgagcg

SEQ ID NO: 79548 - DNA, 20 bp, Artificial Sequence
  Description of Artificial Sequence: Synthetic oligonucleotide
  Target: LAMA2; (-) strand; PAM type: NRG; PAM sequence: CGG
tctcaggcgaatatagcgag

SEQ ID NO: 79549 - DNA, 20 bp, Artificial Sequence
  Description of Artificial Sequence: Synthetic oligonucleotide
  Target: LAMA2; (-) strand; PAM type: NRG; PAM sequence: GAG
aaatctcaggcgaatatagc

SEQ ID NO: 79550 - DNA, 20 bp, Artificial Sequence
  Description of Artificial Sequence: Synthetic oligonucleotide
  Target: LAMA2; (-) strand; PAM type: NRG; PAM sequence: TAG
tctgaaatctcaggcgaata

SEQ ID NO: 79551 - DNA, 20 bp, Artificial Sequence
  Description of Artificial Sequence: Synthetic oligonucleotide
  Target: LAMA2; (-) strand; PAM type: NRG; PAM sequence: AGG
tgcggatcctctgaaatctc

SEQ ID NO: 79552 - DNA, 20 bp, Artificial Sequence
  Description of Artificial Sequence: Synthetic oligonucleotide
  Target: LAMA2; (-) strand; PAM type: NRG; PAM sequence: CAG
gtgcggatcctctgaaatct

SEQ ID NO: 79553 - DNA, 20 bp, Artificial Sequence
  Description of Artificial Sequence: Synthetic oligonucleotide
  Target: LAMA2; (-) strand; PAM type: NRG; PAM sequence: CGG
tcaagtcagcattcagtgtg

SEQ ID NO: 79554 - DNA, 20 bp, Artificial Sequence
  Description of Artificial Sequence: Synthetic oligonucleotide
  Target: LAMA2; (-) strand; PAM type: NRG; PAM sequence: CAG
aacatcatcaagtcagcatt

SEQ ID NO: 79555 - DNA, 20 bp, Artificial Sequence
  Description of Artificial Sequence: Synthetic oligonucleotide
  Target: LAMA2; (-) strand; PAM type: NRG; PAM sequence: CAG
gtgagcaaacatcatcaagt

SEQ ID NO: 79556 - DNA, 20 bp, Artificial Sequence
  Description of Artificial Sequence: Synthetic oligonucleotide
  Target: LAMA2; (-) strand; PAM type: NRG; PAM sequence: AAG
ctttgtgagcaaacatcatc

SEQ ID NO: 79557 - DNA, 20 bp, Artificial Sequence
  Description of Artificial Sequence: Synthetic oligonucleotide
  Target: LAMA2; (-) strand; PAM type: NRG; PAM sequence: GAG
aatttctcttgggtctttgt

SEQ ID NO: 79558 - DNA, 20 bp, Artificial Sequence
  Description of Artificial Sequence: Synthetic oligonucleotide
  Target: LAMA2; (-) strand; PAM type: NRG; PAM sequence: GGG
caatggggtcaatttctctt

SEQ ID NO: 79559 - DNA, 20 bp, Artificial Sequence
  Description of Artificial Sequence: Synthetic oligonucleotide
  Target: LAMA2; (-) strand; PAM type: NRG; PAM sequence: TGG
acaatggggtcaatttctct

SEQ ID NO: 79560 - DNA, 20 bp, Artificial Sequence
  Description of Artificial Sequence: Synthetic oligonucleotide
  Target: LAMA2; (-) strand; PAM type: NRG; PAM sequence: GGG
ttactcttctggtgacaatg

SEQ ID NO: 79561 - DNA, 20 bp, Artificial Sequence
  Description of Artificial Sequence: Synthetic oligonucleotide
  Target: LAMA2; (-) strand; PAM type: NRG; PAM sequence: GGG
cttactcttctggtgacaat

SEQ ID NO: 79562 - DNA, 20 bp, Artificial Sequence
  Description of Artificial Sequence: Synthetic oligonucleotide
  Target: LAMA2; (-) strand; PAM type: NRG; PAM sequence: TGG
acttactcttctggtgacaa

SEQ ID NO: 79563 - DNA, 20 bp, Artificial Sequence
  Description of Artificial Sequence: Synthetic oligonucleotide
  Target: LAMA2; (-) strand; PAM type: NRG; PAM sequence: TGG
ttcatcataacttactcttc

SEQ ID NO: 79564 - DNA, 20 bp, Artificial Sequence
  Description of Artificial Sequence: Synthetic oligonucleotide
  Target: LAMA2; (-) strand; PAM type: NRG; PAM sequence: AGG
ataagtgggatatcatttgt

SEQ ID NO: 79565 - DNA, 20 bp, Artificial Sequence
  Description of Artificial Sequence: Synthetic oligonucleotide
  Target: LAMA2; (-) strand; PAM type: NRG; PAM sequence: TAG
gataagtgggatatcatttg

SEQ ID NO: 79566 - DNA, 20 bp, Artificial Sequence
  Description of Artificial Sequence: Synthetic oligonucleotide
  Target: LAMA2; (-) strand; PAM type: NRG; PAM sequence: GGG
taacagacaaaaagataagt

SEQ ID NO: 79567 - DNA, 20 bp, Artificial Sequence
  Description of Artificial Sequence: Synthetic oligonucleotide
  Target: LAMA2; (-) strand; PAM type: NRG; PAM sequence: TGG
ttaacagacaaaaagataag

SEQ ID NO: 79568 - DNA, 20 bp, Artificial Sequence
  Description of Artificial Sequence: Synthetic oligonucleotide
  Target: LAMA2; (-) strand; PAM type: NRG; PAM sequence: AAG
tatttaacagacaaaaagat

SEQ ID NO: 79569 - DNA, 20 bp, Artificial Sequence
  Description of Artificial Sequence: Synthetic oligonucleotide
  Target: LAMA2; (-) strand; PAM type: NRG; PAM sequence: AAG
taaagtatttaacagacaaa

SEQ ID NO: 79570 - DNA, 20 bp, Artificial Sequence
  Description of Artificial Sequence: Synthetic oligonucleotide
  Target: LAMA2; (-) strand; PAM type: NRG; PAM sequence: CAG
aacatttttaaagtatttaa

SEQ ID NO: 79571 - DNA, 20 bp, Artificial Sequence
  Description of Artificial Sequence: Synthetic oligonucleotide
  Target: LAMA2; (-) strand; PAM type: NRG; PAM sequence: AAG
aatcactgaaaacattttta

SEQ ID NO: 79572 - DNA, 20 bp, Artificial Sequence
  Description of Artificial Sequence: Synthetic oligonucleotide
  Target: LAMA2; (-) strand; PAM type: NRG; PAM sequence: AAG
gcttggatctgaacaaagga

SEQ ID NO: 79573 - DNA, 20 bp, Artificial Sequence
  Description of Artificial Sequence: Synthetic oligonucleotide
  Target: LAMA2; (-) strand; PAM type: NRG; PAM sequence: AGG
cacagcttggatctgaacaa

SEQ ID NO: 79574 - DNA, 20 bp, Artificial Sequence
  Description of Artificial Sequence: Synthetic oligonucleotide
  Target: LAMA2; (-) strand; PAM type: NRG; PAM sequence: AAG
gcacagcttggatctgaaca

SEQ ID NO: 79575 - DNA, 20 bp, Artificial Sequence
  Description of Artificial Sequence: Synthetic oligonucleotide
  Target: LAMA2; (-) strand; PAM type: NRG; PAM sequence: TGG
atgtaataagcggcacagct

SEQ ID NO: 79576 - DNA, 20 bp, Artificial Sequence
  Description of Artificial Sequence: Synthetic oligonucleotide
  Target: LAMA2; (-) strand; PAM type: NRG; PAM sequence: CAG
tacacatgtaataagcggca

SEQ ID NO: 79577 - DNA, 20 bp, Artificial Sequence
  Description of Artificial Sequence: Synthetic oligonucleotide
  Target: LAMA2; (-) strand; PAM type: NRG; PAM sequence: CGG
aatgttacacatgtaataag

SEQ ID NO: 79578 - DNA, 20 bp, Artificial Sequence
  Description of Artificial Sequence: Synthetic oligonucleotide
  Target: LAMA2; (-) strand; PAM type: NRG; PAM sequence: AAG
ataaatgttacacatgtaat

SEQ ID NO: 79579 - DNA, 20 bp, Artificial Sequence
  Description of Artificial Sequence: Synthetic oligonucleotide
  Target: LAMA2; (-) strand; PAM type: NRG; PAM sequence: AGG
gaagaaattaaagtttgaga

SEQ ID NO: 79580 - DNA, 20 bp, Artificial Sequence
  Description of Artificial Sequence: Synthetic oligonucleotide
  Target: LAMA2; (-) strand; PAM type: NRG; PAM sequence: AAG
agaagaaattaaagtttgag

SEQ ID NO: 79581 - DNA, 20 bp, Artificial Sequence
  Description of Artificial Sequence: Synthetic oligonucleotide
  Target: LAMA2; (-) strand; PAM type: NRG; PAM sequence: GAG
aaaagaagaaattaaagttt

SEQ ID NO: 79582 - DNA, 20 bp, Artificial Sequence
  Description of Artificial Sequence: Synthetic oligonucleotide
  Target: LAMA2; (-) strand; PAM type: NRG; PAM sequence: AAG
ttttacaaaagaagaaatta

SEQ ID NO: 79583 - DNA, 20 bp, Artificial Sequence
  Description of Artificial Sequence: Synthetic oligonucleotide
  Target: LAMA2; (-) strand; PAM type: NRG; PAM sequence: AAG
tgattctcattttacaaaag

SEQ ID NO: 79584 - DNA, 20 bp, Artificial Sequence
  Description of Artificial Sequence: Synthetic oligonucleotide
  Target: LAMA2; (-) strand; PAM type: NRG; PAM sequence: AAG
ttgtgattctcattttacaa

SEQ ID NO: 79585 - DNA, 20 bp, Artificial Sequence
  Description of Artificial Sequence: Synthetic oligonucleotide
  Target: LAMA2; (-) strand; PAM type: NRG; PAM sequence: TAG
tgaaaaataagattattaag

SEQ ID NO: 79586 - DNA, 20 bp, Artificial Sequence
  Description of Artificial Sequence: Synthetic oligonucleotide
  Target: LAMA2; (-) strand; PAM type: NRG; PAM sequence: AAG
ttctgaaaaataagattatt

SEQ ID NO: 79587 - DNA, 20 bp, Artificial Sequence
  Description of Artificial Sequence: Synthetic oligonucleotide
  Target: LAMA2; (-) strand; PAM type: NRG; PAM sequence: AAG
ctaattttattctgaaaaat

SEQ ID NO: 79588 - DNA, 20 bp, Artificial Sequence
  Description of Artificial Sequence: Synthetic oligonucleotide
  Target: LAMA2; (-) strand; PAM type: NRG; PAM sequence: AGG
tagatcccctaaggtgacaa

SEQ ID NO: 79589 - DNA, 20 bp, Artificial Sequence
  Description of Artificial Sequence: Synthetic oligonucleotide
  Target: LAMA2; (-) strand; PAM type: NRG; PAM sequence: AAG
atagatcccctaaggtgaca

SEQ ID NO: 79590 - DNA, 20 bp, Artificial Sequence
  Description of Artificial Sequence: Synthetic oligonucleotide
  Target: LAMA2; (-) strand; PAM type: NRG; PAM sequence: AGG
atagtagtatagatccccta

SEQ ID NO: 79591 - DNA, 20 bp, Artificial Sequence
  Description of Artificial Sequence: Synthetic oligonucleotide
  Target: LAMA2; (-) strand; PAM type: NRG; PAM sequence: AAG
aatagtagtatagatcccct

SEQ ID NO: 79592 - DNA, 20 bp, Artificial Sequence
  Description of Artificial Sequence: Synthetic oligonucleotide
  Target: LAMA2; (-) strand; PAM type: NRG; PAM sequence: TAG
agccaattataatagtagta

SEQ ID NO: 79593 - DNA, 20 bp, Artificial Sequence
  Description of Artificial Sequence: Synthetic oligonucleotide
  Target: LAMA2; (-) strand; PAM type: NRG; PAM sequence: TAG
gccaaagccaattataatag

SEQ ID NO: 79594 - DNA, 20 bp, Artificial Sequence
  Description of Artificial Sequence: Synthetic oligonucleotide
  Target: LAMA2; (-) strand; PAM type: NRG; PAM sequence: TAG
ctcgccaaagccaattataa

SEQ ID NO: 79595 - DNA, 20 bp, Artificial Sequence
  Description of Artificial Sequence: Synthetic oligonucleotide
  Target: LAMA2; (-) strand; PAM type: NRG; PAM sequence: AAG
cttccagtagtaactcgcca

SEQ ID NO: 79596 - DNA, 20 bp, Artificial Sequence
  Description of Artificial Sequence: Synthetic oligonucleotide
  Target: LAMA2; (-) strand; PAM type: NRG; PAM sequence: TAG
caaagcccctgcacttccag

SEQ ID NO: 79597 - DNA, 20 bp, Artificial Sequence
  Description of Artificial Sequence: Synthetic oligonucleotide
  Target: LAMA2; (-) strand; PAM type: NRG; PAM sequence: CAG
tttcaaagcccctgcacttc

SEQ ID NO: 79598 - DNA, 20 bp, Artificial Sequence
  Description of Artificial Sequence: Synthetic oligonucleotide
  Target: LAMA2; (-) strand; PAM type: NRG; PAM sequence: AAG
ggtggcaaaaaaatgtttca

SEQ ID NO: 79599 - DNA, 20 bp, Artificial Sequence
  Description of Artificial Sequence: Synthetic oligonucleotide
  Target: LAMA2; (-) strand; PAM type: NRG; PAM sequence: TGG
tgtgtatactggctcagtgg

SEQ ID NO: 79600 - DNA, 20 bp, Artificial Sequence
  Description of Artificial Sequence: Synthetic oligonucleotide
  Target: LAMA2; (-) strand; PAM type: NRG; PAM sequence: TGG
atgtgtgtatactggctcag

SEQ ID NO: 79601 - DNA, 20 bp, Artificial Sequence
  Description of Artificial Sequence: Synthetic oligonucleotide
  Target: LAMA2; (-) strand; PAM type: NRG; PAM sequence: CAG
tgcatgtgtgtatactggct

SEQ ID NO: 79602 - DNA, 20 bp, Artificial Sequence
  Description of Artificial Sequence: Synthetic oligonucleotide
  Target: LAMA2; (-) strand; PAM type: NRG; PAM sequence: TGG
atgtgtgcatgtgtgtatac

SEQ ID NO: 79603 - DNA, 20 bp, Artificial Sequence
  Description of Artificial Sequence: Synthetic oligonucleotide
  Target: LAMA2; (-) strand; PAM type: NRG; PAM sequence: AAG
tcccatacacattaaggttt

SEQ ID NO: 79604 - DNA, 20 bp, Artificial Sequence
  Description of Artificial Sequence: Synthetic oligonucleotide
  Target: LAMA2; (-) strand; PAM type: NRG; PAM sequence: AGG
ggctaatcccatacacatta

SEQ ID NO: 79605 - DNA, 20 bp, Artificial Sequence
  Description of Artificial Sequence: Synthetic oligonucleotide
  Target: LAMA2; (-) strand; PAM type: NRG; PAM sequence: AAG
tggctaatcccatacacatt

SEQ ID NO: 79606 - DNA, 20 bp, Artificial Sequence
  Description of Artificial Sequence: Synthetic oligonucleotide
  Target: LAMA2; (-) strand; PAM type: NRG; PAM sequence: TGG
ctatatttccacaagatcac

SEQ ID NO: 79607 - DNA, 20 bp, Artificial Sequence
  Description of Artificial Sequence: Synthetic oligonucleotide
  Target: LAMA2; (-) strand; PAM type: NRG; PAM sequence: AAG
atcataacctatatttccac

SEQ ID NO: 79608 - DNA, 20 bp, Artificial Sequence
  Description of Artificial Sequence: Synthetic oligonucleotide
  Target: LAMA2; (-) strand; PAM type: NRG; PAM sequence: CAG
gtttttgaagtgcagcgtct

SEQ ID NO: 79609 - DNA, 20 bp, Artificial Sequence
  Description of Artificial Sequence: Synthetic oligonucleotide
  Target: LAMA2; (-) strand; PAM type: NRG; PAM sequence: CAG
cctggaaagtttttgaagtg

SEQ ID NO: 79610 - DNA, 20 bp, Artificial Sequence
  Description of Artificial Sequence: Synthetic oligonucleotide
  Target: LAMA2; (-) strand; PAM type: NRG; PAM sequence: AAG
catcacctggaaagtttttg

SEQ ID NO: 79611 - DNA, 20 bp, Artificial Sequence
  Description of Artificial Sequence: Synthetic oligonucleotide
  Target: LAMA2; (-) strand; PAM type: NRG; PAM sequence: AAG
caacatcagcatcacctgga

SEQ ID NO: 79612 - DNA, 20 bp, Artificial Sequence
  Description of Artificial Sequence: Synthetic oligonucleotide
  Target: LAMA2; (-) strand; PAM type: NRG; PAM sequence: TGG
ccggcaacatcagcatcacc

SEQ ID NO: 79613 - DNA, 20 bp, Artificial Sequence
  Description of Artificial Sequence: Synthetic oligonucleotide
  Target: LAMA2; (-) strand; PAM type: NRG; PAM sequence: CAG
ggcccacaaaccggcaacat

SEQ ID NO: 79614 - DNA, 20 bp, Artificial Sequence
  Description of Artificial Sequence: Synthetic oligonucleotide
  Target: LAMA2; (-) strand; PAM type: NRG; PAM sequence: CGG
ttatttgatggcccacaaac

SEQ ID NO: 79615 - DNA, 20 bp, Artificial Sequence
  Description of Artificial Sequence: Synthetic oligonucleotide
  Target: LAMA2; (-) strand; PAM type: NRG; PAM sequence: TGG
cataaaaccaaattatttga

SEQ ID NO: 79616 - DNA, 20 bp, Artificial Sequence
  Description of Artificial Sequence: Synthetic oligonucleotide
  Target: LAMA2; (-) strand; PAM type: NRG; PAM sequence: AAG
tggcttgtgattcattaatc

SEQ ID NO: 79617 - DNA, 20 bp, Artificial Sequence
  Description of Artificial Sequence: Synthetic oligonucleotide
  Target: LAMA2; (-) strand; PAM type: NRG; PAM sequence: TGG
gcactgcatttttaaaacta

SEQ ID NO: 79618 - DNA, 20 bp, Artificial Sequence
  Description of Artificial Sequence: Synthetic oligonucleotide
  Target: LAMA2; (-) strand; PAM type: NRG; PAM sequence: TAG
gtagaatcagttttctccta

SEQ ID NO: 79619 - DNA, 20 bp, Artificial Sequence
  Description of Artificial Sequence: Synthetic oligonucleotide
  Target: LAMA2; (-) strand; PAM type: NRG; PAM sequence: CAG
aataaaacagtatgtagaat

SEQ ID NO: 79620 - DNA, 20 bp, Artificial Sequence
  Description of Artificial Sequence: Synthetic oligonucleotide
  Target: LAMA2; (-) strand; PAM type: NRG; PAM sequence: TAG
aaggaaaataaaacagtatg

SEQ ID NO: 79621 - DNA, 20 bp, Artificial Sequence
  Description of Artificial Sequence: Synthetic oligonucleotide
  Target: LAMA2; (-) strand; PAM type: NRG; PAM sequence: CAG
atttgtaaaggaaaataaaa

SEQ ID NO: 79622 - DNA, 20 bp, Artificial Sequence
  Description of Artificial Sequence: Synthetic oligonucleotide
  Target: LAMA2; (-) strand; PAM type: NRG; PAM sequence: AGG
ccctaatattttatttgtaa

SEQ ID NO: 79623 - DNA, 20 bp, Artificial Sequence
  Description of Artificial Sequence: Synthetic oligonucleotide
  Target: LAMA2; (-) strand; PAM type: NRG; PAM sequence: AAG
cccctaatattttatttgta

SEQ ID NO: 79624 - DNA, 20 bp, Artificial Sequence
  Description of Artificial Sequence: Synthetic oligonucleotide
  Target: LAMA2; (-) strand; PAM type: NRG; PAM sequence: AAG
gtgttcaaaaagcttttgaa

SEQ ID NO: 79625 - DNA, 20 bp, Artificial Sequence
  Description of Artificial Sequence: Synthetic oligonucleotide
  Target: LAMA2; (-) strand; PAM type: NRG; PAM sequence: AAG
tgttagctcttgtgttcaaa

SEQ ID NO: 79626 - DNA, 20 bp, Artificial Sequence
  Description of Artificial Sequence: Synthetic oligonucleotide
  Target: LAMA2; (-) strand; PAM type: NRG; PAM sequence: TAG
ctggaagacagcacttctgt

SEQ ID NO: 79627 - DNA, 20 bp, Artificial Sequence
  Description of Artificial Sequence: Synthetic oligonucleotide
  Target: LAMA2; (-) strand; PAM type: NRG; PAM sequence: CAG
tcctgtttaacactggaaga

SEQ ID NO: 79628 - DNA, 20 bp, Artificial Sequence
  Description of Artificial Sequence: Synthetic oligonucleotide
  Target: LAMA2; (-) strand; PAM type: NRG; PAM sequence: AAG
aaattcctgtttaacactgg

SEQ ID NO: 79629 - DNA, 20 bp, Artificial Sequence
  Description of Artificial Sequence: Synthetic oligonucleotide
  Target: LAMA2; (-) strand; PAM type: NRG; PAM sequence: TGG
cacaaattcctgtttaacac

SEQ ID NO: 79630 - DNA, 20 bp, Artificial Sequence
  Description of Artificial Sequence: Synthetic oligonucleotide
  Target: LAMA2; (-) strand; PAM type: NRG; PAM sequence: GGG
gttatcactcatagcaatct

SEQ ID NO: 79631 - DNA, 20 bp, Artificial Sequence
  Description of Artificial Sequence: Synthetic oligonucleotide
  Target: LAMA2; (-) strand; PAM type: NRG; PAM sequence: TGG
ggttatcactcatagcaatc

SEQ ID NO: 79632 - DNA, 20 bp, Artificial Sequence
  Description of Artificial Sequence: Synthetic oligonucleotide
  Target: LAMA2; (-) strand; PAM type: NRG; PAM sequence: TAG
ggaagcacggttatcactca

SEQ ID NO: 79633 - DNA, 20 bp, Artificial Sequence
  Description of Artificial Sequence: Synthetic oligonucleotide
  Target: LAMA2; (-) strand; PAM type: NRG; PAM sequence: CGG
aaggtagacaggaggaagca

SEQ ID NO: 79634 - DNA, 20 bp, Artificial Sequence
  Description of Artificial Sequence: Synthetic oligonucleotide
  Target: LAMA2; (-) strand; PAM type: NRG; PAM sequence: AAG
ggtagaaggtagacaggagg

SEQ ID NO: 79635 - DNA, 20 bp, Artificial Sequence
  Description of Artificial Sequence: Synthetic oligonucleotide
  Target: LAMA2; (-) strand; PAM type: NRG; PAM sequence: AGG
tatggtagaaggtagacagg

SEQ ID NO: 79636 - DNA, 20 bp, Artificial Sequence
  Description of Artificial Sequence: Synthetic oligonucleotide
  Target: LAMA2; (-) strand; PAM type: NRG; PAM sequence: GAG
atatggtagaaggtagacag

SEQ ID NO: 79637 - DNA, 20 bp, Artificial Sequence
  Description of Artificial Sequence: Synthetic oligonucleotide
  Target: LAMA2; (-) strand; PAM type: NRG; PAM sequence: AGG
gaatatggtagaaggtagac

SEQ ID NO: 79638 - DNA, 20 bp, Artificial Sequence
  Description of Artificial Sequence: Synthetic oligonucleotide
  Target: LAMA2; (-) strand; PAM type: NRG; PAM sequence: CAG
tgaatatggtagaaggtaga

SEQ ID NO: 79639 - DNA, 20 bp, Artificial Sequence
  Description of Artificial Sequence: Synthetic oligonucleotide
  Target: LAMA2; (-) strand; PAM type: NRG; PAM sequence: TAG
ccagtgaatatggtagaagg

SEQ ID NO: 79640 - DNA, 20 bp, Artificial Sequence
  Description of Artificial Sequence: Synthetic oligonucleotide
  Target: LAMA2; (-) strand; PAM type: NRG; PAM sequence: AGG
aaaccagtgaatatggtaga

SEQ ID NO: 79641 - DNA, 20 bp, Artificial Sequence
  Description of Artificial Sequence: Synthetic oligonucleotide
  Target: LAMA2; (-) strand; PAM type: NRG; PAM sequence: AAG
taaaccagtgaatatggtag

SEQ ID NO: 79642 - DNA, 20 bp, Artificial Sequence
  Description of Artificial Sequence: Synthetic oligonucleotide
  Target: LAMA2; (-) strand; PAM type: NRG; PAM sequence: TAG
ccataaaccagtgaatatgg

SEQ ID NO: 79643 - DNA, 20 bp, Artificial Sequence
  Description of Artificial Sequence: Synthetic oligonucleotide
  Target: LAMA2; (-) strand; PAM type: NRG; PAM sequence: TGG
gtgccataaaccagtgaata

SEQ ID NO: 79644 - DNA, 20 bp, Artificial Sequence
  Description of Artificial Sequence: Synthetic oligonucleotide
  Target: LAMA2; (-) strand; PAM type: NRG; PAM sequence: CAG
atgtgggaggtgccataaac

SEQ ID NO: 79645 - DNA, 20 bp, Artificial Sequence
  Description of Artificial Sequence: Synthetic oligonucleotide
  Target: LAMA2; (-) strand; PAM type: NRG; PAM sequence: AGG
tgtgtagcagcatatgtggg

SEQ ID NO: 79646 - DNA, 20 bp, Artificial Sequence
  Description of Artificial Sequence: Synthetic oligonucleotide
  Target: LAMA2; (-) strand; PAM type: NRG; PAM sequence: GAG
ttgtgtagcagcatatgtgg

SEQ ID NO: 79647 - DNA, 20 bp, Artificial Sequence
  Description of Artificial Sequence: Synthetic oligonucleotide
  Target: LAMA2; (-) strand; PAM type: NRG; PAM sequence: GGG
ggttgtgtagcagcatatgt

SEQ ID NO: 79648 - DNA, 20 bp, Artificial Sequence
  Description of Artificial Sequence: Synthetic oligonucleotide
  Target: LAMA2; (-) strand; PAM type: NRG; PAM sequence: TGG
tggttgtgtagcagcatatg

SEQ ID NO: 79649 - DNA, 20 bp, Artificial Sequence
  Description of Artificial Sequence: Synthetic oligonucleotide
  Target: LAMA2; (-) strand; PAM type: NRG; PAM sequence: CAG
ataatgccttggttgtgtag

SEQ ID NO: 79650 - DNA, 20 bp, Artificial Sequence
  Description of Artificial Sequence: Synthetic oligonucleotide
  Target: LAMA2; (-) strand; PAM type: NRG; PAM sequence: TAG
gtaataatgccttggttgtg

SEQ ID NO: 79651 - DNA, 20 bp, Artificial Sequence
  Description of Artificial Sequence: Synthetic oligonucleotide
  Target: LAMA2; (-) strand; PAM type: NRG; PAM sequence: TGG
cttccctggtaataatgcct

SEQ ID NO: 79652 - DNA, 20 bp, Artificial Sequence
  Description of Artificial Sequence: Synthetic oligonucleotide
  Target: LAMA2; (-) strand; PAM type: NRG; PAM sequence: TGG
tatggctgaattgacttccc

SEQ ID NO: 79653 - DNA, 20 bp, Artificial Sequence
  Description of Artificial Sequence: Synthetic oligonucleotide
  Target: LAMA2; (-) strand; PAM type: NRG; PAM sequence: TGG
gagtttactttatagagtta

SEQ ID NO: 79654 - DNA, 20 bp, Artificial Sequence
  Description of Artificial Sequence: Synthetic oligonucleotide
  Target: LAMA2; (-) strand; PAM type: NRG; PAM sequence: GAG
tcacaggagtttactttata

SEQ ID NO: 79655 - DNA, 20 bp, Artificial Sequence
  Description of Artificial Sequence: Synthetic oligonucleotide
  Target: LAMA2; (-) strand; PAM type: NRG; PAM sequence: TAG
attcacaggagtttacttta

SEQ ID NO: 79656 - DNA, 20 bp, Artificial Sequence
  Description of Artificial Sequence: Synthetic oligonucleotide
  Target: LAMA2; (-) strand; PAM type: NRG; PAM sequence: GAG
agtagatactctattcacag

SEQ ID NO: 79657 - DNA, 20 bp, Artificial Sequence
  Description of Artificial Sequence: Synthetic oligonucleotide
  Target: LAMA2; (-) strand; PAM type: NRG; PAM sequence: AGG
acagtagatactctattcac

SEQ ID NO: 79658 - DNA, 20 bp, Artificial Sequence
  Description of Artificial Sequence: Synthetic oligonucleotide
  Target: LAMA2; (-) strand; PAM type: NRG; PAM sequence: CAG
tacagtagatactctattca

SEQ ID NO: 79659 - DNA, 20 bp, Artificial Sequence
  Description of Artificial Sequence: Synthetic oligonucleotide
  Target: LAMA2; (-) strand; PAM type: NRG; PAM sequence: TAG
ctatacctctagtcatacag

SEQ ID NO: 79660 - DNA, 20 bp, Artificial Sequence
  Description of Artificial Sequence: Synthetic oligonucleotide
  Target: LAMA2; (-) strand; PAM type: NRG; PAM sequence: CAG
tagctatacctctagtcata

SEQ ID NO: 79661 - DNA, 20 bp, Artificial Sequence
  Description of Artificial Sequence: Synthetic oligonucleotide
  Target: LAMA2; (-) strand; PAM type: NRG; PAM sequence: TAG
ttttttcttagctatacctc

SEQ ID NO: 79662 - DNA, 20 bp, Artificial Sequence
  Description of Artificial Sequence: Synthetic oligonucleotide
  Target: LAMA2; (-) strand; PAM type: NRG; PAM sequence: TAG
ctccctatagtcttttttct

SEQ ID NO: 79663 - DNA, 20 bp, Artificial Sequence
  Description of Artificial Sequence: Synthetic oligonucleotide
  Target: LAMA2; (-) strand; PAM type: NRG; PAM sequence: TAG
acaatattaatttctcccta

SEQ ID NO: 79664 - DNA, 20 bp, Artificial Sequence
  Description of Artificial Sequence: Synthetic oligonucleotide
  Target: LAMA2; (-) strand; PAM type: NRG; PAM sequence: TAG
ttaccttagtgggatcattc

SEQ ID NO: 79665 - DNA, 20 bp, Artificial Sequence
  Description of Artificial Sequence: Synthetic oligonucleotide
  Target: LAMA2; (-) strand; PAM type: NRG; PAM sequence: GGG
gacggtggtcttaccttagt

SEQ ID NO: 79666 - DNA, 20 bp, Artificial Sequence
  Description of Artificial Sequence: Synthetic oligonucleotide
  Target: LAMA2; (-) strand; PAM type: NRG; PAM sequence: TGG
tgacggtggtcttaccttag

SEQ ID NO: 79667 - DNA, 20 bp, Artificial Sequence
  Description of Artificial Sequence: Synthetic oligonucleotide
  Target: LAMA2; (-) strand; PAM type: NRG; PAM sequence: TAG
cgatgacggtggtcttacct

SEQ ID NO: 79668 - DNA, 20 bp, Artificial Sequence
  Description of Artificial Sequence: Synthetic oligonucleotide
  Target: LAMA2; (-) strand; PAM type: NRG; PAM sequence: TGG
aattttgcaaccgatgacgg

SEQ ID NO: 79669 - DNA, 20 bp, Artificial Sequence
  Description of Artificial Sequence: Synthetic oligonucleotide
  Target: LAMA2; (-) strand; PAM type: NRG; PAM sequence: CGG
agcaattttgcaaccgatga

SEQ ID NO: 79670 - DNA, 20 bp, Artificial Sequence
  Description of Artificial Sequence: Synthetic oligonucleotide
  Target: LAMA2; (-) strand; PAM type: NRG; PAM sequence: CAG
aactattaaccctagtgatt

SEQ ID NO: 79671 - DNA, 20 bp, Artificial Sequence
  Description of Artificial Sequence: Synthetic oligonucleotide
  Target: LAMA2; (-) strand; PAM type: NRG; PAM sequence: TAG
ggatctgtaactattaaccc

SEQ ID NO: 79672 - DNA, 20 bp, Artificial Sequence
  Description of Artificial Sequence: Synthetic oligonucleotide
  Target: LAMA2; (-) strand; PAM type: NRG; PAM sequence: AGG
aaaacatgtgaggagtattt

SEQ ID NO: 79673 - DNA, 20 bp, Artificial Sequence
  Description of Artificial Sequence: Synthetic oligonucleotide
  Target: LAMA2; (-) strand; PAM type: NRG; PAM sequence: TAG
gaaaacatgtgaggagtatt

SEQ ID NO: 79674 - DNA, 20 bp, Artificial Sequence
  Description of Artificial Sequence: Synthetic oligonucleotide
  Target: LAMA2; (-) strand; PAM type: NRG; PAM sequence: GAG
gaggaaagaaaacatgtgag

SEQ ID NO: 79675 - DNA, 20 bp, Artificial Sequence
  Description of Artificial Sequence: Synthetic oligonucleotide
  Target: LAMA2; (-) strand; PAM type: NRG; PAM sequence: AGG
acgaggaaagaaaacatgtg

SEQ ID NO: 79676 - DNA, 20 bp, Artificial Sequence
  Description of Artificial Sequence: Synthetic oligonucleotide
  Target: LAMA2; (-) strand; PAM type: NRG; PAM sequence: GAG
aacgaggaaagaaaacatgt

SEQ ID NO: 79677 - DNA, 20 bp, Artificial Sequence
  Description of Artificial Sequence: Synthetic oligonucleotide
  Target: LAMA2; (-) strand; PAM type: NRG; PAM sequence: AAG
gggaagttaagtaacgagga

SEQ ID NO: 79678 - DNA, 20 bp, Artificial Sequence
  Description of Artificial Sequence: Synthetic oligonucleotide
  Target: LAMA2; (-) strand; PAM type: NRG; PAM sequence: AGG
gtgtgggaagttaagtaacg

SEQ ID NO: 79679 - DNA, 20 bp, Artificial Sequence
  Description of Artificial Sequence: Synthetic oligonucleotide
  Target: LAMA2; (-) strand; PAM type: NRG; PAM sequence: GAG
ggtgtgggaagttaagtaac

SEQ ID NO: 79680 - DNA, 20 bp, Artificial Sequence
  Description of Artificial Sequence: Synthetic oligonucleotide
  Target: LAMA2; (-) strand; PAM type: NRG; PAM sequence: AAG
gaggttgggtgtgggaagtt

SEQ ID NO: 79681 - DNA, 20 bp, Artificial Sequence
  Description of Artificial Sequence: Synthetic oligonucleotide
  Target: LAMA2; (-) strand; PAM type: NRG; PAM sequence: AAG
atggagaggttgggtgtggg

SEQ ID NO: 79682 - DNA, 20 bp, Artificial Sequence
  Description of Artificial Sequence: Synthetic oligonucleotide
  Target: LAMA2; (-) strand; PAM type: NRG; PAM sequence: GGG
atgatggagaggttgggtgt

SEQ ID NO: 79683 - DNA, 20 bp, Artificial Sequence
  Description of Artificial Sequence: Synthetic oligonucleotide
  Target: LAMA2; (-) strand; PAM type: NRG; PAM sequence: TGG
gatgatggagaggttgggtg

SEQ ID NO: 79684 - DNA, 20 bp, Artificial Sequence
  Description of Artificial Sequence: Synthetic oligonucleotide
  Target: LAMA2; (-) strand; PAM type: NRG; PAM sequence: GGG
cttgtgatgatggagaggtt

SEQ ID NO: 79685 - DNA, 20 bp, Artificial Sequence
  Description of Artificial Sequence: Synthetic oligonucleotide
  Target: LAMA2; (-) strand; PAM type: NRG; PAM sequence: TGG
tcttgtgatgatggagaggt

SEQ ID NO: 79686 - DNA, 20 bp, Artificial Sequence
  Description of Artificial Sequence: Synthetic oligonucleotide
  Target: LAMA2; (-) strand; PAM type: NRG; PAM sequence: AGG
gttatcttgtgatgatggag

SEQ ID NO: 79687 - DNA, 20 bp, Artificial Sequence
  Description of Artificial Sequence: Synthetic oligonucleotide
  Target: LAMA2; (-) strand; PAM type: NRG; PAM sequence: GAG
agttatcttgtgatgatgga

SEQ ID NO: 79688 - DNA, 20 bp, Artificial Sequence
  Description of Artificial Sequence: Synthetic oligonucleotide
  Target: LAMA2; (-) strand; PAM type: NRG; PAM sequence: GAG
aaagttatcttgtgatgatg

SEQ ID NO: 79689 - DNA, 20 bp, Artificial Sequence
  Description of Artificial Sequence: Synthetic oligonucleotide
  Target: LAMA2; (-) strand; PAM type: NRG; PAM sequence: TGG
taaaagttatcttgtgatga

SEQ ID NO: 79690 - DNA, 20 bp, Artificial Sequence
  Description of Artificial Sequence: Synthetic oligonucleotide
  Target: LAMA2; (-) strand; PAM type: NRG; PAM sequence: AAG
gggactaactaaagccttaa

SEQ ID NO: 79691 - DNA, 20 bp, Artificial Sequence
  Description of Artificial Sequence: Synthetic oligonucleotide
  Target: LAMA2; (-) strand; PAM type: NRG; PAM sequence: AAG
atgttgcatgggactaacta

SEQ ID NO: 79692 - DNA, 20 bp, Artificial Sequence
  Description of Artificial Sequence: Synthetic oligonucleotide
  Target: LAMA2; (-) strand; PAM type: NRG; PAM sequence: GGG
acatctgacatatgttgcat

SEQ ID NO: 79693 - DNA, 20 bp, Artificial Sequence
  Description of Artificial Sequence: Synthetic oligonucleotide
  Target: LAMA2; (-) strand; PAM type: NRG; PAM sequence: TGG
aacatctgacatatgttgca

SEQ ID NO: 79694 - DNA, 20 bp, Artificial Sequence
  Description of Artificial Sequence: Synthetic oligonucleotide
  Target: LAMA2; (-) strand; PAM type: NRG; PAM sequence: GGG
tttcaagtttggaaaataca

SEQ ID NO: 79695 - DNA, 20 bp, Artificial Sequence
  Description of Artificial Sequence: Synthetic oligonucleotide
  Target: LAMA2; (-) strand; PAM type: NRG; PAM sequence: AGG
atttcaagtttggaaaatac

SEQ ID NO: 79696 - DNA, 20 bp, Artificial Sequence
  Description of Artificial Sequence: Synthetic oligonucleotide
  Target: LAMA2; (-) strand; PAM type: NRG; PAM sequence: CAG
tatttcaagtttggaaaata

SEQ ID NO: 79697 - DNA, 20 bp, Artificial Sequence
  Description of Artificial Sequence: Synthetic oligonucleotide
  Target: LAMA2; (-) strand; PAM type: NRG; PAM sequence: TGG
aggggaaattatttcaagtt

SEQ ID NO: 79698 - DNA, 20 bp, Artificial Sequence
  Description of Artificial Sequence: Synthetic oligonucleotide
  Target: LAMA2; (-) strand; PAM type: NRG; PAM sequence: AAG
atacaaggggaaattatttc

SEQ ID NO: 79699 - DNA, 20 bp, Artificial Sequence
  Description of Artificial Sequence: Synthetic oligonucleotide
  Target: LAMA2; (-) strand; PAM type: NRG; PAM sequence: GGG
atgttgaggtataatacaag

SEQ ID NO: 79700 - DNA, 20 bp, Artificial Sequence
  Description of Artificial Sequence: Synthetic oligonucleotide
  Target: LAMA2; (-) strand; PAM type: NRG; PAM sequence: GGG
tatgttgaggtataatacaa

SEQ ID NO: 79701 - DNA, 20 bp, Artificial Sequence
  Description of Artificial Sequence: Synthetic oligonucleotide
  Target: LAMA2; (-) strand; PAM type: NRG; PAM sequence: AGG
atatgttgaggtataataca

SEQ ID NO: 79702 - DNA, 20 bp, Artificial Sequence
  Description of Artificial Sequence: Synthetic oligonucleotide
  Target: LAMA2; (-) strand; PAM type: NRG; PAM sequence: AAG
aatatgttgaggtataatac

SEQ ID NO: 79703 - DNA, 20 bp, Artificial Sequence
  Description of Artificial Sequence: Synthetic oligonucleotide
  Target: LAMA2; (-) strand; PAM type: NRG; PAM sequence: AGG
agacaatttacaatatgttg

SEQ ID NO: 79704 - DNA, 20 bp, Artificial Sequence
  Description of Artificial Sequence: Synthetic oligonucleotide
  Target: LAMA2; (-) strand; PAM type: NRG; PAM sequence: GAG
gagacaatttacaatatgtt

SEQ ID NO: 79705 - DNA, 20 bp, Artificial Sequence
  Description of Artificial Sequence: Synthetic oligonucleotide
  Target: LAMA2; (-) strand; PAM type: NRG; PAM sequence: GAG
aataatgattagttttgcat

SEQ ID NO: 79706 - DNA, 20 bp, Artificial Sequence
  Description of Artificial Sequence: Synthetic oligonucleotide
  Target: LAMA2; (-) strand; PAM type: NRG; PAM sequence: TAG
cattgctataaaataatgat

SEQ ID NO: 79707 - DNA, 20 bp, Artificial Sequence
  Description of Artificial Sequence: Synthetic oligonucleotide
  Target: LAMA2; (-) strand; PAM type: NRG; PAM sequence: AAG
ttgaaaatgttttcttaaac

SEQ ID NO: 79708 - DNA, 20 bp, Artificial Sequence
  Description of Artificial Sequence: Synthetic oligonucleotide
  Target: LAMA2; (-) strand; PAM type: NRG; PAM sequence: TAG
tttttaagtcccgccaaaat

SEQ ID NO: 79709 - DNA, 20 bp, Artificial Sequence
  Description of Artificial Sequence: Synthetic oligonucleotide
  Target: LAMA2; (-) strand; PAM type: NRG; PAM sequence: AAG
cttccttggtgtatattttt

SEQ ID NO: 79710 - DNA, 20 bp, Artificial Sequence
  Description of Artificial Sequence: Synthetic oligonucleotide
  Target: LAMA2; (-) strand; PAM type: NRG; PAM sequence: TGG
aatttcacaccagtcttcct

SEQ ID NO: 79711 - DNA, 20 bp, Artificial Sequence
  Description of Artificial Sequence: Synthetic oligonucleotide
  Target: LAMA2; (-) strand; PAM type: NRG; PAM sequence: CAG
atttcactccaatttcacac

SEQ ID NO: 79712 - DNA, 20 bp, Artificial Sequence
  Description of Artificial Sequence: Synthetic oligonucleotide
  Target: LAMA2; (-) strand; PAM type: NRG; PAM sequence: AAG
tgatagacatactgtcaaga

SEQ ID NO: 79713 - DNA, 20 bp, Artificial Sequence
  Description of Artificial Sequence: Synthetic oligonucleotide
  Target: LAMA2; (-) strand; PAM type: NRG; PAM sequence: AAG
tctctgatagacatactgtc

SEQ ID NO: 79714 - DNA, 20 bp, Artificial Sequence
  Description of Artificial Sequence: Synthetic oligonucleotide
  Target: LAMA2; (-) strand; PAM type: NRG; PAM sequence: TAG
cattgattttttttctctga

SEQ ID NO: 79715 - DNA, 20 bp, Artificial Sequence
  Description of Artificial Sequence: Synthetic oligonucleotide
  Target: LAMA2; (-) strand; PAM type: NRG; PAM sequence: AAG
ctcctgcaagagatgataga

SEQ ID NO: 79716 - DNA, 20 bp, Artificial Sequence
  Description of Artificial Sequence: Synthetic oligonucleotide
  Target: LAMA2; (-) strand; PAM type: NRG; PAM sequence: TAG
ctacctcctgcaagagatga

SEQ ID NO: 79717 - DNA, 20 bp, Artificial Sequence
  Description of Artificial Sequence: Synthetic oligonucleotide
  Target: LAMA2; (-) strand; PAM type: NRG; PAM sequence: GAG
ccccactctacctcctgcaa

SEQ ID NO: 79718 - DNA, 20 bp, Artificial Sequence
  Description of Artificial Sequence: Synthetic oligonucleotide
  Target: LAMA2; (-) strand; PAM type: NRG; PAM sequence: AAG
acccccactctacctcctgc

SEQ ID NO: 79719 - DNA, 20 bp, Artificial Sequence
  Description of Artificial Sequence: Synthetic oligonucleotide
  Target: LAMA2; (-) strand; PAM type: NRG; PAM sequence: TAG
tacgataaagttataaataa

SEQ ID NO: 79720 - DNA, 20 bp, Artificial Sequence
  Description of Artificial Sequence: Synthetic oligonucleotide
  Target: LAMA2; (-) strand; PAM type: NRG; PAM sequence: AAG
ttaaagactcatgtacgata

SEQ ID NO: 79721 - DNA, 20 bp, Artificial Sequence
  Description of Artificial Sequence: Synthetic oligonucleotide
  Target: LAMA2; (-) strand; PAM type: NRG; PAM sequence: AAG
acttatactgcattatttta

SEQ ID NO: 79722 - DNA, 20 bp, Artificial Sequence
  Description of Artificial Sequence: Synthetic oligonucleotide
  Target: LAMA2; (-) strand; PAM type: NRG; PAM sequence: GAG
aatgagtgtttattgaactt

SEQ ID NO: 79723 - DNA, 20 bp, Artificial Sequence
  Description of Artificial Sequence: Synthetic oligonucleotide
  Target: LAMA2; (-) strand; PAM type: NRG; PAM sequence: GAG
ttatttttatatatttaaat

SEQ ID NO: 79724 - DNA, 20 bp, Artificial Sequence
  Description of Artificial Sequence: Synthetic oligonucleotide
  Target: LAMA2; (-) strand; PAM type: NRG; PAM sequence: GAG
tgcttttgagtcatgaagaa

SEQ ID NO: 79725 - DNA, 20 bp, Artificial Sequence
  Description of Artificial Sequence: Synthetic oligonucleotide
  Target: LAMA2; (-) strand; PAM type: NRG; PAM sequence: AAG
tttgcttttgagtcatgaag

SEQ ID NO: 79726 - DNA, 20 bp, Artificial Sequence
  Description of Artificial Sequence: Synthetic oligonucleotide
  Target: LAMA2; (-) strand; PAM type: NRG; PAM sequence: AAG
tgctttgcttttgagtcatg

SEQ ID NO: 79727 - DNA, 20 bp, Artificial Sequence
  Description of Artificial Sequence: Synthetic oligonucleotide
  Target: LAMA2; (-) strand; PAM type: NRG; PAM sequence: GAG
atgtataatgctttgctttt

SEQ ID NO: 79728 - DNA, 20 bp, Artificial Sequence
  Description of Artificial Sequence: Synthetic oligonucleotide
  Target: LAMA2; (-) strand; PAM type: NRG; PAM sequence: GGG
ttgtaaatgcttttaaaact

SEQ ID NO: 79729 - DNA, 20 bp, Artificial Sequence
  Description of Artificial Sequence: Synthetic oligonucleotide
  Target: LAMA2; (-) strand; PAM type: NRG; PAM sequence: TGG
tttgtaaatgcttttaaaac

SEQ ID NO: 79730 - DNA, 20 bp, Artificial Sequence
  Description of Artificial Sequence: Synthetic oligonucleotide
  Target: LAMA2; (-) strand; PAM type: NRG; PAM sequence: TAG
tgcttaaaaagctgatacag

SEQ ID NO: 79731 - DNA, 20 bp, Artificial Sequence
  Description of Artificial Sequence: Synthetic oligonucleotide
  Target: LAMA2; (-) strand; PAM type: NRG; PAM sequence: CAG
atttgcttaaaaagctgata

SEQ ID NO: 79732 - DNA, 20 bp, Artificial Sequence
  Description of Artificial Sequence: Synthetic oligonucleotide
  Target: LAMA2; (-) strand; PAM type: NRG; PAM sequence: AAG
aatagagatatttgcttaaa

SEQ ID NO: 79733 - DNA, 20 bp, Artificial Sequence
  Description of Artificial Sequence: Synthetic oligonucleotide
  Target: LAMA2; (-) strand; PAM type: NRG; PAM sequence: GAG
taataatatagacacaaata

SEQ ID NO: 79734 - DNA, 20 bp, Artificial Sequence
  Description of Artificial Sequence: Synthetic oligonucleotide
  Target: LAMA2; (-) strand; PAM type: NRG; PAM sequence: TAG
cttaataatatagacacaaa

SEQ ID NO: 79735 - DNA, 20 bp, Artificial Sequence
  Description of Artificial Sequence: Synthetic oligonucleotide
  Target: LAMA2; (-) strand; PAM type: NRG; PAM sequence: TAG
aacctcatcacttaataata

SEQ ID NO: 79736 - DNA, 20 bp, Artificial Sequence
  Description of Artificial Sequence: Synthetic oligonucleotide
  Target: LAMA2; (-) strand; PAM type: NRG; PAM sequence: TAG
aactggctagggagtttgga

SEQ ID NO: 79737 - DNA, 20 bp, Artificial Sequence
  Description of Artificial Sequence: Synthetic oligonucleotide
  Target: LAMA2; (-) strand; PAM type: NRG; PAM sequence: TGG
atggaactggctagggagtt

SEQ ID NO: 79738 - DNA, 20 bp, Artificial Sequence
  Description of Artificial Sequence: Synthetic oligonucleotide
  Target: LAMA2; (-) strand; PAM type: NRG; PAM sequence: GAG
aactaatggaactggctagg

SEQ ID NO: 79739 - DNA, 20 bp, Artificial Sequence
  Description of Artificial Sequence: Synthetic oligonucleotide
  Target: LAMA2; (-) strand; PAM type: NRG; PAM sequence: GGG
tgaactaatggaactggcta

SEQ ID NO: 79740 - DNA, 20 bp, Artificial Sequence
  Description of Artificial Sequence: Synthetic oligonucleotide
  Target: LAMA2; (-) strand; PAM type: NRG; PAM sequence: AGG
ttgaactaatggaactggct

SEQ ID NO: 79741 - DNA, 20 bp, Artificial Sequence
  Description of Artificial Sequence: Synthetic oligonucleotide
  Target: LAMA2; (-) strand; PAM type: NRG; PAM sequence: TAG
cttgaactaatggaactggc

SEQ ID NO: 79742 - DNA, 20 bp, Artificial Sequence
  Description of Artificial Sequence: Synthetic oligonucleotide
  Target: LAMA2; (-) strand; PAM type: NRG; PAM sequence: TGG
agaccttgaactaatggaac

SEQ ID NO: 79743 - DNA, 20 bp, Artificial Sequence
  Description of Artificial Sequence: Synthetic oligonucleotide
  Target: LAMA2; (-) strand; PAM type: NRG; PAM sequence: TGG
atacctagaccttgaactaa

SEQ ID NO: 79744 - DNA, 20 bp, Artificial Sequence
  Description of Artificial Sequence: Synthetic oligonucleotide
  Target: LAMA2; (-) strand; PAM type: NRG; PAM sequence: TAG
gttatcttatttgatatacc

SEQ ID NO: 79745 - DNA, 20 bp, Artificial Sequence
  Description of Artificial Sequence: Synthetic oligonucleotide
  Target: LAMA2; (-) strand; PAM type: NRG; PAM sequence: TAG
ttgtttttgttacatacata

SEQ ID NO: 79746 - DNA, 20 bp, Artificial Sequence
  Description of Artificial Sequence: Synthetic oligonucleotide
  Target: LAMA2; (-) strand; PAM type: NRG; PAM sequence: AAG
catatctgagttccttgact

SEQ ID NO: 79747 - DNA, 20 bp, Artificial Sequence
  Description of Artificial Sequence: Synthetic oligonucleotide
  Target: LAMA2; (-) strand; PAM type: NRG; PAM sequence: GAG
atgtaggtggacacatatct

SEQ ID NO: 79748 - DNA, 20 bp, Artificial Sequence
  Description of Artificial Sequence: Synthetic oligonucleotide
  Target: LAMA2; (-) strand; PAM type: NRG; PAM sequence: TGG
atttagctagaatatgtagg

SEQ ID NO: 79749 - DNA, 20 bp, Artificial Sequence
  Description of Artificial Sequence: Synthetic oligonucleotide
  Target: LAMA2; (-) strand; PAM type: NRG; PAM sequence: AGG
cagatttagctagaatatgt

SEQ ID NO: 79750 - DNA, 20 bp, Artificial Sequence
  Description of Artificial Sequence: Synthetic oligonucleotide
  Target: LAMA2; (-) strand; PAM type: NRG; PAM sequence: TAG
acagatttagctagaatatg

SEQ ID NO: 79751 - DNA, 20 bp, Artificial Sequence
  Description of Artificial Sequence: Synthetic oligonucleotide
  Target: LAMA2; (-) strand; PAM type: NRG; PAM sequence: TAG
acaaaaaaaacagatttagc

SEQ ID NO: 79752 - DNA, 20 bp, Artificial Sequence
  Description of Artificial Sequence: Synthetic oligonucleotide
  Target: LAMA2; (-) strand; PAM type: NRG; PAM sequence: TAG
acacacaaaaaaaacagatt

SEQ ID NO: 79753 - DNA, 20 bp, Artificial Sequence
  Description of Artificial Sequence: Synthetic oligonucleotide
  Target: LAMA2; (-) strand; PAM type: NRG; PAM sequence: CAG
atacacacacacaaaaaaaa

SEQ ID NO: 79754 - DNA, 20 bp, Artificial Sequence
  Description of Artificial Sequence: Synthetic oligonucleotide
  Target: LAMA2; (-) strand; PAM type: NRG; PAM sequence: TAG
ataatcatcttagcgttaga

SEQ ID NO: 79755 - DNA, 20 bp, Artificial Sequence
  Description of Artificial Sequence: Synthetic oligonucleotide
  Target: LAMA2; (-) strand; PAM type: NRG; PAM sequence: TAG
tcaaataatcatcttagcgt

SEQ ID NO: 79756 - DNA, 20 bp, Artificial Sequence
  Description of Artificial Sequence: Synthetic oligonucleotide
  Target: LAMA2; (-) strand; PAM type: NRG; PAM sequence: TAG
tcatattcaaataatcatct

SEQ ID NO: 79757 - DNA, 20 bp, Artificial Sequence
  Description of Artificial Sequence: Synthetic oligonucleotide
  Target: LAMA2; (-) strand; PAM type: NRG; PAM sequence: GAG
ataacattttataattgtca

SEQ ID NO: 79758 - DNA, 20 bp, Artificial Sequence
  Description of Artificial Sequence: Synthetic oligonucleotide
  Target: LAMA2; (-) strand; PAM type: NRG; PAM sequence: CAG
atataacattttataattgt

SEQ ID NO: 79759 - DNA, 20 bp, Artificial Sequence
  Description of Artificial Sequence: Synthetic oligonucleotide
  Target: LAMA2; (-) strand; PAM type: NRG; PAM sequence: TAG
ttaaggataattatggaggc

SEQ ID NO: 79760 - DNA, 20 bp, Artificial Sequence
  Description of Artificial Sequence: Synthetic oligonucleotide
  Target: LAMA2; (-) strand; PAM type: NRG; PAM sequence: AGG
ttttttaaggataattatgg

SEQ ID NO: 79761 - DNA, 20 bp, Artificial Sequence
  Description of Artificial Sequence: Synthetic oligonucleotide
  Target: LAMA2; (-) strand; PAM type: NRG; PAM sequence: GAG
attttttaaggataattatg

SEQ ID NO: 79762 - DNA, 20 bp, Artificial Sequence
  Description of Artificial Sequence: Synthetic oligonucleotide
  Target: LAMA2; (-) strand; PAM type: NRG; PAM sequence: TGG
ctattttttaaggataatta

SEQ ID NO: 79763 - DNA, 20 bp, Artificial Sequence
  Description of Artificial Sequence: Synthetic oligonucleotide
  Target: LAMA2; (-) strand; PAM type: NRG; PAM sequence: AGG
atctacccagctatttttta

SEQ ID NO: 79764 - DNA, 20 bp, Artificial Sequence
  Description of Artificial Sequence: Synthetic oligonucleotide
  Target: LAMA2; (-) strand; PAM type: NRG; PAM sequence: AAG
aatctacccagctatttttt

SEQ ID NO: 79765 - DNA, 20 bp, Artificial Sequence
  Description of Artificial Sequence: Synthetic oligonucleotide
  Target: LAMA2; (-) strand; PAM type: NRG; PAM sequence: CAG
actaattattttaatctacc

SEQ ID NO: 79766 - DNA, 20 bp, Artificial Sequence
  Description of Artificial Sequence: Synthetic oligonucleotide
  Target: LAMA2; (-) strand; PAM type: NRG; PAM sequence: GAG
ttgtatatgaagttaacata

SEQ ID NO: 79767 - DNA, 20 bp, Artificial Sequence
  Description of Artificial Sequence: Synthetic oligonucleotide
  Target: LAMA2; (-) strand; PAM type: NRG; PAM sequence: TAG
ctttgtatatgaagttaaca

SEQ ID NO: 79768 - DNA, 20 bp, Artificial Sequence
  Description of Artificial Sequence: Synthetic oligonucleotide
  Target: LAMA2; (-) strand; PAM type: NRG; PAM sequence: AAG
tacaattacctttgtatatg

SEQ ID NO: 79769 - DNA, 20 bp, Artificial Sequence
  Description of Artificial Sequence: Synthetic oligonucleotide
  Target: LAMA2; (-) strand; PAM type: NRG; PAM sequence: TAG
ttttatattactatgtaata

SEQ ID NO: 79770 - DNA, 20 bp, Artificial Sequence
  Description of Artificial Sequence: Synthetic oligonucleotide
  Target: LAMA2; (-) strand; PAM type: NRG; PAM sequence: CAG
ttaactgtaagtttattgtg

SEQ ID NO: 79771 - DNA, 20 bp, Artificial Sequence
  Description of Artificial Sequence: Synthetic oligonucleotide
  Target: LAMA2; (-) strand; PAM type: NRG; PAM sequence: AAG
attaaaaagtcattaactgt

SEQ ID NO: 79772 - DNA, 20 bp, Artificial Sequence
  Description of Artificial Sequence: Synthetic oligonucleotide
  Target: LAMA2; (-) strand; PAM type: NRG; PAM sequence: AAG
atattaagaagaaaattaaa

SEQ ID NO: 79773 - DNA, 20 bp, Artificial Sequence
  Description of Artificial Sequence: Synthetic oligonucleotide
  Target: LAMA2; (-) strand; PAM type: NRG; PAM sequence: AAG
tattccttaaccatattaag

SEQ ID NO: 79774 - DNA, 20 bp, Artificial Sequence
  Description of Artificial Sequence: Synthetic oligonucleotide
  Target: LAMA2; (-) strand; PAM type: NRG; PAM sequence: AAG
atatattccttaaccatatt

SEQ ID NO: 79775 - DNA, 20 bp, Artificial Sequence
  Description of Artificial Sequence: Synthetic oligonucleotide
  Target: LAMA2; (-) strand; PAM type: NRG; PAM sequence: TAG
aagaaccaacaaaatctggg

SEQ ID NO: 79776 - DNA, 20 bp, Artificial Sequence
  Description of Artificial Sequence: Synthetic oligonucleotide
  Target: LAMA2; (-) strand; PAM type: NRG; PAM sequence: GGG
gaaaagaaccaacaaaatct

SEQ ID NO: 79777 - DNA, 20 bp, Artificial Sequence
  Description of Artificial Sequence: Synthetic oligonucleotide
  Target: LAMA2; (-) strand; PAM type: NRG; PAM sequence: TGG
tgaaaagaaccaacaaaatc

SEQ ID NO: 79778 - DNA, 20 bp, Artificial Sequence
  Description of Artificial Sequence: Synthetic oligonucleotide
  Target: LAMA2; (-) strand; PAM type: NRG; PAM sequence: AAG
ttttacttgatggatttgaa

SEQ ID NO: 79779 - DNA, 20 bp, Artificial Sequence
  Description of Artificial Sequence: Synthetic oligonucleotide
  Target: LAMA2; (-) strand; PAM type: NRG; PAM sequence: TGG
acgcacactgttttacttga

SEQ ID NO: 79780 - DNA, 20 bp, Artificial Sequence
  Description of Artificial Sequence: Synthetic oligonucleotide
  Target: LAMA2; (-) strand; PAM type: NRG; PAM sequence: CAG
tattgtgattatagcaactg

SEQ ID NO: 79781 - DNA, 20 bp, Artificial Sequence
  Description of Artificial Sequence: Synthetic oligonucleotide
  Target: LAMA2; (-) strand; PAM type: NRG; PAM sequence: TAG
accctcttttattgtgatta

SEQ ID NO: 79782 - DNA, 20 bp, Artificial Sequence
  Description of Artificial Sequence: Synthetic oligonucleotide
  Target: LAMA2; (-) strand; PAM type: NRG; PAM sequence: AAG
tgttttacatagtttcttgc

SEQ ID NO: 79783 - DNA, 20 bp, Artificial Sequence
  Description of Artificial Sequence: Synthetic oligonucleotide
  Target: LAMA2; (-) strand; PAM type: NRG; PAM sequence: TAG
ttcataaaagttgttttaca

SEQ ID NO: 79784 - DNA, 20 bp, Artificial Sequence
  Description of Artificial Sequence: Synthetic oligonucleotide
  Target: LAMA2; (-) strand; PAM type: NRG; PAM sequence: AAG
aggacagctattcttcataa

SEQ ID NO: 79785 - DNA, 20 bp, Artificial Sequence
  Description of Artificial Sequence: Synthetic oligonucleotide
  Target: LAMA2; (-) strand; PAM type: NRG; PAM sequence: CAG
tttttatctggggctaagga

SEQ ID NO: 79786 - DNA, 20 bp, Artificial Sequence
  Description of Artificial Sequence: Synthetic oligonucleotide
  Target: LAMA2; (-) strand; PAM type: NRG; PAM sequence: AGG
gtagtttttatctggggcta

SEQ ID NO: 79787 - DNA, 20 bp, Artificial Sequence
  Description of Artificial Sequence: Synthetic oligonucleotide
  Target: LAMA2; (-) strand; PAM type: NRG; PAM sequence: AAG
agtagtttttatctggggct

SEQ ID NO: 79788 - DNA, 20 bp, Artificial Sequence
  Description of Artificial Sequence: Synthetic oligonucleotide
  Target: LAMA2; (-) strand; PAM type: NRG; PAM sequence: GGG
ctgacagtagtttttatctg

SEQ ID NO: 79789 - DNA, 20 bp, Artificial Sequence
  Description of Artificial Sequence: Synthetic oligonucleotide
  Target: LAMA2; (-) strand; PAM type: NRG; PAM sequence: GGG
gctgacagtagtttttatct

SEQ ID NO: 79790 - DNA, 20 bp, Artificial Sequence
  Description of Artificial Sequence: Synthetic oligonucleotide
  Target: LAMA2; (-) strand; PAM type: NRG; PAM sequence: TGG
ggctgacagtagtttttatc

SEQ ID NO: 79791 - DNA, 20 bp, Artificial Sequence
  Description of Artificial Sequence: Synthetic oligonucleotide
  Target: LAMA2; (-) strand; PAM type: NRG; PAM sequence: TAG
agagtacctgtggctgacag

SEQ ID NO: 79792 - DNA, 20 bp, Artificial Sequence
  Description of Artificial Sequence: Synthetic oligonucleotide
  Target: LAMA2; (-) strand; PAM type: NRG; PAM sequence: CAG
gctagagtacctgtggctga

SEQ ID NO: 79793 - DNA, 20 bp, Artificial Sequence
  Description of Artificial Sequence: Synthetic oligonucleotide
  Target: LAMA2; (-) strand; PAM type: NRG; PAM sequence: TGG
agtccatgctagagtacctg

SEQ ID NO: 79794 - DNA, 20 bp, Artificial Sequence
  Description of Artificial Sequence: Synthetic oligonucleotide
  Target: LAMA2; (-) strand; PAM type: NRG; PAM sequence: GAG
tcagcaccaagtccatgcta

SEQ ID NO: 79795 - DNA, 20 bp, Artificial Sequence
  Description of Artificial Sequence: Synthetic oligonucleotide
  Target: LAMA2; (-) strand; PAM type: NRG; PAM sequence: TAG
agtcagcaccaagtccatgc

SEQ ID NO: 79796 - DNA, 20 bp, Artificial Sequence
  Description of Artificial Sequence: Synthetic oligonucleotide
  Target: LAMA2; (-) strand; PAM type: NRG; PAM sequence: AAG
tctttttcccagtcagcacc

SEQ ID NO: 79797 - DNA, 20 bp, Artificial Sequence
  Description of Artificial Sequence: Synthetic oligonucleotide
  Target: LAMA2; (-) strand; PAM type: NRG; PAM sequence: CAG
agaaatatctttttcccagt

SEQ ID NO: 79798 - DNA, 20 bp, Artificial Sequence
  Description of Artificial Sequence: Synthetic oligonucleotide
  Target: LAMA2; (-) strand; PAM type: NRG; PAM sequence: CAG
ttttagaaatatctttttcc

SEQ ID NO: 79799 - DNA, 20 bp, Artificial Sequence
  Description of Artificial Sequence: Synthetic oligonucleotide
  Target: LAMA2; (-) strand; PAM type: NRG; PAM sequence: TAG
tttaagctagttgggcattt

SEQ ID NO: 79800 - DNA, 20 bp, Artificial Sequence
  Description of Artificial Sequence: Synthetic oligonucleotide
  Target: LAMA2; (-) strand; PAM type: NRG; PAM sequence: GGG
gcctttaatttaagctagtt

SEQ ID NO: 79801 - DNA, 20 bp, Artificial Sequence
  Description of Artificial Sequence: Synthetic oligonucleotide
  Target: LAMA2; (-) strand; PAM type: NRG; PAM sequence: TGG
ggcctttaatttaagctagt

SEQ ID NO: 79802 - DNA, 20 bp, Artificial Sequence
  Description of Artificial Sequence: Synthetic oligonucleotide
  Target: LAMA2; (-) strand; PAM type: NRG; PAM sequence: TAG
gagtggcctttaatttaagc

SEQ ID NO: 79803 - DNA, 20 bp, Artificial Sequence
  Description of Artificial Sequence: Synthetic oligonucleotide
  Target: LAMA2; (-) strand; PAM type: NRG; PAM sequence: AAG
ggaagagtggcctttaattt

SEQ ID NO: 79804 - DNA, 20 bp, Artificial Sequence
  Description of Artificial Sequence: Synthetic oligonucleotide
  Target: LAMA2; (-) strand; PAM type: NRG; PAM sequence: TGG
atcttagcccaaaggaagag

SEQ ID NO: 79805 - DNA, 20 bp, Artificial Sequence
  Description of Artificial Sequence: Synthetic oligonucleotide
  Target: LAMA2; (-) strand; PAM type: NRG; PAM sequence: GAG
gtgatcttagcccaaaggaa

SEQ ID NO: 79806 - DNA, 20 bp, Artificial Sequence
  Description of Artificial Sequence: Synthetic oligonucleotide
  Target: LAMA2; (-) strand; PAM type: NRG; PAM sequence: AAG
ctgtgatcttagcccaaagg

SEQ ID NO: 79807 - DNA, 20 bp, Artificial Sequence
  Description of Artificial Sequence: Synthetic oligonucleotide
  Target: LAMA2; (-) strand; PAM type: NRG; PAM sequence: AGG
gcactgtgatcttagcccaa

SEQ ID NO: 79808 - DNA, 20 bp, Artificial Sequence
  Description of Artificial Sequence: Synthetic oligonucleotide
  Target: LAMA2; (-) strand; PAM type: NRG; PAM sequence: AAG
agcactgtgatcttagccca

SEQ ID NO: 79809 - DNA, 20 bp, Artificial Sequence
  Description of Artificial Sequence: Synthetic oligonucleotide
  Target: LAMA2; (-) strand; PAM type: NRG; PAM sequence: TAG
aactcttagcactgtgatct

SEQ ID NO: 79810 - DNA, 20 bp, Artificial Sequence
  Description of Artificial Sequence: Synthetic oligonucleotide
  Target: LAMA2; (-) strand; PAM type: NRG; PAM sequence: TAG
aaaactgacaaagtaactct

SEQ ID NO: 79811 - DNA, 20 bp, Artificial Sequence
  Description of Artificial Sequence: Synthetic oligonucleotide
  Target: LAMA2; (-) strand; PAM type: NRG; PAM sequence: AAG
gaggactcacaaaactgaca

SEQ ID NO: 79812 - DNA, 20 bp, Artificial Sequence
  Description of Artificial Sequence: Synthetic oligonucleotide
  Target: LAMA2; (-) strand; PAM type: NRG; PAM sequence: AGG
gtgtttcttgaggacaagtg

SEQ ID NO: 79813 - DNA, 20 bp, Artificial Sequence
  Description of Artificial Sequence: Synthetic oligonucleotide
  Target: LAMA2; (-) strand; PAM type: NRG; PAM sequence: GAG
tgtgtttcttgaggacaagt

SEQ ID NO: 79814 - DNA, 20 bp, Artificial Sequence
  Description of Artificial Sequence: Synthetic oligonucleotide
  Target: LAMA2; (-) strand; PAM type: NRG; PAM sequence: AAG
catttgtgtttcttgaggac

SEQ ID NO: 79815 - DNA, 20 bp, Artificial Sequence
  Description of Artificial Sequence: Synthetic oligonucleotide
  Target: LAMA2; (-) strand; PAM type: NRG; PAM sequence: AGG
aaggacatttgtgtttcttg

SEQ ID NO: 79816 - DNA, 20 bp, Artificial Sequence
  Description of Artificial Sequence: Synthetic oligonucleotide
  Target: LAMA2; (-) strand; PAM type: NRG; PAM sequence: GAG
gaaggacatttgtgtttctt

SEQ ID NO: 79817 - DNA, 20 bp, Artificial Sequence
  Description of Artificial Sequence: Synthetic oligonucleotide
  Target: LAMA2; (-) strand; PAM type: NRG; PAM sequence: AGG
tgcttttatccttagtttga

SEQ ID NO: 79818 - DNA, 20 bp, Artificial Sequence
  Description of Artificial Sequence: Synthetic oligonucleotide
  Target: LAMA2; (-) strand; PAM type: NRG; PAM sequence: AAG
ctgcttttatccttagtttg

SEQ ID NO: 79819 - DNA, 20 bp, Artificial Sequence
  Description of Artificial Sequence: Synthetic oligonucleotide
  Target: LAMA2; (-) strand; PAM type: NRG; PAM sequence: TAG
ttattttctgcttttatcct

SEQ ID NO: 79820 - DNA, 20 bp, Artificial Sequence
  Description of Artificial Sequence: Synthetic oligonucleotide
  Target: LAMA2; (-) strand; PAM type: NRG; PAM sequence: CAG
aagtaacaaaaggggacatt

SEQ ID NO: 79821 - DNA, 20 bp, Artificial Sequence
  Description of Artificial Sequence: Synthetic oligonucleotide
  Target: LAMA2; (-) strand; PAM type: NRG; PAM sequence: GGG
caaggtcaaagtaacaaaag

SEQ ID NO: 79822 - DNA, 20 bp, Artificial Sequence
  Description of Artificial Sequence: Synthetic oligonucleotide
  Target: LAMA2; (-) strand; PAM type: NRG; PAM sequence: GGG
gcaaggtcaaagtaacaaaa

SEQ ID NO: 79823 - DNA, 20 bp, Artificial Sequence
  Description of Artificial Sequence: Synthetic oligonucleotide
  Target: LAMA2; (-) strand; PAM type: NRG; PAM sequence: AGG
tgcaaggtcaaagtaacaaa

SEQ ID NO: 79824 - DNA, 20 bp, Artificial Sequence
  Description of Artificial Sequence: Synthetic oligonucleotide
  Target: LAMA2; (-) strand; PAM type: NRG; PAM sequence: AAG
ctgcaaggtcaaagtaacaa

SEQ ID NO: 79825 - DNA, 20 bp, Artificial Sequence
  Description of Artificial Sequence: Synthetic oligonucleotide
  Target: LAMA2; (-) strand; PAM type: NRG; PAM sequence: AAG
ttaagatgactgcaaggtca

SEQ ID NO: 79826 - DNA, 20 bp, Artificial Sequence
  Description of Artificial Sequence: Synthetic oligonucleotide
  Target: LAMA2; (-) strand; PAM type: NRG; PAM sequence: AGG
atcctgttaagatgactgca

SEQ ID NO: 79827 - DNA, 20 bp, Artificial Sequence
  Description of Artificial Sequence: Synthetic oligonucleotide
  Target: LAMA2; (-) strand; PAM type: NRG; PAM sequence: AAG
aatcctgttaagatgactgc

SEQ ID NO: 79828 - DNA, 20 bp, Artificial Sequence
  Description of Artificial Sequence: Synthetic oligonucleotide
  Target: LAMA2; (-) strand; PAM type: NRG; PAM sequence: AAG
atccagagagaaatcctgtt

SEQ ID NO: 79829 - DNA, 20 bp, Artificial Sequence
  Description of Artificial Sequence: Synthetic oligonucleotide
  Target: LAMA2; (-) strand; PAM type: NRG; PAM sequence: GAG
actgcaaaaagcaatccaga

SEQ ID NO: 79830 - DNA, 20 bp, Artificial Sequence
  Description of Artificial Sequence: Synthetic oligonucleotide
  Target: LAMA2; (-) strand; PAM type: NRG; PAM sequence: GAG
atactgcaaaaagcaatcca

SEQ ID NO: 79831 - DNA, 20 bp, Artificial Sequence
  Description of Artificial Sequence: Synthetic oligonucleotide
  Target: LAMA2; (-) strand; PAM type: NRG; PAM sequence: CAG
taatactgcaaaaagcaatc

SEQ ID NO: 79832 - DNA, 20 bp, Artificial Sequence
  Description of Artificial Sequence: Synthetic oligonucleotide
  Target: LAMA2; (-) strand; PAM type: NRG; PAM sequence: AAG
ccgagtagtaatactgcaaa

SEQ ID NO: 79833 - DNA, 20 bp, Artificial Sequence
  Description of Artificial Sequence: Synthetic oligonucleotide
  Target: LAMA2; (-) strand; PAM type: NRG; PAM sequence: TAG
ctgaaatatccttgaccgag

SEQ ID NO: 79834 - DNA, 20 bp, Artificial Sequence
  Description of Artificial Sequence: Synthetic oligonucleotide
  Target: LAMA2; (-) strand; PAM type: NRG; PAM sequence: GAG
caactgaaatatccttgacc

SEQ ID NO: 79835 - DNA, 20 bp, Artificial Sequence
  Description of Artificial Sequence: Synthetic oligonucleotide
  Target: LAMA2; (-) strand; PAM type: NRG; PAM sequence: CAG
aagccctggcatgaccatag

SEQ ID NO: 79836 - DNA, 20 bp, Artificial Sequence
  Description of Artificial Sequence: Synthetic oligonucleotide
  Target: LAMA2; (-) strand; PAM type: NRG; PAM sequence: TAG
gacaagccctggcatgacca

SEQ ID NO: 79837 - DNA, 20 bp, Artificial Sequence
  Description of Artificial Sequence: Synthetic oligonucleotide
  Target: LAMA2; (-) strand; PAM type: NRG; PAM sequence: TGG
tggatcaagtggacaagccc

SEQ ID NO: 79838 - DNA, 20 bp, Artificial Sequence
  Description of Artificial Sequence: Synthetic oligonucleotide
  Target: LAMA2; (-) strand; PAM type: NRG; PAM sequence: AAG
tgtcgctggatcaagtggac

SEQ ID NO: 79839 - DNA, 20 bp, Artificial Sequence
  Description of Artificial Sequence: Synthetic oligonucleotide
  Target: LAMA2; (-) strand; PAM type: NRG; PAM sequence: TGG
acatttgtcgctggatcaag

SEQ ID NO: 79840 - DNA, 20 bp, Artificial Sequence
  Description of Artificial Sequence: Synthetic oligonucleotide
  Target: LAMA2; (-) strand; PAM type: NRG; PAM sequence: AAG
catacatttgtcgctggatc

SEQ ID NO: 79841 - DNA, 20 bp, Artificial Sequence
  Description of Artificial Sequence: Synthetic oligonucleotide
  Target: LAMA2; (-) strand; PAM type: NRG; PAM sequence: TGG
aatatacatacatttgtcgc

SEQ ID NO: 79842 - DNA, 20 bp, Artificial Sequence
  Description of Artificial Sequence: Synthetic oligonucleotide
  Target: LAMA2; (-) strand; PAM type: NRG; PAM sequence: AAG
ctcagggcttcattttgcct

SEQ ID NO: 79843 - DNA, 20 bp, Artificial Sequence
  Description of Artificial Sequence: Synthetic oligonucleotide
  Target: LAMA2; (-) strand; PAM type: NRG; PAM sequence: GGG
atgaaacattttacagctca

SEQ ID NO: 79844 - DNA, 20 bp, Artificial Sequence
  Description of Artificial Sequence: Synthetic oligonucleotide
  Target: LAMA2; (-) strand; PAM type: NRG; PAM sequence: AGG
catgaaacattttacagctc

SEQ ID NO: 79845 - DNA, 20 bp, Artificial Sequence
  Description of Artificial Sequence: Synthetic oligonucleotide
  Target: LAMA2; (-) strand; PAM type: NRG; PAM sequence: CAG
tcatgaaacattttacagct

SEQ ID NO: 79846 - DNA, 20 bp, Artificial Sequence
  Description of Artificial Sequence: Synthetic oligonucleotide
  Target: LAMA2; (-) strand; PAM type: NRG; PAM sequence: CAG
gactgtcatgaaacatttta

SEQ ID NO: 79847 - DNA, 20 bp, Artificial Sequence
  Description of Artificial Sequence: Synthetic oligonucleotide
  Target: LAMA2; (-) strand; PAM type: NRG; PAM sequence: AAG
tacagcgttctctgtcagca

SEQ ID NO: 79848 - DNA, 20 bp, Artificial Sequence
  Description of Artificial Sequence: Synthetic oligonucleotide
  Target: LAMA2; (-) strand; PAM type: NRG; PAM sequence: CAG
ccatttacagcgttctctgt

SEQ ID NO: 79849 - DNA, 20 bp, Artificial Sequence
  Description of Artificial Sequence: Synthetic oligonucleotide
  Target: LAMA2; (-) strand; PAM type: NRG; PAM sequence: CAG
ggggacctgactcccattta

SEQ ID NO: 79850 - DNA, 20 bp, Artificial Sequence
  Description of Artificial Sequence: Synthetic oligonucleotide
  Target: LAMA2; (-) strand; PAM type: NRG; PAM sequence: GGG
tctgttacactgtctaagtg

SEQ ID NO: 79851 - DNA, 20 bp, Artificial Sequence
  Description of Artificial Sequence: Synthetic oligonucleotide
  Target: LAMA2; (-) strand; PAM type: NRG; PAM sequence: GGG
ttctgttacactgtctaagt

SEQ ID NO: 79852 - DNA, 20 bp, Artificial Sequence
  Description of Artificial Sequence: Synthetic oligonucleotide
  Target: LAMA2; (-) strand; PAM type: NRG; PAM sequence: TGG
tttctgttacactgtctaag

SEQ ID NO: 79853 - DNA, 20 bp, Artificial Sequence
  Description of Artificial Sequence: Synthetic oligonucleotide
  Target: LAMA2; (-) strand; PAM type: NRG; PAM sequence: AAG
ggatttctgttacactgtct

SEQ ID NO: 79854 - DNA, 20 bp, Artificial Sequence
  Description of Artificial Sequence: Synthetic oligonucleotide
  Target: LAMA2; (-) strand; PAM type: NRG; PAM sequence: TGG
gctcttatttcaccctggca

SEQ ID NO: 79855 - DNA, 20 bp, Artificial Sequence
  Description of Artificial Sequence: Synthetic oligonucleotide
  Target: LAMA2; (-) strand; PAM type: NRG; PAM sequence: TGG
tgccagctcttatttcaccc

SEQ ID NO: 79856 - DNA, 20 bp, Artificial Sequence
  Description of Artificial Sequence: Synthetic oligonucleotide
  Target: LAMA2; (-) strand; PAM type: NRG; PAM sequence: CAG
aagtctatcatcctaactgc

SEQ ID NO: 79857 - DNA, 20 bp, Artificial Sequence
  Description of Artificial Sequence: Synthetic oligonucleotide
  Target: LAMA2; (-) strand; PAM type: NRG; PAM sequence: AAG
tactgtgatggctgatttca

SEQ ID NO: 79858 - DNA, 20 bp, Artificial Sequence
  Description of Artificial Sequence: Synthetic oligonucleotide
  Target: LAMA2; (-) strand; PAM type: NRG; PAM sequence: TGG
tctgttttcttatactgtga

SEQ ID NO: 79859 - DNA, 20 bp, Artificial Sequence
  Description of Artificial Sequence: Synthetic oligonucleotide
  Target: LAMA2; (-) strand; PAM type: NRG; PAM sequence: AGG
tttgaaaaaaaaaaaaaaaa

SEQ ID NO: 79860 - DNA, 20 bp, Artificial Sequence
  Description of Artificial Sequence: Synthetic oligonucleotide
  Target: LAMA2; (-) strand; PAM type: NRG; PAM sequence: AAG
ttttgaaaaaaaaaaaaaaa

SEQ ID NO: 79861 - DNA, 20 bp, Artificial Sequence
  Description of Artificial Sequence: Synthetic oligonucleotide
  Target: LAMA2; (-) strand; PAM type: NRG; PAM sequence: GAG
tttcaaaatagaccagtttg

SEQ ID NO: 79862 - DNA, 20 bp, Artificial Sequence
  Description of Artificial Sequence: Synthetic oligonucleotide
  Target: LAMA2; (-) strand; PAM type: NRG; PAM sequence: TGG
gatttcaaaatagaccagtt

SEQ ID NO: 79863 - DNA, 20 bp, Artificial Sequence
  Description of Artificial Sequence: Synthetic oligonucleotide
  Target: LAMA2; (-) strand; PAM type: NRG; PAM sequence: CAG
agagagatttcaaaatagac

SEQ ID NO: 79864 - DNA, 20 bp, Artificial Sequence
  Description of Artificial Sequence: Synthetic oligonucleotide
  Target: LAMA2; (-) strand; PAM type: NRG; PAM sequence: TAG
tagctagagagatttcaaaa

SEQ ID NO: 79865 - DNA, 20 bp, Artificial Sequence
  Description of Artificial Sequence: Synthetic oligonucleotide
  Target: LAMA2; (-) strand; PAM type: NRG; PAM sequence: GAG
ggcaggctgtcatagctaga

SEQ ID NO: 79866 - DNA, 20 bp, Artificial Sequence
  Description of Artificial Sequence: Synthetic oligonucleotide
  Target: LAMA2; (-) strand; PAM type: NRG; PAM sequence: GAG
gaggcaggctgtcatagcta

SEQ ID NO: 79867 - DNA, 20 bp, Artificial Sequence
  Description of Artificial Sequence: Synthetic oligonucleotide
  Target: LAMA2; (-) strand; PAM type: NRG; PAM sequence: TAG
atgaggcaggctgtcatagc

SEQ ID NO: 79868 - DNA, 20 bp, Artificial Sequence
  Description of Artificial Sequence: Synthetic oligonucleotide
  Target: LAMA2; (-) strand; PAM type: NRG; PAM sequence: TAG
tatcatgaggcaggctgtca

SEQ ID NO: 79869 - DNA, 20 bp, Artificial Sequence
  Description of Artificial Sequence: Synthetic oligonucleotide
  Target: LAMA2; (-) strand; PAM type: NRG; PAM sequence: AGG
ctaaagctatatcatgaggc

SEQ ID NO: 79870 - DNA, 20 bp, Artificial Sequence
  Description of Artificial Sequence: Synthetic oligonucleotide
  Target: LAMA2; (-) strand; PAM type: NRG; PAM sequence: CAG
tctaaagctatatcatgagg

SEQ ID NO: 79871 - DNA, 20 bp, Artificial Sequence
  Description of Artificial Sequence: Synthetic oligonucleotide
  Target: LAMA2; (-) strand; PAM type: NRG; PAM sequence: AGG
ttctctaaagctatatcatg

SEQ ID NO: 79872 - DNA, 20 bp, Artificial Sequence
  Description of Artificial Sequence: Synthetic oligonucleotide
  Target: LAMA2; (-) strand; PAM type: NRG; PAM sequence: GAG
gttctctaaagctatatcat

SEQ ID NO: 79873 - DNA, 20 bp, Artificial Sequence
  Description of Artificial Sequence: Synthetic oligonucleotide
  Target: LAMA2; (-) strand; PAM type: NRG; PAM sequence: AAG
ttgatggcaggcgttctcta

SEQ ID NO: 79874 - DNA, 20 bp, Artificial Sequence
  Description of Artificial Sequence: Synthetic oligonucleotide
  Target: LAMA2; (-) strand; PAM type: NRG; PAM sequence: AGG
tggtcaggttgattgatggc

SEQ ID NO: 79875 - DNA, 20 bp, Artificial Sequence
  Description of Artificial Sequence: Synthetic oligonucleotide
  Target: LAMA2; (-) strand; PAM type: NRG; PAM sequence: CAG
atggtcaggttgattgatgg

SEQ ID NO: 79876 - DNA, 20 bp, Artificial Sequence
  Description of Artificial Sequence: Synthetic oligonucleotide
  Target: LAMA2; (-) strand; PAM type: NRG; PAM sequence: TGG
gaaatggtcaggttgattga

SEQ ID NO: 79877 - DNA, 20 bp, Artificial Sequence
  Description of Artificial Sequence: Synthetic oligonucleotide
  Target: LAMA2; (-) strand; PAM type: NRG; PAM sequence: AGG
aaactttaaaagaaatggtc

SEQ ID NO: 79878 - DNA, 20 bp, Artificial Sequence
  Description of Artificial Sequence: Synthetic oligonucleotide
  Target: LAMA2; (-) strand; PAM type: NRG; PAM sequence: CAG
gaaactttaaaagaaatggt

SEQ ID NO: 79879 - DNA, 20 bp, Artificial Sequence
  Description of Artificial Sequence: Synthetic oligonucleotide
  Target: LAMA2; (-) strand; PAM type: NRG; PAM sequence: TGG
attagaaactttaaaagaaa

SEQ ID NO: 79880 - DNA, 20 bp, Artificial Sequence
  Description of Artificial Sequence: Synthetic oligonucleotide
  Target: LAMA2; (-) strand; PAM type: NRG; PAM sequence: AAG
tttttgattagaaactttaa

SEQ ID NO: 79881 - DNA, 20 bp, Artificial Sequence
  Description of Artificial Sequence: Synthetic oligonucleotide
  Target: LAMA2; (-) strand; PAM type: NRG; PAM sequence: TAG
atttgcattaattttttgat

SEQ ID NO: 79882 - DNA, 20 bp, Artificial Sequence
  Description of Artificial Sequence: Synthetic oligonucleotide
  Target: LAMA2; (-) strand; PAM type: NRG; PAM sequence: CAG
attttccggcttgccactat

SEQ ID NO: 79883 - DNA, 20 bp, Artificial Sequence
  Description of Artificial Sequence: Synthetic oligonucleotide
  Target: LAMA2; (-) strand; PAM type: NRG; PAM sequence: CGG
aaaagcattctggcattttc

SEQ ID NO: 79884 - DNA, 20 bp, Artificial Sequence
  Description of Artificial Sequence: Synthetic oligonucleotide
  Target: LAMA2; (-) strand; PAM type: NRG; PAM sequence: TGG
aattctatcaaaaagcattc

SEQ ID NO: 79885 - DNA, 20 bp, Artificial Sequence
  Description of Artificial Sequence: Synthetic oligonucleotide
  Target: LAMA2; (-) strand; PAM type: NRG; PAM sequence: AAG
aatgaaaaaattctatcaaa

SEQ ID NO: 79886 - DNA, 20 bp, Artificial Sequence
  Description of Artificial Sequence: Synthetic oligonucleotide
  Target: LAMA2; (-) strand; PAM type: NRG; PAM sequence: AGG
gctcattcatcttctccttt

SEQ ID NO: 79887 - DNA, 20 bp, Artificial Sequence
  Description of Artificial Sequence: Synthetic oligonucleotide
  Target: LAMA2; (-) strand; PAM type: NRG; PAM sequence: TAG
tgctcattcatcttctcctt

SEQ ID NO: 79888 - DNA, 20 bp, Artificial Sequence
  Description of Artificial Sequence: Synthetic oligonucleotide
  Target: LAMA2; (-) strand; PAM type: NRG; PAM sequence: TAG
tttgtctatgacaggaaaaa

SEQ ID NO: 79889 - DNA, 20 bp, Artificial Sequence
  Description of Artificial Sequence: Synthetic oligonucleotide
  Target: LAMA2; (-) strand; PAM type: NRG; PAM sequence: AGG
ttcaccagtttgtctatgac

SEQ ID NO: 79890 - DNA, 20 bp, Artificial Sequence
  Description of Artificial Sequence: Synthetic oligonucleotide
  Target: LAMA2; (-) strand; PAM type: NRG; PAM sequence: CAG
tttcaccagtttgtctatga

SEQ ID NO: 79891 - DNA, 20 bp, Artificial Sequence
  Description of Artificial Sequence: Synthetic oligonucleotide
  Target: LAMA2; (-) strand; PAM type: NRG; PAM sequence: CAG
gagatgagtttgaatttcac

SEQ ID NO: 79892 - DNA, 20 bp, Artificial Sequence
  Description of Artificial Sequence: Synthetic oligonucleotide
  Target: LAMA2; (-) strand; PAM type: NRG; PAM sequence: GAG
ccatatactatacaggagat

SEQ ID NO: 79893 - DNA, 20 bp, Artificial Sequence
  Description of Artificial Sequence: Synthetic oligonucleotide
  Target: LAMA2; (-) strand; PAM type: NRG; PAM sequence: GAG
tttttccatatactatacag

SEQ ID NO: 79894 - DNA, 20 bp, Artificial Sequence
  Description of Artificial Sequence: Synthetic oligonucleotide
  Target: LAMA2; (-) strand; PAM type: NRG; PAM sequence: AGG
tatttttccatatactatac

SEQ ID NO: 79895 - DNA, 20 bp, Artificial Sequence
  Description of Artificial Sequence: Synthetic oligonucleotide
  Target: LAMA2; (-) strand; PAM type: NRG; PAM sequence: CAG
gtatttttccatatactata

SEQ ID NO: 79896 - DNA, 20 bp, Artificial Sequence
  Description of Artificial Sequence: Synthetic oligonucleotide
  Target: LAMA2; (-) strand; PAM type: NRG; PAM sequence: TGG
tatttgagaaaaaaaatctg

SEQ ID NO: 79897 - DNA, 20 bp, Artificial Sequence
  Description of Artificial Sequence: Synthetic oligonucleotide
  Target: LAMA2; (-) strand; PAM type: NRG; PAM sequence: GAG
tcatttgcattacaatattt

SEQ ID NO: 79898 - DNA, 20 bp, Artificial Sequence
  Description of Artificial Sequence: Synthetic oligonucleotide
  Target: LAMA2; (-) strand; PAM type: NRG; PAM sequence: GAG
atcatcagaaaactagcttt

SEQ ID NO: 79899 - DNA, 20 bp, Artificial Sequence
  Description of Artificial Sequence: Synthetic oligonucleotide
  Target: LAMA2; (-) strand; PAM type: NRG; PAM sequence: TAG
taatccaatcatcagaaaac

SEQ ID NO: 79900 - DNA, 20 bp, Artificial Sequence
  Description of Artificial Sequence: Synthetic oligonucleotide
  Target: LAMA2; (-) strand; PAM type: NRG; PAM sequence: CAG
taacattataatccaatcat

SEQ ID NO: 79901 - DNA, 20 bp, Artificial Sequence
  Description of Artificial Sequence: Synthetic oligonucleotide
  Target: LAMA2; (-) strand; PAM type: NRG; PAM sequence: GAG
gtgtactttaatcttcctag

SEQ ID NO: 79902 - DNA, 20 bp, Artificial Sequence
  Description of Artificial Sequence: Synthetic oligonucleotide
  Target: LAMA2; (-) strand; PAM type: NRG; PAM sequence: AGG
tagtgtactttaatcttcct

SEQ ID NO: 79903 - DNA, 20 bp, Artificial Sequence
  Description of Artificial Sequence: Synthetic oligonucleotide
  Target: LAMA2; (-) strand; PAM type: NRG; PAM sequence: TAG
ttagtgtactttaatcttcc

SEQ ID NO: 79904 - DNA, 20 bp, Artificial Sequence
  Description of Artificial Sequence: Synthetic oligonucleotide
  Target: LAMA2; (-) strand; PAM type: NRG; PAM sequence: TAG
ctttgcccataaaaatatgt

SEQ ID NO: 79905 - DNA, 20 bp, Artificial Sequence
  Description of Artificial Sequence: Synthetic oligonucleotide
  Target: LAMA2; (-) strand; PAM type: NRG; PAM sequence: CAG
ccaggcagaaagcagcactg

SEQ ID NO: 79906 - DNA, 20 bp, Artificial Sequence
  Description of Artificial Sequence: Synthetic oligonucleotide
  Target: LAMA2; (-) strand; PAM type: NRG; PAM sequence: CAG
cacccataccaggcagaaag

SEQ ID NO: 79907 - DNA, 20 bp, Artificial Sequence
  Description of Artificial Sequence: Synthetic oligonucleotide
  Target: LAMA2; (-) strand; PAM type: NRG; PAM sequence: AAG
aagcacccataccaggcaga

SEQ ID NO: 79908 - DNA, 20 bp, Artificial Sequence
  Description of Artificial Sequence: Synthetic oligonucleotide
  Target: LAMA2; (-) strand; PAM type: NRG; PAM sequence: CAG
aagaaagcacccataccagg

SEQ ID NO: 79909 - DNA, 20 bp, Artificial Sequence
  Description of Artificial Sequence: Synthetic oligonucleotide
  Target: LAMA2; (-) strand; PAM type: NRG; PAM sequence: AGG
aagaagaaagcacccatacc

SEQ ID NO: 79910 - DNA, 20 bp, Artificial Sequence
  Description of Artificial Sequence: Synthetic oligonucleotide
  Target: LAMA2; (-) strand; PAM type: NRG; PAM sequence: CAG
aaagaagaaagcacccatac

SEQ ID NO: 79911 - DNA, 20 bp, Artificial Sequence
  Description of Artificial Sequence: Synthetic oligonucleotide
  Target: LAMA2; (-) strand; PAM type: NRG; PAM sequence: AAG
ggaaaacaaaaaaaagaaga

SEQ ID NO: 79912 - DNA, 20 bp, Artificial Sequence
  Description of Artificial Sequence: Synthetic oligonucleotide
  Target: LAMA2; (-) strand; PAM type: NRG; PAM sequence: AAG
aaatggaaaacaaaaaaaag

SEQ ID NO: 79913 - DNA, 20 bp, Artificial Sequence
  Description of Artificial Sequence: Synthetic oligonucleotide
  Target: LAMA2; (-) strand; PAM type: NRG; PAM sequence: AAG
aaaaaatggaaaacaaaaaa

SEQ ID NO: 79914 - DNA, 20 bp, Artificial Sequence
  Description of Artificial Sequence: Synthetic oligonucleotide
  Target: LAMA2; (-) strand; PAM type: NRG; PAM sequence: TGG
taaagtaaaattttaaaaaa

SEQ ID NO: 79915 - DNA, 20 bp, Artificial Sequence
  Description of Artificial Sequence: Synthetic oligonucleotide
  Target: LAMA2; (-) strand; PAM type: NRG; PAM sequence: AAG
gcacgagtatccaggattta

SEQ ID NO: 79916 - DNA, 20 bp, Artificial Sequence
  Description of Artificial Sequence: Synthetic oligonucleotide
  Target: LAMA2; (-) strand; PAM type: NRG; PAM sequence: AGG
catgttgtgcacgagtatcc

SEQ ID NO: 79917 - DNA, 20 bp, Artificial Sequence
  Description of Artificial Sequence: Synthetic oligonucleotide
  Target: LAMA2; (-) strand; PAM type: NRG; PAM sequence: CAG
gcatgttgtgcacgagtatc

SEQ ID NO: 79918 - DNA, 20 bp, Artificial Sequence
  Description of Artificial Sequence: Synthetic oligonucleotide
  Target: LAMA2; (-) strand; PAM type: NRG; PAM sequence: GAG
caaacctgcatgttgtgcac

SEQ ID NO: 79919 - DNA, 20 bp, Artificial Sequence
  Description of Artificial Sequence: Synthetic oligonucleotide
  Target: LAMA2; (-) strand; PAM type: NRG; PAM sequence: CAG
aggtgatgggttgatagggg

SEQ ID NO: 79920 - DNA, 20 bp, Artificial Sequence
  Description of Artificial Sequence: Synthetic oligonucleotide
  Target: LAMA2; (-) strand; PAM type: NRG; PAM sequence: GGG
cctaggtgatgggttgatag

SEQ ID NO: 79921 - DNA, 20 bp, Artificial Sequence
  Description of Artificial Sequence: Synthetic oligonucleotide
  Target: LAMA2; (-) strand; PAM type: NRG; PAM sequence: GGG
gcctaggtgatgggttgata

SEQ ID NO: 79922 - DNA, 20 bp, Artificial Sequence
  Description of Artificial Sequence: Synthetic oligonucleotide
  Target: LAMA2; (-) strand; PAM type: NRG; PAM sequence: AGG
tgcctaggtgatgggttgat

SEQ ID NO: 79923 - DNA, 20 bp, Artificial Sequence
  Description of Artificial Sequence: Synthetic oligonucleotide
  Target: LAMA2; (-) strand; PAM type: NRG; PAM sequence: TAG
atgcctaggtgatgggttga

SEQ ID NO: 79924 - DNA, 20 bp, Artificial Sequence
  Description of Artificial Sequence: Synthetic oligonucleotide
  Target: LAMA2; (-) strand; PAM type: NRG; PAM sequence: GGG
gaaaattatgcctaggtgat

SEQ ID NO: 79925 - DNA, 20 bp, Artificial Sequence
  Description of Artificial Sequence: Synthetic oligonucleotide
  Target: LAMA2; (-) strand; PAM type: NRG; PAM sequence: TGG
ggaaaattatgcctaggtga

SEQ ID NO: 79926 - DNA, 20 bp, Artificial Sequence
  Description of Artificial Sequence: Synthetic oligonucleotide
  Target: LAMA2; (-) strand; PAM type: NRG; PAM sequence: AGG
gcctgtggaaaattatgcct

SEQ ID NO: 79927 - DNA, 20 bp, Artificial Sequence
  Description of Artificial Sequence: Synthetic oligonucleotide
  Target: LAMA2; (-) strand; PAM type: NRG; PAM sequence: TAG
agcctgtggaaaattatgcc

SEQ ID NO: 79928 - DNA, 20 bp, Artificial Sequence
  Description of Artificial Sequence: Synthetic oligonucleotide
  Target: LAMA2; (-) strand; PAM type: NRG; PAM sequence: TGG
aagggactctgtaaagcctg

SEQ ID NO: 79929 - DNA, 20 bp, Artificial Sequence
  Description of Artificial Sequence: Synthetic oligonucleotide
  Target: LAMA2; (-) strand; PAM type: NRG; PAM sequence: AAG
tgagacaaagggactctgta

SEQ ID NO: 79930 - DNA, 20 bp, Artificial Sequence
  Description of Artificial Sequence: Synthetic oligonucleotide
  Target: LAMA2; (-) strand; PAM type: NRG; PAM sequence: GGG
cagaaagccagtgagacaaa

SEQ ID NO: 79931 - DNA, 20 bp, Artificial Sequence
  Description of Artificial Sequence: Synthetic oligonucleotide
  Target: LAMA2; (-) strand; PAM type: NRG; PAM sequence: AGG
gcagaaagccagtgagacaa

SEQ ID NO: 79932 - DNA, 20 bp, Artificial Sequence
  Description of Artificial Sequence: Synthetic oligonucleotide
  Target: LAMA2; (-) strand; PAM type: NRG; PAM sequence: AAG
tgcagaaagccagtgagaca

SEQ ID NO: 79933 - DNA, 20 bp, Artificial Sequence
  Description of Artificial Sequence: Synthetic oligonucleotide
  Target: LAMA2; (-) strand; PAM type: NRG; PAM sequence: GAG
ttaaaatgcagaaagccagt

SEQ ID NO: 79934 - DNA, 20 bp, Artificial Sequence
  Description of Artificial Sequence: Synthetic oligonucleotide
  Target: LAMA2; (-) strand; PAM type: NRG; PAM sequence: CAG
atttttaaaatgcagaaagc

SEQ ID NO: 79935 - DNA, 20 bp, Artificial Sequence
  Description of Artificial Sequence: Synthetic oligonucleotide
  Target: LAMA2; (-) strand; PAM type: NRG; PAM sequence: AAG
agggatttttaaaatgcaga

SEQ ID NO: 79936 - DNA, 20 bp, Artificial Sequence
  Description of Artificial Sequence: Synthetic oligonucleotide
  Target: LAMA2; (-) strand; PAM type: NRG; PAM sequence: CAG
gtaaagggatttttaaaatg

SEQ ID NO: 79937 - DNA, 20 bp, Artificial Sequence
  Description of Artificial Sequence: Synthetic oligonucleotide
  Target: LAMA2; (-) strand; PAM type: NRG; PAM sequence: GGG
ccaaataaaataacagtaaa

SEQ ID NO: 79938 - DNA, 20 bp, Artificial Sequence
  Description of Artificial Sequence: Synthetic oligonucleotide
  Target: LAMA2; (-) strand; PAM type: NRG; PAM sequence: AGG
tccaaataaaataacagtaa

SEQ ID NO: 79939 - DNA, 20 bp, Artificial Sequence
  Description of Artificial Sequence: Synthetic oligonucleotide
  Target: LAMA2; (-) strand; PAM type: NRG; PAM sequence: AAG
ctccaaataaaataacagta

SEQ ID NO: 79940 - DNA, 20 bp, Artificial Sequence
  Description of Artificial Sequence: Synthetic oligonucleotide
  Target: LAMA2; (-) strand; PAM type: NRG; PAM sequence: CAG
acttcctccaaataaaataa

SEQ ID NO: 79941 - DNA, 20 bp, Artificial Sequence
  Description of Artificial Sequence: Synthetic oligonucleotide
  Target: LAMA2; (-) strand; PAM type: NRG; PAM sequence: TGG
ggcagcgtagtattctatgg

SEQ ID NO: 79942 - DNA, 20 bp, Artificial Sequence
  Description of Artificial Sequence: Synthetic oligonucleotide
  Target: LAMA2; (-) strand; PAM type: NRG; PAM sequence: TGG
tatggcagcgtagtattcta

SEQ ID NO: 79943 - DNA, 20 bp, Artificial Sequence
  Description of Artificial Sequence: Synthetic oligonucleotide
  Target: LAMA2; (-) strand; PAM type: NRG; PAM sequence: TAG
cattcctttttatggcagcg

SEQ ID NO: 79944 - DNA, 20 bp, Artificial Sequence
  Description of Artificial Sequence: Synthetic oligonucleotide
  Target: LAMA2; (-) strand; PAM type: NRG; PAM sequence: CAG
gatctcattcctttttatgg

SEQ ID NO: 79945 - DNA, 20 bp, Artificial Sequence
  Description of Artificial Sequence: Synthetic oligonucleotide
  Target: LAMA2; (-) strand; PAM type: NRG; PAM sequence: TGG
catgatctcattccttttta

SEQ ID NO: 79946 - DNA, 20 bp, Artificial Sequence
  Description of Artificial Sequence: Synthetic oligonucleotide
  Target: LAMA2; (-) strand; PAM type: NRG; PAM sequence: AGG
cttcatccatgtccctgcaa

SEQ ID NO: 79947 - DNA, 20 bp, Artificial Sequence
  Description of Artificial Sequence: Synthetic oligonucleotide
  Target: LAMA2; (-) strand; PAM type: NRG; PAM sequence: AAG
gcttcatccatgtccctgca

SEQ ID NO: 79948 - DNA, 20 bp, Artificial Sequence
  Description of Artificial Sequence: Synthetic oligonucleotide
  Target: LAMA2; (-) strand; PAM type: NRG; PAM sequence: CAG
ttcctgaggaccatggtttc

SEQ ID NO: 79949 - DNA, 20 bp, Artificial Sequence
  Description of Artificial Sequence: Synthetic oligonucleotide
  Target: LAMA2; (-) strand; PAM type: NRG; PAM sequence: TGG
tgttagtttcctgaggacca

SEQ ID NO: 79950 - DNA, 20 bp, Artificial Sequence
  Description of Artificial Sequence: Synthetic oligonucleotide
  Target: LAMA2; (-) strand; PAM type: NRG; PAM sequence: AGG
gttcctgtgttagtttcctg

SEQ ID NO: 79951 - DNA, 20 bp, Artificial Sequence
  Description of Artificial Sequence: Synthetic oligonucleotide
  Target: LAMA2; (-) strand; PAM type: NRG; PAM sequence: GAG
tgttcctgtgttagtttcct

SEQ ID NO: 79952 - DNA, 20 bp, Artificial Sequence
  Description of Artificial Sequence: Synthetic oligonucleotide
  Target: LAMA2; (-) strand; PAM type: NRG; PAM sequence: TAG
ttggttttctgttcctgtgt

SEQ ID NO: 79953 - DNA, 20 bp, Artificial Sequence
  Description of Artificial Sequence: Synthetic oligonucleotide
  Target: LAMA2; (-) strand; PAM type: NRG; PAM sequence: TGG
gagtgagaacatatagtgtt

SEQ ID NO: 79954 - DNA, 20 bp, Artificial Sequence
  Description of Artificial Sequence: Synthetic oligonucleotide
  Target: LAMA2; (-) strand; PAM type: NRG; PAM sequence: TAG
catttatgagtgagaacata

SEQ ID NO: 79955 - DNA, 20 bp, Artificial Sequence
  Description of Artificial Sequence: Synthetic oligonucleotide
  Target: LAMA2; (-) strand; PAM type: NRG; PAM sequence: GAG
tttagctctcatttatgagt

SEQ ID NO: 79956 - DNA, 20 bp, Artificial Sequence
  Description of Artificial Sequence: Synthetic oligonucleotide
  Target: LAMA2; (-) strand; PAM type: NRG; PAM sequence: GAG
attgtttagctctcatttat

SEQ ID NO: 79957 - DNA, 20 bp, Artificial Sequence
  Description of Artificial Sequence: Synthetic oligonucleotide
  Target: LAMA2; (-) strand; PAM type: NRG; PAM sequence: TAG
gtccatgtgttctcattgtt

SEQ ID NO: 79958 - DNA, 20 bp, Artificial Sequence
  Description of Artificial Sequence: Synthetic oligonucleotide
  Target: LAMA2; (-) strand; PAM type: NRG; PAM sequence: GAG
tgtgtgttgttcccctcctt

SEQ ID NO: 79959 - DNA, 20 bp, Artificial Sequence
  Description of Artificial Sequence: Synthetic oligonucleotide
  Target: LAMA2; (-) strand; PAM type: NRG; PAM sequence: TGG
tccctccatctgataggccc

SEQ ID NO: 79960 - DNA, 20 bp, Artificial Sequence
  Description of Artificial Sequence: Synthetic oligonucleotide
  Target: LAMA2; (-) strand; PAM type: NRG; PAM sequence: AGG
tttgcctccctccatctgat

SEQ ID NO: 79961 - DNA, 20 bp, Artificial Sequence
  Description of Artificial Sequence: Synthetic oligonucleotide
  Target: LAMA2; (-) strand; PAM type: NRG; PAM sequence: TAG
ctttgcctccctccatctga

SEQ ID NO: 79962 - DNA, 20 bp, Artificial Sequence
  Description of Artificial Sequence: Synthetic oligonucleotide
  Target: LAMA2; (-) strand; PAM type: NRG; PAM sequence: TAG
agaaagcaccctgcatgcat

SEQ ID NO: 79963 - DNA, 20 bp, Artificial Sequence
  Description of Artificial Sequence: Synthetic oligonucleotide
  Target: LAMA2; (-) strand; PAM type: NRG; PAM sequence: AAG
tcatctgtacacctgataga

SEQ ID NO: 79964 - DNA, 20 bp, Artificial Sequence
  Description of Artificial Sequence: Synthetic oligonucleotide
  Target: LAMA2; (-) strand; PAM type: NRG; PAM sequence: TAG
ctgatcatctgtacacctga

SEQ ID NO: 79965 - DNA, 20 bp, Artificial Sequence
  Description of Artificial Sequence: Synthetic oligonucleotide
  Target: LAMA2; (-) strand; PAM type: NRG; PAM sequence: GGG
cttgtggacttttaaagcct

SEQ ID NO: 79966 - DNA, 20 bp, Artificial Sequence
  Description of Artificial Sequence: Synthetic oligonucleotide
  Target: LAMA2; (-) strand; PAM type: NRG; PAM sequence: TGG
tcttgtggacttttaaagcc

SEQ ID NO: 79967 - DNA, 20 bp, Artificial Sequence
  Description of Artificial Sequence: Synthetic oligonucleotide
  Target: LAMA2; (-) strand; PAM type: NRG; PAM sequence: AAG
gcctgtcttgtggactttta

SEQ ID NO: 79968 - DNA, 20 bp, Artificial Sequence
  Description of Artificial Sequence: Synthetic oligonucleotide
  Target: LAMA2; (-) strand; PAM type: NRG; PAM sequence: TGG
ggccttccaagcctgtcttg

SEQ ID NO: 79969 - DNA, 20 bp, Artificial Sequence
  Description of Artificial Sequence: Synthetic oligonucleotide
  Target: LAMA2; (-) strand; PAM type: NRG; PAM sequence: AAG
ccacctggaattggccttcc

SEQ ID NO: 79970 - DNA, 20 bp, Artificial Sequence
  Description of Artificial Sequence: Synthetic oligonucleotide
  Target: LAMA2; (-) strand; PAM type: NRG; PAM sequence: TGG
ctcaatttaccacctggaat

SEQ ID NO: 79971 - DNA, 20 bp, Artificial Sequence
  Description of Artificial Sequence: Synthetic oligonucleotide
  Target: LAMA2; (-) strand; PAM type: NRG; PAM sequence: TGG
tacagtctcaatttaccacc

SEQ ID NO: 79972 - DNA, 20 bp, Artificial Sequence
  Description of Artificial Sequence: Synthetic oligonucleotide
  Target: LAMA2; (-) strand; PAM type: NRG; PAM sequence: CAG
gtctgtgcatgctctgaata

SEQ ID NO: 79973 - DNA, 20 bp, Artificial Sequence
  Description of Artificial Sequence: Synthetic oligonucleotide
  Target: LAMA2; (-) strand; PAM type: NRG; PAM sequence: AGG
accagaaatctaatgtctct

SEQ ID NO: 79974 - DNA, 20 bp, Artificial Sequence
  Description of Artificial Sequence: Synthetic oligonucleotide
  Target: LAMA2; (-) strand; PAM type: NRG; PAM sequence: TAG
aaccagaaatctaatgtctc

SEQ ID NO: 79975 - DNA, 20 bp, Artificial Sequence
  Description of Artificial Sequence: Synthetic oligonucleotide
  Target: LAMA2; (-) strand; PAM type: NRG; PAM sequence: CAG
ctctaggggtgcaggtaaac

SEQ ID NO: 79976 - DNA, 20 bp, Artificial Sequence
  Description of Artificial Sequence: Synthetic oligonucleotide
  Target: LAMA2; (-) strand; PAM type: NRG; PAM sequence: AGG
tcctaggcctctaggggtgc

SEQ ID NO: 79977 - DNA, 20 bp, Artificial Sequence
  Description of Artificial Sequence: Synthetic oligonucleotide
  Target: LAMA2; (-) strand; PAM type: NRG; PAM sequence: CAG
ttcctaggcctctaggggtg

SEQ ID NO: 79978 - DNA, 20 bp, Artificial Sequence
  Description of Artificial Sequence: Synthetic oligonucleotide
  Target: LAMA2; (-) strand; PAM type: NRG; PAM sequence: GGG
gttgattcctaggcctctag

SEQ ID NO: 79979 - DNA, 20 bp, Artificial Sequence
  Description of Artificial Sequence: Synthetic oligonucleotide
  Target: LAMA2; (-) strand; PAM type: NRG; PAM sequence: GGG
agttgattcctaggcctcta

SEQ ID NO: 79980 - DNA, 20 bp, Artificial Sequence
  Description of Artificial Sequence: Synthetic oligonucleotide
  Target: LAMA2; (-) strand; PAM type: NRG; PAM sequence: AGG
gagttgattcctaggcctct

SEQ ID NO: 79981 - DNA, 20 bp, Artificial Sequence
  Description of Artificial Sequence: Synthetic oligonucleotide
  Target: LAMA2; (-) strand; PAM type: NRG; PAM sequence: TAG
ggagttgattcctaggcctc

SEQ ID NO: 79982 - DNA, 20 bp, Artificial Sequence
  Description of Artificial Sequence: Synthetic oligonucleotide
  Target: LAMA2; (-) strand; PAM type: NRG; PAM sequence: AGG
gaaggagggagttgattcct

SEQ ID NO: 79983 - DNA, 20 bp, Artificial Sequence
  Description of Artificial Sequence: Synthetic oligonucleotide
  Target: LAMA2; (-) strand; PAM type: NRG; PAM sequence: TAG
agaaggagggagttgattcc

SEQ ID NO: 79984 - DNA, 20 bp, Artificial Sequence
  Description of Artificial Sequence: Synthetic oligonucleotide
  Target: LAMA2; (-) strand; PAM type: NRG; PAM sequence: GAG
tggatatggcaagaaggagg

SEQ ID NO: 79985 - DNA, 20 bp, Artificial Sequence
  Description of Artificial Sequence: Synthetic oligonucleotide
  Target: LAMA2; (-) strand; PAM type: NRG; PAM sequence: GGG
tttggatatggcaagaagga

SEQ ID NO: 79986 - DNA, 20 bp, Artificial Sequence
  Description of Artificial Sequence: Synthetic oligonucleotide
  Target: LAMA2; (-) strand; PAM type: NRG; PAM sequence: AGG
ttttggatatggcaagaagg

SEQ ID NO: 79987 - DNA, 20 bp, Artificial Sequence
  Description of Artificial Sequence: Synthetic oligonucleotide
  Target: LAMA2; (-) strand; PAM type: NRG; PAM sequence: GAG
tttttggatatggcaagaag

SEQ ID NO: 79988 - DNA, 20 bp, Artificial Sequence
  Description of Artificial Sequence: Synthetic oligonucleotide
  Target: LAMA2; (-) strand; PAM type: NRG; PAM sequence: AGG
tatttttggatatggcaaga

SEQ ID NO: 79989 - DNA, 20 bp, Artificial Sequence
  Description of Artificial Sequence: Synthetic oligonucleotide
  Target: LAMA2; (-) strand; PAM type: NRG; PAM sequence: AAG
atatttttggatatggcaag

SEQ ID NO: 79990 - DNA, 20 bp, Artificial Sequence
  Description of Artificial Sequence: Synthetic oligonucleotide
  Target: LAMA2; (-) strand; PAM type: NRG; PAM sequence: AAG
ttaatatttttggatatggc

SEQ ID NO: 79991 - DNA, 20 bp, Artificial Sequence
  Description of Artificial Sequence: Synthetic oligonucleotide
  Target: LAMA2; (-) strand; PAM type: NRG; PAM sequence: TGG
gttgttaatatttttggata

SEQ ID NO: 79992 - DNA, 20 bp, Artificial Sequence
  Description of Artificial Sequence: Synthetic oligonucleotide
  Target: LAMA2; (-) strand; PAM type: NRG; PAM sequence: TGG
caaaatgttgttaatatttt

SEQ ID NO: 79993 - DNA, 20 bp, Artificial Sequence
  Description of Artificial Sequence: Synthetic oligonucleotide
  Target: LAMA2; (-) strand; PAM type: NRG; PAM sequence: AGG
gggtcgattagcttgtttta

SEQ ID NO: 79994 - DNA, 20 bp, Artificial Sequence
  Description of Artificial Sequence: Synthetic oligonucleotide
  Target: LAMA2; (-) strand; PAM type: NRG; PAM sequence: AAG
ggggtcgattagcttgtttt

SEQ ID NO: 79995 - DNA, 20 bp, Artificial Sequence
  Description of Artificial Sequence: Synthetic oligonucleotide
  Target: LAMA2; (-) strand; PAM type: NRG; PAM sequence: TAG
tgtgttttttgggggtcgat

SEQ ID NO: 79996 - DNA, 20 bp, Artificial Sequence
  Description of Artificial Sequence: Synthetic oligonucleotide
  Target: LAMA2; (-) strand; PAM type: NRG; PAM sequence: GGG
gggatctatgtgttttttgg

SEQ ID NO: 79997 - DNA, 20 bp, Artificial Sequence
  Description of Artificial Sequence: Synthetic oligonucleotide
  Target: LAMA2; (-) strand; PAM type: NRG; PAM sequence: GGG
tgggatctatgtgttttttg

SEQ ID NO: 79998 - DNA, 20 bp, Artificial Sequence
  Description of Artificial Sequence: Synthetic oligonucleotide
  Target: LAMA2; (-) strand; PAM type: NRG; PAM sequence: GGG
ctgggatctatgtgtttttt

SEQ ID NO: 79999 - DNA, 20 bp, Artificial Sequence
  Description of Artificial Sequence: Synthetic oligonucleotide
  Target: LAMA2; (-) strand; PAM type: NRG; PAM sequence: TGG
cctgggatctatgtgttttt

SEQ ID NO: 80000 - DNA, 20 bp, Artificial Sequence
  Description of Artificial Sequence: Synthetic oligonucleotide
  Target: LAMA2; (-) strand; PAM type: NRG; PAM sequence: GGG
attctccttctctgatgcct

SEQ ID NO: 80001 - DNA, 20 bp, Artificial Sequence
  Description of Artificial Sequence: Synthetic oligonucleotide
  Target: LAMA2; (-) strand; PAM type: NRG; PAM sequence: TGG
aattctccttctctgatgcc

SEQ ID NO: 80002 - DNA, 20 bp, Artificial Sequence
  Description of Artificial Sequence: Synthetic oligonucleotide
  Target: LAMA2; (-) strand; PAM type: NRG; PAM sequence: AAG
cccagctgggagtggtcttg

SEQ ID NO: 80003 - DNA, 20 bp, Artificial Sequence
  Description of Artificial Sequence: Synthetic oligonucleotide
  Target: LAMA2; (-) strand; PAM type: NRG; PAM sequence: TGG
caggaaggcccagctgggag

SEQ ID NO: 80004 - DNA, 20 bp, Artificial Sequence
  Description of Artificial Sequence: Synthetic oligonucleotide
  Target: LAMA2; (-) strand; PAM type: NRG; PAM sequence: GAG
aagcaggaaggcccagctgg

SEQ ID NO: 80005 - DNA, 20 bp, Artificial Sequence
  Description of Artificial Sequence: Synthetic oligonucleotide
  Target: LAMA2; (-) strand; PAM type: NRG; PAM sequence: GGG
gaaagcaggaaggcccagct

SEQ ID NO: 80006 - DNA, 20 bp, Artificial Sequence
  Description of Artificial Sequence: Synthetic oligonucleotide
  Target: LAMA2; (-) strand; PAM type: NRG; PAM sequence: TGG
agaaagcaggaaggcccagc

SEQ ID NO: 80007 - DNA, 20 bp, Artificial Sequence
  Description of Artificial Sequence: Synthetic oligonucleotide
  Target: LAMA2; (-) strand; PAM type: NRG; PAM sequence: CAG
cagaagaaagcaggaaggcc

SEQ ID NO: 80008 - DNA, 20 bp, Artificial Sequence
  Description of Artificial Sequence: Synthetic oligonucleotide
  Target: LAMA2; (-) strand; PAM type: NRG; PAM sequence: AGG
aggctcagaagaaagcagga

SEQ ID NO: 80009 - DNA, 20 bp, Artificial Sequence
  Description of Artificial Sequence: Synthetic oligonucleotide
  Target: LAMA2; (-) strand; PAM type: NRG; PAM sequence: AAG
taggctcagaagaaagcagg

SEQ ID NO: 80010 - DNA, 20 bp, Artificial Sequence
  Description of Artificial Sequence: Synthetic oligonucleotide
  Target: LAMA2; (-) strand; PAM type: NRG; PAM sequence: AGG
gtttaggctcagaagaaagc

SEQ ID NO: 80011 - DNA, 20 bp, Artificial Sequence
  Description of Artificial Sequence: Synthetic oligonucleotide
  Target: LAMA2; (-) strand; PAM type: NRG; PAM sequence: CAG
ggtttaggctcagaagaaag

SEQ ID NO: 80012 - DNA, 20 bp, Artificial Sequence
  Description of Artificial Sequence: Synthetic oligonucleotide
  Target: LAMA2; (-) strand; PAM type: NRG; PAM sequence: AAG
ctgggtttaggctcagaaga

SEQ ID NO: 80013 - DNA, 20 bp, Artificial Sequence
  Description of Artificial Sequence: Synthetic oligonucleotide
  Target: LAMA2; (-) strand; PAM type: NRG; PAM sequence: AAG
atcactgggtttaggctcag

SEQ ID NO: 80014 - DNA, 20 bp, Artificial Sequence
  Description of Artificial Sequence: Synthetic oligonucleotide
  Target: LAMA2; (-) strand; PAM type: NRG; PAM sequence: CAG
ttaatcactgggtttaggct

SEQ ID NO: 80015 - DNA, 20 bp, Artificial Sequence
  Description of Artificial Sequence: Synthetic oligonucleotide
  Target: LAMA2; (-) strand; PAM type: NRG; PAM sequence: AGG
gttctttaatcactgggttt

SEQ ID NO: 80016 - DNA, 20 bp, Artificial Sequence
  Description of Artificial Sequence: Synthetic oligonucleotide
  Target: LAMA2; (-) strand; PAM type: NRG; PAM sequence: TAG
ggttctttaatcactgggtt

SEQ ID NO: 80017 - DNA, 20 bp, Artificial Sequence
  Description of Artificial Sequence: Synthetic oligonucleotide
  Target: LAMA2; (-) strand; PAM type: NRG; PAM sequence: GGG
aggctggttctttaatcact

SEQ ID NO: 80018 - DNA, 20 bp, Artificial Sequence
  Description of Artificial Sequence: Synthetic oligonucleotide
  Target: LAMA2; (-) strand; PAM type: NRG; PAM sequence: TGG
caggctggttctttaatcac

SEQ ID NO: 80019 - DNA, 20 bp, Artificial Sequence
  Description of Artificial Sequence: Synthetic oligonucleotide
  Target: LAMA2; (-) strand; PAM type: NRG; PAM sequence: TGG
caccttaaggaagtccaggc

SEQ ID NO: 80020 - DNA, 20 bp, Artificial Sequence
  Description of Artificial Sequence: Synthetic oligonucleotide
  Target: LAMA2; (-) strand; PAM type: NRG; PAM sequence: AGG
acatcaccttaaggaagtcc

SEQ ID NO: 80021 - DNA, 20 bp, Artificial Sequence
  Description of Artificial Sequence: Synthetic oligonucleotide
  Target: LAMA2; (-) strand; PAM type: NRG; PAM sequence: CAG
aacatcaccttaaggaagtc

SEQ ID NO: 80022 - DNA, 20 bp, Artificial Sequence
  Description of Artificial Sequence: Synthetic oligonucleotide
  Target: LAMA2; (-) strand; PAM type: NRG; PAM sequence: AAG
tgatcaacatcaccttaagg

SEQ ID NO: 80023 - DNA, 20 bp, Artificial Sequence
  Description of Artificial Sequence: Synthetic oligonucleotide
  Target: LAMA2; (-) strand; PAM type: NRG; PAM sequence: AGG
atttgatcaacatcacctta

SEQ ID NO: 80024 - DNA, 20 bp, Artificial Sequence
  Description of Artificial Sequence: Synthetic oligonucleotide
  Target: LAMA2; (-) strand; PAM type: NRG; PAM sequence: AAG
tatttgatcaacatcacctt

SEQ ID NO: 80025 - DNA, 20 bp, Artificial Sequence
  Description of Artificial Sequence: Synthetic oligonucleotide
  Target: LAMA2; (-) strand; PAM type: NRG; PAM sequence: GGG
agtggtgccaggcttgaagt

SEQ ID NO: 80026 - DNA, 20 bp, Artificial Sequence
  Description of Artificial Sequence: Synthetic oligonucleotide
  Target: LAMA2; (-) strand; PAM type: NRG; PAM sequence: TGG
aagtggtgccaggcttgaag

SEQ ID NO: 80027 - DNA, 20 bp, Artificial Sequence
  Description of Artificial Sequence: Synthetic oligonucleotide
  Target: LAMA2; (-) strand; PAM type: NRG; PAM sequence: AAG
agaaagtggtgccaggcttg

SEQ ID NO: 80028 - DNA, 20 bp, Artificial Sequence
  Description of Artificial Sequence: Synthetic oligonucleotide
  Target: LAMA2; (-) strand; PAM type: NRG; PAM sequence: AGG
cctgggaagaaagtggtgcc

SEQ ID NO: 80029 - DNA, 20 bp, Artificial Sequence
  Description of Artificial Sequence: Synthetic oligonucleotide
  Target: LAMA2; (-) strand; PAM type: NRG; PAM sequence: CAG
gcctgggaagaaagtggtgc

SEQ ID NO: 80030 - DNA, 20 bp, Artificial Sequence
  Description of Artificial Sequence: Synthetic oligonucleotide
  Target: LAMA2; (-) strand; PAM type: NRG; PAM sequence: TGG
tagccagcctgggaagaaag

SEQ ID NO: 80031 - DNA, 20 bp, Artificial Sequence
  Description of Artificial Sequence: Synthetic oligonucleotide
  Target: LAMA2; (-) strand; PAM type: NRG; PAM sequence: AAG
aactagccagcctgggaaga

SEQ ID NO: 80032 - DNA, 20 bp, Artificial Sequence
  Description of Artificial Sequence: Synthetic oligonucleotide
  Target: LAMA2; (-) strand; PAM type: NRG; PAM sequence: AAG
gtaaaactagccagcctggg

SEQ ID NO: 80033 - DNA, 20 bp, Artificial Sequence
  Description of Artificial Sequence: Synthetic oligonucleotide
  Target: LAMA2; (-) strand; PAM type: NRG; PAM sequence: GGG
aatgtaaaactagccagcct

SEQ ID NO: 80034 - DNA, 20 bp, Artificial Sequence
  Description of Artificial Sequence: Synthetic oligonucleotide
  Target: LAMA2; (-) strand; PAM type: NRG; PAM sequence: TGG
aaatgtaaaactagccagcc

SEQ ID NO: 80035 - DNA, 20 bp, Artificial Sequence
  Description of Artificial Sequence: Synthetic oligonucleotide
  Target: LAMA2; (-) strand; PAM type: NRG; PAM sequence: CAG
tactaaaatgtaaaactagc

SEQ ID NO: 80036 - DNA, 20 bp, Artificial Sequence
  Description of Artificial Sequence: Synthetic oligonucleotide
  Target: LAMA2; (-) strand; PAM type: NRG; PAM sequence: TAG
tgtgtactaaaatgtaaaac

SEQ ID NO: 80037 - DNA, 20 bp, Artificial Sequence
  Description of Artificial Sequence: Synthetic oligonucleotide
  Target: LAMA2; (-) strand; PAM type: NRG; PAM sequence: TGG
tgaagaaaagagaaaacatc

SEQ ID NO: 80038 - DNA, 20 bp, Artificial Sequence
  Description of Artificial Sequence: Synthetic oligonucleotide
  Target: LAMA2; (-) strand; PAM type: NRG; PAM sequence: GAG
taaaggtactatgaagaaaa

SEQ ID NO: 80039 - DNA, 20 bp, Artificial Sequence
  Description of Artificial Sequence: Synthetic oligonucleotide
  Target: LAMA2; (-) strand; PAM type: NRG; PAM sequence: AAG
tctaaaggtactatgaagaa

SEQ ID NO: 80040 - DNA, 20 bp, Artificial Sequence
  Description of Artificial Sequence: Synthetic oligonucleotide
  Target: LAMA2; (-) strand; PAM type: NRG; PAM sequence: AAG
ctctctctaaaggtactatg

SEQ ID NO: 80041 - DNA, 20 bp, Artificial Sequence
  Description of Artificial Sequence: Synthetic oligonucleotide
  Target: LAMA2; (-) strand; PAM type: NRG; PAM sequence: AGG
taaaggaagcctctctctaa

SEQ ID NO: 80042 - DNA, 20 bp, Artificial Sequence
  Description of Artificial Sequence: Synthetic oligonucleotide
  Target: LAMA2; (-) strand; PAM type: NRG; PAM sequence: AAG
ataaaggaagcctctctcta

SEQ ID NO: 80043 - DNA, 20 bp, Artificial Sequence
  Description of Artificial Sequence: Synthetic oligonucleotide
  Target: LAMA2; (-) strand; PAM type: NRG; PAM sequence: AAG
ctcatttagaaccataaagg

SEQ ID NO: 80044 - DNA, 20 bp, Artificial Sequence
  Description of Artificial Sequence: Synthetic oligonucleotide
  Target: LAMA2; (-) strand; PAM type: NRG; PAM sequence: AGG
agcctcatttagaaccataa

SEQ ID NO: 80045 - DNA, 20 bp, Artificial Sequence
  Description of Artificial Sequence: Synthetic oligonucleotide
  Target: LAMA2; (-) strand; PAM type: NRG; PAM sequence: AAG
tagcctcatttagaaccata

SEQ ID NO: 80046 - DNA, 20 bp, Artificial Sequence
  Description of Artificial Sequence: Synthetic oligonucleotide
  Target: LAMA2; (-) strand; PAM type: NRG; PAM sequence: TAG
gcacaaattttagcctcatt

SEQ ID NO: 80047 - DNA, 20 bp, Artificial Sequence
  Description of Artificial Sequence: Synthetic oligonucleotide
  Target: LAMA2; (-) strand; PAM type: NRG; PAM sequence: TAG
gagggaggaagcacaaattt

SEQ ID NO: 80048 - DNA, 20 bp, Artificial Sequence
  Description of Artificial Sequence: Synthetic oligonucleotide
  Target: LAMA2; (-) strand; PAM type: NRG; PAM sequence: AAG
tctagtcaaaaagagggagg

SEQ ID NO: 80049 - DNA, 20 bp, Artificial Sequence
  Description of Artificial Sequence: Synthetic oligonucleotide
  Target: LAMA2; (-) strand; PAM type: NRG; PAM sequence: AGG
atttctagtcaaaaagaggg

SEQ ID NO: 80050 - DNA, 20 bp, Artificial Sequence
  Description of Artificial Sequence: Synthetic oligonucleotide
  Target: LAMA2; (-) strand; PAM type: NRG; PAM sequence: GAG
gatttctagtcaaaaagagg

SEQ ID NO: 80051 - DNA, 20 bp, Artificial Sequence
  Description of Artificial Sequence: Synthetic oligonucleotide
  Target: LAMA2; (-) strand; PAM type: NRG; PAM sequence: GGG
gagatttctagtcaaaaaga

SEQ ID NO: 80052 - DNA, 20 bp, Artificial Sequence
  Description of Artificial Sequence: Synthetic oligonucleotide
  Target: LAMA2; (-) strand; PAM type: NRG; PAM sequence: AGG
cgagatttctagtcaaaaag

SEQ ID NO: 80053 - DNA, 20 bp, Artificial Sequence
  Description of Artificial Sequence: Synthetic oligonucleotide
  Target: LAMA2; (-) strand; PAM type: NRG; PAM sequence: GAG
gcgagatttctagtcaaaaa

SEQ ID NO: 80054 - DNA, 20 bp, Artificial Sequence
  Description of Artificial Sequence: Synthetic oligonucleotide
  Target: LAMA2; (-) strand; PAM type: NRG; PAM sequence: AAG
cagcgagatttctagtcaaa

SEQ ID NO: 80055 - DNA, 20 bp, Artificial Sequence
  Description of Artificial Sequence: Synthetic oligonucleotide
  Target: LAMA2; (-) strand; PAM type: NRG; PAM sequence: TAG
cacactcacagcgagatttc

SEQ ID NO: 80056 - DNA, 20 bp, Artificial Sequence
  Description of Artificial Sequence: Synthetic oligonucleotide
  Target: LAMA2; (-) strand; PAM type: NRG; PAM sequence: GAG
gttatgctcacactcacagc

SEQ ID NO: 80057 - DNA, 20 bp, Artificial Sequence
  Description of Artificial Sequence: Synthetic oligonucleotide
  Target: LAMA2; (-) strand; PAM type: NRG; PAM sequence: CAG
atgtgttatgctcacactca

SEQ ID NO: 80058 - DNA, 20 bp, Artificial Sequence
  Description of Artificial Sequence: Synthetic oligonucleotide
  Target: LAMA2; (-) strand; PAM type: NRG; PAM sequence: CAG
atcctggacagcactgatca

SEQ ID NO: 80059 - DNA, 20 bp, Artificial Sequence
  Description of Artificial Sequence: Synthetic oligonucleotide
  Target: LAMA2; (-) strand; PAM type: NRG; PAM sequence: CAG
gtttctgatggaatcctgga

SEQ ID NO: 80060 - DNA, 20 bp, Artificial Sequence
  Description of Artificial Sequence: Synthetic oligonucleotide
  Target: LAMA2; (-) strand; PAM type: NRG; PAM sequence: TGG
cagggtttctgatggaatcc

SEQ ID NO: 80061 - DNA, 20 bp, Artificial Sequence
  Description of Artificial Sequence: Synthetic oligonucleotide
  Target: LAMA2; (-) strand; PAM type: NRG; PAM sequence: TGG
cagctctccagggtttctga

SEQ ID NO: 80062 - DNA, 20 bp, Artificial Sequence
  Description of Artificial Sequence: Synthetic oligonucleotide
  Target: LAMA2; (-) strand; PAM type: NRG; PAM sequence: GGG
agaaaagttccagctctcca

SEQ ID NO: 80063 - DNA, 20 bp, Artificial Sequence
  Description of Artificial Sequence: Synthetic oligonucleotide
  Target: LAMA2; (-) strand; PAM type: NRG; PAM sequence: AGG
tagaaaagttccagctctcc

SEQ ID NO: 80064 - DNA, 20 bp, Artificial Sequence
  Description of Artificial Sequence: Synthetic oligonucleotide
  Target: LAMA2; (-) strand; PAM type: NRG; PAM sequence: CAG
ttagaaaagttccagctctc

SEQ ID NO: 80065 - DNA, 20 bp, Artificial Sequence
  Description of Artificial Sequence: Synthetic oligonucleotide
  Target: LAMA2; (-) strand; PAM type: NRG; PAM sequence: CAG
agttttagttagaaaagttc

SEQ ID NO: 80066 - DNA, 20 bp, Artificial Sequence
  Description of Artificial Sequence: Synthetic oligonucleotide
  Target: LAMA2; (-) strand; PAM type: NRG; PAM sequence: AAG
acattcagttttagttagaa

SEQ ID NO: 80067 - DNA, 20 bp, Artificial Sequence
  Description of Artificial Sequence: Synthetic oligonucleotide
  Target: LAMA2; (-) strand; PAM type: NRG; PAM sequence: TAG
ccttcacattcagttttagt

SEQ ID NO: 80068 - DNA, 20 bp, Artificial Sequence
  Description of Artificial Sequence: Synthetic oligonucleotide
  Target: LAMA2; (-) strand; PAM type: NRG; PAM sequence: TAG
cataccttcacattcagttt

SEQ ID NO: 80069 - DNA, 20 bp, Artificial Sequence
  Description of Artificial Sequence: Synthetic oligonucleotide
  Target: LAMA2; (-) strand; PAM type: NRG; PAM sequence: CAG
aaagaacataccttcacatt

SEQ ID NO: 80070 - DNA, 20 bp, Artificial Sequence
  Description of Artificial Sequence: Synthetic oligonucleotide
  Target: LAMA2; (-) strand; PAM type: NRG; PAM sequence: AAG
acatattttgttggcttcta

SEQ ID NO: 80071 - DNA, 20 bp, Artificial Sequence
  Description of Artificial Sequence: Synthetic oligonucleotide
  Target: LAMA2; (-) strand; PAM type: NRG; PAM sequence: TGG
ggaagaatgacatattttgt

SEQ ID NO: 80072 - DNA, 20 bp, Artificial Sequence
  Description of Artificial Sequence: Synthetic oligonucleotide
  Target: LAMA2; (-) strand; PAM type: NRG; PAM sequence: AAG
ggctttttttcttggaaagg

SEQ ID NO: 80073 - DNA, 20 bp, Artificial Sequence
  Description of Artificial Sequence: Synthetic oligonucleotide
  Target: LAMA2; (-) strand; PAM type: NRG; PAM sequence: AGG
actggctttttttcttggaa

SEQ ID NO: 80074 - DNA, 20 bp, Artificial Sequence
  Description of Artificial Sequence: Synthetic oligonucleotide
  Target: LAMA2; (-) strand; PAM type: NRG; PAM sequence: AAG
tactggctttttttcttgga

SEQ ID NO: 80075 - DNA, 20 bp, Artificial Sequence
  Description of Artificial Sequence: Synthetic oligonucleotide
  Target: LAMA2; (-) strand; PAM type: NRG; PAM sequence: TGG
tcattactggctttttttct

SEQ ID NO: 80076 - DNA, 20 bp, Artificial Sequence
  Description of Artificial Sequence: Synthetic oligonucleotide
  Target: LAMA2; (-) strand; PAM type: NRG; PAM sequence: TGG
atttcactatttttcattac

SEQ ID NO: 80077 - DNA, 20 bp, Artificial Sequence
  Description of Artificial Sequence: Synthetic oligonucleotide
  Target: LAMA2; (-) strand; PAM type: NRG; PAM sequence: CAG
tgttgacacatttgcataac

SEQ ID NO: 80078 - DNA, 20 bp, Artificial Sequence
  Description of Artificial Sequence: Synthetic oligonucleotide
  Target: LAMA2; (-) strand; PAM type: NRG; PAM sequence: GAG
ttcgaagtgataatataaat

SEQ ID NO: 80079 - DNA, 20 bp, Artificial Sequence
  Description of Artificial Sequence: Synthetic oligonucleotide
  Target: LAMA2; (-) strand; PAM type: NRG; PAM sequence: AAG
agacatatgggttgtcttcg

SEQ ID NO: 80080 - DNA, 20 bp, Artificial Sequence
  Description of Artificial Sequence: Synthetic oligonucleotide
  Target: LAMA2; (-) strand; PAM type: NRG; PAM sequence: GGG
ttaggaaaagctagacatat

SEQ ID NO: 80081 - DNA, 20 bp, Artificial Sequence
  Description of Artificial Sequence: Synthetic oligonucleotide
  Target: LAMA2; (-) strand; PAM type: NRG; PAM sequence: TGG
tttaggaaaagctagacata

SEQ ID NO: 80082 - DNA, 20 bp, Artificial Sequence
  Description of Artificial Sequence: Synthetic oligonucleotide
  Target: LAMA2; (-) strand; PAM type: NRG; PAM sequence: TAG
tatttccctttaggaaaagc

SEQ ID NO: 80083 - DNA, 20 bp, Artificial Sequence
  Description of Artificial Sequence: Synthetic oligonucleotide
  Target: LAMA2; (-) strand; PAM type: NRG; PAM sequence: AAG
tagatatttccctttaggaa

SEQ ID NO: 80084 - DNA, 20 bp, Artificial Sequence
  Description of Artificial Sequence: Synthetic oligonucleotide
  Target: LAMA2; (-) strand; PAM type: NRG; PAM sequence: AGG
tttcttagatatttcccttt

SEQ ID NO: 80085 - DNA, 20 bp, Artificial Sequence
  Description of Artificial Sequence: Synthetic oligonucleotide
  Target: LAMA2; (-) strand; PAM type: NRG; PAM sequence: TAG
atttcttagatatttccctt

SEQ ID NO: 80086 - DNA, 20 bp, Artificial Sequence
  Description of Artificial Sequence: Synthetic oligonucleotide
  Target: LAMA2; (-) strand; PAM type: NRG; PAM sequence: TAG
aagtcatctgctacatttct

SEQ ID NO: 80087 - DNA, 20 bp, Artificial Sequence
  Description of Artificial Sequence: Synthetic oligonucleotide
  Target: LAMA2; (-) strand; PAM type: NRG; PAM sequence: AAG
gttgtcactattaggctata

SEQ ID NO: 80088 - DNA, 20 bp, Artificial Sequence
  Description of Artificial Sequence: Synthetic oligonucleotide
  Target: LAMA2; (-) strand; PAM type: NRG; PAM sequence: AGG
aaagaccagttgtcactatt

SEQ ID NO: 80089 - DNA, 20 bp, Artificial Sequence
  Description of Artificial Sequence: Synthetic oligonucleotide
  Target: LAMA2; (-) strand; PAM type: NRG; PAM sequence: TAG
aaaagaccagttgtcactat

SEQ ID NO: 80090 - DNA, 20 bp, Artificial Sequence
  Description of Artificial Sequence: Synthetic oligonucleotide
  Target: LAMA2; (-) strand; PAM type: NRG; PAM sequence: CAG
tacctgtcacctaaaaagac

SEQ ID NO: 80091 - DNA, 20 bp, Artificial Sequence
  Description of Artificial Sequence: Synthetic oligonucleotide
  Target: LAMA2; (-) strand; PAM type: NRG; PAM sequence: AAG
catgatacctgtcacctaaa

SEQ ID NO: 80092 - DNA, 20 bp, Artificial Sequence
  Description of Artificial Sequence: Synthetic oligonucleotide
  Target: LAMA2; (-) strand; PAM type: NRG; PAM sequence: AGG
gagaaaatctccagaaacac

SEQ ID NO: 80093 - DNA, 20 bp, Artificial Sequence
  Description of Artificial Sequence: Synthetic oligonucleotide
  Target: LAMA2; (-) strand; PAM type: NRG; PAM sequence: CAG
tgagaaaatctccagaaaca

SEQ ID NO: 80094 - DNA, 20 bp, Artificial Sequence
  Description of Artificial Sequence: Synthetic oligonucleotide
  Target: LAMA2; (-) strand; PAM type: NRG; PAM sequence: CAG
tcttgggttgagaaaatctc

SEQ ID NO: 80095 - DNA, 20 bp, Artificial Sequence
  Description of Artificial Sequence: Synthetic oligonucleotide
  Target: LAMA2; (-) strand; PAM type: NRG; PAM sequence: GAG
tttaggtcttttcttgggtt

SEQ ID NO: 80096 - DNA, 20 bp, Artificial Sequence
  Description of Artificial Sequence: Synthetic oligonucleotide
  Target: LAMA2; (-) strand; PAM type: NRG; PAM sequence: GGG
ctatttttaggtcttttctt

SEQ ID NO: 80097 - DNA, 20 bp, Artificial Sequence
  Description of Artificial Sequence: Synthetic oligonucleotide
  Target: LAMA2; (-) strand; PAM type: NRG; PAM sequence: TGG
actatttttaggtcttttct

SEQ ID NO: 80098 - DNA, 20 bp, Artificial Sequence
  Description of Artificial Sequence: Synthetic oligonucleotide
  Target: LAMA2; (-) strand; PAM type: NRG; PAM sequence: AGG
ttcagcccaagactattttt

SEQ ID NO: 80099 - DNA, 20 bp, Artificial Sequence
  Description of Artificial Sequence: Synthetic oligonucleotide
  Target: LAMA2; (-) strand; PAM type: NRG; PAM sequence: TAG
gttcagcccaagactatttt

SEQ ID NO: 80100 - DNA, 20 bp, Artificial Sequence
  Description of Artificial Sequence: Synthetic oligonucleotide
  Target: LAMA2; (-) strand; PAM type: NRG; PAM sequence: AAG
ttaggtttgcagttcagccc

SEQ ID NO: 80101 - DNA, 20 bp, Artificial Sequence
  Description of Artificial Sequence: Synthetic oligonucleotide
  Target: LAMA2; (-) strand; PAM type: NRG; PAM sequence: CAG
actagtttaggtttgcagtt

SEQ ID NO: 80102 - DNA, 20 bp, Artificial Sequence
  Description of Artificial Sequence: Synthetic oligonucleotide
  Target: LAMA2; (-) strand; PAM type: NRG; PAM sequence: CAG
ttcatactagtttaggtttg

SEQ ID NO: 80103 - DNA, 20 bp, Artificial Sequence
  Description of Artificial Sequence: Synthetic oligonucleotide
  Target: LAMA2; (-) strand; PAM type: NRG; PAM sequence: AGG
attggacttcatactagttt

SEQ ID NO: 80104 - DNA, 20 bp, Artificial Sequence
  Description of Artificial Sequence: Synthetic oligonucleotide
  Target: LAMA2; (-) strand; PAM type: NRG; PAM sequence: TAG
aattggacttcatactagtt

SEQ ID NO: 80105 - DNA, 20 bp, Artificial Sequence
  Description of Artificial Sequence: Synthetic oligonucleotide
  Target: LAMA2; (-) strand; PAM type: NRG; PAM sequence: TAG
agttgaattggacttcatac

SEQ ID NO: 80106 - DNA, 20 bp, Artificial Sequence
  Description of Artificial Sequence: Synthetic oligonucleotide
  Target: LAMA2; (-) strand; PAM type: NRG; PAM sequence: TGG
atatttgcattcagttgaat

SEQ ID NO: 80107 - DNA, 20 bp, Artificial Sequence
  Description of Artificial Sequence: Synthetic oligonucleotide
  Target: LAMA2; (-) strand; PAM type: NRG; PAM sequence: CAG
gtaatattaatatttgcatt

SEQ ID NO: 80108 - DNA, 20 bp, Artificial Sequence
  Description of Artificial Sequence: Synthetic oligonucleotide
  Target: LAMA2; (-) strand; PAM type: NRG; PAM sequence: GGG
agctgaaaaaaatgtggtta

SEQ ID NO: 80109 - DNA, 20 bp, Artificial Sequence
  Description of Artificial Sequence: Synthetic oligonucleotide
  Target: LAMA2; (-) strand; PAM type: NRG; PAM sequence: AGG
gagctgaaaaaaatgtggtt

SEQ ID NO: 80110 - DNA, 20 bp, Artificial Sequence
  Description of Artificial Sequence: Synthetic oligonucleotide
  Target: LAMA2; (-) strand; PAM type: NRG; PAM sequence: TAG
tgagctgaaaaaaatgtggt

SEQ ID NO: 80111 - DNA, 20 bp, Artificial Sequence
  Description of Artificial Sequence: Synthetic oligonucleotide
  Target: LAMA2; (-) strand; PAM type: NRG; PAM sequence: TGG
ttagtgagctgaaaaaaatg

SEQ ID NO: 80112 - DNA, 20 bp, Artificial Sequence
  Description of Artificial Sequence: Synthetic oligonucleotide
  Target: LAMA2; (-) strand; PAM type: NRG; PAM sequence: GAG
gaaggccatatatacttagt

SEQ ID NO: 80113 - DNA, 20 bp, Artificial Sequence
  Description of Artificial Sequence: Synthetic oligonucleotide
  Target: LAMA2; (-) strand; PAM type: NRG; PAM sequence: TAG
ttttgaaggccatatatact

SEQ ID NO: 80114 - DNA, 20 bp, Artificial Sequence
  Description of Artificial Sequence: Synthetic oligonucleotide
  Target: LAMA2; (-) strand; PAM type: NRG; PAM sequence: AGG
gtctatcaagctgtttttga

SEQ ID NO: 80115 - DNA, 20 bp, Artificial Sequence
  Description of Artificial Sequence: Synthetic oligonucleotide
  Target: LAMA2; (-) strand; PAM type: NRG; PAM sequence: AAG
tgtctatcaagctgtttttg

SEQ ID NO: 80116 - DNA, 20 bp, Artificial Sequence
  Description of Artificial Sequence: Synthetic oligonucleotide
  Target: LAMA2; (-) strand; PAM type: NRG; PAM sequence: AAG
attaatttaaaatgtctatc

SEQ ID NO: 80117 - DNA, 20 bp, Artificial Sequence
  Description of Artificial Sequence: Synthetic oligonucleotide
  Target: LAMA2; (-) strand; PAM type: NRG; PAM sequence: TGG
attcaaaggatatatagtgt

SEQ ID NO: 80118 - DNA, 20 bp, Artificial Sequence
  Description of Artificial Sequence: Synthetic oligonucleotide
  Target: LAMA2; (-) strand; PAM type: NRG; PAM sequence: TAG
tttgttattcaaaggatata

SEQ ID NO: 80119 - DNA, 20 bp, Artificial Sequence
  Description of Artificial Sequence: Synthetic oligonucleotide
  Target: LAMA2; (-) strand; PAM type: NRG; PAM sequence: AGG
tgagttaatttgttattcaa

SEQ ID NO: 80120 - DNA, 20 bp, Artificial Sequence
  Description of Artificial Sequence: Synthetic oligonucleotide
  Target: LAMA2; (-) strand; PAM type: NRG; PAM sequence: AAG
ttgagttaatttgttattca

SEQ ID NO: 80121 - DNA, 20 bp, Artificial Sequence
  Description of Artificial Sequence: Synthetic oligonucleotide
  Target: LAMA2; (-) strand; PAM type: NRG; PAM sequence: GAG
gtacatgataaatgtgagtt

SEQ ID NO: 80122 - DNA, 20 bp, Artificial Sequence
  Description of Artificial Sequence: Synthetic oligonucleotide
  Target: LAMA2; (-) strand; PAM type: NRG; PAM sequence: GAG
acattgtacatgataaatgt

SEQ ID NO: 80123 - DNA, 20 bp, Artificial Sequence
  Description of Artificial Sequence: Synthetic oligonucleotide
  Target: LAMA2; (-) strand; PAM type: NRG; PAM sequence: AAG
gttatgattcaatagtttta

SEQ ID NO: 80124 - DNA, 20 bp, Artificial Sequence
  Description of Artificial Sequence: Synthetic oligonucleotide
  Target: LAMA2; (-) strand; PAM type: NRG; PAM sequence: TAG
taaggtgtgttatgattcaa

SEQ ID NO: 80125 - DNA, 20 bp, Artificial Sequence
  Description of Artificial Sequence: Synthetic oligonucleotide
  Target: LAMA2; (-) strand; PAM type: NRG; PAM sequence: AGG
tggggaacattttgtgatta

SEQ ID NO: 80126 - DNA, 20 bp, Artificial Sequence
  Description of Artificial Sequence: Synthetic oligonucleotide
  Target: LAMA2; (-) strand; PAM type: NRG; PAM sequence: AAG
gtggggaacattttgtgatt

SEQ ID NO: 80127 - DNA, 20 bp, Artificial Sequence
  Description of Artificial Sequence: Synthetic oligonucleotide
  Target: LAMA2; (-) strand; PAM type: NRG; PAM sequence: GGG
gactttatatcttataggtg

SEQ ID NO: 80128 - DNA, 20 bp, Artificial Sequence
  Description of Artificial Sequence: Synthetic oligonucleotide
  Target: LAMA2; (-) strand; PAM type: NRG; PAM sequence: GGG
cgactttatatcttataggt

SEQ ID NO: 80129 - DNA, 20 bp, Artificial Sequence
  Description of Artificial Sequence: Synthetic oligonucleotide
  Target: LAMA2; (-) strand; PAM type: NRG; PAM sequence: TGG
ccgactttatatcttatagg

SEQ ID NO: 80130 - DNA, 20 bp, Artificial Sequence
  Description of Artificial Sequence: Synthetic oligonucleotide
  Target: LAMA2; (-) strand; PAM type: NRG; PAM sequence: AGG
aggccgactttatatcttat

SEQ ID NO: 80131 - DNA, 20 bp, Artificial Sequence
  Description of Artificial Sequence: Synthetic oligonucleotide
  Target: LAMA2; (-) strand; PAM type: NRG; PAM sequence: TAG
aaggccgactttatatctta

SEQ ID NO: 80132 - DNA, 20 bp, Artificial Sequence
  Description of Artificial Sequence: Synthetic oligonucleotide
  Target: LAMA2; (-) strand; PAM type: NRG; PAM sequence: AGG
ggagaaaccatggatatgga

SEQ ID NO: 80133 - DNA, 20 bp, Artificial Sequence
  Description of Artificial Sequence: Synthetic oligonucleotide
  Target: LAMA2; (-) strand; PAM type: NRG; PAM sequence: AAG
tggagaaaccatggatatgg

SEQ ID NO: 80134 - DNA, 20 bp, Artificial Sequence
  Description of Artificial Sequence: Synthetic oligonucleotide
  Target: LAMA2; (-) strand; PAM type: NRG; PAM sequence: TGG
ggatggagaaaccatggata

SEQ ID NO: 80135 - DNA, 20 bp, Artificial Sequence
  Description of Artificial Sequence: Synthetic oligonucleotide
  Target: LAMA2; (-) strand; PAM type: NRG; PAM sequence: TGG
acccatggatggagaaacca

SEQ ID NO: 80136 - DNA, 20 bp, Artificial Sequence
  Description of Artificial Sequence: Synthetic oligonucleotide
  Target: LAMA2; (-) strand; PAM type: NRG; PAM sequence: GAG
gttggttagacccatggatg

SEQ ID NO: 80137 - DNA, 20 bp, Artificial Sequence
  Description of Artificial Sequence: Synthetic oligonucleotide
  Target: LAMA2; (-) strand; PAM type: NRG; PAM sequence: TGG
cagttggttagacccatgga

SEQ ID NO: 80138 - DNA, 20 bp, Artificial Sequence
  Description of Artificial Sequence: Synthetic oligonucleotide
  Target: LAMA2; (-) strand; PAM type: NRG; PAM sequence: TGG
tctgcagttggttagaccca

SEQ ID NO: 80139 - DNA, 20 bp, Artificial Sequence
  Description of Artificial Sequence: Synthetic oligonucleotide
  Target: LAMA2; (-) strand; PAM type: NRG; PAM sequence: TAG
atttttgatctgcagttggt

SEQ ID NO: 80140 - DNA, 20 bp, Artificial Sequence
  Description of Artificial Sequence: Synthetic oligonucleotide
  Target: LAMA2; (-) strand; PAM type: NRG; PAM sequence: TGG
aaacatttttgatctgcagt

SEQ ID NO: 80141 - DNA, 20 bp, Artificial Sequence
  Description of Artificial Sequence: Synthetic oligonucleotide
  Target: LAMA2; (-) strand; PAM type: NRG; PAM sequence: CAG
tttcaaacatttttgatctg

SEQ ID NO: 80142 - DNA, 20 bp, Artificial Sequence
  Description of Artificial Sequence: Synthetic oligonucleotide
  Target: LAMA2; (-) strand; PAM type: NRG; PAM sequence: CAG
aggtctttacaagttcagta

SEQ ID NO: 80143 - DNA, 20 bp, Artificial Sequence
  Description of Artificial Sequence: Synthetic oligonucleotide
  Target: LAMA2; (-) strand; PAM type: NRG; PAM sequence: CAG
gaaaaaggtctttacaagtt

SEQ ID NO: 80144 - DNA, 20 bp, Artificial Sequence
  Description of Artificial Sequence: Synthetic oligonucleotide
  Target: LAMA2; (-) strand; PAM type: NRG; PAM sequence: AAG
aataagaaaaaggtctttac

SEQ ID NO: 80145 - DNA, 20 bp, Artificial Sequence
  Description of Artificial Sequence: Synthetic oligonucleotide
  Target: LAMA2; (-) strand; PAM type: NRG; PAM sequence: AGG
aggaaataataataagaaaa

SEQ ID NO: 80146 - DNA, 20 bp, Artificial Sequence
  Description of Artificial Sequence: Synthetic oligonucleotide
  Target: LAMA2; (-) strand; PAM type: NRG; PAM sequence: AAG
taggaaataataataagaaa

SEQ ID NO: 80147 - DNA, 20 bp, Artificial Sequence
  Description of Artificial Sequence: Synthetic oligonucleotide
  Target: LAMA2; (-) strand; PAM type: NRG; PAM sequence: AAG
attgcttaggaaataataat

SEQ ID NO: 80148 - DNA, 20 bp, Artificial Sequence
  Description of Artificial Sequence: Synthetic oligonucleotide
  Target: LAMA2; (-) strand; PAM type: NRG; PAM sequence: AGG
aaatagttgttatattgctt

SEQ ID NO: 80149 - DNA, 20 bp, Artificial Sequence
  Description of Artificial Sequence: Synthetic oligonucleotide
  Target: LAMA2; (-) strand; PAM type: NRG; PAM sequence: TAG
taaatagttgttatattgct

SEQ ID NO: 80150 - DNA, 20 bp, Artificial Sequence
  Description of Artificial Sequence: Synthetic oligonucleotide
  Target: LAMA2; (-) strand; PAM type: NRG; PAM sequence: TAG
aaatgtaaatgctatataaa

SEQ ID NO: 80151 - DNA, 20 bp, Artificial Sequence
  Description of Artificial Sequence: Synthetic oligonucleotide
  Target: LAMA2; (-) strand; PAM type: NRG; PAM sequence: TAG
tgtacactttagatcatctc

SEQ ID NO: 80152 - DNA, 20 bp, Artificial Sequence
  Description of Artificial Sequence: Synthetic oligonucleotide
  Target: LAMA2; (-) strand; PAM type: NRG; PAM sequence: TAG
gcacatcctcctgtacactt

SEQ ID NO: 80153 - DNA, 20 bp, Artificial Sequence
  Description of Artificial Sequence: Synthetic oligonucleotide
  Target: LAMA2; (-) strand; PAM type: NRG; PAM sequence: CAG
agtggcatagtacttgcata

SEQ ID NO: 80154 - DNA, 20 bp, Artificial Sequence
  Description of Artificial Sequence: Synthetic oligonucleotide
  Target: LAMA2; (-) strand; PAM type: NRG; PAM sequence: TAG
gttcctgttatacagtggca

SEQ ID NO: 80155 - DNA, 20 bp, Artificial Sequence
  Description of Artificial Sequence: Synthetic oligonucleotide
  Target: LAMA2; (-) strand; PAM type: NRG; PAM sequence: TGG
ctcaagttcctgttatacag

SEQ ID NO: 80156 - DNA, 20 bp, Artificial Sequence
  Description of Artificial Sequence: Synthetic oligonucleotide
  Target: LAMA2; (-) strand; PAM type: NRG; PAM sequence: CAG
atactcaagttcctgttata

SEQ ID NO: 80157 - DNA, 20 bp, Artificial Sequence
  Description of Artificial Sequence: Synthetic oligonucleotide
  Target: LAMA2; (-) strand; PAM type: NRG; PAM sequence: AAG
accaagattcaaggatactc

SEQ ID NO: 80158 - DNA, 20 bp, Artificial Sequence
  Description of Artificial Sequence: Synthetic oligonucleotide
  Target: LAMA2; (-) strand; PAM type: NRG; PAM sequence: AGG
ccctcaaacaccaagattca

SEQ ID NO: 80159 - DNA, 20 bp, Artificial Sequence
  Description of Artificial Sequence: Synthetic oligonucleotide
  Target: LAMA2; (-) strand; PAM type: NRG; PAM sequence: AAG
tccctcaaacaccaagattc

SEQ ID NO: 80160 - DNA, 20 bp, Artificial Sequence
  Description of Artificial Sequence: Synthetic oligonucleotide
  Target: LAMA2; (-) strand; PAM type: NRG; PAM sequence: AAG
caggacctccctcaaacacc

SEQ ID NO: 80161 - DNA, 20 bp, Artificial Sequence
  Description of Artificial Sequence: Synthetic oligonucleotide
  Target: LAMA2; (-) strand; PAM type: NRG; PAM sequence: AGG
atatccatgggaatggttcc

SEQ ID NO: 80162 - DNA, 20 bp, Artificial Sequence
  Description of Artificial Sequence: Synthetic oligonucleotide
  Target: LAMA2; (-) strand; PAM type: NRG; PAM sequence: CAG
aatatccatgggaatggttc

SEQ ID NO: 80163 - DNA, 20 bp, Artificial Sequence
  Description of Artificial Sequence: Synthetic oligonucleotide
  Target: LAMA2; (-) strand; PAM type: NRG; PAM sequence: TGG
tccctcaatatccatgggaa

SEQ ID NO: 80164 - DNA, 20 bp, Artificial Sequence
  Description of Artificial Sequence: Synthetic oligonucleotide
  Target: LAMA2; (-) strand; PAM type: NRG; PAM sequence: GGG
agccatccctcaatatccat

SEQ ID NO: 80165 - DNA, 20 bp, Artificial Sequence
  Description of Artificial Sequence: Synthetic oligonucleotide
  Target: LAMA2; (-) strand; PAM type: NRG; PAM sequence: TGG
cagccatccctcaatatcca

SEQ ID NO: 80166 - DNA, 20 bp, Artificial Sequence
  Description of Artificial Sequence: Synthetic oligonucleotide
  Target: LAMA2; (-) strand; PAM type: NRG; PAM sequence: CAG
ctcaaactaaaaagaaaata

SEQ ID NO: 80167 - DNA, 20 bp, Artificial Sequence
  Description of Artificial Sequence: Synthetic oligonucleotide
  Target: LAMA2; (-) strand; PAM type: NRG; PAM sequence: AAG
atgcagaatctcaaactaaa

SEQ ID NO: 80168 - DNA, 20 bp, Artificial Sequence
  Description of Artificial Sequence: Synthetic oligonucleotide
  Target: LAMA2; (-) strand; PAM type: NRG; PAM sequence: CAG
gagagctaatagcatatatg

SEQ ID NO: 80169 - DNA, 20 bp, Artificial Sequence
  Description of Artificial Sequence: Synthetic oligonucleotide
  Target: LAMA2; (-) strand; PAM type: NRG; PAM sequence: TAG
cagaaaataaggagagctaa

SEQ ID NO: 80170 - DNA, 20 bp, Artificial Sequence
  Description of Artificial Sequence: Synthetic oligonucleotide
  Target: LAMA2; (-) strand; PAM type: NRG; PAM sequence: GAG
gtgagtgcagaaaataagga

SEQ ID NO: 80171 - DNA, 20 bp, Artificial Sequence
  Description of Artificial Sequence: Synthetic oligonucleotide
  Target: LAMA2; (-) strand; PAM type: NRG; PAM sequence: GAG
aagtgagtgcagaaaataag

SEQ ID NO: 80172 - DNA, 20 bp, Artificial Sequence
  Description of Artificial Sequence: Synthetic oligonucleotide
  Target: LAMA2; (-) strand; PAM type: NRG; PAM sequence: AGG
tgaagtgagtgcagaaaata

SEQ ID NO: 80173 - DNA, 20 bp, Artificial Sequence
  Description of Artificial Sequence: Synthetic oligonucleotide
  Target: LAMA2; (-) strand; PAM type: NRG; PAM sequence: AAG
atgaagtgagtgcagaaaat

SEQ ID NO: 80174 - DNA, 20 bp, Artificial Sequence
  Description of Artificial Sequence: Synthetic oligonucleotide
  Target: LAMA2; (-) strand; PAM type: NRG; PAM sequence: CAG
aaaagcaaatgaagtgagtg

SEQ ID NO: 80175 - DNA, 20 bp, Artificial Sequence
  Description of Artificial Sequence: Synthetic oligonucleotide
  Target: LAMA2; (-) strand; PAM type: NRG; PAM sequence: GAG
aatccaaaagcaaatgaagt

SEQ ID NO: 80176 - DNA, 20 bp, Artificial Sequence
  Description of Artificial Sequence: Synthetic oligonucleotide
  Target: LAMA2; (-) strand; PAM type: NRG; PAM sequence: AAG
cacaaatccaaaagcaaatg

SEQ ID NO: 80177 - DNA, 20 bp, Artificial Sequence
  Description of Artificial Sequence: Synthetic oligonucleotide
  Target: LAMA2; (-) strand; PAM type: NRG; PAM sequence: AAG
acaggcagacacaaatccaa

SEQ ID NO: 80178 - DNA, 20 bp, Artificial Sequence
  Description of Artificial Sequence: Synthetic oligonucleotide
  Target: LAMA2; (-) strand; PAM type: NRG; PAM sequence: CAG
ataatatctttataaacagg

SEQ ID NO: 80179 - DNA, 20 bp, Artificial Sequence
  Description of Artificial Sequence: Synthetic oligonucleotide
  Target: LAMA2; (-) strand; PAM type: NRG; PAM sequence: AGG
tccataatatctttataaac

SEQ ID NO: 80180 - DNA, 20 bp, Artificial Sequence
  Description of Artificial Sequence: Synthetic oligonucleotide
  Target: LAMA2; (-) strand; PAM type: NRG; PAM sequence: CAG
atccataatatctttataaa

SEQ ID NO: 80181 - DNA, 20 bp, Artificial Sequence
  Description of Artificial Sequence: Synthetic oligonucleotide
  Target: LAMA2; (-) strand; PAM type: NRG; PAM sequence: GAG
atatgcttttgtaataatgg

SEQ ID NO: 80182 - DNA, 20 bp, Artificial Sequence
  Description of Artificial Sequence: Synthetic oligonucleotide
  Target: LAMA2; (-) strand; PAM type: NRG; PAM sequence: GGG
agatatgcttttgtaataat

SEQ ID NO: 80183 - DNA, 20 bp, Artificial Sequence
  Description of Artificial Sequence: Synthetic oligonucleotide
  Target: LAMA2; (-) strand; PAM type: NRG; PAM sequence: TGG
cagatatgcttttgtaataa

SEQ ID NO: 80184 - DNA, 20 bp, Artificial Sequence
  Description of Artificial Sequence: Synthetic oligonucleotide
  Target: LAMA2; (-) strand; PAM type: NRG; PAM sequence: CAG
ccaatggtggctcatgcctc

SEQ ID NO: 80185 - DNA, 20 bp, Artificial Sequence
  Description of Artificial Sequence: Synthetic oligonucleotide
  Target: LAMA2; (-) strand; PAM type: NRG; PAM sequence: TGG
ggtgagtgatgatccaatgg

SEQ ID NO: 80186 - DNA, 20 bp, Artificial Sequence
  Description of Artificial Sequence: Synthetic oligonucleotide
  Target: LAMA2; (-) strand; PAM type: NRG; PAM sequence: TGG
catggtgagtgatgatccaa

SEQ ID NO: 80187 - DNA, 20 bp, Artificial Sequence
  Description of Artificial Sequence: Synthetic oligonucleotide
  Target: LAMA2; (-) strand; PAM type: NRG; PAM sequence: GAG
ggtcccctaccatgcatggt

SEQ ID NO: 80188 - DNA, 20 bp, Artificial Sequence
  Description of Artificial Sequence: Synthetic oligonucleotide
  Target: LAMA2; (-) strand; PAM type: NRG; PAM sequence: TGG
caatggtcccctaccatgca

SEQ ID NO: 80189 - DNA, 20 bp, Artificial Sequence
  Description of Artificial Sequence: Synthetic oligonucleotide
  Target: LAMA2; (-) strand; PAM type: NRG; PAM sequence: TGG
acaaaaggctgggcttccaa

SEQ ID NO: 80190 - DNA, 20 bp, Artificial Sequence
  Description of Artificial Sequence: Synthetic oligonucleotide
  Target: LAMA2; (-) strand; PAM type: NRG; PAM sequence: GGG
gttgaaggaaacaaaaggct

SEQ ID NO: 80191 - DNA, 20 bp, Artificial Sequence
  Description of Artificial Sequence: Synthetic oligonucleotide
  Target: LAMA2; (-) strand; PAM type: NRG; PAM sequence: TGG
agttgaaggaaacaaaaggc

SEQ ID NO: 80192 - DNA, 20 bp, Artificial Sequence
  Description of Artificial Sequence: Synthetic oligonucleotide
  Target: LAMA2; (-) strand; PAM type: NRG; PAM sequence: AGG
aagtagttgaaggaaacaaa

SEQ ID NO: 80193 - DNA, 20 bp, Artificial Sequence
  Description of Artificial Sequence: Synthetic oligonucleotide
  Target: LAMA2; (-) strand; PAM type: NRG; PAM sequence: AAG
gaagtagttgaaggaaacaa

SEQ ID NO: 80194 - DNA, 20 bp, Artificial Sequence
  Description of Artificial Sequence: Synthetic oligonucleotide
  Target: LAMA2; (-) strand; PAM type: NRG; PAM sequence: AGG
acatggctggaagtagttga

SEQ ID NO: 80195 - DNA, 20 bp, Artificial Sequence
  Description of Artificial Sequence: Synthetic oligonucleotide
  Target: LAMA2; (-) strand; PAM type: NRG; PAM sequence: AAG
aacatggctggaagtagttg

SEQ ID NO: 80196 - DNA, 20 bp, Artificial Sequence
  Description of Artificial Sequence: Synthetic oligonucleotide
  Target: LAMA2; (-) strand; PAM type: NRG; PAM sequence: TAG
agccagaacatggctggaag

SEQ ID NO: 80197 - DNA, 20 bp, Artificial Sequence
  Description of Artificial Sequence: Synthetic oligonucleotide
  Target: LAMA2; (-) strand; PAM type: NRG; PAM sequence: AAG
attagccagaacatggctgg

SEQ ID NO: 80198 - DNA, 20 bp, Artificial Sequence
  Description of Artificial Sequence: Synthetic oligonucleotide
  Target: LAMA2; (-) strand; PAM type: NRG; PAM sequence: TGG
gggattagccagaacatggc

SEQ ID NO: 80199 - DNA, 20 bp, Artificial Sequence
  Description of Artificial Sequence: Synthetic oligonucleotide
  Target: LAMA2; (-) strand; PAM type: NRG; PAM sequence: TGG
ctaagggattagccagaaca

SEQ ID NO: 80200 - DNA, 20 bp, Artificial Sequence
  Description of Artificial Sequence: Synthetic oligonucleotide
  Target: LAMA2; (-) strand; PAM type: NRG; PAM sequence: CAG
tggagaactaagggattagc

SEQ ID NO: 80201 - DNA, 20 bp, Artificial Sequence
  Description of Artificial Sequence: Synthetic oligonucleotide
  Target: LAMA2; (-) strand; PAM type: NRG; PAM sequence: TAG
gctgtggagaactaagggat

SEQ ID NO: 80202 - DNA, 20 bp, Artificial Sequence
  Description of Artificial Sequence: Synthetic oligonucleotide
  Target: LAMA2; (-) strand; PAM type: NRG; PAM sequence: GGG
gagaagctgtggagaactaa

SEQ ID NO: 80203 - DNA, 20 bp, Artificial Sequence
  Description of Artificial Sequence: Synthetic oligonucleotide
  Target: LAMA2; (-) strand; PAM type: NRG; PAM sequence: AGG
ggagaagctgtggagaacta

SEQ ID NO: 80204 - DNA, 20 bp, Artificial Sequence
  Description of Artificial Sequence: Synthetic oligonucleotide
  Target: LAMA2; (-) strand; PAM type: NRG; PAM sequence: AAG
tggagaagctgtggagaact

SEQ ID NO: 80205 - DNA, 20 bp, Artificial Sequence
  Description of Artificial Sequence: Synthetic oligonucleotide
  Target: LAMA2; (-) strand; PAM type: NRG; PAM sequence: GAG
ttctctatggagaagctgtg

SEQ ID NO: 80206 - DNA, 20 bp, Artificial Sequence
  Description of Artificial Sequence: Synthetic oligonucleotide
  Target: LAMA2; (-) strand; PAM type: NRG; PAM sequence: TGG
tgttctctatggagaagctg

SEQ ID NO: 80207 - DNA, 20 bp, Artificial Sequence
  Description of Artificial Sequence: Synthetic oligonucleotide
  Target: LAMA2; (-) strand; PAM type: NRG; PAM sequence: AAG
aatgtctgttctctatggag

SEQ ID NO: 80208 - DNA, 20 bp, Artificial Sequence
  Description of Artificial Sequence: Synthetic oligonucleotide
  Target: LAMA2; (-) strand; PAM type: NRG; PAM sequence: GAG
acaaatgtctgttctctatg

SEQ ID NO: 80209 - DNA, 20 bp, Artificial Sequence
  Description of Artificial Sequence: Synthetic oligonucleotide
  Target: LAMA2; (-) strand; PAM type: NRG; PAM sequence: TGG
gaacaaatgtctgttctcta

SEQ ID NO: 80210 - DNA, 20 bp, Artificial Sequence
  Description of Artificial Sequence: Synthetic oligonucleotide
  Target: LAMA2; (-) strand; PAM type: NRG; PAM sequence: AAG
ttacatttaaagtcactatt

SEQ ID NO: 80211 - DNA, 20 bp, Artificial Sequence
  Description of Artificial Sequence: Synthetic oligonucleotide
  Target: LAMA2; (-) strand; PAM type: NRG; PAM sequence: AAG
cctgggtggcattacattta

SEQ ID NO: 80212 - DNA, 20 bp, Artificial Sequence
  Description of Artificial Sequence: Synthetic oligonucleotide
  Target: LAMA2; (-) strand; PAM type: NRG; PAM sequence: TGG
cgagagcaaacatccctggg

SEQ ID NO: 80213 - DNA, 20 bp, Artificial Sequence
  Description of Artificial Sequence: Synthetic oligonucleotide
  Target: LAMA2; (-) strand; PAM type: NRG; PAM sequence: GGG
gctcgagagcaaacatccct

SEQ ID NO: 80214 - DNA, 20 bp, Artificial Sequence
  Description of Artificial Sequence: Synthetic oligonucleotide
  Target: LAMA2; (-) strand; PAM type: NRG; PAM sequence: TGG
agctcgagagcaaacatccc

SEQ ID NO: 80215 - DNA, 20 bp, Artificial Sequence
  Description of Artificial Sequence: Synthetic oligonucleotide
  Target: LAMA2; (-) strand; PAM type: NRG; PAM sequence: GAG
taaaatttaaaggagctcga

SEQ ID NO: 80216 - DNA, 20 bp, Artificial Sequence
  Description of Artificial Sequence: Synthetic oligonucleotide
  Target: LAMA2; (-) strand; PAM type: NRG; PAM sequence: GAG
attaaaatttaaaggagctc

SEQ ID NO: 80217 - DNA, 20 bp, Artificial Sequence
  Description of Artificial Sequence: Synthetic oligonucleotide
  Target: LAMA2; (-) strand; PAM type: NRG; PAM sequence: GAG
aatttaattaaaatttaaag

SEQ ID NO: 80218 - DNA, 20 bp, Artificial Sequence
  Description of Artificial Sequence: Synthetic oligonucleotide
  Target: LAMA2; (-) strand; PAM type: NRG; PAM sequence: AGG
gaaatttaattaaaatttaa

SEQ ID NO: 80219 - DNA, 20 bp, Artificial Sequence
  Description of Artificial Sequence: Synthetic oligonucleotide
  Target: LAMA2; (-) strand; PAM type: NRG; PAM sequence: AAG
agaaatttaattaaaattta

SEQ ID NO: 80220 - DNA, 20 bp, Artificial Sequence
  Description of Artificial Sequence: Synthetic oligonucleotide
  Target: LAMA2; (-) strand; PAM type: NRG; PAM sequence: GAG
ctgatattctacaaacagaa

SEQ ID NO: 80221 - DNA, 20 bp, Artificial Sequence
  Description of Artificial Sequence: Synthetic oligonucleotide
  Target: LAMA2; (-) strand; PAM type: NRG; PAM sequence: AAG
tactgatattctacaaacag

SEQ ID NO: 80222 - DNA, 20 bp, Artificial Sequence
  Description of Artificial Sequence: Synthetic oligonucleotide
  Target: LAMA2; (-) strand; PAM type: NRG; PAM sequence: CAG
gattactgatattctacaaa

SEQ ID NO: 80223 - DNA, 20 bp, Artificial Sequence
  Description of Artificial Sequence: Synthetic oligonucleotide
  Target: LAMA2; (-) strand; PAM type: NRG; PAM sequence: AAG
acaggaagacccctaccttc

SEQ ID NO: 80224 - DNA, 20 bp, Artificial Sequence
  Description of Artificial Sequence: Synthetic oligonucleotide
  Target: LAMA2; (-) strand; PAM type: NRG; PAM sequence: AAG
ggcatgtcagtggcaacagg

SEQ ID NO: 80225 - DNA, 20 bp, Artificial Sequence
  Description of Artificial Sequence: Synthetic oligonucleotide
  Target: LAMA2; (-) strand; PAM type: NRG; PAM sequence: AGG
gaaggcatgtcagtggcaac

SEQ ID NO: 80226 - DNA, 20 bp, Artificial Sequence
  Description of Artificial Sequence: Synthetic oligonucleotide
  Target: LAMA2; (-) strand; PAM type: NRG; PAM sequence: CAG
tgaaggcatgtcagtggcaa

SEQ ID NO: 80227 - DNA, 20 bp, Artificial Sequence
  Description of Artificial Sequence: Synthetic oligonucleotide
  Target: LAMA2; (-) strand; PAM type: NRG; PAM sequence: TGG
actgtgtgaaggcatgtcag

SEQ ID NO: 80228 - DNA, 20 bp, Artificial Sequence
  Description of Artificial Sequence: Synthetic oligonucleotide
  Target: LAMA2; (-) strand; PAM type: NRG; PAM sequence: CAG
atcactgtgtgaaggcatgt

SEQ ID NO: 80229 - DNA, 20 bp, Artificial Sequence
  Description of Artificial Sequence: Synthetic oligonucleotide
  Target: LAMA2; (-) strand; PAM type: NRG; PAM sequence: AGG
acacaattatcactgtgtga

SEQ ID NO: 80230 - DNA, 20 bp, Artificial Sequence
  Description of Artificial Sequence: Synthetic oligonucleotide
  Target: LAMA2; (-) strand; PAM type: NRG; PAM sequence: AAG
tacacaattatcactgtgtg

SEQ ID NO: 80231 - DNA, 20 bp, Artificial Sequence
  Description of Artificial Sequence: Synthetic oligonucleotide
  Target: LAMA2; (-) strand; PAM type: NRG; PAM sequence: GAG
gagtggtaaaggattttgca

SEQ ID NO: 80232 - DNA, 20 bp, Artificial Sequence
  Description of Artificial Sequence: Synthetic oligonucleotide
  Target: LAMA2; (-) strand; PAM type: NRG; PAM sequence: CAG
aagagtggtaaaggattttg

SEQ ID NO: 80233 - DNA, 20 bp, Artificial Sequence
  Description of Artificial Sequence: Synthetic oligonucleotide
  Target: LAMA2; (-) strand; PAM type: NRG; PAM sequence: AGG
acacaagtaaagagtggtaa

SEQ ID NO: 80234 - DNA, 20 bp, Artificial Sequence
  Description of Artificial Sequence: Synthetic oligonucleotide
  Target: LAMA2; (-) strand; PAM type: NRG; PAM sequence: AAG
aacacaagtaaagagtggta

SEQ ID NO: 80235 - DNA, 20 bp, Artificial Sequence
  Description of Artificial Sequence: Synthetic oligonucleotide
  Target: LAMA2; (-) strand; PAM type: NRG; PAM sequence: TGG
gtagaaacacaagtaaagag

SEQ ID NO: 80236 - DNA, 20 bp, Artificial Sequence
  Description of Artificial Sequence: Synthetic oligonucleotide
  Target: LAMA2; (-) strand; PAM type: NRG; PAM sequence: GAG
aacgtagaaacacaagtaaa

SEQ ID NO: 80237 - DNA, 20 bp, Artificial Sequence
  Description of Artificial Sequence: Synthetic oligonucleotide
  Target: LAMA2; (-) strand; PAM type: NRG; PAM sequence: AAG
taaacgtagaaacacaagta

SEQ ID NO: 80238 - DNA, 20 bp, Artificial Sequence
  Description of Artificial Sequence: Synthetic oligonucleotide
  Target: LAMA2; (-) strand; PAM type: NRG; PAM sequence: AAG
gtatttaaacgtagaaacac

SEQ ID NO: 80239 - DNA, 20 bp, Artificial Sequence
  Description of Artificial Sequence: Synthetic oligonucleotide
  Target: LAMA2; (-) strand; PAM type: NRG; PAM sequence: TAG
ttttgttttgtatttaaacg

SEQ ID NO: 80240 - DNA, 20 bp, Artificial Sequence
  Description of Artificial Sequence: Synthetic oligonucleotide
  Target: LAMA2; (-) strand; PAM type: NRG; PAM sequence: AAG
agtctacctctattgctaac

SEQ ID NO: 80241 - DNA, 20 bp, Artificial Sequence
  Description of Artificial Sequence: Synthetic oligonucleotide
  Target: LAMA2; (-) strand; PAM type: NRG; PAM sequence: TAG
ttgaaatgtcttgccttgct

SEQ ID NO: 80242 - DNA, 20 bp, Artificial Sequence
  Description of Artificial Sequence: Synthetic oligonucleotide
  Target: LAMA2; (-) strand; PAM type: NRG; PAM sequence: CAG
tttaaaaatgtgtacagtag

SEQ ID NO: 80243 - DNA, 20 bp, Artificial Sequence
  Description of Artificial Sequence: Synthetic oligonucleotide
  Target: LAMA2; (-) strand; PAM type: NRG; PAM sequence: TAG
tattttaaaaatgtgtacag

SEQ ID NO: 80244 - DNA, 20 bp, Artificial Sequence
  Description of Artificial Sequence: Synthetic oligonucleotide
  Target: LAMA2; (-) strand; PAM type: NRG; PAM sequence: CAG
cactattttaaaaatgtgta

SEQ ID NO: 80245 - DNA, 20 bp, Artificial Sequence
  Description of Artificial Sequence: Synthetic oligonucleotide
  Target: LAMA2; (-) strand; PAM type: NRG; PAM sequence: AAG
tccctacagggaaagaaaaa

SEQ ID NO: 80246 - DNA, 20 bp, Artificial Sequence
  Description of Artificial Sequence: Synthetic oligonucleotide
  Target: LAMA2; (-) strand; PAM type: NRG; PAM sequence: AAG
tcccctcttccctacaggga

SEQ ID NO: 80247 - DNA, 20 bp, Artificial Sequence
  Description of Artificial Sequence: Synthetic oligonucleotide
  Target: LAMA2; (-) strand; PAM type: NRG; PAM sequence: GGG
gacctcccctcttccctaca

SEQ ID NO: 80248 - DNA, 20 bp, Artificial Sequence
  Description of Artificial Sequence: Synthetic oligonucleotide
  Target: LAMA2; (-) strand; PAM type: NRG; PAM sequence: AGG
cgacctcccctcttccctac

SEQ ID NO: 80249 - DNA, 20 bp, Artificial Sequence
  Description of Artificial Sequence: Synthetic oligonucleotide
  Target: LAMA2; (-) strand; PAM type: NRG; PAM sequence: CAG
acgacctcccctcttcccta

SEQ ID NO: 80250 - DNA, 20 bp, Artificial Sequence
  Description of Artificial Sequence: Synthetic oligonucleotide
  Target: LAMA2; (-) strand; PAM type: NRG; PAM sequence: TGG
aaaatgtttgtttttcagtt

SEQ ID NO: 80251 - DNA, 20 bp, Artificial Sequence
  Description of Artificial Sequence: Synthetic oligonucleotide
  Target: LAMA2; (-) strand; PAM type: NRG; PAM sequence: CAG
tttttaaaatgtttgttttt

SEQ ID NO: 80252 - DNA, 20 bp, Artificial Sequence
  Description of Artificial Sequence: Synthetic oligonucleotide
  Target: LAMA2; (-) strand; PAM type: NRG; PAM sequence: AAG
ttatgtatggctttatggct

SEQ ID NO: 80253 - DNA, 20 bp, Artificial Sequence
  Description of Artificial Sequence: Synthetic oligonucleotide
  Target: LAMA2; (-) strand; PAM type: NRG; PAM sequence: TGG
gatttttatgtatggcttta

SEQ ID NO: 80254 - DNA, 20 bp, Artificial Sequence
  Description of Artificial Sequence: Synthetic oligonucleotide
  Target: LAMA2; (-) strand; PAM type: NRG; PAM sequence: TGG
gaaagtgtgatttttatgta

SEQ ID NO: 80255 - DNA, 20 bp, Artificial Sequence
  Description of Artificial Sequence: Synthetic oligonucleotide
  Target: LAMA2; (-) strand; PAM type: NRG; PAM sequence: AAG
aggaatgtactcattgctga

SEQ ID NO: 80256 - DNA, 20 bp, Artificial Sequence
  Description of Artificial Sequence: Synthetic oligonucleotide
  Target: LAMA2; (-) strand; PAM type: NRG; PAM sequence: AGG
aaatttttacttaagctttc

SEQ ID NO: 80257 - DNA, 20 bp, Artificial Sequence
  Description of Artificial Sequence: Synthetic oligonucleotide
  Target: LAMA2; (-) strand; PAM type: NRG; PAM sequence: CAG
aaaatttttacttaagcttt

SEQ ID NO: 80258 - DNA, 20 bp, Artificial Sequence
  Description of Artificial Sequence: Synthetic oligonucleotide
  Target: LAMA2; (-) strand; PAM type: NRG; PAM sequence: AAG
ggaaaagaaaatttttactt

SEQ ID NO: 80259 - DNA, 20 bp, Artificial Sequence
  Description of Artificial Sequence: Synthetic oligonucleotide
  Target: LAMA2; (-) strand; PAM type: NRG; PAM sequence: AAG
gaatatgattcaacttggaa

SEQ ID NO: 80260 - DNA, 20 bp, Artificial Sequence
  Description of Artificial Sequence: Synthetic oligonucleotide
  Target: LAMA2; (-) strand; PAM type: NRG; PAM sequence: TGG
gattggaatatgattcaact

SEQ ID NO: 80261 - DNA, 20 bp, Artificial Sequence
  Description of Artificial Sequence: Synthetic oligonucleotide
  Target: LAMA2; (-) strand; PAM type: NRG; PAM sequence: TGG
tttctaaatattaaggtgat

SEQ ID NO: 80262 - DNA, 20 bp, Artificial Sequence
  Description of Artificial Sequence: Synthetic oligonucleotide
  Target: LAMA2; (-) strand; PAM type: NRG; PAM sequence: AGG
aaggatttttctaaatatta

SEQ ID NO: 80263 - DNA, 20 bp, Artificial Sequence
  Description of Artificial Sequence: Synthetic oligonucleotide
  Target: LAMA2; (-) strand; PAM type: NRG; PAM sequence: AAG
gaaggatttttctaaatatt

SEQ ID NO: 80264 - DNA, 20 bp, Artificial Sequence
  Description of Artificial Sequence: Synthetic oligonucleotide
  Target: LAMA2; (-) strand; PAM type: NRG; PAM sequence: AGG
gggatttgtcatgtcatgga

SEQ ID NO: 80265 - DNA, 20 bp, Artificial Sequence
  Description of Artificial Sequence: Synthetic oligonucleotide
  Target: LAMA2; (-) strand; PAM type: NRG; PAM sequence: AAG
agggatttgtcatgtcatgg

SEQ ID NO: 80266 - DNA, 20 bp, Artificial Sequence
  Description of Artificial Sequence: Synthetic oligonucleotide
  Target: LAMA2; (-) strand; PAM type: NRG; PAM sequence: TGG
tggagggatttgtcatgtca

SEQ ID NO: 80267 - DNA, 20 bp, Artificial Sequence
  Description of Artificial Sequence: Synthetic oligonucleotide
  Target: LAMA2; (-) strand; PAM type: NRG; PAM sequence: GGG
gtgattattcattttatgga

SEQ ID NO: 80268 - DNA, 20 bp, Artificial Sequence
  Description of Artificial Sequence: Synthetic oligonucleotide
  Target: LAMA2; (-) strand; PAM type: NRG; PAM sequence: AGG
tgtgattattcattttatgg

SEQ ID NO: 80269 - DNA, 20 bp, Artificial Sequence
  Description of Artificial Sequence: Synthetic oligonucleotide
  Target: LAMA2; (-) strand; PAM type: NRG; PAM sequence: GAG
atgtgattattcattttatg

SEQ ID NO: 80270 - DNA, 20 bp, Artificial Sequence
  Description of Artificial Sequence: Synthetic oligonucleotide
  Target: LAMA2; (-) strand; PAM type: NRG; PAM sequence: TGG
gaatgtgattattcatttta

SEQ ID NO: 80271 - DNA, 20 bp, Artificial Sequence
  Description of Artificial Sequence: Synthetic oligonucleotide
  Target: LAMA2; (-) strand; PAM type: NRG; PAM sequence: TAG
caaattaaactcaaatgaat

SEQ ID NO: 80272 - DNA, 20 bp, Artificial Sequence
  Description of Artificial Sequence: Synthetic oligonucleotide
  Target: LAMA2; (-) strand; PAM type: NRG; PAM sequence: TAG
ttatcttgccttatgtaagc

SEQ ID NO: 80273 - DNA, 20 bp, Artificial Sequence
  Description of Artificial Sequence: Synthetic oligonucleotide
  Target: LAMA2; (-) strand; PAM type: NRG; PAM sequence: AAG
gatattatcttgccttatgt

SEQ ID NO: 80274 - DNA, 20 bp, Artificial Sequence
  Description of Artificial Sequence: Synthetic oligonucleotide
  Target: LAMA2; (-) strand; PAM type: NRG; PAM sequence: GAG
tgaatattctatgcttttta

SEQ ID NO: 80275 - DNA, 20 bp, Artificial Sequence
  Description of Artificial Sequence: Synthetic oligonucleotide
  Target: LAMA2; (-) strand; PAM type: NRG; PAM sequence: TAG
aatgaatattctatgctttt

SEQ ID NO: 80276 - DNA, 20 bp, Artificial Sequence
  Description of Artificial Sequence: Synthetic oligonucleotide
  Target: LAMA2; (-) strand; PAM type: NRG; PAM sequence: CAG
actgttgtttagtaaaggct

SEQ ID NO: 80277 - DNA, 20 bp, Artificial Sequence
  Description of Artificial Sequence: Synthetic oligonucleotide
  Target: LAMA2; (-) strand; PAM type: NRG; PAM sequence: AGG
atgaaactgttgtttagtaa

SEQ ID NO: 80278 - DNA, 20 bp, Artificial Sequence
  Description of Artificial Sequence: Synthetic oligonucleotide
  Target: LAMA2; (-) strand; PAM type: NRG; PAM sequence: AAG
tatgaaactgttgtttagta

SEQ ID NO: 80279 - DNA, 20 bp, Artificial Sequence
  Description of Artificial Sequence: Synthetic oligonucleotide
  Target: LAMA2; (-) strand; PAM type: NRG; PAM sequence: TAG
tatcatatgaaactgttgtt

SEQ ID NO: 80280 - DNA, 20 bp, Artificial Sequence
  Description of Artificial Sequence: Synthetic oligonucleotide
  Target: LAMA2; (-) strand; PAM type: NRG; PAM sequence: AAG
tactatttcacagaatgtcc

SEQ ID NO: 80281 - DNA, 20 bp, Artificial Sequence
  Description of Artificial Sequence: Synthetic oligonucleotide
  Target: LAMA2; (-) strand; PAM type: NRG; PAM sequence: CAG
atcagcaacttactatttca

SEQ ID NO: 80282 - DNA, 20 bp, Artificial Sequence
  Description of Artificial Sequence: Synthetic oligonucleotide
  Target: LAMA2; (-) strand; PAM type: NRG; PAM sequence: CAG
ccatgttttttctctatcat

SEQ ID NO: 80283 - DNA, 20 bp, Artificial Sequence
  Description of Artificial Sequence: Synthetic oligonucleotide
  Target: LAMA2; (-) strand; PAM type: NRG; PAM sequence: AAG
atggctagtaactgatcaca

SEQ ID NO: 80284 - DNA, 20 bp, Artificial Sequence
  Description of Artificial Sequence: Synthetic oligonucleotide
  Target: LAMA2; (-) strand; PAM type: NRG; PAM sequence: TAG
gtaaccttcaagaatatggc

SEQ ID NO: 80285 - DNA, 20 bp, Artificial Sequence
  Description of Artificial Sequence: Synthetic oligonucleotide
  Target: LAMA2; (-) strand; PAM type: NRG; PAM sequence: TGG
gtctgtaaccttcaagaata

SEQ ID NO: 80286 - DNA, 20 bp, Artificial Sequence
  Description of Artificial Sequence: Synthetic oligonucleotide
  Target: LAMA2; (-) strand; PAM type: NRG; PAM sequence: AAG
ccgctctgtctgtaaccttc

SEQ ID NO: 80287 - DNA, 20 bp, Artificial Sequence
  Description of Artificial Sequence: Synthetic oligonucleotide
  Target: LAMA2; (-) strand; PAM type: NRG; PAM sequence: CAG
cactttctgtctgtaggctg

SEQ ID NO: 80288 - DNA, 20 bp, Artificial Sequence
  Description of Artificial Sequence: Synthetic oligonucleotide
  Target: LAMA2; (-) strand; PAM type: NRG; PAM sequence: AGG
cagccccactttctgtctgt

SEQ ID NO: 80289 - DNA, 20 bp, Artificial Sequence
  Description of Artificial Sequence: Synthetic oligonucleotide
  Target: LAMA2; (-) strand; PAM type: NRG; PAM sequence: TAG
acagccccactttctgtctg

SEQ ID NO: 80290 - DNA, 20 bp, Artificial Sequence
  Description of Artificial Sequence: Synthetic oligonucleotide
  Target: LAMA2; (-) strand; PAM type: NRG; PAM sequence: CAG
cagccaggaccctacaccta

SEQ ID NO: 80291 - DNA, 20 bp, Artificial Sequence
  Description of Artificial Sequence: Synthetic oligonucleotide
  Target: LAMA2; (-) strand; PAM type: NRG; PAM sequence: AGG
atcacacactctgtgcagcc

SEQ ID NO: 80292 - DNA, 20 bp, Artificial Sequence
  Description of Artificial Sequence: Synthetic oligonucleotide
  Target: LAMA2; (-) strand; PAM type: NRG; PAM sequence: CAG
catcacacactctgtgcagc

SEQ ID NO: 80293 - DNA, 20 bp, Artificial Sequence
  Description of Artificial Sequence: Synthetic oligonucleotide
  Target: LAMA2; (-) strand; PAM type: NRG; PAM sequence: CAG
ggtccatcacacactctgtg

SEQ ID NO: 80294 - DNA, 20 bp, Artificial Sequence
  Description of Artificial Sequence: Synthetic oligonucleotide
  Target: LAMA2; (-) strand; PAM type: NRG; PAM sequence: CGG
aaaccctgatgccaaataaa

SEQ ID NO: 80295 - DNA, 20 bp, Artificial Sequence
  Description of Artificial Sequence: Synthetic oligonucleotide
  Target: LAMA2; (-) strand; PAM type: NRG; PAM sequence: GAG
tcaagagtgtttagaactat

SEQ ID NO: 80296 - DNA, 20 bp, Artificial Sequence
  Description of Artificial Sequence: Synthetic oligonucleotide
  Target: LAMA2; (-) strand; PAM type: NRG; PAM sequence: TAG
ttcgtgttgtcaagagtgtt

SEQ ID NO: 80297 - DNA, 20 bp, Artificial Sequence
  Description of Artificial Sequence: Synthetic oligonucleotide
  Target: LAMA2; (-) strand; PAM type: NRG; PAM sequence: GAG
tttagaattcgtgttgtcaa

SEQ ID NO: 80298 - DNA, 20 bp, Artificial Sequence
  Description of Artificial Sequence: Synthetic oligonucleotide
  Target: LAMA2; (-) strand; PAM type: NRG; PAM sequence: AAG
tatttagaattcgtgttgtc

SEQ ID NO: 80299 - DNA, 20 bp, Artificial Sequence
  Description of Artificial Sequence: Synthetic oligonucleotide
  Target: LAMA2; (-) strand; PAM type: NRG; PAM sequence: TAG
agacttattctcacactatt

SEQ ID NO: 80300 - DNA, 20 bp, Artificial Sequence
  Description of Artificial Sequence: Synthetic oligonucleotide
  Target: LAMA2; (-) strand; PAM type: NRG; PAM sequence: TAG
gaggaaaacataaagtaaca

SEQ ID NO: 80301 - DNA, 20 bp, Artificial Sequence
  Description of Artificial Sequence: Synthetic oligonucleotide
  Target: LAMA2; (-) strand; PAM type: NRG; PAM sequence: AAG
tataagcagaggaaaacata

SEQ ID NO: 80302 - DNA, 20 bp, Artificial Sequence
  Description of Artificial Sequence: Synthetic oligonucleotide
  Target: LAMA2; (-) strand; PAM type: NRG; PAM sequence: AGG
tctgctgccagtataagcag

SEQ ID NO: 80303 - DNA, 20 bp, Artificial Sequence
  Description of Artificial Sequence: Synthetic oligonucleotide
  Target: LAMA2; (-) strand; PAM type: NRG; PAM sequence: GAG
ttctgctgccagtataagca

SEQ ID NO: 80304 - DNA, 20 bp, Artificial Sequence
  Description of Artificial Sequence: Synthetic oligonucleotide
  Target: LAMA2; (-) strand; PAM type: NRG; PAM sequence: CAG
acttctgctgccagtataag

SEQ ID NO: 80305 - DNA, 20 bp, Artificial Sequence
  Description of Artificial Sequence: Synthetic oligonucleotide
  Target: LAMA2; (-) strand; PAM type: NRG; PAM sequence: AAG
aaaacttctgctgccagtat

SEQ ID NO: 80306 - DNA, 20 bp, Artificial Sequence
  Description of Artificial Sequence: Synthetic oligonucleotide
  Target: LAMA2; (-) strand; PAM type: NRG; PAM sequence: CAG
acagtcaaaacttctgctgc

SEQ ID NO: 80307 - DNA, 20 bp, Artificial Sequence
  Description of Artificial Sequence: Synthetic oligonucleotide
  Target: LAMA2; (-) strand; PAM type: NRG; PAM sequence: CAG
taatagtgtatttcaaaaaa

SEQ ID NO: 80308 - DNA, 20 bp, Artificial Sequence
  Description of Artificial Sequence: Synthetic oligonucleotide
  Target: LAMA2; (-) strand; PAM type: NRG; PAM sequence: TAG
tcttaaaagctttgttgtaa

SEQ ID NO: 80309 - DNA, 20 bp, Artificial Sequence
  Description of Artificial Sequence: Synthetic oligonucleotide
  Target: LAMA2; (-) strand; PAM type: NRG; PAM sequence: AAG
acctggctatgaattcttaa

SEQ ID NO: 80310 - DNA, 20 bp, Artificial Sequence
  Description of Artificial Sequence: Synthetic oligonucleotide
  Target: LAMA2; (-) strand; PAM type: NRG; PAM sequence: TGG
taggagcatgccactggacc

SEQ ID NO: 80311 - DNA, 20 bp, Artificial Sequence
  Description of Artificial Sequence: Synthetic oligonucleotide
  Target: LAMA2; (-) strand; PAM type: NRG; PAM sequence: TGG
ggattataggagcatgccac

SEQ ID NO: 80312 - DNA, 20 bp, Artificial Sequence
  Description of Artificial Sequence: Synthetic oligonucleotide
  Target: LAMA2; (-) strand; PAM type: NRG; PAM sequence: GAG
tccagtagctgggattatag

SEQ ID NO: 80313 - DNA, 20 bp, Artificial Sequence
  Description of Artificial Sequence: Synthetic oligonucleotide
  Target: LAMA2; (-) strand; PAM type: NRG; PAM sequence: AGG
tttccagtagctgggattat

SEQ ID NO: 80314 - DNA, 20 bp, Artificial Sequence
  Description of Artificial Sequence: Synthetic oligonucleotide
  Target: LAMA2; (-) strand; PAM type: NRG; PAM sequence: TAG
ctttccagtagctgggatta

SEQ ID NO: 80315 - DNA, 20 bp, Artificial Sequence
  Description of Artificial Sequence: Synthetic oligonucleotide
  Target: LAMA2; (-) strand; PAM type: NRG; PAM sequence: GGG
atagcttctttccagtagct

SEQ ID NO: 80316 - DNA, 20 bp, Artificial Sequence
  Description of Artificial Sequence: Synthetic oligonucleotide
  Target: LAMA2; (-) strand; PAM type: NRG; PAM sequence: TGG
catagcttctttccagtagc

SEQ ID NO: 80317 - DNA, 20 bp, Artificial Sequence
  Description of Artificial Sequence: Synthetic oligonucleotide
  Target: LAMA2; (-) strand; PAM type: NRG; PAM sequence: TAG
ccaccatagcttctttccag

SEQ ID NO: 80318 - DNA, 20 bp, Artificial Sequence
  Description of Artificial Sequence: Synthetic oligonucleotide
  Target: LAMA2; (-) strand; PAM type: NRG; PAM sequence: CAG
ctcccaccatagcttctttc

SEQ ID NO: 80319 - DNA, 20 bp, Artificial Sequence
  Description of Artificial Sequence: Synthetic oligonucleotide
  Target: LAMA2; (-) strand; PAM type: NRG; PAM sequence: TAG
ctcaagagatcctcccacca

SEQ ID NO: 80320 - DNA, 20 bp, Artificial Sequence
  Description of Artificial Sequence: Synthetic oligonucleotide
  Target: LAMA2; (-) strand; PAM type: NRG; PAM sequence: GAG
cctcaaactcctgggctcaa

SEQ ID NO: 80321 - DNA, 20 bp, Artificial Sequence
  Description of Artificial Sequence: Synthetic oligonucleotide
  Target: LAMA2; (-) strand; PAM type: NRG; PAM sequence: AAG
ggcctcaaactcctgggctc

SEQ ID NO: 80322 - DNA, 20 bp, Artificial Sequence
  Description of Artificial Sequence: Synthetic oligonucleotide
  Target: LAMA2; (-) strand; PAM type: NRG; PAM sequence: GGG
caggctggcctcaaactcct

SEQ ID NO: 80323 - DNA, 20 bp, Artificial Sequence
  Description of Artificial Sequence: Synthetic oligonucleotide
  Target: LAMA2; (-) strand; PAM type: NRG; PAM sequence: TGG
ccaggctggcctcaaactcc

SEQ ID NO: 80324 - DNA, 20 bp, Artificial Sequence
  Description of Artificial Sequence: Synthetic oligonucleotide
  Target: LAMA2; (-) strand; PAM type: NRG; PAM sequence: TGG
tctcactatgtggcccaggc

SEQ ID NO: 80325 - DNA, 20 bp, Artificial Sequence
  Description of Artificial Sequence: Synthetic oligonucleotide
  Target: LAMA2; (-) strand; PAM type: NRG; PAM sequence: AGG
agggtctcactatgtggccc

SEQ ID NO: 80326 - DNA, 20 bp, Artificial Sequence
  Description of Artificial Sequence: Synthetic oligonucleotide
  Target: LAMA2; (-) strand; PAM type: NRG; PAM sequence: CAG
cagggtctcactatgtggcc

SEQ ID NO: 80327 - DNA, 20 bp, Artificial Sequence
  Description of Artificial Sequence: Synthetic oligonucleotide
  Target: LAMA2; (-) strand; PAM type: NRG; PAM sequence: TGG
acagacagggtctcactatg

SEQ ID NO: 80328 - DNA, 20 bp, Artificial Sequence
  Description of Artificial Sequence: Synthetic oligonucleotide
  Target: LAMA2; (-) strand; PAM type: NRG; PAM sequence: GGG
aaaacggagtgatacagaca

SEQ ID NO: 80329 - DNA, 20 bp, Artificial Sequence
  Description of Artificial Sequence: Synthetic oligonucleotide
  Target: LAMA2; (-) strand; PAM type: NRG; PAM sequence: AGG
gaaaacggagtgatacagac

SEQ ID NO: 80330 - DNA, 20 bp, Artificial Sequence
  Description of Artificial Sequence: Synthetic oligonucleotide
  Target: LAMA2; (-) strand; PAM type: NRG; PAM sequence: CAG
tgaaaacggagtgatacaga

SEQ ID NO: 80331 - DNA, 20 bp, Artificial Sequence
  Description of Artificial Sequence: Synthetic oligonucleotide
  Target: LAMA2; (-) strand; PAM type: NRG; PAM sequence: CAG
agtgtgaaaacggagtgata

SEQ ID NO: 80332 - DNA, 20 bp, Artificial Sequence
  Description of Artificial Sequence: Synthetic oligonucleotide
  Target: LAMA2; (-) strand; PAM type: NRG; PAM sequence: GAG
tttacagcagtgtgaaaacg

SEQ ID NO: 80333 - DNA, 20 bp, Artificial Sequence
  Description of Artificial Sequence: Synthetic oligonucleotide
  Target: LAMA2; (-) strand; PAM type: NRG; PAM sequence: CGG
tctttacagcagtgtgaaaa

SEQ ID NO: 80334 - DNA, 20 bp, Artificial Sequence
  Description of Artificial Sequence: Synthetic oligonucleotide
  Target: LAMA2; (-) strand; PAM type: NRG; PAM sequence: CAG
ctcgggtagtatctttacag

SEQ ID NO: 80335 - DNA, 20 bp, Artificial Sequence
  Description of Artificial Sequence: Synthetic oligonucleotide
  Target: LAMA2; (-) strand; PAM type: NRG; PAM sequence: CAG
agtctcgggtagtatcttta

SEQ ID NO: 80336 - DNA, 20 bp, Artificial Sequence
  Description of Artificial Sequence: Synthetic oligonucleotide
  Target: LAMA2; (-) strand; PAM type: NRG; PAM sequence: TAG
ataaattacccagtctcggg

SEQ ID NO: 80337 - DNA, 20 bp, Artificial Sequence
  Description of Artificial Sequence: Synthetic oligonucleotide
  Target: LAMA2; (-) strand; PAM type: NRG; PAM sequence: GGG
tttataaattacccagtctc

SEQ ID NO: 80338 - DNA, 20 bp, Artificial Sequence
  Description of Artificial Sequence: Synthetic oligonucleotide
  Target: LAMA2; (-) strand; PAM type: NRG; PAM sequence: CGG
ctttataaattacccagtct

SEQ ID NO: 80339 - DNA, 20 bp, Artificial Sequence
  Description of Artificial Sequence: Synthetic oligonucleotide
  Target: LAMA2; (-) strand; PAM type: NRG; PAM sequence: CAG
tctttcctttataaattacc

SEQ ID NO: 80340 - DNA, 20 bp, Artificial Sequence
  Description of Artificial Sequence: Synthetic oligonucleotide
  Target: LAMA2; (-) strand; PAM type: NRG; PAM sequence: GAG
tcctagccatgcagaagggt

SEQ ID NO: 80341 - DNA, 20 bp, Artificial Sequence
  Description of Artificial Sequence: Synthetic oligonucleotide
  Target: LAMA2; (-) strand; PAM type: NRG; PAM sequence: GGG
ggcctcctagccatgcagaa

SEQ ID NO: 80342 - DNA, 20 bp, Artificial Sequence
  Description of Artificial Sequence: Synthetic oligonucleotide
  Target: LAMA2; (-) strand; PAM type: NRG; PAM sequence: AGG
aggcctcctagccatgcaga

SEQ ID NO: 80343 - DNA, 20 bp, Artificial Sequence
  Description of Artificial Sequence: Synthetic oligonucleotide
  Target: LAMA2; (-) strand; PAM type: NRG; PAM sequence: AAG
gaggcctcctagccatgcag

SEQ ID NO: 80344 - DNA, 20 bp, Artificial Sequence
  Description of Artificial Sequence: Synthetic oligonucleotide
  Target: LAMA2; (-) strand; PAM type: NRG; PAM sequence: CAG
cctgaggcctcctagccatg

SEQ ID NO: 80345 - DNA, 20 bp, Artificial Sequence
  Description of Artificial Sequence: Synthetic oligonucleotide
  Target: LAMA2; (-) strand; PAM type: NRG; PAM sequence: TAG
ataagtttcctgaggcctcc

SEQ ID NO: 80346 - DNA, 20 bp, Artificial Sequence
  Description of Artificial Sequence: Synthetic oligonucleotide
  Target: LAMA2; (-) strand; PAM type: NRG; PAM sequence: AGG
ctttgatcataagtttcctg

SEQ ID NO: 80347 - DNA, 20 bp, Artificial Sequence
  Description of Artificial Sequence: Synthetic oligonucleotide
  Target: LAMA2; (-) strand; PAM type: NRG; PAM sequence: GAG
cctttgatcataagtttcct

SEQ ID NO: 80348 - DNA, 20 bp, Artificial Sequence
  Description of Artificial Sequence: Synthetic oligonucleotide
  Target: LAMA2; (-) strand; PAM type: NRG; PAM sequence: AAG
ccctcttcccctttgatcat

SEQ ID NO: 80349 - DNA, 20 bp, Artificial Sequence
  Description of Artificial Sequence: Synthetic oligonucleotide
  Target: LAMA2; (-) strand; PAM type: NRG; PAM sequence: AAG
ctctctctcctgtaccatgt

SEQ ID NO: 80350 - DNA, 20 bp, Artificial Sequence
  Description of Artificial Sequence: Synthetic oligonucleotide
  Target: LAMA2; (-) strand; PAM type: NRG; PAM sequence: GGG
agatctgatggttttataag

SEQ ID NO: 80351 - DNA, 20 bp, Artificial Sequence
  Description of Artificial Sequence: Synthetic oligonucleotide
  Target: LAMA2; (-) strand; PAM type: NRG; PAM sequence: GGG
aagatctgatggttttataa

SEQ ID NO: 80352 - DNA, 20 bp, Artificial Sequence
  Description of Artificial Sequence: Synthetic oligonucleotide
  Target: LAMA2; (-) strand; PAM type: NRG; PAM sequence: AGG
caagatctgatggttttata

SEQ ID NO: 80353 - DNA, 20 bp, Artificial Sequence
  Description of Artificial Sequence: Synthetic oligonucleotide
  Target: LAMA2; (-) strand; PAM type: NRG; PAM sequence: AAG
acaagatctgatggttttat

SEQ ID NO: 80354 - DNA, 20 bp, Artificial Sequence
  Description of Artificial Sequence: Synthetic oligonucleotide
  Target: LAMA2; (-) strand; PAM type: NRG; PAM sequence: TGG
tgagttcgtacaagatctga

SEQ ID NO: 80355 - DNA, 20 bp, Artificial Sequence
  Description of Artificial Sequence: Synthetic oligonucleotide
  Target: LAMA2; (-) strand; PAM type: NRG; PAM sequence: AAG
gatagtgagtgagttcgtac

SEQ ID NO: 80356 - DNA, 20 bp, Artificial Sequence
  Description of Artificial Sequence: Synthetic oligonucleotide
  Target: LAMA2; (-) strand; PAM type: NRG; PAM sequence: GAG
ctgtcctcatgatagtgagt

SEQ ID NO: 80357 - DNA, 20 bp, Artificial Sequence
  Description of Artificial Sequence: Synthetic oligonucleotide
  Target: LAMA2; (-) strand; PAM type: NRG; PAM sequence: GAG
catgctgtcctcatgatagt

SEQ ID NO: 80358 - DNA, 20 bp, Artificial Sequence
  Description of Artificial Sequence: Synthetic oligonucleotide
  Target: LAMA2; (-) strand; PAM type: NRG; PAM sequence: TAG
cccccatgctgtcctcatga

SEQ ID NO: 80359 - DNA, 20 bp, Artificial Sequence
  Description of Artificial Sequence: Synthetic oligonucleotide
  Target: LAMA2; (-) strand; PAM type: NRG; PAM sequence: CAG
aggagactggatcaaggggg

SEQ ID NO: 80360 - DNA, 20 bp, Artificial Sequence
  Description of Artificial Sequence: Synthetic oligonucleotide
  Target: LAMA2; (-) strand; PAM type: NRG; PAM sequence: GGG
gggaggagactggatcaagg

SEQ ID NO: 80361 - DNA, 20 bp, Artificial Sequence
  Description of Artificial Sequence: Synthetic oligonucleotide
  Target: LAMA2; (-) strand; PAM type: NRG; PAM sequence: GGG
agggaggagactggatcaag

SEQ ID NO: 80362 - DNA, 20 bp, Artificial Sequence
  Description of Artificial Sequence: Synthetic oligonucleotide
  Target: LAMA2; (-) strand; PAM type: NRG; PAM sequence: GGG
gagggaggagactggatcaa

SEQ ID NO: 80363 - DNA, 20 bp, Artificial Sequence
  Description of Artificial Sequence: Synthetic oligonucleotide
  Target: LAMA2; (-) strand; PAM type: NRG; PAM sequence: AGG
ggagggaggagactggatca

SEQ ID NO: 80364 - DNA, 20 bp, Artificial Sequence
  Description of Artificial Sequence: Synthetic oligonucleotide
  Target: LAMA2; (-) strand; PAM type: NRG; PAM sequence: AAG
gggagggaggagactggatc

SEQ ID NO: 80365 - DNA, 20 bp, Artificial Sequence
  Description of Artificial Sequence: Synthetic oligonucleotide
  Target: LAMA2; (-) strand; PAM type: NRG; PAM sequence: TGG
tatggagggagggaggagac

SEQ ID NO: 80366 - DNA, 20 bp, Artificial Sequence
  Description of Artificial Sequence: Synthetic oligonucleotide
  Target: LAMA2; (-) strand; PAM type: NRG; PAM sequence: GAG
ccacgtatggagggagggag

SEQ ID NO: 80367 - DNA, 20 bp, Artificial Sequence
  Description of Artificial Sequence: Synthetic oligonucleotide
  Target: LAMA2; (-) strand; PAM type: NRG; PAM sequence: AGG
ctccacgtatggagggaggg

SEQ ID NO: 80368 - DNA, 20 bp, Artificial Sequence
  Description of Artificial Sequence: Synthetic oligonucleotide
  Target: LAMA2; (-) strand; PAM type: NRG; PAM sequence: GAG
tctccacgtatggagggagg

SEQ ID NO: 80369 - DNA, 20 bp, Artificial Sequence
  Description of Artificial Sequence: Synthetic oligonucleotide
  Target: LAMA2; (-) strand; PAM type: NRG; PAM sequence: GGG
aatctccacgtatggaggga

SEQ ID NO: 80370 - DNA, 20 bp, Artificial Sequence
  Description of Artificial Sequence: Synthetic oligonucleotide
  Target: LAMA2; (-) strand; PAM type: NRG; PAM sequence: AGG
taatctccacgtatggaggg

SEQ ID NO: 80371 - DNA, 20 bp, Artificial Sequence
  Description of Artificial Sequence: Synthetic oligonucleotide
  Target: LAMA2; (-) strand; PAM type: NRG; PAM sequence: GAG
gtaatctccacgtatggagg

SEQ ID NO: 80372 - DNA, 20 bp, Artificial Sequence
  Description of Artificial Sequence: Synthetic oligonucleotide
  Target: LAMA2; (-) strand; PAM type: NRG; PAM sequence: GGG
ttgtaatctccacgtatgga

SEQ ID NO: 80373 - DNA, 20 bp, Artificial Sequence
  Description of Artificial Sequence: Synthetic oligonucleotide
  Target: LAMA2; (-) strand; PAM type: NRG; PAM sequence: AGG
attgtaatctccacgtatgg

SEQ ID NO: 80374 - DNA, 20 bp, Artificial Sequence
  Description of Artificial Sequence: Synthetic oligonucleotide
  Target: LAMA2; (-) strand; PAM type: NRG; PAM sequence: GAG
aattgtaatctccacgtatg

SEQ ID NO: 80375 - DNA, 20 bp, Artificial Sequence
  Description of Artificial Sequence: Synthetic oligonucleotide
  Target: LAMA2; (-) strand; PAM type: NRG; PAM sequence: TGG
gaaattgtaatctccacgta

SEQ ID NO: 80376 - DNA, 20 bp, Artificial Sequence
  Description of Artificial Sequence: Synthetic oligonucleotide
  Target: LAMA2; (-) strand; PAM type: NRG; PAM sequence: TGG
agaaagacagtgatatggtt

SEQ ID NO: 80377 - DNA, 20 bp, Artificial Sequence
  Description of Artificial Sequence: Synthetic oligonucleotide
  Target: LAMA2; (-) strand; PAM type: NRG; PAM sequence: TGG
tcttcagaaagacagtgata

SEQ ID NO: 80378 - DNA, 20 bp, Artificial Sequence
  Description of Artificial Sequence: Synthetic oligonucleotide
  Target: LAMA2; (-) strand; PAM type: NRG; PAM sequence: CAG
cttttttttcttcagaaaga

SEQ ID NO: 80379 - DNA, 20 bp, Artificial Sequence
  Description of Artificial Sequence: Synthetic oligonucleotide
  Target: LAMA2; (-) strand; PAM type: NRG; PAM sequence: AAG
attccttttttttcttcaga

SEQ ID NO: 80380 - DNA, 20 bp, Artificial Sequence
  Description of Artificial Sequence: Synthetic oligonucleotide
  Target: LAMA2; (-) strand; PAM type: NRG; PAM sequence: CAG
aagaattccttttttttctt

SEQ ID NO: 80381 - DNA, 20 bp, Artificial Sequence
  Description of Artificial Sequence: Synthetic oligonucleotide
  Target: LAMA2; (-) strand; PAM type: NRG; PAM sequence: AAG
atatctttagggcaacatac

SEQ ID NO: 80382 - DNA, 20 bp, Artificial Sequence
  Description of Artificial Sequence: Synthetic oligonucleotide
  Target: LAMA2; (-) strand; PAM type: NRG; PAM sequence: GGG
taagcagttttatatcttta

SEQ ID NO: 80383 - DNA, 20 bp, Artificial Sequence
  Description of Artificial Sequence: Synthetic oligonucleotide
  Target: LAMA2; (-) strand; PAM type: NRG; PAM sequence: AGG
gtaagcagttttatatcttt

SEQ ID NO: 80384 - DNA, 20 bp, Artificial Sequence
  Description of Artificial Sequence: Synthetic oligonucleotide
  Target: LAMA2; (-) strand; PAM type: NRG; PAM sequence: TAG
tgtaagcagttttatatctt

SEQ ID NO: 80385 - DNA, 20 bp, Artificial Sequence
  Description of Artificial Sequence: Synthetic oligonucleotide
  Target: LAMA2; (-) strand; PAM type: NRG; PAM sequence: CAG
aaatcactaggcattgtaag

SEQ ID NO: 80386 - DNA, 20 bp, Artificial Sequence
  Description of Artificial Sequence: Synthetic oligonucleotide
  Target: LAMA2; (-) strand; PAM type: NRG; PAM sequence: AAG
tacaaatcactaggcattgt

SEQ ID NO: 80387 - DNA, 20 bp, Artificial Sequence
  Description of Artificial Sequence: Synthetic oligonucleotide
  Target: LAMA2; (-) strand; PAM type: NRG; PAM sequence: AGG
agtaatcaatacaaatcact

SEQ ID NO: 80388 - DNA, 20 bp, Artificial Sequence
  Description of Artificial Sequence: Synthetic oligonucleotide
  Target: LAMA2; (-) strand; PAM type: NRG; PAM sequence: TAG
tagtaatcaatacaaatcac

SEQ ID NO: 80389 - DNA, 20 bp, Artificial Sequence
  Description of Artificial Sequence: Synthetic oligonucleotide
  Target: LAMA2; (-) strand; PAM type: NRG; PAM sequence: TAG
ttcaaactttagggaacaca

SEQ ID NO: 80390 - DNA, 20 bp, Artificial Sequence
  Description of Artificial Sequence: Synthetic oligonucleotide
  Target: LAMA2; (-) strand; PAM type: NRG; PAM sequence: GGG
atggagagtttcaaacttta

SEQ ID NO: 80391 - DNA, 20 bp, Artificial Sequence
  Description of Artificial Sequence: Synthetic oligonucleotide
  Target: LAMA2; (-) strand; PAM type: NRG; PAM sequence: AGG
aatggagagtttcaaacttt

SEQ ID NO: 80392 - DNA, 20 bp, Artificial Sequence
  Description of Artificial Sequence: Synthetic oligonucleotide
  Target: LAMA2; (-) strand; PAM type: NRG; PAM sequence: TAG
taatggagagtttcaaactt

SEQ ID NO: 80393 - DNA, 20 bp, Artificial Sequence
  Description of Artificial Sequence: Synthetic oligonucleotide
  Target: LAMA2; (-) strand; PAM type: NRG; PAM sequence: GAG
agttttgctatgttaatgga

SEQ ID NO: 80394 - DNA, 20 bp, Artificial Sequence
  Description of Artificial Sequence: Synthetic oligonucleotide
  Target: LAMA2; (-) strand; PAM type: NRG; PAM sequence: GAG
gtagttttgctatgttaatg

SEQ ID NO: 80395 - DNA, 20 bp, Artificial Sequence
  Description of Artificial Sequence: Synthetic oligonucleotide
  Target: LAMA2; (-) strand; PAM type: NRG; PAM sequence: TGG
tagtagttttgctatgttaa

SEQ ID NO: 80396 - DNA, 20 bp, Artificial Sequence
  Description of Artificial Sequence: Synthetic oligonucleotide
  Target: LAMA2; (-) strand; PAM type: NRG; PAM sequence: TAG
acatttgatttagaatatag

SEQ ID NO: 80397 - DNA, 20 bp, Artificial Sequence
  Description of Artificial Sequence: Synthetic oligonucleotide
  Target: LAMA2; (-) strand; PAM type: NRG; PAM sequence: TAG
ctgacatttgatttagaata

SEQ ID NO: 80398 - DNA, 20 bp, Artificial Sequence
  Description of Artificial Sequence: Synthetic oligonucleotide
  Target: LAMA2; (-) strand; PAM type: NRG; PAM sequence: TAG
caacctgctgacatttgatt

SEQ ID NO: 80399 - DNA, 20 bp, Artificial Sequence
  Description of Artificial Sequence: Synthetic oligonucleotide
  Target: LAMA2; (-) strand; PAM type: NRG; PAM sequence: AGG
taagatctcttaatatagaa

SEQ ID NO: 80400 - DNA, 20 bp, Artificial Sequence
  Description of Artificial Sequence: Synthetic oligonucleotide
  Target: LAMA2; (-) strand; PAM type: NRG; PAM sequence: AAG
gtaagatctcttaatataga

SEQ ID NO: 80401 - DNA, 20 bp, Artificial Sequence
  Description of Artificial Sequence: Synthetic oligonucleotide
  Target: LAMA2; (-) strand; PAM type: NRG; PAM sequence: TAG
atatgtaagatctcttaata

SEQ ID NO: 80402 - DNA, 20 bp, Artificial Sequence
  Description of Artificial Sequence: Synthetic oligonucleotide
  Target: LAMA2; (-) strand; PAM type: NRG; PAM sequence: AAG
cttttttcttattgatatgt

SEQ ID NO: 80403 - DNA, 20 bp, Artificial Sequence
  Description of Artificial Sequence: Synthetic oligonucleotide
  Target: LAMA2; (-) strand; PAM type: NRG; PAM sequence: AGG
cctgttttgatctttctaac

SEQ ID NO: 80404 - DNA, 20 bp, Artificial Sequence
  Description of Artificial Sequence: Synthetic oligonucleotide
  Target: LAMA2; (-) strand; PAM type: NRG; PAM sequence: CAG
acctgttttgatctttctaa

SEQ ID NO: 80405 - DNA, 20 bp, Artificial Sequence
  Description of Artificial Sequence: Synthetic oligonucleotide
  Target: LAMA2; (-) strand; PAM type: NRG; PAM sequence: AGG
aaagttatatgtcatttctg

SEQ ID NO: 80406 - DNA, 20 bp, Artificial Sequence
  Description of Artificial Sequence: Synthetic oligonucleotide
  Target: LAMA2; (-) strand; PAM type: NRG; PAM sequence: GAG
caaagttatatgtcatttct

SEQ ID NO: 80407 - DNA, 20 bp, Artificial Sequence
  Description of Artificial Sequence: Synthetic oligonucleotide
  Target: LAMA2; (-) strand; PAM type: NRG; PAM sequence: AAG
agtgtcattatctttttaca

SEQ ID NO: 80408 - DNA, 20 bp, Artificial Sequence
  Description of Artificial Sequence: Synthetic oligonucleotide
  Target: LAMA2; (-) strand; PAM type: NRG; PAM sequence: GAG
attgatacttccttcattat

SEQ ID NO: 80409 - DNA, 20 bp, Artificial Sequence
  Description of Artificial Sequence: Synthetic oligonucleotide
  Target: LAMA2; (-) strand; PAM type: NRG; PAM sequence: AGG
agaagaataaacactttgat

SEQ ID NO: 80410 - DNA, 20 bp, Artificial Sequence
  Description of Artificial Sequence: Synthetic oligonucleotide
  Target: LAMA2; (-) strand; PAM type: NRG; PAM sequence: TAG
tagaagaataaacactttga

SEQ ID NO: 80411 - DNA, 20 bp, Artificial Sequence
  Description of Artificial Sequence: Synthetic oligonucleotide
  Target: LAMA2; (-) strand; PAM type: NRG; PAM sequence: AAG
ttcaaatatttgttgagtag

SEQ ID NO: 80412 - DNA, 20 bp, Artificial Sequence
  Description of Artificial Sequence: Synthetic oligonucleotide
  Target: LAMA2; (-) strand; PAM type: NRG; PAM sequence: TAG
gcattcaaatatttgttgag

SEQ ID NO: 80413 - DNA, 20 bp, Artificial Sequence
  Description of Artificial Sequence: Synthetic oligonucleotide
  Target: LAMA2; (-) strand; PAM type: NRG; PAM sequence: GAG
taagcattcaaatatttgtt

SEQ ID NO: 80414 - DNA, 20 bp, Artificial Sequence
  Description of Artificial Sequence: Synthetic oligonucleotide
  Target: LAMA2; (-) strand; PAM type: NRG; PAM sequence: AAG
atacaattcctggacataat

SEQ ID NO: 80415 - DNA, 20 bp, Artificial Sequence
  Description of Artificial Sequence: Synthetic oligonucleotide
  Target: LAMA2; (-) strand; PAM type: NRG; PAM sequence: TGG
caacccttgaatacaattcc

SEQ ID NO: 80416 - DNA, 20 bp, Artificial Sequence
  Description of Artificial Sequence: Synthetic oligonucleotide
  Target: LAMA2; (-) strand; PAM type: NRG; PAM sequence: TAG
atgataaaacactttctcca

SEQ ID NO: 80417 - DNA, 20 bp, Artificial Sequence
  Description of Artificial Sequence: Synthetic oligonucleotide
  Target: LAMA2; (-) strand; PAM type: NRG; PAM sequence: TAG
acaaatgacttttcctctag

SEQ ID NO: 80418 - DNA, 20 bp, Artificial Sequence
  Description of Artificial Sequence: Synthetic oligonucleotide
  Target: LAMA2; (-) strand; PAM type: NRG; PAM sequence: TAG
atgacaaatgacttttcctc

SEQ ID NO: 80419 - DNA, 20 bp, Artificial Sequence
  Description of Artificial Sequence: Synthetic oligonucleotide
  Target: LAMA2; (-) strand; PAM type: NRG; PAM sequence: AGG
cgcttaaaaaattcccctcc

SEQ ID NO: 80420 - DNA, 20 bp, Artificial Sequence
  Description of Artificial Sequence: Synthetic oligonucleotide
  Target: LAMA2; (-) strand; PAM type: NRG; PAM sequence: CAG
tcgcttaaaaaattcccctc

SEQ ID NO: 80421 - DNA, 20 bp, Artificial Sequence
  Description of Artificial Sequence: Synthetic oligonucleotide
  Target: LAMA2; (-) strand; PAM type: NRG; PAM sequence: AGG
gaagcataatttctagtcaa

SEQ ID NO: 80422 - DNA, 20 bp, Artificial Sequence
  Description of Artificial Sequence: Synthetic oligonucleotide
  Target: LAMA2; (-) strand; PAM type: NRG; PAM sequence: AAG
ggaagcataatttctagtca

SEQ ID NO: 80423 - DNA, 20 bp, Artificial Sequence
  Description of Artificial Sequence: Synthetic oligonucleotide
  Target: LAMA2; (-) strand; PAM type: NRG; PAM sequence: TAG
attcctggaagcataatttc

SEQ ID NO: 80424 - DNA, 20 bp, Artificial Sequence
  Description of Artificial Sequence: Synthetic oligonucleotide
  Target: LAMA2; (-) strand; PAM type: NRG; PAM sequence: AAG
tctatagggtaaattcctgg

SEQ ID NO: 80425 - DNA, 20 bp, Artificial Sequence
  Description of Artificial Sequence: Synthetic oligonucleotide
  Target: LAMA2; (-) strand; PAM type: NRG; PAM sequence: TGG
atatctatagggtaaattcc

SEQ ID NO: 80426 - DNA, 20 bp, Artificial Sequence
  Description of Artificial Sequence: Synthetic oligonucleotide
  Target: LAMA2; (-) strand; PAM type: NRG; PAM sequence: GGG
tctatatgaatatatctata

SEQ ID NO: 80427 - DNA, 20 bp, Artificial Sequence
  Description of Artificial Sequence: Synthetic oligonucleotide
  Target: LAMA2; (-) strand; PAM type: NRG; PAM sequence: AGG
atctatatgaatatatctat

SEQ ID NO: 80428 - DNA, 20 bp, Artificial Sequence
  Description of Artificial Sequence: Synthetic oligonucleotide
  Target: LAMA2; (-) strand; PAM type: NRG; PAM sequence: TAG
catctatatgaatatatcta

SEQ ID NO: 80429 - DNA, 20 bp, Artificial Sequence
  Description of Artificial Sequence: Synthetic oligonucleotide
  Target: LAMA2; (-) strand; PAM type: NRG; PAM sequence: AGG
gcacttgtataataatgacg

SEQ ID NO: 80430 - DNA, 20 bp, Artificial Sequence
  Description of Artificial Sequence: Synthetic oligonucleotide
  Target: LAMA2; (-) strand; PAM type: NRG; PAM sequence: GAG
agcacttgtataataatgac

SEQ ID NO: 80431 - DNA, 20 bp, Artificial Sequence
  Description of Artificial Sequence: Synthetic oligonucleotide
  Target: LAMA2; (-) strand; PAM type: NRG; PAM sequence: TAG
aatgttagtagcagtagtgg

SEQ ID NO: 80432 - DNA, 20 bp, Artificial Sequence
  Description of Artificial Sequence: Synthetic oligonucleotide
  Target: LAMA2; (-) strand; PAM type: NRG; PAM sequence: TGG
ataaatgttagtagcagtag

SEQ ID NO: 80433 - DNA, 20 bp, Artificial Sequence
  Description of Artificial Sequence: Synthetic oligonucleotide
  Target: LAMA2; (-) strand; PAM type: NRG; PAM sequence: TAG
tcaataaatgttagtagcag

SEQ ID NO: 80434 - DNA, 20 bp, Artificial Sequence
  Description of Artificial Sequence: Synthetic oligonucleotide
  Target: LAMA2; (-) strand; PAM type: NRG; PAM sequence: CAG
agctcaataaatgttagtag

SEQ ID NO: 80435 - DNA, 20 bp, Artificial Sequence
  Description of Artificial Sequence: Synthetic oligonucleotide
  Target: LAMA2; (-) strand; PAM type: NRG; PAM sequence: TAG
ctgagctcaataaatgttag

SEQ ID NO: 80436 - DNA, 20 bp, Artificial Sequence
  Description of Artificial Sequence: Synthetic oligonucleotide
  Target: LAMA2; (-) strand; PAM type: NRG; PAM sequence: TAG
atactgagctcaataaatgt

SEQ ID NO: 80437 - DNA, 20 bp, Artificial Sequence
  Description of Artificial Sequence: Synthetic oligonucleotide
  Target: LAMA2; (-) strand; PAM type: NRG; PAM sequence: GAG
cctgaaacatactaaatact

SEQ ID NO: 80438 - DNA, 20 bp, Artificial Sequence
  Description of Artificial Sequence: Synthetic oligonucleotide
  Target: LAMA2; (-) strand; PAM type: NRG; PAM sequence: CAG
catgttttgagaatgcttag

SEQ ID NO: 80439 - DNA, 20 bp, Artificial Sequence
  Description of Artificial Sequence: Synthetic oligonucleotide
  Target: LAMA2; (-) strand; PAM type: NRG; PAM sequence: TAG
atacatgttttgagaatgct

SEQ ID NO: 80440 - DNA, 20 bp, Artificial Sequence
  Description of Artificial Sequence: Synthetic oligonucleotide
  Target: LAMA2; (-) strand; PAM type: NRG; PAM sequence: GAG
acttgtctcatacatgtttt

SEQ ID NO: 80441 - DNA, 20 bp, Artificial Sequence
  Description of Artificial Sequence: Synthetic oligonucleotide
  Target: LAMA2; (-) strand; PAM type: NRG; PAM sequence: TAG
ctcgagtcctagcatcactt

SEQ ID NO: 80442 - DNA, 20 bp, Artificial Sequence
  Description of Artificial Sequence: Synthetic oligonucleotide
  Target: LAMA2; (-) strand; PAM type: NRG; PAM sequence: TAG
tgaggcaaaaactcgagtcc

SEQ ID NO: 80443 - DNA, 20 bp, Artificial Sequence
  Description of Artificial Sequence: Synthetic oligonucleotide
  Target: LAMA2; (-) strand; PAM type: NRG; PAM sequence: GAG
tgactttgaggcaaaaactc

SEQ ID NO: 80444 - DNA, 20 bp, Artificial Sequence
  Description of Artificial Sequence: Synthetic oligonucleotide
  Target: LAMA2; (-) strand; PAM type: NRG; PAM sequence: AGG
ttgccagttgagtgactttg

SEQ ID NO: 80445 - DNA, 20 bp, Artificial Sequence
  Description of Artificial Sequence: Synthetic oligonucleotide
  Target: LAMA2; (-) strand; PAM type: NRG; PAM sequence: GAG
tttgccagttgagtgacttt

SEQ ID NO: 80446 - DNA, 20 bp, Artificial Sequence
  Description of Artificial Sequence: Synthetic oligonucleotide
  Target: LAMA2; (-) strand; PAM type: NRG; PAM sequence: GAG
aagtttcctatttgccagtt

SEQ ID NO: 80447 - DNA, 20 bp, Artificial Sequence
  Description of Artificial Sequence: Synthetic oligonucleotide
  Target: LAMA2; (-) strand; PAM type: NRG; PAM sequence: CAG
tagaaaagtttcctatttgc

SEQ ID NO: 80448 - DNA, 20 bp, Artificial Sequence
  Description of Artificial Sequence: Synthetic oligonucleotide
  Target: LAMA2; (-) strand; PAM type: NRG; PAM sequence: AAG
gaggcgctctaatgttagaa

SEQ ID NO: 80449 - DNA, 20 bp, Artificial Sequence
  Description of Artificial Sequence: Synthetic oligonucleotide
  Target: LAMA2; (-) strand; PAM type: NRG; PAM sequence: TAG
ggagggaggcgctctaatgt

SEQ ID NO: 80450 - DNA, 20 bp, Artificial Sequence
  Description of Artificial Sequence: Synthetic oligonucleotide
  Target: LAMA2; (-) strand; PAM type: NRG; PAM sequence: AGG
caaggatgccgggtggaggg

SEQ ID NO: 80451 - DNA, 20 bp, Artificial Sequence
  Description of Artificial Sequence: Synthetic oligonucleotide
  Target: LAMA2; (-) strand; PAM type: NRG; PAM sequence: GAG
acaaggatgccgggtggagg

SEQ ID NO: 80452 - DNA, 20 bp, Artificial Sequence
  Description of Artificial Sequence: Synthetic oligonucleotide
  Target: LAMA2; (-) strand; PAM type: NRG; PAM sequence: GGG
ggacaaggatgccgggtgga

SEQ ID NO: 80453 - DNA, 20 bp, Artificial Sequence
  Description of Artificial Sequence: Synthetic oligonucleotide
  Target: LAMA2; (-) strand; PAM type: NRG; PAM sequence: AGG
aggacaaggatgccgggtgg

SEQ ID NO: 80454 - DNA, 20 bp, Artificial Sequence
  Description of Artificial Sequence: Synthetic oligonucleotide
  Target: LAMA2; (-) strand; PAM type: NRG; PAM sequence: GAG
gaggacaaggatgccgggtg

SEQ ID NO: 80455 - DNA, 20 bp, Artificial Sequence
  Description of Artificial Sequence: Synthetic oligonucleotide
  Target: LAMA2; (-) strand; PAM type: NRG; PAM sequence: TGG
gggaggacaaggatgccggg

SEQ ID NO: 80456 - DNA, 20 bp, Artificial Sequence
  Description of Artificial Sequence: Synthetic oligonucleotide
  Target: LAMA2; (-) strand; PAM type: NRG; PAM sequence: GGG
actgggaggacaaggatgcc

SEQ ID NO: 80457 - DNA, 20 bp, Artificial Sequence
  Description of Artificial Sequence: Synthetic oligonucleotide
  Target: LAMA2; (-) strand; PAM type: NRG; PAM sequence: CGG
tactgggaggacaaggatgc

SEQ ID NO: 80458 - DNA, 20 bp, Artificial Sequence
  Description of Artificial Sequence: Synthetic oligonucleotide
  Target: LAMA2; (-) strand; PAM type: NRG; PAM sequence: AGG
acacacatactgggaggaca

SEQ ID NO: 80459 - DNA, 20 bp, Artificial Sequence
  Description of Artificial Sequence: Synthetic oligonucleotide
  Target: LAMA2; (-) strand; PAM type: NRG; PAM sequence: AAG
cacacacatactgggaggac

SEQ ID NO: 80460 - DNA, 20 bp, Artificial Sequence
  Description of Artificial Sequence: Synthetic oligonucleotide
  Target: LAMA2; (-) strand; PAM type: NRG; PAM sequence: AGG
aacaccacacacatactggg

SEQ ID NO: 80461 - DNA, 20 bp, Artificial Sequence
  Description of Artificial Sequence: Synthetic oligonucleotide
  Target: LAMA2; (-) strand; PAM type: NRG; PAM sequence: GAG
taacaccacacacatactgg

SEQ ID NO: 80462 - DNA, 20 bp, Artificial Sequence
  Description of Artificial Sequence: Synthetic oligonucleotide
  Target: LAMA2; (-) strand; PAM type: NRG; PAM sequence: GGG
aataacaccacacacatact

SEQ ID NO: 80463 - DNA, 20 bp, Artificial Sequence
  Description of Artificial Sequence: Synthetic oligonucleotide
  Target: LAMA2; (-) strand; PAM type: NRG; PAM sequence: TGG
aaataacaccacacacatac

SEQ ID NO: 80464 - DNA, 20 bp, Artificial Sequence
  Description of Artificial Sequence: Synthetic oligonucleotide
  Target: LAMA2; (-) strand; PAM type: NRG; PAM sequence: CAG
cctattaatgaacagttaca

SEQ ID NO: 80465 - DNA, 20 bp, Artificial Sequence
  Description of Artificial Sequence: Synthetic oligonucleotide
  Target: LAMA2; (-) strand; PAM type: NRG; PAM sequence: CAG
atcaggtccctattaatgaa

SEQ ID NO: 80466 - DNA, 20 bp, Artificial Sequence
  Description of Artificial Sequence: Synthetic oligonucleotide
  Target: LAMA2; (-) strand; PAM type: NRG; PAM sequence: AGG
cttgaatgaaggtatttatc

SEQ ID NO: 80467 - DNA, 20 bp, Artificial Sequence
  Description of Artificial Sequence: Synthetic oligonucleotide
  Target: LAMA2; (-) strand; PAM type: NRG; PAM sequence: CAG
acttgaatgaaggtatttat

SEQ ID NO: 80468 - DNA, 20 bp, Artificial Sequence
  Description of Artificial Sequence: Synthetic oligonucleotide
  Target: LAMA2; (-) strand; PAM type: NRG; PAM sequence: AGG
acagggtactacttgaatga

SEQ ID NO: 80469 - DNA, 20 bp, Artificial Sequence
  Description of Artificial Sequence: Synthetic oligonucleotide
  Target: LAMA2; (-) strand; PAM type: NRG; PAM sequence: AAG
cacagggtactacttgaatg

SEQ ID NO: 80470 - DNA, 20 bp, Artificial Sequence
  Description of Artificial Sequence: Synthetic oligonucleotide
  Target: LAMA2; (-) strand; PAM type: NRG; PAM sequence: GGG
gtatcccctaagggtacaca

SEQ ID NO: 80471 - DNA, 20 bp, Artificial Sequence
  Description of Artificial Sequence: Synthetic oligonucleotide
  Target: LAMA2; (-) strand; PAM type: NRG; PAM sequence: AGG
tgtatcccctaagggtacac

SEQ ID NO: 80472 - DNA, 20 bp, Artificial Sequence
  Description of Artificial Sequence: Synthetic oligonucleotide
  Target: LAMA2; (-) strand; PAM type: NRG; PAM sequence: CAG
gtgtatcccctaagggtaca

SEQ ID NO: 80473 - DNA, 20 bp, Artificial Sequence
  Description of Artificial Sequence: Synthetic oligonucleotide
  Target: LAMA2; (-) strand; PAM type: NRG; PAM sequence: GGG
ttagcatgtgtatcccctaa

SEQ ID NO: 80474 - DNA, 20 bp, Artificial Sequence
  Description of Artificial Sequence: Synthetic oligonucleotide
  Target: LAMA2; (-) strand; PAM type: NRG; PAM sequence: AGG
attagcatgtgtatccccta

SEQ ID NO: 80475 - DNA, 20 bp, Artificial Sequence
  Description of Artificial Sequence: Synthetic oligonucleotide
  Target: LAMA2; (-) strand; PAM type: NRG; PAM sequence: AAG
tattagcatgtgtatcccct

SEQ ID NO: 80476 - DNA, 20 bp, Artificial Sequence
  Description of Artificial Sequence: Synthetic oligonucleotide
  Target: LAMA2; (-) strand; PAM type: NRG; PAM sequence: TAG
tcatggagccctttccatat

SEQ ID NO: 80477 - DNA, 20 bp, Artificial Sequence
  Description of Artificial Sequence: Synthetic oligonucleotide
  Target: LAMA2; (-) strand; PAM type: NRG; PAM sequence: GAG
tttactaacagtaaatcatg

SEQ ID NO: 80478 - DNA, 20 bp, Artificial Sequence
  Description of Artificial Sequence: Synthetic oligonucleotide
  Target: LAMA2; (-) strand; PAM type: NRG; PAM sequence: TGG
tttttactaacagtaaatca

SEQ ID NO: 80479 - DNA, 20 bp, Artificial Sequence
  Description of Artificial Sequence: Synthetic oligonucleotide
  Target: LAMA2; (-) strand; PAM type: NRG; PAM sequence: CAG
gaaccggttctttttactaa

SEQ ID NO: 80480 - DNA, 20 bp, Artificial Sequence
  Description of Artificial Sequence: Synthetic oligonucleotide
  Target: LAMA2; (-) strand; PAM type: NRG; PAM sequence: CGG
atttgtatactgtttagaac

SEQ ID NO: 80481 - DNA, 20 bp, Artificial Sequence
  Description of Artificial Sequence: Synthetic oligonucleotide
  Target: LAMA2; (-) strand; PAM type: NRG; PAM sequence: TAG
aggggcatttgtatactgtt

SEQ ID NO: 80482 - DNA, 20 bp, Artificial Sequence
  Description of Artificial Sequence: Synthetic oligonucleotide
  Target: LAMA2; (-) strand; PAM type: NRG; PAM sequence: GGG
tttattctacaaaagggaag

SEQ ID NO: 80483 - DNA, 20 bp, Artificial Sequence
  Description of Artificial Sequence: Synthetic oligonucleotide
  Target: LAMA2; (-) strand; PAM type: NRG; PAM sequence: GGG
atttattctacaaaagggaa

SEQ ID NO: 80484 - DNA, 20 bp, Artificial Sequence
  Description of Artificial Sequence: Synthetic oligonucleotide
  Target: LAMA2; (-) strand; PAM type: NRG; PAM sequence: AGG
tatttattctacaaaaggga

SEQ ID NO: 80485 - DNA, 20 bp, Artificial Sequence
  Description of Artificial Sequence: Synthetic oligonucleotide
  Target: LAMA2; (-) strand; PAM type: NRG; PAM sequence: AAG
ttatttattctacaaaaggg

SEQ ID NO: 80486 - DNA, 20 bp, Artificial Sequence
  Description of Artificial Sequence: Synthetic oligonucleotide
  Target: LAMA2; (-) strand; PAM type: NRG; PAM sequence: GGG
tttttatttattctacaaaa

SEQ ID NO: 80487 - DNA, 20 bp, Artificial Sequence
  Description of Artificial Sequence: Synthetic oligonucleotide
  Target: LAMA2; (-) strand; PAM type: NRG; PAM sequence: AGG
ctttttatttattctacaaa

SEQ ID NO: 80488 - DNA, 20 bp, Artificial Sequence
  Description of Artificial Sequence: Synthetic oligonucleotide
  Target: LAMA2; (-) strand; PAM type: NRG; PAM sequence: AAG
tctttttatttattctacaa

SEQ ID NO: 80489 - DNA, 20 bp, Artificial Sequence
  Description of Artificial Sequence: Synthetic oligonucleotide
  Target: LAMA2; (-) strand; PAM type: NRG; PAM sequence: CAG
taggtgtgcttgtatgcata

SEQ ID NO: 80490 - DNA, 20 bp, Artificial Sequence
  Description of Artificial Sequence: Synthetic oligonucleotide
  Target: LAMA2; (-) strand; PAM type: NRG; PAM sequence: AGG
acgtgtgtgtgtgtgtgtgt

SEQ ID NO: 80491 - DNA, 20 bp, Artificial Sequence
  Description of Artificial Sequence: Synthetic oligonucleotide
  Target: LAMA2; (-) strand; PAM type: NRG; PAM sequence: TAG
cacgtgtgtgtgtgtgtgtg

SEQ ID NO: 80492 - DNA, 20 bp, Artificial Sequence
  Description of Artificial Sequence: Synthetic oligonucleotide
  Target: LAMA2; (-) strand; PAM type: NRG; PAM sequence: GAG
tgacatgttgagtttcttag

SEQ ID NO: 80493 - DNA, 20 bp, Artificial Sequence
  Description of Artificial Sequence: Synthetic oligonucleotide
  Target: LAMA2; (-) strand; PAM type: NRG; PAM sequence: AGG
cctgacatgttgagtttctt

SEQ ID NO: 80494 - DNA, 20 bp, Artificial Sequence
  Description of Artificial Sequence: Synthetic oligonucleotide
  Target: LAMA2; (-) strand; PAM type: NRG; PAM sequence: TAG
acctgacatgttgagtttct

SEQ ID NO: 80495 - DNA, 20 bp, Artificial Sequence
  Description of Artificial Sequence: Synthetic oligonucleotide
  Target: LAMA2; (-) strand; PAM type: NRG; PAM sequence: GAG
tccttcctacctgacatgtt

SEQ ID NO: 80496 - DNA, 20 bp, Artificial Sequence
  Description of Artificial Sequence: Synthetic oligonucleotide
  Target: LAMA2; (-) strand; PAM type: NRG; PAM sequence: CAG
accagggaaatatatcgatg

SEQ ID NO: 80497 - DNA, 20 bp, Artificial Sequence
  Description of Artificial Sequence: Synthetic oligonucleotide
  Target: LAMA2; (-) strand; PAM type: NRG; PAM sequence: GGG
tttatattaggatagaacca

SEQ ID NO: 80498 - DNA, 20 bp, Artificial Sequence
  Description of Artificial Sequence: Synthetic oligonucleotide
  Target: LAMA2; (-) strand; PAM type: NRG; PAM sequence: AGG
atttatattaggatagaacc

SEQ ID NO: 80499 - DNA, 20 bp, Artificial Sequence
  Description of Artificial Sequence: Synthetic oligonucleotide
  Target: LAMA2; (-) strand; PAM type: NRG; PAM sequence: CAG
aatttatattaggatagaac

SEQ ID NO: 80500 - DNA, 20 bp, Artificial Sequence
  Description of Artificial Sequence: Synthetic oligonucleotide
  Target: LAMA2; (-) strand; PAM type: NRG; PAM sequence: TAG
atgaagaatttatattagga

SEQ ID NO: 80501 - DNA, 20 bp, Artificial Sequence
  Description of Artificial Sequence: Synthetic oligonucleotide
  Target: LAMA2; (-) strand; PAM type: NRG; PAM sequence: AGG
aaatatgaagaatttatatt

SEQ ID NO: 80502 - DNA, 20 bp, Artificial Sequence
  Description of Artificial Sequence: Synthetic oligonucleotide
  Target: LAMA2; (-) strand; PAM type: NRG; PAM sequence: TAG
taaatatgaagaatttatat

SEQ ID NO: 80503 - DNA, 20 bp, Artificial Sequence
  Description of Artificial Sequence: Synthetic oligonucleotide
  Target: LAMA2; (-) strand; PAM type: NRG; PAM sequence: AAG
gtaagactcttctaaatatg

SEQ ID NO: 80504 - DNA, 20 bp, Artificial Sequence
  Description of Artificial Sequence: Synthetic oligonucleotide
  Target: LAMA2; (-) strand; PAM type: NRG; PAM sequence: AAG
ttctccagaaaggattgggt

SEQ ID NO: 80505 - DNA, 20 bp, Artificial Sequence
  Description of Artificial Sequence: Synthetic oligonucleotide
  Target: LAMA2; (-) strand; PAM type: NRG; PAM sequence: GGG
cactttctccagaaaggatt

SEQ ID NO: 80506 - DNA, 20 bp, Artificial Sequence
  Description of Artificial Sequence: Synthetic oligonucleotide
  Target: LAMA2; (-) strand; PAM type: NRG; PAM sequence: TGG
tcactttctccagaaaggat

SEQ ID NO: 80507 - DNA, 20 bp, Artificial Sequence
  Description of Artificial Sequence: Synthetic oligonucleotide
  Target: LAMA2; (-) strand; PAM type: NRG; PAM sequence: AGG
aaaaatcactttctccagaa

SEQ ID NO: 80508 - DNA, 20 bp, Artificial Sequence
  Description of Artificial Sequence: Synthetic oligonucleotide
  Target: LAMA2; (-) strand; PAM type: NRG; PAM sequence: AAG
gaaaaatcactttctccaga

SEQ ID NO: 80509 - DNA, 20 bp, Artificial Sequence
  Description of Artificial Sequence: Synthetic oligonucleotide
  Target: LAMA2; (-) strand; PAM type: NRG; PAM sequence: CAG
aagtgaaaaatcactttctc

SEQ ID NO: 80510 - DNA, 20 bp, Artificial Sequence
  Description of Artificial Sequence: Synthetic oligonucleotide
  Target: LAMA2; (-) strand; PAM type: NRG; PAM sequence: AAG
tacattagaagaattccaag

SEQ ID NO: 80511 - DNA, 20 bp, Artificial Sequence
  Description of Artificial Sequence: Synthetic oligonucleotide
  Target: LAMA2; (-) strand; PAM type: NRG; PAM sequence: AAG
tgttacattagaagaattcc

SEQ ID NO: 80512 - DNA, 20 bp, Artificial Sequence
  Description of Artificial Sequence: Synthetic oligonucleotide
  Target: LAMA2; (-) strand; PAM type: NRG; PAM sequence: AAG
tctttttcatgttacattag

SEQ ID NO: 80513 - DNA, 20 bp, Artificial Sequence
  Description of Artificial Sequence: Synthetic oligonucleotide
  Target: LAMA2; (-) strand; PAM type: NRG; PAM sequence: TAG
ttgtctttttcatgttacat

SEQ ID NO: 80514 - DNA, 20 bp, Artificial Sequence
  Description of Artificial Sequence: Synthetic oligonucleotide
  Target: LAMA2; (-) strand; PAM type: NRG; PAM sequence: TAG
gtaatgtcttataaagaagt

SEQ ID NO: 80515 - DNA, 20 bp, Artificial Sequence
  Description of Artificial Sequence: Synthetic oligonucleotide
  Target: LAMA2; (-) strand; PAM type: NRG; PAM sequence: AAG
tagcgtaatgtcttataaag

SEQ ID NO: 80516 - DNA, 20 bp, Artificial Sequence
  Description of Artificial Sequence: Synthetic oligonucleotide
  Target: LAMA2; (-) strand; PAM type: NRG; PAM sequence: AAG
cattagcgtaatgtcttata

SEQ ID NO: 80517 - DNA, 20 bp, Artificial Sequence
  Description of Artificial Sequence: Synthetic oligonucleotide
  Target: LAMA2; (-) strand; PAM type: NRG; PAM sequence: TAG
gataatgcatgtgaaatcat

SEQ ID NO: 80518 - DNA, 20 bp, Artificial Sequence
  Description of Artificial Sequence: Synthetic oligonucleotide
  Target: LAMA2; (-) strand; PAM type: NRG; PAM sequence: GAG
ggatatttaaaagcacaagt

SEQ ID NO: 80519 - DNA, 20 bp, Artificial Sequence
  Description of Artificial Sequence: Synthetic oligonucleotide
  Target: LAMA2; (-) strand; PAM type: NRG; PAM sequence: AAG
attgggatatttaaaagcac

SEQ ID NO: 80520 - DNA, 20 bp, Artificial Sequence
  Description of Artificial Sequence: Synthetic oligonucleotide
  Target: LAMA2; (-) strand; PAM type: NRG; PAM sequence: AAG
tactagattgggatatttaa

SEQ ID NO: 80521 - DNA, 20 bp, Artificial Sequence
  Description of Artificial Sequence: Synthetic oligonucleotide
  Target: LAMA2; (-) strand; PAM type: NRG; PAM sequence: GGG
tcaatagtaattactagatt

SEQ ID NO: 80522 - DNA, 20 bp, Artificial Sequence
  Description of Artificial Sequence: Synthetic oligonucleotide
  Target: LAMA2; (-) strand; PAM type: NRG; PAM sequence: TGG
gtcaatagtaattactagat

SEQ ID NO: 80523 - DNA, 20 bp, Artificial Sequence
  Description of Artificial Sequence: Synthetic oligonucleotide
  Target: LAMA2; (-) strand; PAM type: NRG; PAM sequence: TAG
gagtggtcaatagtaattac

SEQ ID NO: 80524 - DNA, 20 bp, Artificial Sequence
  Description of Artificial Sequence: Synthetic oligonucleotide
  Target: LAMA2; (-) strand; PAM type: NRG; PAM sequence: TAG
ataatacatggagtggtcaa

SEQ ID NO: 80525 - DNA, 20 bp, Artificial Sequence
  Description of Artificial Sequence: Synthetic oligonucleotide
  Target: LAMA2; (-) strand; PAM type: NRG; PAM sequence: TGG
tttccatataatacatggag

SEQ ID NO: 80526 - DNA, 20 bp, Artificial Sequence
  Description of Artificial Sequence: Synthetic oligonucleotide
  Target: LAMA2; (-) strand; PAM type: NRG; PAM sequence: GAG
cagtttccatataatacatg

SEQ ID NO: 80527 - DNA, 20 bp, Artificial Sequence
  Description of Artificial Sequence: Synthetic oligonucleotide
  Target: LAMA2; (-) strand; PAM type: NRG; PAM sequence: TGG
ctcagtttccatataataca

SEQ ID NO: 80528 - DNA, 20 bp, Artificial Sequence
  Description of Artificial Sequence: Synthetic oligonucleotide
  Target: LAMA2; (-) strand; PAM type: NRG; PAM sequence: CAG
ttcttaatttcacgaaggct

SEQ ID NO: 80529 - DNA, 20 bp, Artificial Sequence
  Description of Artificial Sequence: Synthetic oligonucleotide
  Target: LAMA2; (-) strand; PAM type: NRG; PAM sequence: AGG
gaaacttcttaatttcacga

SEQ ID NO: 80530 - DNA, 20 bp, Artificial Sequence
  Description of Artificial Sequence: Synthetic oligonucleotide
  Target: LAMA2; (-) strand; PAM type: NRG; PAM sequence: AAG
ggaaacttcttaatttcacg

SEQ ID NO: 80531 - DNA, 20 bp, Artificial Sequence
  Description of Artificial Sequence: Synthetic oligonucleotide
  Target: LAMA2; (-) strand; PAM type: NRG; PAM sequence: TGG
acttagcagtcatatgacat

SEQ ID NO: 80532 - DNA, 20 bp, Artificial Sequence
  Description of Artificial Sequence: Synthetic oligonucleotide
  Target: LAMA2; (-) strand; PAM type: NRG; PAM sequence: CAG
gtgtgctctcctctacttag

SEQ ID NO: 80533 - DNA, 20 bp, Artificial Sequence
  Description of Artificial Sequence: Synthetic oligonucleotide
  Target: LAMA2; (-) strand; PAM type: NRG; PAM sequence: TAG
tgggtgtgctctcctctact

SEQ ID NO: 80534 - DNA, 20 bp, Artificial Sequence
  Description of Artificial Sequence: Synthetic oligonucleotide
  Target: LAMA2; (-) strand; PAM type: NRG; PAM sequence: GGG
caaccaactgtcttggatgt

SEQ ID NO: 80535 - DNA, 20 bp, Artificial Sequence
  Description of Artificial Sequence: Synthetic oligonucleotide
  Target: LAMA2; (-) strand; PAM type: NRG; PAM sequence: TGG
gcaaccaactgtcttggatg

SEQ ID NO: 80536 - DNA, 20 bp, Artificial Sequence
  Description of Artificial Sequence: Synthetic oligonucleotide
  Target: LAMA2; (-) strand; PAM type: NRG; PAM sequence: TGG
tattttgcaaccaactgtct

SEQ ID NO: 80537 - DNA, 20 bp, Artificial Sequence
  Description of Artificial Sequence: Synthetic oligonucleotide
  Target: LAMA2; (-) strand; PAM type: NRG; PAM sequence: AAG
gagctagtttactggtggct

SEQ ID NO: 80538 - DNA, 20 bp, Artificial Sequence
  Description of Artificial Sequence: Synthetic oligonucleotide
  Target: LAMA2; (-) strand; PAM type: NRG; PAM sequence: TGG
accgagagctagtttactgg

SEQ ID NO: 80539 - DNA, 20 bp, Artificial Sequence
  Description of Artificial Sequence: Synthetic oligonucleotide
  Target: LAMA2; (-) strand; PAM type: NRG; PAM sequence: TGG
caaaccgagagctagtttac

SEQ ID NO: 80540 - DNA, 20 bp, Artificial Sequence
  Description of Artificial Sequence: Synthetic oligonucleotide
  Target: LAMA2; (-) strand; PAM type: NRG; PAM sequence: TAG
aattaagacaaaccgagagc

SEQ ID NO: 80541 - DNA, 20 bp, Artificial Sequence
  Description of Artificial Sequence: Synthetic oligonucleotide
  Target: LAMA2; (-) strand; PAM type: NRG; PAM sequence: GAG
aaggaattaagacaaaccga

SEQ ID NO: 80542 - DNA, 20 bp, Artificial Sequence
  Description of Artificial Sequence: Synthetic oligonucleotide
  Target: LAMA2; (-) strand; PAM type: NRG; PAM sequence: GAG
ccaaggaattaagacaaacc

SEQ ID NO: 80543 - DNA, 20 bp, Artificial Sequence
  Description of Artificial Sequence: Synthetic oligonucleotide
  Target: LAMA2; (-) strand; PAM type: NRG; PAM sequence: AAG
atggcaggtgccaaggaatt

SEQ ID NO: 80544 - DNA, 20 bp, Artificial Sequence
  Description of Artificial Sequence: Synthetic oligonucleotide
  Target: LAMA2; (-) strand; PAM type: NRG; PAM sequence: AGG
aagatacatggcaggtgcca

SEQ ID NO: 80545 - DNA, 20 bp, Artificial Sequence
  Description of Artificial Sequence: Synthetic oligonucleotide
  Target: LAMA2; (-) strand; PAM type: NRG; PAM sequence: AAG
taagatacatggcaggtgcc

SEQ ID NO: 80546 - DNA, 20 bp, Artificial Sequence
  Description of Artificial Sequence: Synthetic oligonucleotide
  Target: LAMA2; (-) strand; PAM type: NRG; PAM sequence: AGG
aatgaaataagatacatggc

SEQ ID NO: 80547 - DNA, 20 bp, Artificial Sequence
  Description of Artificial Sequence: Synthetic oligonucleotide
  Target: LAMA2; (-) strand; PAM type: NRG; PAM sequence: CAG
gaatgaaataagatacatgg

SEQ ID NO: 80548 - DNA, 20 bp, Artificial Sequence
  Description of Artificial Sequence: Synthetic oligonucleotide
  Target: LAMA2; (-) strand; PAM type: NRG; PAM sequence: TGG
ggtgaatgaaataagataca

SEQ ID NO: 80549 - DNA, 20 bp, Artificial Sequence
  Description of Artificial Sequence: Synthetic oligonucleotide
  Target: LAMA2; (-) strand; PAM type: NRG; PAM sequence: AAG
tcctacccggtgaatgaaat

SEQ ID NO: 80550 - DNA, 20 bp, Artificial Sequence
  Description of Artificial Sequence: Synthetic oligonucleotide
  Target: LAMA2; (-) strand; PAM type: NRG; PAM sequence: CGG
gaatctcttcacatcctacc

SEQ ID NO: 80551 - DNA, 20 bp, Artificial Sequence
  Description of Artificial Sequence: Synthetic oligonucleotide
  Target: LAMA2; (-) strand; PAM type: NRG; PAM sequence: CAG
tctgcactgctaaagactgc

SEQ ID NO: 80552 - DNA, 20 bp, Artificial Sequence
  Description of Artificial Sequence: Synthetic oligonucleotide
  Target: LAMA2; (-) strand; PAM type: NRG; PAM sequence: AAG
ctccagagtctgcactgcta

SEQ ID NO: 80553 - DNA, 20 bp, Artificial Sequence
  Description of Artificial Sequence: Synthetic oligonucleotide
  Target: LAMA2; (-) strand; PAM type: NRG; PAM sequence: GAG
acctctgaagccagactcca

SEQ ID NO: 80554 - DNA, 20 bp, Artificial Sequence
  Description of Artificial Sequence: Synthetic oligonucleotide
  Target: LAMA2; (-) strand; PAM type: NRG; PAM sequence: CAG
caacctctgaagccagactc

SEQ ID NO: 80555 - DNA, 20 bp, Artificial Sequence
  Description of Artificial Sequence: Synthetic oligonucleotide
  Target: LAMA2; (-) strand; PAM type: NRG; PAM sequence: CAG
tggaaaccaacctctgaagc

SEQ ID NO: 80556 - DNA, 20 bp, Artificial Sequence
  Description of Artificial Sequence: Synthetic oligonucleotide
  Target: LAMA2; (-) strand; PAM type: NRG; PAM sequence: AAG
gtattggaaaccaacctctg

SEQ ID NO: 80557 - DNA, 20 bp, Artificial Sequence
  Description of Artificial Sequence: Synthetic oligonucleotide
  Target: LAMA2; (-) strand; PAM type: NRG; PAM sequence: TGG
aaagatattctaatcagtat

SEQ ID NO: 80558 - DNA, 20 bp, Artificial Sequence
  Description of Artificial Sequence: Synthetic oligonucleotide
  Target: LAMA2; (-) strand; PAM type: NRG; PAM sequence: CAG
cgtgtaaaagatattctaat

SEQ ID NO: 80559 - DNA, 20 bp, Artificial Sequence
  Description of Artificial Sequence: Synthetic oligonucleotide
  Target: LAMA2; (-) strand; PAM type: NRG; PAM sequence: AAG
agaagtgaaataacgtgtaa

SEQ ID NO: 80560 - DNA, 20 bp, Artificial Sequence
  Description of Artificial Sequence: Synthetic oligonucleotide
  Target: LAMA2; (-) strand; PAM type: NRG; PAM sequence: AAG
ctagaaacctgagtccagag

SEQ ID NO: 80561 - DNA, 20 bp, Artificial Sequence
  Description of Artificial Sequence: Synthetic oligonucleotide
  Target: LAMA2; (-) strand; PAM type: NRG; PAM sequence: GAG
atactagaaacctgagtcca

SEQ ID NO: 80562 - DNA, 20 bp, Artificial Sequence
  Description of Artificial Sequence: Synthetic oligonucleotide
  Target: LAMA2; (-) strand; PAM type: NRG; PAM sequence: CAG
gtatactagaaacctgagtc

SEQ ID NO: 80563 - DNA, 20 bp, Artificial Sequence
  Description of Artificial Sequence: Synthetic oligonucleotide
  Target: LAMA2; (-) strand; PAM type: NRG; PAM sequence: GAG
tttttgtatactagaaacct

SEQ ID NO: 80564 - DNA, 20 bp, Artificial Sequence
  Description of Artificial Sequence: Synthetic oligonucleotide
  Target: LAMA2; (-) strand; PAM type: NRG; PAM sequence: TAG
attaacctatttttgtatac

SEQ ID NO: 80565 - DNA, 20 bp, Artificial Sequence
  Description of Artificial Sequence: Synthetic oligonucleotide
  Target: LAMA2; (-) strand; PAM type: NRG; PAM sequence: AGG
caaaaatgcttttaggaatt

SEQ ID NO: 80566 - DNA, 20 bp, Artificial Sequence
  Description of Artificial Sequence: Synthetic oligonucleotide
  Target: LAMA2; (-) strand; PAM type: NRG; PAM sequence: TAG
tcaaaaatgcttttaggaat

SEQ ID NO: 80567 - DNA, 20 bp, Artificial Sequence
  Description of Artificial Sequence: Synthetic oligonucleotide
  Target: LAMA2; (-) strand; PAM type: NRG; PAM sequence: AGG
taatcctcaaaaatgctttt

SEQ ID NO: 80568 - DNA, 20 bp, Artificial Sequence
  Description of Artificial Sequence: Synthetic oligonucleotide
  Target: LAMA2; (-) strand; PAM type: NRG; PAM sequence: TAG
ttaatcctcaaaaatgcttt

SEQ ID NO: 80569 - DNA, 20 bp, Artificial Sequence
  Description of Artificial Sequence: Synthetic oligonucleotide
  Target: LAMA2; (-) strand; PAM type: NRG; PAM sequence: CAG
aacataggttttctcaatgc

SEQ ID NO: 80570 - DNA, 20 bp, Artificial Sequence
  Description of Artificial Sequence: Synthetic oligonucleotide
  Target: LAMA2; (-) strand; PAM type: NRG; PAM sequence: AGG
actaataacaactaaaacat

SEQ ID NO: 80571 - DNA, 20 bp, Artificial Sequence
  Description of Artificial Sequence: Synthetic oligonucleotide
  Target: LAMA2; (-) strand; PAM type: NRG; PAM sequence: TAG
tactaataacaactaaaaca

SEQ ID NO: 80572 - DNA, 20 bp, Artificial Sequence
  Description of Artificial Sequence: Synthetic oligonucleotide
  Target: LAMA2; (-) strand; PAM type: NRG; PAM sequence: AAG
tagagcctgtgggtaaagaa

SEQ ID NO: 80573 - DNA, 20 bp, Artificial Sequence
  Description of Artificial Sequence: Synthetic oligonucleotide
  Target: LAMA2; (-) strand; PAM type: NRG; PAM sequence: AAG
tgtattagagcctgtgggta

SEQ ID NO: 80574 - DNA, 20 bp, Artificial Sequence
  Description of Artificial Sequence: Synthetic oligonucleotide
  Target: LAMA2; (-) strand; PAM type: NRG; PAM sequence: GGG
atttctgtattagagcctgt

SEQ ID NO: 80575 - DNA, 20 bp, Artificial Sequence
  Description of Artificial Sequence: Synthetic oligonucleotide
  Target: LAMA2; (-) strand; PAM type: NRG; PAM sequence: TGG
aatttctgtattagagcctg

SEQ ID NO: 80576 - DNA, 20 bp, Artificial Sequence
  Description of Artificial Sequence: Synthetic oligonucleotide
  Target: LAMA2; (-) strand; PAM type: NRG; PAM sequence: GAG
atatggaaatttctgtatta

SEQ ID NO: 80577 - DNA, 20 bp, Artificial Sequence
  Description of Artificial Sequence: Synthetic oligonucleotide
  Target: LAMA2; (-) strand; PAM type: NRG; PAM sequence: TAG
ccatatggaaatttctgtat

SEQ ID NO: 80578 - DNA, 20 bp, Artificial Sequence
  Description of Artificial Sequence: Synthetic oligonucleotide
  Target: LAMA2; (-) strand; PAM type: NRG; PAM sequence: TGG
tgtaatgaattactaccata

SEQ ID NO: 80579 - DNA, 20 bp, Artificial Sequence
  Description of Artificial Sequence: Synthetic oligonucleotide
  Target: LAMA2; (-) strand; PAM type: NRG; PAM sequence: AGG
gcactgaatgattaacagct

SEQ ID NO: 80580 - DNA, 20 bp, Artificial Sequence
  Description of Artificial Sequence: Synthetic oligonucleotide
  Target: LAMA2; (-) strand; PAM type: NRG; PAM sequence: TAG
ggcactgaatgattaacagc

SEQ ID NO: 80581 - DNA, 20 bp, Artificial Sequence
  Description of Artificial Sequence: Synthetic oligonucleotide
  Target: LAMA2; (-) strand; PAM type: NRG; PAM sequence: CAG
tgatggcactgaatgattaa

SEQ ID NO: 80582 - DNA, 20 bp, Artificial Sequence
  Description of Artificial Sequence: Synthetic oligonucleotide
  Target: LAMA2; (-) strand; PAM type: NRG; PAM sequence: TGG
aataataaattattcaatga

SEQ ID NO: 80583 - DNA, 20 bp, Artificial Sequence
  Description of Artificial Sequence: Synthetic oligonucleotide
  Target: LAMA2; (-) strand; PAM type: NRG; PAM sequence: TGG
gactaacgtgcaattttata

SEQ ID NO: 80584 - DNA, 20 bp, Artificial Sequence
  Description of Artificial Sequence: Synthetic oligonucleotide
  Target: LAMA2; (-) strand; PAM type: NRG; PAM sequence: TGG
catatgcaattgccaatatt

SEQ ID NO: 80585 - DNA, 20 bp, Artificial Sequence
  Description of Artificial Sequence: Synthetic oligonucleotide
  Target: LAMA2; (-) strand; PAM type: NRG; PAM sequence: AAG
atgattaaaacatataaatt

SEQ ID NO: 80586 - DNA, 20 bp, Artificial Sequence
  Description of Artificial Sequence: Synthetic oligonucleotide
  Target: LAMA2; (-) strand; PAM type: NRG; PAM sequence: TAG
aataaattcacacattttaa

SEQ ID NO: 80587 - DNA, 20 bp, Artificial Sequence
  Description of Artificial Sequence: Synthetic oligonucleotide
  Target: LAMA2; (-) strand; PAM type: NRG; PAM sequence: AGG
aaagtatctggatgtattgg

SEQ ID NO: 80588 - DNA, 20 bp, Artificial Sequence
  Description of Artificial Sequence: Synthetic oligonucleotide
  Target: LAMA2; (-) strand; PAM type: NRG; PAM sequence: GAG
gaaagtatctggatgtattg

SEQ ID NO: 80589 - DNA, 20 bp, Artificial Sequence
  Description of Artificial Sequence: Synthetic oligonucleotide
  Target: LAMA2; (-) strand; PAM type: NRG; PAM sequence: TGG
cagaaagtatctggatgtat

SEQ ID NO: 80590 - DNA, 20 bp, Artificial Sequence
  Description of Artificial Sequence: Synthetic oligonucleotide
  Target: LAMA2; (-) strand; PAM type: NRG; PAM sequence: TGG
aaacatatccagaaagtatc

SEQ ID NO: 80591 - DNA, 20 bp, Artificial Sequence
  Description of Artificial Sequence: Synthetic oligonucleotide
  Target: LAMA2; (-) strand; PAM type: NRG; PAM sequence: AAG
cacacacaaacatatccaga

SEQ ID NO: 80592 - DNA, 20 bp, Artificial Sequence
  Description of Artificial Sequence: Synthetic oligonucleotide
  Target: LAMA2; (-) strand; PAM type: NRG; PAM sequence: CAG
tacacacacacaaacatatc

SEQ ID NO: 80593 - DNA, 20 bp, Artificial Sequence
  Description of Artificial Sequence: Synthetic oligonucleotide
  Target: LAMA2; (-) strand; PAM type: NRG; PAM sequence: TAG
accatacgggaaattacatt

SEQ ID NO: 80594 - DNA, 20 bp, Artificial Sequence
  Description of Artificial Sequence: Synthetic oligonucleotide
  Target: LAMA2; (-) strand; PAM type: NRG; PAM sequence: GGG
cctagacttttataccatac

SEQ ID NO: 80595 - DNA, 20 bp, Artificial Sequence
  Description of Artificial Sequence: Synthetic oligonucleotide
  Target: LAMA2; (-) strand; PAM type: NRG; PAM sequence: CGG
gcctagacttttataccata

SEQ ID NO: 80596 - DNA, 20 bp, Artificial Sequence
  Description of Artificial Sequence: Synthetic oligonucleotide
  Target: LAMA2; (-) strand; PAM type: NRG; PAM sequence: TAG
gtgagccactgcccccggcc

SEQ ID NO: 80597 - DNA, 20 bp, Artificial Sequence
  Description of Artificial Sequence: Synthetic oligonucleotide
  Target: LAMA2; (-) strand; PAM type: NRG; PAM sequence: CGG
caggcgtgagccactgcccc

SEQ ID NO: 80598 - DNA, 20 bp, Artificial Sequence
  Description of Artificial Sequence: Synthetic oligonucleotide
  Target: LAMA2; (-) strand; PAM type: NRG; PAM sequence: GAG
agtgctggaattacaggcgt

SEQ ID NO: 80599 - DNA, 20 bp, Artificial Sequence
  Description of Artificial Sequence: Synthetic oligonucleotide
  Target: LAMA2; (-) strand; PAM type: NRG; PAM sequence: AGG
tctcaaagtgctggaattac

SEQ ID NO: 80600 - DNA, 20 bp, Artificial Sequence
  Description of Artificial Sequence: Synthetic oligonucleotide
  Target: LAMA2; (-) strand; PAM type: NRG; PAM sequence: CAG
ctctcaaagtgctggaatta

SEQ ID NO: 80601 - DNA, 20 bp, Artificial Sequence
  Description of Artificial Sequence: Synthetic oligonucleotide
  Target: LAMA2; (-) strand; PAM type: NRG; PAM sequence: TGG
gcctcagcctctcaaagtgc

SEQ ID NO: 80602 - DNA, 20 bp, Artificial Sequence
  Description of Artificial Sequence: Synthetic oligonucleotide
  Target: LAMA2; (-) strand; PAM type: NRG; PAM sequence: AAG
ccacccgcctcagcctctca

SEQ ID NO: 80603 - DNA, 20 bp, Artificial Sequence
  Description of Artificial Sequence: Synthetic oligonucleotide
  Target: LAMA2; (-) strand; PAM type: NRG; PAM sequence: CAG
gacccatgatccacccgcct

SEQ ID NO: 80604 - DNA, 20 bp, Artificial Sequence
  Description of Artificial Sequence: Synthetic oligonucleotide
  Target: LAMA2; (-) strand; PAM type: NRG; PAM sequence: TGG
cttcaccatgttggccaggc

SEQ ID NO: 80605 - DNA, 20 bp, Artificial Sequence
  Description of Artificial Sequence: Synthetic oligonucleotide
  Target: LAMA2; (-) strand; PAM type: NRG; PAM sequence: AGG
ggggcttcaccatgttggcc

SEQ ID NO: 80606 - DNA, 20 bp, Artificial Sequence
  Description of Artificial Sequence: Synthetic oligonucleotide
  Target: LAMA2; (-) strand; PAM type: NRG; PAM sequence: CAG
tggggcttcaccatgttggc

SEQ ID NO: 80607 - DNA, 20 bp, Artificial Sequence
  Description of Artificial Sequence: Synthetic oligonucleotide
  Target: LAMA2; (-) strand; PAM type: NRG; PAM sequence: TGG
gagatggggcttcaccatgt

SEQ ID NO: 80608 - DNA, 20 bp, Artificial Sequence
  Description of Artificial Sequence: Synthetic oligonucleotide
  Target: LAMA2; (-) strand; PAM type: NRG; PAM sequence: GGG
ctgtatttttagtagagatg

SEQ ID NO: 80609 - DNA, 20 bp, Artificial Sequence
  Description of Artificial Sequence: Synthetic oligonucleotide
  Target: LAMA2; (-) strand; PAM type: NRG; PAM sequence: GGG
tctgtatttttagtagagat

SEQ ID NO: 80610 - DNA, 20 bp, Artificial Sequence
  Description of Artificial Sequence: Synthetic oligonucleotide
  Target: LAMA2; (-) strand; PAM type: NRG; PAM sequence: TGG
ttctgtatttttagtagaga

SEQ ID NO: 80611 - DNA, 20 bp, Artificial Sequence
  Description of Artificial Sequence: Synthetic oligonucleotide
  Target: LAMA2; (-) strand; PAM type: NRG; PAM sequence: GAG
taatttctgtatttttagta

SEQ ID NO: 80612 - DNA, 20 bp, Artificial Sequence
  Description of Artificial Sequence: Synthetic oligonucleotide
  Target: LAMA2; (-) strand; PAM type: NRG; PAM sequence: TAG
gctaatttctgtatttttag

SEQ ID NO: 80613 - DNA, 20 bp, Artificial Sequence
  Description of Artificial Sequence: Synthetic oligonucleotide
  Target: LAMA2; (-) strand; PAM type: NRG; PAM sequence: TAG
ccagctaatttctgtatttt

SEQ ID NO: 80614 - DNA, 20 bp, Artificial Sequence
  Description of Artificial Sequence: Synthetic oligonucleotide
  Target: LAMA2; (-) strand; PAM type: NRG; PAM sequence: CAG
caggcatgcaccaccacacc

SEQ ID NO: 80615 - DNA, 20 bp, Artificial Sequence
  Description of Artificial Sequence: Synthetic oligonucleotide
  Target: LAMA2; (-) strand; PAM type: NRG; PAM sequence: AGG
cccgagtagctggggacaac

SEQ ID NO: 80616 - DNA, 20 bp, Artificial Sequence
  Description of Artificial Sequence: Synthetic oligonucleotide
  Target: LAMA2; (-) strand; PAM type: NRG; PAM sequence: CAG
tcccgagtagctggggacaa

SEQ ID NO: 80617 - DNA, 20 bp, Artificial Sequence
  Description of Artificial Sequence: Synthetic oligonucleotide
  Target: LAMA2; (-) strand; PAM type: NRG; PAM sequence: GGG
ctcagcctcccgagtagctg

SEQ ID NO: 80618 - DNA, 20 bp, Artificial Sequence
  Description of Artificial Sequence: Synthetic oligonucleotide
  Target: LAMA2; (-) strand; PAM type: NRG; PAM sequence: GGG
tctcagcctcccgagtagct

SEQ ID NO: 80619 - DNA, 20 bp, Artificial Sequence
  Description of Artificial Sequence: Synthetic oligonucleotide
  Target: LAMA2; (-) strand; PAM type: NRG; PAM sequence: TGG
gtctcagcctcccgagtagc

SEQ ID NO: 80620 - DNA, 20 bp, Artificial Sequence
  Description of Artificial Sequence: Synthetic oligonucleotide
  Target: LAMA2; (-) strand; PAM type: NRG; PAM sequence: TAG
tcctgtctcagcctcccgag

SEQ ID NO: 80621 - DNA, 20 bp, Artificial Sequence
  Description of Artificial Sequence: Synthetic oligonucleotide
  Target: LAMA2; (-) strand; PAM type: NRG; PAM sequence: GAG
tcctcctgtctcagcctccc

SEQ ID NO: 80622 - DNA, 20 bp, Artificial Sequence
  Description of Artificial Sequence: Synthetic oligonucleotide
  Target: LAMA2; (-) strand; PAM type: NRG; PAM sequence: CAG
ttcaagcaatcctcctgtct

SEQ ID NO: 80623 - DNA, 20 bp, Artificial Sequence
  Description of Artificial Sequence: Synthetic oligonucleotide
  Target: LAMA2; (-) strand; PAM type: NRG; PAM sequence: AAG
aacctctgccttccaggttc

SEQ ID NO: 80624 - DNA, 20 bp, Artificial Sequence
  Description of Artificial Sequence: Synthetic oligonucleotide
  Target: LAMA2; (-) strand; PAM type: NRG; PAM sequence: AGG
cactgcaacctctgccttcc

SEQ ID NO: 80625 - DNA, 20 bp, Artificial Sequence
  Description of Artificial Sequence: Synthetic oligonucleotide
  Target: LAMA2; (-) strand; PAM type: NRG; PAM sequence: CAG
tcactgcaacctctgccttc

SEQ ID NO: 80626 - DNA, 20 bp, Artificial Sequence
  Description of Artificial Sequence: Synthetic oligonucleotide
  Target: LAMA2; (-) strand; PAM type: NRG; PAM sequence: CGG
agtgcagagtggcacgatct

SEQ ID NO: 80627 - DNA, 20 bp, Artificial Sequence
  Description of Artificial Sequence: Synthetic oligonucleotide
  Target: LAMA2; (-) strand; PAM type: NRG; PAM sequence: TGG
gcccaggctggagtgcagag

SEQ ID NO: 80628 - DNA, 20 bp, Artificial Sequence
  Description of Artificial Sequence: Synthetic oligonucleotide
  Target: LAMA2; (-) strand; PAM type: NRG; PAM sequence: GAG
gtcgcccaggctggagtgca

SEQ ID NO: 80629 - DNA, 20 bp, Artificial Sequence
  Description of Artificial Sequence: Synthetic oligonucleotide
  Target: LAMA2; (-) strand; PAM type: NRG; PAM sequence: CAG
ctgtcgcccaggctggagtg

SEQ ID NO: 80630 - DNA, 20 bp, Artificial Sequence
  Description of Artificial Sequence: Synthetic oligonucleotide
  Target: LAMA2; (-) strand; PAM type: NRG; PAM sequence: GAG
tcactctgtcgcccaggctg

SEQ ID NO: 80631 - DNA, 20 bp, Artificial Sequence
  Description of Artificial Sequence: Synthetic oligonucleotide
  Target: LAMA2; (-) strand; PAM type: NRG; PAM sequence: TGG
tctcactctgtcgcccaggc

SEQ ID NO: 80632 - DNA, 20 bp, Artificial Sequence
  Description of Artificial Sequence: Synthetic oligonucleotide
  Target: LAMA2; (-) strand; PAM type: NRG; PAM sequence: AGG
agagtctcactctgtcgccc

SEQ ID NO: 80633 - DNA, 20 bp, Artificial Sequence
  Description of Artificial Sequence: Synthetic oligonucleotide
  Target: LAMA2; (-) strand; PAM type: NRG; PAM sequence: CAG
cagagtctcactctgtcgcc

SEQ ID NO: 80634 - DNA, 20 bp, Artificial Sequence
  Description of Artificial Sequence: Synthetic oligonucleotide
  Target: LAMA2; (-) strand; PAM type: NRG; PAM sequence: GAG
tagattttttttttgagaca

SEQ ID NO: 80635 - DNA, 20 bp, Artificial Sequence
  Description of Artificial Sequence: Synthetic oligonucleotide
  Target: LAMA2; (-) strand; PAM type: NRG; PAM sequence: CAG
aatagattttttttttgaga

SEQ ID NO: 80636 - DNA, 20 bp, Artificial Sequence
  Description of Artificial Sequence: Synthetic oligonucleotide
  Target: LAMA2; (-) strand; PAM type: NRG; PAM sequence: GAG
acataatagatttttttttt

SEQ ID NO: 80637 - DNA, 20 bp, Artificial Sequence
  Description of Artificial Sequence: Synthetic oligonucleotide
  Target: LAMA2; (-) strand; PAM type: NRG; PAM sequence: TAG
atcatttctgttatacataa

SEQ ID NO: 80638 - DNA, 20 bp, Artificial Sequence
  Description of Artificial Sequence: Synthetic oligonucleotide
  Target: LAMA2; (-) strand; PAM type: NRG; PAM sequence: CAG
aataaacatcaatttgattt

SEQ ID NO: 80639 - DNA, 20 bp, Artificial Sequence
  Description of Artificial Sequence: Synthetic oligonucleotide
  Target: LAMA2; (-) strand; PAM type: NRG; PAM sequence: AGG
gacaattgcatgctgcatta

SEQ ID NO: 80640 - DNA, 20 bp, Artificial Sequence
  Description of Artificial Sequence: Synthetic oligonucleotide
  Target: LAMA2; (-) strand; PAM type: NRG; PAM sequence: AAG
tgacaattgcatgctgcatt

SEQ ID NO: 80641 - DNA, 20 bp, Artificial Sequence
  Description of Artificial Sequence: Synthetic oligonucleotide
  Target: LAMA2; (-) strand; PAM type: NRG; PAM sequence: CAG
ttcatcataatagcattctt

SEQ ID NO: 80642 - DNA, 20 bp, Artificial Sequence
  Description of Artificial Sequence: Synthetic oligonucleotide
  Target: LAMA2; (-) strand; PAM type: NRG; PAM sequence: TAG
tggcaacattttcatcataa

SEQ ID NO: 80643 - DNA, 20 bp, Artificial Sequence
  Description of Artificial Sequence: Synthetic oligonucleotide
  Target: LAMA2; (-) strand; PAM type: NRG; PAM sequence: TGG
attcaaactcagatttcttc

SEQ ID NO: 80644 - DNA, 20 bp, Artificial Sequence
  Description of Artificial Sequence: Synthetic oligonucleotide
  Target: LAMA2; (-) strand; PAM type: NRG; PAM sequence: CAG
tttccacgtatattcaaact

SEQ ID NO: 80645 - DNA, 20 bp, Artificial Sequence
  Description of Artificial Sequence: Synthetic oligonucleotide
  Target: LAMA2; (-) strand; PAM type: NRG; PAM sequence: CAG
tgttttgggtacaattaatg

SEQ ID NO: 80646 - DNA, 20 bp, Artificial Sequence
  Description of Artificial Sequence: Synthetic oligonucleotide
  Target: LAMA2; (-) strand; PAM type: NRG; PAM sequence: GGG
gtttataccagcagtgtttt

SEQ ID NO: 80647 - DNA, 20 bp, Artificial Sequence
  Description of Artificial Sequence: Synthetic oligonucleotide
  Target: LAMA2; (-) strand; PAM type: NRG; PAM sequence: TGG
agtttataccagcagtgttt

SEQ ID NO: 80648 - DNA, 20 bp, Artificial Sequence
  Description of Artificial Sequence: Synthetic oligonucleotide
  Target: LAMA2; (-) strand; PAM type: NRG; PAM sequence: CAG
tgtctcgcagtttataccag

SEQ ID NO: 80649 - DNA, 20 bp, Artificial Sequence
  Description of Artificial Sequence: Synthetic oligonucleotide
  Target: LAMA2; (-) strand; PAM type: NRG; PAM sequence: CAG
acatgtctcgcagtttatac

SEQ ID NO: 80650 - DNA, 20 bp, Artificial Sequence
  Description of Artificial Sequence: Synthetic oligonucleotide
  Target: LAMA2; (-) strand; PAM type: NRG; PAM sequence: CAG
agccatcagtacatgtctcg

SEQ ID NO: 80651 - DNA, 20 bp, Artificial Sequence
  Description of Artificial Sequence: Synthetic oligonucleotide
  Target: LAMA2; (-) strand; PAM type: NRG; PAM sequence: CAG
tttgggtctgaagaagccat

SEQ ID NO: 80652 - DNA, 20 bp, Artificial Sequence
  Description of Artificial Sequence: Synthetic oligonucleotide
  Target: LAMA2; (-) strand; PAM type: NRG; PAM sequence: AAG
ttacccctttgggtctgaag

SEQ ID NO: 80653 - DNA, 20 bp, Artificial Sequence
  Description of Artificial Sequence: Synthetic oligonucleotide
  Target: LAMA2; (-) strand; PAM type: NRG; PAM sequence: AAG
actttacccctttgggtctg

SEQ ID NO: 80654 - DNA, 20 bp, Artificial Sequence
  Description of Artificial Sequence: Synthetic oligonucleotide
  Target: LAMA2; (-) strand; PAM type: NRG; PAM sequence: GGG
aaagcatactttaccccttt

SEQ ID NO: 80655 - DNA, 20 bp, Artificial Sequence
  Description of Artificial Sequence: Synthetic oligonucleotide
  Target: LAMA2; (-) strand; PAM type: NRG; PAM sequence: TGG
aaaagcatactttacccctt

SEQ ID NO: 80656 - DNA, 20 bp, Artificial Sequence
  Description of Artificial Sequence: Synthetic oligonucleotide
  Target: LAMA2; (-) strand; PAM type: NRG; PAM sequence: AAG
ataactctttatgaaagaaa

SEQ ID NO: 80657 - DNA, 20 bp, Artificial Sequence
  Description of Artificial Sequence: Synthetic oligonucleotide
  Target: LAMA2; (-) strand; PAM type: NRG; PAM sequence: AAG
aaaaaaataactctttatga

SEQ ID NO: 80658 - DNA, 20 bp, Artificial Sequence
  Description of Artificial Sequence: Synthetic oligonucleotide
  Target: LAMA2; (-) strand; PAM type: NRG; PAM sequence: AAG
taaaacatttttgtatgaaa

SEQ ID NO: 80659 - DNA, 20 bp, Artificial Sequence
  Description of Artificial Sequence: Synthetic oligonucleotide
  Target: LAMA2; (-) strand; PAM type: NRG; PAM sequence: AAG
tgaagttcaactgtttacag

SEQ ID NO: 80660 - DNA, 20 bp, Artificial Sequence
  Description of Artificial Sequence: Synthetic oligonucleotide
  Target: LAMA2; (-) strand; PAM type: NRG; PAM sequence: CAG
atttgaagttcaactgttta

SEQ ID NO: 80661 - DNA, 20 bp, Artificial Sequence
  Description of Artificial Sequence: Synthetic oligonucleotide
  Target: LAMA2; (-) strand; PAM type: NRG; PAM sequence: AAG
cctacttaccttttaatttg

SEQ ID NO: 80662 - DNA, 20 bp, Artificial Sequence
  Description of Artificial Sequence: Synthetic oligonucleotide
  Target: LAMA2; (-) strand; PAM type: NRG; PAM sequence: CAG
acatcctcaaagatttaggt

SEQ ID NO: 80663 - DNA, 20 bp, Artificial Sequence
  Description of Artificial Sequence: Synthetic oligonucleotide
  Target: LAMA2; (-) strand; PAM type: NRG; PAM sequence: AGG
tcttacatcctcaaagattt

SEQ ID NO: 80664 - DNA, 20 bp, Artificial Sequence
  Description of Artificial Sequence: Synthetic oligonucleotide
  Target: LAMA2; (-) strand; PAM type: NRG; PAM sequence: TAG
atcttacatcctcaaagatt

SEQ ID NO: 80665 - DNA, 20 bp, Artificial Sequence
  Description of Artificial Sequence: Synthetic oligonucleotide
  Target: LAMA2; (-) strand; PAM type: NRG; PAM sequence: AAG
agttttatcttacatcctca

SEQ ID NO: 80666 - DNA, 20 bp, Artificial Sequence
  Description of Artificial Sequence: Synthetic oligonucleotide
  Target: LAMA2; (-) strand; PAM type: NRG; PAM sequence: AAG
aactttctggagtgatggaa

SEQ ID NO: 80667 - DNA, 20 bp, Artificial Sequence
  Description of Artificial Sequence: Synthetic oligonucleotide
  Target: LAMA2; (-) strand; PAM type: NRG; PAM sequence: TGG
gataaaactttctggagtga

SEQ ID NO: 80668 - DNA, 20 bp, Artificial Sequence
  Description of Artificial Sequence: Synthetic oligonucleotide
  Target: LAMA2; (-) strand; PAM type: NRG; PAM sequence: GAG
agccatgataaaactttctg

SEQ ID NO: 80669 - DNA, 20 bp, Artificial Sequence
  Description of Artificial Sequence: Synthetic oligonucleotide
  Target: LAMA2; (-) strand; PAM type: NRG; PAM sequence: TGG
ggagccatgataaaactttc

SEQ ID NO: 80670 - DNA, 20 bp, Artificial Sequence
  Description of Artificial Sequence: Synthetic oligonucleotide
  Target: LAMA2; (-) strand; PAM type: NRG; PAM sequence: GAG
gtccactccttgactggaag

SEQ ID NO: 80671 - DNA, 20 bp, Artificial Sequence
  Description of Artificial Sequence: Synthetic oligonucleotide
  Target: LAMA2; (-) strand; PAM type: NRG; PAM sequence: AGG
gggtccactccttgactgga

SEQ ID NO: 80672 - DNA, 20 bp, Artificial Sequence
  Description of Artificial Sequence: Synthetic oligonucleotide
  Target: LAMA2; (-) strand; PAM type: NRG; PAM sequence: AAG
ggggtccactccttgactgg

SEQ ID NO: 80673 - DNA, 20 bp, Artificial Sequence
  Description of Artificial Sequence: Synthetic oligonucleotide
  Target: LAMA2; (-) strand; PAM type: NRG; PAM sequence: TGG
ctaggggtccactccttgac

SEQ ID NO: 80674 - DNA, 20 bp, Artificial Sequence
  Description of Artificial Sequence: Synthetic oligonucleotide
  Target: LAMA2; (-) strand; PAM type: NRG; PAM sequence: GGG
tcagaacagagtttgcctag

SEQ ID NO: 80675 - DNA, 20 bp, Artificial Sequence
  Description of Artificial Sequence: Synthetic oligonucleotide
  Target: LAMA2; (-) strand; PAM type: NRG; PAM sequence: GGG
atcagaacagagtttgccta

SEQ ID NO: 80676 - DNA, 20 bp, Artificial Sequence
  Description of Artificial Sequence: Synthetic oligonucleotide
  Target: LAMA2; (-) strand; PAM type: NRG; PAM sequence: AGG
aatcagaacagagtttgcct

SEQ ID NO: 80677 - DNA, 20 bp, Artificial Sequence
  Description of Artificial Sequence: Synthetic oligonucleotide
  Target: LAMA2; (-) strand; PAM type: NRG; PAM sequence: TAG
aaatcagaacagagtttgcc

SEQ ID NO: 80678 - DNA, 20 bp, Artificial Sequence
  Description of Artificial Sequence: Synthetic oligonucleotide
  Target: LAMA2; (-) strand; PAM type: NRG; PAM sequence: GAG
acgttctaaaaatcagaaca

SEQ ID NO: 80679 - DNA, 20 bp, Artificial Sequence
  Description of Artificial Sequence: Synthetic oligonucleotide
  Target: LAMA2; (-) strand; PAM type: NRG; PAM sequence: CAG
ttacgttctaaaaatcagaa

SEQ ID NO: 80680 - DNA, 20 bp, Artificial Sequence
  Description of Artificial Sequence: Synthetic oligonucleotide
  Target: LAMA2; (-) strand; PAM type: NRG; PAM sequence: CAG
ctaatttacgttctaaaaat

SEQ ID NO: 80681 - DNA, 20 bp, Artificial Sequence
  Description of Artificial Sequence: Synthetic oligonucleotide
  Target: LAMA2; (-) strand; PAM type: NRG; PAM sequence: AGG
tttttatgaaattctctaag

SEQ ID NO: 80682 - DNA, 20 bp, Artificial Sequence
  Description of Artificial Sequence: Synthetic oligonucleotide
  Target: LAMA2; (-) strand; PAM type: NRG; PAM sequence: GAG
atttttatgaaattctctaa

SEQ ID NO: 80683 - DNA, 20 bp, Artificial Sequence
  Description of Artificial Sequence: Synthetic oligonucleotide
  Target: LAMA2; (-) strand; PAM type: NRG; PAM sequence: AAG
tcatttttatgaaattctct

SEQ ID NO: 80684 - DNA, 20 bp, Artificial Sequence
  Description of Artificial Sequence: Synthetic oligonucleotide
  Target: LAMA2; (-) strand; PAM type: NRG; PAM sequence: TAG
tcgagtgaaaaaagactcac

SEQ ID NO: 80685 - DNA, 20 bp, Artificial Sequence
  Description of Artificial Sequence: Synthetic oligonucleotide
  Target: LAMA2; (-) strand; PAM type: NRG; PAM sequence: AAG
catattatgtcgagtgaaaa

SEQ ID NO: 80686 - DNA, 20 bp, Artificial Sequence
  Description of Artificial Sequence: Synthetic oligonucleotide
  Target: LAMA2; (-) strand; PAM type: NRG; PAM sequence: GAG
aaatcttaacatattatgtc

SEQ ID NO: 80687 - DNA, 20 bp, Artificial Sequence
  Description of Artificial Sequence: Synthetic oligonucleotide
  Target: LAMA2; (-) strand; PAM type: NRG; PAM sequence: TGG
ctactgatgcacaaacaaca

SEQ ID NO: 80688 - DNA, 20 bp, Artificial Sequence
  Description of Artificial Sequence: Synthetic oligonucleotide
  Target: LAMA2; (-) strand; PAM type: NRG; PAM sequence: AAG
gcaatttctttcaaaagaaa

SEQ ID NO: 80689 - DNA, 20 bp, Artificial Sequence
  Description of Artificial Sequence: Synthetic oligonucleotide
  Target: LAMA2; (-) strand; PAM type: NRG; PAM sequence: AAG
tactcagcaatttctttcaa

SEQ ID NO: 80690 - DNA, 20 bp, Artificial Sequence
  Description of Artificial Sequence: Synthetic oligonucleotide
  Target: LAMA2; (-) strand; PAM type: NRG; PAM sequence: CAG
tcgtgcagagaaatactact

SEQ ID NO: 80691 - DNA, 20 bp, Artificial Sequence
  Description of Artificial Sequence: Synthetic oligonucleotide
  Target: LAMA2; (-) strand; PAM type: NRG; PAM sequence: GAG
aattttgatatgttcgtgca

SEQ ID NO: 80692 - DNA, 20 bp, Artificial Sequence
  Description of Artificial Sequence: Synthetic oligonucleotide
  Target: LAMA2; (-) strand; PAM type: NRG; PAM sequence: CAG
aaaattttgatatgttcgtg

SEQ ID NO: 80693 - DNA, 20 bp, Artificial Sequence
  Description of Artificial Sequence: Synthetic oligonucleotide
  Target: LAMA2; (-) strand; PAM type: NRG; PAM sequence: TGG
aatttctatcaacaggagaa

SEQ ID NO: 80694 - DNA, 20 bp, Artificial Sequence
  Description of Artificial Sequence: Synthetic oligonucleotide
  Target: LAMA2; (-) strand; PAM type: NRG; PAM sequence: GAG
atcctaatttctatcaacag

SEQ ID NO: 80695 - DNA, 20 bp, Artificial Sequence
  Description of Artificial Sequence: Synthetic oligonucleotide
  Target: LAMA2; (-) strand; PAM type: NRG; PAM sequence: AGG
tgatcctaatttctatcaac

SEQ ID NO: 80696 - DNA, 20 bp, Artificial Sequence
  Description of Artificial Sequence: Synthetic oligonucleotide
  Target: LAMA2; (-) strand; PAM type: NRG; PAM sequence: CAG
atgatcctaatttctatcaa

SEQ ID NO: 80697 - DNA, 20 bp, Artificial Sequence
  Description of Artificial Sequence: Synthetic oligonucleotide
  Target: LAMA2; (-) strand; PAM type: NRG; PAM sequence: TGG
tgtaggagctaagctaaaac

SEQ ID NO: 80698 - DNA, 20 bp, Artificial Sequence
  Description of Artificial Sequence: Synthetic oligonucleotide
  Target: LAMA2; (-) strand; PAM type: NRG; PAM sequence: AAG
taaaattatttgtaggagct

SEQ ID NO: 80699 - DNA, 20 bp, Artificial Sequence
  Description of Artificial Sequence: Synthetic oligonucleotide
  Target: LAMA2; (-) strand; PAM type: NRG; PAM sequence: GAG
tagtataaaattatttgtag

SEQ ID NO: 80700 - DNA, 20 bp, Artificial Sequence
  Description of Artificial Sequence: Synthetic oligonucleotide
  Target: LAMA2; (-) strand; PAM type: NRG; PAM sequence: AGG
actagtataaaattatttgt

SEQ ID NO: 80701 - DNA, 20 bp, Artificial Sequence
  Description of Artificial Sequence: Synthetic oligonucleotide
  Target: LAMA2; (-) strand; PAM type: NRG; PAM sequence: TAG
aactagtataaaattatttg

SEQ ID NO: 80702 - DNA, 20 bp, Artificial Sequence
  Description of Artificial Sequence: Synthetic oligonucleotide
  Target: LAMA2; (-) strand; PAM type: NRG; PAM sequence: TAG
aaatatgactataaaataac

SEQ ID NO: 80703 - DNA, 20 bp, Artificial Sequence
  Description of Artificial Sequence: Synthetic oligonucleotide
  Target: LAMA2; (-) strand; PAM type: NRG; PAM sequence: AGG
tattcctaagtatttacaca

SEQ ID NO: 80704 - DNA, 20 bp, Artificial Sequence
  Description of Artificial Sequence: Synthetic oligonucleotide
  Target: LAMA2; (-) strand; PAM type: NRG; PAM sequence: AAG
ctattcctaagtatttacac

SEQ ID NO: 80705 - DNA, 20 bp, Artificial Sequence
  Description of Artificial Sequence: Synthetic oligonucleotide
  Target: LAMA2; (-) strand; PAM type: NRG; PAM sequence: AAG
gaaaaaagctttctattcct

SEQ ID NO: 80706 - DNA, 20 bp, Artificial Sequence
  Description of Artificial Sequence: Synthetic oligonucleotide
  Target: LAMA2; (-) strand; PAM type: NRG; PAM sequence: AAG
atctacctatcctatgaaaa

SEQ ID NO: 80707 - DNA, 20 bp, Artificial Sequence
  Description of Artificial Sequence: Synthetic oligonucleotide
  Target: LAMA2; (-) strand; PAM type: NRG; PAM sequence: AAG
tgacggtttcttataaagtt

SEQ ID NO: 80708 - DNA, 20 bp, Artificial Sequence
  Description of Artificial Sequence: Synthetic oligonucleotide
  Target: LAMA2; (-) strand; PAM type: NRG; PAM sequence: AAG
aatgttgacggtttcttata

SEQ ID NO: 80709 - DNA, 20 bp, Artificial Sequence
  Description of Artificial Sequence: Synthetic oligonucleotide
  Target: LAMA2; (-) strand; PAM type: NRG; PAM sequence: CGG
ctaatttggcaaaatgttga

SEQ ID NO: 80710 - DNA, 20 bp, Artificial Sequence
  Description of Artificial Sequence: Synthetic oligonucleotide
  Target: LAMA2; (-) strand; PAM type: NRG; PAM sequence: TGG
tttatacattattactaatt

SEQ ID NO: 80711 - DNA, 20 bp, Artificial Sequence
  Description of Artificial Sequence: Synthetic oligonucleotide
  Target: LAMA2; (-) strand; PAM type: NRG; PAM sequence: TGG
ctgaaactcatataactttt

SEQ ID NO: 80712 - DNA, 20 bp, Artificial Sequence
  Description of Artificial Sequence: Synthetic oligonucleotide
  Target: LAMA2; (-) strand; PAM type: NRG; PAM sequence: TAG
atcaaatattagagatgata

SEQ ID NO: 80713 - DNA, 20 bp, Artificial Sequence
  Description of Artificial Sequence: Synthetic oligonucleotide
  Target: LAMA2; (-) strand; PAM type: NRG; PAM sequence: GAG
atagtcaacatcaaatatta

SEQ ID NO: 80714 - DNA, 20 bp, Artificial Sequence
  Description of Artificial Sequence: Synthetic oligonucleotide
  Target: LAMA2; (-) strand; PAM type: NRG; PAM sequence: TAG
agatagtcaacatcaaatat

SEQ ID NO: 80715 - DNA, 20 bp, Artificial Sequence
  Description of Artificial Sequence: Synthetic oligonucleotide
  Target: LAMA2; (-) strand; PAM type: NRG; PAM sequence: TAG
atgactaaaatccaaaaaga

SEQ ID NO: 80716 - DNA, 20 bp, Artificial Sequence
  Description of Artificial Sequence: Synthetic oligonucleotide
  Target: LAMA2; (-) strand; PAM type: NRG; PAM sequence: AAG
ctagatgactaaaatccaaa

SEQ ID NO: 80717 - DNA, 20 bp, Artificial Sequence
  Description of Artificial Sequence: Synthetic oligonucleotide
  Target: LAMA2; (-) strand; PAM type: NRG; PAM sequence: TAG
agatgccatttcacacccac

SEQ ID NO: 80718 - DNA, 20 bp, Artificial Sequence
  Description of Artificial Sequence: Synthetic oligonucleotide
  Target: LAMA2; (-) strand; PAM type: NRG; PAM sequence: CAG
attaaaattaaatccataat

SEQ ID NO: 80719 - DNA, 20 bp, Artificial Sequence
  Description of Artificial Sequence: Synthetic oligonucleotide
  Target: LAMA2; (-) strand; PAM type: NRG; PAM sequence: AAG
aagatacaggaatggtcaat

SEQ ID NO: 80720 - DNA, 20 bp, Artificial Sequence
  Description of Artificial Sequence: Synthetic oligonucleotide
  Target: LAMA2; (-) strand; PAM type: NRG; PAM sequence: TGG
cataagagaagatacaggaa

SEQ ID NO: 80721 - DNA, 20 bp, Artificial Sequence
  Description of Artificial Sequence: Synthetic oligonucleotide
  Target: LAMA2; (-) strand; PAM type: NRG; PAM sequence: AGG
tacttcataagagaagatac

SEQ ID NO: 80722 - DNA, 20 bp, Artificial Sequence
  Description of Artificial Sequence: Synthetic oligonucleotide
  Target: LAMA2; (-) strand; PAM type: NRG; PAM sequence: CAG
ctacttcataagagaagata

SEQ ID NO: 80723 - DNA, 20 bp, Artificial Sequence
  Description of Artificial Sequence: Synthetic oligonucleotide
  Target: LAMA2; (-) strand; PAM type: NRG; PAM sequence: AAG
gaacatctacttcataagag

SEQ ID NO: 80724 - DNA, 20 bp, Artificial Sequence
  Description of Artificial Sequence: Synthetic oligonucleotide
  Target: LAMA2; (-) strand; PAM type: NRG; PAM sequence: GAG
tttgaacatctacttcataa

SEQ ID NO: 80725 - DNA, 20 bp, Artificial Sequence
  Description of Artificial Sequence: Synthetic oligonucleotide
  Target: LAMA2; (-) strand; PAM type: NRG; PAM sequence: AAG
actttgaacatctacttcat

SEQ ID NO: 80726 - DNA, 20 bp, Artificial Sequence
  Description of Artificial Sequence: Synthetic oligonucleotide
  Target: LAMA2; (-) strand; PAM type: NRG; PAM sequence: TAG
ttttaggataaaaaaatatt

SEQ ID NO: 80727 - DNA, 20 bp, Artificial Sequence
  Description of Artificial Sequence: Synthetic oligonucleotide
  Target: LAMA2; (-) strand; PAM type: NRG; PAM sequence: AGG
aagttaaaattttggttttt

SEQ ID NO: 80728 - DNA, 20 bp, Artificial Sequence
  Description of Artificial Sequence: Synthetic oligonucleotide
  Target: LAMA2; (-) strand; PAM type: NRG; PAM sequence: TAG
taagttaaaattttggtttt

SEQ ID NO: 80729 - DNA, 20 bp, Artificial Sequence
  Description of Artificial Sequence: Synthetic oligonucleotide
  Target: LAMA2; (-) strand; PAM type: NRG; PAM sequence: TGG
agctctataagttaaaattt

SEQ ID NO: 80730 - DNA, 20 bp, Artificial Sequence
  Description of Artificial Sequence: Synthetic oligonucleotide
  Target: LAMA2; (-) strand; PAM type: NRG; PAM sequence: AAG
gatatgggtaatagctctat

SEQ ID NO: 80731 - DNA, 20 bp, Artificial Sequence
  Description of Artificial Sequence: Synthetic oligonucleotide
  Target: LAMA2; (-) strand; PAM type: NRG; PAM sequence: TAG
catttacttgatatgggtaa

SEQ ID NO: 80732 - DNA, 20 bp, Artificial Sequence
  Description of Artificial Sequence: Synthetic oligonucleotide
  Target: LAMA2; (-) strand; PAM type: NRG; PAM sequence: GGG
cacaaacatttacttgatat

SEQ ID NO: 80733 - DNA, 20 bp, Artificial Sequence
  Description of Artificial Sequence: Synthetic oligonucleotide
  Target: LAMA2; (-) strand; PAM type: NRG; PAM sequence: TGG
acacaaacatttacttgata

SEQ ID NO: 80734 - DNA, 20 bp, Artificial Sequence
  Description of Artificial Sequence: Synthetic oligonucleotide
  Target: LAMA2; (-) strand; PAM type: NRG; PAM sequence: TGG
tcaggttaaccatataaatc

SEQ ID NO: 80735 - DNA, 20 bp, Artificial Sequence
  Description of Artificial Sequence: Synthetic oligonucleotide
  Target: LAMA2; (-) strand; PAM type: NRG; PAM sequence: AGG
acaaatggtgctagaacttc

SEQ ID NO: 80736 - DNA, 20 bp, Artificial Sequence
  Description of Artificial Sequence: Synthetic oligonucleotide
  Target: LAMA2; (-) strand; PAM type: NRG; PAM sequence: CAG
aacaaatggtgctagaactt

SEQ ID NO: 80737 - DNA, 20 bp, Artificial Sequence
  Description of Artificial Sequence: Synthetic oligonucleotide
  Target: LAMA2; (-) strand; PAM type: NRG; PAM sequence: TAG
gatttttcaacaaatggtgc

SEQ ID NO: 80738 - DNA, 20 bp, Artificial Sequence
  Description of Artificial Sequence: Synthetic oligonucleotide
  Target: LAMA2; (-) strand; PAM type: NRG; PAM sequence: TGG
tcaattgatttttcaacaaa

SEQ ID NO: 80739 - DNA, 20 bp, Artificial Sequence
  Description of Artificial Sequence: Synthetic oligonucleotide
  Target: LAMA2; (-) strand; PAM type: NRG; PAM sequence: TAG
aaaatagataactgaggttc

SEQ ID NO: 80740 - DNA, 20 bp, Artificial Sequence
  Description of Artificial Sequence: Synthetic oligonucleotide
  Target: LAMA2; (-) strand; PAM type: NRG; PAM sequence: AGG
ctaggaaaaatagataactg

SEQ ID NO: 80741 - DNA, 20 bp, Artificial Sequence
  Description of Artificial Sequence: Synthetic oligonucleotide
  Target: LAMA2; (-) strand; PAM type: NRG; PAM sequence: GAG
gctaggaaaaatagataact

SEQ ID NO: 80742 - DNA, 20 bp, Artificial Sequence
  Description of Artificial Sequence: Synthetic oligonucleotide
  Target: LAMA2; (-) strand; PAM type: NRG; PAM sequence: TAG
aaaatagatgctaggaaaaa

SEQ ID NO: 80743 - DNA, 20 bp, Artificial Sequence
  Description of Artificial Sequence: Synthetic oligonucleotide
  Target: LAMA2; (-) strand; PAM type: NRG; PAM sequence: AGG
cagagggaaaaatagatgct

SEQ ID NO: 80744 - DNA, 20 bp, Artificial Sequence
  Description of Artificial Sequence: Synthetic oligonucleotide
  Target: LAMA2; (-) strand; PAM type: NRG; PAM sequence: TAG
gcagagggaaaaatagatgc

SEQ ID NO: 80745 - DNA, 20 bp, Artificial Sequence
  Description of Artificial Sequence: Synthetic oligonucleotide
  Target: LAMA2; (-) strand; PAM type: NRG; PAM sequence: TAG
ttagcacgcagagggaaaaa

SEQ ID NO: 80746 - DNA, 20 bp, Artificial Sequence
  Description of Artificial Sequence: Synthetic oligonucleotide
  Target: LAMA2; (-) strand; PAM type: NRG; PAM sequence: GGG
gtatggtattagcacgcaga

SEQ ID NO: 80747 - DNA, 20 bp, Artificial Sequence
  Description of Artificial Sequence: Synthetic oligonucleotide
  Target: LAMA2; (-) strand; PAM type: NRG; PAM sequence: AGG
agtatggtattagcacgcag

SEQ ID NO: 80748 - DNA, 20 bp, Artificial Sequence
  Description of Artificial Sequence: Synthetic oligonucleotide
  Target: LAMA2; (-) strand; PAM type: NRG; PAM sequence: GAG
tagtatggtattagcacgca

SEQ ID NO: 80749 - DNA, 20 bp, Artificial Sequence
  Description of Artificial Sequence: Synthetic oligonucleotide
  Target: LAMA2; (-) strand; PAM type: NRG; PAM sequence: CAG
gatagtatggtattagcacg

SEQ ID NO: 80750 - DNA, 20 bp, Artificial Sequence
  Description of Artificial Sequence: Synthetic oligonucleotide
  Target: LAMA2; (-) strand; PAM type: NRG; PAM sequence: TAG
caatgaagatagtatggtat

SEQ ID NO: 80751 - DNA, 20 bp, Artificial Sequence
  Description of Artificial Sequence: Synthetic oligonucleotide
  Target: LAMA2; (-) strand; PAM type: NRG; PAM sequence: TGG
ctaaagcaatgaagatagta

SEQ ID NO: 80752 - DNA, 20 bp, Artificial Sequence
  Description of Artificial Sequence: Synthetic oligonucleotide
  Target: LAMA2; (-) strand; PAM type: NRG; PAM sequence: TAG
acttactaaagcaatgaaga

SEQ ID NO: 80753 - DNA, 20 bp, Artificial Sequence
  Description of Artificial Sequence: Synthetic oligonucleotide
  Target: LAMA2; (-) strand; PAM type: NRG; PAM sequence: AAG
ctagacttactaaagcaatg

SEQ ID NO: 80754 - DNA, 20 bp, Artificial Sequence
  Description of Artificial Sequence: Synthetic oligonucleotide
  Target: LAMA2; (-) strand; PAM type: NRG; PAM sequence: AAG
cctaaattctagacttacta

SEQ ID NO: 80755 - DNA, 20 bp, Artificial Sequence
  Description of Artificial Sequence: Synthetic oligonucleotide
  Target: LAMA2; (-) strand; PAM type: NRG; PAM sequence: TAG
acattatattacctaaattc

SEQ ID NO: 80756 - DNA, 20 bp, Artificial Sequence
  Description of Artificial Sequence: Synthetic oligonucleotide
  Target: LAMA2; (-) strand; PAM type: NRG; PAM sequence: TGG
ttgaaaataaaaaataaagt

SEQ ID NO: 80757 - DNA, 20 bp, Artificial Sequence
  Description of Artificial Sequence: Synthetic oligonucleotide
  Target: LAMA2; (-) strand; PAM type: NRG; PAM sequence: AAG
aatcttgaaaataaaaaata

SEQ ID NO: 80758 - DNA, 20 bp, Artificial Sequence
  Description of Artificial Sequence: Synthetic oligonucleotide
  Target: LAMA2; (-) strand; PAM type: NRG; PAM sequence: TAG
acacaaaaaagcccctacta

SEQ ID NO: 80759 - DNA, 20 bp, Artificial Sequence
  Description of Artificial Sequence: Synthetic oligonucleotide
  Target: LAMA2; (-) strand; PAM type: NRG; PAM sequence: AAG
gtatagaaacacacacaaaa

SEQ ID NO: 80760 - DNA, 20 bp, Artificial Sequence
  Description of Artificial Sequence: Synthetic oligonucleotide
  Target: LAMA2; (-) strand; PAM type: NRG; PAM sequence: TAG
aagttgattctaaaattgta

SEQ ID NO: 80761 - DNA, 20 bp, Artificial Sequence
  Description of Artificial Sequence: Synthetic oligonucleotide
  Target: LAMA2; (-) strand; PAM type: NRG; PAM sequence: AAG
taatattttctgtaattgac

SEQ ID NO: 80762 - DNA, 20 bp, Artificial Sequence
  Description of Artificial Sequence: Synthetic oligonucleotide
  Target: LAMA2; (-) strand; PAM type: NRG; PAM sequence: AAG
catatttgtatatagagtct

SEQ ID NO: 80763 - DNA, 20 bp, Artificial Sequence
  Description of Artificial Sequence: Synthetic oligonucleotide
  Target: LAMA2; (-) strand; PAM type: NRG; PAM sequence: GAG
attttccatatttgtatata

SEQ ID NO: 80764 - DNA, 20 bp, Artificial Sequence
  Description of Artificial Sequence: Synthetic oligonucleotide
  Target: LAMA2; (-) strand; PAM type: NRG; PAM sequence: TAG
ccattttccatatttgtata

SEQ ID NO: 80765 - DNA, 20 bp, Artificial Sequence
  Description of Artificial Sequence: Synthetic oligonucleotide
  Target: LAMA2; (-) strand; PAM type: NRG; PAM sequence: AAG
tctttgaccaacatctcctc

SEQ ID NO: 80766 - DNA, 20 bp, Artificial Sequence
  Description of Artificial Sequence: Synthetic oligonucleotide
  Target: LAMA2; (-) strand; PAM type: NRG; PAM sequence: CAG
aaatacattgttattaacta

SEQ ID NO: 80767 - DNA, 20 bp, Artificial Sequence
  Description of Artificial Sequence: Synthetic oligonucleotide
  Target: LAMA2; (-) strand; PAM type: NRG; PAM sequence: GAG
ctactctcagcattttttaa

SEQ ID NO: 80768 - DNA, 20 bp, Artificial Sequence
  Description of Artificial Sequence: Synthetic oligonucleotide
  Target: LAMA2; (-) strand; PAM type: NRG; PAM sequence: AAG
atctactctcagcatttttt

SEQ ID NO: 80769 - DNA, 20 bp, Artificial Sequence
  Description of Artificial Sequence: Synthetic oligonucleotide
  Target: LAMA2; (-) strand; PAM type: NRG; PAM sequence: CAG
gaacacttaaaatctactct

SEQ ID NO: 80770 - DNA, 20 bp, Artificial Sequence
  Description of Artificial Sequence: Synthetic oligonucleotide
  Target: LAMA2; (-) strand; PAM type: NRG; PAM sequence: GAG
taattatcaatttttttggt

SEQ ID NO: 80771 - DNA, 20 bp, Artificial Sequence
  Description of Artificial Sequence: Synthetic oligonucleotide
  Target: LAMA2; (-) strand; PAM type: NRG; PAM sequence: TGG
aacataattatcaatttttt

SEQ ID NO: 80772 - DNA, 20 bp, Artificial Sequence
  Description of Artificial Sequence: Synthetic oligonucleotide
  Target: LAMA2; (-) strand; PAM type: NRG; PAM sequence: AAG
aattgtgaaatggttatatc

SEQ ID NO: 80773 - DNA, 20 bp, Artificial Sequence
  Description of Artificial Sequence: Synthetic oligonucleotide
  Target: LAMA2; (-) strand; PAM type: NRG; PAM sequence: TGG
tatatatacaaattgtgaaa

SEQ ID NO: 80774 - DNA, 20 bp, Artificial Sequence
  Description of Artificial Sequence: Synthetic oligonucleotide
  Target: LAMA2; (-) strand; PAM type: NRG; PAM sequence: AAG
tcaatacttgtttgctttta

SEQ ID NO: 80775 - DNA, 20 bp, Artificial Sequence
  Description of Artificial Sequence: Synthetic oligonucleotide
  Target: LAMA2; (-) strand; PAM type: NRG; PAM sequence: TGG
gagagatatgctatgttcat

SEQ ID NO: 80776 - DNA, 20 bp, Artificial Sequence
  Description of Artificial Sequence: Synthetic oligonucleotide
  Target: LAMA2; (-) strand; PAM type: NRG; PAM sequence: GAG
agaagatagaaataaatgga

SEQ ID NO: 80777 - DNA, 20 bp, Artificial Sequence
  Description of Artificial Sequence: Synthetic oligonucleotide
  Target: LAMA2; (-) strand; PAM type: NRG; PAM sequence: GAG
aaagaagatagaaataaatg

SEQ ID NO: 80778 - DNA, 20 bp, Artificial Sequence
  Description of Artificial Sequence: Synthetic oligonucleotide
  Target: LAMA2; (-) strand; PAM type: NRG; PAM sequence: TGG
ataaagaagatagaaataaa

SEQ ID NO: 80779 - DNA, 20 bp, Artificial Sequence
  Description of Artificial Sequence: Synthetic oligonucleotide
  Target: LAMA2; (-) strand; PAM type: NRG; PAM sequence: TAG
actgacatgaataaagaaga

SEQ ID NO: 80780 - DNA, 20 bp, Artificial Sequence
  Description of Artificial Sequence: Synthetic oligonucleotide
  Target: LAMA2; (-) strand; PAM type: NRG; PAM sequence: AAG
gaacactgacatgaataaag

SEQ ID NO: 80781 - DNA, 20 bp, Artificial Sequence
  Description of Artificial Sequence: Synthetic oligonucleotide
  Target: LAMA2; (-) strand; PAM type: NRG; PAM sequence: AAG
ctggaacactgacatgaata

SEQ ID NO: 80782 - DNA, 20 bp, Artificial Sequence
  Description of Artificial Sequence: Synthetic oligonucleotide
  Target: LAMA2; (-) strand; PAM type: NRG; PAM sequence: TGG
gacatgcaagatctctgtac

SEQ ID NO: 80783 - DNA, 20 bp, Artificial Sequence
  Description of Artificial Sequence: Synthetic oligonucleotide
  Target: LAMA2; (-) strand; PAM type: NRG; PAM sequence: AAG
taatttaacaaaagacatgc

SEQ ID NO: 80784 - DNA, 20 bp, Artificial Sequence
  Description of Artificial Sequence: Synthetic oligonucleotide
  Target: LAMA2; (-) strand; PAM type: NRG; PAM sequence: AAG
tctaaagattaatttaacaa

SEQ ID NO: 80785 - DNA, 20 bp, Artificial Sequence
  Description of Artificial Sequence: Synthetic oligonucleotide
  Target: LAMA2; (-) strand; PAM type: NRG; PAM sequence: AAG
tcatgcaaagcaaaattcta

SEQ ID NO: 80786 - DNA, 20 bp, Artificial Sequence
  Description of Artificial Sequence: Synthetic oligonucleotide
  Target: LAMA2; (-) strand; PAM type: NRG; PAM sequence: AAG
attttttttacagtcatgca

SEQ ID NO: 80787 - DNA, 20 bp, Artificial Sequence
  Description of Artificial Sequence: Synthetic oligonucleotide
  Target: LAMA2; (-) strand; PAM type: NRG; PAM sequence: CAG
ttatttaaaaatttttttta

SEQ ID NO: 80788 - DNA, 20 bp, Artificial Sequence
  Description of Artificial Sequence: Synthetic oligonucleotide
  Target: LAMA2; (-) strand; PAM type: NRG; PAM sequence: TGG
taacaattacattaaataat

SEQ ID NO: 80789 - DNA, 20 bp, Artificial Sequence
  Description of Artificial Sequence: Synthetic oligonucleotide
  Target: LAMA2; (-) strand; PAM type: NRG; PAM sequence: AAG
aaggatggctatagggcata

SEQ ID NO: 80790 - DNA, 20 bp, Artificial Sequence
  Description of Artificial Sequence: Synthetic oligonucleotide
  Target: LAMA2; (-) strand; PAM type: NRG; PAM sequence: GGG
agaaattaaggatggctata

SEQ ID NO: 80791 - DNA, 20 bp, Artificial Sequence
  Description of Artificial Sequence: Synthetic oligonucleotide
  Target: LAMA2; (-) strand; PAM type: NRG; PAM sequence: AGG
aagaaattaaggatggctat

SEQ ID NO: 80792 - DNA, 20 bp, Artificial Sequence
  Description of Artificial Sequence: Synthetic oligonucleotide
  Target: LAMA2; (-) strand; PAM type: NRG; PAM sequence: TAG
aaagaaattaaggatggcta

SEQ ID NO: 80793 - DNA, 20 bp, Artificial Sequence
  Description of Artificial Sequence: Synthetic oligonucleotide
  Target: LAMA2; (-) strand; PAM type: NRG; PAM sequence: TGG
aaaaaaaaagaaattaagga

SEQ ID NO: 80794 - DNA, 20 bp, Artificial Sequence
  Description of Artificial Sequence: Synthetic oligonucleotide
  Target: LAMA2; (-) strand; PAM type: NRG; PAM sequence: AGG
aaaaaaaaaaaaagaaatta

SEQ ID NO: 80795 - DNA, 20 bp, Artificial Sequence
  Description of Artificial Sequence: Synthetic oligonucleotide
  Target: LAMA2; (-) strand; PAM type: NRG; PAM sequence: AAG
taaaaaaaaaaaaagaaatt

SEQ ID NO: 80796 - DNA, 20 bp, Artificial Sequence
  Description of Artificial Sequence: Synthetic oligonucleotide
  Target: LAMA2; (-) strand; PAM type: NRG; PAM sequence: AAG
aagttatttaaaaaaaaaaa

SEQ ID NO: 80797 - DNA, 20 bp, Artificial Sequence
  Description of Artificial Sequence: Synthetic oligonucleotide
  Target: LAMA2; (-) strand; PAM type: NRG; PAM sequence: AAG
ctcagtaacttttaaaaggg

SEQ ID NO: 80798 - DNA, 20 bp, Artificial Sequence
  Description of Artificial Sequence: Synthetic oligonucleotide
  Target: LAMA2; (-) strand; PAM type: NRG; PAM sequence: GGG
attctcagtaacttttaaaa

SEQ ID NO: 80799 - DNA, 20 bp, Artificial Sequence
  Description of Artificial Sequence: Synthetic oligonucleotide
  Target: LAMA2; (-) strand; PAM type: NRG; PAM sequence: AGG
tattctcagtaacttttaaa

SEQ ID NO: 80800 - DNA, 20 bp, Artificial Sequence
  Description of Artificial Sequence: Synthetic oligonucleotide
  Target: LAMA2; (-) strand; PAM type: NRG; PAM sequence: AAG
ttattctcagtaacttttaa

SEQ ID NO: 80801 - DNA, 20 bp, Artificial Sequence
  Description of Artificial Sequence: Synthetic oligonucleotide
  Target: LAMA2; (-) strand; PAM type: NRG; PAM sequence: CAG
tgttctgtattctttattct

SEQ ID NO: 80802 - DNA, 20 bp, Artificial Sequence
  Description of Artificial Sequence: Synthetic oligonucleotide
  Target: LAMA2; (-) strand; PAM type: NRG; PAM sequence: AAG
cctgcatttgatagcaatgt

SEQ ID NO: 80803 - DNA, 20 bp, Artificial Sequence
  Description of Artificial Sequence: Synthetic oligonucleotide
  Target: LAMA2; (-) strand; PAM type: NRG; PAM sequence: TAG
aagtgaattcctgcatttga

SEQ ID NO: 80804 - DNA, 20 bp, Artificial Sequence
  Description of Artificial Sequence: Synthetic oligonucleotide
  Target: LAMA2; (-) strand; PAM type: NRG; PAM sequence: AAG
agagaaagcacttcttattg

SEQ ID NO: 80805 - DNA, 20 bp, Artificial Sequence
  Description of Artificial Sequence: Synthetic oligonucleotide
  Target: LAMA2; (-) strand; PAM type: NRG; PAM sequence: AAG
atgaaccatgcttacagaga

SEQ ID NO: 80806 - DNA, 20 bp, Artificial Sequence
  Description of Artificial Sequence: Synthetic oligonucleotide
  Target: LAMA2; (-) strand; PAM type: NRG; PAM sequence: GAG
tgccatgaaccatgcttaca

SEQ ID NO: 80807 - DNA, 20 bp, Artificial Sequence
  Description of Artificial Sequence: Synthetic oligonucleotide
  Target: LAMA2; (-) strand; PAM type: NRG; PAM sequence: CAG
attgccatgaaccatgctta

SEQ ID NO: 80808 - DNA, 20 bp, Artificial Sequence
  Description of Artificial Sequence: Synthetic oligonucleotide
  Target: LAMA2; (-) strand; PAM type: NRG; PAM sequence: GAG
aaacatcctctcctaagttg

SEQ ID NO: 80809 - DNA, 20 bp, Artificial Sequence
  Description of Artificial Sequence: Synthetic oligonucleotide
  Target: LAMA2; (-) strand; PAM type: NRG; PAM sequence: TGG
gaaaacatcctctcctaagt

SEQ ID NO: 80810 - DNA, 20 bp, Artificial Sequence
  Description of Artificial Sequence: Synthetic oligonucleotide
  Target: LAMA2; (-) strand; PAM type: NRG; PAM sequence: AAG
cacggaaaacatcctctcct

SEQ ID NO: 80811 - DNA, 20 bp, Artificial Sequence
  Description of Artificial Sequence: Synthetic oligonucleotide
  Target: LAMA2; (-) strand; PAM type: NRG; PAM sequence: CGG
tgttgttattatttttgtca

SEQ ID NO: 80812 - DNA, 20 bp, Artificial Sequence
  Description of Artificial Sequence: Synthetic oligonucleotide
  Target: LAMA2; (-) strand; PAM type: NRG; PAM sequence: TGG
gtttaaagcatctgtaaatt

SEQ ID NO: 80813 - DNA, 20 bp, Artificial Sequence
  Description of Artificial Sequence: Synthetic oligonucleotide
  Target: LAMA2; (-) strand; PAM type: NRG; PAM sequence: AAG
ccaaggccaaaagaagttta

SEQ ID NO: 80814 - DNA, 20 bp, Artificial Sequence
  Description of Artificial Sequence: Synthetic oligonucleotide
  Target: LAMA2; (-) strand; PAM type: NRG; PAM sequence: AAG
gctgatgccaaggccaaaag

SEQ ID NO: 80815 - DNA, 20 bp, Artificial Sequence
  Description of Artificial Sequence: Synthetic oligonucleotide
  Target: LAMA2; (-) strand; PAM type: NRG; PAM sequence: AAG
aaagctgatgccaaggccaa

SEQ ID NO: 80816 - DNA, 20 bp, Artificial Sequence
  Description of Artificial Sequence: Synthetic oligonucleotide
  Target: LAMA2; (-) strand; PAM type: NRG; PAM sequence: AGG
taacatgaaagctgatgcca

SEQ ID NO: 80817 - DNA, 20 bp, Artificial Sequence
  Description of Artificial Sequence: Synthetic oligonucleotide
  Target: LAMA2; (-) strand; PAM type: NRG; PAM sequence: AAG
ttaacatgaaagctgatgcc

SEQ ID NO: 80818 - DNA, 20 bp, Artificial Sequence
  Description of Artificial Sequence: Synthetic oligonucleotide
  Target: LAMA2; (-) strand; PAM type: NRG; PAM sequence: AAG
agctttattttttaacatga

SEQ ID NO: 80819 - DNA, 20 bp, Artificial Sequence
  Description of Artificial Sequence: Synthetic oligonucleotide
  Target: LAMA2; (-) strand; PAM type: NRG; PAM sequence: CAG
aagtgagatagcttccccac

SEQ ID NO: 80820 - DNA, 20 bp, Artificial Sequence
  Description of Artificial Sequence: Synthetic oligonucleotide
  Target: LAMA2; (-) strand; PAM type: NRG; PAM sequence: TAG
catttactttgcaagtgaga

SEQ ID NO: 80821 - DNA, 20 bp, Artificial Sequence
  Description of Artificial Sequence: Synthetic oligonucleotide
  Target: LAMA2; (-) strand; PAM type: NRG; PAM sequence: GAG
aagccatttactttgcaagt

SEQ ID NO: 80822 - DNA, 20 bp, Artificial Sequence
  Description of Artificial Sequence: Synthetic oligonucleotide
  Target: LAMA2; (-) strand; PAM type: NRG; PAM sequence: AAG
atacaagccatttactttgc

SEQ ID NO: 80823 - DNA, 20 bp, Artificial Sequence
  Description of Artificial Sequence: Synthetic oligonucleotide
  Target: LAMA2; (-) strand; PAM type: NRG; PAM sequence: AAG
aagattcgccaatctcatac

SEQ ID NO: 80824 - DNA, 20 bp, Artificial Sequence
  Description of Artificial Sequence: Synthetic oligonucleotide
  Target: LAMA2; (-) strand; PAM type: NRG; PAM sequence: AAG
taaaaatgcaatatctgacc

SEQ ID NO: 80825 - DNA, 20 bp, Artificial Sequence
  Description of Artificial Sequence: Synthetic oligonucleotide
  Target: LAMA2; (-) strand; PAM type: NRG; PAM sequence: TGG
aggaagatattggtggccgg

SEQ ID NO: 80826 - DNA, 20 bp, Artificial Sequence
  Description of Artificial Sequence: Synthetic oligonucleotide
  Target: LAMA2; (-) strand; PAM type: NRG; PAM sequence: CGG
cacaggaagatattggtggc

SEQ ID NO: 80827 - DNA, 20 bp, Artificial Sequence
  Description of Artificial Sequence: Synthetic oligonucleotide
  Target: LAMA2; (-) strand; PAM type: NRG; PAM sequence: TGG
catgcacaggaagatattgg

SEQ ID NO: 80828 - DNA, 20 bp, Artificial Sequence
  Description of Artificial Sequence: Synthetic oligonucleotide
  Target: LAMA2; (-) strand; PAM type: NRG; PAM sequence: TGG
atgcatgcacaggaagatat

SEQ ID NO: 80829 - DNA, 20 bp, Artificial Sequence
  Description of Artificial Sequence: Synthetic oligonucleotide
  Target: LAMA2; (-) strand; PAM type: NRG; PAM sequence: AAG
aatttatatgcatgcacagg

SEQ ID NO: 80830 - DNA, 20 bp, Artificial Sequence
  Description of Artificial Sequence: Synthetic oligonucleotide
  Target: LAMA2; (-) strand; PAM type: NRG; PAM sequence: AGG
aataatttatatgcatgcac

SEQ ID NO: 80831 - DNA, 20 bp, Artificial Sequence
  Description of Artificial Sequence: Synthetic oligonucleotide
  Target: LAMA2; (-) strand; PAM type: NRG; PAM sequence: CAG
aaataatttatatgcatgca

SEQ ID NO: 80832 - DNA, 20 bp, Artificial Sequence
  Description of Artificial Sequence: Synthetic oligonucleotide
  Target: LAMA2; (-) strand; PAM type: NRG; PAM sequence: AAG
tctgttgccatttgaattag

SEQ ID NO: 80833 - DNA, 20 bp, Artificial Sequence
  Description of Artificial Sequence: Synthetic oligonucleotide
  Target: LAMA2; (-) strand; PAM type: NRG; PAM sequence: TAG
tcctctgttgccatttgaat

SEQ ID NO: 80834 - DNA, 20 bp, Artificial Sequence
  Description of Artificial Sequence: Synthetic oligonucleotide
  Target: LAMA2; (-) strand; PAM type: NRG; PAM sequence: AGG
tctccatgcacatgcacgcc

SEQ ID NO: 80835 - DNA, 20 bp, Artificial Sequence
  Description of Artificial Sequence: Synthetic oligonucleotide
  Target: LAMA2; (-) strand; PAM type: NRG; PAM sequence: CAG
gtctccatgcacatgcacgc

SEQ ID NO: 80836 - DNA, 20 bp, Artificial Sequence
  Description of Artificial Sequence: Synthetic oligonucleotide
  Target: LAMA2; (-) strand; PAM type: NRG; PAM sequence: TAG
gatagtttgtcctgtctcct

SEQ ID NO: 80837 - DNA, 20 bp, Artificial Sequence
  Description of Artificial Sequence: Synthetic oligonucleotide
  Target: LAMA2; (-) strand; PAM type: NRG; PAM sequence: TAG
ggatactgcttagtttatga

SEQ ID NO: 80838 - DNA, 20 bp, Artificial Sequence
  Description of Artificial Sequence: Synthetic oligonucleotide
  Target: LAMA2; (-) strand; PAM type: NRG; PAM sequence: TAG
gatgtgtttgggatactgct

SEQ ID NO: 80839 - DNA, 20 bp, Artificial Sequence
  Description of Artificial Sequence: Synthetic oligonucleotide
  Target: LAMA2; (-) strand; PAM type: NRG; PAM sequence: GGG
ctatagatgatgatgtgttt

SEQ ID NO: 80840 - DNA, 20 bp, Artificial Sequence
  Description of Artificial Sequence: Synthetic oligonucleotide
  Target: LAMA2; (-) strand; PAM type: NRG; PAM sequence: TGG
cctatagatgatgatgtgtt

SEQ ID NO: 80841 - DNA, 20 bp, Artificial Sequence
  Description of Artificial Sequence: Synthetic oligonucleotide
  Target: LAMA2; (-) strand; PAM type: NRG; PAM sequence: TAG
cacctttgtaaaacagccta

SEQ ID NO: 80842 - DNA, 20 bp, Artificial Sequence
  Description of Artificial Sequence: Synthetic oligonucleotide
  Target: LAMA2; (-) strand; PAM type: NRG; PAM sequence: CAG
tgtattccacctttgtaaaa

SEQ ID NO: 80843 - DNA, 20 bp, Artificial Sequence
  Description of Artificial Sequence: Synthetic oligonucleotide
  Target: LAMA2; (-) strand; PAM type: NRG; PAM sequence: CAG
tgccttttacctgagacatt

SEQ ID NO: 80844 - DNA, 20 bp, Artificial Sequence
  Description of Artificial Sequence: Synthetic oligonucleotide
  Target: LAMA2; (-) strand; PAM type: NRG; PAM sequence: GAG
atagactttgccttttacct

SEQ ID NO: 80845 - DNA, 20 bp, Artificial Sequence
  Description of Artificial Sequence: Synthetic oligonucleotide
  Target: LAMA2; (-) strand; PAM type: NRG; PAM sequence: TAG
gtgcagcagagttggagaaa

SEQ ID NO: 80846 - DNA, 20 bp, Artificial Sequence
  Description of Artificial Sequence: Synthetic oligonucleotide
  Target: LAMA2; (-) strand; PAM type: NRG; PAM sequence: GAG
aaatgagtgcagcagagttg

SEQ ID NO: 80847 - DNA, 20 bp, Artificial Sequence
  Description of Artificial Sequence: Synthetic oligonucleotide
  Target: LAMA2; (-) strand; PAM type: NRG; PAM sequence: TGG
ataaatgagtgcagcagagt

SEQ ID NO: 80848 - DNA, 20 bp, Artificial Sequence
  Description of Artificial Sequence: Synthetic oligonucleotide
  Target: LAMA2; (-) strand; PAM type: NRG; PAM sequence: GAG
gaagataaatgagtgcagca

SEQ ID NO: 80849 - DNA, 20 bp, Artificial Sequence
  Description of Artificial Sequence: Synthetic oligonucleotide
  Target: LAMA2; (-) strand; PAM type: NRG; PAM sequence: CAG
aagaagataaatgagtgcag

SEQ ID NO: 80850 - DNA, 20 bp, Artificial Sequence
  Description of Artificial Sequence: Synthetic oligonucleotide
  Target: LAMA2; (-) strand; PAM type: NRG; PAM sequence: CAG
cttaagaagataaatgagtg

SEQ ID NO: 80851 - DNA, 20 bp, Artificial Sequence
  Description of Artificial Sequence: Synthetic oligonucleotide
  Target: LAMA2; (-) strand; PAM type: NRG; PAM sequence: GAG
aaagccttaagaagataaat

SEQ ID NO: 80852 - DNA, 20 bp, Artificial Sequence
  Description of Artificial Sequence: Synthetic oligonucleotide
  Target: LAMA2; (-) strand; PAM type: NRG; PAM sequence: AAG
ctttctgtgaaagccttaag

SEQ ID NO: 80853 - DNA, 20 bp, Artificial Sequence
  Description of Artificial Sequence: Synthetic oligonucleotide
  Target: LAMA2; (-) strand; PAM type: NRG; PAM sequence: AAG
gtgctttctgtgaaagcctt

SEQ ID NO: 80854 - DNA, 20 bp, Artificial Sequence
  Description of Artificial Sequence: Synthetic oligonucleotide
  Target: LAMA2; (-) strand; PAM type: NRG; PAM sequence: AAG
taaaacggtgctttctgtga

SEQ ID NO: 80855 - DNA, 20 bp, Artificial Sequence
  Description of Artificial Sequence: Synthetic oligonucleotide
  Target: LAMA2; (-) strand; PAM type: NRG; PAM sequence: CGG
tgaattgcctgttcataaaa

SEQ ID NO: 80856 - DNA, 20 bp, Artificial Sequence
  Description of Artificial Sequence: Synthetic oligonucleotide
  Target: LAMA2; (-) strand; PAM type: NRG; PAM sequence: GGG
agtgtctccagtcaagctct

SEQ ID NO: 80857 - DNA, 20 bp, Artificial Sequence
  Description of Artificial Sequence: Synthetic oligonucleotide
  Target: LAMA2; (-) strand; PAM type: NRG; PAM sequence: TGG
tagtgtctccagtcaagctc

SEQ ID NO: 80858 - DNA, 20 bp, Artificial Sequence
  Description of Artificial Sequence: Synthetic oligonucleotide
  Target: LAMA2; (-) strand; PAM type: NRG; PAM sequence: AAG
cctgattagtgtctccagtc

SEQ ID NO: 80859 - DNA, 20 bp, Artificial Sequence
  Description of Artificial Sequence: Synthetic oligonucleotide
  Target: LAMA2; (-) strand; PAM type: NRG; PAM sequence: CAG
tcaatcctgattagtgtctc

SEQ ID NO: 80860 - DNA, 20 bp, Artificial Sequence
  Description of Artificial Sequence: Synthetic oligonucleotide
  Target: LAMA2; (-) strand; PAM type: NRG; PAM sequence: TAG
atcaagacttcaatcctgat

SEQ ID NO: 80861 - DNA, 20 bp, Artificial Sequence
  Description of Artificial Sequence: Synthetic oligonucleotide
  Target: LAMA2; (-) strand; PAM type: NRG; PAM sequence: AAG
gggtttttatgaactgcatc

SEQ ID NO: 80862 - DNA, 20 bp, Artificial Sequence
  Description of Artificial Sequence: Synthetic oligonucleotide
  Target: LAMA2; (-) strand; PAM type: NRG; PAM sequence: GGG
tttgatgcctttttttaaat

SEQ ID NO: 80863 - DNA, 20 bp, Artificial Sequence
  Description of Artificial Sequence: Synthetic oligonucleotide
  Target: LAMA2; (-) strand; PAM type: NRG; PAM sequence: TGG
ttttgatgcctttttttaaa

SEQ ID NO: 80864 - DNA, 20 bp, Artificial Sequence
  Description of Artificial Sequence: Synthetic oligonucleotide
  Target: LAMA2; (-) strand; PAM type: NRG; PAM sequence: TGG
ggacaactttattttaaatg

SEQ ID NO: 80865 - DNA, 20 bp, Artificial Sequence
  Description of Artificial Sequence: Synthetic oligonucleotide
  Target: LAMA2; (-) strand; PAM type: NRG; PAM sequence: TGG
aacacttcattctttatata

SEQ ID NO: 80866 - DNA, 20 bp, Artificial Sequence
  Description of Artificial Sequence: Synthetic oligonucleotide
  Target: LAMA2; (-) strand; PAM type: NRG; PAM sequence: GGG
ctcttattaggatacaagct

SEQ ID NO: 80867 - DNA, 20 bp, Artificial Sequence
  Description of Artificial Sequence: Synthetic oligonucleotide
  Target: LAMA2; (-) strand; PAM type: NRG; PAM sequence: TGG
actcttattaggatacaagc

SEQ ID NO: 80868 - DNA, 20 bp, Artificial Sequence
  Description of Artificial Sequence: Synthetic oligonucleotide
  Target: LAMA2; (-) strand; PAM type: NRG; PAM sequence: AAG
cagtactcttattaggatac

SEQ ID NO: 80869 - DNA, 20 bp, Artificial Sequence
  Description of Artificial Sequence: Synthetic oligonucleotide
  Target: LAMA2; (-) strand; PAM type: NRG; PAM sequence: AGG
aacctttcagtactcttatt

SEQ ID NO: 80870 - DNA, 20 bp, Artificial Sequence
  Description of Artificial Sequence: Synthetic oligonucleotide
  Target: LAMA2; (-) strand; PAM type: NRG; PAM sequence: TAG
aaacctttcagtactcttat

SEQ ID NO: 80871 - DNA, 20 bp, Artificial Sequence
  Description of Artificial Sequence: Synthetic oligonucleotide
  Target: LAMA2; (-) strand; PAM type: NRG; PAM sequence: CAG
gctgctaatattaaaccttt

SEQ ID NO: 80872 - DNA, 20 bp, Artificial Sequence
  Description of Artificial Sequence: Synthetic oligonucleotide
  Target: LAMA2; (-) strand; PAM type: NRG; PAM sequence: AGG
tttcttcactacgtgttcac

SEQ ID NO: 80873 - DNA, 20 bp, Artificial Sequence
  Description of Artificial Sequence: Synthetic oligonucleotide
  Target: LAMA2; (-) strand; PAM type: NRG; PAM sequence: CAG
ctttcttcactacgtgttca

SEQ ID NO: 80874 - DNA, 20 bp, Artificial Sequence
  Description of Artificial Sequence: Synthetic oligonucleotide
  Target: LAMA2; (-) strand; PAM type: NRG; PAM sequence: CAG
aaggatgttaacttggttct

SEQ ID NO: 80875 - DNA, 20 bp, Artificial Sequence
  Description of Artificial Sequence: Synthetic oligonucleotide
  Target: LAMA2; (-) strand; PAM type: NRG; PAM sequence: TGG
gtggaataaggatgttaact

SEQ ID NO: 80876 - DNA, 20 bp, Artificial Sequence
  Description of Artificial Sequence: Synthetic oligonucleotide
  Target: LAMA2; (-) strand; PAM type: NRG; PAM sequence: AGG
ggtggaattagagtggaata

SEQ ID NO: 80877 - DNA, 20 bp, Artificial Sequence
  Description of Artificial Sequence: Synthetic oligonucleotide
  Target: LAMA2; (-) strand; PAM type: NRG; PAM sequence: AAG
gggtggaattagagtggaat

SEQ ID NO: 80878 - DNA, 20 bp, Artificial Sequence
  Description of Artificial Sequence: Synthetic oligonucleotide
  Target: LAMA2; (-) strand; PAM type: NRG; PAM sequence: TGG
tggcatgggtggaattagag

SEQ ID NO: 80879 - DNA, 20 bp, Artificial Sequence
  Description of Artificial Sequence: Synthetic oligonucleotide
  Target: LAMA2; (-) strand; PAM type: NRG; PAM sequence: GAG
ccatggcatgggtggaatta

SEQ ID NO: 80880 - DNA, 20 bp, Artificial Sequence
  Description of Artificial Sequence: Synthetic oligonucleotide
  Target: LAMA2; (-) strand; PAM type: NRG; PAM sequence: TAG
acccatggcatgggtggaat

SEQ ID NO: 80881 - DNA, 20 bp, Artificial Sequence
  Description of Artificial Sequence: Synthetic oligonucleotide
  Target: LAMA2; (-) strand; PAM type: NRG; PAM sequence: TGG
gtttttacccatggcatggg

SEQ ID NO: 80882 - DNA, 20 bp, Artificial Sequence
  Description of Artificial Sequence: Synthetic oligonucleotide
  Target: LAMA2; (-) strand; PAM type: NRG; PAM sequence: GGG
actgtttttacccatggcat

SEQ ID NO: 80883 - DNA, 20 bp, Artificial Sequence
  Description of Artificial Sequence: Synthetic oligonucleotide
  Target: LAMA2; (-) strand; PAM type: NRG; PAM sequence: TGG
aactgtttttacccatggca

SEQ ID NO: 80884 - DNA, 20 bp, Artificial Sequence
  Description of Artificial Sequence: Synthetic oligonucleotide
  Target: LAMA2; (-) strand; PAM type: NRG; PAM sequence: TGG
gcaagaactgtttttaccca

SEQ ID NO: 80885 - DNA, 20 bp, Artificial Sequence
  Description of Artificial Sequence: Synthetic oligonucleotide
  Target: LAMA2; (-) strand; PAM type: NRG; PAM sequence: AAG
gaggagaaactctagactgc

SEQ ID NO: 80886 - DNA, 20 bp, Artificial Sequence
  Description of Artificial Sequence: Synthetic oligonucleotide
  Target: LAMA2; (-) strand; PAM type: NRG; PAM sequence: TAG
aaccatcggaggagaaactc

SEQ ID NO: 80887 - DNA, 20 bp, Artificial Sequence
  Description of Artificial Sequence: Synthetic oligonucleotide
  Target: LAMA2; (-) strand; PAM type: NRG; PAM sequence: GAG
tgacggttaaaccatcggag

SEQ ID NO: 80888 - DNA, 20 bp, Artificial Sequence
  Description of Artificial Sequence: Synthetic oligonucleotide
  Target: LAMA2; (-) strand; PAM type: NRG; PAM sequence: AGG
tctgacggttaaaccatcgg

SEQ ID NO: 80889 - DNA, 20 bp, Artificial Sequence
  Description of Artificial Sequence: Synthetic oligonucleotide
  Target: LAMA2; (-) strand; PAM type: NRG; PAM sequence: GAG
atctgacggttaaaccatcg

SEQ ID NO: 80890 - DNA, 20 bp, Artificial Sequence
  Description of Artificial Sequence: Synthetic oligonucleotide
  Target: LAMA2; (-) strand; PAM type: NRG; PAM sequence: CGG
aaatctgacggttaaaccat

SEQ ID NO: 80891 - DNA, 20 bp, Artificial Sequence
  Description of Artificial Sequence: Synthetic oligonucleotide
  Target: LAMA2; (-) strand; PAM type: NRG; PAM sequence: CGG
cccaagatgtaaaaatctga

SEQ ID NO: 80892 - DNA, 20 bp, Artificial Sequence
  Description of Artificial Sequence: Synthetic oligonucleotide
  Target: LAMA2; (-) strand; PAM type: NRG; PAM sequence: AAG
tgccaagatggttgaatccc

SEQ ID NO: 80893 - DNA, 20 bp, Artificial Sequence
  Description of Artificial Sequence: Synthetic oligonucleotide
  Target: LAMA2; (-) strand; PAM type: NRG; PAM sequence: TGG
taagaagacgcttgccaaga

SEQ ID NO: 80894 - DNA, 20 bp, Artificial Sequence
  Description of Artificial Sequence: Synthetic oligonucleotide
  Target: LAMA2; (-) strand; PAM type: NRG; PAM sequence: AAG
gaattaagaagacgcttgcc

SEQ ID NO: 80895 - DNA, 20 bp, Artificial Sequence
  Description of Artificial Sequence: Synthetic oligonucleotide
  Target: LAMA2; (-) strand; PAM type: NRG; PAM sequence: AAG
tcacagcgttgagaattaag

SEQ ID NO: 80896 - DNA, 20 bp, Artificial Sequence
  Description of Artificial Sequence: Synthetic oligonucleotide
  Target: LAMA2; (-) strand; PAM type: NRG; PAM sequence: AAG
gactcacagcgttgagaatt

SEQ ID NO: 80897 - DNA, 20 bp, Artificial Sequence
  Description of Artificial Sequence: Synthetic oligonucleotide
  Target: LAMA2; (-) strand; PAM type: NRG; PAM sequence: GAG
gcccccagactcacagcgtt

SEQ ID NO: 80898 - DNA, 20 bp, Artificial Sequence
  Description of Artificial Sequence: Synthetic oligonucleotide
  Target: LAMA2; (-) strand; PAM type: NRG; PAM sequence: CAG
caatccagcccccagactca

SEQ ID NO: 80899 - DNA, 20 bp, Artificial Sequence
  Description of Artificial Sequence: Synthetic oligonucleotide
  Target: LAMA2; (-) strand; PAM type: NRG; PAM sequence: CAG
tgggcccacaatccagcccc

SEQ ID NO: 80900 - DNA, 20 bp, Artificial Sequence
  Description of Artificial Sequence: Synthetic oligonucleotide
  Target: LAMA2; (-) strand; PAM type: NRG; PAM sequence: CAG
agaatgctgggcccacaatc

SEQ ID NO: 80901 - DNA, 20 bp, Artificial Sequence
  Description of Artificial Sequence: Synthetic oligonucleotide
  Target: LAMA2; (-) strand; PAM type: NRG; PAM sequence: GGG
gaagctaatgtcagaatgct

SEQ ID NO: 80902 - DNA, 20 bp, Artificial Sequence
  Description of Artificial Sequence: Synthetic oligonucleotide
  Target: LAMA2; (-) strand; PAM type: NRG; PAM sequence: TGG
tgaagctaatgtcagaatgc

SEQ ID NO: 80903 - DNA, 20 bp, Artificial Sequence
  Description of Artificial Sequence: Synthetic oligonucleotide
  Target: LAMA2; (-) strand; PAM type: NRG; PAM sequence: CAG
agcagttttgaagctaatgt

SEQ ID NO: 80904 - DNA, 20 bp, Artificial Sequence
  Description of Artificial Sequence: Synthetic oligonucleotide
  Target: LAMA2; (-) strand; PAM type: NRG; PAM sequence: AAG
aatgtctacgagcagttttg

SEQ ID NO: 80905 - DNA, 20 bp, Artificial Sequence
  Description of Artificial Sequence: Synthetic oligonucleotide
  Target: LAMA2; (-) strand; PAM type: NRG; PAM sequence: CAG
cagtgatgaatgtctacgag

SEQ ID NO: 80906 - DNA, 20 bp, Artificial Sequence
  Description of Artificial Sequence: Synthetic oligonucleotide
  Target: LAMA2; (-) strand; PAM type: NRG; PAM sequence: GAG
gaacagtgatgaatgtctac

SEQ ID NO: 80907 - DNA, 20 bp, Artificial Sequence
  Description of Artificial Sequence: Synthetic oligonucleotide
  Target: LAMA2; (-) strand; PAM type: NRG; PAM sequence: CAG
attgtgtctaatcggtggaa

SEQ ID NO: 80908 - DNA, 20 bp, Artificial Sequence
  Description of Artificial Sequence: Synthetic oligonucleotide
  Target: LAMA2; (-) strand; PAM type: NRG; PAM sequence: TGG
ggccaattgtgtctaatcgg

SEQ ID NO: 80909 - DNA, 20 bp, Artificial Sequence
  Description of Artificial Sequence: Synthetic oligonucleotide
  Target: LAMA2; (-) strand; PAM type: NRG; PAM sequence: CGG
tgcggccaattgtgtctaat

SEQ ID NO: 80910 - DNA, 20 bp, Artificial Sequence
  Description of Artificial Sequence: Synthetic oligonucleotide
  Target: LAMA2; (-) strand; PAM type: NRG; PAM sequence: CGG
ttgtgtgtgtcaaacgtttg

SEQ ID NO: 80911 - DNA, 20 bp, Artificial Sequence
  Description of Artificial Sequence: Synthetic oligonucleotide
  Target: LAMA2; (-) strand; PAM type: NRG; PAM sequence: AGG
gtcatacgaagatatgcgtg

SEQ ID NO: 80912 - DNA, 20 bp, Artificial Sequence
  Description of Artificial Sequence: Synthetic oligonucleotide
  Target: LAMA2; (-) strand; PAM type: NRG; PAM sequence: GAG
cgtcatacgaagatatgcgt

SEQ ID NO: 80913 - DNA, 20 bp, Artificial Sequence
  Description of Artificial Sequence: Synthetic oligonucleotide
  Target: LAMA2; (-) strand; PAM type: NRG; PAM sequence: AAG
accgagtgatccgtcatacg

SEQ ID NO: 80914 - DNA, 20 bp, Artificial Sequence
  Description of Artificial Sequence: Synthetic oligonucleotide
  Target: LAMA2; (-) strand; PAM type: NRG; PAM sequence: GAG
ccatattataacatggtacc

SEQ ID NO: 80915 - DNA, 20 bp, Artificial Sequence
  Description of Artificial Sequence: Synthetic oligonucleotide
  Target: LAMA2; (-) strand; PAM type: NRG; PAM sequence: TGG
ccaattgccatattataaca

SEQ ID NO: 80916 - DNA, 20 bp, Artificial Sequence
  Description of Artificial Sequence: Synthetic oligonucleotide
  Target: LAMA2; (-) strand; PAM type: NRG; PAM sequence: AAG
tatcacaggagggatcgtgg

SEQ ID NO: 80917 - DNA, 20 bp, Artificial Sequence
  Description of Artificial Sequence: Synthetic oligonucleotide
  Target: LAMA2; (-) strand; PAM type: NRG; PAM sequence: TGG
ttgtatcacaggagggatcg

SEQ ID NO: 80918 - DNA, 20 bp, Artificial Sequence
  Description of Artificial Sequence: Synthetic oligonucleotide
  Target: LAMA2; (-) strand; PAM type: NRG; PAM sequence: GGG
ctcgtcgttgtatcacagga

SEQ ID NO: 80919 - DNA, 20 bp, Artificial Sequence
  Description of Artificial Sequence: Synthetic oligonucleotide
  Target: LAMA2; (-) strand; PAM type: NRG; PAM sequence: AGG
gctcgtcgttgtatcacagg

SEQ ID NO: 80920 - DNA, 20 bp, Artificial Sequence
  Description of Artificial Sequence: Synthetic oligonucleotide
  Target: LAMA2; (-) strand; PAM type: NRG; PAM sequence: GAG
ggctcgtcgttgtatcacag

SEQ ID NO: 80921 - DNA, 20 bp, Artificial Sequence
  Description of Artificial Sequence: Synthetic oligonucleotide
  Target: LAMA2; (-) strand; PAM type: NRG; PAM sequence: AGG
atggctcgtcgttgtatcac

SEQ ID NO: 80922 - DNA, 20 bp, Artificial Sequence
  Description of Artificial Sequence: Synthetic oligonucleotide
  Target: LAMA2; (-) strand; PAM type: NRG; PAM sequence: CAG
gatggctcgtcgttgtatca

SEQ ID NO: 80923 - DNA, 20 bp, Artificial Sequence
  Description of Artificial Sequence: Synthetic oligonucleotide
  Target: LAMA2; (-) strand; PAM type: NRG; PAM sequence: TGG
cggcctaatcatttgggaga

SEQ ID NO: 80924 - DNA, 20 bp, Artificial Sequence
  Description of Artificial Sequence: Synthetic oligonucleotide
  Target: LAMA2; (-) strand; PAM type: NRG; PAM sequence: GAG
gcttcggcctaatcatttgg

SEQ ID NO: 80925 - DNA, 20 bp, Artificial Sequence
  Description of Artificial Sequence: Synthetic oligonucleotide
  Target: LAMA2; (-) strand; PAM type: NRG; PAM sequence: GGG
cagcttcggcctaatcattt

SEQ ID NO: 80926 - DNA, 20 bp, Artificial Sequence
  Description of Artificial Sequence: Synthetic oligonucleotide
  Target: LAMA2; (-) strand; PAM type: NRG; PAM sequence: TGG
acagcttcggcctaatcatt

SEQ ID NO: 80927 - DNA, 20 bp, Artificial Sequence
  Description of Artificial Sequence: Synthetic oligonucleotide
  Target: LAMA2; (-) strand; PAM type: NRG; PAM sequence: CGG
atggctgatatctacagctt

SEQ ID NO: 80928 - DNA, 20 bp, Artificial Sequence
  Description of Artificial Sequence: Synthetic oligonucleotide
  Target: LAMA2; (-) strand; PAM type: NRG; PAM sequence: CAG
tacatcatggctgatatcta

SEQ ID NO: 80929 - DNA, 20 bp, Artificial Sequence
  Description of Artificial Sequence: Synthetic oligonucleotide
  Target: LAMA2; (-) strand; PAM type: NRG; PAM sequence: TGG
ccacttccagccctacatca

SEQ ID NO: 80930 - DNA, 20 bp, Artificial Sequence
  Description of Artificial Sequence: Synthetic oligonucleotide
  Target: LAMA2; (-) strand; PAM type: NRG; PAM sequence: CAG
gcctgaacaaaaaccacttc

SEQ ID NO: 80931 - DNA, 20 bp, Artificial Sequence
  Description of Artificial Sequence: Synthetic oligonucleotide
  Target: LAMA2; (-) strand; PAM type: NRG; PAM sequence: AAG
gctccagaagtgctggacga

SEQ ID NO: 80932 - DNA, 20 bp, Artificial Sequence
  Description of Artificial Sequence: Synthetic oligonucleotide
  Target: LAMA2; (-) strand; PAM type: NRG; PAM sequence: TGG
ctacctggctccagaagtgc

SEQ ID NO: 80933 - DNA, 20 bp, Artificial Sequence
  Description of Artificial Sequence: Synthetic oligonucleotide
  Target: LAMA2; (-) strand; PAM type: NRG; PAM sequence: AAG
caaacgctacctggctccag

SEQ ID NO: 80934 - DNA, 20 bp, Artificial Sequence
  Description of Artificial Sequence: Synthetic oligonucleotide
  Target: LAMA2; (-) strand; PAM type: NRG; PAM sequence: CAG
caccaaacgctacctggctc

SEQ ID NO: 80935 - DNA, 20 bp, Artificial Sequence
  Description of Artificial Sequence: Synthetic oligonucleotide
  Target: LAMA2; (-) strand; PAM type: NRG; PAM sequence: TGG
ggtgggcaccaaacgctacc

SEQ ID NO: 80936 - DNA, 20 bp, Artificial Sequence
  Description of Artificial Sequence: Synthetic oligonucleotide
  Target: LAMA2; (-) strand; PAM type: NRG; PAM sequence: GGG
gtgcccttgaataccagggt

SEQ ID NO: 80937 - DNA, 20 bp, Artificial Sequence
  Description of Artificial Sequence: Synthetic oligonucleotide
  Target: LAMA2; (-) strand; PAM type: NRG; PAM sequence: TGG
tgtgcccttgaataccaggg

SEQ ID NO: 80938 - DNA, 20 bp, Artificial Sequence
  Description of Artificial Sequence: Synthetic oligonucleotide
  Target: LAMA2; (-) strand; PAM type: NRG; PAM sequence: GGG
tgatgtgcccttgaatacca

SEQ ID NO: 80939 - DNA, 20 bp, Artificial Sequence
  Description of Artificial Sequence: Synthetic oligonucleotide
  Target: LAMA2; (-) strand; PAM type: NRG; PAM sequence: AGG
ttgatgtgcccttgaatacc

SEQ ID NO: 80940 - DNA, 20 bp, Artificial Sequence
  Description of Artificial Sequence: Synthetic oligonucleotide
  Target: LAMA2; (-) strand; PAM type: NRG; PAM sequence: CAG
gttgatgtgcccttgaatac

SEQ ID NO: 80941 - DNA, 20 bp, Artificial Sequence
  Description of Artificial Sequence: Synthetic oligonucleotide
  Target: LAMA2; (-) strand; PAM type: NRG; PAM sequence: AAG
attcaacagtgacacaaatg

SEQ ID NO: 80942 - DNA, 20 bp, Artificial Sequence
  Description of Artificial Sequence: Synthetic oligonucleotide
  Target: LAMA2; (-) strand; PAM type: NRG; PAM sequence: CAG
ggccttgctgttaaattcaa

SEQ ID NO: 80943 - DNA, 20 bp, Artificial Sequence
  Description of Artificial Sequence: Synthetic oligonucleotide
  Target: LAMA2; (-) strand; PAM type: NRG; PAM sequence: GGG
agttgctgcattgctgacct

SEQ ID NO: 80944 - DNA, 20 bp, Artificial Sequence
  Description of Artificial Sequence: Synthetic oligonucleotide
  Target: LAMA2; (-) strand; PAM type: NRG; PAM sequence: TGG
gagttgctgcattgctgacc

SEQ ID NO: 80945 - DNA, 20 bp, Artificial Sequence
  Description of Artificial Sequence: Synthetic oligonucleotide
  Target: LAMA2; (-) strand; PAM type: NRG; PAM sequence: GAG
atcctcatcaagaaaaatgg

SEQ ID NO: 80946 - DNA, 20 bp, Artificial Sequence
  Description of Artificial Sequence: Synthetic oligonucleotide
  Target: LAMA2; (-) strand; PAM type: NRG; PAM sequence: GGG
acatcctcatcaagaaaaat

SEQ ID NO: 80947 - DNA, 20 bp, Artificial Sequence
  Description of Artificial Sequence: Synthetic oligonucleotide
  Target: LAMA2; (-) strand; PAM type: NRG; PAM sequence: TGG
aacatcctcatcaagaaaaa

SEQ ID NO: 80948 - DNA, 20 bp, Artificial Sequence
  Description of Artificial Sequence: Synthetic oligonucleotide
  Target: LAMA2; (-) strand; PAM type: NRG; PAM sequence: AAG
agagcaaaaacatcctcatc

SEQ ID NO: 80949 - DNA, 20 bp, Artificial Sequence
  Description of Artificial Sequence: Synthetic oligonucleotide
  Target: LAMA2; (-) strand; PAM type: NRG; PAM sequence: GAG
attgctcatcgagacctaaa

SEQ ID NO: 80950 - DNA, 20 bp, Artificial Sequence
  Description of Artificial Sequence: Synthetic oligonucleotide
  Target: LAMA2; (-) strand; PAM type: NRG; PAM sequence: AAG
caattgctcatcgagaccta

SEQ ID NO: 80951 - DNA, 20 bp, Artificial Sequence
  Description of Artificial Sequence: Synthetic oligonucleotide
  Target: LAMA2; (-) strand; PAM type: NRG; PAM sequence: GAG
aaagcccgcaattgctcatc

SEQ ID NO: 80952 - DNA, 20 bp, Artificial Sequence
  Description of Artificial Sequence: Synthetic oligonucleotide
  Target: LAMA2; (-) strand; PAM type: NRG; PAM sequence: AAG
aaacgtatggcacccaagga

SEQ ID NO: 80953 - DNA, 20 bp, Artificial Sequence
  Description of Artificial Sequence: Synthetic oligonucleotide
  Target: LAMA2; (-) strand; PAM type: NRG; PAM sequence: AGG
acagaaacgtatggcaccca

SEQ ID NO: 80954 - DNA, 20 bp, Artificial Sequence
  Description of Artificial Sequence: Synthetic oligonucleotide
  Target: LAMA2; (-) strand; PAM type: NRG; PAM sequence: AAG
cacagaaacgtatggcaccc

SEQ ID NO: 80955 - DNA, 20 bp, Artificial Sequence
  Description of Artificial Sequence: Synthetic oligonucleotide
  Target: LAMA2; (-) strand; PAM type: NRG; PAM sequence: TGG
cacctgcacacagaaacgta

SEQ ID NO: 80956 - DNA, 20 bp, Artificial Sequence
  Description of Artificial Sequence: Synthetic oligonucleotide
  Target: LAMA2; (-) strand; PAM type: NRG; PAM sequence: CAG
tggtctgtgccacctgcaca

SEQ ID NO: 80957 - DNA, 20 bp, Artificial Sequence
  Description of Artificial Sequence: Synthetic oligonucleotide
  Target: LAMA2; (-) strand; PAM type: NRG; PAM sequence: TGG
ttggcttattcagctgcctg

SEQ ID NO: 80958 - DNA, 20 bp, Artificial Sequence
  Description of Artificial Sequence: Synthetic oligonucleotide
  Target: LAMA2; (-) strand; PAM type: NRG; PAM sequence: CAG
cctgcttaaattggcttatt

SEQ ID NO: 80959 - DNA, 20 bp, Artificial Sequence
  Description of Artificial Sequence: Synthetic oligonucleotide
  Target: LAMA2; (-) strand; PAM type: NRG; PAM sequence: TGG
caccagagccctgcttaaat

SEQ ID NO: 80960 - DNA, 20 bp, Artificial Sequence
  Description of Artificial Sequence: Synthetic oligonucleotide
  Target: LAMA2; (-) strand; PAM type: NRG; PAM sequence: GAG
atgtgctacgctggacacca

SEQ ID NO: 80961 - DNA, 20 bp, Artificial Sequence
  Description of Artificial Sequence: Synthetic oligonucleotide
  Target: LAMA2; (-) strand; PAM type: NRG; PAM sequence: CAG
aaatgtgctacgctggacac

SEQ ID NO: 80962 - DNA, 20 bp, Artificial Sequence
  Description of Artificial Sequence: Synthetic oligonucleotide
  Target: LAMA2; (-) strand; PAM type: NRG; PAM sequence: TGG
cttcctgaaatgtgctacgc

SEQ ID NO: 80963 - DNA, 20 bp, Artificial Sequence
  Description of Artificial Sequence: Synthetic oligonucleotide
  Target: LAMA2; (-) strand; PAM type: NRG; PAM sequence: TGG
attactgattaccatgaaaa

SEQ ID NO: 80964 - DNA, 20 bp, Artificial Sequence
  Description of Artificial Sequence: Synthetic oligonucleotide
  Target: LAMA2; (-) strand; PAM type: NRG; PAM sequence: CAG
aaggtacaggttcctggact

SEQ ID NO: 80965 - DNA, 20 bp, Artificial Sequence
  Description of Artificial Sequence: Synthetic oligonucleotide
  Target: LAMA2; (-) strand; PAM type: NRG; PAM sequence: TGG
atattaaaggtacaggttcc

SEQ ID NO: 80966 - DNA, 20 bp, Artificial Sequence
  Description of Artificial Sequence: Synthetic oligonucleotide
  Target: LAMA2; (-) strand; PAM type: NRG; PAM sequence: AGG
gcggcagatattaaaggtac

SEQ ID NO: 80967 - DNA, 20 bp, Artificial Sequence
  Description of Artificial Sequence: Synthetic oligonucleotide
  Target: LAMA2; (-) strand; PAM type: NRG; PAM sequence: CAG
agcggcagatattaaaggta

SEQ ID NO: 80968 - DNA, 20 bp, Artificial Sequence
  Description of Artificial Sequence: Synthetic oligonucleotide
  Target: LAMA2; (-) strand; PAM type: NRG; PAM sequence: AGG
ttcatagcggcagatattaa

SEQ ID NO: 80969 - DNA, 20 bp, Artificial Sequence
  Description of Artificial Sequence: Synthetic oligonucleotide
  Target: LAMA2; (-) strand; PAM type: NRG; PAM sequence: AAG
tttcatagcggcagatatta

SEQ ID NO: 80970 - DNA, 20 bp, Artificial Sequence
  Description of Artificial Sequence: Synthetic oligonucleotide
  Target: LAMA2; (-) strand; PAM type: NRG; PAM sequence: CAG
catacttggtttcatagcgg

SEQ ID NO: 80971 - DNA, 20 bp, Artificial Sequence
  Description of Artificial Sequence: Synthetic oligonucleotide
  Target: LAMA2; (-) strand; PAM type: NRG; PAM sequence: CGG
aaacatacttggtttcatag

SEQ ID NO: 80972 - DNA, 20 bp, Artificial Sequence
  Description of Artificial Sequence: Synthetic oligonucleotide
  Target: LAMA2; (-) strand; PAM type: NRG; PAM sequence: TAG
tgaaaacatacttggtttca

SEQ ID NO: 80973 - DNA, 20 bp, Artificial Sequence
  Description of Artificial Sequence: Synthetic oligonucleotide
  Target: LAMA2; (-) strand; PAM type: NRG; PAM sequence: TGG
atgcgccatgaaaacatact

SEQ ID NO: 80974 - DNA, 20 bp, Artificial Sequence
  Description of Artificial Sequence: Synthetic oligonucleotide
  Target: LAMA2; (-) strand; PAM type: NRG; PAM sequence: CAG
agccagctggtttcgagaaa

SEQ ID NO: 80975 - DNA, 20 bp, Artificial Sequence
  Description of Artificial Sequence: Synthetic oligonucleotide
  Target: LAMA2; (-) strand; PAM type: NRG; PAM sequence: GAG
tgaagaagccagctggtttc

SEQ ID NO: 80976 - DNA, 20 bp, Artificial Sequence
  Description of Artificial Sequence: Synthetic oligonucleotide
  Target: LAMA2; (-) strand; PAM type: NRG; PAM sequence: TGG
ttaccactgaagaagccagc

SEQ ID NO: 80977 - DNA, 20 bp, Artificial Sequence
  Description of Artificial Sequence: Synthetic oligonucleotide
  Target: LAMA2; (-) strand; PAM type: NRG; PAM sequence: CAG
ttctttaccactgaagaagc

SEQ ID NO: 80978 - DNA, 20 bp, Artificial Sequence
  Description of Artificial Sequence: Synthetic oligonucleotide
  Target: LAMA2; (-) strand; PAM type: NRG; PAM sequence: AAG
agtattctttaccactgaag

SEQ ID NO: 80979 - DNA, 20 bp, Artificial Sequence
  Description of Artificial Sequence: Synthetic oligonucleotide
  Target: LAMA2; (-) strand; PAM type: NRG; PAM sequence: AAG
gaaagtattctttaccactg

SEQ ID NO: 80980 - DNA, 20 bp, Artificial Sequence
  Description of Artificial Sequence: Synthetic oligonucleotide
  Target: LAMA2; (-) strand; PAM type: NRG; PAM sequence: AAG
tggcgaaagagtggcggtga

SEQ ID NO: 80981 - DNA, 20 bp, Artificial Sequence
  Description of Artificial Sequence: Synthetic oligonucleotide
  Target: LAMA2; (-) strand; PAM type: NRG; PAM sequence: CGG
atggcatggcgaaagagtgg

SEQ ID NO: 80982 - DNA, 20 bp, Artificial Sequence
  Description of Artificial Sequence: Synthetic oligonucleotide
  Target: LAMA2; (-) strand; PAM type: NRG; PAM sequence: TGG
caaatggcatggcgaaagag

SEQ ID NO: 80983 - DNA, 20 bp, Artificial Sequence
  Description of Artificial Sequence: Synthetic oligonucleotide
  Target: LAMA2; (-) strand; PAM type: NRG; PAM sequence: GAG
gggcaaatggcatggcgaaa

SEQ ID NO: 80984 - DNA, 20 bp, Artificial Sequence
  Description of Artificial Sequence: Synthetic oligonucleotide
  Target: LAMA2; (-) strand; PAM type: NRG; PAM sequence: AAG
atgggcaaatggcatggcga

SEQ ID NO: 80985 - DNA, 20 bp, Artificial Sequence
  Description of Artificial Sequence: Synthetic oligonucleotide
  Target: LAMA2; (-) strand; PAM type: NRG; PAM sequence: TGG
gtacggatgggcaaatggca

SEQ ID NO: 80986 - DNA, 20 bp, Artificial Sequence
  Description of Artificial Sequence: Synthetic oligonucleotide
  Target: LAMA2; (-) strand; PAM type: NRG; PAM sequence: TGG
gagaagtacggatgggcaaa

SEQ ID NO: 80987 - DNA, 20 bp, Artificial Sequence
  Description of Artificial Sequence: Synthetic oligonucleotide
  Target: LAMA2; (-) strand; PAM type: NRG; PAM sequence: GGG
cgatatggagaagtacggat

SEQ ID NO: 80988 - DNA, 20 bp, Artificial Sequence
  Description of Artificial Sequence: Synthetic oligonucleotide
  Target: LAMA2; (-) strand; PAM type: NRG; PAM sequence: TGG
ccgatatggagaagtacgga

SEQ ID NO: 80989 - DNA, 20 bp, Artificial Sequence
  Description of Artificial Sequence: Synthetic oligonucleotide
  Target: LAMA2; (-) strand; PAM type: NRG; PAM sequence: CGG
aaggccgatatggagaagta

SEQ ID NO: 80990 - DNA, 20 bp, Artificial Sequence
  Description of Artificial Sequence: Synthetic oligonucleotide
  Target: LAMA2; (-) strand; PAM type: NRG; PAM sequence: AAG
tggtaaaggccgatatggag

SEQ ID NO: 80991 - DNA, 20 bp, Artificial Sequence
  Description of Artificial Sequence: Synthetic oligonucleotide
  Target: LAMA2; (-) strand; PAM type: NRG; PAM sequence: GAG
agttggtaaaggccgatatg

SEQ ID NO: 80992 - DNA, 20 bp, Artificial Sequence
  Description of Artificial Sequence: Synthetic oligonucleotide
  Target: LAMA2; (-) strand; PAM type: NRG; PAM sequence: TGG
caagttggtaaaggccgata

SEQ ID NO: 80993 - DNA, 20 bp, Artificial Sequence
  Description of Artificial Sequence: Synthetic oligonucleotide
  Target: LAMA2; (-) strand; PAM type: NRG; PAM sequence: AGG
atggtccggcaagttggtaa

SEQ ID NO: 80994 - DNA, 20 bp, Artificial Sequence
  Description of Artificial Sequence: Synthetic oligonucleotide
  Target: LAMA2; (-) strand; PAM type: NRG; PAM sequence: AAG
gatggtccggcaagttggta

SEQ ID NO: 80995 - DNA, 20 bp, Artificial Sequence
  Description of Artificial Sequence: Synthetic oligonucleotide
  Target: LAMA2; (-) strand; PAM type: NRG; PAM sequence: TGG
attcagatggtccggcaagt

SEQ ID NO: 80996 - DNA, 20 bp, Artificial Sequence
  Description of Artificial Sequence: Synthetic oligonucleotide
  Target: LAMA2; (-) strand; PAM type: NRG; PAM sequence: AAG
acagattcagatggtccggc

SEQ ID NO: 80997 - DNA, 20 bp, Artificial Sequence
  Description of Artificial Sequence: Synthetic oligonucleotide
  Target: LAMA2; (-) strand; PAM type: NRG; PAM sequence: CGG
ccaaacagattcagatggtc

SEQ ID NO: 80998 - DNA, 20 bp, Artificial Sequence
  Description of Artificial Sequence: Synthetic oligonucleotide
  Target: LAMA2; (-) strand; PAM type: NRG; PAM sequence: TGG
tattgccaaacagattcaga

SEQ ID NO: 80999 - DNA, 20 bp, Artificial Sequence
  Description of Artificial Sequence: Synthetic oligonucleotide
  Target: LAMA2; (-) strand; PAM type: NRG; PAM sequence: CAG
gaactattgccaaacagatt

SEQ ID NO: 81000 - DNA, 20 bp, Artificial Sequence
  Description of Artificial Sequence: Synthetic oligonucleotide
  Target: LAMA2; (-) strand; PAM type: NRG; PAM sequence: CAG
ttcagcgaactattgccaaa

SEQ ID NO: 81001 - DNA, 20 bp, Artificial Sequence
  Description of Artificial Sequence: Synthetic oligonucleotide
  Target: LAMA2; (-) strand; PAM type: NRG; PAM sequence: CAG
ctggactacctttattggtt

SEQ ID NO: 81002 - DNA, 20 bp, Artificial Sequence
  Description of Artificial Sequence: Synthetic oligonucleotide
  Target: LAMA2; (-) strand; PAM type: NRG; PAM sequence: TGG
tgggtctggactacctttat

SEQ ID NO: 81003 - DNA, 20 bp, Artificial Sequence
  Description of Artificial Sequence: Synthetic oligonucleotide
  Target: LAMA2; (-) strand; PAM type: NRG; PAM sequence: TGG
caaagttctggtagtgggtc

SEQ ID NO: 81004 - DNA, 20 bp, Artificial Sequence
  Description of Artificial Sequence: Synthetic oligonucleotide
  Target: LAMA2; (-) strand; PAM type: NRG; PAM sequence: GGG
agtcacaaagttctggtagt

SEQ ID NO: 81005 - DNA, 20 bp, Artificial Sequence
  Description of Artificial Sequence: Synthetic oligonucleotide
  Target: LAMA2; (-) strand; PAM type: NRG; PAM sequence: TGG
cagtcacaaagttctggtag

SEQ ID NO: 81006 - DNA, 20 bp, Artificial Sequence
  Description of Artificial Sequence: Synthetic oligonucleotide
  Target: LAMA2; (-) strand; PAM type: NRG; PAM sequence: TAG
gaccagtcacaaagttctgg

SEQ ID NO: 81007 - DNA, 20 bp, Artificial Sequence
  Description of Artificial Sequence: Synthetic oligonucleotide
  Target: LAMA2; (-) strand; PAM type: NRG; PAM sequence: TGG
attgaccagtcacaaagttc

SEQ ID NO: 81008 - DNA, 20 bp, Artificial Sequence
  Description of Artificial Sequence: Synthetic oligonucleotide
  Target: LAMA2; (-) strand; PAM type: NRG; PAM sequence: AAG
gaccttattgaccagtcaca

SEQ ID NO: 81009 - DNA, 20 bp, Artificial Sequence
  Description of Artificial Sequence: Synthetic oligonucleotide
  Target: LAMA2; (-) strand; PAM type: NRG; PAM sequence: CAG
cactaaaagaccttattgac

SEQ ID NO: 81010 - DNA, 20 bp, Artificial Sequence
  Description of Artificial Sequence: Synthetic oligonucleotide
  Target: LAMA2; (-) strand; PAM type: NRG; PAM sequence: AAG
tccagttggaaaatcactaa

SEQ ID NO: 81011 - DNA, 20 bp, Artificial Sequence
  Description of Artificial Sequence: Synthetic oligonucleotide
  Target: LAMA2; (-) strand; PAM type: NRG; PAM sequence: TGG
gatgaagcatttattccagt

SEQ ID NO: 81012 - DNA, 20 bp, Artificial Sequence
  Description of Artificial Sequence: Synthetic oligonucleotide
  Target: LAMA2; (-) strand; PAM type: NRG; PAM sequence: CAG
acaggatgaagcatttattc

SEQ ID NO: 81013 - DNA, 20 bp, Artificial Sequence
  Description of Artificial Sequence: Synthetic oligonucleotide
  Target: LAMA2; (-) strand; PAM type: NRG; PAM sequence: AAG
tcgtgatttggaacaggatg

SEQ ID NO: 81014 - DNA, 20 bp, Artificial Sequence
  Description of Artificial Sequence: Synthetic oligonucleotide
  Target: LAMA2; (-) strand; PAM type: NRG; PAM sequence: AGG
ttacaatcgtgatttggaac

SEQ ID NO: 81015 - DNA, 20 bp, Artificial Sequence
  Description of Artificial Sequence: Synthetic oligonucleotide
  Target: LAMA2; (-) strand; PAM type: NRG; PAM sequence: CAG
gttacaatcgtgatttggaa

SEQ ID NO: 81016 - DNA, 20 bp, Artificial Sequence
  Description of Artificial Sequence: Synthetic oligonucleotide
  Target: LAMA2; (-) strand; PAM type: NRG; PAM sequence: TGG
acgtcgttacaatcgtgatt

SEQ ID NO: 81017 - DNA, 20 bp, Artificial Sequence
  Description of Artificial Sequence: Synthetic oligonucleotide
  Target: LAMA2; (-) strand; PAM type: NRG; PAM sequence: CAG
tattgcaagagcatctcaag

SEQ ID NO: 81018 - DNA, 20 bp, Artificial Sequence
  Description of Artificial Sequence: Synthetic oligonucleotide
  Target: LAMA2; (-) strand; PAM type: NRG; PAM sequence: AAG
cattattgcaagagcatctc

SEQ ID NO: 81019 - DNA, 20 bp, Artificial Sequence
  Description of Artificial Sequence: Synthetic oligonucleotide
  Target: LAMA2; (-) strand; PAM type: NRG; PAM sequence: GAG
tgttacaaacattattgcaa

SEQ ID NO: 81020 - DNA, 20 bp, Artificial Sequence
  Description of Artificial Sequence: Synthetic oligonucleotide
  Target: LAMA2; (-) strand; PAM type: NRG; PAM sequence: AAG
tttgttacaaacattattgc

SEQ ID NO: 81021 - DNA, 20 bp, Artificial Sequence
  Description of Artificial Sequence: Synthetic oligonucleotide
  Target: LAMA2; (-) strand; PAM type: NRG; PAM sequence: CAG
attgctatgatcatcttctc

SEQ ID NO: 81022 - DNA, 20 bp, Artificial Sequence
  Description of Artificial Sequence: Synthetic oligonucleotide
  Target: LAMA2; (-) strand; PAM type: NRG; PAM sequence: TGG
gctggttttgctcatttcta

SEQ ID NO: 81023 - DNA, 20 bp, Artificial Sequence
  Description of Artificial Sequence: Synthetic oligonucleotide
  Target: LAMA2; (-) strand; PAM type: NRG; PAM sequence: TGG
tgatggcagcattcgatggc

SEQ ID NO: 81024 - DNA, 20 bp, Artificial Sequence
  Description of Artificial Sequence: Synthetic oligonucleotide
  Target: LAMA2; (-) strand; PAM type: NRG; PAM sequence: TGG
tttttgatggcagcattcga

SEQ ID NO: 81025 - DNA, 20 bp, Artificial Sequence
  Description of Artificial Sequence: Synthetic oligonucleotide
  Target: LAMA2; (-) strand; PAM type: NRG; PAM sequence: CAG
ataggtccgttttttgatgg

SEQ ID NO: 81026 - DNA, 20 bp, Artificial Sequence
  Description of Artificial Sequence: Synthetic oligonucleotide
  Target: LAMA2; (-) strand; PAM type: NRG; PAM sequence: TGG
gtcataggtccgttttttga

SEQ ID NO: 81027 - DNA, 20 bp, Artificial Sequence
  Description of Artificial Sequence: Synthetic oligonucleotide
  Target: LAMA2; (-) strand; PAM type: NRG; PAM sequence: AGG
cacatgccccctgttgtcat

SEQ ID NO: 81028 - DNA, 20 bp, Artificial Sequence
  Description of Artificial Sequence: Synthetic oligonucleotide
  Target: LAMA2; (-) strand; PAM type: NRG; PAM sequence: TAG
ccacatgccccctgttgtca

SEQ ID NO: 81029 - DNA, 20 bp, Artificial Sequence
  Description of Artificial Sequence: Synthetic oligonucleotide
  Target: LAMA2; (-) strand; PAM type: NRG; PAM sequence: CAG
gtcggaccaatttatgtaac

SEQ ID NO: 81030 - DNA, 20 bp, Artificial Sequence
  Description of Artificial Sequence: Synthetic oligonucleotide
  Target: LAMA2; (-) strand; PAM type: NRG; PAM sequence: CGG
gccggacaatagaatgttgt

SEQ ID NO: 81031 - DNA, 20 bp, Artificial Sequence
  Description of Artificial Sequence: Synthetic oligonucleotide
  Target: LAMA2; (-) strand; PAM type: NRG; PAM sequence: TAG
agcccagctacgccggacaa

SEQ ID NO: 81032 - DNA, 20 bp, Artificial Sequence
  Description of Artificial Sequence: Synthetic oligonucleotide
  Target: LAMA2; (-) strand; PAM type: NRG; PAM sequence: CGG
ctccaaaagcccagctacgc

SEQ ID NO: 81033 - DNA, 20 bp, Artificial Sequence
  Description of Artificial Sequence: Synthetic oligonucleotide
  Target: LAMA2; (-) strand; PAM type: NRG; PAM sequence: CAG
gcaaagattctccaaaagcc

SEQ ID NO: 81034 - DNA, 20 bp, Artificial Sequence
  Description of Artificial Sequence: Synthetic oligonucleotide
  Target: LAMA2; (-) strand; PAM type: NRG; PAM sequence: AAG
tcagtgcaaagattctccaa

SEQ ID NO: 81035 - DNA, 20 bp, Artificial Sequence
  Description of Artificial Sequence: Synthetic oligonucleotide
  Target: LAMA2; (-) strand; PAM type: NRG; PAM sequence: AAG
aggatctgattttcagtgca

SEQ ID NO: 81036 - DNA, 20 bp, Artificial Sequence
  Description of Artificial Sequence: Synthetic oligonucleotide
  Target: LAMA2; (-) strand; PAM type: NRG; PAM sequence: CAG
aatatgaaggatctgatttt

SEQ ID NO: 81037 - DNA, 20 bp, Artificial Sequence
  Description of Artificial Sequence: Synthetic oligonucleotide
  Target: LAMA2; (-) strand; PAM type: NRG; PAM sequence: AGG
tcagggtgtatgaaatatga

SEQ ID NO: 81038 - DNA, 20 bp, Artificial Sequence
  Description of Artificial Sequence: Synthetic oligonucleotide
  Target: LAMA2; (-) strand; PAM type: NRG; PAM sequence: AAG
ttcagggtgtatgaaatatg

SEQ ID NO: 81039 - DNA, 20 bp, Artificial Sequence
  Description of Artificial Sequence: Synthetic oligonucleotide
  Target: LAMA2; (-) strand; PAM type: NRG; PAM sequence: GGG
gagaaaccacattagcttca

SEQ ID NO: 81040 - DNA, 20 bp, Artificial Sequence
  Description of Artificial Sequence: Synthetic oligonucleotide
  Target: LAMA2; (-) strand; PAM type: NRG; PAM sequence: AGG
ggagaaaccacattagcttc

SEQ ID NO: 81041 - DNA, 20 bp, Artificial Sequence
  Description of Artificial Sequence: Synthetic oligonucleotide
  Target: LAMA2; (-) strand; PAM type: NRG; PAM sequence: CAG
gggagaaaccacattagctt

SEQ ID NO: 81042 - DNA, 20 bp, Artificial Sequence
  Description of Artificial Sequence: Synthetic oligonucleotide
  Target: LAMA2; (-) strand; PAM type: NRG; PAM sequence: TAG
tgaccagggagaaaccacat

SEQ ID NO: 81043 - DNA, 20 bp, Artificial Sequence
  Description of Artificial Sequence: Synthetic oligonucleotide
  Target: LAMA2; (-) strand; PAM type: NRG; PAM sequence: GAG
catagaagaagatgaccagg

SEQ ID NO: 81044 - DNA, 20 bp, Artificial Sequence
  Description of Artificial Sequence: Synthetic oligonucleotide
  Target: LAMA2; (-) strand; PAM type: NRG; PAM sequence: GGG
atcatagaagaagatgacca

SEQ ID NO: 81045 - DNA, 20 bp, Artificial Sequence
  Description of Artificial Sequence: Synthetic oligonucleotide
  Target: LAMA2; (-) strand; PAM type: NRG; PAM sequence: AGG
catcatagaagaagatgacc

SEQ ID NO: 81046 - DNA, 20 bp, Artificial Sequence
  Description of Artificial Sequence: Synthetic oligonucleotide
  Target: LAMA2; (-) strand; PAM type: NRG; PAM sequence: CAG
ccatcatagaagaagatgac

SEQ ID NO: 81047 - DNA, 20 bp, Artificial Sequence
  Description of Artificial Sequence: Synthetic oligonucleotide
  Target: LAMA2; (-) strand; PAM type: NRG; PAM sequence: AAG
ttgctttgccatcatagaag

SEQ ID NO: 81048 - DNA, 20 bp, Artificial Sequence
  Description of Artificial Sequence: Synthetic oligonucleotide
  Target: LAMA2; (-) strand; PAM type: NRG; PAM sequence: AAG
acgttgctttgccatcatag

SEQ ID NO: 81049 - DNA, 20 bp, Artificial Sequence
  Description of Artificial Sequence: Synthetic oligonucleotide
  Target: LAMA2; (-) strand; PAM type: NRG; PAM sequence: TAG
tggacgttgctttgccatca

SEQ ID NO: 81050 - DNA, 20 bp, Artificial Sequence
  Description of Artificial Sequence: Synthetic oligonucleotide
  Target: LAMA2; (-) strand; PAM type: NRG; PAM sequence: TGG
aataacacatgcataactaa

SEQ ID NO: 81051 - DNA, 20 bp, Artificial Sequence
  Description of Artificial Sequence: Synthetic oligonucleotide
  Target: LAMA2; (-) strand; PAM type: NRG; PAM sequence: CAG
ctattgctgagggcactgcc

SEQ ID NO: 81052 - DNA, 20 bp, Artificial Sequence
  Description of Artificial Sequence: Synthetic oligonucleotide
  Target: LAMA2; (-) strand; PAM type: NRG; PAM sequence: GGG
ttttcaagtgctattgctga

SEQ ID NO: 81053 - DNA, 20 bp, Artificial Sequence
  Description of Artificial Sequence: Synthetic oligonucleotide
  Target: LAMA2; (-) strand; PAM type: NRG; PAM sequence: AGG
tttttcaagtgctattgctg

SEQ ID NO: 81054 - DNA, 20 bp, Artificial Sequence
  Description of Artificial Sequence: Synthetic oligonucleotide
  Target: LAMA2; (-) strand; PAM type: NRG; PAM sequence: GAG
ttttttcaagtgctattgct

SEQ ID NO: 81055 - DNA, 20 bp, Artificial Sequence
  Description of Artificial Sequence: Synthetic oligonucleotide
  Target: LAMA2; (-) strand; PAM type: NRG; PAM sequence: AAG
aggataccttgccttttttc

SEQ ID NO: 81056 - DNA, 20 bp, Artificial Sequence
  Description of Artificial Sequence: Synthetic oligonucleotide
  Target: LAMA2; (-) strand; PAM type: NRG; PAM sequence: AGG
tggagtaaccttagcaccag

SEQ ID NO: 81057 - DNA, 20 bp, Artificial Sequence
  Description of Artificial Sequence: Synthetic oligonucleotide
  Target: LAMA2; (-) strand; PAM type: NRG; PAM sequence: GAG
atggagtaaccttagcacca

SEQ ID NO: 81058 - DNA, 20 bp, Artificial Sequence
  Description of Artificial Sequence: Synthetic oligonucleotide
  Target: LAMA2; (-) strand; PAM type: NRG; PAM sequence: CAG
aaatggagtaaccttagcac

SEQ ID NO: 81059 - DNA, 20 bp, Artificial Sequence
  Description of Artificial Sequence: Synthetic oligonucleotide
  Target: LAMA2; (-) strand; PAM type: NRG; PAM sequence: TAG
gtcagaaaatggagtaacct

SEQ ID NO: 81060 - DNA, 20 bp, Artificial Sequence
  Description of Artificial Sequence: Synthetic oligonucleotide
  Target: LAMA2; (-) strand; PAM type: NRG; PAM sequence: GAG
ccagaaaaagtcagaaaatg

SEQ ID NO: 81061 - DNA, 20 bp, Artificial Sequence
  Description of Artificial Sequence: Synthetic oligonucleotide
  Target: LAMA2; (-) strand; PAM type: NRG; PAM sequence: TGG
gaccagaaaaagtcagaaaa

SEQ ID NO: 81062 - DNA, 20 bp, Artificial Sequence
  Description of Artificial Sequence: Synthetic oligonucleotide
  Target: LAMA2; (-) strand; PAM type: NRG; PAM sequence: CAG
agactccgaccagaaaaagt

SEQ ID NO: 81063 - DNA, 20 bp, Artificial Sequence
  Description of Artificial Sequence: Synthetic oligonucleotide
  Target: LAMA2; (-) strand; PAM type: NRG; PAM sequence: AAG
aatcagactccgaccagaaa

SEQ ID NO: 81064 - DNA, 20 bp, Artificial Sequence
  Description of Artificial Sequence: Synthetic oligonucleotide
  Target: LAMA2; (-) strand; PAM type: NRG; PAM sequence: CAG
ggatgaaatcagactccgac

SEQ ID NO: 81065 - DNA, 20 bp, Artificial Sequence
  Description of Artificial Sequence: Synthetic oligonucleotide
  Target: LAMA2; (-) strand; PAM type: NRG; PAM sequence: CAG
ccacggcactgggatgaaat

SEQ ID NO: 81066 - DNA, 20 bp, Artificial Sequence
  Description of Artificial Sequence: Synthetic oligonucleotide
  Target: LAMA2; (-) strand; PAM type: NRG; PAM sequence: GGG
atagtatgctccacggcact

SEQ ID NO: 81067 - DNA, 20 bp, Artificial Sequence
  Description of Artificial Sequence: Synthetic oligonucleotide
  Target: LAMA2; (-) strand; PAM type: NRG; PAM sequence: TGG
gatagtatgctccacggcac

SEQ ID NO: 81068 - DNA, 20 bp, Artificial Sequence
  Description of Artificial Sequence: Synthetic oligonucleotide
  Target: LAMA2; (-) strand; PAM type: NRG; PAM sequence: CGG
aatctggatagtatgctcca

SEQ ID NO: 81069 - DNA, 20 bp, Artificial Sequence
  Description of Artificial Sequence: Synthetic oligonucleotide
  Target: LAMA2; (-) strand; PAM type: NRG; PAM sequence: TAG
gttcaaggacagaatctgga

SEQ ID NO: 81070 - DNA, 20 bp, Artificial Sequence
  Description of Artificial Sequence: Synthetic oligonucleotide
  Target: LAMA2; (-) strand; PAM type: NRG; PAM sequence: TGG
tcgtgttcaaggacagaatc

SEQ ID NO: 81071 - DNA, 20 bp, Artificial Sequence
  Description of Artificial Sequence: Synthetic oligonucleotide
  Target: LAMA2; (-) strand; PAM type: NRG; PAM sequence: CAG
tcatttctcgtgttcaagga

SEQ ID NO: 81072 - DNA, 20 bp, Artificial Sequence
  Description of Artificial Sequence: Synthetic oligonucleotide
  Target: LAMA2; (-) strand; PAM type: NRG; PAM sequence: AGG
ttcatcatttctcgtgttca

SEQ ID NO: 81073 - DNA, 20 bp, Artificial Sequence
  Description of Artificial Sequence: Synthetic oligonucleotide
  Target: LAMA2; (-) strand; PAM type: NRG; PAM sequence: AAG
gttcatcatttctcgtgttc

SEQ ID NO: 81074 - DNA, 20 bp, Artificial Sequence
  Description of Artificial Sequence: Synthetic oligonucleotide
  Target: LAMA2; (-) strand; PAM type: NRG; PAM sequence: GAG
catttacatcagattattgg

SEQ ID NO: 81075 - DNA, 20 bp, Artificial Sequence
  Description of Artificial Sequence: Synthetic oligonucleotide
  Target: LAMA2; (-) strand; PAM type: NRG; PAM sequence: GGG
tacatttacatcagattatt

SEQ ID NO: 81076 - DNA, 20 bp, Artificial Sequence
  Description of Artificial Sequence: Synthetic oligonucleotide
  Target: LAMA2; (-) strand; PAM type: NRG; PAM sequence: TGG
atacatttacatcagattat

SEQ ID NO: 81077 - DNA, 20 bp, Artificial Sequence
  Description of Artificial Sequence: Synthetic oligonucleotide
  Target: LAMA2; (-) strand; PAM type: NRG; PAM sequence: CAG
actcagctatacatttacat

SEQ ID NO: 81078 - DNA, 20 bp, Artificial Sequence
  Description of Artificial Sequence: Synthetic oligonucleotide
  Target: LAMA2; (-) strand; PAM type: NRG; PAM sequence: CAG
attacaattgaacaatgact

SEQ ID NO: 81079 - DNA, 20 bp, Artificial Sequence
  Description of Artificial Sequence: Synthetic oligonucleotide
  Target: LAMA2; (-) strand; PAM type: NRG; PAM sequence: AGG
tactaaaggtgacagtacac

SEQ ID NO: 81080 - DNA, 20 bp, Artificial Sequence
  Description of Artificial Sequence: Synthetic oligonucleotide
  Target: LAMA2; (-) strand; PAM type: NRG; PAM sequence: CAG
ttactaaaggtgacagtaca

SEQ ID NO: 81081 - DNA, 20 bp, Artificial Sequence
  Description of Artificial Sequence: Synthetic oligonucleotide
  Target: LAMA2; (-) strand; PAM type: NRG; PAM sequence: CAG
agaccaattactaaaggtga

SEQ ID NO: 81082 - DNA, 20 bp, Artificial Sequence
  Description of Artificial Sequence: Synthetic oligonucleotide
  Target: LAMA2; (-) strand; PAM type: NRG; PAM sequence: AGG
gtagcaagaccaattactaa

SEQ ID NO: 81083 - DNA, 20 bp, Artificial Sequence
  Description of Artificial Sequence: Synthetic oligonucleotide
  Target: LAMA2; (-) strand; PAM type: NRG; PAM sequence: AAG
agtagcaagaccaattacta

SEQ ID NO: 81084 - DNA, 20 bp, Artificial Sequence
  Description of Artificial Sequence: Synthetic oligonucleotide
  Target: LAMA2; (-) strand; PAM type: NRG; PAM sequence: AAG
atttaaattggtgaagtagc

SEQ ID NO: 81085 - DNA, 20 bp, Artificial Sequence
  Description of Artificial Sequence: Synthetic oligonucleotide
  Target: LAMA2; (-) strand; PAM type: NRG; PAM sequence: TAG
agtcatttaaattggtgaag

SEQ ID NO: 81086 - DNA, 20 bp, Artificial Sequence
  Description of Artificial Sequence: Synthetic oligonucleotide
  Target: LAMA2; (-) strand; PAM type: NRG; PAM sequence: AAG
gacagtcatttaaattggtg

SEQ ID NO: 81087 - DNA, 20 bp, Artificial Sequence
  Description of Artificial Sequence: Synthetic oligonucleotide
  Target: LAMA2; (-) strand; PAM type: NRG; PAM sequence: TGG
tgaatgacagtcatttaaat

SEQ ID NO: 81088 - DNA, 20 bp, Artificial Sequence
  Description of Artificial Sequence: Synthetic oligonucleotide
  Target: LAMA2; (-) strand; PAM type: NRG; PAM sequence: CAG
aagaaaatctcactgaatga

SEQ ID NO: 81089 - DNA, 20 bp, Artificial Sequence
  Description of Artificial Sequence: Synthetic oligonucleotide
  Target: LAMA2; (-) strand; PAM type: NRG; PAM sequence: AAG
aagtgcttgcgatcttttac

SEQ ID NO: 81090 - DNA, 20 bp, Artificial Sequence
  Description of Artificial Sequence: Synthetic oligonucleotide
  Target: LAMA2; (-) strand; PAM type: NRG; PAM sequence: AAG
tgggagttgaagtcattgtc

SEQ ID NO: 81091 - DNA, 20 bp, Artificial Sequence
  Description of Artificial Sequence: Synthetic oligonucleotide
  Target: LAMA2; (-) strand; PAM type: NRG; PAM sequence: AAG
taagaaagcagtgggagttg

SEQ ID NO: 81092 - DNA, 20 bp, Artificial Sequence
  Description of Artificial Sequence: Synthetic oligonucleotide
  Target: LAMA2; (-) strand; PAM type: NRG; PAM sequence: GAG
gagtcgtaagaaagcagtgg

SEQ ID NO: 81093 - DNA, 20 bp, Artificial Sequence
  Description of Artificial Sequence: Synthetic oligonucleotide
  Target: LAMA2; (-) strand; PAM type: NRG; PAM sequence: GGG
aggagtcgtaagaaagcagt

SEQ ID NO: 81094 - DNA, 20 bp, Artificial Sequence
  Description of Artificial Sequence: Synthetic oligonucleotide
  Target: LAMA2; (-) strand; PAM type: NRG; PAM sequence: TGG
gaggagtcgtaagaaagcag

SEQ ID NO: 81095 - DNA, 20 bp, Artificial Sequence
  Description of Artificial Sequence: Synthetic oligonucleotide
  Target: LAMA2; (-) strand; PAM type: NRG; PAM sequence: CAG
ttggaggagtcgtaagaaag

SEQ ID NO: 81096 - DNA, 20 bp, Artificial Sequence
  Description of Artificial Sequence: Synthetic oligonucleotide
  Target: LAMA2; (-) strand; PAM type: NRG; PAM sequence: AAG
atcttggaggagtcgtaaga

SEQ ID NO: 81097 - DNA, 20 bp, Artificial Sequence
  Description of Artificial Sequence: Synthetic oligonucleotide
  Target: LAMA2; (-) strand; PAM type: NRG; PAM sequence: AAG
ccacatcttggaggagtcgt

SEQ ID NO: 81098 - DNA, 20 bp, Artificial Sequence
  Description of Artificial Sequence: Synthetic oligonucleotide
  Target: LAMA2; (-) strand; PAM type: NRG; PAM sequence: GAG
tatctagccacatcttggag

SEQ ID NO: 81099 - DNA, 20 bp, Artificial Sequence
  Description of Artificial Sequence: Synthetic oligonucleotide
  Target: LAMA2; (-) strand; PAM type: NRG; PAM sequence: AGG
tttatctagccacatcttgg

SEQ ID NO: 81100 - DNA, 20 bp, Artificial Sequence
  Description of Artificial Sequence: Synthetic oligonucleotide
  Target: LAMA2; (-) strand; PAM type: NRG; PAM sequence: GAG
ttttatctagccacatcttg

SEQ ID NO: 81101 - DNA, 20 bp, Artificial Sequence
  Description of Artificial Sequence: Synthetic oligonucleotide
  Target: LAMA2; (-) strand; PAM type: NRG; PAM sequence: TGG
agttttatctagccacatct

SEQ ID NO: 81102 - DNA, 20 bp, Artificial Sequence
  Description of Artificial Sequence: Synthetic oligonucleotide
  Target: LAMA2; (-) strand; PAM type: NRG; PAM sequence: TAG
atcggaagtacagttttatc

SEQ ID NO: 81103 - DNA, 20 bp, Artificial Sequence
  Description of Artificial Sequence: Synthetic oligonucleotide
  Target: LAMA2; (-) strand; PAM type: NRG; PAM sequence: CAG
tttggagaaaatcggaagta

SEQ ID NO: 81104 - DNA, 20 bp, Artificial Sequence
  Description of Artificial Sequence: Synthetic oligonucleotide
  Target: LAMA2; (-) strand; PAM type: NRG; PAM sequence: AAG
agctgtttggagaaaatcgg

SEQ ID NO: 81105 - DNA, 20 bp, Artificial Sequence
  Description of Artificial Sequence: Synthetic oligonucleotide
  Target: LAMA2; (-) strand; PAM type: NRG; PAM sequence: CGG
caaagctgtttggagaaaat

SEQ ID NO: 81106 - DNA, 20 bp, Artificial Sequence
  Description of Artificial Sequence: Synthetic oligonucleotide
  Target: LAMA2; (-) strand; PAM type: NRG; PAM sequence: GAG
gcataggtcaaagctgtttg

SEQ ID NO: 81107 - DNA, 20 bp, Artificial Sequence
  Description of Artificial Sequence: Synthetic oligonucleotide
  Target: LAMA2; (-) strand; PAM type: NRG; PAM sequence: TGG
aagcataggtcaaagctgtt

SEQ ID NO: 81108 - DNA, 20 bp, Artificial Sequence
  Description of Artificial Sequence: Synthetic oligonucleotide
  Target: LAMA2; (-) strand; PAM type: NRG; PAM sequence: AAG
tgagatggaagcataggtca

SEQ ID NO: 81109 - DNA, 20 bp, Artificial Sequence
  Description of Artificial Sequence: Synthetic oligonucleotide
  Target: LAMA2; (-) strand; PAM type: NRG; PAM sequence: AGG
aattcatgagatggaagcat

SEQ ID NO: 81110 - DNA, 20 bp, Artificial Sequence
  Description of Artificial Sequence: Synthetic oligonucleotide
  Target: LAMA2; (-) strand; PAM type: NRG; PAM sequence: TAG
gaattcatgagatggaagca

SEQ ID NO: 81111 - DNA, 20 bp, Artificial Sequence
  Description of Artificial Sequence: Synthetic oligonucleotide
  Target: LAMA2; (-) strand; PAM type: NRG; PAM sequence: AAG
tcttggaattcatgagatgg

SEQ ID NO: 81112 - DNA, 20 bp, Artificial Sequence
  Description of Artificial Sequence: Synthetic oligonucleotide
  Target: LAMA2; (-) strand; PAM type: NRG; PAM sequence: TGG
ctgtcttggaattcatgaga

SEQ ID NO: 81113 - DNA, 20 bp, Artificial Sequence
  Description of Artificial Sequence: Synthetic oligonucleotide
  Target: LAMA2; (-) strand; PAM type: NRG; PAM sequence: GAG
aatactgtcttggaattcat

SEQ ID NO: 81114 - DNA, 20 bp, Artificial Sequence
  Description of Artificial Sequence: Synthetic oligonucleotide
  Target: LAMA2; (-) strand; PAM type: NRG; PAM sequence: TGG
gcatcagtttaatactgtct

SEQ ID NO: 81115 - DNA, 20 bp, Artificial Sequence
  Description of Artificial Sequence: Synthetic oligonucleotide
  Target: LAMA2; (-) strand; PAM type: NRG; PAM sequence: CAG
cgacttatgaaaatatgcat

SEQ ID NO: 81116 - DNA, 20 bp, Artificial Sequence
  Description of Artificial Sequence: Synthetic oligonucleotide
  Target: LAMA2; (-) strand; PAM type: NRG; PAM sequence: GAG
agcccgggaagagacgccgg

SEQ ID NO: 81117 - DNA, 20 bp, Artificial Sequence
  Description of Artificial Sequence: Synthetic oligonucleotide
  Target: LAMA2; (-) strand; PAM type: NRG; PAM sequence: GGG
ggagcccgggaagagacgcc

SEQ ID NO: 81118 - DNA, 20 bp, Artificial Sequence
  Description of Artificial Sequence: Synthetic oligonucleotide
  Target: LAMA2; (-) strand; PAM type: NRG; PAM sequence: CGG
aggagcccgggaagagacgc

SEQ ID NO: 81119 - DNA, 20 bp, Artificial Sequence
  Description of Artificial Sequence: Synthetic oligonucleotide
  Target: LAMA2; (-) strand; PAM type: NRG; PAM sequence: GAG
gctggcaaggagcccgggaa

SEQ ID NO: 81120 - DNA, 20 bp, Artificial Sequence
  Description of Artificial Sequence: Synthetic oligonucleotide
  Target: LAMA2; (-) strand; PAM type: NRG; PAM sequence: AAG
acgctggcaaggagcccggg

SEQ ID NO: 81121 - DNA, 20 bp, Artificial Sequence
  Description of Artificial Sequence: Synthetic oligonucleotide
  Target: LAMA2; (-) strand; PAM type: NRG; PAM sequence: GGG
ggcacgctggcaaggagccc

SEQ ID NO: 81122 - DNA, 20 bp, Artificial Sequence
  Description of Artificial Sequence: Synthetic oligonucleotide
  Target: LAMA2; (-) strand; PAM type: NRG; PAM sequence: CGG
cggcacgctggcaaggagcc

SEQ ID NO: 81123 - DNA, 20 bp, Artificial Sequence
  Description of Artificial Sequence: Synthetic oligonucleotide
  Target: LAMA2; (-) strand; PAM type: NRG; PAM sequence: GAG
cgcctcggcacgctggcaag

SEQ ID NO: 81124 - DNA, 20 bp, Artificial Sequence
  Description of Artificial Sequence: Synthetic oligonucleotide
  Target: LAMA2; (-) strand; PAM type: NRG; PAM sequence: AGG
tgcgcctcggcacgctggca

SEQ ID NO: 81125 - DNA, 20 bp, Artificial Sequence
  Description of Artificial Sequence: Synthetic oligonucleotide
  Target: LAMA2; (-) strand; PAM type: NRG; PAM sequence: AAG
ctgcgcctcggcacgctggc

SEQ ID NO: 81126 - DNA, 20 bp, Artificial Sequence
  Description of Artificial Sequence: Synthetic oligonucleotide
  Target: LAMA2; (-) strand; PAM type: NRG; PAM sequence: TGG
ctgcctgcgcctcggcacgc

SEQ ID NO: 81127 - DNA, 20 bp, Artificial Sequence
  Description of Artificial Sequence: Synthetic oligonucleotide
  Target: LAMA2; (-) strand; PAM type: NRG; PAM sequence: CGG
ccatcaccctgcctgcgcct

SEQ ID NO: 81128 - DNA, 20 bp, Artificial Sequence
  Description of Artificial Sequence: Synthetic oligonucleotide
  Target: LAMA2; (-) strand; PAM type: NRG; PAM sequence: GGG
ccggcagatcctcccggccg

SEQ ID NO: 81129 - DNA, 20 bp, Artificial Sequence
  Description of Artificial Sequence: Synthetic oligonucleotide
  Target: LAMA2; (-) strand; PAM type: NRG; PAM sequence: GGG
cccggcagatcctcccggcc

SEQ ID NO: 81130 - DNA, 20 bp, Artificial Sequence
  Description of Artificial Sequence: Synthetic oligonucleotide
  Target: LAMA2; (-) strand; PAM type: NRG; PAM sequence: CGG
ccccggcagatcctcccggc

SEQ ID NO: 81131 - DNA, 20 bp, Artificial Sequence
  Description of Artificial Sequence: Synthetic oligonucleotide
  Target: LAMA2; (-) strand; PAM type: NRG; PAM sequence: CGG
ctctccccggcagatcctcc

SEQ ID NO: 81132 - DNA, 20 bp, Artificial Sequence
  Description of Artificial Sequence: Synthetic oligonucleotide
  Target: LAMA2; (-) strand; PAM type: NRG; PAM sequence: CAG
aggaaagccgctctccccgg

SEQ ID NO: 81133 - DNA, 20 bp, Artificial Sequence
  Description of Artificial Sequence: Synthetic oligonucleotide
  Target: LAMA2; (-) strand; PAM type: NRG; PAM sequence: CGG
atgaggaaagccgctctccc

SEQ ID NO: 81134 - DNA, 20 bp, Artificial Sequence
  Description of Artificial Sequence: Synthetic oligonucleotide
  Target: LAMA2; (-) strand; PAM type: NRG; PAM sequence: AAG
tgctcccgaatcgatgagga

SEQ ID NO: 81135 - DNA, 20 bp, Artificial Sequence
  Description of Artificial Sequence: Synthetic oligonucleotide
  Target: LAMA2; (-) strand; PAM type: NRG; PAM sequence: AGG
tgggtgctcccgaatcgatg

SEQ ID NO: 81136 - DNA, 20 bp, Artificial Sequence
  Description of Artificial Sequence: Synthetic oligonucleotide
  Target: LAMA2; (-) strand; PAM type: NRG; PAM sequence: GAG
gtgggtgctcccgaatcgat

SEQ ID NO: 81137 - DNA, 20 bp, Artificial Sequence
  Description of Artificial Sequence: Synthetic oligonucleotide
  Target: LAMA2; (-) strand; PAM type: NRG; PAM sequence: GGG
ataaagaaattaagcatggt

SEQ ID NO: 81138 - DNA, 20 bp, Artificial Sequence
  Description of Artificial Sequence: Synthetic oligonucleotide
  Target: LAMA2; (-) strand; PAM type: NRG; PAM sequence: TGG
aataaagaaattaagcatgg

SEQ ID NO: 81139 - DNA, 20 bp, Artificial Sequence
  Description of Artificial Sequence: Synthetic oligonucleotide
  Target: LAMA2; (-) strand; PAM type: NRG; PAM sequence: TGG
attaataaagaaattaagca

SEQ ID NO: 81140 - DNA, 20 bp, Artificial Sequence
  Description of Artificial Sequence: Synthetic oligonucleotide
  Target: LAMA2; (-) strand; PAM type: NRG; PAM sequence: AAG
ctagaattaataaagaaatt

SEQ ID NO: 81141 - DNA, 20 bp, Artificial Sequence
  Description of Artificial Sequence: Synthetic oligonucleotide
  Target: LAMA2; (-) strand; PAM type: NRG; PAM sequence: AAG
taaaactactagaattaata

SEQ ID NO: 81142 - DNA, 20 bp, Artificial Sequence
  Description of Artificial Sequence: Synthetic oligonucleotide
  Target: LAMA2; (-) strand; PAM type: NRG; PAM sequence: TAG
agcatgtagtttaaaactac

SEQ ID NO: 81143 - DNA, 20 bp, Artificial Sequence
  Description of Artificial Sequence: Synthetic oligonucleotide
  Target: LAMA2; (-) strand; PAM type: NRG; PAM sequence: TAG
gtgtacgtttctaaagcatg

SEQ ID NO: 81144 - DNA, 20 bp, Artificial Sequence
  Description of Artificial Sequence: Synthetic oligonucleotide
  Target: LAMA2; (-) strand; PAM type: NRG; PAM sequence: AAG
tgtttatgtgtacgtttcta

SEQ ID NO: 81145 - DNA, 20 bp, Artificial Sequence
  Description of Artificial Sequence: Synthetic oligonucleotide
  Target: LAMA2; (-) strand; PAM type: NRG; PAM sequence: AGG
gtaagcctgaatgtacttgc

SEQ ID NO: 81146 - DNA, 20 bp, Artificial Sequence
  Description of Artificial Sequence: Synthetic oligonucleotide
  Target: LAMA2; (-) strand; PAM type: NRG; PAM sequence: CAG
agtaagcctgaatgtacttg

SEQ ID NO: 81147 - DNA, 20 bp, Artificial Sequence
  Description of Artificial Sequence: Synthetic oligonucleotide
  Target: LAMA2; (-) strand; PAM type: NRG; PAM sequence: AAG
aagattgcaaaggaagaagt

SEQ ID NO: 81148 - DNA, 20 bp, Artificial Sequence
  Description of Artificial Sequence: Synthetic oligonucleotide
  Target: LAMA2; (-) strand; PAM type: NRG; PAM sequence: AAG
cataaagattgcaaaggaag

SEQ ID NO: 81149 - DNA, 20 bp, Artificial Sequence
  Description of Artificial Sequence: Synthetic oligonucleotide
  Target: LAMA2; (-) strand; PAM type: NRG; PAM sequence: AAG
tggcataaagattgcaaagg

SEQ ID NO: 81150 - DNA, 20 bp, Artificial Sequence
  Description of Artificial Sequence: Synthetic oligonucleotide
  Target: LAMA2; (-) strand; PAM type: NRG; PAM sequence: AGG
ccttggcataaagattgcaa

SEQ ID NO: 81151 - DNA, 20 bp, Artificial Sequence
  Description of Artificial Sequence: Synthetic oligonucleotide
  Target: LAMA2; (-) strand; PAM type: NRG; PAM sequence: AAG
accttggcataaagattgca

SEQ ID NO: 81152 - DNA, 20 bp, Artificial Sequence
  Description of Artificial Sequence: Synthetic oligonucleotide
  Target: LAMA2; (-) strand; PAM type: NRG; PAM sequence: AAG
ttttagttaaccttggcata

SEQ ID NO: 81153 - DNA, 20 bp, Artificial Sequence
  Description of Artificial Sequence: Synthetic oligonucleotide
  Target: LAMA2; (-) strand; PAM type: NRG; PAM sequence: TGG
tcgccatttttagttaacct

SEQ ID NO: 81154 - DNA, 20 bp, Artificial Sequence
  Description of Artificial Sequence: Synthetic oligonucleotide
  Target: LAMA2; (-) strand; PAM type: NRG; PAM sequence: TAG
atgtcagctctcgccatttt

SEQ ID NO: 81155 - DNA, 20 bp, Artificial Sequence
  Description of Artificial Sequence: Synthetic oligonucleotide
  Target: LAMA2; (-) strand; PAM type: NRG; PAM sequence: CAG
tcagaacaaagtgaagatgt

SEQ ID NO: 81156 - DNA, 20 bp, Artificial Sequence
  Description of Artificial Sequence: Synthetic oligonucleotide
  Target: LAMA2; (-) strand; PAM type: NRG; PAM sequence: AAG
ttaaaattcagaacaaagtg

SEQ ID NO: 81157 - DNA, 20 bp, Artificial Sequence
  Description of Artificial Sequence: Synthetic oligonucleotide
  Target: LAMA2; (-) strand; PAM type: NRG; PAM sequence: AAG
tccctttaaaattcagaaca

SEQ ID NO: 81158 - DNA, 20 bp, Artificial Sequence
  Description of Artificial Sequence: Synthetic oligonucleotide
  Target: LAMA2; (-) strand; PAM type: NRG; PAM sequence: CAG
ttaggtttccctttaaaatt

SEQ ID NO: 81159 - DNA, 20 bp, Artificial Sequence
  Description of Artificial Sequence: Synthetic oligonucleotide
  Target: LAMA2; (-) strand; PAM type: NRG; PAM sequence: AGG
atactccatagtgaaatatt

SEQ ID NO: 81160 - DNA, 20 bp, Artificial Sequence
  Description of Artificial Sequence: Synthetic oligonucleotide
  Target: LAMA2; (-) strand; PAM type: NRG; PAM sequence: TAG
catactccatagtgaaatat

SEQ ID NO: 81161 - DNA, 20 bp, Artificial Sequence
  Description of Artificial Sequence: Synthetic oligonucleotide
  Target: LAMA2; (-) strand; PAM type: NRG; PAM sequence: TAG
gcagttcacatcatactcca

SEQ ID NO: 81162 - DNA, 20 bp, Artificial Sequence
  Description of Artificial Sequence: Synthetic oligonucleotide
  Target: LAMA2; (-) strand; PAM type: NRG; PAM sequence: CAG
ggtgtccataaaaaaatatg

SEQ ID NO: 81163 - DNA, 20 bp, Artificial Sequence
  Description of Artificial Sequence: Synthetic oligonucleotide
  Target: LAMA2; (-) strand; PAM type: NRG; PAM sequence: GGG
gacctactgaatctgataaa

SEQ ID NO: 81164 - DNA, 20 bp, Artificial Sequence
  Description of Artificial Sequence: Synthetic oligonucleotide
  Target: LAMA2; (-) strand; PAM type: NRG; PAM sequence: AGG
ggacctactgaatctgataa

SEQ ID NO: 81165 - DNA, 20 bp, Artificial Sequence
  Description of Artificial Sequence: Synthetic oligonucleotide
  Target: LAMA2; (-) strand; PAM type: NRG; PAM sequence: AAG
gggacctactgaatctgata

SEQ ID NO: 81166 - DNA, 20 bp, Artificial Sequence
  Description of Artificial Sequence: Synthetic oligonucleotide
  Target: LAMA2; (-) strand; PAM type: NRG; PAM sequence: GGG
ctgcaacttaggaatagtag

SEQ ID NO: 81167 - DNA, 20 bp, Artificial Sequence
  Description of Artificial Sequence: Synthetic oligonucleotide
  Target: LAMA2; (-) strand; PAM type: NRG; PAM sequence: GGG
tctgcaacttaggaatagta

SEQ ID NO: 81168 - DNA, 20 bp, Artificial Sequence
  Description of Artificial Sequence: Synthetic oligonucleotide
  Target: LAMA2; (-) strand; PAM type: NRG; PAM sequence: AGG
ctctgcaacttaggaatagt

SEQ ID NO: 81169 - DNA, 20 bp, Artificial Sequence
  Description of Artificial Sequence: Synthetic oligonucleotide
  Target: LAMA2; (-) strand; PAM type: NRG; PAM sequence: TAG
tctctgcaacttaggaatag

SEQ ID NO: 81170 - DNA, 20 bp, Artificial Sequence
  Description of Artificial Sequence: Synthetic oligonucleotide
  Target: LAMA2; (-) strand; PAM type: NRG; PAM sequence: TAG
aactctctgcaacttaggaa

SEQ ID NO: 81171 - DNA, 20 bp, Artificial Sequence
  Description of Artificial Sequence: Synthetic oligonucleotide
  Target: LAMA2; (-) strand; PAM type: NRG; PAM sequence: AGG
ataaaaactctctgcaactt

SEQ ID NO: 81172 - DNA, 20 bp, Artificial Sequence
  Description of Artificial Sequence: Synthetic oligonucleotide
  Target: LAMA2; (-) strand; PAM type: NRG; PAM sequence: TAG
tataaaaactctctgcaact

SEQ ID NO: 81173 - DNA, 20 bp, Artificial Sequence
  Description of Artificial Sequence: Synthetic oligonucleotide
  Target: LAMA2; (-) strand; PAM type: NRG; PAM sequence: AAG
tcatttcagtaggtttcgaa

SEQ ID NO: 81174 - DNA, 20 bp, Artificial Sequence
  Description of Artificial Sequence: Synthetic oligonucleotide
  Target: LAMA2; (-) strand; PAM type: NRG; PAM sequence: AGG
atccttatgttcatttcagt

SEQ ID NO: 81175 - DNA, 20 bp, Artificial Sequence
  Description of Artificial Sequence: Synthetic oligonucleotide
  Target: LAMA2; (-) strand; PAM type: NRG; PAM sequence: TAG
aatccttatgttcatttcag

SEQ ID NO: 81176 - DNA, 20 bp, Artificial Sequence
  Description of Artificial Sequence: Synthetic oligonucleotide
  Target: LAMA2; (-) strand; PAM type: NRG; PAM sequence: CAG
gaaaatccttatgttcattt

SEQ ID NO: 81177 - DNA, 20 bp, Artificial Sequence
  Description of Artificial Sequence: Synthetic oligonucleotide
  Target: LAMA2; (-) strand; PAM type: NRG; PAM sequence: GAG
tccccgttaacagaataaag

SEQ ID NO: 81178 - DNA, 20 bp, Artificial Sequence
  Description of Artificial Sequence: Synthetic oligonucleotide
  Target: LAMA2; (-) strand; PAM type: NRG; PAM sequence: AGG
tgtccccgttaacagaataa

SEQ ID NO: 81179 - DNA, 20 bp, Artificial Sequence
  Description of Artificial Sequence: Synthetic oligonucleotide
  Target: LAMA2; (-) strand; PAM type: NRG; PAM sequence: AAG
ttgtccccgttaacagaata

SEQ ID NO: 81180 - DNA, 20 bp, Artificial Sequence
  Description of Artificial Sequence: Synthetic oligonucleotide
  Target: LAMA2; (-) strand; PAM type: NRG; PAM sequence: CAG
gcataaattgtccccgttaa

SEQ ID NO: 81181 - DNA, 20 bp, Artificial Sequence
  Description of Artificial Sequence: Synthetic oligonucleotide
  Target: LAMA2; (-) strand; PAM type: NRG; PAM sequence: AAG
gagattaattcacaaatgca

SEQ ID NO: 81182 - DNA, 20 bp, Artificial Sequence
  Description of Artificial Sequence: Synthetic oligonucleotide
  Target: LAMA2; (-) strand; PAM type: NRG; PAM sequence: GAG
taatatatcataaccaaatg

SEQ ID NO: 81183 - DNA, 20 bp, Artificial Sequence
  Description of Artificial Sequence: Synthetic oligonucleotide
  Target: LAMA2; (-) strand; PAM type: NRG; PAM sequence: TGG
gataatatatcataaccaaa

SEQ ID NO: 81184 - DNA, 20 bp, Artificial Sequence
  Description of Artificial Sequence: Synthetic oligonucleotide
  Target: LAMA2; (-) strand; PAM type: NRG; PAM sequence: TAG
caaaattcttaaccaaacat

SEQ ID NO: 81185 - DNA, 20 bp, Artificial Sequence
  Description of Artificial Sequence: Synthetic oligonucleotide
  Target: LAMA2; (-) strand; PAM type: NRG; PAM sequence: AGG
agaccaatatattttatgag

SEQ ID NO: 81186 - DNA, 20 bp, Artificial Sequence
  Description of Artificial Sequence: Synthetic oligonucleotide
  Target: LAMA2; (-) strand; PAM type: NRG; PAM sequence: GAG
tagaccaatatattttatga

SEQ ID NO: 81187 - DNA, 20 bp, Artificial Sequence
  Description of Artificial Sequence: Synthetic oligonucleotide
  Target: LAMA2; (-) strand; PAM type: NRG; PAM sequence: GAG
tatagaccaatatattttat

SEQ ID NO: 81188 - DNA, 20 bp, Artificial Sequence
  Description of Artificial Sequence: Synthetic oligonucleotide
  Target: LAMA2; (-) strand; PAM type: NRG; PAM sequence: TAG
attataagaaaataaaatta

SEQ ID NO: 81189 - DNA, 20 bp, Artificial Sequence
  Description of Artificial Sequence: Synthetic oligonucleotide
  Target: LAMA2; (-) strand; PAM type: NRG; PAM sequence: AAG
aaacctgacaaaaacattat

SEQ ID NO: 81190 - DNA, 20 bp, Artificial Sequence
  Description of Artificial Sequence: Synthetic oligonucleotide
  Target: LAMA2; (-) strand; PAM type: NRG; PAM sequence: CAG
ccccgatcatttgttgatgc

SEQ ID NO: 81191 - DNA, 20 bp, Artificial Sequence
  Description of Artificial Sequence: Synthetic oligonucleotide
  Target: LAMA2; (-) strand; PAM type: NRG; PAM sequence: AAG
actttagaaaacagaagagg

SEQ ID NO: 81192 - DNA, 20 bp, Artificial Sequence
  Description of Artificial Sequence: Synthetic oligonucleotide
  Target: LAMA2; (-) strand; PAM type: NRG; PAM sequence: AGG
gttactttagaaaacagaag

SEQ ID NO: 81193 - DNA, 20 bp, Artificial Sequence
  Description of Artificial Sequence: Synthetic oligonucleotide
  Target: LAMA2; (-) strand; PAM type: NRG; PAM sequence: GAG
agttactttagaaaacagaa

SEQ ID NO: 81194 - DNA, 20 bp, Artificial Sequence
  Description of Artificial Sequence: Synthetic oligonucleotide
  Target: LAMA2; (-) strand; PAM type: NRG; PAM sequence: AAG
gaagttactttagaaaacag

SEQ ID NO: 81195 - DNA, 20 bp, Artificial Sequence
  Description of Artificial Sequence: Synthetic oligonucleotide
  Target: LAMA2; (-) strand; PAM type: NRG; PAM sequence: CAG
tctgaagttactttagaaaa

SEQ ID NO: 81196 - DNA, 20 bp, Artificial Sequence
  Description of Artificial Sequence: Synthetic oligonucleotide
  Target: LAMA2; (-) strand; PAM type: NRG; PAM sequence: TAG
attttaatctgaagttactt

SEQ ID NO: 81197 - DNA, 20 bp, Artificial Sequence
  Description of Artificial Sequence: Synthetic oligonucleotide
  Target: LAMA2; (-) strand; PAM type: NRG; PAM sequence: AAG
agagaattaattttaatctg

SEQ ID NO: 81198 - DNA, 20 bp, Artificial Sequence
  Description of Artificial Sequence: Synthetic oligonucleotide
  Target: LAMA2; (-) strand; PAM type: NRG; PAM sequence: GAG
attttatcaagcattttaaa

SEQ ID NO: 81199 - DNA, 20 bp, Artificial Sequence
  Description of Artificial Sequence: Synthetic oligonucleotide
  Target: LAMA2; (-) strand; PAM type: NRG; PAM sequence: AAG
aaattttatcaagcatttta

SEQ ID NO: 81200 - DNA, 20 bp, Artificial Sequence
  Description of Artificial Sequence: Synthetic oligonucleotide
  Target: LAMA2; (-) strand; PAM type: NRG; PAM sequence: AAG
tttcactaggaaattttatc

SEQ ID NO: 81201 - DNA, 20 bp, Artificial Sequence
  Description of Artificial Sequence: Synthetic oligonucleotide
  Target: LAMA2; (-) strand; PAM type: NRG; PAM sequence: AGG
gagactcagatagtttcact

SEQ ID NO: 81202 - DNA, 20 bp, Artificial Sequence
  Description of Artificial Sequence: Synthetic oligonucleotide
  Target: LAMA2; (-) strand; PAM type: NRG; PAM sequence: TAG
agagactcagatagtttcac

SEQ ID NO: 81203 - DNA, 20 bp, Artificial Sequence
  Description of Artificial Sequence: Synthetic oligonucleotide
  Target: LAMA2; (-) strand; PAM type: NRG; PAM sequence: TAG
aagaaaactagagactcaga

SEQ ID NO: 81204 - DNA, 20 bp, Artificial Sequence
  Description of Artificial Sequence: Synthetic oligonucleotide
  Target: LAMA2; (-) strand; PAM type: NRG; PAM sequence: CAG
cacgaagaaaactagagact

SEQ ID NO: 81205 - DNA, 20 bp, Artificial Sequence
  Description of Artificial Sequence: Synthetic oligonucleotide
  Target: LAMA2; (-) strand; PAM type: NRG; PAM sequence: GAG
acaatgcacgaagaaaacta

SEQ ID NO: 81206 - DNA, 20 bp, Artificial Sequence
  Description of Artificial Sequence: Synthetic oligonucleotide
  Target: LAMA2; (-) strand; PAM type: NRG; PAM sequence: TAG
atacaatgcacgaagaaaac

SEQ ID NO: 81207 - DNA, 20 bp, Artificial Sequence
  Description of Artificial Sequence: Synthetic oligonucleotide
  Target: LAMA2; (-) strand; PAM type: NRG; PAM sequence: AAG
aatagccaatacaatgcacg

SEQ ID NO: 81208 - DNA, 20 bp, Artificial Sequence
  Description of Artificial Sequence: Synthetic oligonucleotide
  Target: LAMA2; (-) strand; PAM type: NRG; PAM sequence: TAG
accctatgtctaataaaaaa

SEQ ID NO: 81209 - DNA, 20 bp, Artificial Sequence
  Description of Artificial Sequence: Synthetic oligonucleotide
  Target: LAMA2; (-) strand; PAM type: NRG; PAM sequence: AAG
tcaaaaattgaccctcccta

SEQ ID NO: 81210 - DNA, 20 bp, Artificial Sequence
  Description of Artificial Sequence: Synthetic oligonucleotide
  Target: LAMA2; (-) strand; PAM type: NRG; PAM sequence: TAG
ttgccaatgatttgacaatt

SEQ ID NO: 81211 - DNA, 20 bp, Artificial Sequence
  Description of Artificial Sequence: Synthetic oligonucleotide
  Target: LAMA2; (-) strand; PAM type: NRG; PAM sequence: AGG
tagacttcaagaagataata

SEQ ID NO: 81212 - DNA, 20 bp, Artificial Sequence
  Description of Artificial Sequence: Synthetic oligonucleotide
  Target: LAMA2; (-) strand; PAM type: NRG; PAM sequence: AAG
atagacttcaagaagataat

SEQ ID NO: 81213 - DNA, 20 bp, Artificial Sequence
  Description of Artificial Sequence: Synthetic oligonucleotide
  Target: LAMA2; (-) strand; PAM type: NRG; PAM sequence: AAG
tagatgctatagacttcaag

SEQ ID NO: 81214 - DNA, 20 bp, Artificial Sequence
  Description of Artificial Sequence: Synthetic oligonucleotide
  Target: LAMA2; (-) strand; PAM type: NRG; PAM sequence: AAG
atatagatgctatagacttc

SEQ ID NO: 81215 - DNA, 20 bp, Artificial Sequence
  Description of Artificial Sequence: Synthetic oligonucleotide
  Target: LAMA2; (-) strand; PAM type: NRG; PAM sequence: TAG
ggatatctatatagatgcta

SEQ ID NO: 81216 - DNA, 20 bp, Artificial Sequence
  Description of Artificial Sequence: Synthetic oligonucleotide
  Target: LAMA2; (-) strand; PAM type: NRG; PAM sequence: TAG
ttacacaggggatatctata

SEQ ID NO: 81217 - DNA, 20 bp, Artificial Sequence
  Description of Artificial Sequence: Synthetic oligonucleotide
  Target: LAMA2; (-) strand; PAM type: NRG; PAM sequence: GGG
tcattttaaaaattacacag

SEQ ID NO: 81218 - DNA, 20 bp, Artificial Sequence
  Description of Artificial Sequence: Synthetic oligonucleotide
  Target: LAMA2; (-) strand; PAM type: NRG; PAM sequence: GGG
atcattttaaaaattacaca

SEQ ID NO: 81219 - DNA, 20 bp, Artificial Sequence
  Description of Artificial Sequence: Synthetic oligonucleotide
  Target: LAMA2; (-) strand; PAM type: NRG; PAM sequence: AGG
aatcattttaaaaattacac

SEQ ID NO: 81220 - DNA, 20 bp, Artificial Sequence
  Description of Artificial Sequence: Synthetic oligonucleotide
  Target: LAMA2; (-) strand; PAM type: NRG; PAM sequence: CAG
taatcattttaaaaattaca

SEQ ID NO: 81221 - DNA, 20 bp, Artificial Sequence
  Description of Artificial Sequence: Synthetic oligonucleotide
  Target: LAMA2; (-) strand; PAM type: NRG; PAM sequence: AAG
agtgatcaataaaaggagaa

SEQ ID NO: 81222 - DNA, 20 bp, Artificial Sequence
  Description of Artificial Sequence: Synthetic oligonucleotide
  Target: LAMA2; (-) strand; PAM type: NRG; PAM sequence: GAG
acataagtgatcaataaaag

SEQ ID NO: 81223 - DNA, 20 bp, Artificial Sequence
  Description of Artificial Sequence: Synthetic oligonucleotide
  Target: LAMA2; (-) strand; PAM type: NRG; PAM sequence: AGG
taacataagtgatcaataaa

SEQ ID NO: 81224 - DNA, 20 bp, Artificial Sequence
  Description of Artificial Sequence: Synthetic oligonucleotide
  Target: LAMA2; (-) strand; PAM type: NRG; PAM sequence: AAG
ctaacataagtgatcaataa

SEQ ID NO: 81225 - DNA, 20 bp, Artificial Sequence
  Description of Artificial Sequence: Synthetic oligonucleotide
  Target: LAMA2; (-) strand; PAM type: NRG; PAM sequence: AAG
aattgataaacccctaacat

SEQ ID NO: 81226 - DNA, 20 bp, Artificial Sequence
  Description of Artificial Sequence: Synthetic oligonucleotide
  Target: LAMA2; (-) strand; PAM type: NRG; PAM sequence: AGG
aagtttttttggaaaagatt

SEQ ID NO: 81227 - DNA, 20 bp, Artificial Sequence
  Description of Artificial Sequence: Synthetic oligonucleotide
  Target: LAMA2; (-) strand; PAM type: NRG; PAM sequence: TAG
gaagtttttttggaaaagat

SEQ ID NO: 81228 - DNA, 20 bp, Artificial Sequence
  Description of Artificial Sequence: Synthetic oligonucleotide
  Target: LAMA2; (-) strand; PAM type: NRG; PAM sequence: AAG
aggcagaagtttttttggaa

SEQ ID NO: 81229 - DNA, 20 bp, Artificial Sequence
  Description of Artificial Sequence: Synthetic oligonucleotide
  Target: LAMA2; (-) strand; PAM type: NRG; PAM sequence: TGG
taaaaaggcagaagtttttt

SEQ ID NO: 81230 - DNA, 20 bp, Artificial Sequence
  Description of Artificial Sequence: Synthetic oligonucleotide
  Target: LAMA2; (-) strand; PAM type: NRG; PAM sequence: AAG
cacaaaaaataaaaaggcag

SEQ ID NO: 81231 - DNA, 20 bp, Artificial Sequence
  Description of Artificial Sequence: Synthetic oligonucleotide
  Target: LAMA2; (-) strand; PAM type: NRG; PAM sequence: CAG
aaacacaaaaaataaaaagg

SEQ ID NO: 81232 - DNA, 20 bp, Artificial Sequence
  Description of Artificial Sequence: Synthetic oligonucleotide
  Target: LAMA2; (-) strand; PAM type: NRG; PAM sequence: AGG
taaaaacacaaaaaataaaa

SEQ ID NO: 81233 - DNA, 20 bp, Artificial Sequence
  Description of Artificial Sequence: Synthetic oligonucleotide
  Target: LAMA2; (-) strand; PAM type: NRG; PAM sequence: AAG
ataaaaacacaaaaaataaa

SEQ ID NO: 81234 - DNA, 20 bp, Artificial Sequence
  Description of Artificial Sequence: Synthetic oligonucleotide
  Target: LAMA2; (-) strand; PAM type: NRG; PAM sequence: CAG
gaataatataataaatagaa

SEQ ID NO: 81235 - DNA, 20 bp, Artificial Sequence
  Description of Artificial Sequence: Synthetic oligonucleotide
  Target: LAMA2; (-) strand; PAM type: NRG; PAM sequence: TAG
caaatgaataatataataaa

SEQ ID NO: 81236 - DNA, 20 bp, Artificial Sequence
  Description of Artificial Sequence: Synthetic oligonucleotide
  Target: LAMA2; (-) strand; PAM type: NRG; PAM sequence: AGG
atgaaatttaaaaccaaaac

SEQ ID NO: 81237 - DNA, 20 bp, Artificial Sequence
  Description of Artificial Sequence: Synthetic oligonucleotide
  Target: LAMA2; (-) strand; PAM type: NRG; PAM sequence: CAG
aatgaaatttaaaaccaaaa

SEQ ID NO: 81238 - DNA, 20 bp, Artificial Sequence
  Description of Artificial Sequence: Synthetic oligonucleotide
  Target: LAMA2; (-) strand; PAM type: NRG; PAM sequence: AAG
tccaaattgataggtagaaa

SEQ ID NO: 81239 - DNA, 20 bp, Artificial Sequence
  Description of Artificial Sequence: Synthetic oligonucleotide
  Target: LAMA2; (-) strand; PAM type: NRG; PAM sequence: TAG
taactttccaaattgatagg

SEQ ID NO: 81240 - DNA, 20 bp, Artificial Sequence
  Description of Artificial Sequence: Synthetic oligonucleotide
  Target: LAMA2; (-) strand; PAM type: NRG; PAM sequence: AGG
atttaactttccaaattgat

SEQ ID NO: 81241 - DNA, 20 bp, Artificial Sequence
  Description of Artificial Sequence: Synthetic oligonucleotide
  Target: LAMA2; (-) strand; PAM type: NRG; PAM sequence: TAG
aatttaactttccaaattga

SEQ ID NO: 81242 - DNA, 20 bp, Artificial Sequence
  Description of Artificial Sequence: Synthetic oligonucleotide
  Target: LAMA2; (-) strand; PAM type: NRG; PAM sequence: AGG
tttatatgataaaagaagaa

SEQ ID NO: 81243 - DNA, 20 bp, Artificial Sequence
  Description of Artificial Sequence: Synthetic oligonucleotide
  Target: LAMA2; (-) strand; PAM type: NRG; PAM sequence: AAG
gtttatatgataaaagaaga

SEQ ID NO: 81244 - DNA, 20 bp, Artificial Sequence
  Description of Artificial Sequence: Synthetic oligonucleotide
  Target: LAMA2; (-) strand; PAM type: NRG; PAM sequence: AAG
aaaagtttatatgataaaag

SEQ ID NO: 81245 - DNA, 20 bp, Artificial Sequence
  Description of Artificial Sequence: Synthetic oligonucleotide
  Target: LAMA2; (-) strand; PAM type: NRG; PAM sequence: AAG
tttaaaagtttatatgataa

SEQ ID NO: 81246 - DNA, 20 bp, Artificial Sequence
  Description of Artificial Sequence: Synthetic oligonucleotide
  Target: LAMA2; (-) strand; PAM type: NRG; PAM sequence: AAG
agaaggaaatctatatttaa

SEQ ID NO: 81247 - DNA, 20 bp, Artificial Sequence
  Description of Artificial Sequence: Synthetic oligonucleotide
  Target: LAMA2; (-) strand; PAM type: NRG; PAM sequence: AGG
acagctaaagaactgctaga

SEQ ID NO: 81248 - DNA, 20 bp, Artificial Sequence
  Description of Artificial Sequence: Synthetic oligonucleotide
  Target: LAMA2; (-) strand; PAM type: NRG; PAM sequence: AAG
aacagctaaagaactgctag

SEQ ID NO: 81249 - DNA, 20 bp, Artificial Sequence
  Description of Artificial Sequence: Synthetic oligonucleotide
  Target: LAMA2; (-) strand; PAM type: NRG; PAM sequence: TAG
agaaacagctaaagaactgc

SEQ ID NO: 81250 - DNA, 20 bp, Artificial Sequence
  Description of Artificial Sequence: Synthetic oligonucleotide
  Target: LAMA2; (-) strand; PAM type: NRG; PAM sequence: AAG
gaattcatgagaaacagcta

SEQ ID NO: 81251 - DNA, 20 bp, Artificial Sequence
  Description of Artificial Sequence: Synthetic oligonucleotide
  Target: LAMA2; (-) strand; PAM type: NRG; PAM sequence: CAG
attcctgaattcatgagaaa

SEQ ID NO: 81252 - DNA, 20 bp, Artificial Sequence
  Description of Artificial Sequence: Synthetic oligonucleotide
  Target: LAMA2; (-) strand; PAM type: NRG; PAM sequence: GAG
taaagcattcctgaattcat

SEQ ID NO: 81253 - DNA, 20 bp, Artificial Sequence
  Description of Artificial Sequence: Synthetic oligonucleotide
  Target: LAMA2; (-) strand; PAM type: NRG; PAM sequence: AAG
aataaatgacaatgaacata

SEQ ID NO: 81254 - DNA, 20 bp, Artificial Sequence
  Description of Artificial Sequence: Synthetic oligonucleotide
  Target: LAMA2; (-) strand; PAM type: NRG; PAM sequence: AAG
taaatcacaagagaaattag

SEQ ID NO: 81255 - DNA, 20 bp, Artificial Sequence
  Description of Artificial Sequence: Synthetic oligonucleotide
  Target: LAMA2; (-) strand; PAM type: NRG; PAM sequence: TAG
aaataaatcacaagagaaat

SEQ ID NO: 81256 - DNA, 20 bp, Artificial Sequence
  Description of Artificial Sequence: Synthetic oligonucleotide
  Target: LAMA2; (-) strand; PAM type: NRG; PAM sequence: GAG
taacaaaaaataaatcacaa

SEQ ID NO: 81257 - DNA, 20 bp, Artificial Sequence
  Description of Artificial Sequence: Synthetic oligonucleotide
  Target: LAMA2; (-) strand; PAM type: NRG; PAM sequence: AAG
attaacaaaaaataaatcac

SEQ ID NO: 81258 - DNA, 20 bp, Artificial Sequence
  Description of Artificial Sequence: Synthetic oligonucleotide
  Target: LAMA2; (-) strand; PAM type: NRG; PAM sequence: TGG
tttaataaagctcaaatatt

SEQ ID NO: 81259 - DNA, 20 bp, Artificial Sequence
  Description of Artificial Sequence: Synthetic oligonucleotide
  Target: LAMA2; (-) strand; PAM type: NRG; PAM sequence: AAG
caaaaatataatatttaata

SEQ ID NO: 81260 - DNA, 20 bp, Artificial Sequence
  Description of Artificial Sequence: Synthetic oligonucleotide
  Target: LAMA2; (-) strand; PAM type: NRG; PAM sequence: TAG
cagatcataaacatccagtg

SEQ ID NO: 81261 - DNA, 20 bp, Artificial Sequence
  Description of Artificial Sequence: Synthetic oligonucleotide
  Target: LAMA2; (-) strand; PAM type: NRG; PAM sequence: CAG
gttctcagatcataaacatc

SEQ ID NO: 81262 - DNA, 20 bp, Artificial Sequence
  Description of Artificial Sequence: Synthetic oligonucleotide
  Target: LAMA2; (-) strand; PAM type: NRG; PAM sequence: CAG
catcttagagagtatgttct

SEQ ID NO: 81263 - DNA, 20 bp, Artificial Sequence
  Description of Artificial Sequence: Synthetic oligonucleotide
  Target: LAMA2; (-) strand; PAM type: NRG; PAM sequence: GAG
ctaaagtttgacatcttaga

SEQ ID NO: 81264 - DNA, 20 bp, Artificial Sequence
  Description of Artificial Sequence: Synthetic oligonucleotide
  Target: LAMA2; (-) strand; PAM type: NRG; PAM sequence: GAG
ttctaaagtttgacatctta

SEQ ID NO: 81265 - DNA, 20 bp, Artificial Sequence
  Description of Artificial Sequence: Synthetic oligonucleotide
  Target: LAMA2; (-) strand; PAM type: NRG; PAM sequence: TAG
acttctaaagtttgacatct

SEQ ID NO: 81266 - DNA, 20 bp, Artificial Sequence
  Description of Artificial Sequence: Synthetic oligonucleotide
  Target: LAMA2; (-) strand; PAM type: NRG; PAM sequence: AAG
taaatttcaataaacttcta

SEQ ID NO: 81267 - DNA, 20 bp, Artificial Sequence
  Description of Artificial Sequence: Synthetic oligonucleotide
  Target: LAMA2; (-) strand; PAM type: NRG; PAM sequence: AAG
gagaccatgcactgagccat

SEQ ID NO: 81268 - DNA, 20 bp, Artificial Sequence
  Description of Artificial Sequence: Synthetic oligonucleotide
  Target: LAMA2; (-) strand; PAM type: NRG; PAM sequence: GAG
gccaagagagaccatgcact

SEQ ID NO: 81269 - DNA, 20 bp, Artificial Sequence
  Description of Artificial Sequence: Synthetic oligonucleotide
  Target: LAMA2; (-) strand; PAM type: NRG; PAM sequence: GAG
catttatttgtttgccaaga

SEQ ID NO: 81270 - DNA, 20 bp, Artificial Sequence
  Description of Artificial Sequence: Synthetic oligonucleotide
  Target: LAMA2; (-) strand; PAM type: NRG; PAM sequence: GAG
cacatttatttgtttgccaa

SEQ ID NO: 81271 - DNA, 20 bp, Artificial Sequence
  Description of Artificial Sequence: Synthetic oligonucleotide
  Target: LAMA2; (-) strand; PAM type: NRG; PAM sequence: AAG
tccacatttatttgtttgcc

SEQ ID NO: 81272 - DNA, 20 bp, Artificial Sequence
  Description of Artificial Sequence: Synthetic oligonucleotide
  Target: LAMA2; (-) strand; PAM type: NRG; PAM sequence: TGG
aggaatccataatcgcagat

SEQ ID NO: 81273 - DNA, 20 bp, Artificial Sequence
  Description of Artificial Sequence: Synthetic oligonucleotide
  Target: LAMA2; (-) strand; PAM type: NRG; PAM sequence: CAG
aaggtaggaatccataatcg

SEQ ID NO: 81274 - DNA, 20 bp, Artificial Sequence
  Description of Artificial Sequence: Synthetic oligonucleotide
  Target: LAMA2; (-) strand; PAM type: NRG; PAM sequence: AGG
gaaaaaaatgaaagaaaggt

SEQ ID NO: 81275 - DNA, 20 bp, Artificial Sequence
  Description of Artificial Sequence: Synthetic oligonucleotide
  Target: LAMA2; (-) strand; PAM type: NRG; PAM sequence: TAG
tgaaaaaaatgaaagaaagg

SEQ ID NO: 81276 - DNA, 20 bp, Artificial Sequence
  Description of Artificial Sequence: Synthetic oligonucleotide
  Target: LAMA2; (-) strand; PAM type: NRG; PAM sequence: AGG
tactgaaaaaaatgaaagaa

SEQ ID NO: 81277 - DNA, 20 bp, Artificial Sequence
  Description of Artificial Sequence: Synthetic oligonucleotide
  Target: LAMA2; (-) strand; PAM type: NRG; PAM sequence: AAG
atactgaaaaaaatgaaaga

SEQ ID NO: 81278 - DNA, 20 bp, Artificial Sequence
  Description of Artificial Sequence: Synthetic oligonucleotide
  Target: LAMA2; (-) strand; PAM type: NRG; PAM sequence: AAG
agaaatactgaaaaaaatga

SEQ ID NO: 81279 - DNA, 20 bp, Artificial Sequence
  Description of Artificial Sequence: Synthetic oligonucleotide
  Target: LAMA2; (-) strand; PAM type: NRG; PAM sequence: AAG
acagtgcttcaaagaacagg

SEQ ID NO: 81280 - DNA, 20 bp, Artificial Sequence
  Description of Artificial Sequence: Synthetic oligonucleotide
  Target: LAMA2; (-) strand; PAM type: NRG; PAM sequence: AGG
ataacagtgcttcaaagaac

SEQ ID NO: 81281 - DNA, 20 bp, Artificial Sequence
  Description of Artificial Sequence: Synthetic oligonucleotide
  Target: LAMA2; (-) strand; PAM type: NRG; PAM sequence: CAG
cataacagtgcttcaaagaa

SEQ ID NO: 81282 - DNA, 20 bp, Artificial Sequence
  Description of Artificial Sequence: Synthetic oligonucleotide
  Target: LAMA2; (-) strand; PAM type: NRG; PAM sequence: AAG
tgcctcataacagtgcttca

SEQ ID NO: 81283 - DNA, 20 bp, Artificial Sequence
  Description of Artificial Sequence: Synthetic oligonucleotide
  Target: LAMA2; (-) strand; PAM type: NRG; PAM sequence: CAG
aatatgtatgtgcctcataa

SEQ ID NO: 81284 - DNA, 20 bp, Artificial Sequence
  Description of Artificial Sequence: Synthetic oligonucleotide
  Target: LAMA2; (-) strand; PAM type: NRG; PAM sequence: AAG
ttataagatataaaaatcta

SEQ ID NO: 81285 - DNA, 20 bp, Artificial Sequence
  Description of Artificial Sequence: Synthetic oligonucleotide
  Target: LAMA2; (-) strand; PAM type: NRG; PAM sequence: AAG
ttatcaaaatattaatttat

SEQ ID NO: 81286 - DNA, 20 bp, Artificial Sequence
  Description of Artificial Sequence: Synthetic oligonucleotide
  Target: LAMA2; (-) strand; PAM type: NRG; PAM sequence: CAG
agattaagtggagatcttca

SEQ ID NO: 81287 - DNA, 20 bp, Artificial Sequence
  Description of Artificial Sequence: Synthetic oligonucleotide
  Target: LAMA2; (-) strand; PAM type: NRG; PAM sequence: GAG
gtgatatctgagattaagtg

SEQ ID NO: 81288 - DNA, 20 bp, Artificial Sequence
  Description of Artificial Sequence: Synthetic oligonucleotide
  Target: LAMA2; (-) strand; PAM type: NRG; PAM sequence: TGG
aagtgatatctgagattaag

SEQ ID NO: 81289 - DNA, 20 bp, Artificial Sequence
  Description of Artificial Sequence: Synthetic oligonucleotide
  Target: LAMA2; (-) strand; PAM type: NRG; PAM sequence: AAG
aaaaagtgatatctgagatt

SEQ ID NO: 81290 - DNA, 20 bp, Artificial Sequence
  Description of Artificial Sequence: Synthetic oligonucleotide
  Target: LAMA2; (-) strand; PAM type: NRG; PAM sequence: GAG
taggacaaaaagtgatatct

SEQ ID NO: 81291 - DNA, 20 bp, Artificial Sequence
  Description of Artificial Sequence: Synthetic oligonucleotide
  Target: LAMA2; (-) strand; PAM type: NRG; PAM sequence: AAG
aaagtagactttaggacaaa

SEQ ID NO: 81292 - DNA, 20 bp, Artificial Sequence
  Description of Artificial Sequence: Synthetic oligonucleotide
  Target: LAMA2; (-) strand; PAM type: NRG; PAM sequence: AGG
taaaaaataaagtagacttt

SEQ ID NO: 81293 - DNA, 20 bp, Artificial Sequence
  Description of Artificial Sequence: Synthetic oligonucleotide
  Target: LAMA2; (-) strand; PAM type: NRG; PAM sequence: TAG
ataaaaaataaagtagactt

SEQ ID NO: 81294 - DNA, 20 bp, Artificial Sequence
  Description of Artificial Sequence: Synthetic oligonucleotide
  Target: LAMA2; (-) strand; PAM type: NRG; PAM sequence: TAG
aatgttaataaaaaataaag

SEQ ID NO: 81295 - DNA, 20 bp, Artificial Sequence
  Description of Artificial Sequence: Synthetic oligonucleotide
  Target: LAMA2; (-) strand; PAM type: NRG; PAM sequence: AAG
ggcaatgttaataaaaaata

SEQ ID NO: 81296 - DNA, 20 bp, Artificial Sequence
  Description of Artificial Sequence: Synthetic oligonucleotide
  Target: LAMA2; (-) strand; PAM type: NRG; PAM sequence: TGG
taagcatatgaaaactgctg

SEQ ID NO: 81297 - DNA, 20 bp, Artificial Sequence
  Description of Artificial Sequence: Synthetic oligonucleotide
  Target: LAMA2; (-) strand; PAM type: NRG; PAM sequence: AAG
aaaaacataccatacagagt

SEQ ID NO: 81298 - DNA, 20 bp, Artificial Sequence
  Description of Artificial Sequence: Synthetic oligonucleotide
  Target: LAMA2; (-) strand; PAM type: NRG; PAM sequence: GAG
cagaaaaaacataccataca

SEQ ID NO: 81299 - DNA, 20 bp, Artificial Sequence
  Description of Artificial Sequence: Synthetic oligonucleotide
  Target: LAMA2; (-) strand; PAM type: NRG; PAM sequence: CAG
atcagaaaaaacataccata

SEQ ID NO: 81300 - DNA, 20 bp, Artificial Sequence
  Description of Artificial Sequence: Synthetic oligonucleotide
  Target: LAMA2; (-) strand; PAM type: NRG; PAM sequence: CAG
ggttgaaagttaaacaaaat

SEQ ID NO: 81301 - DNA, 20 bp, Artificial Sequence
  Description of Artificial Sequence: Synthetic oligonucleotide
  Target: LAMA2; (-) strand; PAM type: NRG; PAM sequence: AAG
tgaaaataaagataggttga

SEQ ID NO: 81302 - DNA, 20 bp, Artificial Sequence
  Description of Artificial Sequence: Synthetic oligonucleotide
  Target: LAMA2; (-) strand; PAM type: NRG; PAM sequence: AGG
ttttaaatgaaaataaagat

SEQ ID NO: 81303 - DNA, 20 bp, Artificial Sequence
  Description of Artificial Sequence: Synthetic oligonucleotide
  Target: LAMA2; (-) strand; PAM type: NRG; PAM sequence: TAG
cttttaaatgaaaataaaga

SEQ ID NO: 81304 - DNA, 20 bp, Artificial Sequence
  Description of Artificial Sequence: Synthetic oligonucleotide
  Target: LAMA2; (-) strand; PAM type: NRG; PAM sequence: AAG
aaatcttttaaatgaaaata

SEQ ID NO: 81305 - DNA, 20 bp, Artificial Sequence
  Description of Artificial Sequence: Synthetic oligonucleotide
  Target: LAMA2; (-) strand; PAM type: NRG; PAM sequence: AAG
ccatctattttactctttat

SEQ ID NO: 81306 - DNA, 20 bp, Artificial Sequence
  Description of Artificial Sequence: Synthetic oligonucleotide
  Target: LAMA2; (-) strand; PAM type: NRG; PAM sequence: AGG
ctaaacacacagtaattgtc

SEQ ID NO: 81307 - DNA, 20 bp, Artificial Sequence
  Description of Artificial Sequence: Synthetic oligonucleotide
  Target: LAMA2; (-) strand; PAM type: NRG; PAM sequence: CAG
actaaacacacagtaattgt

SEQ ID NO: 81308 - DNA, 20 bp, Artificial Sequence
  Description of Artificial Sequence: Synthetic oligonucleotide
  Target: LAMA2; (-) strand; PAM type: NRG; PAM sequence: CAG
aaatttagggactaaacaca

SEQ ID NO: 81309 - DNA, 20 bp, Artificial Sequence
  Description of Artificial Sequence: Synthetic oligonucleotide
  Target: LAMA2; (-) strand; PAM type: NRG; PAM sequence: GGG
tattaactatattaaattta

SEQ ID NO: 81310 - DNA, 20 bp, Artificial Sequence
  Description of Artificial Sequence: Synthetic oligonucleotide
  Target: LAMA2; (-) strand; PAM type: NRG; PAM sequence: AGG
ttattaactatattaaattt

SEQ ID NO: 81311 - DNA, 20 bp, Artificial Sequence
  Description of Artificial Sequence: Synthetic oligonucleotide
  Target: LAMA2; (-) strand; PAM type: NRG; PAM sequence: TAG
attattaactatattaaatt

SEQ ID NO: 81312 - DNA, 20 bp, Artificial Sequence
  Description of Artificial Sequence: Synthetic oligonucleotide
  Target: LAMA2; (-) strand; PAM type: NRG; PAM sequence: TAG
tgacacaaatgggaaacaaa

SEQ ID NO: 81313 - DNA, 20 bp, Artificial Sequence
  Description of Artificial Sequence: Synthetic oligonucleotide
  Target: LAMA2; (-) strand; PAM type: NRG; PAM sequence: GGG
aaaaattttgtgacacaaat

SEQ ID NO: 81314 - DNA, 20 bp, Artificial Sequence
  Description of Artificial Sequence: Synthetic oligonucleotide
  Target: LAMA2; (-) strand; PAM type: NRG; PAM sequence: TGG
caaaaattttgtgacacaaa

SEQ ID NO: 81315 - DNA, 20 bp, Artificial Sequence
  Description of Artificial Sequence: Synthetic oligonucleotide
  Target: LAMA2; (-) strand; PAM type: NRG; PAM sequence: GGG
gtagacagaaaaggaagaat

SEQ ID NO: 81316 - DNA, 20 bp, Artificial Sequence
  Description of Artificial Sequence: Synthetic oligonucleotide
  Target: LAMA2; (-) strand; PAM type: NRG; PAM sequence: TGG
agtagacagaaaaggaagaa

SEQ ID NO: 81317 - DNA, 20 bp, Artificial Sequence
  Description of Artificial Sequence: Synthetic oligonucleotide
  Target: LAMA2; (-) strand; PAM type: NRG; PAM sequence: AAG
ataaaagtagacagaaaagg

SEQ ID NO: 81318 - DNA, 20 bp, Artificial Sequence
  Description of Artificial Sequence: Synthetic oligonucleotide
  Target: LAMA2; (-) strand; PAM type: NRG; PAM sequence: AGG
aacataaaagtagacagaaa

SEQ ID NO: 81319 - DNA, 20 bp, Artificial Sequence
  Description of Artificial Sequence: Synthetic oligonucleotide
  Target: LAMA2; (-) strand; PAM type: NRG; PAM sequence: AAG
taacataaaagtagacagaa

SEQ ID NO: 81320 - DNA, 20 bp, Artificial Sequence
  Description of Artificial Sequence: Synthetic oligonucleotide
  Target: LAMA2; (-) strand; PAM type: NRG; PAM sequence: CAG
ttgtttaacataaaagtaga

SEQ ID NO: 81321 - DNA, 20 bp, Artificial Sequence
  Description of Artificial Sequence: Synthetic oligonucleotide
  Target: LAMA2; (-) strand; PAM type: NRG; PAM sequence: TAG
atatttgtttaacataaaag

SEQ ID NO: 81322 - DNA, 20 bp, Artificial Sequence
  Description of Artificial Sequence: Synthetic oligonucleotide
  Target: LAMA2; (-) strand; PAM type: NRG; PAM sequence: AAG
aaaatatttgtttaacataa

SEQ ID NO: 81323 - DNA, 20 bp, Artificial Sequence
  Description of Artificial Sequence: Synthetic oligonucleotide
  Target: LAMA2; (-) strand; PAM type: NRG; PAM sequence: TGG
agataataaaggaaataaaa

SEQ ID NO: 81324 - DNA, 20 bp, Artificial Sequence
  Description of Artificial Sequence: Synthetic oligonucleotide
  Target: LAMA2; (-) strand; PAM type: NRG; PAM sequence: AGG
tactgctaaaaagataataa

SEQ ID NO: 81325 - DNA, 20 bp, Artificial Sequence
  Description of Artificial Sequence: Synthetic oligonucleotide
  Target: LAMA2; (-) strand; PAM type: NRG; PAM sequence: AAG
gtactgctaaaaagataata

SEQ ID NO: 81326 - DNA, 20 bp, Artificial Sequence
  Description of Artificial Sequence: Synthetic oligonucleotide
  Target: LAMA2; (-) strand; PAM type: NRG; PAM sequence: AAG
tacaaagaggtactgctaaa

SEQ ID NO: 81327 - DNA, 20 bp, Artificial Sequence
  Description of Artificial Sequence: Synthetic oligonucleotide
  Target: LAMA2; (-) strand; PAM type: NRG; PAM sequence: AGG
gaatggaaaattatacaaag

SEQ ID NO: 81328 - DNA, 20 bp, Artificial Sequence
  Description of Artificial Sequence: Synthetic oligonucleotide
  Target: LAMA2; (-) strand; PAM type: NRG; PAM sequence: GAG
ggaatggaaaattatacaaa

SEQ ID NO: 81329 - DNA, 20 bp, Artificial Sequence
  Description of Artificial Sequence: Synthetic oligonucleotide
  Target: LAMA2; (-) strand; PAM type: NRG; PAM sequence: AAG
ttggaatggaaaattataca

SEQ ID NO: 81330 - DNA, 20 bp, Artificial Sequence
  Description of Artificial Sequence: Synthetic oligonucleotide
  Target: LAMA2; (-) strand; PAM type: NRG; PAM sequence: TGG
acctaaaataaaagttggaa

SEQ ID NO: 81331 - DNA, 20 bp, Artificial Sequence
  Description of Artificial Sequence: Synthetic oligonucleotide
  Target: LAMA2; (-) strand; PAM type: NRG; PAM sequence: TGG
cctgaacctaaaataaaagt

SEQ ID NO: 81332 - DNA, 20 bp, Artificial Sequence
  Description of Artificial Sequence: Synthetic oligonucleotide
  Target: LAMA2; (-) strand; PAM type: NRG; PAM sequence: AAG
actacctgaacctaaaataa

SEQ ID NO: 81333 - DNA, 20 bp, Artificial Sequence
  Description of Artificial Sequence: Synthetic oligonucleotide
  Target: LAMA2; (-) strand; PAM type: NRG; PAM sequence: GGG
ttttattatgcttattatct

SEQ ID NO: 81334 - DNA, 20 bp, Artificial Sequence
  Description of Artificial Sequence: Synthetic oligonucleotide
  Target: LAMA2; (-) strand; PAM type: NRG; PAM sequence: TGG
attttattatgcttattatc

SEQ ID NO: 81335 - DNA, 20 bp, Artificial Sequence
  Description of Artificial Sequence: Synthetic oligonucleotide
  Target: LAMA2; (-) strand; PAM type: NRG; PAM sequence: AAG
aaaagggtgggaggggggtg

SEQ ID NO: 81336 - DNA, 20 bp, Artificial Sequence
  Description of Artificial Sequence: Synthetic oligonucleotide
  Target: LAMA2; (-) strand; PAM type: NRG; PAM sequence: GGG
gcttgaaaagggtgggaggg

SEQ ID NO: 81337 - DNA, 20 bp, Artificial Sequence
  Description of Artificial Sequence: Synthetic oligonucleotide
  Target: LAMA2; (-) strand; PAM type: NRG; PAM sequence: GGG
tgcttgaaaagggtgggagg

SEQ ID NO: 81338 - DNA, 20 bp, Artificial Sequence
  Description of Artificial Sequence: Synthetic oligonucleotide
  Target: LAMA2; (-) strand; PAM type: NRG; PAM sequence: GGG
ctgcttgaaaagggtgggag

SEQ ID NO: 81339 - DNA, 20 bp, Artificial Sequence
  Description of Artificial Sequence: Synthetic oligonucleotide
  Target: LAMA2; (-) strand; PAM type: NRG; PAM sequence: GGG
cctgcttgaaaagggtggga

SEQ ID NO: 81340 - DNA, 20 bp, Artificial Sequence
  Description of Artificial Sequence: Synthetic oligonucleotide
  Target: LAMA2; (-) strand; PAM type: NRG; PAM sequence: AGG
gcctgcttgaaaagggtggg

SEQ ID NO: 81341 - DNA, 20 bp, Artificial Sequence
  Description of Artificial Sequence: Synthetic oligonucleotide
  Target: LAMA2; (-) strand; PAM type: NRG; PAM sequence: GAG
ggcctgcttgaaaagggtgg

SEQ ID NO: 81342 - DNA, 20 bp, Artificial Sequence
  Description of Artificial Sequence: Synthetic oligonucleotide
  Target: LAMA2; (-) strand; PAM type: NRG; PAM sequence: GGG
agggcctgcttgaaaagggt

SEQ ID NO: 81343 - DNA, 20 bp, Artificial Sequence
  Description of Artificial Sequence: Synthetic oligonucleotide
  Target: LAMA2; (-) strand; PAM type: NRG; PAM sequence: TGG
cagggcctgcttgaaaaggg

SEQ ID NO: 81344 - DNA, 20 bp, Artificial Sequence
  Description of Artificial Sequence: Synthetic oligonucleotide
  Target: LAMA2; (-) strand; PAM type: NRG; PAM sequence: GGG
caccagggcctgcttgaaaa

SEQ ID NO: 81345 - DNA, 20 bp, Artificial Sequence
  Description of Artificial Sequence: Synthetic oligonucleotide
  Target: LAMA2; (-) strand; PAM type: NRG; PAM sequence: AGG
acaccagggcctgcttgaaa

SEQ ID NO: 81346 - DNA, 20 bp, Artificial Sequence
  Description of Artificial Sequence: Synthetic oligonucleotide
  Target: LAMA2; (-) strand; PAM type: NRG; PAM sequence: AAG
gacaccagggcctgcttgaa

SEQ ID NO: 81347 - DNA, 20 bp, Artificial Sequence
  Description of Artificial Sequence: Synthetic oligonucleotide
  Target: LAMA2; (-) strand; PAM type: NRG; PAM sequence: GGG
gaaggcaacaatagacacca

SEQ ID NO: 81348 - DNA, 20 bp, Artificial Sequence
  Description of Artificial Sequence: Synthetic oligonucleotide
  Target: LAMA2; (-) strand; PAM type: NRG; PAM sequence: AGG
agaaggcaacaatagacacc

SEQ ID NO: 81349 - DNA, 20 bp, Artificial Sequence
  Description of Artificial Sequence: Synthetic oligonucleotide
  Target: LAMA2; (-) strand; PAM type: NRG; PAM sequence: CAG
aagaaggcaacaatagacac

SEQ ID NO: 81350 - DNA, 20 bp, Artificial Sequence
  Description of Artificial Sequence: Synthetic oligonucleotide
  Target: LAMA2; (-) strand; PAM type: NRG; PAM sequence: TAG
ggacacaaagaaggcaacaa

SEQ ID NO: 81351 - DNA, 20 bp, Artificial Sequence
  Description of Artificial Sequence: Synthetic oligonucleotide
  Target: LAMA2; (-) strand; PAM type: NRG; PAM sequence: AGG
agtacacatggacacaaaga

SEQ ID NO: 81352 - DNA, 20 bp, Artificial Sequence
  Description of Artificial Sequence: Synthetic oligonucleotide
  Target: LAMA2; (-) strand; PAM type: NRG; PAM sequence: AAG
gagtacacatggacacaaag

SEQ ID NO: 81353 - DNA, 20 bp, Artificial Sequence
  Description of Artificial Sequence: Synthetic oligonucleotide
  Target: LAMA2; (-) strand; PAM type: NRG; PAM sequence: AAG
attgagtacacatggacaca

SEQ ID NO: 81354 - DNA, 20 bp, Artificial Sequence
  Description of Artificial Sequence: Synthetic oligonucleotide
  Target: LAMA2; (-) strand; PAM type: NRG; PAM sequence: TGG
agctaaacattgagtacaca

SEQ ID NO: 81355 - DNA, 20 bp, Artificial Sequence
  Description of Artificial Sequence: Synthetic oligonucleotide
  Target: LAMA2; (-) strand; PAM type: NRG; PAM sequence: GAG
tatgagtggagctaaacatt

SEQ ID NO: 81356 - DNA, 20 bp, Artificial Sequence
  Description of Artificial Sequence: Synthetic oligonucleotide
  Target: LAMA2; (-) strand; PAM type: NRG; PAM sequence: GAG
catgttctctcttatgagtg

SEQ ID NO: 81357 - DNA, 20 bp, Artificial Sequence
  Description of Artificial Sequence: Synthetic oligonucleotide
  Target: LAMA2; (-) strand; PAM type: NRG; PAM sequence: TGG
tgcatgttctctcttatgag

SEQ ID NO: 81358 - DNA, 20 bp, Artificial Sequence
  Description of Artificial Sequence: Synthetic oligonucleotide
  Target: LAMA2; (-) strand; PAM type: NRG; PAM sequence: GAG
tactgcatgttctctcttat

SEQ ID NO: 81359 - DNA, 20 bp, Artificial Sequence
  Description of Artificial Sequence: Synthetic oligonucleotide
  Target: LAMA2; (-) strand; PAM type: NRG; PAM sequence: CAG
ttaatgcaagaatagaaaac

SEQ ID NO: 81360 - DNA, 20 bp, Artificial Sequence
  Description of Artificial Sequence: Synthetic oligonucleotide
  Target: LAMA2; (-) strand; PAM type: NRG; PAM sequence: TAG
taagtgaattaatgcaagaa

SEQ ID NO: 81361 - DNA, 20 bp, Artificial Sequence
  Description of Artificial Sequence: Synthetic oligonucleotide
  Target: LAMA2; (-) strand; PAM type: NRG; PAM sequence: AAG
tatcctaagtgaattaatgc

SEQ ID NO: 81362 - DNA, 20 bp, Artificial Sequence
  Description of Artificial Sequence: Synthetic oligonucleotide
  Target: LAMA2; (-) strand; PAM type: NRG; PAM sequence: AAG
gagcagaaggccattatcct

SEQ ID NO: 81363 - DNA, 20 bp, Artificial Sequence
  Description of Artificial Sequence: Synthetic oligonucleotide
  Target: LAMA2; (-) strand; PAM type: NRG; PAM sequence: AGG
agcaacatggatggagcaga

SEQ ID NO: 81364 - DNA, 20 bp, Artificial Sequence
  Description of Artificial Sequence: Synthetic oligonucleotide
  Target: LAMA2; (-) strand; PAM type: NRG; PAM sequence: AAG
aagcaacatggatggagcag

SEQ ID NO: 81365 - DNA, 20 bp, Artificial Sequence
  Description of Artificial Sequence: Synthetic oligonucleotide
  Target: LAMA2; (-) strand; PAM type: NRG; PAM sequence: CAG
ttgaagcaacatggatggag

SEQ ID NO: 81366 - DNA, 20 bp, Artificial Sequence
  Description of Artificial Sequence: Synthetic oligonucleotide
  Target: LAMA2; (-) strand; PAM type: NRG; PAM sequence: GAG
cctttgaagcaacatggatg

SEQ ID NO: 81367 - DNA, 20 bp, Artificial Sequence
  Description of Artificial Sequence: Synthetic oligonucleotide
  Target: LAMA2; (-) strand; PAM type: NRG; PAM sequence: TGG
gtcctttgaagcaacatgga

SEQ ID NO: 81368 - DNA, 20 bp, Artificial Sequence
  Description of Artificial Sequence: Synthetic oligonucleotide
  Target: LAMA2; (-) strand; PAM type: NRG; PAM sequence: TGG
tcatgtcctttgaagcaaca

SEQ ID NO: 81369 - DNA, 20 bp, Artificial Sequence
  Description of Artificial Sequence: Synthetic oligonucleotide
  Target: LAMA2; (-) strand; PAM type: NRG; PAM sequence: AAG
gaataaaatcatgtcctttg

SEQ ID NO: 81370 - DNA, 20 bp, Artificial Sequence
  Description of Artificial Sequence: Synthetic oligonucleotide
  Target: LAMA2; (-) strand; PAM type: NRG; PAM sequence: AAG
aatactacacagccataaaa

SEQ ID NO: 81371 - DNA, 20 bp, Artificial Sequence
  Description of Artificial Sequence: Synthetic oligonucleotide
  Target: LAMA2; (-) strand; PAM type: NRG; PAM sequence: CAG
atacaccatggaatactaca

SEQ ID NO: 81372 - DNA, 20 bp, Artificial Sequence
  Description of Artificial Sequence: Synthetic oligonucleotide
  Target: LAMA2; (-) strand; PAM type: NRG; PAM sequence: TGG
aatgtagtacatatacacca

SEQ ID NO: 81373 - DNA, 20 bp, Artificial Sequence
  Description of Artificial Sequence: Synthetic oligonucleotide
  Target: LAMA2; (-) strand; PAM type: NRG; PAM sequence: TAG
tggactgaataaagaaaatg

SEQ ID NO: 81374 - DNA, 20 bp, Artificial Sequence
  Description of Artificial Sequence: Synthetic oligonucleotide
  Target: LAMA2; (-) strand; PAM type: NRG; PAM sequence: AAG
catcattggtggactgaata

SEQ ID NO: 81375 - DNA, 20 bp, Artificial Sequence
  Description of Artificial Sequence: Synthetic oligonucleotide
  Target: LAMA2; (-) strand; PAM type: NRG; PAM sequence: TGG
aacctaggtaccatcattgg

SEQ ID NO: 81376 - DNA, 20 bp, Artificial Sequence
  Description of Artificial Sequence: Synthetic oligonucleotide
  Target: LAMA2; (-) strand; PAM type: NRG; PAM sequence: TGG
atcaacctaggtaccatcat

SEQ ID NO: 81377 - DNA, 20 bp, Artificial Sequence
  Description of Artificial Sequence: Synthetic oligonucleotide
  Target: LAMA2; (-) strand; PAM type: NRG; PAM sequence: AGG
caaagacatggaatcaacct

SEQ ID NO: 81378 - DNA, 20 bp, Artificial Sequence
  Description of Artificial Sequence: Synthetic oligonucleotide
  Target: LAMA2; (-) strand; PAM type: NRG; PAM sequence: TAG
acaaagacatggaatcaacc

SEQ ID NO: 81379 - DNA, 20 bp, Artificial Sequence
  Description of Artificial Sequence: Synthetic oligonucleotide
  Target: LAMA2; (-) strand; PAM type: NRG; PAM sequence: TGG
tattcacaataacaaagaca

SEQ ID NO: 81380 - DNA, 20 bp, Artificial Sequence
  Description of Artificial Sequence: Synthetic oligonucleotide
  Target: LAMA2; (-) strand; PAM type: NRG; PAM sequence: AAG
cagccctattcacaataaca

SEQ ID NO: 81381 - DNA, 20 bp, Artificial Sequence
  Description of Artificial Sequence: Synthetic oligonucleotide
  Target: LAMA2; (-) strand; PAM type: NRG; PAM sequence: CAG
atgcatgcctatgttcattg

SEQ ID NO: 81382 - DNA, 20 bp, Artificial Sequence
  Description of Artificial Sequence: Synthetic oligonucleotide
  Target: LAMA2; (-) strand; PAM type: NRG; PAM sequence: AAG
atatatatcattctatcata

SEQ ID NO: 81383 - DNA, 20 bp, Artificial Sequence
  Description of Artificial Sequence: Synthetic oligonucleotide
  Target: LAMA2; (-) strand; PAM type: NRG; PAM sequence: AGG
attactgcgtatatgcccaa

SEQ ID NO: 81384 - DNA, 20 bp, Artificial Sequence
  Description of Artificial Sequence: Synthetic oligonucleotide
  Target: LAMA2; (-) strand; PAM type: NRG; PAM sequence: AAG
cattactgcgtatatgccca

SEQ ID NO: 81385 - DNA, 20 bp, Artificial Sequence
  Description of Artificial Sequence: Synthetic oligonucleotide
  Target: LAMA2; (-) strand; PAM type: NRG; PAM sequence: CAG
aacagaactagcactcaact

SEQ ID NO: 81386 - DNA, 20 bp, Artificial Sequence
  Description of Artificial Sequence: Synthetic oligonucleotide
  Target: LAMA2; (-) strand; PAM type: NRG; PAM sequence: TAG
caaaaaacttaaaacagaac

SEQ ID NO: 81387 - DNA, 20 bp, Artificial Sequence
  Description of Artificial Sequence: Synthetic oligonucleotide
  Target: LAMA2; (-) strand; PAM type: NRG; PAM sequence: CAG
atttctcaaaaaacttaaaa

SEQ ID NO: 81388 - DNA, 20 bp, Artificial Sequence
  Description of Artificial Sequence: Synthetic oligonucleotide
  Target: LAMA2; (-) strand; PAM type: NRG; PAM sequence: GAG
acactgtgggaagccgttgg

SEQ ID NO: 81389 - DNA, 20 bp, Artificial Sequence
  Description of Artificial Sequence: Synthetic oligonucleotide
  Target: LAMA2; (-) strand; PAM type: NRG; PAM sequence: GGG
agacactgtgggaagccgtt

SEQ ID NO: 81390 - DNA, 20 bp, Artificial Sequence
  Description of Artificial Sequence: Synthetic oligonucleotide
  Target: LAMA2; (-) strand; PAM type: NRG; PAM sequence: TGG
cagacactgtgggaagccgt

SEQ ID NO: 81391 - DNA, 20 bp, Artificial Sequence
  Description of Artificial Sequence: Synthetic oligonucleotide
  Target: LAMA2; (-) strand; PAM type: NRG; PAM sequence: AAG
attagttcagacactgtggg

SEQ ID NO: 81392 - DNA, 20 bp, Artificial Sequence
  Description of Artificial Sequence: Synthetic oligonucleotide
  Target: LAMA2; (-) strand; PAM type: NRG; PAM sequence: GGG
taaattagttcagacactgt

SEQ ID NO: 81393 - DNA, 20 bp, Artificial Sequence
  Description of Artificial Sequence: Synthetic oligonucleotide
  Target: LAMA2; (-) strand; PAM type: NRG; PAM sequence: TGG
gtaaattagttcagacactg

SEQ ID NO: 81394 - DNA, 20 bp, Artificial Sequence
  Description of Artificial Sequence: Synthetic oligonucleotide
  Target: LAMA2; (-) strand; PAM type: NRG; PAM sequence: CAG
ggtgggaaagtaaattagtt

SEQ ID NO: 81395 - DNA, 20 bp, Artificial Sequence
  Description of Artificial Sequence: Synthetic oligonucleotide
  Target: LAMA2; (-) strand; PAM type: NRG; PAM sequence: TAG
ctgctggtgggaaagtaaat

SEQ ID NO: 81396 - DNA, 20 bp, Artificial Sequence
  Description of Artificial Sequence: Synthetic oligonucleotide
  Target: LAMA2; (-) strand; PAM type: NRG; PAM sequence: AAG
cttatacactgctggtggga

SEQ ID NO: 81397 - DNA, 20 bp, Artificial Sequence
  Description of Artificial Sequence: Synthetic oligonucleotide
  Target: LAMA2; (-) strand; PAM type: NRG; PAM sequence: GGG
aacacttatacactgctggt

SEQ ID NO: 81398 - DNA, 20 bp, Artificial Sequence
  Description of Artificial Sequence: Synthetic oligonucleotide
  Target: LAMA2; (-) strand; PAM type: NRG; PAM sequence: TGG
gaacacttatacactgctgg

SEQ ID NO: 81399 - DNA, 20 bp, Artificial Sequence
  Description of Artificial Sequence: Synthetic oligonucleotide
  Target: LAMA2; (-) strand; PAM type: NRG; PAM sequence: TGG
agggaacacttatacactgc

SEQ ID NO: 81400 - DNA, 20 bp, Artificial Sequence
  Description of Artificial Sequence: Synthetic oligonucleotide
  Target: LAMA2; (-) strand; PAM type: NRG; PAM sequence: GGG
ctggtgaggttgcagagaaa

SEQ ID NO: 81401 - DNA, 20 bp, Artificial Sequence
  Description of Artificial Sequence: Synthetic oligonucleotide
  Target: LAMA2; (-) strand; PAM type: NRG; PAM sequence: AGG
actggtgaggttgcagagaa

SEQ ID NO: 81402 - DNA, 20 bp, Artificial Sequence
  Description of Artificial Sequence: Synthetic oligonucleotide
  Target: LAMA2; (-) strand; PAM type: NRG; PAM sequence: AAG
tactggtgaggttgcagaga

SEQ ID NO: 81403 - DNA, 20 bp, Artificial Sequence
  Description of Artificial Sequence: Synthetic oligonucleotide
  Target: LAMA2; (-) strand; PAM type: NRG; PAM sequence: GAG
cagatactggtgaggttgca

SEQ ID NO: 81404 - DNA, 20 bp, Artificial Sequence
  Description of Artificial Sequence: Synthetic oligonucleotide
  Target: LAMA2; (-) strand; PAM type: NRG; PAM sequence: CAG
aacagatactggtgaggttg

SEQ ID NO: 81405 - DNA, 20 bp, Artificial Sequence
  Description of Artificial Sequence: Synthetic oligonucleotide
  Target: LAMA2; (-) strand; PAM type: NRG; PAM sequence: AGG
aaaaataacagatactggtg

SEQ ID NO: 81406 - DNA, 20 bp, Artificial Sequence
  Description of Artificial Sequence: Synthetic oligonucleotide
  Target: LAMA2; (-) strand; PAM type: NRG; PAM sequence: GAG
caaaaataacagatactggt

SEQ ID NO: 81407 - DNA, 20 bp, Artificial Sequence
  Description of Artificial Sequence: Synthetic oligonucleotide
  Target: LAMA2; (-) strand; PAM type: NRG; PAM sequence: TGG
aagtcaaaaataacagatac

SEQ ID NO: 81408 - DNA, 20 bp, Artificial Sequence
  Description of Artificial Sequence: Synthetic oligonucleotide
  Target: LAMA2; (-) strand; PAM type: NRG; PAM sequence: CAG
ttactgaaagtcaaaaataa

SEQ ID NO: 81409 - DNA, 20 bp, Artificial Sequence
  Description of Artificial Sequence: Synthetic oligonucleotide
  Target: LAMA2; (-) strand; PAM type: NRG; PAM sequence: AAG
gtcagaacggctattactga

SEQ ID NO: 81410 - DNA, 20 bp, Artificial Sequence
  Description of Artificial Sequence: Synthetic oligonucleotide
  Target: LAMA2; (-) strand; PAM type: NRG; PAM sequence: CGG
ccatctcacactggtcagaa

SEQ ID NO: 81411 - DNA, 20 bp, Artificial Sequence
  Description of Artificial Sequence: Synthetic oligonucleotide
  Target: LAMA2; (-) strand; PAM type: NRG; PAM sequence: CAG
tactaccatctcacactggt

SEQ ID NO: 81412 - DNA, 20 bp, Artificial Sequence
  Description of Artificial Sequence: Synthetic oligonucleotide
  Target: LAMA2; (-) strand; PAM type: NRG; PAM sequence: TGG
aaaatactaccatctcacac

SEQ ID NO: 81413 - DNA, 20 bp, Artificial Sequence
  Description of Artificial Sequence: Synthetic oligonucleotide
  Target: LAMA2; (-) strand; PAM type: NRG; PAM sequence: GAG
ggactatatcactatatcat

SEQ ID NO: 81414 - DNA, 20 bp, Artificial Sequence
  Description of Artificial Sequence: Synthetic oligonucleotide
  Target: LAMA2; (-) strand; PAM type: NRG; PAM sequence: AGG
aaaacaatagtccaaaagat

SEQ ID NO: 81415 - DNA, 20 bp, Artificial Sequence
  Description of Artificial Sequence: Synthetic oligonucleotide
  Target: LAMA2; (-) strand; PAM type: NRG; PAM sequence: TAG
gaaaacaatagtccaaaaga

SEQ ID NO: 81416 - DNA, 20 bp, Artificial Sequence
  Description of Artificial Sequence: Synthetic oligonucleotide
  Target: LAMA2; (-) strand; PAM type: NRG; PAM sequence: AAG
atatgaaaacaatagtccaa

SEQ ID NO: 81417 - DNA, 20 bp, Artificial Sequence
  Description of Artificial Sequence: Synthetic oligonucleotide
  Target: LAMA2; (-) strand; PAM type: NRG; PAM sequence: TAG
tgtgcaatatatgaaaacaa

SEQ ID NO: 81418 - DNA, 20 bp, Artificial Sequence
  Description of Artificial Sequence: Synthetic oligonucleotide
  Target: LAMA2; (-) strand; PAM type: NRG; PAM sequence: TGG
aaatgacaacattgtattgc

SEQ ID NO: 81419 - DNA, 20 bp, Artificial Sequence
  Description of Artificial Sequence: Synthetic oligonucleotide
  Target: LAMA2; (-) strand; PAM type: NRG; PAM sequence: TAG
tttctttaagattgttttca

SEQ ID NO: 81420 - DNA, 20 bp, Artificial Sequence
  Description of Artificial Sequence: Synthetic oligonucleotide
  Target: LAMA2; (-) strand; PAM type: NRG; PAM sequence: AAG
ttccttcttttcatttcttt

SEQ ID NO: 81421 - DNA, 20 bp, Artificial Sequence
  Description of Artificial Sequence: Synthetic oligonucleotide
  Target: LAMA2; (-) strand; PAM type: NRG; PAM sequence: TGG
tatggaaaatgggaaaggta

SEQ ID NO: 81422 - DNA, 20 bp, Artificial Sequence
  Description of Artificial Sequence: Synthetic oligonucleotide
  Target: LAMA2; (-) strand; PAM type: NRG; PAM sequence: AGG
cagagtatggaaaatgggaa

SEQ ID NO: 81423 - DNA, 20 bp, Artificial Sequence
  Description of Artificial Sequence: Synthetic oligonucleotide
  Target: LAMA2; (-) strand; PAM type: NRG; PAM sequence: AAG
acagagtatggaaaatggga

SEQ ID NO: 81424 - DNA, 20 bp, Artificial Sequence
  Description of Artificial Sequence: Synthetic oligonucleotide
  Target: LAMA2; (-) strand; PAM type: NRG; PAM sequence: GGG
aaccacagagtatggaaaat

SEQ ID NO: 81425 - DNA, 20 bp, Artificial Sequence
  Description of Artificial Sequence: Synthetic oligonucleotide
  Target: LAMA2; (-) strand; PAM type: NRG; PAM sequence: TGG
gaaccacagagtatggaaaa

SEQ ID NO: 81426 - DNA, 20 bp, Artificial Sequence
  Description of Artificial Sequence: Synthetic oligonucleotide
  Target: LAMA2; (-) strand; PAM type: NRG; PAM sequence: TGG
taagctagaaccacagagta

SEQ ID NO: 81427 - DNA, 20 bp, Artificial Sequence
  Description of Artificial Sequence: Synthetic oligonucleotide
  Target: LAMA2; (-) strand; PAM type: NRG; PAM sequence: GAG
atatataagctagaaccaca

SEQ ID NO: 81428 - DNA, 20 bp, Artificial Sequence
  Description of Artificial Sequence: Synthetic oligonucleotide
  Target: LAMA2; (-) strand; PAM type: NRG; PAM sequence: CAG
atatatataagctagaacca

SEQ ID NO: 81429 - DNA, 20 bp, Artificial Sequence
  Description of Artificial Sequence: Synthetic oligonucleotide
  Target: LAMA2; (-) strand; PAM type: NRG; PAM sequence: TAG
ggagggcaatatatataagc

SEQ ID NO: 81430 - DNA, 20 bp, Artificial Sequence
  Description of Artificial Sequence: Synthetic oligonucleotide
  Target: LAMA2; (-) strand; PAM type: NRG; PAM sequence: AAG
agcaggagggcaatatatat

SEQ ID NO: 81431 - DNA, 20 bp, Artificial Sequence
  Description of Artificial Sequence: Synthetic oligonucleotide
  Target: LAMA2; (-) strand; PAM type: NRG; PAM sequence: GGG
aggaaatttttcaagcagga

SEQ ID NO: 81432 - DNA, 20 bp, Artificial Sequence
  Description of Artificial Sequence: Synthetic oligonucleotide
  Target: LAMA2; (-) strand; PAM type: NRG; PAM sequence: AGG
aaggaaatttttcaagcagg

SEQ ID NO: 81433 - DNA, 20 bp, Artificial Sequence
  Description of Artificial Sequence: Synthetic oligonucleotide
  Target: LAMA2; (-) strand; PAM type: NRG; PAM sequence: GAG
aaaggaaatttttcaagcag

SEQ ID NO: 81434 - DNA, 20 bp, Artificial Sequence
  Description of Artificial Sequence: Synthetic oligonucleotide
  Target: LAMA2; (-) strand; PAM type: NRG; PAM sequence: AGG
ttaaaggaaatttttcaagc

SEQ ID NO: 81435 - DNA, 20 bp, Artificial Sequence
  Description of Artificial Sequence: Synthetic oligonucleotide
  Target: LAMA2; (-) strand; PAM type: NRG; PAM sequence: CAG
gttaaaggaaatttttcaag

SEQ ID NO: 81436 - DNA, 20 bp, Artificial Sequence
  Description of Artificial Sequence: Synthetic oligonucleotide
  Target: LAMA2; (-) strand; PAM type: NRG; PAM sequence: AAG
aatgttaaaggaaatttttc

SEQ ID NO: 81437 - DNA, 20 bp, Artificial Sequence
  Description of Artificial Sequence: Synthetic oligonucleotide
  Target: LAMA2; (-) strand; PAM type: NRG; PAM sequence: AGG
taccaaaaaaaaaatgttaa

SEQ ID NO: 81438 - DNA, 20 bp, Artificial Sequence
  Description of Artificial Sequence: Synthetic oligonucleotide
  Target: LAMA2; (-) strand; PAM type: NRG; PAM sequence: AAG
ctaccaaaaaaaaaatgtta

SEQ ID NO: 81439 - DNA, 20 bp, Artificial Sequence
  Description of Artificial Sequence: Synthetic oligonucleotide
  Target: LAMA2; (-) strand; PAM type: NRG; PAM sequence: CAG
ttgagaaaatttgtcaccag

SEQ ID NO: 81440 - DNA, 20 bp, Artificial Sequence
  Description of Artificial Sequence: Synthetic oligonucleotide
  Target: LAMA2; (-) strand; PAM type: NRG; PAM sequence: CAG
aagttgagaaaatttgtcac

SEQ ID NO: 81441 - DNA, 20 bp, Artificial Sequence
  Description of Artificial Sequence: Synthetic oligonucleotide
  Target: LAMA2; (-) strand; PAM type: NRG; PAM sequence: GAG
ttttcagataaagggaagtt

SEQ ID NO: 81442 - DNA, 20 bp, Artificial Sequence
  Description of Artificial Sequence: Synthetic oligonucleotide
  Target: LAMA2; (-) strand; PAM type: NRG; PAM sequence: AAG
agacattttcagataaaggg

SEQ ID NO: 81443 - DNA, 20 bp, Artificial Sequence
  Description of Artificial Sequence: Synthetic oligonucleotide
  Target: LAMA2; (-) strand; PAM type: NRG; PAM sequence: GGG
taaagacattttcagataaa

SEQ ID NO: 81444 - DNA, 20 bp, Artificial Sequence
  Description of Artificial Sequence: Synthetic oligonucleotide
  Target: LAMA2; (-) strand; PAM type: NRG; PAM sequence: AGG
ttaaagacattttcagataa

SEQ ID NO: 81445 - DNA, 20 bp, Artificial Sequence
  Description of Artificial Sequence: Synthetic oligonucleotide
  Target: LAMA2; (-) strand; PAM type: NRG; PAM sequence: AAG
attaaagacattttcagata

SEQ ID NO: 81446 - DNA, 20 bp, Artificial Sequence
  Description of Artificial Sequence: Synthetic oligonucleotide
  Target: LAMA2; (-) strand; PAM type: NRG; PAM sequence: CAG
aagtagattaaagacatttt

SEQ ID NO: 81447 - DNA, 20 bp, Artificial Sequence
  Description of Artificial Sequence: Synthetic oligonucleotide
  Target: LAMA2; (-) strand; PAM type: NRG; PAM sequence: AAG
tcaataatgaaagtagatta

SEQ ID NO: 81448 - DNA, 20 bp, Artificial Sequence
  Description of Artificial Sequence: Synthetic oligonucleotide
  Target: LAMA2; (-) strand; PAM type: NRG; PAM sequence: TAG
atatccttcaataatgaaag

SEQ ID NO: 81449 - DNA, 20 bp, Artificial Sequence
  Description of Artificial Sequence: Synthetic oligonucleotide
  Target: LAMA2; (-) strand; PAM type: NRG; PAM sequence: AAG
aaaatatccttcaataatga

SEQ ID NO: 81450 - DNA, 20 bp, Artificial Sequence
  Description of Artificial Sequence: Synthetic oligonucleotide
  Target: LAMA2; (-) strand; PAM type: NRG; PAM sequence: TGG
cacacacctctgtaactatg

SEQ ID NO: 81451 - DNA, 20 bp, Artificial Sequence
  Description of Artificial Sequence: Synthetic oligonucleotide
  Target: LAMA2; (-) strand; PAM type: NRG; PAM sequence: AAG
ctttaaagtgctaaacaaag

SEQ ID NO: 81452 - DNA, 20 bp, Artificial Sequence
  Description of Artificial Sequence: Synthetic oligonucleotide
  Target: LAMA2; (-) strand; PAM type: NRG; PAM sequence: AAG
catctttaaagtgctaaaca

SEQ ID NO: 81453 - DNA, 20 bp, Artificial Sequence
  Description of Artificial Sequence: Synthetic oligonucleotide
  Target: LAMA2; (-) strand; PAM type: NRG; PAM sequence: AAG
ataatggtgccacatcttta

SEQ ID NO: 81454 - DNA, 20 bp, Artificial Sequence
  Description of Artificial Sequence: Synthetic oligonucleotide
  Target: LAMA2; (-) strand; PAM type: NRG; PAM sequence: TGG
gaatgaaatccagaaaataa

SEQ ID NO: 81455 - DNA, 20 bp, Artificial Sequence
  Description of Artificial Sequence: Synthetic oligonucleotide
  Target: LAMA2; (-) strand; PAM type: NRG; PAM sequence: CAG
tcataaggatgaatgaaatc

SEQ ID NO: 81456 - DNA, 20 bp, Artificial Sequence
  Description of Artificial Sequence: Synthetic oligonucleotide
  Target: LAMA2; (-) strand; PAM type: NRG; PAM sequence: AGG
ataatggctatgttgtcata

SEQ ID NO: 81457 - DNA, 20 bp, Artificial Sequence
  Description of Artificial Sequence: Synthetic oligonucleotide
  Target: LAMA2; (-) strand; PAM type: NRG; PAM sequence: AAG
aataatggctatgttgtcat

SEQ ID NO: 81458 - DNA, 20 bp, Artificial Sequence
  Description of Artificial Sequence: Synthetic oligonucleotide
  Target: LAMA2; (-) strand; PAM type: NRG; PAM sequence: TGG
tagaacaaagaaacaaataa

SEQ ID NO: 81459 - DNA, 20 bp, Artificial Sequence
  Description of Artificial Sequence: Synthetic oligonucleotide
  Target: LAMA2; (-) strand; PAM type: NRG; PAM sequence: AAG
agatatatatatatagaaca

SEQ ID NO: 81460 - DNA, 20 bp, Artificial Sequence
  Description of Artificial Sequence: Synthetic oligonucleotide
  Target: LAMA2; (-) strand; PAM type: NRG; PAM sequence: TAG
gaattaaagatatatatata

SEQ ID NO: 81461 - DNA, 20 bp, Artificial Sequence
  Description of Artificial Sequence: Synthetic oligonucleotide
  Target: LAMA2; (-) strand; PAM type: NRG; PAM sequence: AAG
tgaaatcatctagtgaatta

SEQ ID NO: 81462 - DNA, 20 bp, Artificial Sequence
  Description of Artificial Sequence: Synthetic oligonucleotide
  Target: LAMA2; (-) strand; PAM type: NRG; PAM sequence: TAG
aaaaaatttttgaaatcatc

SEQ ID NO: 81463 - DNA, 20 bp, Artificial Sequence
  Description of Artificial Sequence: Synthetic oligonucleotide
  Target: LAMA2; (-) strand; PAM type: NRG; PAM sequence: CAG
atggtataagtgtcaaaagg

SEQ ID NO: 81464 - DNA, 20 bp, Artificial Sequence
  Description of Artificial Sequence: Synthetic oligonucleotide
  Target: LAMA2; (-) strand; PAM type: NRG; PAM sequence: AGG
tacatggtataagtgtcaaa

SEQ ID NO: 81465 - DNA, 20 bp, Artificial Sequence
  Description of Artificial Sequence: Synthetic oligonucleotide
  Target: LAMA2; (-) strand; PAM type: NRG; PAM sequence: AAG
atacatggtataagtgtcaa

SEQ ID NO: 81466 - DNA, 20 bp, Artificial Sequence
  Description of Artificial Sequence: Synthetic oligonucleotide
  Target: LAMA2; (-) strand; PAM type: NRG; PAM sequence: AAG
agttttatcatacatggtat

SEQ ID NO: 81467 - DNA, 20 bp, Artificial Sequence
  Description of Artificial Sequence: Synthetic oligonucleotide
  Target: LAMA2; (-) strand; PAM type: NRG; PAM sequence: TGG
ggccaaagttttatcataca

SEQ ID NO: 81468 - DNA, 20 bp, Artificial Sequence
  Description of Artificial Sequence: Synthetic oligonucleotide
  Target: LAMA2; (-) strand; PAM type: NRG; PAM sequence: AAG
cagatttggtctacgggcca

SEQ ID NO: 81469 - DNA, 20 bp, Artificial Sequence
  Description of Artificial Sequence: Synthetic oligonucleotide
  Target: LAMA2; (-) strand; PAM type: NRG; PAM sequence: GGG
atgagtcagatttggtctac

SEQ ID NO: 81470 - DNA, 20 bp, Artificial Sequence
  Description of Artificial Sequence: Synthetic oligonucleotide
  Target: LAMA2; (-) strand; PAM type: NRG; PAM sequence: CGG
catgagtcagatttggtcta

SEQ ID NO: 81471 - DNA, 20 bp, Artificial Sequence
  Description of Artificial Sequence: Synthetic oligonucleotide
  Target: LAMA2; (-) strand; PAM type: NRG; PAM sequence: TGG
tataggccatgagtcagatt

SEQ ID NO: 81472 - DNA, 20 bp, Artificial Sequence
  Description of Artificial Sequence: Synthetic oligonucleotide
  Target: LAMA2; (-) strand; PAM type: NRG; PAM sequence: CAG
tacaaatataggccatgagt

SEQ ID NO: 81473 - DNA, 20 bp, Artificial Sequence
  Description of Artificial Sequence: Synthetic oligonucleotide
  Target: LAMA2; (-) strand; PAM type: NRG; PAM sequence: GAG
atcatacaaatataggccat

SEQ ID NO: 81474 - DNA, 20 bp, Artificial Sequence
  Description of Artificial Sequence: Synthetic oligonucleotide
  Target: LAMA2; (-) strand; PAM type: NRG; PAM sequence: AGG
cttacagatcatacaaatat

SEQ ID NO: 81475 - DNA, 20 bp, Artificial Sequence
  Description of Artificial Sequence: Synthetic oligonucleotide
  Target: LAMA2; (-) strand; PAM type: NRG; PAM sequence: TAG
gcttacagatcatacaaata

SEQ ID NO: 81476 - DNA, 20 bp, Artificial Sequence
  Description of Artificial Sequence: Synthetic oligonucleotide
  Target: LAMA2; (-) strand; PAM type: NRG; PAM sequence: CAG
gtaaaaacatcctttgctta

SEQ ID NO: 81477 - DNA, 20 bp, Artificial Sequence
  Description of Artificial Sequence: Synthetic oligonucleotide
  Target: LAMA2; (-) strand; PAM type: NRG; PAM sequence: TAG
cctcttcttcccccccctcc

SEQ ID NO: 81478 - DNA, 20 bp, Artificial Sequence
  Description of Artificial Sequence: Synthetic oligonucleotide
  Target: LAMA2; (-) strand; PAM type: NRG; PAM sequence: AAG
atagtaaaataagccatata

SEQ ID NO: 81479 - DNA, 20 bp, Artificial Sequence
  Description of Artificial Sequence: Synthetic oligonucleotide
  Target: LAMA2; (-) strand; PAM type: NRG; PAM sequence: AAG
aaagggccagatagtaaaat

SEQ ID NO: 81480 - DNA, 20 bp, Artificial Sequence
  Description of Artificial Sequence: Synthetic oligonucleotide
  Target: LAMA2; (-) strand; PAM type: NRG; PAM sequence: TAG
cttttctgtaaagggccaga

SEQ ID NO: 81481 - DNA, 20 bp, Artificial Sequence
  Description of Artificial Sequence: Synthetic oligonucleotide
  Target: LAMA2; (-) strand; PAM type: NRG; PAM sequence: CAG
aaaacttttctgtaaagggc

SEQ ID NO: 81482 - DNA, 20 bp, Artificial Sequence
  Description of Artificial Sequence: Synthetic oligonucleotide
  Target: LAMA2; (-) strand; PAM type: NRG; PAM sequence: GGG
ttggaaaacttttctgtaaa

SEQ ID NO: 81483 - DNA, 20 bp, Artificial Sequence
  Description of Artificial Sequence: Synthetic oligonucleotide
  Target: LAMA2; (-) strand; PAM type: NRG; PAM sequence: AGG
gttggaaaacttttctgtaa

SEQ ID NO: 81484 - DNA, 20 bp, Artificial Sequence
  Description of Artificial Sequence: Synthetic oligonucleotide
  Target: LAMA2; (-) strand; PAM type: NRG; PAM sequence: AAG
ggttggaaaacttttctgta

SEQ ID NO: 81485 - DNA, 20 bp, Artificial Sequence
  Description of Artificial Sequence: Synthetic oligonucleotide
  Target: LAMA2; (-) strand; PAM type: NRG; PAM sequence: TGG
agtttatttaactctgaggt

SEQ ID NO: 81486 - DNA, 20 bp, Artificial Sequence
  Description of Artificial Sequence: Synthetic oligonucleotide
  Target: LAMA2; (-) strand; PAM type: NRG; PAM sequence: AGG
tcatagtttatttaactctg

SEQ ID NO: 81487 - DNA, 20 bp, Artificial Sequence
  Description of Artificial Sequence: Synthetic oligonucleotide
  Target: LAMA2; (-) strand; PAM type: NRG; PAM sequence: GAG
atcatagtttatttaactct

SEQ ID NO: 81488 - DNA, 20 bp, Artificial Sequence
  Description of Artificial Sequence: Synthetic oligonucleotide
  Target: LAMA2; (-) strand; PAM type: NRG; PAM sequence: TAG
agccaaacatagacacatca

SEQ ID NO: 81489 - DNA, 20 bp, Artificial Sequence
  Description of Artificial Sequence: Synthetic oligonucleotide
  Target: LAMA2; (-) strand; PAM type: NRG; PAM sequence: TAG
gtaagcttgaaagccaaaca

SEQ ID NO: 81490 - DNA, 20 bp, Artificial Sequence
  Description of Artificial Sequence: Synthetic oligonucleotide
  Target: LAMA2; (-) strand; PAM type: NRG; PAM sequence: AAG
atcaagcaaggtaagcttga

SEQ ID NO: 81491 - DNA, 20 bp, Artificial Sequence
  Description of Artificial Sequence: Synthetic oligonucleotide
  Target: LAMA2; (-) strand; PAM type: NRG; PAM sequence: AAG
ctttgtgaatcaagcaaggt

SEQ ID NO: 81492 - DNA, 20 bp, Artificial Sequence
  Description of Artificial Sequence: Synthetic oligonucleotide
  Target: LAMA2; (-) strand; PAM type: NRG; PAM sequence: AGG
gaagctttgtgaatcaagca

SEQ ID NO: 81493 - DNA, 20 bp, Artificial Sequence
  Description of Artificial Sequence: Synthetic oligonucleotide
  Target: LAMA2; (-) strand; PAM type: NRG; PAM sequence: AAG
agaagctttgtgaatcaagc

SEQ ID NO: 81494 - DNA, 20 bp, Artificial Sequence
  Description of Artificial Sequence: Synthetic oligonucleotide
  Target: LAMA2; (-) strand; PAM type: NRG; PAM sequence: AAG
tcctagaagctttgtgaatc

SEQ ID NO: 81495 - DNA, 20 bp, Artificial Sequence
  Description of Artificial Sequence: Synthetic oligonucleotide
  Target: LAMA2; (-) strand; PAM type: NRG; PAM sequence: AAG
tctcaatttatagttcctag

SEQ ID NO: 81496 - DNA, 20 bp, Artificial Sequence
  Description of Artificial Sequence: Synthetic oligonucleotide
  Target: LAMA2; (-) strand; PAM type: NRG; PAM sequence: TAG
aaatctcaatttatagttcc

SEQ ID NO: 81497 - DNA, 20 bp, Artificial Sequence
  Description of Artificial Sequence: Synthetic oligonucleotide
  Target: LAMA2; (-) strand; PAM type: NRG; PAM sequence: TAG
tggaataaaatctcaattta

SEQ ID NO: 81498 - DNA, 20 bp, Artificial Sequence
  Description of Artificial Sequence: Synthetic oligonucleotide
  Target: LAMA2; (-) strand; PAM type: NRG; PAM sequence: TGG
agcctaaaatttcctaaatg

SEQ ID NO: 81499 - DNA, 20 bp, Artificial Sequence
  Description of Artificial Sequence: Synthetic oligonucleotide
  Target: LAMA2; (-) strand; PAM type: NRG; PAM sequence: TAG
ataagtaaaaataaaaaaaa

SEQ ID NO: 81500 - DNA, 20 bp, Artificial Sequence
  Description of Artificial Sequence: Synthetic oligonucleotide
  Target: LAMA2; (-) strand; PAM type: NRG; PAM sequence: AAG
aacaaaagcctaaaaaaaat

SEQ ID NO: 81501 - DNA, 20 bp, Artificial Sequence
  Description of Artificial Sequence: Synthetic oligonucleotide
  Target: LAMA2; (-) strand; PAM type: NRG; PAM sequence: AAG
aaaaaacaggttttaaacaa

SEQ ID NO: 81502 - DNA, 20 bp, Artificial Sequence
  Description of Artificial Sequence: Synthetic oligonucleotide
  Target: LAMA2; (-) strand; PAM type: NRG; PAM sequence: AGG
aaaaacactggtcaaaaaac

SEQ ID NO: 81503 - DNA, 20 bp, Artificial Sequence
  Description of Artificial Sequence: Synthetic oligonucleotide
  Target: LAMA2; (-) strand; PAM type: NRG; PAM sequence: CAG
gaaaaacactggtcaaaaaa

SEQ ID NO: 81504 - DNA, 20 bp, Artificial Sequence
  Description of Artificial Sequence: Synthetic oligonucleotide
  Target: LAMA2; (-) strand; PAM type: NRG; PAM sequence: TGG
agaaagagaaggaaaaacac

SEQ ID NO: 81505 - DNA, 20 bp, Artificial Sequence
  Description of Artificial Sequence: Synthetic oligonucleotide
  Target: LAMA2; (-) strand; PAM type: NRG; PAM sequence: AGG
gctggagtcctagaaagaga

SEQ ID NO: 81506 - DNA, 20 bp, Artificial Sequence
  Description of Artificial Sequence: Synthetic oligonucleotide
  Target: LAMA2; (-) strand; PAM type: NRG; PAM sequence: AAG
agctggagtcctagaaagag

SEQ ID NO: 81507 - DNA, 20 bp, Artificial Sequence
  Description of Artificial Sequence: Synthetic oligonucleotide
  Target: LAMA2; (-) strand; PAM type: NRG; PAM sequence: GAG
tgcagctggagtcctagaaa

SEQ ID NO: 81508 - DNA, 20 bp, Artificial Sequence
  Description of Artificial Sequence: Synthetic oligonucleotide
  Target: LAMA2; (-) strand; PAM type: NRG; PAM sequence: AAG
catgcagctggagtcctaga

SEQ ID NO: 81509 - DNA, 20 bp, Artificial Sequence
  Description of Artificial Sequence: Synthetic oligonucleotide
  Target: LAMA2; (-) strand; PAM type: NRG; PAM sequence: TAG
cacacatgcagctggagtcc

SEQ ID NO: 81510 - DNA, 20 bp, Artificial Sequence
  Description of Artificial Sequence: Synthetic oligonucleotide
  Target: LAMA2; (-) strand; PAM type: NRG; PAM sequence: GAG
ccctagcacacatgcagctg

SEQ ID NO: 81511 - DNA, 20 bp, Artificial Sequence
  Description of Artificial Sequence: Synthetic oligonucleotide
  Target: LAMA2; (-) strand; PAM type: NRG; PAM sequence: TGG
cgccctagcacacatgcagc

SEQ ID NO: 81512 - DNA, 20 bp, Artificial Sequence
  Description of Artificial Sequence: Synthetic oligonucleotide
  Target: LAMA2; (-) strand; PAM type: NRG; PAM sequence: CAG
tgaacgccctagcacacatg

SEQ ID NO: 81513 - DNA, 20 bp, Artificial Sequence
  Description of Artificial Sequence: Synthetic oligonucleotide
  Target: LAMA2; (-) strand; PAM type: NRG; PAM sequence: TAG
ctcagatacaatgaacgccc

SEQ ID NO: 81514 - DNA, 20 bp, Artificial Sequence
  Description of Artificial Sequence: Synthetic oligonucleotide
  Target: LAMA2; (-) strand; PAM type: NRG; PAM sequence: CAG
aaaattacttagcactgcct

SEQ ID NO: 81515 - DNA, 20 bp, Artificial Sequence
  Description of Artificial Sequence: Synthetic oligonucleotide
  Target: LAMA2; (-) strand; PAM type: NRG; PAM sequence: TAG
gagaaagaaaaaaaattact

SEQ ID NO: 81516 - DNA, 20 bp, Artificial Sequence
  Description of Artificial Sequence: Synthetic oligonucleotide
  Target: LAMA2; (-) strand; PAM type: NRG; PAM sequence: AAG
tccaatctaaagaacggaga

SEQ ID NO: 81517 - DNA, 20 bp, Artificial Sequence
  Description of Artificial Sequence: Synthetic oligonucleotide
  Target: LAMA2; (-) strand; PAM type: NRG; PAM sequence: GAG
atgatccaatctaaagaacg

SEQ ID NO: 81518 - DNA, 20 bp, Artificial Sequence
  Description of Artificial Sequence: Synthetic oligonucleotide
  Target: LAMA2; (-) strand; PAM type: NRG; PAM sequence: CGG
aaatgatccaatctaaagaa

SEQ ID NO: 81519 - DNA, 20 bp, Artificial Sequence
  Description of Artificial Sequence: Synthetic oligonucleotide
  Target: LAMA2; (-) strand; PAM type: NRG; PAM sequence: AAG
aatggaaatgatccaatcta

SEQ ID NO: 81520 - DNA, 20 bp, Artificial Sequence
  Description of Artificial Sequence: Synthetic oligonucleotide
  Target: LAMA2; (-) strand; PAM type: NRG; PAM sequence: TGG
aaagtataatgacagatgaa

SEQ ID NO: 81521 - DNA, 20 bp, Artificial Sequence
  Description of Artificial Sequence: Synthetic oligonucleotide
  Target: LAMA2; (-) strand; PAM type: NRG; PAM sequence: CAG
tgtagaccaaagtataatga

SEQ ID NO: 81522 - DNA, 20 bp, Artificial Sequence
  Description of Artificial Sequence: Synthetic oligonucleotide
  Target: LAMA2; (-) strand; PAM type: NRG; PAM sequence: AAG
gatacattatatgtagacca

SEQ ID NO: 81523 - DNA, 20 bp, Artificial Sequence
  Description of Artificial Sequence: Synthetic oligonucleotide
  Target: LAMA2; (-) strand; PAM type: NRG; PAM sequence: TAG
aattaaagatacattatatg

SEQ ID NO: 81524 - DNA, 20 bp, Artificial Sequence
  Description of Artificial Sequence: Synthetic oligonucleotide
  Target: LAMA2; (-) strand; PAM type: NRG; PAM sequence: AAG
taaaatcagctagtaaatta

SEQ ID NO: 81525 - DNA, 20 bp, Artificial Sequence
  Description of Artificial Sequence: Synthetic oligonucleotide
  Target: LAMA2; (-) strand; PAM type: NRG; PAM sequence: TAG
gagaatattttaaaatcagc

SEQ ID NO: 81526 - DNA, 20 bp, Artificial Sequence
  Description of Artificial Sequence: Synthetic oligonucleotide
  Target: LAMA2; (-) strand; PAM type: NRG; PAM sequence: CAG
taatgagaatattttaaaat

SEQ ID NO: 81527 - DNA, 20 bp, Artificial Sequence
  Description of Artificial Sequence: Synthetic oligonucleotide
  Target: LAMA2; (-) strand; PAM type: NRG; PAM sequence: GAG
accactgtgcccggcctaat

SEQ ID NO: 81528 - DNA, 20 bp, Artificial Sequence
  Description of Artificial Sequence: Synthetic oligonucleotide
  Target: LAMA2; (-) strand; PAM type: NRG; PAM sequence: CGG
ctggggtgaaccactgtgcc

SEQ ID NO: 81529 - DNA, 20 bp, Artificial Sequence
  Description of Artificial Sequence: Synthetic oligonucleotide
  Target: LAMA2; (-) strand; PAM type: NRG; PAM sequence: GGG
ccaaagtactgggattcctg

SEQ ID NO: 81530 - DNA, 20 bp, Artificial Sequence
  Description of Artificial Sequence: Synthetic oligonucleotide
  Target: LAMA2; (-) strand; PAM type: NRG; PAM sequence: GGG
tccaaagtactgggattcct

SEQ ID NO: 81531 - DNA, 20 bp, Artificial Sequence
  Description of Artificial Sequence: Synthetic oligonucleotide
  Target: LAMA2; (-) strand; PAM type: NRG; PAM sequence: TGG
ttccaaagtactgggattcc

SEQ ID NO: 81532 - DNA, 20 bp, Artificial Sequence
  Description of Artificial Sequence: Synthetic oligonucleotide
  Target: LAMA2; (-) strand; PAM type: NRG; PAM sequence: GGG
cttcggccttccaaagtact

SEQ ID NO: 81533 - DNA, 20 bp, Artificial Sequence
  Description of Artificial Sequence: Synthetic oligonucleotide
  Target: LAMA2; (-) strand; PAM type: NRG; PAM sequence: TGG
gcttcggccttccaaagtac

SEQ ID NO: 81534 - DNA, 20 bp, Artificial Sequence
  Description of Artificial Sequence: Synthetic oligonucleotide
  Target: LAMA2; (-) strand; PAM type: NRG; PAM sequence: AAG
ttgcctgcttcggccttcca

SEQ ID NO: 81535 - DNA, 20 bp, Artificial Sequence
  Description of Artificial Sequence: Synthetic oligonucleotide
  Target: LAMA2; (-) strand; PAM type: NRG; PAM sequence: CGG
cgcaagcgacttgcctgctt

SEQ ID NO: 81536 - DNA, 20 bp, Artificial Sequence
  Description of Artificial Sequence: Synthetic oligonucleotide
  Target: LAMA2; (-) strand; PAM type: NRG; PAM sequence: AAG
ggtcttaaactcctgaccgc

SEQ ID NO: 81537 - DNA, 20 bp, Artificial Sequence
  Description of Artificial Sequence: Synthetic oligonucleotide
  Target: LAMA2; (-) strand; PAM type: NRG; PAM sequence: TGG
tttcaccatgttggccaggt

SEQ ID NO: 81538 - DNA, 20 bp, Artificial Sequence
  Description of Artificial Sequence: Synthetic oligonucleotide
  Target: LAMA2; (-) strand; PAM type: NRG; PAM sequence: AGG
agggtttcaccatgttggcc

SEQ ID NO: 81539 - DNA, 20 bp, Artificial Sequence
  Description of Artificial Sequence: Synthetic oligonucleotide
  Target: LAMA2; (-) strand; PAM type: NRG; PAM sequence: CAG
cagggtttcaccatgttggc

SEQ ID NO: 81540 - DNA, 20 bp, Artificial Sequence
  Description of Artificial Sequence: Synthetic oligonucleotide
  Target: LAMA2; (-) strand; PAM type: NRG; PAM sequence: TGG
gagacagggtttcaccatgt

SEQ ID NO: 81541 - DNA, 20 bp, Artificial Sequence
  Description of Artificial Sequence: Synthetic oligonucleotide
  Target: LAMA2; (-) strand; PAM type: NRG; PAM sequence: GGG
ttgtatttttaatagagaca

SEQ ID NO: 81542 - DNA, 20 bp, Artificial Sequence
  Description of Artificial Sequence: Synthetic oligonucleotide
  Target: LAMA2; (-) strand; PAM type: NRG; PAM sequence: AGG
tttgtatttttaatagagac

SEQ ID NO: 81543 - DNA, 20 bp, Artificial Sequence
  Description of Artificial Sequence: Synthetic oligonucleotide
  Target: LAMA2; (-) strand; PAM type: NRG; PAM sequence: CAG
ttttgtatttttaatagaga

SEQ ID NO: 81544 - DNA, 20 bp, Artificial Sequence
  Description of Artificial Sequence: Synthetic oligonucleotide
  Target: LAMA2; (-) strand; PAM type: NRG; PAM sequence: GAG
taaattttgtatttttaata

SEQ ID NO: 81545 - DNA, 20 bp, Artificial Sequence
  Description of Artificial Sequence: Synthetic oligonucleotide
  Target: LAMA2; (-) strand; PAM type: NRG; PAM sequence: TAG
gctaaattttgtatttttaa

SEQ ID NO: 81546 - DNA, 20 bp, Artificial Sequence
  Description of Artificial Sequence: Synthetic oligonucleotide
  Target: LAMA2; (-) strand; PAM type: NRG; PAM sequence: TGG
caggtgcctgccaccatgcc

SEQ ID NO: 81547 - DNA, 20 bp, Artificial Sequence
  Description of Artificial Sequence: Synthetic oligonucleotide
  Target: LAMA2; (-) strand; PAM type: NRG; PAM sequence: AGG
tcctgagtaggtgatattac

SEQ ID NO: 81548 - DNA, 20 bp, Artificial Sequence
  Description of Artificial Sequence: Synthetic oligonucleotide
  Target: LAMA2; (-) strand; PAM type: NRG; PAM sequence: CAG
ctcctgagtaggtgatatta

SEQ ID NO: 81549 - DNA, 20 bp, Artificial Sequence
  Description of Artificial Sequence: Synthetic oligonucleotide
  Target: LAMA2; (-) strand; PAM type: NRG; PAM sequence: AGG
cctgcctcagtctcctgagt

SEQ ID NO: 81550 - DNA, 20 bp, Artificial Sequence
  Description of Artificial Sequence: Synthetic oligonucleotide
  Target: LAMA2; (-) strand; PAM type: NRG; PAM sequence: TAG
tcctgcctcagtctcctgag

SEQ ID NO: 81551 - DNA, 20 bp, Artificial Sequence
  Description of Artificial Sequence: Synthetic oligonucleotide
  Target: LAMA2; (-) strand; PAM type: NRG; PAM sequence: GAG
ttctcctgcctcagtctcct

SEQ ID NO: 81552 - DNA, 20 bp, Artificial Sequence
  Description of Artificial Sequence: Synthetic oligonucleotide
  Target: LAMA2; (-) strand; PAM type: NRG; PAM sequence: CAG
ttcaagctattctcctgcct

SEQ ID NO: 81553 - DNA, 20 bp, Artificial Sequence
  Description of Artificial Sequence: Synthetic oligonucleotide
  Target: LAMA2; (-) strand; PAM type: NRG; PAM sequence: AAG
caacctcacttcctgggttc

SEQ ID NO: 81554 - DNA, 20 bp, Artificial Sequence
  Description of Artificial Sequence: Synthetic oligonucleotide
  Target: LAMA2; (-) strand; PAM type: NRG; PAM sequence: GGG
ccactgcaacctcacttcct

SEQ ID NO: 81555 - DNA, 20 bp, Artificial Sequence
  Description of Artificial Sequence: Synthetic oligonucleotide
  Target: LAMA2; (-) strand; PAM type: NRG; PAM sequence: TGG
cccactgcaacctcacttcc

SEQ ID NO: 81556 - DNA, 20 bp, Artificial Sequence
  Description of Artificial Sequence: Synthetic oligonucleotide
  Target: LAMA2; (-) strand; PAM type: NRG; PAM sequence: AAG
aggctgaagtgcactggtgc

SEQ ID NO: 81557 - DNA, 20 bp, Artificial Sequence
  Description of Artificial Sequence: Synthetic oligonucleotide
  Target: LAMA2; (-) strand; PAM type: NRG; PAM sequence: TGG
ttgcccaggctgaagtgcac

SEQ ID NO: 81558 - DNA, 20 bp, Artificial Sequence
  Description of Artificial Sequence: Synthetic oligonucleotide
  Target: LAMA2; (-) strand; PAM type: NRG; PAM sequence: AAG
tcgctctcttgcccaggctg

SEQ ID NO: 81559 - DNA, 20 bp, Artificial Sequence
  Description of Artificial Sequence: Synthetic oligonucleotide
  Target: LAMA2; (-) strand; PAM type: NRG; PAM sequence: AGG
agggtctcgctctcttgccc

SEQ ID NO: 81560 - DNA, 20 bp, Artificial Sequence
  Description of Artificial Sequence: Synthetic oligonucleotide
  Target: LAMA2; (-) strand; PAM type: NRG; PAM sequence: CAG
tagggtctcgctctcttgcc

SEQ ID NO: 81561 - DNA, 20 bp, Artificial Sequence
  Description of Artificial Sequence: Synthetic oligonucleotide
  Target: LAMA2; (-) strand; PAM type: NRG; PAM sequence: GGG
ttgtatttatttttgagata

SEQ ID NO: 81562 - DNA, 20 bp, Artificial Sequence
  Description of Artificial Sequence: Synthetic oligonucleotide
  Target: LAMA2; (-) strand; PAM type: NRG; PAM sequence: AGG
tttgtatttatttttgagat

SEQ ID NO: 81563 - DNA, 20 bp, Artificial Sequence
  Description of Artificial Sequence: Synthetic oligonucleotide
  Target: LAMA2; (-) strand; PAM type: NRG; PAM sequence: TAG
atttgtatttatttttgaga

SEQ ID NO: 81564 - DNA, 20 bp, Artificial Sequence
  Description of Artificial Sequence: Synthetic oligonucleotide
  Target: LAMA2; (-) strand; PAM type: NRG; PAM sequence: GAG
atttatttgtatttattttt

SEQ ID NO: 81565 - DNA, 20 bp, Artificial Sequence
  Description of Artificial Sequence: Synthetic oligonucleotide
  Target: LAMA2; (-) strand; PAM type: NRG; PAM sequence: GAG
ttgttaaaagtaaatataat

SEQ ID NO: 81566 - DNA, 20 bp, Artificial Sequence
  Description of Artificial Sequence: Synthetic oligonucleotide
  Target: LAMA2; (-) strand; PAM type: NRG; PAM sequence: AAG
aaacatgatactattgttaa

SEQ ID NO: 81567 - DNA, 20 bp, Artificial Sequence
  Description of Artificial Sequence: Synthetic oligonucleotide
  Target: LAMA2; (-) strand; PAM type: NRG; PAM sequence: AAG
aggatttggtctacaggcca

SEQ ID NO: 81568 - DNA, 20 bp, Artificial Sequence
  Description of Artificial Sequence: Synthetic oligonucleotide
  Target: LAMA2; (-) strand; PAM type: NRG; PAM sequence: AGG
taggccaggatttggtctac

SEQ ID NO: 81569 - DNA, 20 bp, Artificial Sequence
  Description of Artificial Sequence: Synthetic oligonucleotide
  Target: LAMA2; (-) strand; PAM type: NRG; PAM sequence: CAG
ataggccaggatttggtcta

SEQ ID NO: 81570 - DNA, 20 bp, Artificial Sequence
  Description of Artificial Sequence: Synthetic oligonucleotide
  Target: LAMA2; (-) strand; PAM type: NRG; PAM sequence: TGG
tctggccataggccaggatt

SEQ ID NO: 81571 - DNA, 20 bp, Artificial Sequence
  Description of Artificial Sequence: Synthetic oligonucleotide
  Target: LAMA2; (-) strand; PAM type: NRG; PAM sequence: AGG
tagtcatctggccataggcc

SEQ ID NO: 81572 - DNA, 20 bp, Artificial Sequence
  Description of Artificial Sequence: Synthetic oligonucleotide
  Target: LAMA2; (-) strand; PAM type: NRG; PAM sequence: CAG
gtagtcatctggccataggc

SEQ ID NO: 81573 - DNA, 20 bp, Artificial Sequence
  Description of Artificial Sequence: Synthetic oligonucleotide
  Target: LAMA2; (-) strand; PAM type: NRG; PAM sequence: AGG
ttttgtagtcatctggccat

SEQ ID NO: 81574 - DNA, 20 bp, Artificial Sequence
  Description of Artificial Sequence: Synthetic oligonucleotide
  Target: LAMA2; (-) strand; PAM type: NRG; PAM sequence: TAG
cttttgtagtcatctggcca

SEQ ID NO: 81575 - DNA, 20 bp, Artificial Sequence
  Description of Artificial Sequence: Synthetic oligonucleotide
  Target: LAMA2; (-) strand; PAM type: NRG; PAM sequence: TGG
tgactacttttgtagtcatc

SEQ ID NO: 81576 - DNA, 20 bp, Artificial Sequence
  Description of Artificial Sequence: Synthetic oligonucleotide
  Target: LAMA2; (-) strand; PAM type: NRG; PAM sequence: TAG
caacctaatgactacttttg

SEQ ID NO: 81577 - DNA, 20 bp, Artificial Sequence
  Description of Artificial Sequence: Synthetic oligonucleotide
  Target: LAMA2; (-) strand; PAM type: NRG; PAM sequence: TAG
agagatgataggaggaagag

SEQ ID NO: 81578 - DNA, 20 bp, Artificial Sequence
  Description of Artificial Sequence: Synthetic oligonucleotide
  Target: LAMA2; (-) strand; PAM type: NRG; PAM sequence: GAG
ggtagagatgataggaggaa

SEQ ID NO: 81579 - DNA, 20 bp, Artificial Sequence
  Description of Artificial Sequence: Synthetic oligonucleotide
  Target: LAMA2; (-) strand; PAM type: NRG; PAM sequence: AAG
caggtagagatgataggagg

SEQ ID NO: 81580 - DNA, 20 bp, Artificial Sequence
  Description of Artificial Sequence: Synthetic oligonucleotide
  Target: LAMA2; (-) strand; PAM type: NRG; PAM sequence: AGG
catcaggtagagatgatagg

SEQ ID NO: 81581 - DNA, 20 bp, Artificial Sequence
  Description of Artificial Sequence: Synthetic oligonucleotide
  Target: LAMA2; (-) strand; PAM type: NRG; PAM sequence: GAG
acatcaggtagagatgatag

SEQ ID NO: 81582 - DNA, 20 bp, Artificial Sequence
  Description of Artificial Sequence: Synthetic oligonucleotide
  Target: LAMA2; (-) strand; PAM type: NRG; PAM sequence: AGG
taacatcaggtagagatgat

SEQ ID NO: 81583 - DNA, 20 bp, Artificial Sequence
  Description of Artificial Sequence: Synthetic oligonucleotide
  Target: LAMA2; (-) strand; PAM type: NRG; PAM sequence: TAG
ttaacatcaggtagagatga

SEQ ID NO: 81584 - DNA, 20 bp, Artificial Sequence
  Description of Artificial Sequence: Synthetic oligonucleotide
  Target: LAMA2; (-) strand; PAM type: NRG; PAM sequence: GAG
gatatgcttaacatcaggta

SEQ ID NO: 81585 - DNA, 20 bp, Artificial Sequence
  Description of Artificial Sequence: Synthetic oligonucleotide
  Target: LAMA2; (-) strand; PAM type: NRG; PAM sequence: TAG
tggatatgcttaacatcagg

SEQ ID NO: 81586 - DNA, 20 bp, Artificial Sequence
  Description of Artificial Sequence: Synthetic oligonucleotide
  Target: LAMA2; (-) strand; PAM type: NRG; PAM sequence: AGG
cactggatatgcttaacatc

SEQ ID NO: 81587 - DNA, 20 bp, Artificial Sequence
  Description of Artificial Sequence: Synthetic oligonucleotide
  Target: LAMA2; (-) strand; PAM type: NRG; PAM sequence: CAG
tcactggatatgcttaacat

SEQ ID NO: 81588 - DNA, 20 bp, Artificial Sequence
  Description of Artificial Sequence: Synthetic oligonucleotide
  Target: LAMA2; (-) strand; PAM type: NRG; PAM sequence: TGG
acctcaatttaataattcac

SEQ ID NO: 81589 - DNA, 20 bp, Artificial Sequence
  Description of Artificial Sequence: Synthetic oligonucleotide
  Target: LAMA2; (-) strand; PAM type: NRG; PAM sequence: AAG
aagaactccagaaagctgaa

SEQ ID NO: 81590 - DNA, 20 bp, Artificial Sequence
  Description of Artificial Sequence: Synthetic oligonucleotide
  Target: LAMA2; (-) strand; PAM type: NRG; PAM sequence: AAG
aggaacataagaactccaga

SEQ ID NO: 81591 - DNA, 20 bp, Artificial Sequence
  Description of Artificial Sequence: Synthetic oligonucleotide
  Target: LAMA2; (-) strand; PAM type: NRG; PAM sequence: CAG
tgtaaggaacataagaactc

SEQ ID NO: 81592 - DNA, 20 bp, Artificial Sequence
  Description of Artificial Sequence: Synthetic oligonucleotide
  Target: LAMA2; (-) strand; PAM type: NRG; PAM sequence: AAG
atggaagctgtaaggaacat

SEQ ID NO: 81593 - DNA, 20 bp, Artificial Sequence
  Description of Artificial Sequence: Synthetic oligonucleotide
  Target: LAMA2; (-) strand; PAM type: NRG; PAM sequence: AGG
tcagagaaatggaagctgta

SEQ ID NO: 81594 - DNA, 20 bp, Artificial Sequence
  Description of Artificial Sequence: Synthetic oligonucleotide
  Target: LAMA2; (-) strand; PAM type: NRG; PAM sequence: AAG
ttcagagaaatggaagctgt

SEQ ID NO: 81595 - DNA, 20 bp, Artificial Sequence
  Description of Artificial Sequence: Synthetic oligonucleotide
  Target: LAMA2; (-) strand; PAM type: NRG; PAM sequence: AAG
ggagtatttcagagaaatgg

SEQ ID NO: 81596 - DNA, 20 bp, Artificial Sequence
  Description of Artificial Sequence: Synthetic oligonucleotide
  Target: LAMA2; (-) strand; PAM type: NRG; PAM sequence: TGG
tatggagtatttcagagaaa

SEQ ID NO: 81597 - DNA, 20 bp, Artificial Sequence
  Description of Artificial Sequence: Synthetic oligonucleotide
  Target: LAMA2; (-) strand; PAM type: NRG; PAM sequence: GAG
tgaaggtatggagtatttca

SEQ ID NO: 81598 - DNA, 20 bp, Artificial Sequence
  Description of Artificial Sequence: Synthetic oligonucleotide
  Target: LAMA2; (-) strand; PAM type: NRG; PAM sequence: CAG
agtgaaggtatggagtattt

SEQ ID NO: 81599 - DNA, 20 bp, Artificial Sequence
  Description of Artificial Sequence: Synthetic oligonucleotide
  Target: LAMA2; (-) strand; PAM type: NRG; PAM sequence: GAG
ttataatgagtgaaggtatg

SEQ ID NO: 81600 - DNA, 20 bp, Artificial Sequence
  Description of Artificial Sequence: Synthetic oligonucleotide
  Target: LAMA2; (-) strand; PAM type: NRG; PAM sequence: TGG
gtttataatgagtgaaggta

SEQ ID NO: 81601 - DNA, 20 bp, Artificial Sequence
  Description of Artificial Sequence: Synthetic oligonucleotide
  Target: LAMA2; (-) strand; PAM type: NRG; PAM sequence: AGG
acaatgtttataatgagtga

SEQ ID NO: 81602 - DNA, 20 bp, Artificial Sequence
  Description of Artificial Sequence: Synthetic oligonucleotide
  Target: LAMA2; (-) strand; PAM type: NRG; PAM sequence: AAG
aacaatgtttataatgagtg

SEQ ID NO: 81603 - DNA, 20 bp, Artificial Sequence
  Description of Artificial Sequence: Synthetic oligonucleotide
  Target: LAMA2; (-) strand; PAM type: NRG; PAM sequence: GAG
aaggaaacaatgtttataat

SEQ ID NO: 81604 - DNA, 20 bp, Artificial Sequence
  Description of Artificial Sequence: Synthetic oligonucleotide
  Target: LAMA2; (-) strand; PAM type: NRG; PAM sequence: AGG
aaatatgtccgagaatataa

SEQ ID NO: 81605 - DNA, 20 bp, Artificial Sequence
  Description of Artificial Sequence: Synthetic oligonucleotide
  Target: LAMA2; (-) strand; PAM type: NRG; PAM sequence: AAG
taaatatgtccgagaatata

SEQ ID NO: 81606 - DNA, 20 bp, Artificial Sequence
  Description of Artificial Sequence: Synthetic oligonucleotide
  Target: LAMA2; (-) strand; PAM type: NRG; PAM sequence: GAG
taagttctgtaaatatgtcc

SEQ ID NO: 81607 - DNA, 20 bp, Artificial Sequence
  Description of Artificial Sequence: Synthetic oligonucleotide
  Target: LAMA2; (-) strand; PAM type: NRG; PAM sequence: AAG
gcatacaaggaagtcaacgt

SEQ ID NO: 81608 - DNA, 20 bp, Artificial Sequence
  Description of Artificial Sequence: Synthetic oligonucleotide
  Target: LAMA2; (-) strand; PAM type: NRG; PAM sequence: AAG
attgaaattagcatacaagg

SEQ ID NO: 81609 - DNA, 20 bp, Artificial Sequence
  Description of Artificial Sequence: Synthetic oligonucleotide
  Target: LAMA2; (-) strand; PAM type: NRG; PAM sequence: AGG
gatattgaaattagcataca

SEQ ID NO: 81610 - DNA, 20 bp, Artificial Sequence
  Description of Artificial Sequence: Synthetic oligonucleotide
  Target: LAMA2; (-) strand; PAM type: NRG; PAM sequence: AAG
agatattgaaattagcatac

SEQ ID NO: 81611 - DNA, 20 bp, Artificial Sequence
  Description of Artificial Sequence: Synthetic oligonucleotide
  Target: LAMA2; (-) strand; PAM type: NRG; PAM sequence: TAG
ggtgacccagatattgaaat

SEQ ID NO: 81612 - DNA, 20 bp, Artificial Sequence
  Description of Artificial Sequence: Synthetic oligonucleotide
  Target: LAMA2; (-) strand; PAM type: NRG; PAM sequence: CAG
aagcagatcctgaggtgacc

SEQ ID NO: 81613 - DNA, 20 bp, Artificial Sequence
  Description of Artificial Sequence: Synthetic oligonucleotide
  Target: LAMA2; (-) strand; PAM type: NRG; PAM sequence: AGG
gttgataaaagcagatcctg

SEQ ID NO: 81614 - DNA, 20 bp, Artificial Sequence
  Description of Artificial Sequence: Synthetic oligonucleotide
  Target: LAMA2; (-) strand; PAM type: NRG; PAM sequence: GAG
agttgataaaagcagatcct

SEQ ID NO: 81615 - DNA, 20 bp, Artificial Sequence
  Description of Artificial Sequence: Synthetic oligonucleotide
  Target: LAMA2; (-) strand; PAM type: NRG; PAM sequence: CAG
aaaaaagaagttgataaaag

SEQ ID NO: 81616 - DNA, 20 bp, Artificial Sequence
  Description of Artificial Sequence: Synthetic oligonucleotide
  Target: LAMA2; (-) strand; PAM type: NRG; PAM sequence: AAG
ttaaaaaaagaagttgataa

SEQ ID NO: 81617 - DNA, 20 bp, Artificial Sequence
  Description of Artificial Sequence: Synthetic oligonucleotide
  Target: LAMA2; (-) strand; PAM type: NRG; PAM sequence: AAG
gttgaccttattaaaaaaag

SEQ ID NO: 81618 - DNA, 20 bp, Artificial Sequence
  Description of Artificial Sequence: Synthetic oligonucleotide
  Target: LAMA2; (-) strand; PAM type: NRG; PAM sequence: AAG
aatgttgaccttattaaaaa

SEQ ID NO: 81619 - DNA, 20 bp, Artificial Sequence
  Description of Artificial Sequence: Synthetic oligonucleotide
  Target: LAMA2; (-) strand; PAM type: NRG; PAM sequence: AGG
tagatatacaggaaagaaac

SEQ ID NO: 81620 - DNA, 20 bp, Artificial Sequence
  Description of Artificial Sequence: Synthetic oligonucleotide
  Target: LAMA2; (-) strand; PAM type: NRG; PAM sequence: CAG
ttagatatacaggaaagaaa

SEQ ID NO: 81621 - DNA, 20 bp, Artificial Sequence
  Description of Artificial Sequence: Synthetic oligonucleotide
  Target: LAMA2; (-) strand; PAM type: NRG; PAM sequence: AAG
actgtattagatatacagga

SEQ ID NO: 81622 - DNA, 20 bp, Artificial Sequence
  Description of Artificial Sequence: Synthetic oligonucleotide
  Target: LAMA2; (-) strand; PAM type: NRG; PAM sequence: AGG
gactactgtattagatatac

SEQ ID NO: 81623 - DNA, 20 bp, Artificial Sequence
  Description of Artificial Sequence: Synthetic oligonucleotide
  Target: LAMA2; (-) strand; PAM type: NRG; PAM sequence: CAG
ggactactgtattagatata

SEQ ID NO: 81624 - DNA, 20 bp, Artificial Sequence
  Description of Artificial Sequence: Synthetic oligonucleotide
  Target: LAMA2; (-) strand; PAM type: NRG; PAM sequence: TAG
ataaaggaggactactgtat

SEQ ID NO: 81625 - DNA, 20 bp, Artificial Sequence
  Description of Artificial Sequence: Synthetic oligonucleotide
  Target: LAMA2; (-) strand; PAM type: NRG; PAM sequence: AGG
atatcctctgtgaataaagg

SEQ ID NO: 81626 - DNA, 20 bp, Artificial Sequence
  Description of Artificial Sequence: Synthetic oligonucleotide
  Target: LAMA2; (-) strand; PAM type: NRG; PAM sequence: GAG
catatcctctgtgaataaag

SEQ ID NO: 81627 - DNA, 20 bp, Artificial Sequence
  Description of Artificial Sequence: Synthetic oligonucleotide
  Target: LAMA2; (-) strand; PAM type: NRG; PAM sequence: AGG
aacatatcctctgtgaataa

SEQ ID NO: 81628 - DNA, 20 bp, Artificial Sequence
  Description of Artificial Sequence: Synthetic oligonucleotide
  Target: LAMA2; (-) strand; PAM type: NRG; PAM sequence: AAG
gaacatatcctctgtgaata

SEQ ID NO: 81629 - DNA, 20 bp, Artificial Sequence
  Description of Artificial Sequence: Synthetic oligonucleotide
  Target: LAMA2; (-) strand; PAM type: NRG; PAM sequence: TGG
caggtatcaactggggttcc

SEQ ID NO: 81630 - DNA, 20 bp, Artificial Sequence
  Description of Artificial Sequence: Synthetic oligonucleotide
  Target: LAMA2; (-) strand; PAM type: NRG; PAM sequence: GGG
gtgatttcaggtatcaactg

SEQ ID NO: 81631 - DNA, 20 bp, Artificial Sequence
  Description of Artificial Sequence: Synthetic oligonucleotide
  Target: LAMA2; (-) strand; PAM type: NRG; PAM sequence: GGG
tgtgatttcaggtatcaact

SEQ ID NO: 81632 - DNA, 20 bp, Artificial Sequence
  Description of Artificial Sequence: Synthetic oligonucleotide
  Target: LAMA2; (-) strand; PAM type: NRG; PAM sequence: TGG
ctgtgatttcaggtatcaac

SEQ ID NO: 81633 - DNA, 20 bp, Artificial Sequence
  Description of Artificial Sequence: Synthetic oligonucleotide
  Target: LAMA2; (-) strand; PAM type: NRG; PAM sequence: AGG
ttggtactatctgtgatttc

SEQ ID NO: 81634 - DNA, 20 bp, Artificial Sequence
  Description of Artificial Sequence: Synthetic oligonucleotide
  Target: LAMA2; (-) strand; PAM type: NRG; PAM sequence: CAG
tttggtactatctgtgattt

SEQ ID NO: 81635 - DNA, 20 bp, Artificial Sequence
  Description of Artificial Sequence: Synthetic oligonucleotide
  Target: LAMA2; (-) strand; PAM type: NRG; PAM sequence: TGG
aaacatagtatatataggtt

SEQ ID NO: 81636 - DNA, 20 bp, Artificial Sequence
  Description of Artificial Sequence: Synthetic oligonucleotide
  Target: LAMA2; (-) strand; PAM type: NRG; PAM sequence: AGG
agaaaaaacatagtatatat

SEQ ID NO: 81637 - DNA, 20 bp, Artificial Sequence
  Description of Artificial Sequence: Synthetic oligonucleotide
  Target: LAMA2; (-) strand; PAM type: NRG; PAM sequence: TAG
tagaaaaaacatagtatata

SEQ ID NO: 81638 - DNA, 20 bp, Artificial Sequence
  Description of Artificial Sequence: Synthetic oligonucleotide
  Target: LAMA2; (-) strand; PAM type: NRG; PAM sequence: TAG
ggtatcagatagaaaaaaca

SEQ ID NO: 81639 - DNA, 20 bp, Artificial Sequence
  Description of Artificial Sequence: Synthetic oligonucleotide
  Target: LAMA2; (-) strand; PAM type: NRG; PAM sequence: TAG
gtcccatcacaggtatcaga

SEQ ID NO: 81640 - DNA, 20 bp, Artificial Sequence
  Description of Artificial Sequence: Synthetic oligonucleotide
  Target: LAMA2; (-) strand; PAM type: NRG; PAM sequence: CAG
cttagtcccatcacaggtat

SEQ ID NO: 81641 - DNA, 20 bp, Artificial Sequence
  Description of Artificial Sequence: Synthetic oligonucleotide
  Target: LAMA2; (-) strand; PAM type: NRG; PAM sequence: AGG
tagtcacttagtcccatcac

SEQ ID NO: 81642 - DNA, 20 bp, Artificial Sequence
  Description of Artificial Sequence: Synthetic oligonucleotide
  Target: LAMA2; (-) strand; PAM type: NRG; PAM sequence: CAG
ttagtcacttagtcccatca

SEQ ID NO: 81643 - DNA, 20 bp, Artificial Sequence
  Description of Artificial Sequence: Synthetic oligonucleotide
  Target: LAMA2; (-) strand; PAM type: NRG; PAM sequence: TAG
ctaccctcctgttagtcact

SEQ ID NO: 81644 - DNA, 20 bp, Artificial Sequence
  Description of Artificial Sequence: Synthetic oligonucleotide
  Target: LAMA2; (-) strand; PAM type: NRG; PAM sequence: TAG
tatagacactaccctcctgt

SEQ ID NO: 81645 - DNA, 20 bp, Artificial Sequence
  Description of Artificial Sequence: Synthetic oligonucleotide
  Target: LAMA2; (-) strand; PAM type: NRG; PAM sequence: TAG
tccagcatatctatgctgta

SEQ ID NO: 81646 - DNA, 20 bp, Artificial Sequence
  Description of Artificial Sequence: Synthetic oligonucleotide
  Target: LAMA2; (-) strand; PAM type: NRG; PAM sequence: CAG
atatgaatcatccccttgtc

SEQ ID NO: 81647 - DNA, 20 bp, Artificial Sequence
  Description of Artificial Sequence: Synthetic oligonucleotide
  Target: LAMA2; (-) strand; PAM type: NRG; PAM sequence: GGG
catcttgctctgtcgcacca

SEQ ID NO: 81648 - DNA, 20 bp, Artificial Sequence
  Description of Artificial Sequence: Synthetic oligonucleotide
  Target: LAMA2; (-) strand; PAM type: NRG; PAM sequence: AGG
ccatcttgctctgtcgcacc

SEQ ID NO: 81649 - DNA, 20 bp, Artificial Sequence
  Description of Artificial Sequence: Synthetic oligonucleotide
  Target: LAMA2; (-) strand; PAM type: NRG; PAM sequence: CAG
gccatcttgctctgtcgcac

SEQ ID NO: 81650 - DNA, 20 bp, Artificial Sequence
  Description of Artificial Sequence: Synthetic oligonucleotide
  Target: LAMA2; (-) strand; PAM type: NRG; PAM sequence: GGG
gaatagtgtggtgaaatctc

SEQ ID NO: 81651 - DNA, 20 bp, Artificial Sequence
  Description of Artificial Sequence: Synthetic oligonucleotide
  Target: LAMA2; (-) strand; PAM type: NRG; PAM sequence: CGG
tgaatagtgtggtgaaatct

SEQ ID NO: 81652 - DNA, 20 bp, Artificial Sequence
  Description of Artificial Sequence: Synthetic oligonucleotide
  Target: LAMA2; (-) strand; PAM type: NRG; PAM sequence: TGG
gcatgtcattttgaatagtg

SEQ ID NO: 81653 - DNA, 20 bp, Artificial Sequence
  Description of Artificial Sequence: Synthetic oligonucleotide
  Target: LAMA2; (-) strand; PAM type: NRG; PAM sequence: TAG
aatttgcatgtcattttgaa

SEQ ID NO: 81654 - DNA, 20 bp, Artificial Sequence
  Description of Artificial Sequence: Synthetic oligonucleotide
  Target: LAMA2; (-) strand; PAM type: NRG; PAM sequence: AAG
tccagaaataaataattgaa

SEQ ID NO: 81655 - DNA, 20 bp, Artificial Sequence
  Description of Artificial Sequence: Synthetic oligonucleotide
  Target: LAMA2; (-) strand; PAM type: NRG; PAM sequence: CAG
aaatattaaatggaaaactc

SEQ ID NO: 81656 - DNA, 20 bp, Artificial Sequence
  Description of Artificial Sequence: Synthetic oligonucleotide
  Target: LAMA2; (-) strand; PAM type: NRG; PAM sequence: TGG
cacagttcgaaaatattaaa

SEQ ID NO: 81657 - DNA, 20 bp, Artificial Sequence
  Description of Artificial Sequence: Synthetic oligonucleotide
  Target: LAMA2; (-) strand; PAM type: NRG; PAM sequence: CAG
tcagttatcatggttaacca

SEQ ID NO: 81658 - DNA, 20 bp, Artificial Sequence
  Description of Artificial Sequence: Synthetic oligonucleotide
  Target: LAMA2; (-) strand; PAM type: NRG; PAM sequence: TGG
gtctgaggtttcagttatca

SEQ ID NO: 81659 - DNA, 20 bp, Artificial Sequence
  Description of Artificial Sequence: Synthetic oligonucleotide
  Target: LAMA2; (-) strand; PAM type: NRG; PAM sequence: CAG
agttttgctgtctgaggttt

SEQ ID NO: 81660 - DNA, 20 bp, Artificial Sequence
  Description of Artificial Sequence: Synthetic oligonucleotide
  Target: LAMA2; (-) strand; PAM type: NRG; PAM sequence: AGG
atctgtagttttgctgtctg

SEQ ID NO: 81661 - DNA, 20 bp, Artificial Sequence
  Description of Artificial Sequence: Synthetic oligonucleotide
  Target: LAMA2; (-) strand; PAM type: NRG; PAM sequence: GAG
catctgtagttttgctgtct

SEQ ID NO: 81662 - DNA, 20 bp, Artificial Sequence
  Description of Artificial Sequence: Synthetic oligonucleotide
  Target: LAMA2; (-) strand; PAM type: NRG; PAM sequence: TAG
agtagtcctcacctcatctg

SEQ ID NO: 81663 - DNA, 20 bp, Artificial Sequence
  Description of Artificial Sequence: Synthetic oligonucleotide
  Target: LAMA2; (-) strand; PAM type: NRG; PAM sequence: TAG
gtagagatgataaattacag

SEQ ID NO: 81664 - DNA, 20 bp, Artificial Sequence
  Description of Artificial Sequence: Synthetic oligonucleotide
  Target: LAMA2; (-) strand; PAM type: NRG; PAM sequence: CAG
cctgtagagatgataaatta

SEQ ID NO: 81665 - DNA, 20 bp, Artificial Sequence
  Description of Artificial Sequence: Synthetic oligonucleotide
  Target: LAMA2; (-) strand; PAM type: NRG; PAM sequence: GAG
attctccgaaatgtcctgta

SEQ ID NO: 81666 - DNA, 20 bp, Artificial Sequence
  Description of Artificial Sequence: Synthetic oligonucleotide
  Target: LAMA2; (-) strand; PAM type: NRG; PAM sequence: TAG
gtattctccgaaatgtcctg

SEQ ID NO: 81667 - DNA, 20 bp, Artificial Sequence
  Description of Artificial Sequence: Synthetic oligonucleotide
  Target: LAMA2; (-) strand; PAM type: NRG; PAM sequence: CAG
cagaggaacataacagaaac

SEQ ID NO: 81668 - DNA, 20 bp, Artificial Sequence
  Description of Artificial Sequence: Synthetic oligonucleotide
  Target: LAMA2; (-) strand; PAM type: NRG; PAM sequence: CAG
aactcttcagaggaacataa

SEQ ID NO: 81669 - DNA, 20 bp, Artificial Sequence
  Description of Artificial Sequence: Synthetic oligonucleotide
  Target: LAMA2; (-) strand; PAM type: NRG; PAM sequence: AGG
aaccaattcaaactcttcag

SEQ ID NO: 81670 - DNA, 20 bp, Artificial Sequence
  Description of Artificial Sequence: Synthetic oligonucleotide
  Target: LAMA2; (-) strand; PAM type: NRG; PAM sequence: GAG
gaaccaattcaaactcttca

SEQ ID NO: 81671 - DNA, 20 bp, Artificial Sequence
  Description of Artificial Sequence: Synthetic oligonucleotide
  Target: LAMA2; (-) strand; PAM type: NRG; PAM sequence: CAG
tagaaccaattcaaactctt

SEQ ID NO: 81672 - DNA, 20 bp, Artificial Sequence
  Description of Artificial Sequence: Synthetic oligonucleotide
  Target: LAMA2; (-) strand; PAM type: NRG; PAM sequence: TAG
tcagcaagtttattactaat

SEQ ID NO: 81673 - DNA, 20 bp, Artificial Sequence
  Description of Artificial Sequence: Synthetic oligonucleotide
  Target: LAMA2; (-) strand; PAM type: NRG; PAM sequence: AAG
cttcatggtgatcactcagc

SEQ ID NO: 81674 - DNA, 20 bp, Artificial Sequence
  Description of Artificial Sequence: Synthetic oligonucleotide
  Target: LAMA2; (-) strand; PAM type: NRG; PAM sequence: CAG
atgacttcatggtgatcact

SEQ ID NO: 81675 - DNA, 20 bp, Artificial Sequence
  Description of Artificial Sequence: Synthetic oligonucleotide
  Target: LAMA2; (-) strand; PAM type: NRG; PAM sequence: TGG
agtaaactttcatgacttca

SEQ ID NO: 81676 - DNA, 20 bp, Artificial Sequence
  Description of Artificial Sequence: Synthetic oligonucleotide
  Target: LAMA2; (-) strand; PAM type: NRG; PAM sequence: AAG
tctgtcctaacaaagtatga

SEQ ID NO: 81677 - DNA, 20 bp, Artificial Sequence
  Description of Artificial Sequence: Synthetic oligonucleotide
  Target: LAMA2; (-) strand; PAM type: NRG; PAM sequence: AAG
tccactaatctgtcctaaca

SEQ ID NO: 81678 - DNA, 20 bp, Artificial Sequence
  Description of Artificial Sequence: Synthetic oligonucleotide
  Target: LAMA2; (-) strand; PAM type: NRG; PAM sequence: GAG
aaatgtttgatgaatacctg

SEQ ID NO: 81679 - DNA, 20 bp, Artificial Sequence
  Description of Artificial Sequence: Synthetic oligonucleotide
  Target: LAMA2; (-) strand; PAM type: NRG; PAM sequence: TGG
agaaatgtttgatgaatacc

SEQ ID NO: 81680 - DNA, 20 bp, Artificial Sequence
  Description of Artificial Sequence: Synthetic oligonucleotide
  Target: LAMA2; (-) strand; PAM type: NRG; PAM sequence: TAG
agactttaagttaactacat

SEQ ID NO: 81681 - DNA, 20 bp, Artificial Sequence
  Description of Artificial Sequence: Synthetic oligonucleotide
  Target: LAMA2; (-) strand; PAM type: NRG; PAM sequence: AAG
gtaaagagaattcagacttt

SEQ ID NO: 81682 - DNA, 20 bp, Artificial Sequence
  Description of Artificial Sequence: Synthetic oligonucleotide
  Target: LAMA2; (-) strand; PAM type: NRG; PAM sequence: CAG
accataaagtaaagagaatt

SEQ ID NO: 81683 - DNA, 20 bp, Artificial Sequence
  Description of Artificial Sequence: Synthetic oligonucleotide
  Target: LAMA2; (-) strand; PAM type: NRG; PAM sequence: GAG
gctaccaaccataaagtaaa

SEQ ID NO: 81684 - DNA, 20 bp, Artificial Sequence
  Description of Artificial Sequence: Synthetic oligonucleotide
  Target: LAMA2; (-) strand; PAM type: NRG; PAM sequence: AAG
gtgctaccaaccataaagta

SEQ ID NO: 81685 - DNA, 20 bp, Artificial Sequence
  Description of Artificial Sequence: Synthetic oligonucleotide
  Target: LAMA2; (-) strand; PAM type: NRG; PAM sequence: AAG
ttcaggtgctaccaaccata

SEQ ID NO: 81686 - DNA, 20 bp, Artificial Sequence
  Description of Artificial Sequence: Synthetic oligonucleotide
  Target: LAMA2; (-) strand; PAM type: NRG; PAM sequence: AGG
acaaggtgagaagagttttc

SEQ ID NO: 81687 - DNA, 20 bp, Artificial Sequence
  Description of Artificial Sequence: Synthetic oligonucleotide
  Target: LAMA2; (-) strand; PAM type: NRG; PAM sequence: CAG
aacaaggtgagaagagtttt

SEQ ID NO: 81688 - DNA, 20 bp, Artificial Sequence
  Description of Artificial Sequence: Synthetic oligonucleotide
  Target: LAMA2; (-) strand; PAM type: NRG; PAM sequence: GAG
gaaactgaacaaggtgagaa

SEQ ID NO: 81689 - DNA, 20 bp, Artificial Sequence
  Description of Artificial Sequence: Synthetic oligonucleotide
  Target: LAMA2; (-) strand; PAM type: NRG; PAM sequence: AAG
tggaaactgaacaaggtgag

SEQ ID NO: 81690 - DNA, 20 bp, Artificial Sequence
  Description of Artificial Sequence: Synthetic oligonucleotide
  Target: LAMA2; (-) strand; PAM type: NRG; PAM sequence: GAG
cgctggaaactgaacaaggt

SEQ ID NO: 81691 - DNA, 20 bp, Artificial Sequence
  Description of Artificial Sequence: Synthetic oligonucleotide
  Target: LAMA2; (-) strand; PAM type: NRG; PAM sequence: AGG
caaccgctggaaactgaaca

SEQ ID NO: 81692 - DNA, 20 bp, Artificial Sequence
  Description of Artificial Sequence: Synthetic oligonucleotide
  Target: LAMA2; (-) strand; PAM type: NRG; PAM sequence: AAG
gcaaccgctggaaactgaac

SEQ ID NO: 81693 - DNA, 20 bp, Artificial Sequence
  Description of Artificial Sequence: Synthetic oligonucleotide
  Target: LAMA2; (-) strand; PAM type: NRG; PAM sequence: TGG
attcagtggaaagcaaccgc

SEQ ID NO: 81694 - DNA, 20 bp, Artificial Sequence
  Description of Artificial Sequence: Synthetic oligonucleotide
  Target: LAMA2; (-) strand; PAM type: NRG; PAM sequence: AAG
attctaggaaattcagtgga

SEQ ID NO: 81695 - DNA, 20 bp, Artificial Sequence
  Description of Artificial Sequence: Synthetic oligonucleotide
  Target: LAMA2; (-) strand; PAM type: NRG; PAM sequence: TGG
ggagattctaggaaattcag

SEQ ID NO: 81696 - DNA, 20 bp, Artificial Sequence
  Description of Artificial Sequence: Synthetic oligonucleotide
  Target: LAMA2; (-) strand; PAM type: NRG; PAM sequence: CAG
tcaggagattctaggaaatt

SEQ ID NO: 81697 - DNA, 20 bp, Artificial Sequence
  Description of Artificial Sequence: Synthetic oligonucleotide
  Target: LAMA2; (-) strand; PAM type: NRG; PAM sequence: AGG
atattcactcaggagattct

SEQ ID NO: 81698 - DNA, 20 bp, Artificial Sequence
  Description of Artificial Sequence: Synthetic oligonucleotide
  Target: LAMA2; (-) strand; PAM type: NRG; PAM sequence: TAG
tatattcactcaggagattc

SEQ ID NO: 81699 - DNA, 20 bp, Artificial Sequence
  Description of Artificial Sequence: Synthetic oligonucleotide
  Target: LAMA2; (-) strand; PAM type: NRG; PAM sequence: GAG
tttattgtatattcactcag

SEQ ID NO: 81700 - DNA, 20 bp, Artificial Sequence
  Description of Artificial Sequence: Synthetic oligonucleotide
  Target: LAMA2; (-) strand; PAM type: NRG; PAM sequence: AGG
cctttattgtatattcactc

SEQ ID NO: 81701 - DNA, 20 bp, Artificial Sequence
  Description of Artificial Sequence: Synthetic oligonucleotide
  Target: LAMA2; (-) strand; PAM type: NRG; PAM sequence: CAG
ccctttattgtatattcact

SEQ ID NO: 81702 - DNA, 20 bp, Artificial Sequence
  Description of Artificial Sequence: Synthetic oligonucleotide
  Target: LAMA2; (-) strand; PAM type: NRG; PAM sequence: CAG
ttgcataacaatacccttcc

SEQ ID NO: 81703 - DNA, 20 bp, Artificial Sequence
  Description of Artificial Sequence: Synthetic oligonucleotide
  Target: LAMA2; (-) strand; PAM type: NRG; PAM sequence: TAG
catcatagagataaattctt

SEQ ID NO: 81704 - DNA, 20 bp, Artificial Sequence
  Description of Artificial Sequence: Synthetic oligonucleotide
  Target: LAMA2; (-) strand; PAM type: NRG; PAM sequence: GAG
ataattttatgaacatcata

SEQ ID NO: 81705 - DNA, 20 bp, Artificial Sequence
  Description of Artificial Sequence: Synthetic oligonucleotide
  Target: LAMA2; (-) strand; PAM type: NRG; PAM sequence: TAG
caataattttatgaacatca

SEQ ID NO: 81706 - DNA, 20 bp, Artificial Sequence
  Description of Artificial Sequence: Synthetic oligonucleotide
  Target: LAMA2; (-) strand; PAM type: NRG; PAM sequence: AAG
aaaatctaaaatcaaatttt

SEQ ID NO: 81707 - DNA, 20 bp, Artificial Sequence
  Description of Artificial Sequence: Synthetic oligonucleotide
  Target: LAMA2; (-) strand; PAM type: NRG; PAM sequence: TGG
ataaattaaatgtcattaag

SEQ ID NO: 81708 - DNA, 20 bp, Artificial Sequence
  Description of Artificial Sequence: Synthetic oligonucleotide
  Target: LAMA2; (-) strand; PAM type: NRG; PAM sequence: AAG
catataaattaaatgtcatt

SEQ ID NO: 81709 - DNA, 20 bp, Artificial Sequence
  Description of Artificial Sequence: Synthetic oligonucleotide
  Target: LAMA2; (-) strand; PAM type: NRG; PAM sequence: AGG
gactgtgcacagaataggta

SEQ ID NO: 81710 - DNA, 20 bp, Artificial Sequence
  Description of Artificial Sequence: Synthetic oligonucleotide
  Target: LAMA2; (-) strand; PAM type: NRG; PAM sequence: AAG
ggactgtgcacagaataggt

SEQ ID NO: 81711 - DNA, 20 bp, Artificial Sequence
  Description of Artificial Sequence: Synthetic oligonucleotide
  Target: LAMA2; (-) strand; PAM type: NRG; PAM sequence: AGG
gttgggactgtgcacagaat

SEQ ID NO: 81712 - DNA, 20 bp, Artificial Sequence
  Description of Artificial Sequence: Synthetic oligonucleotide
  Target: LAMA2; (-) strand; PAM type: NRG; PAM sequence: TAG
agttgggactgtgcacagaa

SEQ ID NO: 81713 - DNA, 20 bp, Artificial Sequence
  Description of Artificial Sequence: Synthetic oligonucleotide
  Target: LAMA2; (-) strand; PAM type: NRG; PAM sequence: CAG
tatgaagttgggactgtgca

SEQ ID NO: 81714 - DNA, 20 bp, Artificial Sequence
  Description of Artificial Sequence: Synthetic oligonucleotide
  Target: LAMA2; (-) strand; PAM type: NRG; PAM sequence: GGG
cattcccccattatgaagtt

SEQ ID NO: 81715 - DNA, 20 bp, Artificial Sequence
  Description of Artificial Sequence: Synthetic oligonucleotide
  Target: LAMA2; (-) strand; PAM type: NRG; PAM sequence: TGG
tcattcccccattatgaagt

SEQ ID NO: 81716 - DNA, 20 bp, Artificial Sequence
  Description of Artificial Sequence: Synthetic oligonucleotide
  Target: LAMA2; (-) strand; PAM type: NRG; PAM sequence: AAG
tcattcattcccccattatg

SEQ ID NO: 81717 - DNA, 20 bp, Artificial Sequence
  Description of Artificial Sequence: Synthetic oligonucleotide
  Target: LAMA2; (-) strand; PAM type: NRG; PAM sequence: AAG
ttcaaaatcatcatttgttt

SEQ ID NO: 81718 - DNA, 20 bp, Artificial Sequence
  Description of Artificial Sequence: Synthetic oligonucleotide
  Target: LAMA2; (-) strand; PAM type: NRG; PAM sequence: CAG
aattaactaagttcacaggt

SEQ ID NO: 81719 - DNA, 20 bp, Artificial Sequence
  Description of Artificial Sequence: Synthetic oligonucleotide
  Target: LAMA2; (-) strand; PAM type: NRG; PAM sequence: AGG
tctcaattaactaagttcac

SEQ ID NO: 81720 - DNA, 20 bp, Artificial Sequence
  Description of Artificial Sequence: Synthetic oligonucleotide
  Target: LAMA2; (-) strand; PAM type: NRG; PAM sequence: CAG
atctcaattaactaagttca

SEQ ID NO: 81721 - DNA, 20 bp, Artificial Sequence
  Description of Artificial Sequence: Synthetic oligonucleotide
  Target: LAMA2; (-) strand; PAM type: NRG; PAM sequence: AAG
tcactgaatctcaattaact

SEQ ID NO: 81722 - DNA, 20 bp, Artificial Sequence
  Description of Artificial Sequence: Synthetic oligonucleotide
  Target: LAMA2; (-) strand; PAM type: NRG; PAM sequence: TAG
ataaatcagagtgttaaaat

SEQ ID NO: 81723 - DNA, 20 bp, Artificial Sequence
  Description of Artificial Sequence: Synthetic oligonucleotide
  Target: LAMA2; (-) strand; PAM type: NRG; PAM sequence: GAG
ttgtttgctactataaatca

SEQ ID NO: 81724 - DNA, 20 bp, Artificial Sequence
  Description of Artificial Sequence: Synthetic oligonucleotide
  Target: LAMA2; (-) strand; PAM type: NRG; PAM sequence: CAG
acttgtttgctactataaat

SEQ ID NO: 81725 - DNA, 20 bp, Artificial Sequence
  Description of Artificial Sequence: Synthetic oligonucleotide
  Target: LAMA2; (-) strand; PAM type: NRG; PAM sequence: AGG
gttcatatgtatatatatct

SEQ ID NO: 81726 - DNA, 20 bp, Artificial Sequence
  Description of Artificial Sequence: Synthetic oligonucleotide
  Target: LAMA2; (-) strand; PAM type: NRG; PAM sequence: TAG
agttcatatgtatatatatc

SEQ ID NO: 81727 - DNA, 20 bp, Artificial Sequence
  Description of Artificial Sequence: Synthetic oligonucleotide
  Target: LAMA2; (-) strand; PAM type: NRG; PAM sequence: TAG
aaatgcccacctattcaata

SEQ ID NO: 81728 - DNA, 20 bp, Artificial Sequence
  Description of Artificial Sequence: Synthetic oligonucleotide
  Target: LAMA2; (-) strand; PAM type: NRG; PAM sequence: AAG
aaaaactaaattatttgccc

SEQ ID NO: 81729 - DNA, 20 bp, Artificial Sequence
  Description of Artificial Sequence: Synthetic oligonucleotide
  Target: LAMA2; (-) strand; PAM type: NRG; PAM sequence: AGG
atttattttccagatgtaat

SEQ ID NO: 81730 - DNA, 20 bp, Artificial Sequence
  Description of Artificial Sequence: Synthetic oligonucleotide
  Target: LAMA2; (-) strand; PAM type: NRG; PAM sequence: TAG
gatttattttccagatgtaa

SEQ ID NO: 81731 - DNA, 20 bp, Artificial Sequence
  Description of Artificial Sequence: Synthetic oligonucleotide
  Target: LAMA2; (-) strand; PAM type: NRG; PAM sequence: CAG
tatatacaagatttattttc

SEQ ID NO: 81732 - DNA, 20 bp, Artificial Sequence
  Description of Artificial Sequence: Synthetic oligonucleotide
  Target: LAMA2; (-) strand; PAM type: NRG; PAM sequence: AAG
tgttcatatactgtatatac

SEQ ID NO: 81733 - DNA, 20 bp, Artificial Sequence
  Description of Artificial Sequence: Synthetic oligonucleotide
  Target: LAMA2; (-) strand; PAM type: NRG; PAM sequence: TAG
acatagtatatcaacaaagc

SEQ ID NO: 81734 - DNA, 20 bp, Artificial Sequence
  Description of Artificial Sequence: Synthetic oligonucleotide
  Target: LAMA2; (-) strand; PAM type: NRG; PAM sequence: AAG
gtatacatagtatatcaaca

SEQ ID NO: 81735 - DNA, 20 bp, Artificial Sequence
  Description of Artificial Sequence: Synthetic oligonucleotide
  Target: LAMA2; (-) strand; PAM type: NRG; PAM sequence: TAG
tcctttttatcttgtataca

SEQ ID NO: 81736 - DNA, 20 bp, Artificial Sequence
  Description of Artificial Sequence: Synthetic oligonucleotide
  Target: LAMA2; (-) strand; PAM type: NRG; PAM sequence: TAG
attcctatatatttgttact

SEQ ID NO: 81737 - DNA, 20 bp, Artificial Sequence
  Description of Artificial Sequence: Synthetic oligonucleotide
  Target: LAMA2; (-) strand; PAM type: NRG; PAM sequence: TAG
ttacacaaaagtaaagataa

SEQ ID NO: 81738 - DNA, 20 bp, Artificial Sequence
  Description of Artificial Sequence: Synthetic oligonucleotide
  Target: LAMA2; (-) strand; PAM type: NRG; PAM sequence: AAG
tacatgcttacacaaaagta

SEQ ID NO: 81739 - DNA, 20 bp, Artificial Sequence
  Description of Artificial Sequence: Synthetic oligonucleotide
  Target: LAMA2; (-) strand; PAM type: NRG; PAM sequence: AAG
tcttttacatgcttacacaa

SEQ ID NO: 81740 - DNA, 20 bp, Artificial Sequence
  Description of Artificial Sequence: Synthetic oligonucleotide
  Target: LAMA2; (-) strand; PAM type: NRG; PAM sequence: CAG
tgtttataatttctaaaatc

SEQ ID NO: 81741 - DNA, 20 bp, Artificial Sequence
  Description of Artificial Sequence: Synthetic oligonucleotide
  Target: LAMA2; (-) strand; PAM type: NRG; PAM sequence: AAG
caaattattgagaaaactat

SEQ ID NO: 81742 - DNA, 20 bp, Artificial Sequence
  Description of Artificial Sequence: Synthetic oligonucleotide
  Target: LAMA2; (-) strand; PAM type: NRG; PAM sequence: GAG
atacagagcagcaaattatt

SEQ ID NO: 81743 - DNA, 20 bp, Artificial Sequence
  Description of Artificial Sequence: Synthetic oligonucleotide
  Target: LAMA2; (-) strand; PAM type: NRG; PAM sequence: CAG
gtagttttaataatacagag

SEQ ID NO: 81744 - DNA, 20 bp, Artificial Sequence
  Description of Artificial Sequence: Synthetic oligonucleotide
  Target: LAMA2; (-) strand; PAM type: NRG; PAM sequence: GAG
aaagtagttttaataataca

SEQ ID NO: 81745 - DNA, 20 bp, Artificial Sequence
  Description of Artificial Sequence: Synthetic oligonucleotide
  Target: LAMA2; (-) strand; PAM type: NRG; PAM sequence: CAG
acaaagtagttttaataata

SEQ ID NO: 81746 - DNA, 20 bp, Artificial Sequence
  Description of Artificial Sequence: Synthetic oligonucleotide
  Target: LAMA2; (-) strand; PAM type: NRG; PAM sequence: TAG
gcaaacttttatagacaaag

SEQ ID NO: 81747 - DNA, 20 bp, Artificial Sequence
  Description of Artificial Sequence: Synthetic oligonucleotide
  Target: LAMA2; (-) strand; PAM type: NRG; PAM sequence: AAG
tcagcaaacttttatagaca

SEQ ID NO: 81748 - DNA, 20 bp, Artificial Sequence
  Description of Artificial Sequence: Synthetic oligonucleotide
  Target: LAMA2; (-) strand; PAM type: NRG; PAM sequence: TAG
ttcacttcagcaaactttta

SEQ ID NO: 81749 - DNA, 20 bp, Artificial Sequence
  Description of Artificial Sequence: Synthetic oligonucleotide
  Target: LAMA2; (-) strand; PAM type: NRG; PAM sequence: CAG
aacagcaatatttttcactt

SEQ ID NO: 81750 - DNA, 20 bp, Artificial Sequence
  Description of Artificial Sequence: Synthetic oligonucleotide
  Target: LAMA2; (-) strand; PAM type: NRG; PAM sequence: CAG
ttaacgaagtgtaatagaaa

SEQ ID NO: 81751 - DNA, 20 bp, Artificial Sequence
  Description of Artificial Sequence: Synthetic oligonucleotide
  Target: LAMA2; (-) strand; PAM type: NRG; PAM sequence: TAG
atgaatttaacgaagtgtaa

SEQ ID NO: 81752 - DNA, 20 bp, Artificial Sequence
  Description of Artificial Sequence: Synthetic oligonucleotide
  Target: LAMA2; (-) strand; PAM type: NRG; PAM sequence: AAG
atattaaaatgaatttaacg

SEQ ID NO: 81753 - DNA, 20 bp, Artificial Sequence
  Description of Artificial Sequence: Synthetic oligonucleotide
  Target: LAMA2; (-) strand; PAM type: NRG; PAM sequence: GAG
gcatggccttggataatttg

SEQ ID NO: 81754 - DNA, 20 bp, Artificial Sequence
  Description of Artificial Sequence: Synthetic oligonucleotide
  Target: LAMA2; (-) strand; PAM type: NRG; PAM sequence: TGG
tggcatggccttggataatt

SEQ ID NO: 81755 - DNA, 20 bp, Artificial Sequence
  Description of Artificial Sequence: Synthetic oligonucleotide
  Target: LAMA2; (-) strand; PAM type: NRG; PAM sequence: TGG
tgacatggctggcatggcct

SEQ ID NO: 81756 - DNA, 20 bp, Artificial Sequence
  Description of Artificial Sequence: Synthetic oligonucleotide
  Target: LAMA2; (-) strand; PAM type: NRG; PAM sequence: TGG
tcgcaatgacatggctggca

SEQ ID NO: 81757 - DNA, 20 bp, Artificial Sequence
  Description of Artificial Sequence: Synthetic oligonucleotide
  Target: LAMA2; (-) strand; PAM type: NRG; PAM sequence: TGG
ttggatcgcaatgacatggc

SEQ ID NO: 81758 - DNA, 20 bp, Artificial Sequence
  Description of Artificial Sequence: Synthetic oligonucleotide
  Target: LAMA2; (-) strand; PAM type: NRG; PAM sequence: TGG
ccaattggatcgcaatgaca

SEQ ID NO: 81759 - DNA, 20 bp, Artificial Sequence
  Description of Artificial Sequence: Synthetic oligonucleotide
  Target: LAMA2; (-) strand; PAM type: NRG; PAM sequence: TGG
acttcatttaaggaaccaat

SEQ ID NO: 81760 - DNA, 20 bp, Artificial Sequence
  Description of Artificial Sequence: Synthetic oligonucleotide
  Target: LAMA2; (-) strand; PAM type: NRG; PAM sequence: AGG
cttgacacagacttcattta

SEQ ID NO: 81761 - DNA, 20 bp, Artificial Sequence
  Description of Artificial Sequence: Synthetic oligonucleotide
  Target: LAMA2; (-) strand; PAM type: NRG; PAM sequence: AAG
ccttgacacagacttcattt

SEQ ID NO: 81762 - DNA, 20 bp, Artificial Sequence
  Description of Artificial Sequence: Synthetic oligonucleotide
  Target: LAMA2; (-) strand; PAM type: NRG; PAM sequence: CAG
catgtttctcatccttgaca

SEQ ID NO: 81763 - DNA, 20 bp, Artificial Sequence
  Description of Artificial Sequence: Synthetic oligonucleotide
  Target: LAMA2; (-) strand; PAM type: NRG; PAM sequence: GAG
gctgcagctctcacctcgtc

SEQ ID NO: 81764 - DNA, 20 bp, Artificial Sequence
  Description of Artificial Sequence: Synthetic oligonucleotide
  Target: LAMA2; (-) strand; PAM type: NRG; PAM sequence: CAG
agagcagtgacattctgctg

SEQ ID NO: 81765 - DNA, 20 bp, Artificial Sequence
  Description of Artificial Sequence: Synthetic oligonucleotide
  Target: LAMA2; (-) strand; PAM type: NRG; PAM sequence: CAG
tagttgtccttttatcagag

SEQ ID NO: 81766 - DNA, 20 bp, Artificial Sequence
  Description of Artificial Sequence: Synthetic oligonucleotide
  Target: LAMA2; (-) strand; PAM type: NRG; PAM sequence: GAG
ttttagttgtccttttatca

SEQ ID NO: 81767 - DNA, 20 bp, Artificial Sequence
  Description of Artificial Sequence: Synthetic oligonucleotide
  Target: LAMA2; (-) strand; PAM type: NRG; PAM sequence: CAG
gcttttagttgtccttttat

SEQ ID NO: 81768 - DNA, 20 bp, Artificial Sequence
  Description of Artificial Sequence: Synthetic oligonucleotide
  Target: LAMA2; (-) strand; PAM type: NRG; PAM sequence: TAG
aaataatcatatttggcttt

SEQ ID NO: 81769 - DNA, 20 bp, Artificial Sequence
  Description of Artificial Sequence: Synthetic oligonucleotide
  Target: LAMA2; (-) strand; PAM type: NRG; PAM sequence: TGG
cttctgaaaataatcatatt

SEQ ID NO: 81770 - DNA, 20 bp, Artificial Sequence
  Description of Artificial Sequence: Synthetic oligonucleotide
  Target: LAMA2; (-) strand; PAM type: NRG; PAM sequence: AAG
gctaatacactgatagatta

SEQ ID NO: 81771 - DNA, 20 bp, Artificial Sequence
  Description of Artificial Sequence: Synthetic oligonucleotide
  Target: LAMA2; (-) strand; PAM type: NRG; PAM sequence: TAG
agggaacgctaatacactga

SEQ ID NO: 81772 - DNA, 20 bp, Artificial Sequence
  Description of Artificial Sequence: Synthetic oligonucleotide
  Target: LAMA2; (-) strand; PAM type: NRG; PAM sequence: GGG
tttaaaaactacttcctgga

SEQ ID NO: 81773 - DNA, 20 bp, Artificial Sequence
  Description of Artificial Sequence: Synthetic oligonucleotide
  Target: LAMA2; (-) strand; PAM type: NRG; PAM sequence: AGG
gtttaaaaactacttcctgg

SEQ ID NO: 81774 - DNA, 20 bp, Artificial Sequence
  Description of Artificial Sequence: Synthetic oligonucleotide
  Target: LAMA2; (-) strand; PAM type: NRG; PAM sequence: GAG
agtttaaaaactacttcctg

SEQ ID NO: 81775 - DNA, 20 bp, Artificial Sequence
  Description of Artificial Sequence: Synthetic oligonucleotide
  Target: LAMA2; (-) strand; PAM type: NRG; PAM sequence: TGG
tgagtttaaaaactacttcc

SEQ ID NO: 81776 - DNA, 20 bp, Artificial Sequence
  Description of Artificial Sequence: Synthetic oligonucleotide
  Target: LAMA2; (-) strand; PAM type: NRG; PAM sequence: GAG
atgaaagtaattattgagat

SEQ ID NO: 81777 - DNA, 20 bp, Artificial Sequence
  Description of Artificial Sequence: Synthetic oligonucleotide
  Target: LAMA2; (-) strand; PAM type: NRG; PAM sequence: GAG
taaacatgaaagtaattatt

SEQ ID NO: 81778 - DNA, 20 bp, Artificial Sequence
  Description of Artificial Sequence: Synthetic oligonucleotide
  Target: LAMA2; (-) strand; PAM type: NRG; PAM sequence: AAG
aacattataattaaacatga

SEQ ID NO: 81779 - DNA, 20 bp, Artificial Sequence
  Description of Artificial Sequence: Synthetic oligonucleotide
  Target: LAMA2; (-) strand; PAM type: NRG; PAM sequence: CAG
tgaaaaaattacatatacca

SEQ ID NO: 81780 - DNA, 20 bp, Artificial Sequence
  Description of Artificial Sequence: Synthetic oligonucleotide
  Target: LAMA2; (-) strand; PAM type: NRG; PAM sequence: AAG
tttcatgctagaactcatag

SEQ ID NO: 81781 - DNA, 20 bp, Artificial Sequence
  Description of Artificial Sequence: Synthetic oligonucleotide
  Target: LAMA2; (-) strand; PAM type: NRG; PAM sequence: TAG
gcatttcatgctagaactca

SEQ ID NO: 81782 - DNA, 20 bp, Artificial Sequence
  Description of Artificial Sequence: Synthetic oligonucleotide
  Target: LAMA2; (-) strand; PAM type: NRG; PAM sequence: TAG
tgaacgctggcatttcatgc

SEQ ID NO: 81783 - DNA, 20 bp, Artificial Sequence
  Description of Artificial Sequence: Synthetic oligonucleotide
  Target: LAMA2; (-) strand; PAM type: NRG; PAM sequence: TGG
acacattcctcagtgaacgc

SEQ ID NO: 81784 - DNA, 20 bp, Artificial Sequence
  Description of Artificial Sequence: Synthetic oligonucleotide
  Target: LAMA2; (-) strand; PAM type: NRG; PAM sequence: CAG
actacagcacacacattcct

SEQ ID NO: 81785 - DNA, 20 bp, Artificial Sequence
  Description of Artificial Sequence: Synthetic oligonucleotide
  Target: LAMA2; (-) strand; PAM type: NRG; PAM sequence: CAG
tctatttgcttttcccacta

SEQ ID NO: 81786 - DNA, 20 bp, Artificial Sequence
  Description of Artificial Sequence: Synthetic oligonucleotide
  Target: LAMA2; (-) strand; PAM type: NRG; PAM sequence: GAG
ttgcctacatctcagtgtgt

SEQ ID NO: 81787 - DNA, 20 bp, Artificial Sequence
  Description of Artificial Sequence: Synthetic oligonucleotide
  Target: LAMA2; (-) strand; PAM type: NRG; PAM sequence: CAG
ctatattattgcctacatct

SEQ ID NO: 81788 - DNA, 20 bp, Artificial Sequence
  Description of Artificial Sequence: Synthetic oligonucleotide
  Target: LAMA2; (-) strand; PAM type: NRG; PAM sequence: TAG
attcatgactactaccttct

SEQ ID NO: 81789 - DNA, 20 bp, Artificial Sequence
  Description of Artificial Sequence: Synthetic oligonucleotide
  Target: LAMA2; (-) strand; PAM type: NRG; PAM sequence: CAG
gctttagcttaaattagtgt

SEQ ID NO: 81790 - DNA, 20 bp, Artificial Sequence
  Description of Artificial Sequence: Synthetic oligonucleotide
  Target: LAMA2; (-) strand; PAM type: NRG; PAM sequence: TAG
aggaaggctttagcttaaat

SEQ ID NO: 81791 - DNA, 20 bp, Artificial Sequence
  Description of Artificial Sequence: Synthetic oligonucleotide
  Target: LAMA2; (-) strand; PAM type: NRG; PAM sequence: TAG
cattcctcaaaggaaggctt

SEQ ID NO: 81792 - DNA, 20 bp, Artificial Sequence
  Description of Artificial Sequence: Synthetic oligonucleotide
  Target: LAMA2; (-) strand; PAM type: NRG; PAM sequence: AGG
gaatttcattcctcaaagga

SEQ ID NO: 81793 - DNA, 20 bp, Artificial Sequence
  Description of Artificial Sequence: Synthetic oligonucleotide
  Target: LAMA2; (-) strand; PAM type: NRG; PAM sequence: AAG
tgaatttcattcctcaaagg

SEQ ID NO: 81794 - DNA, 20 bp, Artificial Sequence
  Description of Artificial Sequence: Synthetic oligonucleotide
  Target: LAMA2; (-) strand; PAM type: NRG; PAM sequence: AGG
tcatgaatttcattcctcaa

SEQ ID NO: 81795 - DNA, 20 bp, Artificial Sequence
  Description of Artificial Sequence: Synthetic oligonucleotide
  Target: LAMA2; (-) strand; PAM type: NRG; PAM sequence: AAG
ttcatgaatttcattcctca

SEQ ID NO: 81796 - DNA, 20 bp, Artificial Sequence
  Description of Artificial Sequence: Synthetic oligonucleotide
  Target: LAMA2; (-) strand; PAM type: NRG; PAM sequence: GAG
atttgatttcttaatgtttg

SEQ ID NO: 81797 - DNA, 20 bp, Artificial Sequence
  Description of Artificial Sequence: Synthetic oligonucleotide
  Target: LAMA2; (-) strand; PAM type: NRG; PAM sequence: TGG
gcatttgatttcttaatgtt

SEQ ID NO: 81798 - DNA, 20 bp, Artificial Sequence
  Description of Artificial Sequence: Synthetic oligonucleotide
  Target: LAMA2; (-) strand; PAM type: NRG; PAM sequence: TGG
tttatatcaaggagttatgt

SEQ ID NO: 81799 - DNA, 20 bp, Artificial Sequence
  Description of Artificial Sequence: Synthetic oligonucleotide
  Target: LAMA2; (-) strand; PAM type: NRG; PAM sequence: GAG
ccaaacgcttttatatcaag

SEQ ID NO: 81800 - DNA, 20 bp, Artificial Sequence
  Description of Artificial Sequence: Synthetic oligonucleotide
  Target: LAMA2; (-) strand; PAM type: NRG; PAM sequence: AGG
tcccaaacgcttttatatca

SEQ ID NO: 81801 - DNA, 20 bp, Artificial Sequence
  Description of Artificial Sequence: Synthetic oligonucleotide
  Target: LAMA2; (-) strand; PAM type: NRG; PAM sequence: AAG
ctcccaaacgcttttatatc

SEQ ID NO: 81802 - DNA, 20 bp, Artificial Sequence
  Description of Artificial Sequence: Synthetic oligonucleotide
  Target: LAMA2; (-) strand; PAM type: NRG; PAM sequence: TAG
gcgagcaactgccctggaag

SEQ ID NO: 81803 - DNA, 20 bp, Artificial Sequence
  Description of Artificial Sequence: Synthetic oligonucleotide
  Target: LAMA2; (-) strand; PAM type: NRG; PAM sequence: AAG
ttggcgagcaactgccctgg

SEQ ID NO: 81804 - DNA, 20 bp, Artificial Sequence
  Description of Artificial Sequence: Synthetic oligonucleotide
  Target: LAMA2; (-) strand; PAM type: NRG; PAM sequence: TGG
aacttggcgagcaactgccc

SEQ ID NO: 81805 - DNA, 20 bp, Artificial Sequence
  Description of Artificial Sequence: Synthetic oligonucleotide
  Target: LAMA2; (-) strand; PAM type: NRG; PAM sequence: GAG
atttcctacttaaacttggc

SEQ ID NO: 81806 - DNA, 20 bp, Artificial Sequence
  Description of Artificial Sequence: Synthetic oligonucleotide
  Target: LAMA2; (-) strand; PAM type: NRG; PAM sequence: TGG
atgaatttcctacttaaact

SEQ ID NO: 81807 - DNA, 20 bp, Artificial Sequence
  Description of Artificial Sequence: Synthetic oligonucleotide
  Target: LAMA2; (-) strand; PAM type: NRG; PAM sequence: CAG
tttctagagaagaagcgtcc

SEQ ID NO: 81808 - DNA, 20 bp, Artificial Sequence
  Description of Artificial Sequence: Synthetic oligonucleotide
  Target: LAMA2; (-) strand; PAM type: NRG; PAM sequence: AAG
ttttagtctttctagagaag

SEQ ID NO: 81809 - DNA, 20 bp, Artificial Sequence
  Description of Artificial Sequence: Synthetic oligonucleotide
  Target: LAMA2; (-) strand; PAM type: NRG; PAM sequence: AAG
taattttagtctttctagag

SEQ ID NO: 81810 - DNA, 20 bp, Artificial Sequence
  Description of Artificial Sequence: Synthetic oligonucleotide
  Target: LAMA2; (-) strand; PAM type: NRG; PAM sequence: GAG
gattaattttagtctttcta

SEQ ID NO: 81811 - DNA, 20 bp, Artificial Sequence
  Description of Artificial Sequence: Synthetic oligonucleotide
  Target: LAMA2; (-) strand; PAM type: NRG; PAM sequence: TAG
ttgattaattttagtctttc

SEQ ID NO: 81812 - DNA, 20 bp, Artificial Sequence
  Description of Artificial Sequence: Synthetic oligonucleotide
  Target: LAMA2; (-) strand; PAM type: NRG; PAM sequence: TAG
attgtagccttgattaattt

SEQ ID NO: 81813 - DNA, 20 bp, Artificial Sequence
  Description of Artificial Sequence: Synthetic oligonucleotide
  Target: LAMA2; (-) strand; PAM type: NRG; PAM sequence: TAG
gggaaaaaaacactacattg

SEQ ID NO: 81814 - DNA, 20 bp, Artificial Sequence
  Description of Artificial Sequence: Synthetic oligonucleotide
  Target: LAMA2; (-) strand; PAM type: NRG; PAM sequence: GGG
ttttaacgctaaagtcatta

SEQ ID NO: 81815 - DNA, 20 bp, Artificial Sequence
  Description of Artificial Sequence: Synthetic oligonucleotide
  Target: LAMA2; (-) strand; PAM type: NRG; PAM sequence: AGG
cttttaacgctaaagtcatt

SEQ ID NO: 81816 - DNA, 20 bp, Artificial Sequence
  Description of Artificial Sequence: Synthetic oligonucleotide
  Target: LAMA2; (-) strand; PAM type: NRG; PAM sequence: TAG
tcttttaacgctaaagtcat

SEQ ID NO: 81817 - DNA, 20 bp, Artificial Sequence
  Description of Artificial Sequence: Synthetic oligonucleotide
  Target: LAMA2; (-) strand; PAM type: NRG; PAM sequence: AAG
ttgctggtcttttaacgcta

SEQ ID NO: 81818 - DNA, 20 bp, Artificial Sequence
  Description of Artificial Sequence: Synthetic oligonucleotide
  Target: LAMA2; (-) strand; PAM type: NRG; PAM sequence: TGG
ttgtacctaagaaacattgc

SEQ ID NO: 81819 - DNA, 20 bp, Artificial Sequence
  Description of Artificial Sequence: Synthetic oligonucleotide
  Target: LAMA2; (-) strand; PAM type: NRG; PAM sequence: AAG
aggtaacaagaattgtacct

SEQ ID NO: 81820 - DNA, 20 bp, Artificial Sequence
  Description of Artificial Sequence: Synthetic oligonucleotide
  Target: LAMA2; (-) strand; PAM type: NRG; PAM sequence: AAG
ttataaagaaagcaggtaac

SEQ ID NO: 81821 - DNA, 20 bp, Artificial Sequence
  Description of Artificial Sequence: Synthetic oligonucleotide
  Target: LAMA2; (-) strand; PAM type: NRG; PAM sequence: AGG
tacagttttataaagaaagc

SEQ ID NO: 81822 - DNA, 20 bp, Artificial Sequence
  Description of Artificial Sequence: Synthetic oligonucleotide
  Target: LAMA2; (-) strand; PAM type: NRG; PAM sequence: CAG
ctacagttttataaagaaag

SEQ ID NO: 81823 - DNA, 20 bp, Artificial Sequence
  Description of Artificial Sequence: Synthetic oligonucleotide
  Target: LAMA2; (-) strand; PAM type: NRG; PAM sequence: AAG
atcctacagttttataaaga

SEQ ID NO: 81824 - DNA, 20 bp, Artificial Sequence
  Description of Artificial Sequence: Synthetic oligonucleotide
  Target: LAMA2; (-) strand; PAM type: NRG; PAM sequence: AAG
gataatcctacagttttata

SEQ ID NO: 81825 - DNA, 20 bp, Artificial Sequence
  Description of Artificial Sequence: Synthetic oligonucleotide
  Target: LAMA2; (-) strand; PAM type: NRG; PAM sequence: CAG
tgctcagattgataatccta

SEQ ID NO: 81826 - DNA, 20 bp, Artificial Sequence
  Description of Artificial Sequence: Synthetic oligonucleotide
  Target: LAMA2; (-) strand; PAM type: NRG; PAM sequence: CAG
tttagtctacatgtaatgct

SEQ ID NO: 81827 - DNA, 20 bp, Artificial Sequence
  Description of Artificial Sequence: Synthetic oligonucleotide
  Target: LAMA2; (-) strand; PAM type: NRG; PAM sequence: TAG
ttttttaatatttcaaaatt

SEQ ID NO: 81828 - DNA, 20 bp, Artificial Sequence
  Description of Artificial Sequence: Synthetic oligonucleotide
  Target: LAMA2; (-) strand; PAM type: NRG; PAM sequence: CAG
cttaaaacgaaaagtgagct

SEQ ID NO: 81829 - DNA, 20 bp, Artificial Sequence
  Description of Artificial Sequence: Synthetic oligonucleotide
  Target: LAMA2; (-) strand; PAM type: NRG; PAM sequence: GAG
aaaggcttaaaacgaaaagt

SEQ ID NO: 81830 - DNA, 20 bp, Artificial Sequence
  Description of Artificial Sequence: Synthetic oligonucleotide
  Target: LAMA2; (-) strand; PAM type: NRG; PAM sequence: AAG
gagaaaaggcttaaaacgaa

SEQ ID NO: 81831 - DNA, 20 bp, Artificial Sequence
  Description of Artificial Sequence: Synthetic oligonucleotide
  Target: LAMA2; (-) strand; PAM type: NRG; PAM sequence: AGG
cttgtaaacacaaagagaaa

SEQ ID NO: 81832 - DNA, 20 bp, Artificial Sequence
  Description of Artificial Sequence: Synthetic oligonucleotide
  Target: LAMA2; (-) strand; PAM type: NRG; PAM sequence: AAG
acttgtaaacacaaagagaa

SEQ ID NO: 81833 - DNA, 20 bp, Artificial Sequence
  Description of Artificial Sequence: Synthetic oligonucleotide
  Target: LAMA2; (-) strand; PAM type: NRG; PAM sequence: GAG
gatttacttgtaaacacaaa

SEQ ID NO: 81834 - DNA, 20 bp, Artificial Sequence
  Description of Artificial Sequence: Synthetic oligonucleotide
  Target: LAMA2; (-) strand; PAM type: NRG; PAM sequence: AAG
gtgatttacttgtaaacaca

SEQ ID NO: 81835 - DNA, 20 bp, Artificial Sequence
  Description of Artificial Sequence: Synthetic oligonucleotide
  Target: LAMA2; (-) strand; PAM type: NRG; PAM sequence: GAG
actcaaaaaggggtagggaa

SEQ ID NO: 81836 - DNA, 20 bp, Artificial Sequence
  Description of Artificial Sequence: Synthetic oligonucleotide
  Target: LAMA2; (-) strand; PAM type: NRG; PAM sequence: AAG
ttactcaaaaaggggtaggg

SEQ ID NO: 81837 - DNA, 20 bp, Artificial Sequence
  Description of Artificial Sequence: Synthetic oligonucleotide
  Target: LAMA2; (-) strand; PAM type: NRG; PAM sequence: GGG
tcattactcaaaaaggggta

SEQ ID NO: 81838 - DNA, 20 bp, Artificial Sequence
  Description of Artificial Sequence: Synthetic oligonucleotide
  Target: LAMA2; (-) strand; PAM type: NRG; PAM sequence: AGG
ctcattactcaaaaaggggt

SEQ ID NO: 81839 - DNA, 20 bp, Artificial Sequence
  Description of Artificial Sequence: Synthetic oligonucleotide
  Target: LAMA2; (-) strand; PAM type: NRG; PAM sequence: TAG
actcattactcaaaaagggg

SEQ ID NO: 81840 - DNA, 20 bp, Artificial Sequence
  Description of Artificial Sequence: Synthetic oligonucleotide
  Target: LAMA2; (-) strand; PAM type: NRG; PAM sequence: GGG
tatactcattactcaaaaag

SEQ ID NO: 81841 - DNA, 20 bp, Artificial Sequence
  Description of Artificial Sequence: Synthetic oligonucleotide
  Target: LAMA2; (-) strand; PAM type: NRG; PAM sequence: GGG
atatactcattactcaaaaa

SEQ ID NO: 81842 - DNA, 20 bp, Artificial Sequence
  Description of Artificial Sequence: Synthetic oligonucleotide
  Target: LAMA2; (-) strand; PAM type: NRG; PAM sequence: AGG
catatactcattactcaaaa

SEQ ID NO: 81843 - DNA, 20 bp, Artificial Sequence
  Description of Artificial Sequence: Synthetic oligonucleotide
  Target: LAMA2; (-) strand; PAM type: NRG; PAM sequence: AAG
tcatatactcattactcaaa

SEQ ID NO: 81844 - DNA, 20 bp, Artificial Sequence
  Description of Artificial Sequence: Synthetic oligonucleotide
  Target: LAMA2; (-) strand; PAM type: NRG; PAM sequence: TGG
atatatgaaaatgttaatag

SEQ ID NO: 81845 - DNA, 20 bp, Artificial Sequence
  Description of Artificial Sequence: Synthetic oligonucleotide
  Target: LAMA2; (-) strand; PAM type: NRG; PAM sequence: TAG
gaaatatatgaaaatgttaa

SEQ ID NO: 81846 - DNA, 20 bp, Artificial Sequence
  Description of Artificial Sequence: Synthetic oligonucleotide
  Target: LAMA2; (-) strand; PAM type: NRG; PAM sequence: CAG
aatttttgtatgcattatga

SEQ ID NO: 81847 - DNA, 20 bp, Artificial Sequence
  Description of Artificial Sequence: Synthetic oligonucleotide
  Target: LAMA2; (-) strand; PAM type: NRG; PAM sequence: CAG
aaagttaagaggagcaatat

SEQ ID NO: 81848 - DNA, 20 bp, Artificial Sequence
  Description of Artificial Sequence: Synthetic oligonucleotide
  Target: LAMA2; (-) strand; PAM type: NRG; PAM sequence: GAG
tcatcacataaagttaagag

SEQ ID NO: 81849 - DNA, 20 bp, Artificial Sequence
  Description of Artificial Sequence: Synthetic oligonucleotide
  Target: LAMA2; (-) strand; PAM type: NRG; PAM sequence: AGG
actcatcacataaagttaag

SEQ ID NO: 81850 - DNA, 20 bp, Artificial Sequence
  Description of Artificial Sequence: Synthetic oligonucleotide
  Target: LAMA2; (-) strand; PAM type: NRG; PAM sequence: GAG
aactcatcacataaagttaa

SEQ ID NO: 81851 - DNA, 20 bp, Artificial Sequence
  Description of Artificial Sequence: Synthetic oligonucleotide
  Target: LAMA2; (-) strand; PAM type: NRG; PAM sequence: AAG
gaaactcatcacataaagtt

SEQ ID NO: 81852 - DNA, 20 bp, Artificial Sequence
  Description of Artificial Sequence: Synthetic oligonucleotide
  Target: LAMA2; (-) strand; PAM type: NRG; PAM sequence: AAG
ttggggaaactcatcacata

SEQ ID NO: 81853 - DNA, 20 bp, Artificial Sequence
  Description of Artificial Sequence: Synthetic oligonucleotide
  Target: LAMA2; (-) strand; PAM type: NRG; PAM sequence: GGG
aaagttttcatagatttttg

SEQ ID NO: 81854 - DNA, 20 bp, Artificial Sequence
  Description of Artificial Sequence: Synthetic oligonucleotide
  Target: LAMA2; (-) strand; PAM type: NRG; PAM sequence: GGG
gaaagttttcatagattttt

SEQ ID NO: 81855 - DNA, 20 bp, Artificial Sequence
  Description of Artificial Sequence: Synthetic oligonucleotide
  Target: LAMA2; (-) strand; PAM type: NRG; PAM sequence: TGG
agaaagttttcatagatttt

SEQ ID NO: 81856 - DNA, 20 bp, Artificial Sequence
  Description of Artificial Sequence: Synthetic oligonucleotide
  Target: LAMA2; (-) strand; PAM type: NRG; PAM sequence: TAG
gacttcagagaaagttttca

SEQ ID NO: 81857 - DNA, 20 bp, Artificial Sequence
  Description of Artificial Sequence: Synthetic oligonucleotide
  Target: LAMA2; (-) strand; PAM type: NRG; PAM sequence: AAG
ctgaagccagacttcagaga

SEQ ID NO: 81858 - DNA, 20 bp, Artificial Sequence
  Description of Artificial Sequence: Synthetic oligonucleotide
  Target: LAMA2; (-) strand; PAM type: NRG; PAM sequence: GAG
ggtgctgaagccagacttca

SEQ ID NO: 81859 - DNA, 20 bp, Artificial Sequence
  Description of Artificial Sequence: Synthetic oligonucleotide
  Target: LAMA2; (-) strand; PAM type: NRG; PAM sequence: CAG
taggtgctgaagccagactt

SEQ ID NO: 81860 - DNA, 20 bp, Artificial Sequence
  Description of Artificial Sequence: Synthetic oligonucleotide
  Target: LAMA2; (-) strand; PAM type: NRG; PAM sequence: CAG
tgttatttaggtgctgaagc

SEQ ID NO: 81861 - DNA, 20 bp, Artificial Sequence
  Description of Artificial Sequence: Synthetic oligonucleotide
  Target: LAMA2; (-) strand; PAM type: NRG; PAM sequence: AAG
aatgtgttatttaggtgctg

SEQ ID NO: 81862 - DNA, 20 bp, Artificial Sequence
  Description of Artificial Sequence: Synthetic oligonucleotide
  Target: LAMA2; (-) strand; PAM type: NRG; PAM sequence: AGG
catataataatgtgttattt

SEQ ID NO: 81863 - DNA, 20 bp, Artificial Sequence
  Description of Artificial Sequence: Synthetic oligonucleotide
  Target: LAMA2; (-) strand; PAM type: NRG; PAM sequence: TAG
ccatataataatgtgttatt

SEQ ID NO: 81864 - DNA, 20 bp, Artificial Sequence
  Description of Artificial Sequence: Synthetic oligonucleotide
  Target: LAMA2; (-) strand; PAM type: NRG; PAM sequence: TGG
gttgagagggtaaataatta

SEQ ID NO: 81865 - DNA, 20 bp, Artificial Sequence
  Description of Artificial Sequence: Synthetic oligonucleotide
  Target: LAMA2; (-) strand; PAM type: NRG; PAM sequence: GGG
atgtccatataaagttgaga

SEQ ID NO: 81866 - DNA, 20 bp, Artificial Sequence
  Description of Artificial Sequence: Synthetic oligonucleotide
  Target: LAMA2; (-) strand; PAM type: NRG; PAM sequence: AGG
aatgtccatataaagttgag

SEQ ID NO: 81867 - DNA, 20 bp, Artificial Sequence
  Description of Artificial Sequence: Synthetic oligonucleotide
  Target: LAMA2; (-) strand; PAM type: NRG; PAM sequence: GAG
taatgtccatataaagttga

SEQ ID NO: 81868 - DNA, 20 bp, Artificial Sequence
  Description of Artificial Sequence: Synthetic oligonucleotide
  Target: LAMA2; (-) strand; PAM type: NRG; PAM sequence: GAG
cttaatgtccatataaagtt

SEQ ID NO: 81869 - DNA, 20 bp, Artificial Sequence
  Description of Artificial Sequence: Synthetic oligonucleotide
  Target: LAMA2; (-) strand; PAM type: NRG; PAM sequence: AAG
acaatcttaatgtccatata

SEQ ID NO: 81870 - DNA, 20 bp, Artificial Sequence
  Description of Artificial Sequence: Synthetic oligonucleotide
  Target: LAMA2; (-) strand; PAM type: NRG; PAM sequence: TGG
aataagtattattaaaggat

SEQ ID NO: 81871 - DNA, 20 bp, Artificial Sequence
  Description of Artificial Sequence: Synthetic oligonucleotide
  Target: LAMA2; (-) strand; PAM type: NRG; PAM sequence: AGG
tatggaataagtattattaa

SEQ ID NO: 81872 - DNA, 20 bp, Artificial Sequence
  Description of Artificial Sequence: Synthetic oligonucleotide
  Target: LAMA2; (-) strand; PAM type: NRG; PAM sequence: AAG
atatggaataagtattatta

SEQ ID NO: 81873 - DNA, 20 bp, Artificial Sequence
  Description of Artificial Sequence: Synthetic oligonucleotide
  Target: LAMA2; (-) strand; PAM type: NRG; PAM sequence: AAG
gaaaagtaattatatggaat

SEQ ID NO: 81874 - DNA, 20 bp, Artificial Sequence
  Description of Artificial Sequence: Synthetic oligonucleotide
  Target: LAMA2; (-) strand; PAM type: NRG; PAM sequence: TGG
ataattgaaaagtaattata

SEQ ID NO: 81875 - DNA, 20 bp, Artificial Sequence
  Description of Artificial Sequence: Synthetic oligonucleotide
  Target: LAMA2; (-) strand; PAM type: NRG; PAM sequence: AAG
ttgtttttacaataattgaa

SEQ ID NO: 81876 - DNA, 20 bp, Artificial Sequence
  Description of Artificial Sequence: Synthetic oligonucleotide
  Target: LAMA2; (-) strand; PAM type: NRG; PAM sequence: AAG
tattttatttctttactatt

SEQ ID NO: 81877 - DNA, 20 bp, Artificial Sequence
  Description of Artificial Sequence: Synthetic oligonucleotide
  Target: LAMA2; (-) strand; PAM type: NRG; PAM sequence: AGG
ctgggataaataggttgaag

SEQ ID NO: 81878 - DNA, 20 bp, Artificial Sequence
  Description of Artificial Sequence: Synthetic oligonucleotide
  Target: LAMA2; (-) strand; PAM type: NRG; PAM sequence: GAG
actgggataaataggttgaa

SEQ ID NO: 81879 - DNA, 20 bp, Artificial Sequence
  Description of Artificial Sequence: Synthetic oligonucleotide
  Target: LAMA2; (-) strand; PAM type: NRG; PAM sequence: AAG
agactgggataaataggttg

SEQ ID NO: 81880 - DNA, 20 bp, Artificial Sequence
  Description of Artificial Sequence: Synthetic oligonucleotide
  Target: LAMA2; (-) strand; PAM type: NRG; PAM sequence: AGG
gaagtaagactgggataaat

SEQ ID NO: 81881 - DNA, 20 bp, Artificial Sequence
  Description of Artificial Sequence: Synthetic oligonucleotide
  Target: LAMA2; (-) strand; PAM type: NRG; PAM sequence: TAG
ggaagtaagactgggataaa

SEQ ID NO: 81882 - DNA, 20 bp, Artificial Sequence
  Description of Artificial Sequence: Synthetic oligonucleotide
  Target: LAMA2; (-) strand; PAM type: NRG; PAM sequence: GGG
ttaaatttggaagtaagact

SEQ ID NO: 81883 - DNA, 20 bp, Artificial Sequence
  Description of Artificial Sequence: Synthetic oligonucleotide
  Target: LAMA2; (-) strand; PAM type: NRG; PAM sequence: TGG
tttaaatttggaagtaagac

SEQ ID NO: 81884 - DNA, 20 bp, Artificial Sequence
  Description of Artificial Sequence: Synthetic oligonucleotide
  Target: LAMA2; (-) strand; PAM type: NRG; PAM sequence: AAG
atatttttaaatttggaagt

SEQ ID NO: 81885 - DNA, 20 bp, Artificial Sequence
  Description of Artificial Sequence: Synthetic oligonucleotide
  Target: LAMA2; (-) strand; PAM type: NRG; PAM sequence: AAG
ctcaatatttttaaatttgg

SEQ ID NO: 81886 - DNA, 20 bp, Artificial Sequence
  Description of Artificial Sequence: Synthetic oligonucleotide
  Target: LAMA2; (-) strand; PAM type: NRG; PAM sequence: TGG
aggctcaatatttttaaatt

SEQ ID NO: 81887 - DNA, 20 bp, Artificial Sequence
  Description of Artificial Sequence: Synthetic oligonucleotide
  Target: LAMA2; (-) strand; PAM type: NRG; PAM sequence: AGG
taaaaactgaatcggaaaaa

SEQ ID NO: 81888 - DNA, 20 bp, Artificial Sequence
  Description of Artificial Sequence: Synthetic oligonucleotide
  Target: LAMA2; (-) strand; PAM type: NRG; PAM sequence: AAG
ataaaaactgaatcggaaaa

SEQ ID NO: 81889 - DNA, 20 bp, Artificial Sequence
  Description of Artificial Sequence: Synthetic oligonucleotide
  Target: LAMA2; (-) strand; PAM type: NRG; PAM sequence: CGG
aaaaaaaataaaaactgaat

SEQ ID NO: 81890 - DNA, 20 bp, Artificial Sequence
  Description of Artificial Sequence: Synthetic oligonucleotide
  Target: LAMA2; (-) strand; PAM type: NRG; PAM sequence: AAG
cacatgtaccctaaaactta

SEQ ID NO: 81891 - DNA, 20 bp, Artificial Sequence
  Description of Artificial Sequence: Synthetic oligonucleotide
  Target: LAMA2; (-) strand; PAM type: NRG; PAM sequence: TGG
gtgggtgcagtgcaccagca

SEQ ID NO: 81892 - DNA, 20 bp, Artificial Sequence
  Description of Artificial Sequence: Synthetic oligonucleotide
  Target: LAMA2; (-) strand; PAM type: NRG; PAM sequence: CAG
agttagtgggtgcagtgcac

SEQ ID NO: 81893 - DNA, 20 bp, Artificial Sequence
  Description of Artificial Sequence: Synthetic oligonucleotide
  Target: LAMA2; (-) strand; PAM type: NRG; PAM sequence: CAG
agatgacgagttagtgggtg

SEQ ID NO: 81894 - DNA, 20 bp, Artificial Sequence
  Description of Artificial Sequence: Synthetic oligonucleotide
  Target: LAMA2; (-) strand; PAM type: NRG; PAM sequence: GGG
atgctagatgacgagttagt

SEQ ID NO: 81895 - DNA, 20 bp, Artificial Sequence
  Description of Artificial Sequence: Synthetic oligonucleotide
  Target: LAMA2; (-) strand; PAM type: NRG; PAM sequence: TGG
aatgctagatgacgagttag

SEQ ID NO: 81896 - DNA, 20 bp, Artificial Sequence
  Description of Artificial Sequence: Synthetic oligonucleotide
  Target: LAMA2; (-) strand; PAM type: NRG; PAM sequence: TAG
cctaatgctagatgacgagt

SEQ ID NO: 81897 - DNA, 20 bp, Artificial Sequence
  Description of Artificial Sequence: Synthetic oligonucleotide
  Target: LAMA2; (-) strand; PAM type: NRG; PAM sequence: GAG
tatacctaatgctagatgac

SEQ ID NO: 81898 - DNA, 20 bp, Artificial Sequence
  Description of Artificial Sequence: Synthetic oligonucleotide
  Target: LAMA2; (-) strand; PAM type: NRG; PAM sequence: TAG
ttgggagatatacctaatgc

SEQ ID NO: 81899 - DNA, 20 bp, Artificial Sequence
  Description of Artificial Sequence: Synthetic oligonucleotide
  Target: LAMA2; (-) strand; PAM type: NRG; PAM sequence: GAG
ggggggagggatagcattgg

SEQ ID NO: 81900 - DNA, 20 bp, Artificial Sequence
  Description of Artificial Sequence: Synthetic oligonucleotide
  Target: LAMA2; (-) strand; PAM type: NRG; PAM sequence: GGG
gaggggggagggatagcatt

SEQ ID NO: 81901 - DNA, 20 bp, Artificial Sequence
  Description of Artificial Sequence: Synthetic oligonucleotide
  Target: LAMA2; (-) strand; PAM type: NRG; PAM sequence: TGG
ggaggggggagggatagcat

SEQ ID NO: 81902 - DNA, 20 bp, Artificial Sequence
  Description of Artificial Sequence: Synthetic oligonucleotide
  Target: LAMA2; (-) strand; PAM type: NRG; PAM sequence: TAG
gtggggggaggggggaggga

SEQ ID NO: 81903 - DNA, 20 bp, Artificial Sequence
  Description of Artificial Sequence: Synthetic oligonucleotide
  Target: LAMA2; (-) strand; PAM type: NRG; PAM sequence: GGG
tggggtggggggagggggga

SEQ ID NO: 81904 - DNA, 20 bp, Artificial Sequence
  Description of Artificial Sequence: Synthetic oligonucleotide
  Target: LAMA2; (-) strand; PAM type: NRG; PAM sequence: AGG
gtggggtggggggagggggg

SEQ ID NO: 81905 - DNA, 20 bp, Artificial Sequence
  Description of Artificial Sequence: Synthetic oligonucleotide
  Target: LAMA2; (-) strand; PAM type: NRG; PAM sequence: GAG
tgtggggtggggggaggggg

SEQ ID NO: 81906 - DNA, 20 bp, Artificial Sequence
  Description of Artificial Sequence: Synthetic oligonucleotide
  Target: LAMA2; (-) strand; PAM type: NRG; PAM sequence: GGG
gttgtggggtggggggaggg

SEQ ID NO: 81907 - DNA, 20 bp, Artificial Sequence
  Description of Artificial Sequence: Synthetic oligonucleotide
  Target: LAMA2; (-) strand; PAM type: NRG; PAM sequence: GGG
tgttgtggggtggggggagg

SEQ ID NO: 81908 - DNA, 20 bp, Artificial Sequence
  Description of Artificial Sequence: Synthetic oligonucleotide
  Target: LAMA2; (-) strand; PAM type: NRG; PAM sequence: GGG
ctgttgtggggtggggggag

SEQ ID NO: 81909 - DNA, 20 bp, Artificial Sequence
  Description of Artificial Sequence: Synthetic oligonucleotide
  Target: LAMA2; (-) strand; PAM type: NRG; PAM sequence: GGG
actgttgtggggtgggggga

SEQ ID NO: 81910 - DNA, 20 bp, Artificial Sequence
  Description of Artificial Sequence: Synthetic oligonucleotide
  Target: LAMA2; (-) strand; PAM type: NRG; PAM sequence: AGG
gactgttgtggggtgggggg

SEQ ID NO: 81911 - DNA, 20 bp, Artificial Sequence
  Description of Artificial Sequence: Synthetic oligonucleotide
  Target: LAMA2; (-) strand; PAM type: NRG; PAM sequence: GAG
ggactgttgtggggtggggg

SEQ ID NO: 81912 - DNA, 20 bp, Artificial Sequence
  Description of Artificial Sequence: Synthetic oligonucleotide
  Target: LAMA2; (-) strand; PAM type: NRG; PAM sequence: GGG
ggggactgttgtggggtggg

SEQ ID NO: 81913 - DNA, 20 bp, Artificial Sequence
  Description of Artificial Sequence: Synthetic oligonucleotide
  Target: LAMA2; (-) strand; PAM type: NRG; PAM sequence: GGG
tggggactgttgtggggtgg

SEQ ID NO: 81914 - DNA, 20 bp, Artificial Sequence
  Description of Artificial Sequence: Synthetic oligonucleotide
  Target: LAMA2; (-) strand; PAM type: NRG; PAM sequence: GGG
ctggggactgttgtggggtg

SEQ ID NO: 81915 - DNA, 20 bp, Artificial Sequence
  Description of Artificial Sequence: Synthetic oligonucleotide
  Target: LAMA2; (-) strand; PAM type: NRG; PAM sequence: GGG
tctggggactgttgtggggt

SEQ ID NO: 81916 - DNA, 20 bp, Artificial Sequence
  Description of Artificial Sequence: Synthetic oligonucleotide
  Target: LAMA2; (-) strand; PAM type: NRG; PAM sequence: TGG
ctctggggactgttgtgggg

SEQ ID NO: 81917 - DNA, 20 bp, Artificial Sequence
  Description of Artificial Sequence: Synthetic oligonucleotide
  Target: LAMA2; (-) strand; PAM type: NRG; PAM sequence: GGG
acactctggggactgttgtg

SEQ ID NO: 81918 - DNA, 20 bp, Artificial Sequence
  Description of Artificial Sequence: Synthetic oligonucleotide
  Target: LAMA2; (-) strand; PAM type: NRG; PAM sequence: GGG
cacactctggggactgttgt

SEQ ID NO: 81919 - DNA, 20 bp, Artificial Sequence
  Description of Artificial Sequence: Synthetic oligonucleotide
  Target: LAMA2; (-) strand; PAM type: NRG; PAM sequence: TGG
tcacactctggggactgttg

SEQ ID NO: 81920 - DNA, 20 bp, Artificial Sequence
  Description of Artificial Sequence: Synthetic oligonucleotide
  Target: LAMA2; (-) strand; PAM type: NRG; PAM sequence: GGG
aaggggaatatcacactctg

SEQ ID NO: 81921 - DNA, 20 bp, Artificial Sequence
  Description of Artificial Sequence: Synthetic oligonucleotide
  Target: LAMA2; (-) strand; PAM type: NRG; PAM sequence: GGG
gaaggggaatatcacactct

SEQ ID NO: 81922 - DNA, 20 bp, Artificial Sequence
  Description of Artificial Sequence: Synthetic oligonucleotide
  Target: LAMA2; (-) strand; PAM type: NRG; PAM sequence: TGG
ggaaggggaatatcacactc

SEQ ID NO: 81923 - DNA, 20 bp, Artificial Sequence
  Description of Artificial Sequence: Synthetic oligonucleotide
  Target: LAMA2; (-) strand; PAM type: NRG; PAM sequence: GGG
tatcacatggacacaggaag

SEQ ID NO: 81924 - DNA, 20 bp, Artificial Sequence
  Description of Artificial Sequence: Synthetic oligonucleotide
  Target: LAMA2; (-) strand; PAM type: NRG; PAM sequence: GGG
ctatcacatggacacaggaa

SEQ ID NO: 81925 - DNA, 20 bp, Artificial Sequence
  Description of Artificial Sequence: Synthetic oligonucleotide
  Target: LAMA2; (-) strand; PAM type: NRG; PAM sequence: AGG
gctatcacatggacacagga

SEQ ID NO: 81926 - DNA, 20 bp, Artificial Sequence
  Description of Artificial Sequence: Synthetic oligonucleotide
  Target: LAMA2; (-) strand; PAM type: NRG; PAM sequence: AAG
tgctatcacatggacacagg

SEQ ID NO: 81927 - DNA, 20 bp, Artificial Sequence
  Description of Artificial Sequence: Synthetic oligonucleotide
  Target: LAMA2; (-) strand; PAM type: NRG; PAM sequence: AGG
caatgctatcacatggacac

SEQ ID NO: 81928 - DNA, 20 bp, Artificial Sequence
  Description of Artificial Sequence: Synthetic oligonucleotide
  Target: LAMA2; (-) strand; PAM type: NRG; PAM sequence: CAG
acaatgctatcacatggaca

SEQ ID NO: 81929 - DNA, 20 bp, Artificial Sequence
  Description of Artificial Sequence: Synthetic oligonucleotide
  Target: LAMA2; (-) strand; PAM type: NRG; PAM sequence: TGG
aattgaacaatgctatcaca

SEQ ID NO: 81930 - DNA, 20 bp, Artificial Sequence
  Description of Artificial Sequence: Synthetic oligonucleotide
  Target: LAMA2; (-) strand; PAM type: NRG; PAM sequence: GGG
acatattctcactcataggt

SEQ ID NO: 81931 - DNA, 20 bp, Artificial Sequence
  Description of Artificial Sequence: Synthetic oligonucleotide
  Target: LAMA2; (-) strand; PAM type: NRG; PAM sequence: TGG
cacatattctcactcatagg

SEQ ID NO: 81932 - DNA, 20 bp, Artificial Sequence
  Description of Artificial Sequence: Synthetic oligonucleotide
  Target: LAMA2; (-) strand; PAM type: NRG; PAM sequence: AGG
caccacatattctcactcat

SEQ ID NO: 81933 - DNA, 20 bp, Artificial Sequence
  Description of Artificial Sequence: Synthetic oligonucleotide
  Target: LAMA2; (-) strand; PAM type: NRG; PAM sequence: TAG
acaccacatattctcactca

SEQ ID NO: 81934 - DNA, 20 bp, Artificial Sequence
  Description of Artificial Sequence: Synthetic oligonucleotide
  Target: LAMA2; (-) strand; PAM type: NRG; PAM sequence: AAG
cattctcagtaaacgattgc

SEQ ID NO: 81935 - DNA, 20 bp, Artificial Sequence
  Description of Artificial Sequence: Synthetic oligonucleotide
  Target: LAMA2; (-) strand; PAM type: NRG; PAM sequence: CAG
aaattggaaaacatcattct

SEQ ID NO: 81936 - DNA, 20 bp, Artificial Sequence
  Description of Artificial Sequence: Synthetic oligonucleotide
  Target: LAMA2; (-) strand; PAM type: NRG; PAM sequence: TGG
tgtagggacatggatgaaat

SEQ ID NO: 81937 - DNA, 20 bp, Artificial Sequence
  Description of Artificial Sequence: Synthetic oligonucleotide
  Target: LAMA2; (-) strand; PAM type: NRG; PAM sequence: TGG
tcatgtcctttgtagggaca

SEQ ID NO: 81938 - DNA, 20 bp, Artificial Sequence
  Description of Artificial Sequence: Synthetic oligonucleotide
  Target: LAMA2; (-) strand; PAM type: NRG; PAM sequence: GGG
atgagttcatgtcctttgta

SEQ ID NO: 81939 - DNA, 20 bp, Artificial Sequence
  Description of Artificial Sequence: Synthetic oligonucleotide
  Target: LAMA2; (-) strand; PAM type: NRG; PAM sequence: AGG
gatgagttcatgtcctttgt

SEQ ID NO: 81940 - DNA, 20 bp, Artificial Sequence
  Description of Artificial Sequence: Synthetic oligonucleotide
  Target: LAMA2; (-) strand; PAM type: NRG; PAM sequence: TAG
tgatgagttcatgtcctttg

SEQ ID NO: 81941 - DNA, 20 bp, Artificial Sequence
  Description of Artificial Sequence: Synthetic oligonucleotide
  Target: LAMA2; (-) strand; PAM type: NRG; PAM sequence: GAG
atgcagccataaaaaatgat

SEQ ID NO: 81942 - DNA, 20 bp, Artificial Sequence
  Description of Artificial Sequence: Synthetic oligonucleotide
  Target: LAMA2; (-) strand; PAM type: NRG; PAM sequence: CAG
atacaccatggaatactatg

SEQ ID NO: 81943 - DNA, 20 bp, Artificial Sequence
  Description of Artificial Sequence: Synthetic oligonucleotide
  Target: LAMA2; (-) strand; PAM type: NRG; PAM sequence: TGG
aatgtggcacttatacacca

SEQ ID NO: 81944 - DNA, 20 bp, Artificial Sequence
  Description of Artificial Sequence: Synthetic oligonucleotide
  Target: LAMA2; (-) strand; PAM type: NRG; PAM sequence: TGG
tagactggattaagaaaatg

SEQ ID NO: 81945 - DNA, 20 bp, Artificial Sequence
  Description of Artificial Sequence: Synthetic oligonucleotide
  Target: LAMA2; (-) strand; PAM type: NRG; PAM sequence: AAG
caacaatgatagactggatt

SEQ ID NO: 81946 - DNA, 20 bp, Artificial Sequence
  Description of Artificial Sequence: Synthetic oligonucleotide
  Target: LAMA2; (-) strand; PAM type: NRG; PAM sequence: TGG
aatgtccaacaatgatagac

SEQ ID NO: 81947 - DNA, 20 bp, Artificial Sequence
  Description of Artificial Sequence: Synthetic oligonucleotide
  Target: LAMA2; (-) strand; PAM type: NRG; PAM sequence: TAG
acccaaatgtccaacaatga

SEQ ID NO: 81948 - DNA, 20 bp, Artificial Sequence
  Description of Artificial Sequence: Synthetic oligonucleotide
  Target: LAMA2; (-) strand; PAM type: NRG; PAM sequence: TGG
tatccacaatagcaaagact

SEQ ID NO: 81949 - DNA, 20 bp, Artificial Sequence
  Description of Artificial Sequence: Synthetic oligonucleotide
  Target: LAMA2; (-) strand; PAM type: NRG; PAM sequence: AAG
cggcattatccacaatagca

SEQ ID NO: 81950 - DNA, 20 bp, Artificial Sequence
  Description of Artificial Sequence: Synthetic oligonucleotide
  Target: LAMA2; (-) strand; PAM type: NRG; PAM sequence: TAG
tattgcggcattatccacaa

SEQ ID NO: 81951 - DNA, 20 bp, Artificial Sequence
  Description of Artificial Sequence: Synthetic oligonucleotide
  Target: LAMA2; (-) strand; PAM type: NRG; PAM sequence: CGG
atgcacacgtatgtttattg

SEQ ID NO: 81952 - DNA, 20 bp, Artificial Sequence
  Description of Artificial Sequence: Synthetic oligonucleotide
  Target: LAMA2; (-) strand; PAM type: NRG; PAM sequence: AAG
ctgtaaatcatgctgctatg

SEQ ID NO: 81953 - DNA, 20 bp, Artificial Sequence
  Description of Artificial Sequence: Synthetic oligonucleotide
  Target: LAMA2; (-) strand; PAM type: NRG; PAM sequence: AGG
attactgggtatatacccaa

SEQ ID NO: 81954 - DNA, 20 bp, Artificial Sequence
  Description of Artificial Sequence: Synthetic oligonucleotide
  Target: LAMA2; (-) strand; PAM type: NRG; PAM sequence: AAG
cattactgggtatataccca

SEQ ID NO: 81955 - DNA, 20 bp, Artificial Sequence
  Description of Artificial Sequence: Synthetic oligonucleotide
  Target: LAMA2; (-) strand; PAM type: NRG; PAM sequence: GGG
gacccagccatcccattact

SEQ ID NO: 81956 - DNA, 20 bp, Artificial Sequence
  Description of Artificial Sequence: Synthetic oligonucleotide
  Target: LAMA2; (-) strand; PAM type: NRG; PAM sequence: TGG
tgacccagccatcccattac

SEQ ID NO: 81957 - DNA, 20 bp, Artificial Sequence
  Description of Artificial Sequence: Synthetic oligonucleotide
  Target: LAMA2; (-) strand; PAM type: NRG; PAM sequence: CAG
actggaaataccctttgacc

SEQ ID NO: 81958 - DNA, 20 bp, Artificial Sequence
  Description of Artificial Sequence: Synthetic oligonucleotide
  Target: LAMA2; (-) strand; PAM type: NRG; PAM sequence: TGG
attcctcagggatctagaac

SEQ ID NO: 81959 - DNA, 20 bp, Artificial Sequence
  Description of Artificial Sequence: Synthetic oligonucleotide
  Target: LAMA2; (-) strand; PAM type: NRG; PAM sequence: TAG
gtggccattcctcagggatc

SEQ ID NO: 81960 - DNA, 20 bp, Artificial Sequence
  Description of Artificial Sequence: Synthetic oligonucleotide
  Target: LAMA2; (-) strand; PAM type: NRG; PAM sequence: GGG
gtcagtgtggccattcctca

SEQ ID NO: 81961 - DNA, 20 bp, Artificial Sequence
  Description of Artificial Sequence: Synthetic oligonucleotide
  Target: LAMA2; (-) strand; PAM type: NRG; PAM sequence: AGG
agtcagtgtggccattcctc

SEQ ID NO: 81962 - DNA, 20 bp, Artificial Sequence
  Description of Artificial Sequence: Synthetic oligonucleotide
  Target: LAMA2; (-) strand; PAM type: NRG; PAM sequence: CAG
aagtcagtgtggccattcct

SEQ ID NO: 81963 - DNA, 20 bp, Artificial Sequence
  Description of Artificial Sequence: Synthetic oligonucleotide
  Target: LAMA2; (-) strand; PAM type: NRG; PAM sequence: TGG
aaccattgtggaagtcagtg

SEQ ID NO: 81964 - DNA, 20 bp, Artificial Sequence
  Description of Artificial Sequence: Synthetic oligonucleotide
  Target: LAMA2; (-) strand; PAM type: NRG; PAM sequence: CAG
agttcaaccattgtggaagt

SEQ ID NO: 81965 - DNA, 20 bp, Artificial Sequence
  Description of Artificial Sequence: Synthetic oligonucleotide
  Target: LAMA2; (-) strand; PAM type: NRG; PAM sequence: AAG
aactagttcaaccattgtgg

SEQ ID NO: 81966 - DNA, 20 bp, Artificial Sequence
  Description of Artificial Sequence: Synthetic oligonucleotide
  Target: LAMA2; (-) strand; PAM type: NRG; PAM sequence: TGG
gtaaactagttcaaccattg

SEQ ID NO: 81967 - DNA, 20 bp, Artificial Sequence
  Description of Artificial Sequence: Synthetic oligonucleotide
  Target: LAMA2; (-) strand; PAM type: NRG; PAM sequence: TAG
ctgttggtgggactgtaaac

SEQ ID NO: 81968 - DNA, 20 bp, Artificial Sequence
  Description of Artificial Sequence: Synthetic oligonucleotide
  Target: LAMA2; (-) strand; PAM type: NRG; PAM sequence: GGG
cacttttacacactgttggt

SEQ ID NO: 81969 - DNA, 20 bp, Artificial Sequence
  Description of Artificial Sequence: Synthetic oligonucleotide
  Target: LAMA2; (-) strand; PAM type: NRG; PAM sequence: TGG
acacttttacacactgttgg

SEQ ID NO: 81970 - DNA, 20 bp, Artificial Sequence
  Description of Artificial Sequence: Synthetic oligonucleotide
  Target: LAMA2; (-) strand; PAM type: NRG; PAM sequence: TGG
ggaacacttttacacactgt

SEQ ID NO: 81971 - DNA, 20 bp, Artificial Sequence
  Description of Artificial Sequence: Synthetic oligonucleotide
  Target: LAMA2; (-) strand; PAM type: NRG; PAM sequence: AGG
tggagaggatgtggagaaat

SEQ ID NO: 81972 - DNA, 20 bp, Artificial Sequence
  Description of Artificial Sequence: Synthetic oligonucleotide
  Target: LAMA2; (-) strand; PAM type: NRG; PAM sequence: TAG
ctggagaggatgtggagaaa

SEQ ID NO: 81973 - DNA, 20 bp, Artificial Sequence
  Description of Artificial Sequence: Synthetic oligonucleotide
  Target: LAMA2; (-) strand; PAM type: NRG; PAM sequence: GAG
caggtgctggagaggatgtg

SEQ ID NO: 81974 - DNA, 20 bp, Artificial Sequence
  Description of Artificial Sequence: Synthetic oligonucleotide
  Target: LAMA2; (-) strand; PAM type: NRG; PAM sequence: TGG
aacaggtgctggagaggatg

SEQ ID NO: 81975 - DNA, 20 bp, Artificial Sequence
  Description of Artificial Sequence: Synthetic oligonucleotide
  Target: LAMA2; (-) strand; PAM type: NRG; PAM sequence: AGG
ggaaacaacaggtgctggag

SEQ ID NO: 81976 - DNA, 20 bp, Artificial Sequence
  Description of Artificial Sequence: Synthetic oligonucleotide
  Target: LAMA2; (-) strand; PAM type: NRG; PAM sequence: GAG
aggaaacaacaggtgctgga

SEQ ID NO: 81977 - DNA, 20 bp, Artificial Sequence
  Description of Artificial Sequence: Synthetic oligonucleotide
  Target: LAMA2; (-) strand; PAM type: NRG; PAM sequence: GAG
tcaggaaacaacaggtgctg

SEQ ID NO: 81978 - DNA, 20 bp, Artificial Sequence
  Description of Artificial Sequence: Synthetic oligonucleotide
  Target: LAMA2; (-) strand; PAM type: NRG; PAM sequence: TGG
agtcaggaaacaacaggtgc

SEQ ID NO: 81979 - DNA, 20 bp, Artificial Sequence
  Description of Artificial Sequence: Synthetic oligonucleotide
  Target: LAMA2; (-) strand; PAM type: NRG; PAM sequence: AGG
ttaaaaagtcaggaaacaac

SEQ ID NO: 81980 - DNA, 20 bp, Artificial Sequence
  Description of Artificial Sequence: Synthetic oligonucleotide
  Target: LAMA2; (-) strand; PAM type: NRG; PAM sequence: CAG
attaaaaagtcaggaaacaa

SEQ ID NO: 81981 - DNA, 20 bp, Artificial Sequence
  Description of Artificial Sequence: Synthetic oligonucleotide
  Target: LAMA2; (-) strand; PAM type: NRG; PAM sequence: AGG
atggcaatcattaaaaagtc

SEQ ID NO: 81982 - DNA, 20 bp, Artificial Sequence
  Description of Artificial Sequence: Synthetic oligonucleotide
  Target: LAMA2; (-) strand; PAM type: NRG; PAM sequence: CAG
aatggcaatcattaaaaagt

SEQ ID NO: 81983 - DNA, 20 bp, Artificial Sequence
  Description of Artificial Sequence: Synthetic oligonucleotide
  Target: LAMA2; (-) strand; PAM type: NRG; PAM sequence: AAG
ttagaatggcaatcattaaa

SEQ ID NO: 81984 - DNA, 20 bp, Artificial Sequence
  Description of Artificial Sequence: Synthetic oligonucleotide
  Target: LAMA2; (-) strand; PAM type: NRG; PAM sequence: TGG
ccatctcacaccagttagaa

SEQ ID NO: 81985 - DNA, 20 bp, Artificial Sequence
  Description of Artificial Sequence: Synthetic oligonucleotide
  Target: LAMA2; (-) strand; PAM type: NRG; PAM sequence: TAG
agataccatctcacaccagt

SEQ ID NO: 81986 - DNA, 20 bp, Artificial Sequence
  Description of Artificial Sequence: Synthetic oligonucleotide
  Target: LAMA2; (-) strand; PAM type: NRG; PAM sequence: CAG
aatgagataccatctcacac

SEQ ID NO: 81987 - DNA, 20 bp, Artificial Sequence
  Description of Artificial Sequence: Synthetic oligonucleotide
  Target: LAMA2; (-) strand; PAM type: NRG; PAM sequence: GAG
atgcaaatcaaaaccacaat

SEQ ID NO: 81988 - DNA, 20 bp, Artificial Sequence
  Description of Artificial Sequence: Synthetic oligonucleotide
  Target: LAMA2; (-) strand; PAM type: NRG; PAM sequence: GAG
ctcatcatcactggccatca

SEQ ID NO: 81989 - DNA, 20 bp, Artificial Sequence
  Description of Artificial Sequence: Synthetic oligonucleotide
  Target: LAMA2; (-) strand; PAM type: NRG; PAM sequence: CAG
tgctcatcatcactggccat

SEQ ID NO: 81990 - DNA, 20 bp, Artificial Sequence
  Description of Artificial Sequence: Synthetic oligonucleotide
  Target: LAMA2; (-) strand; PAM type: NRG; PAM sequence: TGG
gaaaaaatgctcatcatcac

SEQ ID NO: 81991 - DNA, 20 bp, Artificial Sequence
  Description of Artificial Sequence: Synthetic oligonucleotide
  Target: LAMA2; (-) strand; PAM type: NRG; PAM sequence: CAG
ctcaaaagaagacatttatg

SEQ ID NO: 81992 - DNA, 20 bp, Artificial Sequence
  Description of Artificial Sequence: Synthetic oligonucleotide
  Target: LAMA2; (-) strand; PAM type: NRG; PAM sequence: AAG
gaacagacacttctcaaaag

SEQ ID NO: 81993 - DNA, 20 bp, Artificial Sequence
  Description of Artificial Sequence: Synthetic oligonucleotide
  Target: LAMA2; (-) strand; PAM type: NRG; PAM sequence: AAG
catgaacagacacttctcaa

SEQ ID NO: 81994 - DNA, 20 bp, Artificial Sequence
  Description of Artificial Sequence: Synthetic oligonucleotide
  Target: LAMA2; (-) strand; PAM type: NRG; PAM sequence: CAG
aagtgggcgaaggacatgaa

SEQ ID NO: 81995 - DNA, 20 bp, Artificial Sequence
  Description of Artificial Sequence: Synthetic oligonucleotide
  Target: LAMA2; (-) strand; PAM type: NRG; PAM sequence: AGG
ccccatcaacaagtgggcga

SEQ ID NO: 81996 - DNA, 20 bp, Artificial Sequence
  Description of Artificial Sequence: Synthetic oligonucleotide
  Target: LAMA2; (-) strand; PAM type: NRG; PAM sequence: AAG
accccatcaacaagtgggcg

SEQ ID NO: 81997 - DNA, 20 bp, Artificial Sequence
  Description of Artificial Sequence: Synthetic oligonucleotide
  Target: LAMA2; (-) strand; PAM type: NRG; PAM sequence: GGG
aaacaaccccatcaacaagt

SEQ ID NO: 81998 - DNA, 20 bp, Artificial Sequence
  Description of Artificial Sequence: Synthetic oligonucleotide
  Target: LAMA2; (-) strand; PAM type: NRG; PAM sequence: TGG
caaacaaccccatcaacaag

SEQ ID NO: 81999 - DNA, 20 bp, Artificial Sequence
  Description of Artificial Sequence: Synthetic oligonucleotide
  Target: LAMA2; (-) strand; PAM type: NRG; PAM sequence: AAG
aaacaaacaaccccatcaac

SEQ ID NO: 82000 - DNA, 20 bp, Artificial Sequence
  Description of Artificial Sequence: Synthetic oligonucleotide
  Target: LAMA2; (-) strand; PAM type: NRG; PAM sequence: AAG
atgaactcaaacaaatttac

SEQ ID NO: 82001 - DNA, 20 bp, Artificial Sequence
  Description of Artificial Sequence: Synthetic oligonucleotide
  Target: LAMA2; (-) strand; PAM type: NRG; PAM sequence: CAG
tctgacaaagggctaatatc

SEQ ID NO: 82002 - DNA, 20 bp, Artificial Sequence
  Description of Artificial Sequence: Synthetic oligonucleotide
  Target: LAMA2; (-) strand; PAM type: NRG; PAM sequence: GGG
caacctactcatctgacaaa

SEQ ID NO: 82003 - DNA, 20 bp, Artificial Sequence
  Description of Artificial Sequence: Synthetic oligonucleotide
  Target: LAMA2; (-) strand; PAM type: NRG; PAM sequence: AGG
gcaacctactcatctgacaa

SEQ ID NO: 82004 - DNA, 20 bp, Artificial Sequence
  Description of Artificial Sequence: Synthetic oligonucleotide
  Target: LAMA2; (-) strand; PAM type: NRG; PAM sequence: AAG
tgcaacctactcatctgaca

SEQ ID NO: 82005 - DNA, 20 bp, Artificial Sequence
  Description of Artificial Sequence: Synthetic oligonucleotide
  Target: LAMA2; (-) strand; PAM type: NRG; PAM sequence: GAG
acaggcaacctacaaaatgg

SEQ ID NO: 82006 - DNA, 20 bp, Artificial Sequence
  Description of Artificial Sequence: Synthetic oligonucleotide
  Target: LAMA2; (-) strand; PAM type: NRG; PAM sequence: GGG
gaacaggcaacctacaaaat

SEQ ID NO: 82007 - DNA, 20 bp, Artificial Sequence
  Description of Artificial Sequence: Synthetic oligonucleotide
  Target: LAMA2; (-) strand; PAM type: NRG; PAM sequence: TGG
tgaacaggcaacctacaaaa

SEQ ID NO: 82008 - DNA, 20 bp, Artificial Sequence
  Description of Artificial Sequence: Synthetic oligonucleotide
  Target: LAMA2; (-) strand; PAM type: NRG; PAM sequence: AGG
aaactaccatcagagtgaac

SEQ ID NO: 82009 - DNA, 20 bp, Artificial Sequence
  Description of Artificial Sequence: Synthetic oligonucleotide
  Target: LAMA2; (-) strand; PAM type: NRG; PAM sequence: CAG
gaaactaccatcagagtgaa

SEQ ID NO: 82010 - DNA, 20 bp, Artificial Sequence
  Description of Artificial Sequence: Synthetic oligonucleotide
  Target: LAMA2; (-) strand; PAM type: NRG; PAM sequence: GAG
agcaaaagaaactaccatca

SEQ ID NO: 82011 - DNA, 20 bp, Artificial Sequence
  Description of Artificial Sequence: Synthetic oligonucleotide
  Target: LAMA2; (-) strand; PAM type: NRG; PAM sequence: CAG
acagcaaaagaaactaccat

SEQ ID NO: 82012 - DNA, 20 bp, Artificial Sequence
  Description of Artificial Sequence: Synthetic oligonucleotide
  Target: LAMA2; (-) strand; PAM type: NRG; PAM sequence: AAG
aaagagcttctgcacagcaa

SEQ ID NO: 82013 - DNA, 20 bp, Artificial Sequence
  Description of Artificial Sequence: Synthetic oligonucleotide
  Target: LAMA2; (-) strand; PAM type: NRG; PAM sequence: CAG
taaactaaagagcttctgca

SEQ ID NO: 82014 - DNA, 20 bp, Artificial Sequence
  Description of Artificial Sequence: Synthetic oligonucleotide
  Target: LAMA2; (-) strand; PAM type: NRG; PAM sequence: GAG
tgggatctaattaaactaaa

SEQ ID NO: 82015 - DNA, 20 bp, Artificial Sequence
  Description of Artificial Sequence: Synthetic oligonucleotide
  Target: LAMA2; (-) strand; PAM type: NRG; PAM sequence: AAG
aatgggatctaattaaacta

SEQ ID NO: 82016 - DNA, 20 bp, Artificial Sequence
  Description of Artificial Sequence: Synthetic oligonucleotide
  Target: LAMA2; (-) strand; PAM type: NRG; PAM sequence: GGG
aaaagacaaaattgacaaat

SEQ ID NO: 82017 - DNA, 20 bp, Artificial Sequence
  Description of Artificial Sequence: Synthetic oligonucleotide
  Target: LAMA2; (-) strand; PAM type: NRG; PAM sequence: TGG
caaaagacaaaattgacaaa

SEQ ID NO: 82018 - DNA, 20 bp, Artificial Sequence
  Description of Artificial Sequence: Synthetic oligonucleotide
  Target: LAMA2; (-) strand; PAM type: NRG; PAM sequence: AAG
accaaaagcaatggcaacaa

SEQ ID NO: 82019 - DNA, 20 bp, Artificial Sequence
  Description of Artificial Sequence: Synthetic oligonucleotide
  Target: LAMA2; (-) strand; PAM type: NRG; PAM sequence: TGG
gtctaaaacaccaaaagcaa

SEQ ID NO: 82020 - DNA, 20 bp, Artificial Sequence
  Description of Artificial Sequence: Synthetic oligonucleotide
  Target: LAMA2; (-) strand; PAM type: NRG; PAM sequence: AAG
cttcatgtctaaaacaccaa

SEQ ID NO: 82021 - DNA, 20 bp, Artificial Sequence
  Description of Artificial Sequence: Synthetic oligonucleotide
  Target: LAMA2; (-) strand; PAM type: NRG; PAM sequence: AGG
tcaggacataggcatgggca

SEQ ID NO: 82022 - DNA, 20 bp, Artificial Sequence
  Description of Artificial Sequence: Synthetic oligonucleotide
  Target: LAMA2; (-) strand; PAM type: NRG; PAM sequence: AAG
ttcaggacataggcatgggc

SEQ ID NO: 82023 - DNA, 20 bp, Artificial Sequence
  Description of Artificial Sequence: Synthetic oligonucleotide
  Target: LAMA2; (-) strand; PAM type: NRG; PAM sequence: GGG
accattcaggacataggcat

SEQ ID NO: 82024 - DNA, 20 bp, Artificial Sequence
  Description of Artificial Sequence: Synthetic oligonucleotide
  Target: LAMA2; (-) strand; PAM type: NRG; PAM sequence: TGG
taccattcaggacataggca

SEQ ID NO: 82025 - DNA, 20 bp, Artificial Sequence
  Description of Artificial Sequence: Synthetic oligonucleotide
  Target: LAMA2; (-) strand; PAM type: NRG; PAM sequence: AGG
ggcagtaccattcaggacat

SEQ ID NO: 82026 - DNA, 20 bp, Artificial Sequence
  Description of Artificial Sequence: Synthetic oligonucleotide
  Target: LAMA2; (-) strand; PAM type: NRG; PAM sequence: TAG
aggcagtaccattcaggaca

SEQ ID NO: 82027 - DNA, 20 bp, Artificial Sequence
  Description of Artificial Sequence: Synthetic oligonucleotide
  Target: LAMA2; (-) strand; PAM type: NRG; PAM sequence: AGG
aaacctaggcagtaccattc

SEQ ID NO: 82028 - DNA, 20 bp, Artificial Sequence
  Description of Artificial Sequence: Synthetic oligonucleotide
  Target: LAMA2; (-) strand; PAM type: NRG; PAM sequence: CAG
aaaacctaggcagtaccatt

SEQ ID NO: 82029 - DNA, 20 bp, Artificial Sequence
  Description of Artificial Sequence: Synthetic oligonucleotide
  Target: LAMA2; (-) strand; PAM type: NRG; PAM sequence: CAG
accctagaagaaaacctagg

SEQ ID NO: 82030 - DNA, 20 bp, Artificial Sequence
  Description of Artificial Sequence: Synthetic oligonucleotide
  Target: LAMA2; (-) strand; PAM type: NRG; PAM sequence: AGG
aaaaccctagaagaaaacct

SEQ ID NO: 82031 - DNA, 20 bp, Artificial Sequence
  Description of Artificial Sequence: Synthetic oligonucleotide
  Target: LAMA2; (-) strand; PAM type: NRG; PAM sequence: TAG
aaaaaccctagaagaaaacc

SEQ ID NO: 82032 - DNA, 20 bp, Artificial Sequence
  Description of Artificial Sequence: Synthetic oligonucleotide
  Target: LAMA2; (-) strand; PAM type: NRG; PAM sequence: AAG
taaaaccataaaaaccctag

SEQ ID NO: 82033 - DNA, 20 bp, Artificial Sequence
  Description of Artificial Sequence: Synthetic oligonucleotide
  Target: LAMA2; (-) strand; PAM type: NRG; PAM sequence: TAG
acctaaaaccataaaaaccc

SEQ ID NO: 82034 - DNA, 20 bp, Artificial Sequence
  Description of Artificial Sequence: Synthetic oligonucleotide
  Target: LAMA2; (-) strand; PAM type: NRG; PAM sequence: TAG
tggattaaagacttaaacgt

SEQ ID NO: 82035 - DNA, 20 bp, Artificial Sequence
  Description of Artificial Sequence: Synthetic oligonucleotide
  Target: LAMA2; (-) strand; PAM type: NRG; PAM sequence: AAG
aatcaattcaagatggatta

SEQ ID NO: 82036 - DNA, 20 bp, Artificial Sequence
  Description of Artificial Sequence: Synthetic oligonucleotide
  Target: LAMA2; (-) strand; PAM type: NRG; PAM sequence: TGG
atacaaaaatcaattcaaga

SEQ ID NO: 82037 - DNA, 20 bp, Artificial Sequence
  Description of Artificial Sequence: Synthetic oligonucleotide
  Target: LAMA2; (-) strand; PAM type: NRG; PAM sequence: AAG
ccttatacaaaaatcaattc

SEQ ID NO: 82038 - DNA, 20 bp, Artificial Sequence
  Description of Artificial Sequence: Synthetic oligonucleotide
  Target: LAMA2; (-) strand; PAM type: NRG; PAM sequence: TGG
catatgtagaaagctgaaac

SEQ ID NO: 82039 - DNA, 20 bp, Artificial Sequence
  Description of Artificial Sequence: Synthetic oligonucleotide
  Target: LAMA2; (-) strand; PAM type: NRG; PAM sequence: AAG
actggctagccatatgtaga

SEQ ID NO: 82040 - DNA, 20 bp, Artificial Sequence
  Description of Artificial Sequence: Synthetic oligonucleotide
  Target: LAMA2; (-) strand; PAM type: NRG; PAM sequence: TAG
gagaactggctagccatatg

SEQ ID NO: 82041 - DNA, 20 bp, Artificial Sequence
  Description of Artificial Sequence: Synthetic oligonucleotide
  Target: LAMA2; (-) strand; PAM type: NRG; PAM sequence: TAG
atggtgctgggagaactggc

SEQ ID NO: 82042 - DNA, 20 bp, Artificial Sequence
  Description of Artificial Sequence: Synthetic oligonucleotide
  Target: LAMA2; (-) strand; PAM type: NRG; PAM sequence: TGG
ataaatggtgctgggagaac

SEQ ID NO: 82043 - DNA, 20 bp, Artificial Sequence
  Description of Artificial Sequence: Synthetic oligonucleotide
  Target: LAMA2; (-) strand; PAM type: NRG; PAM sequence: GAG
tgtttaataaatggtgctgg

SEQ ID NO: 82044 - DNA, 20 bp, Artificial Sequence
  Description of Artificial Sequence: Synthetic oligonucleotide
  Target: LAMA2; (-) strand; PAM type: NRG; PAM sequence: GGG
cctgtttaataaatggtgct

SEQ ID NO: 82045 - DNA, 20 bp, Artificial Sequence
  Description of Artificial Sequence: Synthetic oligonucleotide
  Target: LAMA2; (-) strand; PAM type: NRG; PAM sequence: TGG
ccctgtttaataaatggtgc

SEQ ID NO: 82046 - DNA, 20 bp, Artificial Sequence
  Description of Artificial Sequence: Synthetic oligonucleotide
  Target: LAMA2; (-) strand; PAM type: NRG; PAM sequence: TGG
aggattccctgtttaataaa

SEQ ID NO: 82047 - DNA, 20 bp, Artificial Sequence
  Description of Artificial Sequence: Synthetic oligonucleotide
  Target: LAMA2; (-) strand; PAM type: NRG; PAM sequence: AGG
gaaaaacaagcaatggggaa

SEQ ID NO: 82048 - DNA, 20 bp, Artificial Sequence
  Description of Artificial Sequence: Synthetic oligonucleotide
  Target: LAMA2; (-) strand; PAM type: NRG; PAM sequence: AAG
agaaaaacaagcaatgggga

SEQ ID NO: 82049 - DNA, 20 bp, Artificial Sequence
  Description of Artificial Sequence: Synthetic oligonucleotide
  Target: LAMA2; (-) strand; PAM type: NRG; PAM sequence: GGG
cctgagaaaaacaagcaatg

SEQ ID NO: 82050 - DNA, 20 bp, Artificial Sequence
  Description of Artificial Sequence: Synthetic oligonucleotide
  Target: LAMA2; (-) strand; PAM type: NRG; PAM sequence: GGG
acctgagaaaaacaagcaat

SEQ ID NO: 82051 - DNA, 20 bp, Artificial Sequence
  Description of Artificial Sequence: Synthetic oligonucleotide
  Target: LAMA2; (-) strand; PAM type: NRG; PAM sequence: TGG
aacctgagaaaaacaagcaa

SEQ ID NO: 82052 - DNA, 20 bp, Artificial Sequence
  Description of Artificial Sequence: Synthetic oligonucleotide
  Target: LAMA2; (-) strand; PAM type: NRG; PAM sequence: AAG
ttgacaaacctgagaaaaac

SEQ ID NO: 82053 - DNA, 20 bp, Artificial Sequence
  Description of Artificial Sequence: Synthetic oligonucleotide
  Target: LAMA2; (-) strand; PAM type: NRG; PAM sequence: GAG
acctgatctttgacaaacct

SEQ ID NO: 82054 - DNA, 20 bp, Artificial Sequence
  Description of Artificial Sequence: Synthetic oligonucleotide
  Target: LAMA2; (-) strand; PAM type: NRG; PAM sequence: CAG
atggaacagaacagagccct

SEQ ID NO: 82055 - DNA, 20 bp, Artificial Sequence
  Description of Artificial Sequence: Synthetic oligonucleotide
  Target: LAMA2; (-) strand; PAM type: NRG; PAM sequence: GAG
tagatcaatggaacagaaca

SEQ ID NO: 82056 - DNA, 20 bp, Artificial Sequence
  Description of Artificial Sequence: Synthetic oligonucleotide
  Target: LAMA2; (-) strand; PAM type: NRG; PAM sequence: CAG
tatagatcaatggaacagaa

SEQ ID NO: 82057 - DNA, 20 bp, Artificial Sequence
  Description of Artificial Sequence: Synthetic oligonucleotide
  Target: LAMA2; (-) strand; PAM type: NRG; PAM sequence: CAG
agagatatagatcaatggaa

SEQ ID NO: 82058 - DNA, 20 bp, Artificial Sequence
  Description of Artificial Sequence: Synthetic oligonucleotide
  Target: LAMA2; (-) strand; PAM type: NRG; PAM sequence: TGG
aaaacagagatatagatcaa

SEQ ID NO: 82059 - DNA, 20 bp, Artificial Sequence
  Description of Artificial Sequence: Synthetic oligonucleotide
  Target: LAMA2; (-) strand; PAM type: NRG; PAM sequence: TAG
ctggtaccaaaacagagata

SEQ ID NO: 82060 - DNA, 20 bp, Artificial Sequence
  Description of Artificial Sequence: Synthetic oligonucleotide
  Target: LAMA2; (-) strand; PAM type: NRG; PAM sequence: GAG
atggtactggtaccaaaaca

SEQ ID NO: 82061 - DNA, 20 bp, Artificial Sequence
  Description of Artificial Sequence: Synthetic oligonucleotide
  Target: LAMA2; (-) strand; PAM type: NRG; PAM sequence: CAG
gcatggtactggtaccaaaa

SEQ ID NO: 82062 - DNA, 20 bp, Artificial Sequence
  Description of Artificial Sequence: Synthetic oligonucleotide
  Target: LAMA2; (-) strand; PAM type: NRG; PAM sequence: TGG
taaccaaaacagcatggtac

SEQ ID NO: 82063 - DNA, 20 bp, Artificial Sequence
  Description of Artificial Sequence: Synthetic oligonucleotide
  Target: LAMA2; (-) strand; PAM type: NRG; PAM sequence: TGG
ctacagtaaccaaaacagca

SEQ ID NO: 82064 - DNA, 20 bp, Artificial Sequence
  Description of Artificial Sequence: Synthetic oligonucleotide
  Target: LAMA2; (-) strand; PAM type: NRG; PAM sequence: CAG
caagtctacagtaaccaaaa

SEQ ID NO: 82065 - DNA, 20 bp, Artificial Sequence
  Description of Artificial Sequence: Synthetic oligonucleotide
  Target: LAMA2; (-) strand; PAM type: NRG; PAM sequence: CAG
caaactatactacaagtcta

SEQ ID NO: 82066 - DNA, 20 bp, Artificial Sequence
  Description of Artificial Sequence: Synthetic oligonucleotide
  Target: LAMA2; (-) strand; PAM type: NRG; PAM sequence: AAG
ctgacttcaaactatactac

SEQ ID NO: 82067 - DNA, 20 bp, Artificial Sequence
  Description of Artificial Sequence: Synthetic oligonucleotide
  Target: LAMA2; (-) strand; PAM type: NRG; PAM sequence: AGG
agccaaaagaacaaagctgg

SEQ ID NO: 82068 - DNA, 20 bp, Artificial Sequence
  Description of Artificial Sequence: Synthetic oligonucleotide
  Target: LAMA2; (-) strand; PAM type: NRG; PAM sequence: GAG
aagccaaaagaacaaagctg

SEQ ID NO: 82069 - DNA, 20 bp, Artificial Sequence
  Description of Artificial Sequence: Synthetic oligonucleotide
  Target: LAMA2; (-) strand; PAM type: NRG; PAM sequence: TGG
ctaagccaaaagaacaaagc

SEQ ID NO: 82070 - DNA, 20 bp, Artificial Sequence
  Description of Artificial Sequence: Synthetic oligonucleotide
  Target: LAMA2; (-) strand; PAM type: NRG; PAM sequence: AAG
aatcctaagccaaaagaaca

SEQ ID NO: 82071 - DNA, 20 bp, Artificial Sequence
  Description of Artificial Sequence: Synthetic oligonucleotide
  Target: LAMA2; (-) strand; PAM type: NRG; PAM sequence: AAG
ccaagtcaatcctaagccaa

SEQ ID NO: 82072 - DNA, 20 bp, Artificial Sequence
  Description of Artificial Sequence: Synthetic oligonucleotide
  Target: LAMA2; (-) strand; PAM type: NRG; PAM sequence: AAG
cgcatcgccaagtcaatcct

SEQ ID NO: 82073 - DNA, 20 bp, Artificial Sequence
  Description of Artificial Sequence: Synthetic oligonucleotide
  Target: LAMA2; (-) strand; PAM type: NRG; PAM sequence: AAG
aaaaaagagcccgcatcgcc

SEQ ID NO: 82074 - DNA, 20 bp, Artificial Sequence
  Description of Artificial Sequence: Synthetic oligonucleotide
  Target: LAMA2; (-) strand; PAM type: NRG; PAM sequence: GAG
gttcatatggaaccaaaaaa

SEQ ID NO: 82075 - DNA, 20 bp, Artificial Sequence
  Description of Artificial Sequence: Synthetic oligonucleotide
  Target: LAMA2; (-) strand; PAM type: NRG; PAM sequence: AAG
aagttcatatggaaccaaaa

SEQ ID NO: 82076 - DNA, 20 bp, Artificial Sequence
  Description of Artificial Sequence: Synthetic oligonucleotide
  Target: LAMA2; (-) strand; PAM type: NRG; PAM sequence: TGG
aaactactttaaagttcata

SEQ ID NO: 82077 - DNA, 20 bp, Artificial Sequence
  Description of Artificial Sequence: Synthetic oligonucleotide
  Target: LAMA2; (-) strand; PAM type: NRG; PAM sequence: AAG
aattggaaaaaactacttta

SEQ ID NO: 82078 - DNA, 20 bp, Artificial Sequence
  Description of Artificial Sequence: Synthetic oligonucleotide
  Target: LAMA2; (-) strand; PAM type: NRG; PAM sequence: TGG
aatgcctttcttcacagaat

SEQ ID NO: 82079 - DNA, 20 bp, Artificial Sequence
  Description of Artificial Sequence: Synthetic oligonucleotide
  Target: LAMA2; (-) strand; PAM type: NRG; PAM sequence: CAG
gctaccaatgcctttcttca

SEQ ID NO: 82080 - DNA, 20 bp, Artificial Sequence
  Description of Artificial Sequence: Synthetic oligonucleotide
  Target: LAMA2; (-) strand; PAM type: NRG; PAM sequence: AAG
gattcaatgccatccccatc

SEQ ID NO: 82081 - DNA, 20 bp, Artificial Sequence
  Description of Artificial Sequence: Synthetic oligonucleotide
  Target: LAMA2; (-) strand; PAM type: NRG; PAM sequence: CAG
atactgcccaaggtaattta

SEQ ID NO: 82082 - DNA, 20 bp, Artificial Sequence
  Description of Artificial Sequence: Synthetic oligonucleotide
  Target: LAMA2; (-) strand; PAM type: NRG; PAM sequence: AGG
gaaaatggccatactgccca

SEQ ID NO: 82083 - DNA, 20 bp, Artificial Sequence
  Description of Artificial Sequence: Synthetic oligonucleotide
  Target: LAMA2; (-) strand; PAM type: NRG; PAM sequence: AAG
tgaaaatggccatactgccc

SEQ ID NO: 82084 - DNA, 20 bp, Artificial Sequence
  Description of Artificial Sequence: Synthetic oligonucleotide
  Target: LAMA2; (-) strand; PAM type: NRG; PAM sequence: TGG
aagaatcaatatcgtgaaaa

SEQ ID NO: 82085 - DNA, 20 bp, Artificial Sequence
  Description of Artificial Sequence: Synthetic oligonucleotide
  Target: LAMA2; (-) strand; PAM type: NRG; PAM sequence: AAG
attccatgctcatgggtagg

SEQ ID NO: 82086 - DNA, 20 bp, Artificial Sequence
  Description of Artificial Sequence: Synthetic oligonucleotide
  Target: LAMA2; (-) strand; PAM type: NRG; PAM sequence: AGG
aacattccatgctcatgggt

SEQ ID NO: 82087 - DNA, 20 bp, Artificial Sequence
  Description of Artificial Sequence: Synthetic oligonucleotide
  Target: LAMA2; (-) strand; PAM type: NRG; PAM sequence: TAG
gaacattccatgctcatggg

SEQ ID NO: 82088 - DNA, 20 bp, Artificial Sequence
  Description of Artificial Sequence: Synthetic oligonucleotide
  Target: LAMA2; (-) strand; PAM type: NRG; PAM sequence: GGG
gaagaacattccatgctcat

SEQ ID NO: 82089 - DNA, 20 bp, Artificial Sequence
  Description of Artificial Sequence: Synthetic oligonucleotide
  Target: LAMA2; (-) strand; PAM type: NRG; PAM sequence: TGG
ggaagaacattccatgctca

SEQ ID NO: 82090 - DNA, 20 bp, Artificial Sequence
  Description of Artificial Sequence: Synthetic oligonucleotide
  Target: LAMA2; (-) strand; PAM type: NRG; PAM sequence: AAG
aagaggatacaaacaaatgg

SEQ ID NO: 82091 - DNA, 20 bp, Artificial Sequence
  Description of Artificial Sequence: Synthetic oligonucleotide
  Target: LAMA2; (-) strand; PAM type: NRG; PAM sequence: TGG
taaaagaggatacaaacaaa

SEQ ID NO: 82092 - DNA, 20 bp, Artificial Sequence
  Description of Artificial Sequence: Synthetic oligonucleotide
  Target: LAMA2; (-) strand; PAM type: NRG; PAM sequence: AGG
actgctcaaggaaataaaag

SEQ ID NO: 82093 - DNA, 20 bp, Artificial Sequence
  Description of Artificial Sequence: Synthetic oligonucleotide
  Target: LAMA2; (-) strand; PAM type: NRG; PAM sequence: GAG
cactgctcaaggaaataaaa

SEQ ID NO: 82094 - DNA, 20 bp, Artificial Sequence
  Description of Artificial Sequence: Synthetic oligonucleotide
  Target: LAMA2; (-) strand; PAM type: NRG; PAM sequence: AAG
accactgctcaaggaaataa

SEQ ID NO: 82095 - DNA, 20 bp, Artificial Sequence
  Description of Artificial Sequence: Synthetic oligonucleotide
  Target: LAMA2; (-) strand; PAM type: NRG; PAM sequence: AGG
gaactacaaaccactgctca

SEQ ID NO: 82096 - DNA, 20 bp, Artificial Sequence
  Description of Artificial Sequence: Synthetic oligonucleotide
  Target: LAMA2; (-) strand; PAM type: NRG; PAM sequence: AAG
agaactacaaaccactgctc

SEQ ID NO: 82097 - DNA, 20 bp, Artificial Sequence
  Description of Artificial Sequence: Synthetic oligonucleotide
  Target: LAMA2; (-) strand; PAM type: NRG; PAM sequence: GAG
atgtgaaggacctcttcaag

SEQ ID NO: 82098 - DNA, 20 bp, Artificial Sequence
  Description of Artificial Sequence: Synthetic oligonucleotide
  Target: LAMA2; (-) strand; PAM type: NRG; PAM sequence: AGG
ggatgtgaaggacctcttca

SEQ ID NO: 82099 - DNA, 20 bp, Artificial Sequence
  Description of Artificial Sequence: Synthetic oligonucleotide
  Target: LAMA2; (-) strand; PAM type: NRG; PAM sequence: AAG
gggatgtgaaggacctcttc

SEQ ID NO: 82100 - DNA, 20 bp, Artificial Sequence
  Description of Artificial Sequence: Synthetic oligonucleotide
  Target: LAMA2; (-) strand; PAM type: NRG; PAM sequence: AGG
ccaacttacaagggatgtga

SEQ ID NO: 82101 - DNA, 20 bp, Artificial Sequence
  Description of Artificial Sequence: Synthetic oligonucleotide
  Target: LAMA2; (-) strand; PAM type: NRG; PAM sequence: AAG
tccaacttacaagggatgtg

SEQ ID NO: 82102 - DNA, 20 bp, Artificial Sequence
  Description of Artificial Sequence: Synthetic oligonucleotide
  Target: LAMA2; (-) strand; PAM type: NRG; PAM sequence: GGG
cctaggaatccaacttacaa

SEQ ID NO: 82103 - DNA, 20 bp, Artificial Sequence
  Description of Artificial Sequence: Synthetic oligonucleotide
  Target: LAMA2; (-) strand; PAM type: NRG; PAM sequence: AGG
acctaggaatccaacttaca

SEQ ID NO: 82104 - DNA, 20 bp, Artificial Sequence
  Description of Artificial Sequence: Synthetic oligonucleotide
  Target: LAMA2; (-) strand; PAM type: NRG; PAM sequence: AAG
tacctaggaatccaacttac

SEQ ID NO: 82105 - DNA, 20 bp, Artificial Sequence
  Description of Artificial Sequence: Synthetic oligonucleotide
  Target: LAMA2; (-) strand; PAM type: NRG; PAM sequence: AGG
tcaaagagaataaaatacct

SEQ ID NO: 82106 - DNA, 20 bp, Artificial Sequence
  Description of Artificial Sequence: Synthetic oligonucleotide
  Target: LAMA2; (-) strand; PAM type: NRG; PAM sequence: TAG
ttcaaagagaataaaatacc

SEQ ID NO: 82107 - DNA, 20 bp, Artificial Sequence
  Description of Artificial Sequence: Synthetic oligonucleotide
  Target: LAMA2; (-) strand; PAM type: NRG; PAM sequence: GAG
ccattcacaattgcttcaaa

SEQ ID NO: 82108 - DNA, 20 bp, Artificial Sequence
  Description of Artificial Sequence: Synthetic oligonucleotide
  Target: LAMA2; (-) strand; PAM type: NRG; PAM sequence: AAG
tcccattcacaattgcttca

SEQ ID NO: 82109 - DNA, 20 bp, Artificial Sequence
  Description of Artificial Sequence: Synthetic oligonucleotide
  Target: LAMA2; (-) strand; PAM type: NRG; PAM sequence: GAG
caaacagagagccaaatcat

SEQ ID NO: 82110 - DNA, 20 bp, Artificial Sequence
  Description of Artificial Sequence: Synthetic oligonucleotide
  Target: LAMA2; (-) strand; PAM type: NRG; PAM sequence: GAG
atacaacaacaacaaacaga

SEQ ID NO: 82111 - DNA, 20 bp, Artificial Sequence
  Description of Artificial Sequence: Synthetic oligonucleotide
  Target: LAMA2; (-) strand; PAM type: NRG; PAM sequence: GAG
ttatacaacaacaacaaaca

SEQ ID NO: 82112 - DNA, 20 bp, Artificial Sequence
  Description of Artificial Sequence: Synthetic oligonucleotide
  Target: LAMA2; (-) strand; PAM type: NRG; PAM sequence: CAG
tcttatacaacaacaacaaa

SEQ ID NO: 82113 - DNA, 20 bp, Artificial Sequence
  Description of Artificial Sequence: Synthetic oligonucleotide
  Target: LAMA2; (-) strand; PAM type: NRG; PAM sequence: AAG
aatcaatgtacaaaagtcac

SEQ ID NO: 82114 - DNA, 20 bp, Artificial Sequence
  Description of Artificial Sequence: Synthetic oligonucleotide
  Target: LAMA2; (-) strand; PAM type: NRG; PAM sequence: AAG
gatacaaaatcaatgtacaa

SEQ ID NO: 82115 - DNA, 20 bp, Artificial Sequence
  Description of Artificial Sequence: Synthetic oligonucleotide
  Target: LAMA2; (-) strand; PAM type: NRG; PAM sequence: AGG
agcaacttcagcaaagtctc

SEQ ID NO: 82116 - DNA, 20 bp, Artificial Sequence
  Description of Artificial Sequence: Synthetic oligonucleotide
  Target: LAMA2; (-) strand; PAM type: NRG; PAM sequence: CAG
aagcaacttcagcaaagtct

SEQ ID NO: 82117 - DNA, 20 bp, Artificial Sequence
  Description of Artificial Sequence: Synthetic oligonucleotide
  Target: LAMA2; (-) strand; PAM type: NRG; PAM sequence: AAG
gctgataagcaacttcagca

SEQ ID NO: 82118 - DNA, 20 bp, Artificial Sequence
  Description of Artificial Sequence: Synthetic oligonucleotide
  Target: LAMA2; (-) strand; PAM type: NRG; PAM sequence: CAG
cttaagctgataagcaactt

SEQ ID NO: 82119 - DNA, 20 bp, Artificial Sequence
  Description of Artificial Sequence: Synthetic oligonucleotide
  Target: LAMA2; (-) strand; PAM type: NRG; PAM sequence: AAG
caaaatctccttaagctgat

SEQ ID NO: 82120 - DNA, 20 bp, Artificial Sequence
  Description of Artificial Sequence: Synthetic oligonucleotide
  Target: LAMA2; (-) strand; PAM type: NRG; PAM sequence: AAG
tctcagtccaaaatctcctt

SEQ ID NO: 82121 - DNA, 20 bp, Artificial Sequence
  Description of Artificial Sequence: Synthetic oligonucleotide
  Target: LAMA2; (-) strand; PAM type: NRG; PAM sequence: CAG
tctagaaaaccccattgtct

SEQ ID NO: 82122 - DNA, 20 bp, Artificial Sequence
  Description of Artificial Sequence: Synthetic oligonucleotide
  Target: LAMA2; (-) strand; PAM type: NRG; PAM sequence: TAG
agacgacatgattgtatatc

SEQ ID NO: 82123 - DNA, 20 bp, Artificial Sequence
  Description of Artificial Sequence: Synthetic oligonucleotide
  Target: LAMA2; (-) strand; PAM type: NRG; PAM sequence: CAG
agtcaaattgtccccgtttg

SEQ ID NO: 82124 - DNA, 20 bp, Artificial Sequence
  Description of Artificial Sequence: Synthetic oligonucleotide
  Target: LAMA2; (-) strand; PAM type: NRG; PAM sequence: AAG
tattcaattaggaaaagagg

SEQ ID NO: 82125 - DNA, 20 bp, Artificial Sequence
  Description of Artificial Sequence: Synthetic oligonucleotide
  Target: LAMA2; (-) strand; PAM type: NRG; PAM sequence: AGG
gggtattcaattaggaaaag

SEQ ID NO: 82126 - DNA, 20 bp, Artificial Sequence
  Description of Artificial Sequence: Synthetic oligonucleotide
  Target: LAMA2; (-) strand; PAM type: NRG; PAM sequence: GAG
agggtattcaattaggaaaa

SEQ ID NO: 82127 - DNA, 20 bp, Artificial Sequence
  Description of Artificial Sequence: Synthetic oligonucleotide
  Target: LAMA2; (-) strand; PAM type: NRG; PAM sequence: AAG
aaagggtattcaattaggaa

SEQ ID NO: 82128 - DNA, 20 bp, Artificial Sequence
  Description of Artificial Sequence: Synthetic oligonucleotide
  Target: LAMA2; (-) strand; PAM type: NRG; PAM sequence: AGG
gaaataaagggtattcaatt

SEQ ID NO: 82129 - DNA, 20 bp, Artificial Sequence
  Description of Artificial Sequence: Synthetic oligonucleotide
  Target: LAMA2; (-) strand; PAM type: NRG; PAM sequence: TAG
ggaaataaagggtattcaat

SEQ ID NO: 82130 - DNA, 20 bp, Artificial Sequence
  Description of Artificial Sequence: Synthetic oligonucleotide
  Target: LAMA2; (-) strand; PAM type: NRG; PAM sequence: GGG
aggcaggagaaggaaataaa

SEQ ID NO: 82131 - DNA, 20 bp, Artificial Sequence
  Description of Artificial Sequence: Synthetic oligonucleotide
  Target: LAMA2; (-) strand; PAM type: NRG; PAM sequence: AGG
taggcaggagaaggaaataa

SEQ ID NO: 82132 - DNA, 20 bp, Artificial Sequence
  Description of Artificial Sequence: Synthetic oligonucleotide
  Target: LAMA2; (-) strand; PAM type: NRG; PAM sequence: AAG
ttaggcaggagaaggaaata

SEQ ID NO: 82133 - DNA, 20 bp, Artificial Sequence
  Description of Artificial Sequence: Synthetic oligonucleotide
  Target: LAMA2; (-) strand; PAM type: NRG; PAM sequence: AGG
cagggcaattaggcaggaga

SEQ ID NO: 82134 - DNA, 20 bp, Artificial Sequence
  Description of Artificial Sequence: Synthetic oligonucleotide
  Target: LAMA2; (-) strand; PAM type: NRG; PAM sequence: AAG
ccagggcaattaggcaggag

SEQ ID NO: 82135 - DNA, 20 bp, Artificial Sequence
  Description of Artificial Sequence: Synthetic oligonucleotide
  Target: LAMA2; (-) strand; PAM type: NRG; PAM sequence: GAG
tggccagggcaattaggcag

SEQ ID NO: 82136 - DNA, 20 bp, Artificial Sequence
  Description of Artificial Sequence: Synthetic oligonucleotide
  Target: LAMA2; (-) strand; PAM type: NRG; PAM sequence: AGG
tctggccagggcaattaggc

SEQ ID NO: 82137 - DNA, 20 bp, Artificial Sequence
  Description of Artificial Sequence: Synthetic oligonucleotide
  Target: LAMA2; (-) strand; PAM type: NRG; PAM sequence: CAG
ttctggccagggcaattagg

SEQ ID NO: 82138 - DNA, 20 bp, Artificial Sequence
  Description of Artificial Sequence: Synthetic oligonucleotide
  Target: LAMA2; (-) strand; PAM type: NRG; PAM sequence: AGG
aagttctggccagggcaatt

SEQ ID NO: 82139 - DNA, 20 bp, Artificial Sequence
  Description of Artificial Sequence: Synthetic oligonucleotide
  Target: LAMA2; (-) strand; PAM type: NRG; PAM sequence: TAG
gaagttctggccagggcaat

SEQ ID NO: 82140 - DNA, 20 bp, Artificial Sequence
  Description of Artificial Sequence: Synthetic oligonucleotide
  Target: LAMA2; (-) strand; PAM type: NRG; PAM sequence: GGG
agtgttggaagttctggcca

SEQ ID NO: 82141 - DNA, 20 bp, Artificial Sequence
  Description of Artificial Sequence: Synthetic oligonucleotide
  Target: LAMA2; (-) strand; PAM type: NRG; PAM sequence: AGG
tagtgttggaagttctggcc

SEQ ID NO: 82142 - DNA, 20 bp, Artificial Sequence
  Description of Artificial Sequence: Synthetic oligonucleotide
  Target: LAMA2; (-) strand; PAM type: NRG; PAM sequence: CAG
atagtgttggaagttctggc

SEQ ID NO: 82143 - DNA, 20 bp, Artificial Sequence
  Description of Artificial Sequence: Synthetic oligonucleotide
  Target: LAMA2; (-) strand; PAM type: NRG; PAM sequence: TGG
caacatagtgttggaagttc

SEQ ID NO: 82144 - DNA, 20 bp, Artificial Sequence
  Description of Artificial Sequence: Synthetic oligonucleotide
  Target: LAMA2; (-) strand; PAM type: NRG; PAM sequence: AAG
cctattcaacatagtgttgg

SEQ ID NO: 82145 - DNA, 20 bp, Artificial Sequence
  Description of Artificial Sequence: Synthetic oligonucleotide
  Target: LAMA2; (-) strand; PAM type: NRG; PAM sequence: TGG
gctcctattcaacatagtgt

SEQ ID NO: 82146 - DNA, 20 bp, Artificial Sequence
  Description of Artificial Sequence: Synthetic oligonucleotide
  Target: LAMA2; (-) strand; PAM type: NRG; PAM sequence: TAG
ctcaccgctcctattcaaca

SEQ ID NO: 82147 - DNA, 20 bp, Artificial Sequence
  Description of Artificial Sequence: Synthetic oligonucleotide
  Target: LAMA2; (-) strand; PAM type: NRG; PAM sequence: GGG
ttgaaaactggcacaagaca

SEQ ID NO: 82148 - DNA, 20 bp, Artificial Sequence
  Description of Artificial Sequence: Synthetic oligonucleotide
  Target: LAMA2; (-) strand; PAM type: NRG; PAM sequence: AGG
tttgaaaactggcacaagac

SEQ ID NO: 82149 - DNA, 20 bp, Artificial Sequence
  Description of Artificial Sequence: Synthetic oligonucleotide
  Target: LAMA2; (-) strand; PAM type: NRG; PAM sequence: CAG
ctttgaaaactggcacaaga

SEQ ID NO: 82150 - DNA, 20 bp, Artificial Sequence
  Description of Artificial Sequence: Synthetic oligonucleotide
  Target: LAMA2; (-) strand; PAM type: NRG; PAM sequence: AAG
ttccctttgaaaactggcac

SEQ ID NO: 82151 - DNA, 20 bp, Artificial Sequence
  Description of Artificial Sequence: Synthetic oligonucleotide
  Target: LAMA2; (-) strand; PAM type: NRG; PAM sequence: TGG
gaagcattccctttgaaaac

SEQ ID NO: 82152 - DNA, 20 bp, Artificial Sequence
  Description of Artificial Sequence: Synthetic oligonucleotide
  Target: LAMA2; (-) strand; PAM type: NRG; PAM sequence: AAG
acagaatgggcaaaaactgg

SEQ ID NO: 82153 - DNA, 20 bp, Artificial Sequence
  Description of Artificial Sequence: Synthetic oligonucleotide
  Target: LAMA2; (-) strand; PAM type: NRG; PAM sequence: TGG
catacagaatgggcaaaaac

SEQ ID NO: 82154 - DNA, 20 bp, Artificial Sequence
  Description of Artificial Sequence: Synthetic oligonucleotide
  Target: LAMA2; (-) strand; PAM type: NRG; PAM sequence: GGG
cagccagtatcatacagaat

SEQ ID NO: 82155 - DNA, 20 bp, Artificial Sequence
  Description of Artificial Sequence: Synthetic oligonucleotide
  Target: LAMA2; (-) strand; PAM type: NRG; PAM sequence: TGG
acagccagtatcatacagaa

SEQ ID NO: 82156 - DNA, 20 bp, Artificial Sequence
  Description of Artificial Sequence: Synthetic oligonucleotide
  Target: LAMA2; (-) strand; PAM type: NRG; PAM sequence: CAG
aacccacagccagtatcata

SEQ ID NO: 82157 - DNA, 20 bp, Artificial Sequence
  Description of Artificial Sequence: Synthetic oligonucleotide
  Target: LAMA2; (-) strand; PAM type: NRG; PAM sequence: CAG
atctatgacaaacccacagc

SEQ ID NO: 82158 - DNA, 20 bp, Artificial Sequence
  Description of Artificial Sequence: Synthetic oligonucleotide
  Target: LAMA2; (-) strand; PAM type: NRG; PAM sequence: CAG
agctatctatgacaaaccca

SEQ ID NO: 82159 - DNA, 20 bp, Artificial Sequence
  Description of Artificial Sequence: Synthetic oligonucleotide
  Target: LAMA2; (-) strand; PAM type: NRG; PAM sequence: GAG
gacgtaattcaaaatattaa

SEQ ID NO: 82160 - DNA, 20 bp, Artificial Sequence
  Description of Artificial Sequence: Synthetic oligonucleotide
  Target: LAMA2; (-) strand; PAM type: NRG; PAM sequence: AAG
gggacgtaattcaaaatatt

SEQ ID NO: 82161 - DNA, 20 bp, Artificial Sequence
  Description of Artificial Sequence: Synthetic oligonucleotide
  Target: LAMA2; (-) strand; PAM type: NRG; PAM sequence: GGG
tcaataaattaggtattgat

SEQ ID NO: 82162 - DNA, 20 bp, Artificial Sequence
  Description of Artificial Sequence: Synthetic oligonucleotide
  Target: LAMA2; (-) strand; PAM type: NRG; PAM sequence: TGG
ctcaataaattaggtattga

SEQ ID NO: 82163 - DNA, 20 bp, Artificial Sequence
  Description of Artificial Sequence: Synthetic oligonucleotide
  Target: LAMA2; (-) strand; PAM type: NRG; PAM sequence: AGG
ctaaaaactctcaataaatt

SEQ ID NO: 82164 - DNA, 20 bp, Artificial Sequence
  Description of Artificial Sequence: Synthetic oligonucleotide
  Target: LAMA2; (-) strand; PAM type: NRG; PAM sequence: TAG
gctaaaaactctcaataaat

SEQ ID NO: 82165 - DNA, 20 bp, Artificial Sequence
  Description of Artificial Sequence: Synthetic oligonucleotide
  Target: LAMA2; (-) strand; PAM type: NRG; PAM sequence: AAG
tatctcaatagatgcagaaa

SEQ ID NO: 82166 - DNA, 20 bp, Artificial Sequence
  Description of Artificial Sequence: Synthetic oligonucleotide
  Target: LAMA2; (-) strand; PAM type: NRG; PAM sequence: CAG
catgattatctcaatagatg

SEQ ID NO: 82167 - DNA, 20 bp, Artificial Sequence
  Description of Artificial Sequence: Synthetic oligonucleotide
  Target: LAMA2; (-) strand; PAM type: NRG; PAM sequence: TAG
aaaccacatgattatctcaa

SEQ ID NO: 82168 - DNA, 20 bp, Artificial Sequence
  Description of Artificial Sequence: Synthetic oligonucleotide
  Target: LAMA2; (-) strand; PAM type: NRG; PAM sequence: AAG
ccagcatataaacagagcca

SEQ ID NO: 82169 - DNA, 20 bp, Artificial Sequence
  Description of Artificial Sequence: Synthetic oligonucleotide
  Target: LAMA2; (-) strand; PAM type: NRG; PAM sequence: GAG
tgtaatccagcatataaaca

SEQ ID NO: 82170 - DNA, 20 bp, Artificial Sequence
  Description of Artificial Sequence: Synthetic oligonucleotide
  Target: LAMA2; (-) strand; PAM type: NRG; PAM sequence: CAG
aatgtaatccagcatataaa

SEQ ID NO: 82171 - DNA, 20 bp, Artificial Sequence
  Description of Artificial Sequence: Synthetic oligonucleotide
  Target: LAMA2; (-) strand; PAM type: NRG; PAM sequence: CAG
acaaatcaataaatgtaatc

SEQ ID NO: 82172 - DNA, 20 bp, Artificial Sequence
  Description of Artificial Sequence: Synthetic oligonucleotide
  Target: LAMA2; (-) strand; PAM type: NRG; PAM sequence: TGG
tcatccctgggatgcaaggc

SEQ ID NO: 82173 - DNA, 20 bp, Artificial Sequence
  Description of Artificial Sequence: Synthetic oligonucleotide
  Target: LAMA2; (-) strand; PAM type: NRG; PAM sequence: AGG
ggcttcatccctgggatgca

SEQ ID NO: 82174 - DNA, 20 bp, Artificial Sequence
  Description of Artificial Sequence: Synthetic oligonucleotide
  Target: LAMA2; (-) strand; PAM type: NRG; PAM sequence: AAG
aggcttcatccctgggatgc

SEQ ID NO: 82175 - DNA, 20 bp, Artificial Sequence
  Description of Artificial Sequence: Synthetic oligonucleotide
  Target: LAMA2; (-) strand; PAM type: NRG; PAM sequence: GGG
atcaagtaggcttcatccct

SEQ ID NO: 82176 - DNA, 20 bp, Artificial Sequence
  Description of Artificial Sequence: Synthetic oligonucleotide
  Target: LAMA2; (-) strand; PAM type: NRG; PAM sequence: TGG
gatcaagtaggcttcatccc

SEQ ID NO: 82177 - DNA, 20 bp, Artificial Sequence
  Description of Artificial Sequence: Synthetic oligonucleotide
  Target: LAMA2; (-) strand; PAM type: NRG; PAM sequence: AGG
cttatccaccatgatcaagt

SEQ ID NO: 82178 - DNA, 20 bp, Artificial Sequence
  Description of Artificial Sequence: Synthetic oligonucleotide
  Target: LAMA2; (-) strand; PAM type: NRG; PAM sequence: TAG
gcttatccaccatgatcaag

SEQ ID NO: 82179 - DNA, 20 bp, Artificial Sequence
  Description of Artificial Sequence: Synthetic oligonucleotide
  Target: LAMA2; (-) strand; PAM type: NRG; PAM sequence: AAG
aaagcttatccaccatgatc

SEQ ID NO: 82180 - DNA, 20 bp, Artificial Sequence
  Description of Artificial Sequence: Synthetic oligonucleotide
  Target: LAMA2; (-) strand; PAM type: NRG; PAM sequence: AAG
gaatccagcagcacatcaaa

SEQ ID NO: 82181 - DNA, 20 bp, Artificial Sequence
  Description of Artificial Sequence: Synthetic oligonucleotide
  Target: LAMA2; (-) strand; PAM type: NRG; PAM sequence: CAG
tactggcaaaacgaatccag

SEQ ID NO: 82182 - DNA, 20 bp, Artificial Sequence
  Description of Artificial Sequence: Synthetic oligonucleotide
  Target: LAMA2; (-) strand; PAM type: NRG; PAM sequence: CAG
aaatactggcaaaacgaatc

SEQ ID NO: 82183 - DNA, 20 bp, Artificial Sequence
  Description of Artificial Sequence: Synthetic oligonucleotide
  Target: LAMA2; (-) strand; PAM type: NRG; PAM sequence: TGG
aaaaatcctcagtaaaatac

SEQ ID NO: 82184 - DNA, 20 bp, Artificial Sequence
  Description of Artificial Sequence: Synthetic oligonucleotide
  Target: LAMA2; (-) strand; PAM type: NRG; PAM sequence: CAG
aacattgatgcaaaaatcct

SEQ ID NO: 82185 - DNA, 20 bp, Artificial Sequence
  Description of Artificial Sequence: Synthetic oligonucleotide
  Target: LAMA2; (-) strand; PAM type: NRG; PAM sequence: TAG
acaaccaaaaaagagaattt

SEQ ID NO: 82186 - DNA, 20 bp, Artificial Sequence
  Description of Artificial Sequence: Synthetic oligonucleotide
  Target: LAMA2; (-) strand; PAM type: NRG; PAM sequence: GAG
gcagagacacaaccaaaaaa

SEQ ID NO: 82187 - DNA, 20 bp, Artificial Sequence
  Description of Artificial Sequence: Synthetic oligonucleotide
  Target: LAMA2; (-) strand; PAM type: NRG; PAM sequence: AAG
aggcagagacacaaccaaaa

SEQ ID NO: 82188 - DNA, 20 bp, Artificial Sequence
  Description of Artificial Sequence: Synthetic oligonucleotide
  Target: LAMA2; (-) strand; PAM type: NRG; PAM sequence: GAG
tctgataccaaagccaggca

SEQ ID NO: 82189 - DNA, 20 bp, Artificial Sequence
  Description of Artificial Sequence: Synthetic oligonucleotide
  Target: LAMA2; (-) strand; PAM type: NRG; PAM sequence: CAG
attctgataccaaagccagg

SEQ ID NO: 82190 - DNA, 20 bp, Artificial Sequence
  Description of Artificial Sequence: Synthetic oligonucleotide
  Target: LAMA2; (-) strand; PAM type: NRG; PAM sequence: AGG
atcattctgataccaaagcc

SEQ ID NO: 82191 - DNA, 20 bp, Artificial Sequence
  Description of Artificial Sequence: Synthetic oligonucleotide
  Target: LAMA2; (-) strand; PAM type: NRG; PAM sequence: CAG
catcattctgataccaaagc

SEQ ID NO: 82192 - DNA, 20 bp, Artificial Sequence
  Description of Artificial Sequence: Synthetic oligonucleotide
  Target: LAMA2; (-) strand; PAM type: NRG; PAM sequence: AAG
ccagcatcattctgatacca

SEQ ID NO: 82193 - DNA, 20 bp, Artificial Sequence
  Description of Artificial Sequence: Synthetic oligonucleotide
  Target: LAMA2; (-) strand; PAM type: NRG; PAM sequence: CAG
cctaactcattttatgaggc

SEQ ID NO: 82194 - DNA, 20 bp, Artificial Sequence
  Description of Artificial Sequence: Synthetic oligonucleotide
  Target: LAMA2; (-) strand; PAM type: NRG; PAM sequence: AGG
cctccctaactcattttatg

SEQ ID NO: 82195 - DNA, 20 bp, Artificial Sequence
  Description of Artificial Sequence: Synthetic oligonucleotide
  Target: LAMA2; (-) strand; PAM type: NRG; PAM sequence: GAG
tcctccctaactcattttat

SEQ ID NO: 82196 - DNA, 20 bp, Artificial Sequence
  Description of Artificial Sequence: Synthetic oligonucleotide
  Target: LAMA2; (-) strand; PAM type: NRG; PAM sequence: GGG
ttccaatcaatagaaaaaga

SEQ ID NO: 82197 - DNA, 20 bp, Artificial Sequence
  Description of Artificial Sequence: Synthetic oligonucleotide
  Target: LAMA2; (-) strand; PAM type: NRG; PAM sequence: AGG
attccaatcaatagaaaaag

SEQ ID NO: 82198 - DNA, 20 bp, Artificial Sequence
  Description of Artificial Sequence: Synthetic oligonucleotide
  Target: LAMA2; (-) strand; PAM type: NRG; PAM sequence: GAG
tattccaatcaatagaaaaa

SEQ ID NO: 82199 - DNA, 20 bp, Artificial Sequence
  Description of Artificial Sequence: Synthetic oligonucleotide
  Target: LAMA2; (-) strand; PAM type: NRG; PAM sequence: AAG
actattccaatcaatagaaa

SEQ ID NO: 82200 - DNA, 20 bp, Artificial Sequence
  Description of Artificial Sequence: Synthetic oligonucleotide
  Target: LAMA2; (-) strand; PAM type: NRG; PAM sequence: TAG
tctgaaactattccaatcaa

SEQ ID NO: 82201 - DNA, 20 bp, Artificial Sequence
  Description of Artificial Sequence: Synthetic oligonucleotide
  Target: LAMA2; (-) strand; PAM type: NRG; PAM sequence: TGG
ccagaggtacaaggaggaac

SEQ ID NO: 82202 - DNA, 20 bp, Artificial Sequence
  Description of Artificial Sequence: Synthetic oligonucleotide
  Target: LAMA2; (-) strand; PAM type: NRG; PAM sequence: AGG
attctaccagaggtacaagg

SEQ ID NO: 82203 - DNA, 20 bp, Artificial Sequence
  Description of Artificial Sequence: Synthetic oligonucleotide
  Target: LAMA2; (-) strand; PAM type: NRG; PAM sequence: GAG
aattctaccagaggtacaag

SEQ ID NO: 82204 - DNA, 20 bp, Artificial Sequence
  Description of Artificial Sequence: Synthetic oligonucleotide
  Target: LAMA2; (-) strand; PAM type: NRG; PAM sequence: AGG
cgaattctaccagaggtaca

SEQ ID NO: 82205 - DNA, 20 bp, Artificial Sequence
  Description of Artificial Sequence: Synthetic oligonucleotide
  Target: LAMA2; (-) strand; PAM type: NRG; PAM sequence: AAG
ccgaattctaccagaggtac

SEQ ID NO: 82206 - DNA, 20 bp, Artificial Sequence
  Description of Artificial Sequence: Synthetic oligonucleotide
  Target: LAMA2; (-) strand; PAM type: NRG; PAM sequence: AGG
tcacagccgaattctaccag

SEQ ID NO: 82207 - DNA, 20 bp, Artificial Sequence
  Description of Artificial Sequence: Synthetic oligonucleotide
  Target: LAMA2; (-) strand; PAM type: NRG; PAM sequence: GAG
ttcacagccgaattctacca

SEQ ID NO: 82208 - DNA, 20 bp, Artificial Sequence
  Description of Artificial Sequence: Synthetic oligonucleotide
  Target: LAMA2; (-) strand; PAM type: NRG; PAM sequence: CAG
gattcacagccgaattctac

SEQ ID NO: 82209 - DNA, 20 bp, Artificial Sequence
  Description of Artificial Sequence: Synthetic oligonucleotide
  Target: LAMA2; (-) strand; PAM type: NRG; PAM sequence: CAG
tccaggaccagatggattca

SEQ ID NO: 82210 - DNA, 20 bp, Artificial Sequence
  Description of Artificial Sequence: Synthetic oligonucleotide
  Target: LAMA2; (-) strand; PAM type: NRG; PAM sequence: TGG
aaaaagagtccaggaccaga

SEQ ID NO: 82211 - DNA, 20 bp, Artificial Sequence
  Description of Artificial Sequence: Synthetic oligonucleotide
  Target: LAMA2; (-) strand; PAM type: NRG; PAM sequence: CAG
aaccaaaaagagtccaggac

SEQ ID NO: 82212 - DNA, 20 bp, Artificial Sequence
  Description of Artificial Sequence: Synthetic oligonucleotide
  Target: LAMA2; (-) strand; PAM type: NRG; PAM sequence: AGG
ttaccaaccaaaaagagtcc

SEQ ID NO: 82213 - DNA, 20 bp, Artificial Sequence
  Description of Artificial Sequence: Synthetic oligonucleotide
  Target: LAMA2; (-) strand; PAM type: NRG; PAM sequence: CAG
cttaccaaccaaaaagagtc

SEQ ID NO: 82214 - DNA, 20 bp, Artificial Sequence
  Description of Artificial Sequence: Synthetic oligonucleotide
  Target: LAMA2; (-) strand; PAM type: NRG; PAM sequence: GAG
aatagcttaccaaccaaaaa

SEQ ID NO: 82215 - DNA, 20 bp, Artificial Sequence
  Description of Artificial Sequence: Synthetic oligonucleotide
  Target: LAMA2; (-) strand; PAM type: NRG; PAM sequence: AAG
tcaatagcttaccaaccaaa

SEQ ID NO: 82216 - DNA, 20 bp, Artificial Sequence
  Description of Artificial Sequence: Synthetic oligonucleotide
  Target: LAMA2; (-) strand; PAM type: NRG; PAM sequence: TAG
gaaattgtggcaataatcaa

SEQ ID NO: 82217 - DNA, 20 bp, Artificial Sequence
  Description of Artificial Sequence: Synthetic oligonucleotide
  Target: LAMA2; (-) strand; PAM type: NRG; PAM sequence: TGG
aataacaggatctgaaattg

SEQ ID NO: 82218 - DNA, 20 bp, Artificial Sequence
  Description of Artificial Sequence: Synthetic oligonucleotide
  Target: LAMA2; (-) strand; PAM type: NRG; PAM sequence: AGG
tctctgaatagaccaataac

SEQ ID NO: 82219 - DNA, 20 bp, Artificial Sequence
  Description of Artificial Sequence: Synthetic oligonucleotide
  Target: LAMA2; (-) strand; PAM type: NRG; PAM sequence: CAG
atctctgaatagaccaataa

SEQ ID NO: 82220 - DNA, 20 bp, Artificial Sequence
  Description of Artificial Sequence: Synthetic oligonucleotide
  Target: LAMA2; (-) strand; PAM type: NRG; PAM sequence: TAG
gaagaagttgaatctctgaa

SEQ ID NO: 82221 - DNA, 20 bp, Artificial Sequence
  Description of Artificial Sequence: Synthetic oligonucleotide
  Target: LAMA2; (-) strand; PAM type: NRG; PAM sequence: AAG
cccaagactaaaccaggaag

SEQ ID NO: 82222 - DNA, 20 bp, Artificial Sequence
  Description of Artificial Sequence: Synthetic oligonucleotide
  Target: LAMA2; (-) strand; PAM type: NRG; PAM sequence: AAG
tctcccaagactaaaccagg

SEQ ID NO: 82223 - DNA, 20 bp, Artificial Sequence
  Description of Artificial Sequence: Synthetic oligonucleotide
  Target: LAMA2; (-) strand; PAM type: NRG; PAM sequence: AGG
cactctcccaagactaaacc

SEQ ID NO: 82224 - DNA, 20 bp, Artificial Sequence
  Description of Artificial Sequence: Synthetic oligonucleotide
  Target: LAMA2; (-) strand; PAM type: NRG; PAM sequence: CAG
acactctcccaagactaaac

SEQ ID NO: 82225 - DNA, 20 bp, Artificial Sequence
  Description of Artificial Sequence: Synthetic oligonucleotide
  Target: LAMA2; (-) strand; PAM type: NRG; PAM sequence: AAG
ctcgacacatacactctccc

SEQ ID NO: 82226 - DNA, 20 bp, Artificial Sequence
  Description of Artificial Sequence: Synthetic oligonucleotide
  Target: LAMA2; (-) strand; PAM type: NRG; PAM sequence: TGG
actagaaaatctagaagaaa

SEQ ID NO: 82227 - DNA, 20 bp, Artificial Sequence
  Description of Artificial Sequence: Synthetic oligonucleotide
  Target: LAMA2; (-) strand; PAM type: NRG; PAM sequence: AAG
aaataaactagaaaatctag

SEQ ID NO: 82228 - DNA, 20 bp, Artificial Sequence
  Description of Artificial Sequence: Synthetic oligonucleotide
  Target: LAMA2; (-) strand; PAM type: NRG; PAM sequence: TAG
tgcaaataaactagaaaatc

SEQ ID NO: 82229 - DNA, 20 bp, Artificial Sequence
  Description of Artificial Sequence: Synthetic oligonucleotide
  Target: LAMA2; (-) strand; PAM type: NRG; PAM sequence: TAG
acacctctatgcaaataaac

SEQ ID NO: 82230 - DNA, 20 bp, Artificial Sequence
  Description of Artificial Sequence: Synthetic oligonucleotide
  Target: LAMA2; (-) strand; PAM type: NRG; PAM sequence: GAG
agaaatacaaactaaaatca

SEQ ID NO: 82231 - DNA, 20 bp, Artificial Sequence
  Description of Artificial Sequence: Synthetic oligonucleotide
  Target: LAMA2; (-) strand; PAM type: NRG; PAM sequence: CAG
acagaaatacaaactaaaat

SEQ ID NO: 82232 - DNA, 20 bp, Artificial Sequence
  Description of Artificial Sequence: Synthetic oligonucleotide
  Target: LAMA2; (-) strand; PAM type: NRG; PAM sequence: CAG
ggatatcaccacggatccca

SEQ ID NO: 82233 - DNA, 20 bp, Artificial Sequence
  Description of Artificial Sequence: Synthetic oligonucleotide
  Target: LAMA2; (-) strand; PAM type: NRG; PAM sequence: CGG
tgataaaggggatatcacca

SEQ ID NO: 82234 - DNA, 20 bp, Artificial Sequence
  Description of Artificial Sequence: Synthetic oligonucleotide
  Target: LAMA2; (-) strand; PAM type: NRG; PAM sequence: GGG
tgcaataaaaaatgataaag

SEQ ID NO: 82235 - DNA, 20 bp, Artificial Sequence
  Description of Artificial Sequence: Synthetic oligonucleotide
  Target: LAMA2; (-) strand; PAM type: NRG; PAM sequence: GGG
atgcaataaaaaatgataaa

SEQ ID NO: 82236 - DNA, 20 bp, Artificial Sequence
  Description of Artificial Sequence: Synthetic oligonucleotide
  Target: LAMA2; (-) strand; PAM type: NRG; PAM sequence: AGG
gatgcaataaaaaatgataa

SEQ ID NO: 82237 - DNA, 20 bp, Artificial Sequence
  Description of Artificial Sequence: Synthetic oligonucleotide
  Target: LAMA2; (-) strand; PAM type: NRG; PAM sequence: AAG
agatgcaataaaaaatgata

SEQ ID NO: 82238 - DNA, 20 bp, Artificial Sequence
  Description of Artificial Sequence: Synthetic oligonucleotide
  Target: LAMA2; (-) strand; PAM type: NRG; PAM sequence: TAG
aaaaagagagaagaatctaa

SEQ ID NO: 82239 - DNA, 20 bp, Artificial Sequence
  Description of Artificial Sequence: Synthetic oligonucleotide
  Target: LAMA2; (-) strand; PAM type: NRG; PAM sequence: AAG
taataaagaaaaaaagagag

SEQ ID NO: 82240 - DNA, 20 bp, Artificial Sequence
  Description of Artificial Sequence: Synthetic oligonucleotide
  Target: LAMA2; (-) strand; PAM type: NRG; PAM sequence: GAG
gactaataaagaaaaaaaga

SEQ ID NO: 82241 - DNA, 20 bp, Artificial Sequence
  Description of Artificial Sequence: Synthetic oligonucleotide
  Target: LAMA2; (-) strand; PAM type: NRG; PAM sequence: GAG
aagactaataaagaaaaaaa

SEQ ID NO: 82242 - DNA, 20 bp, Artificial Sequence
  Description of Artificial Sequence: Synthetic oligonucleotide
  Target: LAMA2; (-) strand; PAM type: NRG; PAM sequence: AAG
gcaagactaataaagaaaaa

SEQ ID NO: 82243 - DNA, 20 bp, Artificial Sequence
  Description of Artificial Sequence: Synthetic oligonucleotide
  Target: LAMA2; (-) strand; PAM type: NRG; PAM sequence: AAG
gaccgctagcaagactaata

SEQ ID NO: 82244 - DNA, 20 bp, Artificial Sequence
  Description of Artificial Sequence: Synthetic oligonucleotide
  Target: LAMA2; (-) strand; PAM type: NRG; PAM sequence: AAG
aaaattgatagaccgctagc

SEQ ID NO: 82245 - DNA, 20 bp, Artificial Sequence
  Description of Artificial Sequence: Synthetic oligonucleotide
  Target: LAMA2; (-) strand; PAM type: NRG; PAM sequence: TAG
caacaaaattgatagaccgc

SEQ ID NO: 82246 - DNA, 20 bp, Artificial Sequence
  Description of Artificial Sequence: Synthetic oligonucleotide
  Target: LAMA2; (-) strand; PAM type: NRG; PAM sequence: TAG
gaaagggtcaacaaaattga

SEQ ID NO: 82247 - DNA, 20 bp, Artificial Sequence
  Description of Artificial Sequence: Synthetic oligonucleotide
  Target: LAMA2; (-) strand; PAM type: NRG; PAM sequence: GGG
caggagctggttttttgaaa

SEQ ID NO: 82248 - DNA, 20 bp, Artificial Sequence
  Description of Artificial Sequence: Synthetic oligonucleotide
  Target: LAMA2; (-) strand; PAM type: NRG; PAM sequence: AGG
ccaggagctggttttttgaa

SEQ ID NO: 82249 - DNA, 20 bp, Artificial Sequence
  Description of Artificial Sequence: Synthetic oligonucleotide
  Target: LAMA2; (-) strand; PAM type: NRG; PAM sequence: AAG
tccaggagctggttttttga

SEQ ID NO: 82250 - DNA, 20 bp, Artificial Sequence
  Description of Artificial Sequence: Synthetic oligonucleotide
  Target: LAMA2; (-) strand; PAM type: NRG; PAM sequence: TGG
aaattaatgaatccaggagc

SEQ ID NO: 82251 - DNA, 20 bp, Artificial Sequence
  Description of Artificial Sequence: Synthetic oligonucleotide
  Target: LAMA2; (-) strand; PAM type: NRG; PAM sequence: GAG
caaaaaattaatgaatccag

SEQ ID NO: 82252 - DNA, 20 bp, Artificial Sequence
  Description of Artificial Sequence: Synthetic oligonucleotide
  Target: LAMA2; (-) strand; PAM type: NRG; PAM sequence: AGG
ttcaaaaaattaatgaatcc

SEQ ID NO: 82253 - DNA, 20 bp, Artificial Sequence
  Description of Artificial Sequence: Synthetic oligonucleotide
  Target: LAMA2; (-) strand; PAM type: NRG; PAM sequence: CAG
cttcaaaaaattaatgaatc

SEQ ID NO: 82254 - DNA, 20 bp, Artificial Sequence
  Description of Artificial Sequence: Synthetic oligonucleotide
  Target: LAMA2; (-) strand; PAM type: NRG; PAM sequence: GAG
gagcagaactgaaggaaata

SEQ ID NO: 82255 - DNA, 20 bp, Artificial Sequence
  Description of Artificial Sequence: Synthetic oligonucleotide
  Target: LAMA2; (-) strand; PAM type: NRG; PAM sequence: TAG
cagagcagaactgaaggaaa

SEQ ID NO: 82256 - DNA, 20 bp, Artificial Sequence
  Description of Artificial Sequence: Synthetic oligonucleotide
  Target: LAMA2; (-) strand; PAM type: NRG; PAM sequence: AGG
taaaatcagagcagaactga

SEQ ID NO: 82257 - DNA, 20 bp, Artificial Sequence
  Description of Artificial Sequence: Synthetic oligonucleotide
  Target: LAMA2; (-) strand; PAM type: NRG; PAM sequence: AAG
ctaaaatcagagcagaactg

SEQ ID NO: 82258 - DNA, 20 bp, Artificial Sequence
  Description of Artificial Sequence: Synthetic oligonucleotide
  Target: LAMA2; (-) strand; PAM type: NRG; PAM sequence: CAG
agaaataactaaaatcagag

SEQ ID NO: 82259 - DNA, 20 bp, Artificial Sequence
  Description of Artificial Sequence: Synthetic oligonucleotide
  Target: LAMA2; (-) strand; PAM type: NRG; PAM sequence: GAG
gcaagaaataactaaaatca

SEQ ID NO: 82260 - DNA, 20 bp, Artificial Sequence
  Description of Artificial Sequence: Synthetic oligonucleotide
  Target: LAMA2; (-) strand; PAM type: NRG; PAM sequence: CAG
aggcaagaaataactaaaat

SEQ ID NO: 82261 - DNA, 20 bp, Artificial Sequence
  Description of Artificial Sequence: Synthetic oligonucleotide
  Target: LAMA2; (-) strand; PAM type: NRG; PAM sequence: AAG
ttcaaaagctagcagaaggc

SEQ ID NO: 82262 - DNA, 20 bp, Artificial Sequence
  Description of Artificial Sequence: Synthetic oligonucleotide
  Target: LAMA2; (-) strand; PAM type: NRG; PAM sequence: AGG
cacattcaaaagctagcaga

SEQ ID NO: 82263 - DNA, 20 bp, Artificial Sequence
  Description of Artificial Sequence: Synthetic oligonucleotide
  Target: LAMA2; (-) strand; PAM type: NRG; PAM sequence: AAG
acacattcaaaagctagcag

SEQ ID NO: 82264 - DNA, 20 bp, Artificial Sequence
  Description of Artificial Sequence: Synthetic oligonucleotide
  Target: LAMA2; (-) strand; PAM type: NRG; PAM sequence: CAG
caaacacattcaaaagctag

SEQ ID NO: 82265 - DNA, 20 bp, Artificial Sequence
  Description of Artificial Sequence: Synthetic oligonucleotide
  Target: LAMA2; (-) strand; PAM type: NRG; PAM sequence: TAG
gagcaaacacattcaaaagc

SEQ ID NO: 82266 - DNA, 20 bp, Artificial Sequence
  Description of Artificial Sequence: Synthetic oligonucleotide
  Target: LAMA2; (-) strand; PAM type: NRG; PAM sequence: AAG
gcaggagcaaacacattcaa

SEQ ID NO: 82267 - DNA, 20 bp, Artificial Sequence
  Description of Artificial Sequence: Synthetic oligonucleotide
  Target: LAMA2; (-) strand; PAM type: NRG; PAM sequence: GAG
taaaagaactagaaaagcag

SEQ ID NO: 82268 - DNA, 20 bp, Artificial Sequence
  Description of Artificial Sequence: Synthetic oligonucleotide
  Target: LAMA2; (-) strand; PAM type: NRG; PAM sequence: AGG
attaaaagaactagaaaagc

SEQ ID NO: 82269 - DNA, 20 bp, Artificial Sequence
  Description of Artificial Sequence: Synthetic oligonucleotide
  Target: LAMA2; (-) strand; PAM type: NRG; PAM sequence: CAG
aattaaaagaactagaaaag

SEQ ID NO: 82270 - DNA, 20 bp, Artificial Sequence
  Description of Artificial Sequence: Synthetic oligonucleotide
  Target: LAMA2; (-) strand; PAM type: NRG; PAM sequence: AAG
cacaattaaaagaactagaa

SEQ ID NO: 82271 - DNA, 20 bp, Artificial Sequence
  Description of Artificial Sequence: Synthetic oligonucleotide
  Target: LAMA2; (-) strand; PAM type: NRG; PAM sequence: TAG
aacatcacaattaaaagaac

SEQ ID NO: 82272 - DNA, 20 bp, Artificial Sequence
  Description of Artificial Sequence: Synthetic oligonucleotide
  Target: LAMA2; (-) strand; PAM type: NRG; PAM sequence: AAG
caccctaacatcacaattaa

SEQ ID NO: 82273 - DNA, 20 bp, Artificial Sequence
  Description of Artificial Sequence: Synthetic oligonucleotide
  Target: LAMA2; (-) strand; PAM type: NRG; PAM sequence: AAG
gcccacaagagaaagcagga

SEQ ID NO: 82274 - DNA, 20 bp, Artificial Sequence
  Description of Artificial Sequence: Synthetic oligonucleotide
  Target: LAMA2; (-) strand; PAM type: NRG; PAM sequence: AGG
aaatgcccacaagagaaagc

SEQ ID NO: 82275 - DNA, 20 bp, Artificial Sequence
  Description of Artificial Sequence: Synthetic oligonucleotide
  Target: LAMA2; (-) strand; PAM type: NRG; PAM sequence: CAG
taaatgcccacaagagaaag

SEQ ID NO: 82276 - DNA, 20 bp, Artificial Sequence
  Description of Artificial Sequence: Synthetic oligonucleotide
  Target: LAMA2; (-) strand; PAM type: NRG; PAM sequence: AAG
cactaaatgcccacaagaga

SEQ ID NO: 82277 - DNA, 20 bp, Artificial Sequence
  Description of Artificial Sequence: Synthetic oligonucleotide
  Target: LAMA2; (-) strand; PAM type: NRG; PAM sequence: GAG
atagcactaaatgcccacaa

SEQ ID NO: 82278 - DNA, 20 bp, Artificial Sequence
  Description of Artificial Sequence: Synthetic oligonucleotide
  Target: LAMA2; (-) strand; PAM type: NRG; PAM sequence: AAG
ttatagcactaaatgcccac

SEQ ID NO: 82279 - DNA, 20 bp, Artificial Sequence
  Description of Artificial Sequence: Synthetic oligonucleotide
  Target: LAMA2; (-) strand; PAM type: NRG; PAM sequence: TAG
agtgtgtagagggaaattta

SEQ ID NO: 82280 - DNA, 20 bp, Artificial Sequence
  Description of Artificial Sequence: Synthetic oligonucleotide
  Target: LAMA2; (-) strand; PAM type: NRG; PAM sequence: GGG
cattcaaagcagtgtgtaga

SEQ ID NO: 82281 - DNA, 20 bp, Artificial Sequence
  Description of Artificial Sequence: Synthetic oligonucleotide
  Target: LAMA2; (-) strand; PAM type: NRG; PAM sequence: AGG
gcattcaaagcagtgtgtag

SEQ ID NO: 82282 - DNA, 20 bp, Artificial Sequence
  Description of Artificial Sequence: Synthetic oligonucleotide
  Target: LAMA2; (-) strand; PAM type: NRG; PAM sequence: GAG
cgcattcaaagcagtgtgta

SEQ ID NO: 82283 - DNA, 20 bp, Artificial Sequence
  Description of Artificial Sequence: Synthetic oligonucleotide
  Target: LAMA2; (-) strand; PAM type: NRG; PAM sequence: TAG
gacgcattcaaagcagtgtg

SEQ ID NO: 82284 - DNA, 20 bp, Artificial Sequence
  Description of Artificial Sequence: Synthetic oligonucleotide
  Target: LAMA2; (-) strand; PAM type: NRG; PAM sequence: CAG
tctctgggacgcattcaaag

SEQ ID NO: 82285 - DNA, 20 bp, Artificial Sequence
  Description of Artificial Sequence: Synthetic oligonucleotide
  Target: LAMA2; (-) strand; PAM type: NRG; PAM sequence: AAG
gaatctctgggacgcattca

SEQ ID NO: 82286 - DNA, 20 bp, Artificial Sequence
  Description of Artificial Sequence: Synthetic oligonucleotide
  Target: LAMA2; (-) strand; PAM type: NRG; PAM sequence: GGG
cacaacataccagaatctct

SEQ ID NO: 82287 - DNA, 20 bp, Artificial Sequence
  Description of Artificial Sequence: Synthetic oligonucleotide
  Target: LAMA2; (-) strand; PAM type: NRG; PAM sequence: TGG
acacaacataccagaatctc

SEQ ID NO: 82288 - DNA, 20 bp, Artificial Sequence
  Description of Artificial Sequence: Synthetic oligonucleotide
  Target: LAMA2; (-) strand; PAM type: NRG; PAM sequence: CAG
agaacaaagacacaacatac

SEQ ID NO: 82289 - DNA, 20 bp, Artificial Sequence
  Description of Artificial Sequence: Synthetic oligonucleotide
  Target: LAMA2; (-) strand; PAM type: NRG; PAM sequence: AAG
ctttgaaacccatgagaaca

SEQ ID NO: 82290 - DNA, 20 bp, Artificial Sequence
  Description of Artificial Sequence: Synthetic oligonucleotide
  Target: LAMA2; (-) strand; PAM type: NRG; PAM sequence: GAG
agatgttctttgaaacccat

SEQ ID NO: 82291 - DNA, 20 bp, Artificial Sequence
  Description of Artificial Sequence: Synthetic oligonucleotide
  Target: LAMA2; (-) strand; PAM type: NRG; PAM sequence: AAG
acgaaatgaaggcagaaata

SEQ ID NO: 82292 - DNA, 20 bp, Artificial Sequence
  Description of Artificial Sequence: Synthetic oligonucleotide
  Target: LAMA2; (-) strand; PAM type: NRG; PAM sequence: CAG
ggtacataacgaaatgaagg

SEQ ID NO: 82293 - DNA, 20 bp, Artificial Sequence
  Description of Artificial Sequence: Synthetic oligonucleotide
  Target: LAMA2; (-) strand; PAM type: NRG; PAM sequence: AGG
ctgggtacataacgaaatga

SEQ ID NO: 82294 - DNA, 20 bp, Artificial Sequence
  Description of Artificial Sequence: Synthetic oligonucleotide
  Target: LAMA2; (-) strand; PAM type: NRG; PAM sequence: AAG
actgggtacataacgaaatg

SEQ ID NO: 82295 - DNA, 20 bp, Artificial Sequence
  Description of Artificial Sequence: Synthetic oligonucleotide
  Target: LAMA2; (-) strand; PAM type: NRG; PAM sequence: GGG
cctgctcctgaatgactact

SEQ ID NO: 82296 - DNA, 20 bp, Artificial Sequence
  Description of Artificial Sequence: Synthetic oligonucleotide
  Target: LAMA2; (-) strand; PAM type: NRG; PAM sequence: TGG
acctgctcctgaatgactac

SEQ ID NO: 82297 - DNA, 20 bp, Artificial Sequence
  Description of Artificial Sequence: Synthetic oligonucleotide
  Target: LAMA2; (-) strand; PAM type: NRG; PAM sequence: TGG
ctcaaaactgctcaactaca

SEQ ID NO: 82298 - DNA, 20 bp, Artificial Sequence
  Description of Artificial Sequence: Synthetic oligonucleotide
  Target: LAMA2; (-) strand; PAM type: NRG; PAM sequence: AAG
tcaaactagaactcaggatt

SEQ ID NO: 82299 - DNA, 20 bp, Artificial Sequence
  Description of Artificial Sequence: Synthetic oligonucleotide
  Target: LAMA2; (-) strand; PAM type: NRG; PAM sequence: AGG
gtgcaatcaaactagaactc

SEQ ID NO: 82300 - DNA, 20 bp, Artificial Sequence
  Description of Artificial Sequence: Synthetic oligonucleotide
  Target: LAMA2; (-) strand; PAM type: NRG; PAM sequence: CAG
agtgcaatcaaactagaact

SEQ ID NO: 82301 - DNA, 20 bp, Artificial Sequence
  Description of Artificial Sequence: Synthetic oligonucleotide
  Target: LAMA2; (-) strand; PAM type: NRG; PAM sequence: TAG
agaccacagtgcaatcaaac

SEQ ID NO: 82302 - DNA, 20 bp, Artificial Sequence
  Description of Artificial Sequence: Synthetic oligonucleotide
  Target: LAMA2; (-) strand; PAM type: NRG; PAM sequence: CAG
acaaactatctctcagacca

SEQ ID NO: 82303 - DNA, 20 bp, Artificial Sequence
  Description of Artificial Sequence: Synthetic oligonucleotide
  Target: LAMA2; (-) strand; PAM type: NRG; PAM sequence: CAG
aattataacaaactatctct

SEQ ID NO: 82304 - DNA, 20 bp, Artificial Sequence
  Description of Artificial Sequence: Synthetic oligonucleotide
  Target: LAMA2; (-) strand; PAM type: NRG; PAM sequence: CAG
cctcagcaaatgtaaaagaa

SEQ ID NO: 82305 - DNA, 20 bp, Artificial Sequence
  Description of Artificial Sequence: Synthetic oligonucleotide
  Target: LAMA2; (-) strand; PAM type: NRG; PAM sequence: AAG
gctctcctcagcaaatgtaa

SEQ ID NO: 82306 - DNA, 20 bp, Artificial Sequence
  Description of Artificial Sequence: Synthetic oligonucleotide
  Target: LAMA2; (-) strand; PAM type: NRG; PAM sequence: CAG
cttggaagtaaagctctcct

SEQ ID NO: 82307 - DNA, 20 bp, Artificial Sequence
  Description of Artificial Sequence: Synthetic oligonucleotide
  Target: LAMA2; (-) strand; PAM type: NRG; PAM sequence: AAG
tgaccacatacttggaagta

SEQ ID NO: 82308 - DNA, 20 bp, Artificial Sequence
  Description of Artificial Sequence: Synthetic oligonucleotide
  Target: LAMA2; (-) strand; PAM type: NRG; PAM sequence: AAG
aaaattgaccacatacttgg

SEQ ID NO: 82309 - DNA, 20 bp, Artificial Sequence
  Description of Artificial Sequence: Synthetic oligonucleotide
  Target: LAMA2; (-) strand; PAM type: NRG; PAM sequence: TGG
tccaaaattgaccacatact

SEQ ID NO: 82310 - DNA, 20 bp, Artificial Sequence
  Description of Artificial Sequence: Synthetic oligonucleotide
  Target: LAMA2; (-) strand; PAM type: NRG; PAM sequence: CAG
aacagaatatacattttttt

SEQ ID NO: 82311 - DNA, 20 bp, Artificial Sequence
  Description of Artificial Sequence: Synthetic oligonucleotide
  Target: LAMA2; (-) strand; PAM type: NRG; PAM sequence: CAG
aactctccaccccaaatcaa

SEQ ID NO: 82312 - DNA, 20 bp, Artificial Sequence
  Description of Artificial Sequence: Synthetic oligonucleotide
  Target: LAMA2; (-) strand; PAM type: NRG; PAM sequence: CAG
gcggacctaataaacatcta

SEQ ID NO: 82313 - DNA, 20 bp, Artificial Sequence
  Description of Artificial Sequence: Synthetic oligonucleotide
  Target: LAMA2; (-) strand; PAM type: NRG; PAM sequence: CGG
gaacacagctctgcaccaag

SEQ ID NO: 82314 - DNA, 20 bp, Artificial Sequence
  Description of Artificial Sequence: Synthetic oligonucleotide
  Target: LAMA2; (-) strand; PAM type: NRG; PAM sequence: AAG
attgaacacagctctgcacc

SEQ ID NO: 82315 - DNA, 20 bp, Artificial Sequence
  Description of Artificial Sequence: Synthetic oligonucleotide
  Target: LAMA2; (-) strand; PAM type: NRG; PAM sequence: CAG
ggatacccaggaattgaaca

SEQ ID NO: 82316 - DNA, 20 bp, Artificial Sequence
  Description of Artificial Sequence: Synthetic oligonucleotide
  Target: LAMA2; (-) strand; PAM type: NRG; PAM sequence: AGG
agaagtcaacaaggataccc

SEQ ID NO: 82317 - DNA, 20 bp, Artificial Sequence
  Description of Artificial Sequence: Synthetic oligonucleotide
  Target: LAMA2; (-) strand; PAM type: NRG; PAM sequence: CAG
aagaagtcaacaaggatacc

SEQ ID NO: 82318 - DNA, 20 bp, Artificial Sequence
  Description of Artificial Sequence: Synthetic oligonucleotide
  Target: LAMA2; (-) strand; PAM type: NRG; PAM sequence: AGG
aagtcaacaagaagtcaaca

SEQ ID NO: 82319 - DNA, 20 bp, Artificial Sequence
  Description of Artificial Sequence: Synthetic oligonucleotide
  Target: LAMA2; (-) strand; PAM type: NRG; PAM sequence: AAG
aaagtcaacaagaagtcaac

SEQ ID NO: 82320 - DNA, 20 bp, Artificial Sequence
  Description of Artificial Sequence: Synthetic oligonucleotide
  Target: LAMA2; (-) strand; PAM type: NRG; PAM sequence: AAG
cgagacagaaagtcaacaag

SEQ ID NO: 82321 - DNA, 20 bp, Artificial Sequence
  Description of Artificial Sequence: Synthetic oligonucleotide
  Target: LAMA2; (-) strand; PAM type: NRG; PAM sequence: AAG
caacgagacagaaagtcaac

SEQ ID NO: 82322 - DNA, 20 bp, Artificial Sequence
  Description of Artificial Sequence: Synthetic oligonucleotide
  Target: LAMA2; (-) strand; PAM type: NRG; PAM sequence: AAG
agacagatcaacgagacaga

SEQ ID NO: 82323 - DNA, 20 bp, Artificial Sequence
  Description of Artificial Sequence: Synthetic oligonucleotide
  Target: LAMA2; (-) strand; PAM type: NRG; PAM sequence: CAG
cattagacagatcaacgaga

SEQ ID NO: 82324 - DNA, 20 bp, Artificial Sequence
  Description of Artificial Sequence: Synthetic oligonucleotide
  Target: LAMA2; (-) strand; PAM type: NRG; PAM sequence: GAG
tcaacattagacagatcaac

SEQ ID NO: 82325 - DNA, 20 bp, Artificial Sequence
  Description of Artificial Sequence: Synthetic oligonucleotide
  Target: LAMA2; (-) strand; PAM type: NRG; PAM sequence: CAG
accccactgtcaacattaga

SEQ ID NO: 82326 - DNA, 20 bp, Artificial Sequence
  Description of Artificial Sequence: Synthetic oligonucleotide
  Target: LAMA2; (-) strand; PAM type: NRG; PAM sequence: TAG
taacaccccactgtcaacat

SEQ ID NO: 82327 - DNA, 20 bp, Artificial Sequence
  Description of Artificial Sequence: Synthetic oligonucleotide
  Target: LAMA2; (-) strand; PAM type: NRG; PAM sequence: GAG
ctcccacacattaataatgg

SEQ ID NO: 82328 - DNA, 20 bp, Artificial Sequence
  Description of Artificial Sequence: Synthetic oligonucleotide
  Target: LAMA2; (-) strand; PAM type: NRG; PAM sequence: GGG
gactcccacacattaataat

SEQ ID NO: 82329 - DNA, 20 bp, Artificial Sequence
  Description of Artificial Sequence: Synthetic oligonucleotide
  Target: LAMA2; (-) strand; PAM type: NRG; PAM sequence: TGG
agactcccacacattaataa

SEQ ID NO: 82330 - DNA, 20 bp, Artificial Sequence
  Description of Artificial Sequence: Synthetic oligonucleotide
  Target: LAMA2; (-) strand; PAM type: NRG; PAM sequence: TAG
gagtgacctacaaagagact

SEQ ID NO: 82331 - DNA, 20 bp, Artificial Sequence
  Description of Artificial Sequence: Synthetic oligonucleotide
  Target: LAMA2; (-) strand; PAM type: NRG; PAM sequence: GAG
agtcctgagtgacctacaaa

SEQ ID NO: 82332 - DNA, 20 bp, Artificial Sequence
  Description of Artificial Sequence: Synthetic oligonucleotide
  Target: LAMA2; (-) strand; PAM type: NRG; PAM sequence: AAG
caagtcctgagtgacctaca

SEQ ID NO: 82333 - DNA, 20 bp, Artificial Sequence
  Description of Artificial Sequence: Synthetic oligonucleotide
  Target: LAMA2; (-) strand; PAM type: NRG; PAM sequence: GAG
agattcataaagcaagtcct

SEQ ID NO: 82334 - DNA, 20 bp, Artificial Sequence
  Description of Artificial Sequence: Synthetic oligonucleotide
  Target: LAMA2; (-) strand; PAM type: NRG; PAM sequence: AAG
agcacccagattcataaagc

SEQ ID NO: 82335 - DNA, 20 bp, Artificial Sequence
  Description of Artificial Sequence: Synthetic oligonucleotide
  Target: LAMA2; (-) strand; PAM type: NRG; PAM sequence: AAG
caggagcacccagattcata

SEQ ID NO: 82336 - DNA, 20 bp, Artificial Sequence
  Description of Artificial Sequence: Synthetic oligonucleotide
  Target: LAMA2; (-) strand; PAM type: NRG; PAM sequence: CAG
gcacccaatacaggagcacc

SEQ ID NO: 82337 - DNA, 20 bp, Artificial Sequence
  Description of Artificial Sequence: Synthetic oligonucleotide
  Target: LAMA2; (-) strand; PAM type: NRG; PAM sequence: GAG
tatatatgcacccaatacag

SEQ ID NO: 82338 - DNA, 20 bp, Artificial Sequence
  Description of Artificial Sequence: Synthetic oligonucleotide
  Target: LAMA2; (-) strand; PAM type: NRG; PAM sequence: AGG
aatatatatgcacccaatac

SEQ ID NO: 82339 - DNA, 20 bp, Artificial Sequence
  Description of Artificial Sequence: Synthetic oligonucleotide
  Target: LAMA2; (-) strand; PAM type: NRG; PAM sequence: CAG
aaatatatatgcacccaata

SEQ ID NO: 82340 - DNA, 20 bp, Artificial Sequence
  Description of Artificial Sequence: Synthetic oligonucleotide
  Target: LAMA2; (-) strand; PAM type: NRG; PAM sequence: GAG
agggatcaattcaacaagaa

SEQ ID NO: 82341 - DNA, 20 bp, Artificial Sequence
  Description of Artificial Sequence: Synthetic oligonucleotide
  Target: LAMA2; (-) strand; PAM type: NRG; PAM sequence: AAG
aaagggatcaattcaacaag

SEQ ID NO: 82342 - DNA, 20 bp, Artificial Sequence
  Description of Artificial Sequence: Synthetic oligonucleotide
  Target: LAMA2; (-) strand; PAM type: NRG; PAM sequence: AAG
ggtaaagggatcaattcaac

SEQ ID NO: 82343 - DNA, 20 bp, Artificial Sequence
  Description of Artificial Sequence: Synthetic oligonucleotide
  Target: LAMA2; (-) strand; PAM type: NRG; PAM sequence: GGG
ggccattacataatggtaaa

SEQ ID NO: 82344 - DNA, 20 bp, Artificial Sequence
  Description of Artificial Sequence: Synthetic oligonucleotide
  Target: LAMA2; (-) strand; PAM type: NRG; PAM sequence: AGG
aggccattacataatggtaa

SEQ ID NO: 82345 - DNA, 20 bp, Artificial Sequence
  Description of Artificial Sequence: Synthetic oligonucleotide
  Target: LAMA2; (-) strand; PAM type: NRG; PAM sequence: AAG
aaggccattacataatggta

SEQ ID NO: 82346 - DNA, 20 bp, Artificial Sequence
  Description of Artificial Sequence: Synthetic oligonucleotide
  Target: LAMA2; (-) strand; PAM type: NRG; PAM sequence: TGG
caaagaaggccattacataa

SEQ ID NO: 82347 - DNA, 20 bp, Artificial Sequence
  Description of Artificial Sequence: Synthetic oligonucleotide
  Target: LAMA2; (-) strand; PAM type: NRG; PAM sequence: AGG
aacatcaaaagagacaaaga

SEQ ID NO: 82348 - DNA, 20 bp, Artificial Sequence
  Description of Artificial Sequence: Synthetic oligonucleotide
  Target: LAMA2; (-) strand; PAM type: NRG; PAM sequence: AAG
aaacatcaaaagagacaaag

SEQ ID NO: 82349 - DNA, 20 bp, Artificial Sequence
  Description of Artificial Sequence: Synthetic oligonucleotide
  Target: LAMA2; (-) strand; PAM type: NRG; PAM sequence: AAG
aacaaacatcaaaagagaca

SEQ ID NO: 82350 - DNA, 20 bp, Artificial Sequence
  Description of Artificial Sequence: Synthetic oligonucleotide
  Target: LAMA2; (-) strand; PAM type: NRG; PAM sequence: GAG
taaaccaacaaacatcaaaa

SEQ ID NO: 82351 - DNA, 20 bp, Artificial Sequence
  Description of Artificial Sequence: Synthetic oligonucleotide
  Target: LAMA2; (-) strand; PAM type: NRG; PAM sequence: AAG
tttaaaccaacaaacatcaa

SEQ ID NO: 82352 - DNA, 20 bp, Artificial Sequence
  Description of Artificial Sequence: Synthetic oligonucleotide
  Target: LAMA2; (-) strand; PAM type: NRG; PAM sequence: CAG
aatcctagtctctgataaaa

SEQ ID NO: 82353 - DNA, 20 bp, Artificial Sequence
  Description of Artificial Sequence: Synthetic oligonucleotide
  Target: LAMA2; (-) strand; PAM type: NRG; PAM sequence: TAG
aaaggcaggggttgcaatcc

SEQ ID NO: 82354 - DNA, 20 bp, Artificial Sequence
  Description of Artificial Sequence: Synthetic oligonucleotide
  Target: LAMA2; (-) strand; PAM type: NRG; PAM sequence: GGG
tggaaaacaaaaaaaggcag

SEQ ID NO: 82355 - DNA, 20 bp, Artificial Sequence
  Description of Artificial Sequence: Synthetic oligonucleotide
  Target: LAMA2; (-) strand; PAM type: NRG; PAM sequence: GGG
atggaaaacaaaaaaaggca

SEQ ID NO: 82356 - DNA, 20 bp, Artificial Sequence
  Description of Artificial Sequence: Synthetic oligonucleotide
  Target: LAMA2; (-) strand; PAM type: NRG; PAM sequence: AGG
aatggaaaacaaaaaaaggc

SEQ ID NO: 82357 - DNA, 20 bp, Artificial Sequence
  Description of Artificial Sequence: Synthetic oligonucleotide
  Target: LAMA2; (-) strand; PAM type: NRG; PAM sequence: CAG
aaatggaaaacaaaaaaagg

SEQ ID NO: 82358 - DNA, 20 bp, Artificial Sequence
  Description of Artificial Sequence: Synthetic oligonucleotide
  Target: LAMA2; (-) strand; PAM type: NRG; PAM sequence: AGG
agcaaatggaaaacaaaaaa

SEQ ID NO: 82359 - DNA, 20 bp, Artificial Sequence
  Description of Artificial Sequence: Synthetic oligonucleotide
  Target: LAMA2; (-) strand; PAM type: NRG; PAM sequence: AAG
aagcaaatggaaaacaaaaa

SEQ ID NO: 82360 - DNA, 20 bp, Artificial Sequence
  Description of Artificial Sequence: Synthetic oligonucleotide
  Target: LAMA2; (-) strand; PAM type: NRG; PAM sequence: TGG
aggaagatctaccaagcaaa

SEQ ID NO: 82361 - DNA, 20 bp, Artificial Sequence
  Description of Artificial Sequence: Synthetic oligonucleotide
  Target: LAMA2; (-) strand; PAM type: NRG; PAM sequence: AAG
aggatggaggaagatctacc

SEQ ID NO: 82362 - DNA, 20 bp, Artificial Sequence
  Description of Artificial Sequence: Synthetic oligonucleotide
  Target: LAMA2; (-) strand; PAM type: NRG; PAM sequence: AAG
tcaaaataaaaggatggagg

SEQ ID NO: 82363 - DNA, 20 bp, Artificial Sequence
  Description of Artificial Sequence: Synthetic oligonucleotide
  Target: LAMA2; (-) strand; PAM type: NRG; PAM sequence: AGG
ggctcaaaataaaaggatgg

SEQ ID NO: 82364 - DNA, 20 bp, Artificial Sequence
  Description of Artificial Sequence: Synthetic oligonucleotide
  Target: LAMA2; (-) strand; PAM type: NRG; PAM sequence: GAG
aggctcaaaataaaaggatg

SEQ ID NO: 82365 - DNA, 20 bp, Artificial Sequence
  Description of Artificial Sequence: Synthetic oligonucleotide
  Target: LAMA2; (-) strand; PAM type: NRG; PAM sequence: TGG
ataggctcaaaataaaagga

SEQ ID NO: 82366 - DNA, 20 bp, Artificial Sequence
  Description of Artificial Sequence: Synthetic oligonucleotide
  Target: LAMA2; (-) strand; PAM type: NRG; PAM sequence: AGG
acacataggctcaaaataaa

SEQ ID NO: 82367 - DNA, 20 bp, Artificial Sequence
  Description of Artificial Sequence: Synthetic oligonucleotide
  Target: LAMA2; (-) strand; PAM type: NRG; PAM sequence: AAG
cacacataggctcaaaataa

SEQ ID NO: 82368 - DNA, 20 bp, Artificial Sequence
  Description of Artificial Sequence: Synthetic oligonucleotide
  Target: LAMA2; (-) strand; PAM type: NRG; PAM sequence: AGG
tcatgtgcagagacacacat

SEQ ID NO: 82369 - DNA, 20 bp, Artificial Sequence
  Description of Artificial Sequence: Synthetic oligonucleotide
  Target: LAMA2; (-) strand; PAM type: NRG; PAM sequence: TAG
ctcatgtgcagagacacaca

SEQ ID NO: 82370 - DNA, 20 bp, Artificial Sequence
  Description of Artificial Sequence: Synthetic oligonucleotide
  Target: LAMA2; (-) strand; PAM type: NRG; PAM sequence: GAG
ggaaacccatctcatgtgca

SEQ ID NO: 82371 - DNA, 20 bp, Artificial Sequence
  Description of Artificial Sequence: Synthetic oligonucleotide
  Target: LAMA2; (-) strand; PAM type: NRG; PAM sequence: CAG
caggaaacccatctcatgtg

SEQ ID NO: 82372 - DNA, 20 bp, Artificial Sequence
  Description of Artificial Sequence: Synthetic oligonucleotide
  Target: LAMA2; (-) strand; PAM type: NRG; PAM sequence: AGG
cccatcagtgttccgtattc

SEQ ID NO: 82373 - DNA, 20 bp, Artificial Sequence
  Description of Artificial Sequence: Synthetic oligonucleotide
  Target: LAMA2; (-) strand; PAM type: NRG; PAM sequence: CAG
acccatcagtgttccgtatt

SEQ ID NO: 82374 - DNA, 20 bp, Artificial Sequence
  Description of Artificial Sequence: Synthetic oligonucleotide
  Target: LAMA2; (-) strand; PAM type: NRG; PAM sequence: CAG
gataaagagtcaagacccat

SEQ ID NO: 82375 - DNA, 20 bp, Artificial Sequence
  Description of Artificial Sequence: Synthetic oligonucleotide
  Target: LAMA2; (-) strand; PAM type: NRG; PAM sequence: AAG
ggcaaattggataaagagtc

SEQ ID NO: 82376 - DNA, 20 bp, Artificial Sequence
  Description of Artificial Sequence: Synthetic oligonucleotide
  Target: LAMA2; (-) strand; PAM type: NRG; PAM sequence: GAG
agactggcaaattggataaa

SEQ ID NO: 82377 - DNA, 20 bp, Artificial Sequence
  Description of Artificial Sequence: Synthetic oligonucleotide
  Target: LAMA2; (-) strand; PAM type: NRG; PAM sequence: AAG
acagactggcaaattggata

SEQ ID NO: 82378 - DNA, 20 bp, Artificial Sequence
  Description of Artificial Sequence: Synthetic oligonucleotide
  Target: LAMA2; (-) strand; PAM type: NRG; PAM sequence: TGG
aaagacacagactggcaaat

SEQ ID NO: 82379 - DNA, 20 bp, Artificial Sequence
  Description of Artificial Sequence: Synthetic oligonucleotide
  Target: LAMA2; (-) strand; PAM type: NRG; PAM sequence: TGG
tccaattaaaagacacagac

SEQ ID NO: 82380 - DNA, 20 bp, Artificial Sequence
  Description of Artificial Sequence: Synthetic oligonucleotide
  Target: LAMA2; (-) strand; PAM type: NRG; PAM sequence: CAG
aatgctccaattaaaagaca

SEQ ID NO: 82381 - DNA, 20 bp, Artificial Sequence
  Description of Artificial Sequence: Synthetic oligonucleotide
  Target: LAMA2; (-) strand; PAM type: NRG; PAM sequence: AAG
ggactaaatgctccaattaa

SEQ ID NO: 82382 - DNA, 20 bp, Artificial Sequence
  Description of Artificial Sequence: Synthetic oligonucleotide
  Target: LAMA2; (-) strand; PAM type: NRG; PAM sequence: TGG
atattaactttaaatgtaaa

SEQ ID NO: 82383 - DNA, 20 bp, Artificial Sequence
  Description of Artificial Sequence: Synthetic oligonucleotide
  Target: LAMA2; (-) strand; PAM type: NRG; PAM sequence: AGG
ccagctaacatcatcatgac

SEQ ID NO: 82384 - DNA, 20 bp, Artificial Sequence
  Description of Artificial Sequence: Synthetic oligonucleotide
  Target: LAMA2; (-) strand; PAM type: NRG; PAM sequence: CAG
accagctaacatcatcatga

SEQ ID NO: 82385 - DNA, 20 bp, Artificial Sequence
  Description of Artificial Sequence: Synthetic oligonucleotide
  Target: LAMA2; (-) strand; PAM type: NRG; PAM sequence: CAG
caactaacgagcaaaataac

SEQ ID NO: 82386 - DNA, 20 bp, Artificial Sequence
  Description of Artificial Sequence: Synthetic oligonucleotide
  Target: LAMA2; (-) strand; PAM type: NRG; PAM sequence: GAG
aagaaactgcatcaactaac

SEQ ID NO: 82387 - DNA, 20 bp, Artificial Sequence
  Description of Artificial Sequence: Synthetic oligonucleotide
  Target: LAMA2; (-) strand; PAM type: NRG; PAM sequence: AAG
taaagaccatcgatgctagg

SEQ ID NO: 82388 - DNA, 20 bp, Artificial Sequence
  Description of Artificial Sequence: Synthetic oligonucleotide
  Target: LAMA2; (-) strand; PAM type: NRG; PAM sequence: AGG
ttgtaaagaccatcgatgct

SEQ ID NO: 82389 - DNA, 20 bp, Artificial Sequence
  Description of Artificial Sequence: Synthetic oligonucleotide
  Target: LAMA2; (-) strand; PAM type: NRG; PAM sequence: TAG
attgtaaagaccatcgatgc

SEQ ID NO: 82390 - DNA, 20 bp, Artificial Sequence
  Description of Artificial Sequence: Synthetic oligonucleotide
  Target: LAMA2; (-) strand; PAM type: NRG; PAM sequence: AAG
caaaagcatgccaaattgta

SEQ ID NO: 82391 - DNA, 20 bp, Artificial Sequence
  Description of Artificial Sequence: Synthetic oligonucleotide
  Target: LAMA2; (-) strand; PAM type: NRG; PAM sequence: AAG
accagtaccagccactgcaa

SEQ ID NO: 82392 - DNA, 20 bp, Artificial Sequence
  Description of Artificial Sequence: Synthetic oligonucleotide
  Target: LAMA2; (-) strand; PAM type: NRG; PAM sequence: CAG
tggaaaggaacaaccagtac

SEQ ID NO: 82393 - DNA, 20 bp, Artificial Sequence
  Description of Artificial Sequence: Synthetic oligonucleotide
  Target: LAMA2; (-) strand; PAM type: NRG; PAM sequence: CAG
taaacatggaaaggaacaac

SEQ ID NO: 82394 - DNA, 20 bp, Artificial Sequence
  Description of Artificial Sequence: Synthetic oligonucleotide
  Target: LAMA2; (-) strand; PAM type: NRG; PAM sequence: AGG
aggaagcactaaacatggaa

SEQ ID NO: 82395 - DNA, 20 bp, Artificial Sequence
  Description of Artificial Sequence: Synthetic oligonucleotide
  Target: LAMA2; (-) strand; PAM type: NRG; PAM sequence: AAG
aaggaagcactaaacatgga

SEQ ID NO: 82396 - DNA, 20 bp, Artificial Sequence
  Description of Artificial Sequence: Synthetic oligonucleotide
  Target: LAMA2; (-) strand; PAM type: NRG; PAM sequence: TGG
cctgaaggaagcactaaaca

SEQ ID NO: 82397 - DNA, 20 bp, Artificial Sequence
  Description of Artificial Sequence: Synthetic oligonucleotide
  Target: LAMA2; (-) strand; PAM type: NRG; PAM sequence: AAG
cctaaaagagctcctgaagg

SEQ ID NO: 82398 - DNA, 20 bp, Artificial Sequence
  Description of Artificial Sequence: Synthetic oligonucleotide
  Target: LAMA2; (-) strand; PAM type: NRG; PAM sequence: AGG
tgccctaaaagagctcctga

SEQ ID NO: 82399 - DNA, 20 bp, Artificial Sequence
  Description of Artificial Sequence: Synthetic oligonucleotide
  Target: LAMA2; (-) strand; PAM type: NRG; PAM sequence: AAG
ctgccctaaaagagctcctg

SEQ ID NO: 82400 - DNA, 20 bp, Artificial Sequence
  Description of Artificial Sequence: Synthetic oligonucleotide
  Target: LAMA2; (-) strand; PAM type: NRG; PAM sequence: GAG
ccaccagtcctgccctaaaa

SEQ ID NO: 82401 - DNA, 20 bp, Artificial Sequence
  Description of Artificial Sequence: Synthetic oligonucleotide
  Target: LAMA2; (-) strand; PAM type: NRG; PAM sequence: AAG
caccaccagtcctgccctaa

SEQ ID NO: 82402 - DNA, 20 bp, Artificial Sequence
  Description of Artificial Sequence: Synthetic oligonucleotide
  Target: LAMA2; (-) strand; PAM type: NRG; PAM sequence: CAG
ctgagagattttgtcaccac

SEQ ID NO: 82403 - DNA, 20 bp, Artificial Sequence
  Description of Artificial Sequence: Synthetic oligonucleotide
  Target: LAMA2; (-) strand; PAM type: NRG; PAM sequence: GAG
tacagacaagcaaatgctga

SEQ ID NO: 82404 - DNA, 20 bp, Artificial Sequence
  Description of Artificial Sequence: Synthetic oligonucleotide
  Target: LAMA2; (-) strand; PAM type: NRG; PAM sequence: GAG
tttacagacaagcaaatgct

SEQ ID NO: 82405 - DNA, 20 bp, Artificial Sequence
  Description of Artificial Sequence: Synthetic oligonucleotide
  Target: LAMA2; (-) strand; PAM type: NRG; PAM sequence: AAG
aaataaaatactttacagac

SEQ ID NO: 82406 - DNA, 20 bp, Artificial Sequence
  Description of Artificial Sequence: Synthetic oligonucleotide
  Target: LAMA2; (-) strand; PAM type: NRG; PAM sequence: CAG
aggagaaataaaatacttta

SEQ ID NO: 82407 - DNA, 20 bp, Artificial Sequence
  Description of Artificial Sequence: Synthetic oligonucleotide
  Target: LAMA2; (-) strand; PAM type: NRG; PAM sequence: GAG
actaagcttcataagcgaag

SEQ ID NO: 82408 - DNA, 20 bp, Artificial Sequence
  Description of Artificial Sequence: Synthetic oligonucleotide
  Target: LAMA2; (-) strand; PAM type: NRG; PAM sequence: AGG
aaactaagcttcataagcga

SEQ ID NO: 82409 - DNA, 20 bp, Artificial Sequence
  Description of Artificial Sequence: Synthetic oligonucleotide
  Target: LAMA2; (-) strand; PAM type: NRG; PAM sequence: AAG
caaactaagcttcataagcg

SEQ ID NO: 82410 - DNA, 20 bp, Artificial Sequence
  Description of Artificial Sequence: Synthetic oligonucleotide
  Target: LAMA2; (-) strand; PAM type: NRG; PAM sequence: AAG
ccagccaaactaagcttcat

SEQ ID NO: 82411 - DNA, 20 bp, Artificial Sequence
  Description of Artificial Sequence: Synthetic oligonucleotide
  Target: LAMA2; (-) strand; PAM type: NRG; PAM sequence: AAG
atttcatatccagccaaact

SEQ ID NO: 82412 - DNA, 20 bp, Artificial Sequence
  Description of Artificial Sequence: Synthetic oligonucleotide
  Target: LAMA2; (-) strand; PAM type: NRG; PAM sequence: CAG
tcaacccagaatttcatatc

SEQ ID NO: 82413 - DNA, 20 bp, Artificial Sequence
  Description of Artificial Sequence: Synthetic oligonucleotide
  Target: LAMA2; (-) strand; PAM type: NRG; PAM sequence: CAG
aaagaaaagaattttcaacc

SEQ ID NO: 82414 - DNA, 20 bp, Artificial Sequence
  Description of Artificial Sequence: Synthetic oligonucleotide
  Target: LAMA2; (-) strand; PAM type: NRG; PAM sequence: AAG
tattcaacattcttaaagaa

SEQ ID NO: 82415 - DNA, 20 bp, Artificial Sequence
  Description of Artificial Sequence: Synthetic oligonucleotide
  Target: LAMA2; (-) strand; PAM type: NRG; PAM sequence: AAG
gccaatattcaacattctta

SEQ ID NO: 82416 - DNA, 20 bp, Artificial Sequence
  Description of Artificial Sequence: Synthetic oligonucleotide
  Target: LAMA2; (-) strand; PAM type: NRG; PAM sequence: GGG
tacaagccggaagagagtgg

SEQ ID NO: 82417 - DNA, 20 bp, Artificial Sequence
  Description of Artificial Sequence: Synthetic oligonucleotide
  Target: LAMA2; (-) strand; PAM type: NRG; PAM sequence: GGG
ctacaagccggaagagagtg

SEQ ID NO: 82418 - DNA, 20 bp, Artificial Sequence
  Description of Artificial Sequence: Synthetic oligonucleotide
  Target: LAMA2; (-) strand; PAM type: NRG; PAM sequence: GGG
tctacaagccggaagagagt

SEQ ID NO: 82419 - DNA, 20 bp, Artificial Sequence
  Description of Artificial Sequence: Synthetic oligonucleotide
  Target: LAMA2; (-) strand; PAM type: NRG; PAM sequence: TGG
ctctacaagccggaagagag

SEQ ID NO: 82420 - DNA, 20 bp, Artificial Sequence
  Description of Artificial Sequence: Synthetic oligonucleotide
  Target: LAMA2; (-) strand; PAM type: NRG; PAM sequence: GAG
aaactctacaagccggaaga

SEQ ID NO: 82421 - DNA, 20 bp, Artificial Sequence
  Description of Artificial Sequence: Synthetic oligonucleotide
  Target: LAMA2; (-) strand; PAM type: NRG; PAM sequence: GAG
agaaactctacaagccggaa

SEQ ID NO: 82422 - DNA, 20 bp, Artificial Sequence
  Description of Artificial Sequence: Synthetic oligonucleotide
  Target: LAMA2; (-) strand; PAM type: NRG; PAM sequence: AAG
gcagaaactctacaagccgg

SEQ ID NO: 82423 - DNA, 20 bp, Artificial Sequence
  Description of Artificial Sequence: Synthetic oligonucleotide
  Target: LAMA2; (-) strand; PAM type: NRG; PAM sequence: CGG
tcggcagaaactctacaagc

SEQ ID NO: 82424 - DNA, 20 bp, Artificial Sequence
  Description of Artificial Sequence: Synthetic oligonucleotide
  Target: LAMA2; (-) strand; PAM type: NRG; PAM sequence: AAG
tcgctcggcagaaactctac

SEQ ID NO: 82425 - DNA, 20 bp, Artificial Sequence
  Description of Artificial Sequence: Synthetic oligonucleotide
  Target: LAMA2; (-) strand; PAM type: NRG; PAM sequence: CAG
actaacagcagatcgctcgg

SEQ ID NO: 82426 - DNA, 20 bp, Artificial Sequence
  Description of Artificial Sequence: Synthetic oligonucleotide
  Target: LAMA2; (-) strand; PAM type: NRG; PAM sequence: CGG
cagactaacagcagatcgct

SEQ ID NO: 82427 - DNA, 20 bp, Artificial Sequence
  Description of Artificial Sequence: Synthetic oligonucleotide
  Target: LAMA2; (-) strand; PAM type: NRG; PAM sequence: CAG
gaagcccatcagactaacag

SEQ ID NO: 82428 - DNA, 20 bp, Artificial Sequence
  Description of Artificial Sequence: Synthetic oligonucleotide
  Target: LAMA2; (-) strand; PAM type: NRG; PAM sequence: CAG
agggaagcccatcagactaa

SEQ ID NO: 82429 - DNA, 20 bp, Artificial Sequence
  Description of Artificial Sequence: Synthetic oligonucleotide
  Target: LAMA2; (-) strand; PAM type: NRG; PAM sequence: CAG
accctcaaagggaagcccat

SEQ ID NO: 82430 - DNA, 20 bp, Artificial Sequence
  Description of Artificial Sequence: Synthetic oligonucleotide
  Target: LAMA2; (-) strand; PAM type: NRG; PAM sequence: AAG
gtcgggttaccctcaaaggg

SEQ ID NO: 82431 - DNA, 20 bp, Artificial Sequence
  Description of Artificial Sequence: Synthetic oligonucleotide
  Target: LAMA2; (-) strand; PAM type: NRG; PAM sequence: GGG
aaggtcgggttaccctcaaa

SEQ ID NO: 82432 - DNA, 20 bp, Artificial Sequence
  Description of Artificial Sequence: Synthetic oligonucleotide
  Target: LAMA2; (-) strand; PAM type: NRG; PAM sequence: AGG
aaaggtcgggttaccctcaa

SEQ ID NO: 82433 - DNA, 20 bp, Artificial Sequence
  Description of Artificial Sequence: Synthetic oligonucleotide
  Target: LAMA2; (-) strand; PAM type: NRG; PAM sequence: AAG
gaaaggtcgggttaccctca

SEQ ID NO: 82434 - DNA, 20 bp, Artificial Sequence
  Description of Artificial Sequence: Synthetic oligonucleotide
  Target: LAMA2; (-) strand; PAM type: NRG; PAM sequence: GGG
ggcagccagagagaaaggtc

SEQ ID NO: 82435 - DNA, 20 bp, Artificial Sequence
  Description of Artificial Sequence: Synthetic oligonucleotide
  Target: LAMA2; (-) strand; PAM type: NRG; PAM sequence: CGG
gggcagccagagagaaaggt

SEQ ID NO: 82436 - DNA, 20 bp, Artificial Sequence
  Description of Artificial Sequence: Synthetic oligonucleotide
  Target: LAMA2; (-) strand; PAM type: NRG; PAM sequence: AGG
ttaagggcagccagagagaa

SEQ ID NO: 82437 - DNA, 20 bp, Artificial Sequence
  Description of Artificial Sequence: Synthetic oligonucleotide
  Target: LAMA2; (-) strand; PAM type: NRG; PAM sequence: AAG
gttaagggcagccagagaga

SEQ ID NO: 82438 - DNA, 20 bp, Artificial Sequence
  Description of Artificial Sequence: Synthetic oligonucleotide
  Target: LAMA2; (-) strand; PAM type: NRG; PAM sequence: GAG
aaatgttaagggcagccaga

SEQ ID NO: 82439 - DNA, 20 bp, Artificial Sequence
  Description of Artificial Sequence: Synthetic oligonucleotide
  Target: LAMA2; (-) strand; PAM type: NRG; PAM sequence: GAG
aaaaatgttaagggcagcca

SEQ ID NO: 82440 - DNA, 20 bp, Artificial Sequence
  Description of Artificial Sequence: Synthetic oligonucleotide
  Target: LAMA2; (-) strand; PAM type: NRG; PAM sequence: CAG
gaaaaaatgttaagggcagc

SEQ ID NO: 82441 - DNA, 20 bp, Artificial Sequence
  Description of Artificial Sequence: Synthetic oligonucleotide
  Target: LAMA2; (-) strand; PAM type: NRG; PAM sequence: CAG
gaaggaaaaaatgttaaggg

SEQ ID NO: 82442 - DNA, 20 bp, Artificial Sequence
  Description of Artificial Sequence: Synthetic oligonucleotide
  Target: LAMA2; (-) strand; PAM type: NRG; PAM sequence: GGG
aatgaaggaaaaaatgttaa

SEQ ID NO: 82443 - DNA, 20 bp, Artificial Sequence
  Description of Artificial Sequence: Synthetic oligonucleotide
  Target: LAMA2; (-) strand; PAM type: NRG; PAM sequence: AGG
aaatgaaggaaaaaatgtta

SEQ ID NO: 82444 - DNA, 20 bp, Artificial Sequence
  Description of Artificial Sequence: Synthetic oligonucleotide
  Target: LAMA2; (-) strand; PAM type: NRG; PAM sequence: AAG
gaaatgaaggaaaaaatgtt

SEQ ID NO: 82445 - DNA, 20 bp, Artificial Sequence
  Description of Artificial Sequence: Synthetic oligonucleotide
  Target: LAMA2; (-) strand; PAM type: NRG; PAM sequence: AGG
attcaccaaagctgaaatga

SEQ ID NO: 82446 - DNA, 20 bp, Artificial Sequence
  Description of Artificial Sequence: Synthetic oligonucleotide
  Target: LAMA2; (-) strand; PAM type: NRG; PAM sequence: AAG
gattcaccaaagctgaaatg

SEQ ID NO: 82447 - DNA, 20 bp, Artificial Sequence
  Description of Artificial Sequence: Synthetic oligonucleotide
  Target: LAMA2; (-) strand; PAM type: NRG; PAM sequence: AAG
cataattgtcagattcacca

SEQ ID NO: 82448 - DNA, 20 bp, Artificial Sequence
  Description of Artificial Sequence: Synthetic oligonucleotide
  Target: LAMA2; (-) strand; PAM type: NRG; PAM sequence: CAG
actccaagacacataattgt

SEQ ID NO: 82449 - DNA, 20 bp, Artificial Sequence
  Description of Artificial Sequence: Synthetic oligonucleotide
  Target: LAMA2; (-) strand; PAM type: NRG; PAM sequence: AAG
tcctcgagaagagcaactcc

SEQ ID NO: 82450 - DNA, 20 bp, Artificial Sequence
  Description of Artificial Sequence: Synthetic oligonucleotide
  Target: LAMA2; (-) strand; PAM type: NRG; PAM sequence: GAG
acaaagatactcctcgagaa

SEQ ID NO: 82451 - DNA, 20 bp, Artificial Sequence
  Description of Artificial Sequence: Synthetic oligonucleotide
  Target: LAMA2; (-) strand; PAM type: NRG; PAM sequence: AAG
ccacaaagatactcctcgag

SEQ ID NO: 82452 - DNA, 20 bp, Artificial Sequence
  Description of Artificial Sequence: Synthetic oligonucleotide
  Target: LAMA2; (-) strand; PAM type: NRG; PAM sequence: GAG
acgccacaaagatactcctc

SEQ ID NO: 82453 - DNA, 20 bp, Artificial Sequence
  Description of Artificial Sequence: Synthetic oligonucleotide
  Target: LAMA2; (-) strand; PAM type: NRG; PAM sequence: AAG
gaaatacagagaacgccaca

SEQ ID NO: 82454 - DNA, 20 bp, Artificial Sequence
  Description of Artificial Sequence: Synthetic oligonucleotide
  Target: LAMA2; (-) strand; PAM type: NRG; PAM sequence: GAG
gttcagattcaggaaataca

SEQ ID NO: 82455 - DNA, 20 bp, Artificial Sequence
  Description of Artificial Sequence: Synthetic oligonucleotide
  Target: LAMA2; (-) strand; PAM type: NRG; PAM sequence: CAG
acgttcagattcaggaaata

SEQ ID NO: 82456 - DNA, 20 bp, Artificial Sequence
  Description of Artificial Sequence: Synthetic oligonucleotide
  Target: LAMA2; (-) strand; PAM type: NRG; PAM sequence: AGG
gcaggccaacgttcagattc

SEQ ID NO: 82457 - DNA, 20 bp, Artificial Sequence
  Description of Artificial Sequence: Synthetic oligonucleotide
  Target: LAMA2; (-) strand; PAM type: NRG; PAM sequence: CAG
ggcaggccaacgttcagatt

SEQ ID NO: 82458 - DNA, 20 bp, Artificial Sequence
  Description of Artificial Sequence: Synthetic oligonucleotide
  Target: LAMA2; (-) strand; PAM type: NRG; PAM sequence: CAG
tagcaaggcaggccaacgtt

SEQ ID NO: 82459 - DNA, 20 bp, Artificial Sequence
  Description of Artificial Sequence: Synthetic oligonucleotide
  Target: LAMA2; (-) strand; PAM type: NRG; PAM sequence: AGG
cttccccaatctagcaaggc

SEQ ID NO: 82460 - DNA, 20 bp, Artificial Sequence
  Description of Artificial Sequence: Synthetic oligonucleotide
  Target: LAMA2; (-) strand; PAM type: NRG; PAM sequence: CAG
acttccccaatctagcaagg

SEQ ID NO: 82461 - DNA, 20 bp, Artificial Sequence
  Description of Artificial Sequence: Synthetic oligonucleotide
  Target: LAMA2; (-) strand; PAM type: NRG; PAM sequence: AGG
agaacttccccaatctagca

SEQ ID NO: 82462 - DNA, 20 bp, Artificial Sequence
  Description of Artificial Sequence: Synthetic oligonucleotide
  Target: LAMA2; (-) strand; PAM type: NRG; PAM sequence: AAG
gagaacttccccaatctagc

SEQ ID NO: 82463 - DNA, 20 bp, Artificial Sequence
  Description of Artificial Sequence: Synthetic oligonucleotide
  Target: LAMA2; (-) strand; PAM type: NRG; PAM sequence: TAG
ccaggagaacttccccaatc

SEQ ID NO: 82464 - DNA, 20 bp, Artificial Sequence
  Description of Artificial Sequence: Synthetic oligonucleotide
  Target: LAMA2; (-) strand; PAM type: NRG; PAM sequence: GAG
ctctgcaggatattatccag

SEQ ID NO: 82465 - DNA, 20 bp, Artificial Sequence
  Description of Artificial Sequence: Synthetic oligonucleotide
  Target: LAMA2; (-) strand; PAM type: NRG; PAM sequence: AGG
cactctgcaggatattatcc

SEQ ID NO: 82466 - DNA, 20 bp, Artificial Sequence
  Description of Artificial Sequence: Synthetic oligonucleotide
  Target: LAMA2; (-) strand; PAM type: NRG; PAM sequence: CAG
acactctgcaggatattatc

SEQ ID NO: 82467 - DNA, 20 bp, Artificial Sequence
  Description of Artificial Sequence: Synthetic oligonucleotide
  Target: LAMA2; (-) strand; PAM type: NRG; PAM sequence: AGG
caagttggaaaacactctgc

SEQ ID NO: 82468 - DNA, 20 bp, Artificial Sequence
  Description of Artificial Sequence: Synthetic oligonucleotide
  Target: LAMA2; (-) strand; PAM type: NRG; PAM sequence: CAG
ccaagttggaaaacactctg

SEQ ID NO: 82469 - DNA, 20 bp, Artificial Sequence
  Description of Artificial Sequence: Synthetic oligonucleotide
  Target: LAMA2; (-) strand; PAM type: NRG; PAM sequence: TGG
tggggagaatggaaccaagt

SEQ ID NO: 82470 - DNA, 20 bp, Artificial Sequence
  Description of Artificial Sequence: Synthetic oligonucleotide
  Target: LAMA2; (-) strand; PAM type: NRG; PAM sequence: AAG
gtgatggggagaatggaacc

SEQ ID NO: 82471 - DNA, 20 bp, Artificial Sequence
  Description of Artificial Sequence: Synthetic oligonucleotide
  Target: LAMA2; (-) strand; PAM type: NRG; PAM sequence: TGG
cctgaaagtgatggggagaa

SEQ ID NO: 82472 - DNA, 20 bp, Artificial Sequence
  Description of Artificial Sequence: Synthetic oligonucleotide
  Target: LAMA2; (-) strand; PAM type: NRG; PAM sequence: GAG
gtgtacctgaaagtgatggg

SEQ ID NO: 82473 - DNA, 20 bp, Artificial Sequence
  Description of Artificial Sequence: Synthetic oligonucleotide
  Target: LAMA2; (-) strand; PAM type: NRG; PAM sequence: GGG
tggtgtacctgaaagtgatg

SEQ ID NO: 82474 - DNA, 20 bp, Artificial Sequence
  Description of Artificial Sequence: Synthetic oligonucleotide
  Target: LAMA2; (-) strand; PAM type: NRG; PAM sequence: GGG
ttggtgtacctgaaagtgat

SEQ ID NO: 82475 - DNA, 20 bp, Artificial Sequence
  Description of Artificial Sequence: Synthetic oligonucleotide
  Target: LAMA2; (-) strand; PAM type: NRG; PAM sequence: TGG
attggtgtacctgaaagtga

SEQ ID NO: 82476 - DNA, 20 bp, Artificial Sequence
  Description of Artificial Sequence: Synthetic oligonucleotide
  Target: LAMA2; (-) strand; PAM type: NRG; PAM sequence: AAG
cgtctgattggtgtacctga

SEQ ID NO: 82477 - DNA, 20 bp, Artificial Sequence
  Description of Artificial Sequence: Synthetic oligonucleotide
  Target: LAMA2; (-) strand; PAM type: NRG; PAM sequence: TGG
agaccaaatctacgtctgat

SEQ ID NO: 82478 - DNA, 20 bp, Artificial Sequence
  Description of Artificial Sequence: Synthetic oligonucleotide
  Target: LAMA2; (-) strand; PAM type: NRG; PAM sequence: AAG
gaaatatgggactatgtgaa

SEQ ID NO: 82479 - DNA, 20 bp, Artificial Sequence
  Description of Artificial Sequence: Synthetic oligonucleotide
  Target: LAMA2; (-) strand; PAM type: NRG; PAM sequence: GGG
gcaaagcctccaagaaatat

SEQ ID NO: 82480 - DNA, 20 bp, Artificial Sequence
  Description of Artificial Sequence: Synthetic oligonucleotide
  Target: LAMA2; (-) strand; PAM type: NRG; PAM sequence: TGG
agcaaagcctccaagaaata

SEQ ID NO: 82481 - DNA, 20 bp, Artificial Sequence
  Description of Artificial Sequence: Synthetic oligonucleotide
  Target: LAMA2; (-) strand; PAM type: NRG; PAM sequence: AAG
aagaaatgagcaaagcctcc

SEQ ID NO: 82482 - DNA, 20 bp, Artificial Sequence
  Description of Artificial Sequence: Synthetic oligonucleotide
  Target: LAMA2; (-) strand; PAM type: NRG; PAM sequence: AAG
agaataaaaagaaatgagca

SEQ ID NO: 82483 - DNA, 20 bp, Artificial Sequence
  Description of Artificial Sequence: Synthetic oligonucleotide
  Target: LAMA2; (-) strand; PAM type: NRG; PAM sequence: GAG
aaaaaagaataaaaagaaat

SEQ ID NO: 82484 - DNA, 20 bp, Artificial Sequence
  Description of Artificial Sequence: Synthetic oligonucleotide
  Target: LAMA2; (-) strand; PAM type: NRG; PAM sequence: AAG
tttagagaaaaaagaataaa

SEQ ID NO: 82485 - DNA, 20 bp, Artificial Sequence
  Description of Artificial Sequence: Synthetic oligonucleotide
  Target: LAMA2; (-) strand; PAM type: NRG; PAM sequence: AAG
gaagggaagtttagagaaaa

SEQ ID NO: 82486 - DNA, 20 bp, Artificial Sequence
  Description of Artificial Sequence: Synthetic oligonucleotide
  Target: LAMA2; (-) strand; PAM type: NRG; PAM sequence: GAG
gaagtgagaagggaagttta

SEQ ID NO: 82487 - DNA, 20 bp, Artificial Sequence
  Description of Artificial Sequence: Synthetic oligonucleotide
  Target: LAMA2; (-) strand; PAM type: NRG; PAM sequence: TAG
atgaagtgagaagggaagtt

SEQ ID NO: 82488 - DNA, 20 bp, Artificial Sequence
  Description of Artificial Sequence: Synthetic oligonucleotide
  Target: LAMA2; (-) strand; PAM type: NRG; PAM sequence: AAG
atgaaatgaagtgagaaggg

SEQ ID NO: 82489 - DNA, 20 bp, Artificial Sequence
  Description of Artificial Sequence: Synthetic oligonucleotide
  Target: LAMA2; (-) strand; PAM type: NRG; PAM sequence: GGG
tgaatgaaatgaagtgagaa

SEQ ID NO: 82490 - DNA, 20 bp, Artificial Sequence
  Description of Artificial Sequence: Synthetic oligonucleotide
  Target: LAMA2; (-) strand; PAM type: NRG; PAM sequence: AGG
atgaatgaaatgaagtgaga

SEQ ID NO: 82491 - DNA, 20 bp, Artificial Sequence
  Description of Artificial Sequence: Synthetic oligonucleotide
  Target: LAMA2; (-) strand; PAM type: NRG; PAM sequence: AAG
aatgaatgaaatgaagtgag

SEQ ID NO: 82492 - DNA, 20 bp, Artificial Sequence
  Description of Artificial Sequence: Synthetic oligonucleotide
  Target: LAMA2; (-) strand; PAM type: NRG; PAM sequence: GAG
tgaaatgaatgaaatgaagt

SEQ ID NO: 82493 - DNA, 20 bp, Artificial Sequence
  Description of Artificial Sequence: Synthetic oligonucleotide
  Target: LAMA2; (-) strand; PAM type: NRG; PAM sequence: AAG
aagatgaaatgaatgaaatg

SEQ ID NO: 82494 - DNA, 20 bp, Artificial Sequence
  Description of Artificial Sequence: Synthetic oligonucleotide
  Target: LAMA2; (-) strand; PAM type: NRG; PAM sequence: AAG
agaaagggtatcagcaatgg

SEQ ID NO: 82495 - DNA, 20 bp, Artificial Sequence
  Description of Artificial Sequence: Synthetic oligonucleotide
  Target: LAMA2; (-) strand; PAM type: NRG; PAM sequence: TGG
ggaagaaagggtatcagcaa

SEQ ID NO: 82496 - DNA, 20 bp, Artificial Sequence
  Description of Artificial Sequence: Synthetic oligonucleotide
  Target: LAMA2; (-) strand; PAM type: NRG; PAM sequence: CAG
tcaactggaagaaagggtat

SEQ ID NO: 82497 - DNA, 20 bp, Artificial Sequence
  Description of Artificial Sequence: Synthetic oligonucleotide
  Target: LAMA2; (-) strand; PAM type: NRG; PAM sequence: GGG
atgcgatcaactggaagaaa

SEQ ID NO: 82498 - DNA, 20 bp, Artificial Sequence
  Description of Artificial Sequence: Synthetic oligonucleotide
  Target: LAMA2; (-) strand; PAM type: NRG; PAM sequence: AGG
gatgcgatcaactggaagaa

SEQ ID NO: 82499 - DNA, 20 bp, Artificial Sequence
  Description of Artificial Sequence: Synthetic oligonucleotide
  Target: LAMA2; (-) strand; PAM type: NRG; PAM sequence: AAG
cgatgcgatcaactggaaga

SEQ ID NO: 82500 - DNA, 20 bp, Artificial Sequence
  Description of Artificial Sequence: Synthetic oligonucleotide
  Target: LAMA2; (-) strand; PAM type: NRG; PAM sequence: AAG
gagccgatgcgatcaactgg

SEQ ID NO: 82501 - DNA, 20 bp, Artificial Sequence
  Description of Artificial Sequence: Synthetic oligonucleotide
  Target: LAMA2; (-) strand; PAM type: NRG; PAM sequence: TGG
caggagccgatgcgatcaac

SEQ ID NO: 82502 - DNA, 20 bp, Artificial Sequence
  Description of Artificial Sequence: Synthetic oligonucleotide
  Target: LAMA2; (-) strand; PAM type: NRG; PAM sequence: GAG
gaagaatgcagaagcctcag

SEQ ID NO: 82503 - DNA, 20 bp, Artificial Sequence
  Description of Artificial Sequence: Synthetic oligonucleotide
  Target: LAMA2; (-) strand; PAM type: NRG; PAM sequence: AGG
gtgaagaatgcagaagcctc

SEQ ID NO: 82504 - DNA, 20 bp, Artificial Sequence
  Description of Artificial Sequence: Synthetic oligonucleotide
  Target: LAMA2; (-) strand; PAM type: NRG; PAM sequence: CAG
cgtgaagaatgcagaagcct

SEQ ID NO: 82505 - DNA, 20 bp, Artificial Sequence
  Description of Artificial Sequence: Synthetic oligonucleotide
  Target: LAMA2; (-) strand; PAM type: NRG; PAM sequence: AAG
gaactacgtgaagaatgcag

SEQ ID NO: 82506 - DNA, 20 bp, Artificial Sequence
  Description of Artificial Sequence: Synthetic oligonucleotide
  Target: LAMA2; (-) strand; PAM type: NRG; PAM sequence: CAG
cgagaactacgtgaagaatg

SEQ ID NO: 82507 - DNA, 20 bp, Artificial Sequence
  Description of Artificial Sequence: Synthetic oligonucleotide
  Target: LAMA2; (-) strand; PAM type: NRG; PAM sequence: AAG
caaggctcgagaactacgtg

SEQ ID NO: 82508 - DNA, 20 bp, Artificial Sequence
  Description of Artificial Sequence: Synthetic oligonucleotide
  Target: LAMA2; (-) strand; PAM type: NRG; PAM sequence: GAG
ggagctgaaaaccaaggctc

SEQ ID NO: 82509 - DNA, 20 bp, Artificial Sequence
  Description of Artificial Sequence: Synthetic oligonucleotide
  Target: LAMA2; (-) strand; PAM type: NRG; PAM sequence: AGG
gctgatggagctgaaaacca

SEQ ID NO: 82510 - DNA, 20 bp, Artificial Sequence
  Description of Artificial Sequence: Synthetic oligonucleotide
  Target: LAMA2; (-) strand; PAM type: NRG; PAM sequence: AAG
agctgatggagctgaaaacc

SEQ ID NO: 82511 - DNA, 20 bp, Artificial Sequence
  Description of Artificial Sequence: Synthetic oligonucleotide
  Target: LAMA2; (-) strand; PAM type: NRG; PAM sequence: GAG
agtgcttaaaggagctgatg

SEQ ID NO: 82512 - DNA, 20 bp, Artificial Sequence
  Description of Artificial Sequence: Synthetic oligonucleotide
  Target: LAMA2; (-) strand; PAM type: NRG; PAM sequence: TGG
gaagtgcttaaaggagctga

SEQ ID NO: 82513 - DNA, 20 bp, Artificial Sequence
  Description of Artificial Sequence: Synthetic oligonucleotide
  Target: LAMA2; (-) strand; PAM type: NRG; PAM sequence: GAG
atacagagaagtgcttaaag

SEQ ID NO: 82514 - DNA, 20 bp, Artificial Sequence
  Description of Artificial Sequence: Synthetic oligonucleotide
  Target: LAMA2; (-) strand; PAM type: NRG; PAM sequence: AGG
caatacagagaagtgcttaa

SEQ ID NO: 82515 - DNA, 20 bp, Artificial Sequence
  Description of Artificial Sequence: Synthetic oligonucleotide
  Target: LAMA2; (-) strand; PAM type: NRG; PAM sequence: AAG
ccaatacagagaagtgctta

SEQ ID NO: 82516 - DNA, 20 bp, Artificial Sequence
  Description of Artificial Sequence: Synthetic oligonucleotide
  Target: LAMA2; (-) strand; PAM type: NRG; PAM sequence: AAG
ctagaataaccaatacagag

SEQ ID NO: 82517 - DNA, 20 bp, Artificial Sequence
  Description of Artificial Sequence: Synthetic oligonucleotide
  Target: LAMA2; (-) strand; PAM type: NRG; PAM sequence: GAG
taactagaataaccaataca

SEQ ID NO: 82518 - DNA, 20 bp, Artificial Sequence
  Description of Artificial Sequence: Synthetic oligonucleotide
  Target: LAMA2; (-) strand; PAM type: NRG; PAM sequence: CAG
tataactagaataaccaata

SEQ ID NO: 82519 - DNA, 20 bp, Artificial Sequence
  Description of Artificial Sequence: Synthetic oligonucleotide
  Target: LAMA2; (-) strand; PAM type: NRG; PAM sequence: TAG
aatgtagaagaatgtataac

SEQ ID NO: 82520 - DNA, 20 bp, Artificial Sequence
  Description of Artificial Sequence: Synthetic oligonucleotide
  Target: LAMA2; (-) strand; PAM type: NRG; PAM sequence: AAG
aaactttgaaaaaaatgtag

SEQ ID NO: 82521 - DNA, 20 bp, Artificial Sequence
  Description of Artificial Sequence: Synthetic oligonucleotide
  Target: LAMA2; (-) strand; PAM type: NRG; PAM sequence: TAG
tgaaaactttgaaaaaaatg

SEQ ID NO: 82522 - DNA, 20 bp, Artificial Sequence
  Description of Artificial Sequence: Synthetic oligonucleotide
  Target: LAMA2; (-) strand; PAM type: NRG; PAM sequence: AAG
cattcaaaccaaaggcaaag

SEQ ID NO: 82523 - DNA, 20 bp, Artificial Sequence
  Description of Artificial Sequence: Synthetic oligonucleotide
  Target: LAMA2; (-) strand; PAM type: NRG; PAM sequence: AAG
ggacattcaaaccaaaggca

SEQ ID NO: 82524 - DNA, 20 bp, Artificial Sequence
  Description of Artificial Sequence: Synthetic oligonucleotide
  Target: LAMA2; (-) strand; PAM type: NRG; PAM sequence: AGG
cgggaggacattcaaaccaa

SEQ ID NO: 82525 - DNA, 20 bp, Artificial Sequence
  Description of Artificial Sequence: Synthetic oligonucleotide
  Target: LAMA2; (-) strand; PAM type: NRG; PAM sequence: AAG
acgggaggacattcaaacca

SEQ ID NO: 82526 - DNA, 20 bp, Artificial Sequence
  Description of Artificial Sequence: Synthetic oligonucleotide
  Target: LAMA2; (-) strand; PAM type: NRG; PAM sequence: AGG
aaattactctgagctacggg

SEQ ID NO: 82527 - DNA, 20 bp, Artificial Sequence
  Description of Artificial Sequence: Synthetic oligonucleotide
  Target: LAMA2; (-) strand; PAM type: NRG; PAM sequence: GAG
caaattactctgagctacgg

SEQ ID NO: 82528 - DNA, 20 bp, Artificial Sequence
  Description of Artificial Sequence: Synthetic oligonucleotide
  Target: LAMA2; (-) strand; PAM type: NRG; PAM sequence: GGG
atcaaattactctgagctac

SEQ ID NO: 82529 - DNA, 20 bp, Artificial Sequence
  Description of Artificial Sequence: Synthetic oligonucleotide
  Target: LAMA2; (-) strand; PAM type: NRG; PAM sequence: CGG
gatcaaattactctgagcta

SEQ ID NO: 82530 - DNA, 20 bp, Artificial Sequence
  Description of Artificial Sequence: Synthetic oligonucleotide
  Target: LAMA2; (-) strand; PAM type: NRG; PAM sequence: GAG
tcagacgatcaaattactct

SEQ ID NO: 82531 - DNA, 20 bp, Artificial Sequence
  Description of Artificial Sequence: Synthetic oligonucleotide
  Target: LAMA2; (-) strand; PAM type: NRG; PAM sequence: CAG
gagctgagagaagaaggctt

SEQ ID NO: 82532 - DNA, 20 bp, Artificial Sequence
  Description of Artificial Sequence: Synthetic oligonucleotide
  Target: LAMA2; (-) strand; PAM type: NRG; PAM sequence: AGG
tttgacgagctgagagaaga

SEQ ID NO: 82533 - DNA, 20 bp, Artificial Sequence
  Description of Artificial Sequence: Synthetic oligonucleotide
  Target: LAMA2; (-) strand; PAM type: NRG; PAM sequence: AAG
ctttgacgagctgagagaag

SEQ ID NO: 82534 - DNA, 20 bp, Artificial Sequence
  Description of Artificial Sequence: Synthetic oligonucleotide
  Target: LAMA2; (-) strand; PAM type: NRG; PAM sequence: AAG
cgactttgacgagctgagag

SEQ ID NO: 82535 - DNA, 20 bp, Artificial Sequence
  Description of Artificial Sequence: Synthetic oligonucleotide
  Target: LAMA2; (-) strand; PAM type: NRG; PAM sequence: GAG
gaacgactttgacgagctga

SEQ ID NO: 82536 - DNA, 20 bp, Artificial Sequence
  Description of Artificial Sequence: Synthetic oligonucleotide
  Target: LAMA2; (-) strand; PAM type: NRG; PAM sequence: GAG
gagaacgactttgacgagct

SEQ ID NO: 82537 - DNA, 20 bp, Artificial Sequence
  Description of Artificial Sequence: Synthetic oligonucleotide
  Target: LAMA2; (-) strand; PAM type: NRG; PAM sequence: GAG
ggatggagaacgactttgac

SEQ ID NO: 82538 - DNA, 20 bp, Artificial Sequence
  Description of Artificial Sequence: Synthetic oligonucleotide
  Target: LAMA2; (-) strand; PAM type: NRG; PAM sequence: GAG
caacggaacaaagctggatg

SEQ ID NO: 82539 - DNA, 20 bp, Artificial Sequence
  Description of Artificial Sequence: Synthetic oligonucleotide
  Target: LAMA2; (-) strand; PAM type: NRG; PAM sequence: TGG
agcaacggaacaaagctgga

SEQ ID NO: 82540 - DNA, 20 bp, Artificial Sequence
  Description of Artificial Sequence: Synthetic oligonucleotide
  Target: LAMA2; (-) strand; PAM type: NRG; PAM sequence: TGG
caccagcaacggaacaaagc

SEQ ID NO: 82541 - DNA, 20 bp, Artificial Sequence
  Description of Artificial Sequence: Synthetic oligonucleotide
  Target: LAMA2; (-) strand; PAM type: NRG; PAM sequence: AAG
tcctcaccagcaacggaaca

SEQ ID NO: 82542 - DNA, 20 bp, Artificial Sequence
  Description of Artificial Sequence: Synthetic oligonucleotide
  Target: LAMA2; (-) strand; PAM type: NRG; PAM sequence: CGG
acgcagttcctcaccagcaa

SEQ ID NO: 82543 - DNA, 20 bp, Artificial Sequence
  Description of Artificial Sequence: Synthetic oligonucleotide
  Target: LAMA2; (-) strand; PAM type: NRG; PAM sequence: CAG
aaaggaacgcagttcctcac

SEQ ID NO: 82544 - DNA, 20 bp, Artificial Sequence
  Description of Artificial Sequence: Synthetic oligonucleotide
  Target: LAMA2; (-) strand; PAM type: NRG; PAM sequence: CAG
tctcctcctccaaaggaacg

SEQ ID NO: 82545 - DNA, 20 bp, Artificial Sequence
  Description of Artificial Sequence: Synthetic oligonucleotide
  Target: LAMA2; (-) strand; PAM type: NRG; PAM sequence: AGG
gagtgcctctcctcctccaa

SEQ ID NO: 82546 - DNA, 20 bp, Artificial Sequence
  Description of Artificial Sequence: Synthetic oligonucleotide
  Target: LAMA2; (-) strand; PAM type: NRG; PAM sequence: AAG
agagtgcctctcctcctcca

SEQ ID NO: 82547 - DNA, 20 bp, Artificial Sequence
  Description of Artificial Sequence: Synthetic oligonucleotide
  Target: LAMA2; (-) strand; PAM type: NRG; PAM sequence: GAG
actggaaactctaaaaagca

SEQ ID NO: 82548 - DNA, 20 bp, Artificial Sequence
  Description of Artificial Sequence: Synthetic oligonucleotide
  Target: LAMA2; (-) strand; PAM type: NRG; PAM sequence: CAG
aaactggaaactctaaaaag

SEQ ID NO: 82549 - DNA, 20 bp, Artificial Sequence
  Description of Artificial Sequence: Synthetic oligonucleotide
  Target: LAMA2; (-) strand; PAM type: NRG; PAM sequence: AAG
gaaaaactggaaactctaaa

SEQ ID NO: 82550 - DNA, 20 bp, Artificial Sequence
  Description of Artificial Sequence: Synthetic oligonucleotide
  Target: LAMA2; (-) strand; PAM type: NRG; PAM sequence: TGG
aaaaaacagaacagaaaaac

SEQ ID NO: 82551 - DNA, 20 bp, Artificial Sequence
  Description of Artificial Sequence: Synthetic oligonucleotide
  Target: LAMA2; (-) strand; PAM type: NRG; PAM sequence: CAG
aagatggggaaaaaacagaa

SEQ ID NO: 82552 - DNA, 20 bp, Artificial Sequence
  Description of Artificial Sequence: Synthetic oligonucleotide
  Target: LAMA2; (-) strand; PAM type: NRG; PAM sequence: CAG
ccacaaagatggggaaaaaa

SEQ ID NO: 82553 - DNA, 20 bp, Artificial Sequence
  Description of Artificial Sequence: Synthetic oligonucleotide
  Target: LAMA2; (-) strand; PAM type: NRG; PAM sequence: GGG
tagataaaaccacaaagatg

SEQ ID NO: 82554 - DNA, 20 bp, Artificial Sequence
  Description of Artificial Sequence: Synthetic oligonucleotide
  Target: LAMA2; (-) strand; PAM type: NRG; PAM sequence: GGG
gtagataaaaccacaaagat

SEQ ID NO: 82555 - DNA, 20 bp, Artificial Sequence
  Description of Artificial Sequence: Synthetic oligonucleotide
  Target: LAMA2; (-) strand; PAM type: NRG; PAM sequence: TGG
agtagataaaaccacaaaga

SEQ ID NO: 82556 - DNA, 20 bp, Artificial Sequence
  Description of Artificial Sequence: Synthetic oligonucleotide
  Target: LAMA2; (-) strand; PAM type: NRG; PAM sequence: AAG
caaaagtagataaaaccaca

SEQ ID NO: 82557 - DNA, 20 bp, Artificial Sequence
  Description of Artificial Sequence: Synthetic oligonucleotide
  Target: LAMA2; (-) strand; PAM type: NRG; PAM sequence: TAG
ccatcatcaaagaccaaaag

SEQ ID NO: 82558 - DNA, 20 bp, Artificial Sequence
  Description of Artificial Sequence: Synthetic oligonucleotide
  Target: LAMA2; (-) strand; PAM type: NRG; PAM sequence: AAG
tcaccatcatcaaagaccaa

SEQ ID NO: 82559 - DNA, 20 bp, Artificial Sequence
  Description of Artificial Sequence: Synthetic oligonucleotide
  Target: LAMA2; (-) strand; PAM type: NRG; PAM sequence: AAG
tctgtacatcaccatcatca

SEQ ID NO: 82560 - DNA, 20 bp, Artificial Sequence
  Description of Artificial Sequence: Synthetic oligonucleotide
  Target: LAMA2; (-) strand; PAM type: NRG; PAM sequence: AGG
aggaaaactaacaaacagaa

SEQ ID NO: 82561 - DNA, 20 bp, Artificial Sequence
  Description of Artificial Sequence: Synthetic oligonucleotide
  Target: LAMA2; (-) strand; PAM type: NRG; PAM sequence: AAG
aaggaaaactaacaaacaga

SEQ ID NO: 82562 - DNA, 20 bp, Artificial Sequence
  Description of Artificial Sequence: Synthetic oligonucleotide
  Target: LAMA2; (-) strand; PAM type: NRG; PAM sequence: CAG
ttagaaggaaaactaacaaa

SEQ ID NO: 82563 - DNA, 20 bp, Artificial Sequence
  Description of Artificial Sequence: Synthetic oligonucleotide
  Target: LAMA2; (-) strand; PAM type: NRG; PAM sequence: AGG
tgaggttcctgtctgttaga

SEQ ID NO: 82564 - DNA, 20 bp, Artificial Sequence
  Description of Artificial Sequence: Synthetic oligonucleotide
  Target: LAMA2; (-) strand; PAM type: NRG; PAM sequence: AAG
ctgaggttcctgtctgttag

SEQ ID NO: 82565 - DNA, 20 bp, Artificial Sequence
  Description of Artificial Sequence: Synthetic oligonucleotide
  Target: LAMA2; (-) strand; PAM type: NRG; PAM sequence: TAG
cagctgaggttcctgtctgt

SEQ ID NO: 82566 - DNA, 20 bp, Artificial Sequence
  Description of Artificial Sequence: Synthetic oligonucleotide
  Target: LAMA2; (-) strand; PAM type: NRG; PAM sequence: AGG
ttgcaacagacctgcagctg

SEQ ID NO: 82567 - DNA, 20 bp, Artificial Sequence
  Description of Artificial Sequence: Synthetic oligonucleotide
  Target: LAMA2; (-) strand; PAM type: NRG; PAM sequence: GAG
attgcaacagacctgcagct

SEQ ID NO: 82568 - DNA, 20 bp, Artificial Sequence
  Description of Artificial Sequence: Synthetic oligonucleotide
  Target: LAMA2; (-) strand; PAM type: NRG; PAM sequence: CAG
agggtattgcaacagacctg

SEQ ID NO: 82569 - DNA, 20 bp, Artificial Sequence
  Description of Artificial Sequence: Synthetic oligonucleotide
  Target: LAMA2; (-) strand; PAM type: NRG; PAM sequence: CAG
cacacggcagggtattgcaa

SEQ ID NO: 82570 - DNA, 20 bp, Artificial Sequence
  Description of Artificial Sequence: Synthetic oligonucleotide
  Target: LAMA2; (-) strand; PAM type: NRG; PAM sequence: GGG
cactgacacctcacacggca

SEQ ID NO: 82571 - DNA, 20 bp, Artificial Sequence
  Description of Artificial Sequence: Synthetic oligonucleotide
  Target: LAMA2; (-) strand; PAM type: NRG; PAM sequence: AGG
acactgacacctcacacggc

SEQ ID NO: 82572 - DNA, 20 bp, Artificial Sequence
  Description of Artificial Sequence: Synthetic oligonucleotide
  Target: LAMA2; (-) strand; PAM type: NRG; PAM sequence: CAG
cacactgacacctcacacgg

SEQ ID NO: 82573 - DNA, 20 bp, Artificial Sequence
  Description of Artificial Sequence: Synthetic oligonucleotide
  Target: LAMA2; (-) strand; PAM type: NRG; PAM sequence: CGG
gggcacactgacacctcaca

SEQ ID NO: 82574 - DNA, 20 bp, Artificial Sequence
  Description of Artificial Sequence: Synthetic oligonucleotide
  Target: LAMA2; (-) strand; PAM type: NRG; PAM sequence: GGG
tgggaggcaccccccagcag

SEQ ID NO: 82575 - DNA, 20 bp, Artificial Sequence
  Description of Artificial Sequence: Synthetic oligonucleotide
  Target: LAMA2; (-) strand; PAM type: NRG; PAM sequence: GGG
ctgggaggcaccccccagca

SEQ ID NO: 82576 - DNA, 20 bp, Artificial Sequence
  Description of Artificial Sequence: Synthetic oligonucleotide
  Target: LAMA2; (-) strand; PAM type: NRG; PAM sequence: AGG
actgggaggcaccccccagc

SEQ ID NO: 82577 - DNA, 20 bp, Artificial Sequence
  Description of Artificial Sequence: Synthetic oligonucleotide
  Target: LAMA2; (-) strand; PAM type: NRG; PAM sequence: CAG
aactgggaggcaccccccag

SEQ ID NO: 82578 - DNA, 20 bp, Artificial Sequence
  Description of Artificial Sequence: Synthetic oligonucleotide
  Target: LAMA2; (-) strand; PAM type: NRG; PAM sequence: CAG
cgtaactgggaggcaccccc

SEQ ID NO: 82579 - DNA, 20 bp, Artificial Sequence
  Description of Artificial Sequence: Synthetic oligonucleotide
  Target: LAMA2; (-) strand; PAM type: NRG; PAM sequence: AGG
ccctgagcagcgtaactggg

SEQ ID NO: 82580 - DNA, 20 bp, Artificial Sequence
  Description of Artificial Sequence: Synthetic oligonucleotide
  Target: LAMA2; (-) strand; PAM type: NRG; PAM sequence: GAG
cccctgagcagcgtaactgg

SEQ ID NO: 82581 - DNA, 20 bp, Artificial Sequence
  Description of Artificial Sequence: Synthetic oligonucleotide
  Target: LAMA2; (-) strand; PAM type: NRG; PAM sequence: GGG
gacccctgagcagcgtaact

SEQ ID NO: 82582 - DNA, 20 bp, Artificial Sequence
  Description of Artificial Sequence: Synthetic oligonucleotide
  Target: LAMA2; (-) strand; PAM type: NRG; PAM sequence: TGG
tgacccctgagcagcgtaac

SEQ ID NO: 82583 - DNA, 20 bp, Artificial Sequence
  Description of Artificial Sequence: Synthetic oligonucleotide
  Target: LAMA2; (-) strand; PAM type: NRG; PAM sequence: CAG
cctgacccctgacccctgag

SEQ ID NO: 82584 - DNA, 20 bp, Artificial Sequence
  Description of Artificial Sequence: Synthetic oligonucleotide
  Target: LAMA2; (-) strand; PAM type: NRG; PAM sequence: GAG
gtccctgacccctgacccct

SEQ ID NO: 82585 - DNA, 20 bp, Artificial Sequence
  Description of Artificial Sequence: Synthetic oligonucleotide
  Target: LAMA2; (-) strand; PAM type: NRG; PAM sequence: GGG
ggcagactgcctcctcaagt

SEQ ID NO: 82586 - DNA, 20 bp, Artificial Sequence
  Description of Artificial Sequence: Synthetic oligonucleotide
  Target: LAMA2; (-) strand; PAM type: NRG; PAM sequence: TGG
gggcagactgcctcctcaag

SEQ ID NO: 82587 - DNA, 20 bp, Artificial Sequence
  Description of Artificial Sequence: Synthetic oligonucleotide
  Target: LAMA2; (-) strand; PAM type: NRG; PAM sequence: AAG
aacgggcagactgcctcctc

SEQ ID NO: 82588 - DNA, 20 bp, Artificial Sequence
  Description of Artificial Sequence: Synthetic oligonucleotide
  Target: LAMA2; (-) strand; PAM type: NRG; PAM sequence: CAG
gctggagatctaagaacggg

SEQ ID NO: 82589 - DNA, 20 bp, Artificial Sequence
  Description of Artificial Sequence: Synthetic oligonucleotide
  Target: LAMA2; (-) strand; PAM type: NRG; PAM sequence: GGG
gcagctggagatctaagaac

SEQ ID NO: 82590 - DNA, 20 bp, Artificial Sequence
  Description of Artificial Sequence: Synthetic oligonucleotide
  Target: LAMA2; (-) strand; PAM type: NRG; PAM sequence: CGG
cgcagctggagatctaagaa

SEQ ID NO: 82591 - DNA, 20 bp, Artificial Sequence
  Description of Artificial Sequence: Synthetic oligonucleotide
  Target: LAMA2; (-) strand; PAM type: NRG; PAM sequence: AAG
cagcacgcagctggagatct

SEQ ID NO: 82592 - DNA, 20 bp, Artificial Sequence
  Description of Artificial Sequence: Synthetic oligonucleotide
  Target: LAMA2; (-) strand; PAM type: NRG; PAM sequence: GAG
gttctcccagcacgcagctg

SEQ ID NO: 82593 - DNA, 20 bp, Artificial Sequence
  Description of Artificial Sequence: Synthetic oligonucleotide
  Target: LAMA2; (-) strand; PAM type: NRG; PAM sequence: TGG
tggttctcccagcacgcagc

SEQ ID NO: 82594 - DNA, 20 bp, Artificial Sequence
  Description of Artificial Sequence: Synthetic oligonucleotide
  Target: LAMA2; (-) strand; PAM type: NRG; PAM sequence: CAG
gcagtggttctcccagcacg

SEQ ID NO: 82595 - DNA, 20 bp, Artificial Sequence
  Description of Artificial Sequence: Synthetic oligonucleotide
  Target: LAMA2; (-) strand; PAM type: NRG; PAM sequence: CAG
gaagagagcagtggttctcc

SEQ ID NO: 82596 - DNA, 20 bp, Artificial Sequence
  Description of Artificial Sequence: Synthetic oligonucleotide
  Target: LAMA2; (-) strand; PAM type: NRG; PAM sequence: TGG
gacagctttgaagagagcag

SEQ ID NO: 82597 - DNA, 20 bp, Artificial Sequence
  Description of Artificial Sequence: Synthetic oligonucleotide
  Target: LAMA2; (-) strand; PAM type: NRG; PAM sequence: CAG
tctgacagctttgaagagag

SEQ ID NO: 82598 - DNA, 20 bp, Artificial Sequence
  Description of Artificial Sequence: Synthetic oligonucleotide
  Target: LAMA2; (-) strand; PAM type: NRG; PAM sequence: GAG
ccctctgacagctttgaaga

SEQ ID NO: 82599 - DNA, 20 bp, Artificial Sequence
  Description of Artificial Sequence: Synthetic oligonucleotide
  Target: LAMA2; (-) strand; PAM type: NRG; PAM sequence: GAG
gtccctctgacagctttgaa

SEQ ID NO: 82600 - DNA, 20 bp, Artificial Sequence
  Description of Artificial Sequence: Synthetic oligonucleotide
  Target: LAMA2; (-) strand; PAM type: NRG; PAM sequence: AAG
atgtccctctgacagctttg

SEQ ID NO: 82601 - DNA, 20 bp, Artificial Sequence
  Description of Artificial Sequence: Synthetic oligonucleotide
  Target: LAMA2; (-) strand; PAM type: NRG; PAM sequence: CAG
agacttaaatgtccctctga

SEQ ID NO: 82602 - DNA, 20 bp, Artificial Sequence
  Description of Artificial Sequence: Synthetic oligonucleotide
  Target: LAMA2; (-) strand; PAM type: NRG; PAM sequence: CAG
aaagacagcagtaacctctg

SEQ ID NO: 82603 - DNA, 20 bp, Artificial Sequence
  Description of Artificial Sequence: Synthetic oligonucleotide
  Target: LAMA2; (-) strand; PAM type: NRG; PAM sequence: CAG
acagacaaacaaaaagacag

SEQ ID NO: 82604 - DNA, 20 bp, Artificial Sequence
  Description of Artificial Sequence: Synthetic oligonucleotide
  Target: LAMA2; (-) strand; PAM type: NRG; PAM sequence: CAG
ggcacagacaaacaaaaaga

SEQ ID NO: 82605 - DNA, 20 bp, Artificial Sequence
  Description of Artificial Sequence: Synthetic oligonucleotide
  Target: LAMA2; (-) strand; PAM type: NRG; PAM sequence: AAG
gcagggcacagacaaacaaa

SEQ ID NO: 82606 - DNA, 20 bp, Artificial Sequence
  Description of Artificial Sequence: Synthetic oligonucleotide
  Target: LAMA2; (-) strand; PAM type: NRG; PAM sequence: CAG
ccacctctgggggcagggca

SEQ ID NO: 82607 - DNA, 20 bp, Artificial Sequence
  Description of Artificial Sequence: Synthetic oligonucleotide
  Target: LAMA2; (-) strand; PAM type: NRG; PAM sequence: GGG
aggctccacctctgggggca

SEQ ID NO: 82608 - DNA, 20 bp, Artificial Sequence
  Description of Artificial Sequence: Synthetic oligonucleotide
  Target: LAMA2; (-) strand; PAM type: NRG; PAM sequence: AGG
taggctccacctctgggggc

SEQ ID NO: 82609 - DNA, 20 bp, Artificial Sequence
  Description of Artificial Sequence: Synthetic oligonucleotide
  Target: LAMA2; (-) strand; PAM type: NRG; PAM sequence: CAG
gtaggctccacctctggggg

SEQ ID NO: 82610 - DNA, 20 bp, Artificial Sequence
  Description of Artificial Sequence: Synthetic oligonucleotide
  Target: LAMA2; (-) strand; PAM type: NRG; PAM sequence: GGG
tctgtaggctccacctctgg

SEQ ID NO: 82611 - DNA, 20 bp, Artificial Sequence
  Description of Artificial Sequence: Synthetic oligonucleotide
  Target: LAMA2; (-) strand; PAM type: NRG; PAM sequence: GGG
ctctgtaggctccacctctg

SEQ ID NO: 82612 - DNA, 20 bp, Artificial Sequence
  Description of Artificial Sequence: Synthetic oligonucleotide
  Target: LAMA2; (-) strand; PAM type: NRG; PAM sequence: GGG
cctctgtaggctccacctct

SEQ ID NO: 82613 - DNA, 20 bp, Artificial Sequence
  Description of Artificial Sequence: Synthetic oligonucleotide
  Target: LAMA2; (-) strand; PAM type: NRG; PAM sequence: TGG
gcctctgtaggctccacctc

SEQ ID NO: 82614 - DNA, 20 bp, Artificial Sequence
  Description of Artificial Sequence: Synthetic oligonucleotide
  Target: LAMA2; (-) strand; PAM type: NRG; PAM sequence: AGG
ggaggcctgcctgcctctgt

SEQ ID NO: 82615 - DNA, 20 bp, Artificial Sequence
  Description of Artificial Sequence: Synthetic oligonucleotide
  Target: LAMA2; (-) strand; PAM type: NRG; PAM sequence: TAG
aggaggcctgcctgcctctg

SEQ ID NO: 82616 - DNA, 20 bp, Artificial Sequence
  Description of Artificial Sequence: Synthetic oligonucleotide
  Target: LAMA2; (-) strand; PAM type: NRG; PAM sequence: AGG
gagcccaccacagctcaagg

SEQ ID NO: 82617 - DNA, 20 bp, Artificial Sequence
  Description of Artificial Sequence: Synthetic oligonucleotide
  Target: LAMA2; (-) strand; PAM type: NRG; PAM sequence: GAG
ggagcccaccacagctcaag

SEQ ID NO: 82618 - DNA, 20 bp, Artificial Sequence
  Description of Artificial Sequence: Synthetic oligonucleotide
  Target: LAMA2; (-) strand; PAM type: NRG; PAM sequence: AGG
gtggagcccaccacagctca

SEQ ID NO: 82619 - DNA, 20 bp, Artificial Sequence
  Description of Artificial Sequence: Synthetic oligonucleotide
  Target: LAMA2; (-) strand; PAM type: NRG; PAM sequence: AAG
ggtggagcccaccacagctc

SEQ ID NO: 82620 - DNA, 20 bp, Artificial Sequence
  Description of Artificial Sequence: Synthetic oligonucleotide
  Target: LAMA2; (-) strand; PAM type: NRG; PAM sequence: CAG
caactgggtggagcccacca

SEQ ID NO: 82621 - DNA, 20 bp, Artificial Sequence
  Description of Artificial Sequence: Synthetic oligonucleotide
  Target: LAMA2; (-) strand; PAM type: NRG; PAM sequence: GAG
tgggaagctccaactgggtg

SEQ ID NO: 82622 - DNA, 20 bp, Artificial Sequence
  Description of Artificial Sequence: Synthetic oligonucleotide
  Target: LAMA2; (-) strand; PAM type: NRG; PAM sequence: TGG
gctgggaagctccaactggg

SEQ ID NO: 82623 - DNA, 20 bp, Artificial Sequence
  Description of Artificial Sequence: Synthetic oligonucleotide
  Target: LAMA2; (-) strand; PAM type: NRG; PAM sequence: GGG
gcagctgggaagctccaact

SEQ ID NO: 82624 - DNA, 20 bp, Artificial Sequence
  Description of Artificial Sequence: Synthetic oligonucleotide
  Target: LAMA2; (-) strand; PAM type: NRG; PAM sequence: TGG
agcagctgggaagctccaac

SEQ ID NO: 82625 - DNA, 20 bp, Artificial Sequence
  Description of Artificial Sequence: Synthetic oligonucleotide
  Target: LAMA2; (-) strand; PAM type: NRG; PAM sequence: AAG
aggtaaacaaagcagctggg

SEQ ID NO: 82626 - DNA, 20 bp, Artificial Sequence
  Description of Artificial Sequence: Synthetic oligonucleotide
  Target: LAMA2; (-) strand; PAM type: NRG; PAM sequence: GGG
attaggtaaacaaagcagct

SEQ ID NO: 82627 - DNA, 20 bp, Artificial Sequence
  Description of Artificial Sequence: Synthetic oligonucleotide
  Target: LAMA2; (-) strand; PAM type: NRG; PAM sequence: TGG
gattaggtaaacaaagcagc

SEQ ID NO: 82628 - DNA, 20 bp, Artificial Sequence
  Description of Artificial Sequence: Synthetic oligonucleotide
  Target: LAMA2; (-) strand; PAM type: NRG; PAM sequence: CAG
gcttgattaggtaaacaaag

SEQ ID NO: 82629 - DNA, 20 bp, Artificial Sequence
  Description of Artificial Sequence: Synthetic oligonucleotide
  Target: LAMA2; (-) strand; PAM type: NRG; PAM sequence: AAG
caggcttgattaggtaaaca

SEQ ID NO: 82630 - DNA, 20 bp, Artificial Sequence
  Description of Artificial Sequence: Synthetic oligonucleotide
  Target: LAMA2; (-) strand; PAM type: NRG; PAM sequence: AGG
gccattgcccaggcttgatt

SEQ ID NO: 82631 - DNA, 20 bp, Artificial Sequence
  Description of Artificial Sequence: Synthetic oligonucleotide
  Target: LAMA2; (-) strand; PAM type: NRG; PAM sequence: TAG
cgccattgcccaggcttgat

SEQ ID NO: 82632 - DNA, 20 bp, Artificial Sequence
  Description of Artificial Sequence: Synthetic oligonucleotide
  Target: LAMA2; (-) strand; PAM type: NRG; PAM sequence: AGG
gaggggcgccgccattgccc

SEQ ID NO: 82633 - DNA, 20 bp, Artificial Sequence
  Description of Artificial Sequence: Synthetic oligonucleotide
  Target: LAMA2; (-) strand; PAM type: NRG; PAM sequence: CAG
ggaggggcgccgccattgcc

SEQ ID NO: 82634 - DNA, 20 bp, Artificial Sequence
  Description of Artificial Sequence: Synthetic oligonucleotide
  Target: LAMA2; (-) strand; PAM type: NRG; PAM sequence: GGG
cagcagcgaggctgggggag

SEQ ID NO: 82635 - DNA, 20 bp, Artificial Sequence
  Description of Artificial Sequence: Synthetic oligonucleotide
  Target: LAMA2; (-) strand; PAM type: NRG; PAM sequence: GGG
gcagcagcgaggctggggga

SEQ ID NO: 82636 - DNA, 20 bp, Artificial Sequence
  Description of Artificial Sequence: Synthetic oligonucleotide
  Target: LAMA2; (-) strand; PAM type: NRG; PAM sequence: AGG
ggcagcagcgaggctggggg

SEQ ID NO: 82637 - DNA, 20 bp, Artificial Sequence
  Description of Artificial Sequence: Synthetic oligonucleotide
  Target: LAMA2; (-) strand; PAM type: NRG; PAM sequence: GAG
aggcagcagcgaggctgggg

SEQ ID NO: 82638 - DNA, 20 bp, Artificial Sequence
  Description of Artificial Sequence: Synthetic oligonucleotide
  Target: LAMA2; (-) strand; PAM type: NRG; PAM sequence: GGG
caaggcagcagcgaggctgg

SEQ ID NO: 82639 - DNA, 20 bp, Artificial Sequence
  Description of Artificial Sequence: Synthetic oligonucleotide
  Target: LAMA2; (-) strand; PAM type: NRG; PAM sequence: GGG
gcaaggcagcagcgaggctg

SEQ ID NO: 82640 - DNA, 20 bp, Artificial Sequence
  Description of Artificial Sequence: Synthetic oligonucleotide
  Target: LAMA2; (-) strand; PAM type: NRG; PAM sequence: GGG
tgcaaggcagcagcgaggct

SEQ ID NO: 82641 - DNA, 20 bp, Artificial Sequence
  Description of Artificial Sequence: Synthetic oligonucleotide
  Target: LAMA2; (-) strand; PAM type: NRG; PAM sequence: TGG
ctgcaaggcagcagcgaggc

SEQ ID NO: 82642 - DNA, 20 bp, Artificial Sequence
  Description of Artificial Sequence: Synthetic oligonucleotide
  Target: LAMA2; (-) strand; PAM type: NRG; PAM sequence: AGG
caaactgcaaggcagcagcg

SEQ ID NO: 82643 - DNA, 20 bp, Artificial Sequence
  Description of Artificial Sequence: Synthetic oligonucleotide
  Target: LAMA2; (-) strand; PAM type: NRG; PAM sequence: GAG
tcaaactgcaaggcagcagc

SEQ ID NO: 82644 - DNA, 20 bp, Artificial Sequence
  Description of Artificial Sequence: Synthetic oligonucleotide
  Target: LAMA2; (-) strand; PAM type: NRG; PAM sequence: CAG
gagatcaaactgcaaggcag

SEQ ID NO: 82645 - DNA, 20 bp, Artificial Sequence
  Description of Artificial Sequence: Synthetic oligonucleotide
  Target: LAMA2; (-) strand; PAM type: NRG; PAM sequence: CAG
tctgagatcaaactgcaagg

SEQ ID NO: 82646 - DNA, 20 bp, Artificial Sequence
  Description of Artificial Sequence: Synthetic oligonucleotide
  Target: LAMA2; (-) strand; PAM type: NRG; PAM sequence: AGG
cagtctgagatcaaactgca

SEQ ID NO: 82647 - DNA, 20 bp, Artificial Sequence
  Description of Artificial Sequence: Synthetic oligonucleotide
  Target: LAMA2; (-) strand; PAM type: NRG; PAM sequence: AAG
gcagtctgagatcaaactgc

SEQ ID NO: 82648 - DNA, 20 bp, Artificial Sequence
  Description of Artificial Sequence: Synthetic oligonucleotide
  Target: LAMA2; (-) strand; PAM type: NRG; PAM sequence: GAG
gattgctagcacagcagtct

SEQ ID NO: 82649 - DNA, 20 bp, Artificial Sequence
  Description of Artificial Sequence: Synthetic oligonucleotide
  Target: LAMA2; (-) strand; PAM type: NRG; PAM sequence: CAG
ctcgctgattgctagcacag

SEQ ID NO: 82650 - DNA, 20 bp, Artificial Sequence
  Description of Artificial Sequence: Synthetic oligonucleotide
  Target: LAMA2; (-) strand; PAM type: NRG; PAM sequence: CAG
agtctcgctgattgctagca

SEQ ID NO: 82651 - DNA, 20 bp, Artificial Sequence
  Description of Artificial Sequence: Synthetic oligonucleotide
  Target: LAMA2; (-) strand; PAM type: NRG; PAM sequence: TAG
catggagtctcgctgattgc

SEQ ID NO: 82652 - DNA, 20 bp, Artificial Sequence
  Description of Artificial Sequence: Synthetic oligonucleotide
  Target: LAMA2; (-) strand; PAM type: NRG; PAM sequence: GAG
tggagggtcctacgcccatg

SEQ ID NO: 82653 - DNA, 20 bp, Artificial Sequence
  Description of Artificial Sequence: Synthetic oligonucleotide
  Target: LAMA2; (-) strand; PAM type: NRG; PAM sequence: TGG
cttggagggtcctacgccca

SEQ ID NO: 82654 - DNA, 20 bp, Artificial Sequence
  Description of Artificial Sequence: Synthetic oligonucleotide
  Target: LAMA2; (-) strand; PAM type: NRG; PAM sequence: GGG
tatcctgcacctggcttgga

SEQ ID NO: 82655 - DNA, 20 bp, Artificial Sequence
  Description of Artificial Sequence: Synthetic oligonucleotide
  Target: LAMA2; (-) strand; PAM type: NRG; PAM sequence: AGG
atatcctgcacctggcttgg

SEQ ID NO: 82656 - DNA, 20 bp, Artificial Sequence
  Description of Artificial Sequence: Synthetic oligonucleotide
  Target: LAMA2; (-) strand; PAM type: NRG; PAM sequence: GAG
tatatcctgcacctggcttg

SEQ ID NO: 82657 - DNA, 20 bp, Artificial Sequence
  Description of Artificial Sequence: Synthetic oligonucleotide
  Target: LAMA2; (-) strand; PAM type: NRG; PAM sequence: TGG
attatatcctgcacctggct

SEQ ID NO: 82658 - DNA, 20 bp, Artificial Sequence
  Description of Artificial Sequence: Synthetic oligonucleotide
  Target: LAMA2; (-) strand; PAM type: NRG; PAM sequence: TGG
atgagattatatcctgcacc

SEQ ID NO: 82659 - DNA, 20 bp, Artificial Sequence
  Description of Artificial Sequence: Synthetic oligonucleotide
  Target: LAMA2; (-) strand; PAM type: NRG; PAM sequence: GAG
cttaaaaaacggtgaaccat

SEQ ID NO: 82660 - DNA, 20 bp, Artificial Sequence
  Description of Artificial Sequence: Synthetic oligonucleotide
  Target: LAMA2; (-) strand; PAM type: NRG; PAM sequence: CGG
tttccgacgggcttaaaaaa

SEQ ID NO: 82661 - DNA, 20 bp, Artificial Sequence
  Description of Artificial Sequence: Synthetic oligonucleotide
  Target: LAMA2; (-) strand; PAM type: NRG; PAM sequence: GGG
gaatactgcgcttttccgac

SEQ ID NO: 82662 - DNA, 20 bp, Artificial Sequence
  Description of Artificial Sequence: Synthetic oligonucleotide
  Target: LAMA2; (-) strand; PAM type: NRG; PAM sequence: CGG
ggaatactgcgcttttccga

SEQ ID NO: 82663 - DNA, 20 bp, Artificial Sequence
  Description of Artificial Sequence: Synthetic oligonucleotide
  Target: LAMA2; (-) strand; PAM type: NRG; PAM sequence: CGG
gaaaatcgggtcactcccac

SEQ ID NO: 82664 - DNA, 20 bp, Artificial Sequence
  Description of Artificial Sequence: Synthetic oligonucleotide
  Target: LAMA2; (-) strand; PAM type: NRG; PAM sequence: GGG
cggacggcacctggaaaatc

SEQ ID NO: 82665 - DNA, 20 bp, Artificial Sequence
  Description of Artificial Sequence: Synthetic oligonucleotide
  Target: LAMA2; (-) strand; PAM type: NRG; PAM sequence: CGG
acggacggcacctggaaaat

SEQ ID NO: 82666 - DNA, 20 bp, Artificial Sequence
  Description of Artificial Sequence: Synthetic oligonucleotide
  Target: LAMA2; (-) strand; PAM type: NRG; PAM sequence: TGG
aaggggtgacggacggcacc

SEQ ID NO: 82667 - DNA, 20 bp, Artificial Sequence
  Description of Artificial Sequence: Synthetic oligonucleotide
  Target: LAMA2; (-) strand; PAM type: NRG; PAM sequence: CGG
tcacagaaaggggtgacgga

SEQ ID NO: 82668 - DNA, 20 bp, Artificial Sequence
  Description of Artificial Sequence: Synthetic oligonucleotide
  Target: LAMA2; (-) strand; PAM type: NRG; PAM sequence: CGG
cgagtcacagaaaggggtga

SEQ ID NO: 82669 - DNA, 20 bp, Artificial Sequence
  Description of Artificial Sequence: Synthetic oligonucleotide
  Target: LAMA2; (-) strand; PAM type: NRG; PAM sequence: GGG
cctttccgagtcacagaaag

SEQ ID NO: 82670 - DNA, 20 bp, Artificial Sequence
  Description of Artificial Sequence: Synthetic oligonucleotide
  Target: LAMA2; (-) strand; PAM type: NRG; PAM sequence: GGG
ccctttccgagtcacagaaa

SEQ ID NO: 82671 - DNA, 20 bp, Artificial Sequence
  Description of Artificial Sequence: Synthetic oligonucleotide
  Target: LAMA2; (-) strand; PAM type: NRG; PAM sequence: AGG
tccctttccgagtcacagaa

SEQ ID NO: 82672 - DNA, 20 bp, Artificial Sequence
  Description of Artificial Sequence: Synthetic oligonucleotide
  Target: LAMA2; (-) strand; PAM type: NRG; PAM sequence: AAG
ttccctttccgagtcacaga

SEQ ID NO: 82673 - DNA, 20 bp, Artificial Sequence
  Description of Artificial Sequence: Synthetic oligonucleotide
  Target: LAMA2; (-) strand; PAM type: NRG; PAM sequence: CAG
ggagttccctttccgagtca

SEQ ID NO: 82674 - DNA, 20 bp, Artificial Sequence
  Description of Artificial Sequence: Synthetic oligonucleotide
  Target: LAMA2; (-) strand; PAM type: NRG; PAM sequence: GAG
ggtcagggagttccctttcc

SEQ ID NO: 82675 - DNA, 20 bp, Artificial Sequence
  Description of Artificial Sequence: Synthetic oligonucleotide
  Target: LAMA2; (-) strand; PAM type: NRG; PAM sequence: GAG
gggaagcgcaaggggtcagg

SEQ ID NO: 82676 - DNA, 20 bp, Artificial Sequence
  Description of Artificial Sequence: Synthetic oligonucleotide
  Target: LAMA2; (-) strand; PAM type: NRG; PAM sequence: GGG
ttgggaagcgcaaggggtca

SEQ ID NO: 82677 - DNA, 20 bp, Artificial Sequence
  Description of Artificial Sequence: Synthetic oligonucleotide
  Target: LAMA2; (-) strand; PAM type: NRG; PAM sequence: AGG
cttgggaagcgcaaggggtc

SEQ ID NO: 82678 - DNA, 20 bp, Artificial Sequence
  Description of Artificial Sequence: Synthetic oligonucleotide
  Target: LAMA2; (-) strand; PAM type: NRG; PAM sequence: CAG
acttgggaagcgcaaggggt

SEQ ID NO: 82679 - DNA, 20 bp, Artificial Sequence
  Description of Artificial Sequence: Synthetic oligonucleotide
  Target: LAMA2; (-) strand; PAM type: NRG; PAM sequence: GGG
cctcacttgggaagcgcaag

SEQ ID NO: 82680 - DNA, 20 bp, Artificial Sequence
  Description of Artificial Sequence: Synthetic oligonucleotide
  Target: LAMA2; (-) strand; PAM type: NRG; PAM sequence: GGG
gcctcacttgggaagcgcaa

SEQ ID NO: 82681 - DNA, 20 bp, Artificial Sequence
  Description of Artificial Sequence: Synthetic oligonucleotide
  Target: LAMA2; (-) strand; PAM type: NRG; PAM sequence: AGG
tgcctcacttgggaagcgca

SEQ ID NO: 82682 - DNA, 20 bp, Artificial Sequence
  Description of Artificial Sequence: Synthetic oligonucleotide
  Target: LAMA2; (-) strand; PAM type: NRG; PAM sequence: AAG
ttgcctcacttgggaagcgc

SEQ ID NO: 82683 - DNA, 20 bp, Artificial Sequence
  Description of Artificial Sequence: Synthetic oligonucleotide
  Target: LAMA2; (-) strand; PAM type: NRG; PAM sequence: AAG
gaggcattgcctcacttggg

SEQ ID NO: 82684 - DNA, 20 bp, Artificial Sequence
  Description of Artificial Sequence: Synthetic oligonucleotide
  Target: LAMA2; (-) strand; PAM type: NRG; PAM sequence: GGG
ggcgaggcattgcctcactt

SEQ ID NO: 82685 - DNA, 20 bp, Artificial Sequence
  Description of Artificial Sequence: Synthetic oligonucleotide
  Target: LAMA2; (-) strand; PAM type: NRG; PAM sequence: TGG
gggcgaggcattgcctcact

SEQ ID NO: 82686 - DNA, 20 bp, Artificial Sequence
  Description of Artificial Sequence: Synthetic oligonucleotide
  Target: LAMA2; (-) strand; PAM type: NRG; PAM sequence: AGG
gcgcgagccgaagcagggcg

SEQ ID NO: 82687 - DNA, 20 bp, Artificial Sequence
  Description of Artificial Sequence: Synthetic oligonucleotide
  Target: LAMA2; (-) strand; PAM type: NRG; PAM sequence: GAG
tgcgcgagccgaagcagggc

SEQ ID NO: 82688 - DNA, 20 bp, Artificial Sequence
  Description of Artificial Sequence: Synthetic oligonucleotide
  Target: LAMA2; (-) strand; PAM type: NRG; PAM sequence: GGG
accctgcgcgagccgaagca

SEQ ID NO: 82689 - DNA, 20 bp, Artificial Sequence
  Description of Artificial Sequence: Synthetic oligonucleotide
  Target: LAMA2; (-) strand; PAM type: NRG; PAM sequence: AGG
caccctgcgcgagccgaagc

SEQ ID NO: 82690 - DNA, 20 bp, Artificial Sequence
  Description of Artificial Sequence: Synthetic oligonucleotide
  Target: LAMA2; (-) strand; PAM type: NRG; PAM sequence: CAG
gcaccctgcgcgagccgaag

SEQ ID NO: 82691 - DNA, 20 bp, Artificial Sequence
  Description of Artificial Sequence: Synthetic oligonucleotide
  Target: LAMA2; (-) strand; PAM type: NRG; PAM sequence: AAG
cgcgcaccctgcgcgagccg

SEQ ID NO: 82692 - DNA, 20 bp, Artificial Sequence
  Description of Artificial Sequence: Synthetic oligonucleotide
  Target: LAMA2; (-) strand; PAM type: NRG; PAM sequence: GAG
tgggtgcgcgcaccctgcgc

SEQ ID NO: 82693 - DNA, 20 bp, Artificial Sequence
  Description of Artificial Sequence: Synthetic oligonucleotide
  Target: LAMA2; (-) strand; PAM type: NRG; PAM sequence: GGG
gacagtgggcgcaggtcagt

SEQ ID NO: 82694 - DNA, 20 bp, Artificial Sequence
  Description of Artificial Sequence: Synthetic oligonucleotide
  Target: LAMA2; (-) strand; PAM type: NRG; PAM sequence: TGG
agacagtgggcgcaggtcag

SEQ ID NO: 82695 - DNA, 20 bp, Artificial Sequence
  Description of Artificial Sequence: Synthetic oligonucleotide
  Target: LAMA2; (-) strand; PAM type: NRG; PAM sequence: CAG
gccagacagtgggcgcaggt

SEQ ID NO: 82696 - DNA, 20 bp, Artificial Sequence
  Description of Artificial Sequence: Synthetic oligonucleotide
  Target: LAMA2; (-) strand; PAM type: NRG; PAM sequence: AGG
gaatgccagacagtgggcgc

SEQ ID NO: 82697 - DNA, 20 bp, Artificial Sequence
  Description of Artificial Sequence: Synthetic oligonucleotide
  Target: LAMA2; (-) strand; PAM type: NRG; PAM sequence: CAG
ggaatgccagacagtgggcg

SEQ ID NO: 82698 - DNA, 20 bp, Artificial Sequence
  Description of Artificial Sequence: Synthetic oligonucleotide
  Target: LAMA2; (-) strand; PAM type: NRG; PAM sequence: GGG
actagggaatgccagacagt

SEQ ID NO: 82699 - DNA, 20 bp, Artificial Sequence
  Description of Artificial Sequence: Synthetic oligonucleotide
  Target: LAMA2; (-) strand; PAM type: NRG; PAM sequence: TGG
cactagggaatgccagacag

SEQ ID NO: 82700 - DNA, 20 bp, Artificial Sequence
  Description of Artificial Sequence: Synthetic oligonucleotide
  Target: LAMA2; (-) strand; PAM type: NRG; PAM sequence: CAG
tctcactagggaatgccaga

SEQ ID NO: 82701 - DNA, 20 bp, Artificial Sequence
  Description of Artificial Sequence: Synthetic oligonucleotide
  Target: LAMA2; (-) strand; PAM type: NRG; PAM sequence: CAG
ttcatctcactagggaatgc

SEQ ID NO: 82702 - DNA, 20 bp, Artificial Sequence
  Description of Artificial Sequence: Synthetic oligonucleotide
  Target: LAMA2; (-) strand; PAM type: NRG; PAM sequence: GGG
gtaccgggttcatctcacta

SEQ ID NO: 82703 - DNA, 20 bp, Artificial Sequence
  Description of Artificial Sequence: Synthetic oligonucleotide
  Target: LAMA2; (-) strand; PAM type: NRG; PAM sequence: AGG
ggtaccgggttcatctcact

SEQ ID NO: 82704 - DNA, 20 bp, Artificial Sequence
  Description of Artificial Sequence: Synthetic oligonucleotide
  Target: LAMA2; (-) strand; PAM type: NRG; PAM sequence: TAG
aggtaccgggttcatctcac

SEQ ID NO: 82705 - DNA, 20 bp, Artificial Sequence
  Description of Artificial Sequence: Synthetic oligonucleotide
  Target: LAMA2; (-) strand; PAM type: NRG; PAM sequence: GGG
gcatttccatctgaggtacc

SEQ ID NO: 82706 - DNA, 20 bp, Artificial Sequence
  Description of Artificial Sequence: Synthetic oligonucleotide
  Target: LAMA2; (-) strand; PAM type: NRG; PAM sequence: CGG
tgcatttccatctgaggtac

SEQ ID NO: 82707 - DNA, 20 bp, Artificial Sequence
  Description of Artificial Sequence: Synthetic oligonucleotide
  Target: LAMA2; (-) strand; PAM type: NRG; PAM sequence: AGG
gatttctgcatttccatctg

SEQ ID NO: 82708 - DNA, 20 bp, Artificial Sequence
  Description of Artificial Sequence: Synthetic oligonucleotide
  Target: LAMA2; (-) strand; PAM type: NRG; PAM sequence: GAG
tgatttctgcatttccatct

SEQ ID NO: 82709 - DNA, 20 bp, Artificial Sequence
  Description of Artificial Sequence: Synthetic oligonucleotide
  Target: LAMA2; (-) strand; PAM type: NRG; PAM sequence: CGG
agcgtgagcgacgcagaaga

SEQ ID NO: 82710 - DNA, 20 bp, Artificial Sequence
  Description of Artificial Sequence: Synthetic oligonucleotide
  Target: LAMA2; (-) strand; PAM type: NRG; PAM sequence: AAG
tcccagcgtgagcgacgcag

SEQ ID NO: 82711 - DNA, 20 bp, Artificial Sequence
  Description of Artificial Sequence: Synthetic oligonucleotide
  Target: LAMA2; (-) strand; PAM type: NRG; PAM sequence: CAG
agctcccagcgtgagcgacg

SEQ ID NO: 82712 - DNA, 20 bp, Artificial Sequence
  Description of Artificial Sequence: Synthetic oligonucleotide
  Target: LAMA2; (-) strand; PAM type: NRG; PAM sequence: GAG
cggtctacagctcccagcgt

SEQ ID NO: 82713 - DNA, 20 bp, Artificial Sequence
  Description of Artificial Sequence: Synthetic oligonucleotide
  Target: LAMA2; (-) strand; PAM type: NRG; PAM sequence: CAG
cagctccggtctacagctcc

SEQ ID NO: 82714 - DNA, 20 bp, Artificial Sequence
  Description of Artificial Sequence: Synthetic oligonucleotide
  Target: LAMA2; (-) strand; PAM type: NRG; PAM sequence: CAG
ataggaacagctccggtcta

SEQ ID NO: 82715 - DNA, 20 bp, Artificial Sequence
  Description of Artificial Sequence: Synthetic oligonucleotide
  Target: LAMA2; (-) strand; PAM type: NRG; PAM sequence: CGG
tggcccaataggaacagctc

SEQ ID NO: 82716 - DNA, 20 bp, Artificial Sequence
  Description of Artificial Sequence: Synthetic oligonucleotide
  Target: LAMA2; (-) strand; PAM type: NRG; PAM sequence: CAG
ccaacatggcccaataggaa

SEQ ID NO: 82717 - DNA, 20 bp, Artificial Sequence
  Description of Artificial Sequence: Synthetic oligonucleotide
  Target: LAMA2; (-) strand; PAM type: NRG; PAM sequence: AGG
aggagccaacatggcccaat

SEQ ID NO: 82718 - DNA, 20 bp, Artificial Sequence
  Description of Artificial Sequence: Synthetic oligonucleotide
  Target: LAMA2; (-) strand; PAM type: NRG; PAM sequence: TAG
gaggagccaacatggcccaa

SEQ ID NO: 82719 - DNA, 20 bp, Artificial Sequence
  Description of Artificial Sequence: Synthetic oligonucleotide
  Target: LAMA2; (-) strand; PAM type: NRG; PAM sequence: TGG
atcggggagaggagccaaca

SEQ ID NO: 82720 - DNA, 20 bp, Artificial Sequence
  Description of Artificial Sequence: Synthetic oligonucleotide
  Target: LAMA2; (-) strand; PAM type: NRG; PAM sequence: GAG
aaaaactgaatcggggagag

SEQ ID NO: 82721 - DNA, 20 bp, Artificial Sequence
  Description of Artificial Sequence: Synthetic oligonucleotide
  Target: LAMA2; (-) strand; PAM type: NRG; PAM sequence: AGG
taaaaaactgaatcggggag

SEQ ID NO: 82722 - DNA, 20 bp, Artificial Sequence
  Description of Artificial Sequence: Synthetic oligonucleotide
  Target: LAMA2; (-) strand; PAM type: NRG; PAM sequence: GAG
ctaaaaaactgaatcgggga

SEQ ID NO: 82723 - DNA, 20 bp, Artificial Sequence
  Description of Artificial Sequence: Synthetic oligonucleotide
  Target: LAMA2; (-) strand; PAM type: NRG; PAM sequence: GAG
cactaaaaaactgaatcggg

SEQ ID NO: 82724 - DNA, 20 bp, Artificial Sequence
  Description of Artificial Sequence: Synthetic oligonucleotide
  Target: LAMA2; (-) strand; PAM type: NRG; PAM sequence: GGG
ctcactaaaaaactgaatcg

SEQ ID NO: 82725 - DNA, 20 bp, Artificial Sequence
  Description of Artificial Sequence: Synthetic oligonucleotide
  Target: LAMA2; (-) strand; PAM type: NRG; PAM sequence: GGG
actcactaaaaaactgaatc

SEQ ID NO: 82726 - DNA, 20 bp, Artificial Sequence
  Description of Artificial Sequence: Synthetic oligonucleotide
  Target: LAMA2; (-) strand; PAM type: NRG; PAM sequence: CGG
aactcactaaaaaactgaat

SEQ ID NO: 82727 - DNA, 20 bp, Artificial Sequence
  Description of Artificial Sequence: Synthetic oligonucleotide
  Target: LAMA2; (-) strand; PAM type: NRG; PAM sequence: AGG
gaatattatttagatactaa

SEQ ID NO: 82728 - DNA, 20 bp, Artificial Sequence
  Description of Artificial Sequence: Synthetic oligonucleotide
  Target: LAMA2; (-) strand; PAM type: NRG; PAM sequence: AAG
agaatattatttagatacta

SEQ ID NO: 82729 - DNA, 20 bp, Artificial Sequence
  Description of Artificial Sequence: Synthetic oligonucleotide
  Target: LAMA2; (-) strand; PAM type: NRG; PAM sequence: TAG
gtactgataagaatattatt

SEQ ID NO: 82730 - DNA, 20 bp, Artificial Sequence
  Description of Artificial Sequence: Synthetic oligonucleotide
  Target: LAMA2; (-) strand; PAM type: NRG; PAM sequence: AAG
atggtgataaaagtactgat

SEQ ID NO: 82731 - DNA, 20 bp, Artificial Sequence
  Description of Artificial Sequence: Synthetic oligonucleotide
  Target: LAMA2; (-) strand; PAM type: NRG; PAM sequence: AAG
gcaatatgtaatggtgataa

SEQ ID NO: 82732 - DNA, 20 bp, Artificial Sequence
  Description of Artificial Sequence: Synthetic oligonucleotide
  Target: LAMA2; (-) strand; PAM type: NRG; PAM sequence: TGG
agtcaataggcaatatgtaa

SEQ ID NO: 82733 - DNA, 20 bp, Artificial Sequence
  Description of Artificial Sequence: Synthetic oligonucleotide
  Target: LAMA2; (-) strand; PAM type: NRG; PAM sequence: AGG
tttcaagacggagagtcaat

SEQ ID NO: 82734 - DNA, 20 bp, Artificial Sequence
  Description of Artificial Sequence: Synthetic oligonucleotide
  Target: LAMA2; (-) strand; PAM type: NRG; PAM sequence: TAG
ctttcaagacggagagtcaa

SEQ ID NO: 82735 - DNA, 20 bp, Artificial Sequence
  Description of Artificial Sequence: Synthetic oligonucleotide
  Target: LAMA2; (-) strand; PAM type: NRG; PAM sequence: GAG
tcttcacctttcaagacgga

SEQ ID NO: 82736 - DNA, 20 bp, Artificial Sequence
  Description of Artificial Sequence: Synthetic oligonucleotide
  Target: LAMA2; (-) strand; PAM type: NRG; PAM sequence: GAG
tttcttcacctttcaagacg

SEQ ID NO: 82737 - DNA, 20 bp, Artificial Sequence
  Description of Artificial Sequence: Synthetic oligonucleotide
  Target: LAMA2; (-) strand; PAM type: NRG; PAM sequence: CGG
catttcttcacctttcaaga

SEQ ID NO: 82738 - DNA, 20 bp, Artificial Sequence
  Description of Artificial Sequence: Synthetic oligonucleotide
  Target: LAMA2; (-) strand; PAM type: NRG; PAM sequence: AAG
gatacatttcttcacctttc

SEQ ID NO: 82739 - DNA, 20 bp, Artificial Sequence
  Description of Artificial Sequence: Synthetic oligonucleotide
  Target: LAMA2; (-) strand; PAM type: NRG; PAM sequence: AGG
gatggtggaatgaaggaggg

SEQ ID NO: 82740 - DNA, 20 bp, Artificial Sequence
  Description of Artificial Sequence: Synthetic oligonucleotide
  Target: LAMA2; (-) strand; PAM type: NRG; PAM sequence: GAG
ggatggtggaatgaaggagg

SEQ ID NO: 82741 - DNA, 20 bp, Artificial Sequence
  Description of Artificial Sequence: Synthetic oligonucleotide
  Target: LAMA2; (-) strand; PAM type: NRG; PAM sequence: GGG
atggatggtggaatgaagga

SEQ ID NO: 82742 - DNA, 20 bp, Artificial Sequence
  Description of Artificial Sequence: Synthetic oligonucleotide
  Target: LAMA2; (-) strand; PAM type: NRG; PAM sequence: AGG
tatggatggtggaatgaagg

SEQ ID NO: 82743 - DNA, 20 bp, Artificial Sequence
  Description of Artificial Sequence: Synthetic oligonucleotide
  Target: LAMA2; (-) strand; PAM type: NRG; PAM sequence: GAG
gtatggatggtggaatgaag

SEQ ID NO: 82744 - DNA, 20 bp, Artificial Sequence
  Description of Artificial Sequence: Synthetic oligonucleotide
  Target: LAMA2; (-) strand; PAM type: NRG; PAM sequence: AGG
atgtatggatggtggaatga

SEQ ID NO: 82745 - DNA, 20 bp, Artificial Sequence
  Description of Artificial Sequence: Synthetic oligonucleotide
  Target: LAMA2; (-) strand; PAM type: NRG; PAM sequence: AAG
aatgtatggatggtggaatg

SEQ ID NO: 82746 - DNA, 20 bp, Artificial Sequence
  Description of Artificial Sequence: Synthetic oligonucleotide
  Target: LAMA2; (-) strand; PAM type: NRG; PAM sequence: TGG
taataaaaatgtatggatgg

SEQ ID NO: 82747 - DNA, 20 bp, Artificial Sequence
  Description of Artificial Sequence: Synthetic oligonucleotide
  Target: LAMA2; (-) strand; PAM type: NRG; PAM sequence: TGG
acataataaaaatgtatgga

SEQ ID NO: 82748 - DNA, 20 bp, Artificial Sequence
  Description of Artificial Sequence: Synthetic oligonucleotide
  Target: LAMA2; (-) strand; PAM type: NRG; PAM sequence: TGG
aaacacataataaaaatgta

SEQ ID NO: 82749 - DNA, 20 bp, Artificial Sequence
  Description of Artificial Sequence: Synthetic oligonucleotide
  Target: LAMA2; (-) strand; PAM type: NRG; PAM sequence: AAG
acatgataaagatatcgtag

SEQ ID NO: 82750 - DNA, 20 bp, Artificial Sequence
  Description of Artificial Sequence: Synthetic oligonucleotide
  Target: LAMA2; (-) strand; PAM type: NRG; PAM sequence: TAG
tgaacatgataaagatatcg

SEQ ID NO: 82751 - DNA, 20 bp, Artificial Sequence
  Description of Artificial Sequence: Synthetic oligonucleotide
  Target: LAMA2; (-) strand; PAM type: NRG; PAM sequence: AAG
aagctctcttgaacatgata

SEQ ID NO: 82752 - DNA, 20 bp, Artificial Sequence
  Description of Artificial Sequence: Synthetic oligonucleotide
  Target: LAMA2; (-) strand; PAM type: NRG; PAM sequence: AAG
cattgatgaaatagacatgt

SEQ ID NO: 82753 - DNA, 20 bp, Artificial Sequence
  Description of Artificial Sequence: Synthetic oligonucleotide
  Target: LAMA2; (-) strand; PAM type: NRG; PAM sequence: TAG
aaatgtagtcattgatgaaa

SEQ ID NO: 82754 - DNA, 20 bp, Artificial Sequence
  Description of Artificial Sequence: Synthetic oligonucleotide
  Target: LAMA2; (-) strand; PAM type: NRG; PAM sequence: TAG
ctcaagagaaagtctaaatg

SEQ ID NO: 82755 - DNA, 20 bp, Artificial Sequence
  Description of Artificial Sequence: Synthetic oligonucleotide
  Target: LAMA2; (-) strand; PAM type: NRG; PAM sequence: AAG
tatagtaggacctcaagaga

SEQ ID NO: 82756 - DNA, 20 bp, Artificial Sequence
  Description of Artificial Sequence: Synthetic oligonucleotide
  Target: LAMA2; (-) strand; PAM type: NRG; PAM sequence: GAG
cttatatagtaggacctcaa

SEQ ID NO: 82757 - DNA, 20 bp, Artificial Sequence
  Description of Artificial Sequence: Synthetic oligonucleotide
  Target: LAMA2; (-) strand; PAM type: NRG; PAM sequence: AAG
atcttatatagtaggacctc

SEQ ID NO: 82758 - DNA, 20 bp, Artificial Sequence
  Description of Artificial Sequence: Synthetic oligonucleotide
  Target: LAMA2; (-) strand; PAM type: NRG; PAM sequence: AGG
tttatcacatcttatatagt

SEQ ID NO: 82759 - DNA, 20 bp, Artificial Sequence
  Description of Artificial Sequence: Synthetic oligonucleotide
  Target: LAMA2; (-) strand; PAM type: NRG; PAM sequence: TAG
ctttatcacatcttatatag

SEQ ID NO: 82760 - DNA, 20 bp, Artificial Sequence
  Description of Artificial Sequence: Synthetic oligonucleotide
  Target: LAMA2; (-) strand; PAM type: NRG; PAM sequence: TAG
agtctttatcacatcttata

SEQ ID NO: 82761 - DNA, 20 bp, Artificial Sequence
  Description of Artificial Sequence: Synthetic oligonucleotide
  Target: LAMA2; (-) strand; PAM type: NRG; PAM sequence: TAG
ggtgaagaatgtagggatga

SEQ ID NO: 82762 - DNA, 20 bp, Artificial Sequence
  Description of Artificial Sequence: Synthetic oligonucleotide
  Target: LAMA2; (-) strand; PAM type: NRG; PAM sequence: GGG
gacaagtggtgaagaatgta

SEQ ID NO: 82763 - DNA, 20 bp, Artificial Sequence
  Description of Artificial Sequence: Synthetic oligonucleotide
  Target: LAMA2; (-) strand; PAM type: NRG; PAM sequence: AGG
tgacaagtggtgaagaatgt

SEQ ID NO: 82764 - DNA, 20 bp, Artificial Sequence
  Description of Artificial Sequence: Synthetic oligonucleotide
  Target: LAMA2; (-) strand; PAM type: NRG; PAM sequence: TAG
ctgacaagtggtgaagaatg

SEQ ID NO: 82765 - DNA, 20 bp, Artificial Sequence
  Description of Artificial Sequence: Synthetic oligonucleotide
  Target: LAMA2; (-) strand; PAM type: NRG; PAM sequence: AAG
acagacactgacaagtggtg

SEQ ID NO: 82766 - DNA, 20 bp, Artificial Sequence
  Description of Artificial Sequence: Synthetic oligonucleotide
  Target: LAMA2; (-) strand; PAM type: NRG; PAM sequence: TGG
aattgacagacactgacaag

SEQ ID NO: 82767 - DNA, 20 bp, Artificial Sequence
  Description of Artificial Sequence: Synthetic oligonucleotide
  Target: LAMA2; (-) strand; PAM type: NRG; PAM sequence: AAG
tgtaattgacagacactgac

SEQ ID NO: 82768 - DNA, 20 bp, Artificial Sequence
  Description of Artificial Sequence: Synthetic oligonucleotide
  Target: LAMA2; (-) strand; PAM type: NRG; PAM sequence: CAG
tttcaaagatatgtaattga

SEQ ID NO: 82769 - DNA, 20 bp, Artificial Sequence
  Description of Artificial Sequence: Synthetic oligonucleotide
  Target: LAMA2; (-) strand; PAM type: NRG; PAM sequence: AAG
aaatctttgaaaagatttca

SEQ ID NO: 82770 - DNA, 20 bp, Artificial Sequence
  Description of Artificial Sequence: Synthetic oligonucleotide
  Target: LAMA2; (-) strand; PAM type: NRG; PAM sequence: AAG
taactgtgaaaatctttgaa

SEQ ID NO: 82771 - DNA, 20 bp, Artificial Sequence
  Description of Artificial Sequence: Synthetic oligonucleotide
  Target: LAMA2; (-) strand; PAM type: NRG; PAM sequence: GAG
aagcattaattattggtcca

SEQ ID NO: 82772 - DNA, 20 bp, Artificial Sequence
  Description of Artificial Sequence: Synthetic oligonucleotide
  Target: LAMA2; (-) strand; PAM type: NRG; PAM sequence: CAG
ataagcattaattattggtc

SEQ ID NO: 82773 - DNA, 20 bp, Artificial Sequence
  Description of Artificial Sequence: Synthetic oligonucleotide
  Target: LAMA2; (-) strand; PAM type: NRG; PAM sequence: TGG
gaattataagcattaattat

SEQ ID NO: 82774 - DNA, 20 bp, Artificial Sequence
  Description of Artificial Sequence: Synthetic oligonucleotide
  Target: LAMA2; (-) strand; PAM type: NRG; PAM sequence: AAG
tatttctatttttgaattat

SEQ ID NO: 82775 - DNA, 20 bp, Artificial Sequence
  Description of Artificial Sequence: Synthetic oligonucleotide
  Target: LAMA2; (-) strand; PAM type: NRG; PAM sequence: CAG
aaataatatgtatctaatta

SEQ ID NO: 82776 - DNA, 20 bp, Artificial Sequence
  Description of Artificial Sequence: Synthetic oligonucleotide
  Target: LAMA2; (-) strand; PAM type: NRG; PAM sequence: GAG
tgtgtccaattttgcaattc

SEQ ID NO: 82777 - DNA, 20 bp, Artificial Sequence
  Description of Artificial Sequence: Synthetic oligonucleotide
  Target: LAMA2; (-) strand; PAM type: NRG; PAM sequence: AAG
aagttatcagagcaagcatg

SEQ ID NO: 82778 - DNA, 20 bp, Artificial Sequence
  Description of Artificial Sequence: Synthetic oligonucleotide
  Target: LAMA2; (-) strand; PAM type: NRG; PAM sequence: AAG
cctaaataagttatcagagc

SEQ ID NO: 82779 - DNA, 20 bp, Artificial Sequence
  Description of Artificial Sequence: Synthetic oligonucleotide
  Target: LAMA2; (-) strand; PAM type: NRG; PAM sequence: GAG
ctttcctaaataagttatca

SEQ ID NO: 82780 - DNA, 20 bp, Artificial Sequence
  Description of Artificial Sequence: Synthetic oligonucleotide
  Target: LAMA2; (-) strand; PAM type: NRG; PAM sequence: CAG
ctctttcctaaataagttat

SEQ ID NO: 82781 - DNA, 20 bp, Artificial Sequence
  Description of Artificial Sequence: Synthetic oligonucleotide
  Target: LAMA2; (-) strand; PAM type: NRG; PAM sequence: AAG
tcttacactctttcctaaat

SEQ ID NO: 82782 - DNA, 20 bp, Artificial Sequence
  Description of Artificial Sequence: Synthetic oligonucleotide
  Target: LAMA2; (-) strand; PAM type: NRG; PAM sequence: GAG
gatgaagaagtgcaaaccat

SEQ ID NO: 82783 - DNA, 20 bp, Artificial Sequence
  Description of Artificial Sequence: Synthetic oligonucleotide
  Target: LAMA2; (-) strand; PAM type: NRG; PAM sequence: AAG
ggttatgtaatctgatgaag

SEQ ID NO: 82784 - DNA, 20 bp, Artificial Sequence
  Description of Artificial Sequence: Synthetic oligonucleotide
  Target: LAMA2; (-) strand; PAM type: NRG; PAM sequence: AAG
tctggttatgtaatctgatg

SEQ ID NO: 82785 - DNA, 20 bp, Artificial Sequence
  Description of Artificial Sequence: Synthetic oligonucleotide
  Target: LAMA2; (-) strand; PAM type: NRG; PAM sequence: TGG
aaatatccttttctactatc

SEQ ID NO: 82786 - DNA, 20 bp, Artificial Sequence
  Description of Artificial Sequence: Synthetic oligonucleotide
  Target: LAMA2; (-) strand; PAM type: NRG; PAM sequence: CAG
cctcgtaatcaaatgaatgc

SEQ ID NO: 82787 - DNA, 20 bp, Artificial Sequence
  Description of Artificial Sequence: Synthetic oligonucleotide
  Target: LAMA2; (-) strand; PAM type: NRG; PAM sequence: AAG
aactaaaagaaaaatcagag

SEQ ID NO: 82788 - DNA, 20 bp, Artificial Sequence
  Description of Artificial Sequence: Synthetic oligonucleotide
  Target: LAMA2; (-) strand; PAM type: NRG; PAM sequence: GAG
gaaaactaaaagaaaaatca

SEQ ID NO: 82789 - DNA, 20 bp, Artificial Sequence
  Description of Artificial Sequence: Synthetic oligonucleotide
  Target: LAMA2; (-) strand; PAM type: NRG; PAM sequence: CAG
aagaaaactaaaagaaaaat

SEQ ID NO: 82790 - DNA, 20 bp, Artificial Sequence
  Description of Artificial Sequence: Synthetic oligonucleotide
  Target: LAMA2; (-) strand; PAM type: NRG; PAM sequence: AAG
aagaaaatgaagaaaactaa

SEQ ID NO: 82791 - DNA, 20 bp, Artificial Sequence
  Description of Artificial Sequence: Synthetic oligonucleotide
  Target: LAMA2; (-) strand; PAM type: NRG; PAM sequence: AAG
ccttctactaaaagaaaatg

SEQ ID NO: 82792 - DNA, 20 bp, Artificial Sequence
  Description of Artificial Sequence: Synthetic oligonucleotide
  Target: LAMA2; (-) strand; PAM type: NRG; PAM sequence: AAG
agaaaacttccttctactaa

SEQ ID NO: 82793 - DNA, 20 bp, Artificial Sequence
  Description of Artificial Sequence: Synthetic oligonucleotide
  Target: LAMA2; (-) strand; PAM type: NRG; PAM sequence: GAG
gctcttacaaatctacaagg

SEQ ID NO: 82794 - DNA, 20 bp, Artificial Sequence
  Description of Artificial Sequence: Synthetic oligonucleotide
  Target: LAMA2; (-) strand; PAM type: NRG; PAM sequence: GGG
gtgctcttacaaatctacaa

SEQ ID NO: 82795 - DNA, 20 bp, Artificial Sequence
  Description of Artificial Sequence: Synthetic oligonucleotide
  Target: LAMA2; (-) strand; PAM type: NRG; PAM sequence: AGG
agtgctcttacaaatctaca

SEQ ID NO: 82796 - DNA, 20 bp, Artificial Sequence
  Description of Artificial Sequence: Synthetic oligonucleotide
  Target: LAMA2; (-) strand; PAM type: NRG; PAM sequence: AAG
aagtgctcttacaaatctac

SEQ ID NO: 82797 - DNA, 20 bp, Artificial Sequence
  Description of Artificial Sequence: Synthetic oligonucleotide
  Target: LAMA2; (-) strand; PAM type: NRG; PAM sequence: AAG
atcactgtttttaatattta

SEQ ID NO: 82798 - DNA, 20 bp, Artificial Sequence
  Description of Artificial Sequence: Synthetic oligonucleotide
  Target: LAMA2; (-) strand; PAM type: NRG; PAM sequence: AAG
atcaacagtagtgagacaca

SEQ ID NO: 82799 - DNA, 20 bp, Artificial Sequence
  Description of Artificial Sequence: Synthetic oligonucleotide
  Target: LAMA2; (-) strand; PAM type: NRG; PAM sequence: GAG
tagaaattatcaacagtagt

SEQ ID NO: 82800 - DNA, 20 bp, Artificial Sequence
  Description of Artificial Sequence: Synthetic oligonucleotide
  Target: LAMA2; (-) strand; PAM type: NRG; PAM sequence: TAG
gcactagaaattatcaacag

SEQ ID NO: 82801 - DNA, 20 bp, Artificial Sequence
  Description of Artificial Sequence: Synthetic oligonucleotide
  Target: LAMA2; (-) strand; PAM type: NRG; PAM sequence: CAG
tgtgcactagaaattatcaa

SEQ ID NO: 82802 - DNA, 20 bp, Artificial Sequence
  Description of Artificial Sequence: Synthetic oligonucleotide
  Target: LAMA2; (-) strand; PAM type: NRG; PAM sequence: TAG
aatttttgaagtttgtgcac

SEQ ID NO: 82803 - DNA, 20 bp, Artificial Sequence
  Description of Artificial Sequence: Synthetic oligonucleotide
  Target: LAMA2; (-) strand; PAM type: NRG; PAM sequence: AAG
ctgattacataaaatttttg

SEQ ID NO: 82804 - DNA, 20 bp, Artificial Sequence
  Description of Artificial Sequence: Synthetic oligonucleotide
  Target: LAMA2; (-) strand; PAM type: NRG; PAM sequence: CAG
gaattttacctgaactttga

SEQ ID NO: 82805 - DNA, 20 bp, Artificial Sequence
  Description of Artificial Sequence: Synthetic oligonucleotide
  Target: LAMA2; (-) strand; PAM type: NRG; PAM sequence: AAG
tggtatcattattataagta

SEQ ID NO: 82806 - DNA, 20 bp, Artificial Sequence
  Description of Artificial Sequence: Synthetic oligonucleotide
  Target: LAMA2; (-) strand; PAM type: NRG; PAM sequence: AAG
tgggttggtatcattattat

SEQ ID NO: 82807 - DNA, 20 bp, Artificial Sequence
  Description of Artificial Sequence: Synthetic oligonucleotide
  Target: LAMA2; (-) strand; PAM type: NRG; PAM sequence: TGG
aatatataataatcatgggt

SEQ ID NO: 82808 - DNA, 20 bp, Artificial Sequence
  Description of Artificial Sequence: Synthetic oligonucleotide
  Target: LAMA2; (-) strand; PAM type: NRG; PAM sequence: GGG
tcaaaatatataataatcat

SEQ ID NO: 82809 - DNA, 20 bp, Artificial Sequence
  Description of Artificial Sequence: Synthetic oligonucleotide
  Target: LAMA2; (-) strand; PAM type: NRG; PAM sequence: TGG
atcaaaatatataataatca

SEQ ID NO: 82810 - DNA, 20 bp, Artificial Sequence
  Description of Artificial Sequence: Synthetic oligonucleotide
  Target: LAMA2; (-) strand; PAM type: NRG; PAM sequence: AAG
tctaggattataaagcatgt

SEQ ID NO: 82811 - DNA, 20 bp, Artificial Sequence
  Description of Artificial Sequence: Synthetic oligonucleotide
  Target: LAMA2; (-) strand; PAM type: NRG; PAM sequence: AAG
atgagagttctaggattata

SEQ ID NO: 82812 - DNA, 20 bp, Artificial Sequence
  Description of Artificial Sequence: Synthetic oligonucleotide
  Target: LAMA2; (-) strand; PAM type: NRG; PAM sequence: AGG
ttgggatagatgagagttct

SEQ ID NO: 82813 - DNA, 20 bp, Artificial Sequence
  Description of Artificial Sequence: Synthetic oligonucleotide
  Target: LAMA2; (-) strand; PAM type: NRG; PAM sequence: TAG
cttgggatagatgagagttc

SEQ ID NO: 82814 - DNA, 20 bp, Artificial Sequence
  Description of Artificial Sequence: Synthetic oligonucleotide
  Target: LAMA2; (-) strand; PAM type: NRG; PAM sequence: GAG
tctaatcttgggatagatga

SEQ ID NO: 82815 - DNA, 20 bp, Artificial Sequence
  Description of Artificial Sequence: Synthetic oligonucleotide
  Target: LAMA2; (-) strand; PAM type: NRG; PAM sequence: GAG
tttctaatcttgggatagat

SEQ ID NO: 82816 - DNA, 20 bp, Artificial Sequence
  Description of Artificial Sequence: Synthetic oligonucleotide
  Target: LAMA2; (-) strand; PAM type: NRG; PAM sequence: TAG
acatttttctaatcttggga

SEQ ID NO: 82817 - DNA, 20 bp, Artificial Sequence
  Description of Artificial Sequence: Synthetic oligonucleotide
  Target: LAMA2; (-) strand; PAM type: NRG; PAM sequence: GGG
aaatacatttttctaatctt

SEQ ID NO: 82818 - DNA, 20 bp, Artificial Sequence
  Description of Artificial Sequence: Synthetic oligonucleotide
  Target: LAMA2; (-) strand; PAM type: NRG; PAM sequence: TGG
caaatacatttttctaatct

SEQ ID NO: 82819 - DNA, 20 bp, Artificial Sequence
  Description of Artificial Sequence: Synthetic oligonucleotide
  Target: LAMA2; (-) strand; PAM type: NRG; PAM sequence: AAG
aaaatgaaatcatacaaatg

SEQ ID NO: 82820 - DNA, 20 bp, Artificial Sequence
  Description of Artificial Sequence: Synthetic oligonucleotide
  Target: LAMA2; (-) strand; PAM type: NRG; PAM sequence: AAG
tctagatggaataaaaaatt

SEQ ID NO: 82821 - DNA, 20 bp, Artificial Sequence
  Description of Artificial Sequence: Synthetic oligonucleotide
  Target: LAMA2; (-) strand; PAM type: NRG; PAM sequence: TGG
ataacaaaataaattctaga

SEQ ID NO: 82822 - DNA, 20 bp, Artificial Sequence
  Description of Artificial Sequence: Synthetic oligonucleotide
  Target: LAMA2; (-) strand; PAM type: NRG; PAM sequence: TAG
aaatataacaaaataaattc

SEQ ID NO: 82823 - DNA, 20 bp, Artificial Sequence
  Description of Artificial Sequence: Synthetic oligonucleotide
  Target: LAMA2; (-) strand; PAM type: NRG; PAM sequence: TAG
gagtattggaaaacaaaatg

SEQ ID NO: 82824 - DNA, 20 bp, Artificial Sequence
  Description of Artificial Sequence: Synthetic oligonucleotide
  Target: LAMA2; (-) strand; PAM type: NRG; PAM sequence: TGG
agatgagtaaaaaagagtat

SEQ ID NO: 82825 - DNA, 20 bp, Artificial Sequence
  Description of Artificial Sequence: Synthetic oligonucleotide
  Target: LAMA2; (-) strand; PAM type: NRG; PAM sequence: GAG
aaatgtagatgagtaaaaaa

SEQ ID NO: 82826 - DNA, 20 bp, Artificial Sequence
  Description of Artificial Sequence: Synthetic oligonucleotide
  Target: LAMA2; (-) strand; PAM type: NRG; PAM sequence: AAG
ttaaatgtagatgagtaaaa

SEQ ID NO: 82827 - DNA, 20 bp, Artificial Sequence
  Description of Artificial Sequence: Synthetic oligonucleotide
  Target: LAMA2; (-) strand; PAM type: NRG; PAM sequence: GAG
aagtaatattaaatgtagat

SEQ ID NO: 82828 - DNA, 20 bp, Artificial Sequence
  Description of Artificial Sequence: Synthetic oligonucleotide
  Target: LAMA2; (-) strand; PAM type: NRG; PAM sequence: TAG
gctgaaagtaatattaaatg

SEQ ID NO: 82829 - DNA, 20 bp, Artificial Sequence
  Description of Artificial Sequence: Synthetic oligonucleotide
  Target: LAMA2; (-) strand; PAM type: NRG; PAM sequence: AAG
taatatgtctaaagagctga

SEQ ID NO: 82830 - DNA, 20 bp, Artificial Sequence
  Description of Artificial Sequence: Synthetic oligonucleotide
  Target: LAMA2; (-) strand; PAM type: NRG; PAM sequence: GAG
atatatttaatatgtctaaa

SEQ ID NO: 82831 - DNA, 20 bp, Artificial Sequence
  Description of Artificial Sequence: Synthetic oligonucleotide
  Target: LAMA2; (-) strand; PAM type: NRG; PAM sequence: AAG
aaatatatttaatatgtcta

SEQ ID NO: 82832 - DNA, 20 bp, Artificial Sequence
  Description of Artificial Sequence: Synthetic oligonucleotide
  Target: LAMA2; (-) strand; PAM type: NRG; PAM sequence: CAG
caataacagagtgcttctaa

SEQ ID NO: 82833 - DNA, 20 bp, Artificial Sequence
  Description of Artificial Sequence: Synthetic oligonucleotide
  Target: LAMA2; (-) strand; PAM type: NRG; PAM sequence: GAG
cagactcagactcaataaca

SEQ ID NO: 82834 - DNA, 20 bp, Artificial Sequence
  Description of Artificial Sequence: Synthetic oligonucleotide
  Target: LAMA2; (-) strand; PAM type: NRG; PAM sequence: CAG
tgcagactcagactcaataa

SEQ ID NO: 82835 - DNA, 20 bp, Artificial Sequence
  Description of Artificial Sequence: Synthetic oligonucleotide
  Target: LAMA2; (-) strand; PAM type: NRG; PAM sequence: CAG
gagaaataaaaatgcagact

SEQ ID NO: 82836 - DNA, 20 bp, Artificial Sequence
  Description of Artificial Sequence: Synthetic oligonucleotide
  Target: LAMA2; (-) strand; PAM type: NRG; PAM sequence: CAG
ttagaagagaaataaaaatg

SEQ ID NO: 82837 - DNA, 20 bp, Artificial Sequence
  Description of Artificial Sequence: Synthetic oligonucleotide
  Target: LAMA2; (-) strand; PAM type: NRG; PAM sequence: GAG
catatgaataagagttagaa

SEQ ID NO: 82838 - DNA, 20 bp, Artificial Sequence
  Description of Artificial Sequence: Synthetic oligonucleotide
  Target: LAMA2; (-) strand; PAM type: NRG; PAM sequence: AAG
tccatatgaataagagttag

SEQ ID NO: 82839 - DNA, 20 bp, Artificial Sequence
  Description of Artificial Sequence: Synthetic oligonucleotide
  Target: LAMA2; (-) strand; PAM type: NRG; PAM sequence: TAG
aagtccatatgaataagagt

SEQ ID NO: 82840 - DNA, 20 bp, Artificial Sequence
  Description of Artificial Sequence: Synthetic oligonucleotide
  Target: LAMA2; (-) strand; PAM type: NRG; PAM sequence: GAG
aatgaagtccatatgaataa

SEQ ID NO: 82841 - DNA, 20 bp, Artificial Sequence
  Description of Artificial Sequence: Synthetic oligonucleotide
  Target: LAMA2; (-) strand; PAM type: NRG; PAM sequence: AAG
aaaatgaagtccatatgaat

SEQ ID NO: 82842 - DNA, 20 bp, Artificial Sequence
  Description of Artificial Sequence: Synthetic oligonucleotide
  Target: LAMA2; (-) strand; PAM type: NRG; PAM sequence: AAG
ttacgaaacataagaaaatg

SEQ ID NO: 82843 - DNA, 20 bp, Artificial Sequence
  Description of Artificial Sequence: Synthetic oligonucleotide
  Target: LAMA2; (-) strand; PAM type: NRG; PAM sequence: AAG
cacacacacttacgaaacat

SEQ ID NO: 82844 - DNA, 20 bp, Artificial Sequence
  Description of Artificial Sequence: Synthetic oligonucleotide
  Target: LAMA2; (-) strand; PAM type: NRG; PAM sequence: AAG
ggcttctgaaagaataaact

SEQ ID NO: 82845 - DNA, 20 bp, Artificial Sequence
  Description of Artificial Sequence: Synthetic oligonucleotide
  Target: LAMA2; (-) strand; PAM type: NRG; PAM sequence: AAG
tgtaaattcaaggcttctga

SEQ ID NO: 82846 - DNA, 20 bp, Artificial Sequence
  Description of Artificial Sequence: Synthetic oligonucleotide
  Target: LAMA2; (-) strand; PAM type: NRG; PAM sequence: AGG
cataacttcatgtaaattca

SEQ ID NO: 82847 - DNA, 20 bp, Artificial Sequence
  Description of Artificial Sequence: Synthetic oligonucleotide
  Target: LAMA2; (-) strand; PAM type: NRG; PAM sequence: AAG
acataacttcatgtaaattc

SEQ ID NO: 82848 - DNA, 20 bp, Artificial Sequence
  Description of Artificial Sequence: Synthetic oligonucleotide
  Target: LAMA2; (-) strand; PAM type: NRG; PAM sequence: AGG
ttctaggtcctatataaggt

SEQ ID NO: 82849 - DNA, 20 bp, Artificial Sequence
  Description of Artificial Sequence: Synthetic oligonucleotide
  Target: LAMA2; (-) strand; PAM type: NRG; PAM sequence: TAG
attctaggtcctatataagg

SEQ ID NO: 82850 - DNA, 20 bp, Artificial Sequence
  Description of Artificial Sequence: Synthetic oligonucleotide
  Target: LAMA2; (-) strand; PAM type: NRG; PAM sequence: AGG
aaaattctaggtcctatata

SEQ ID NO: 82851 - DNA, 20 bp, Artificial Sequence
  Description of Artificial Sequence: Synthetic oligonucleotide
  Target: LAMA2; (-) strand; PAM type: NRG; PAM sequence: AAG
aaaaattctaggtcctatat

SEQ ID NO: 82852 - DNA, 20 bp, Artificial Sequence
  Description of Artificial Sequence: Synthetic oligonucleotide
  Target: LAMA2; (-) strand; PAM type: NRG; PAM sequence: AGG
gaagaacaacaaaaaattct

SEQ ID NO: 82853 - DNA, 20 bp, Artificial Sequence
  Description of Artificial Sequence: Synthetic oligonucleotide
  Target: LAMA2; (-) strand; PAM type: NRG; PAM sequence: TAG
agaagaacaacaaaaaattc

SEQ ID NO: 82854 - DNA, 20 bp, Artificial Sequence
  Description of Artificial Sequence: Synthetic oligonucleotide
  Target: LAMA2; (-) strand; PAM type: NRG; PAM sequence: AAG
cagggagcatggttttacag

SEQ ID NO: 82855 - DNA, 20 bp, Artificial Sequence
  Description of Artificial Sequence: Synthetic oligonucleotide
  Target: LAMA2; (-) strand; PAM type: NRG; PAM sequence: CAG
gttcagggagcatggtttta

SEQ ID NO: 82856 - DNA, 20 bp, Artificial Sequence
  Description of Artificial Sequence: Synthetic oligonucleotide
  Target: LAMA2; (-) strand; PAM type: NRG; PAM sequence: TGG
agactacagttcagggagca

SEQ ID NO: 82857 - DNA, 20 bp, Artificial Sequence
  Description of Artificial Sequence: Synthetic oligonucleotide
  Target: LAMA2; (-) strand; PAM type: NRG; PAM sequence: GAG
tgactagactacagttcagg

SEQ ID NO: 82858 - DNA, 20 bp, Artificial Sequence
  Description of Artificial Sequence: Synthetic oligonucleotide
  Target: LAMA2; (-) strand; PAM type: NRG; PAM sequence: GGG
gatgactagactacagttca

SEQ ID NO: 82859 - DNA, 20 bp, Artificial Sequence
  Description of Artificial Sequence: Synthetic oligonucleotide
  Target: LAMA2; (-) strand; PAM type: NRG; PAM sequence: AGG
tgatgactagactacagttc

SEQ ID NO: 82860 - DNA, 20 bp, Artificial Sequence
  Description of Artificial Sequence: Synthetic oligonucleotide
  Target: LAMA2; (-) strand; PAM type: NRG; PAM sequence: CAG
ctgatgactagactacagtt

SEQ ID NO: 82861 - DNA, 20 bp, Artificial Sequence
  Description of Artificial Sequence: Synthetic oligonucleotide
  Target: LAMA2; (-) strand; PAM type: NRG; PAM sequence: CAG
aaattctgatgactagacta

SEQ ID NO: 82862 - DNA, 20 bp, Artificial Sequence
  Description of Artificial Sequence: Synthetic oligonucleotide
  Target: LAMA2; (-) strand; PAM type: NRG; PAM sequence: TAG
gactggcaaattctgatgac

SEQ ID NO: 82863 - DNA, 20 bp, Artificial Sequence
  Description of Artificial Sequence: Synthetic oligonucleotide
  Target: LAMA2; (-) strand; PAM type: NRG; PAM sequence: TGG
atgtctttcctggagttgac

SEQ ID NO: 82864 - DNA, 20 bp, Artificial Sequence
  Description of Artificial Sequence: Synthetic oligonucleotide
  Target: LAMA2; (-) strand; PAM type: NRG; PAM sequence: GAG
ttaaaacaatgtctttcctg

SEQ ID NO: 82865 - DNA, 20 bp, Artificial Sequence
  Description of Artificial Sequence: Synthetic oligonucleotide
  Target: LAMA2; (-) strand; PAM type: NRG; PAM sequence: TGG
ctttaaaacaatgtctttcc

SEQ ID NO: 82866 - DNA, 20 bp, Artificial Sequence
  Description of Artificial Sequence: Synthetic oligonucleotide
  Target: LAMA2; (-) strand; PAM type: NRG; PAM sequence: AAG
ctacaaaattgacttctaga

SEQ ID NO: 82867 - DNA, 20 bp, Artificial Sequence
  Description of Artificial Sequence: Synthetic oligonucleotide
  Target: LAMA2; (-) strand; PAM type: NRG; PAM sequence: TAG
gaaactacaaaattgacttc

SEQ ID NO: 82868 - DNA, 20 bp, Artificial Sequence
  Description of Artificial Sequence: Synthetic oligonucleotide
  Target: LAMA2; (-) strand; PAM type: NRG; PAM sequence: GAG
taaagaaaccccttggagat

SEQ ID NO: 82869 - DNA, 20 bp, Artificial Sequence
  Description of Artificial Sequence: Synthetic oligonucleotide
  Target: LAMA2; (-) strand; PAM type: NRG; PAM sequence: GAG
agaaataaagaaaccccttg

SEQ ID NO: 82870 - DNA, 20 bp, Artificial Sequence
  Description of Artificial Sequence: Synthetic oligonucleotide
  Target: LAMA2; (-) strand; PAM type: NRG; PAM sequence: TGG
caagaaataaagaaacccct

SEQ ID NO: 82871 - DNA, 20 bp, Artificial Sequence
  Description of Artificial Sequence: Synthetic oligonucleotide
  Target: LAMA2; (-) strand; PAM type: NRG; PAM sequence: AAG
cgttgcgctggcaagaaata

SEQ ID NO: 82872 - DNA, 20 bp, Artificial Sequence
  Description of Artificial Sequence: Synthetic oligonucleotide
  Target: LAMA2; (-) strand; PAM type: NRG; PAM sequence: AAG
aacagaatcgttgcgctggc

SEQ ID NO: 82873 - DNA, 20 bp, Artificial Sequence
  Description of Artificial Sequence: Synthetic oligonucleotide
  Target: LAMA2; (-) strand; PAM type: NRG; PAM sequence: TGG
agataacagaatcgttgcgc

SEQ ID NO: 82874 - DNA, 20 bp, Artificial Sequence
  Description of Artificial Sequence: Synthetic oligonucleotide
  Target: LAMA2; (-) strand; PAM type: NRG; PAM sequence: CAG
gaaagacagatggcagataa

SEQ ID NO: 82875 - DNA, 20 bp, Artificial Sequence
  Description of Artificial Sequence: Synthetic oligonucleotide
  Target: LAMA2; (-) strand; PAM type: NRG; PAM sequence: CAG
atagatcgaaagacagatgg

SEQ ID NO: 82876 - DNA, 20 bp, Artificial Sequence
  Description of Artificial Sequence: Synthetic oligonucleotide
  Target: LAMA2; (-) strand; PAM type: NRG; PAM sequence: TGG
tagatagatcgaaagacaga

SEQ ID NO: 82877 - DNA, 20 bp, Artificial Sequence
  Description of Artificial Sequence: Synthetic oligonucleotide
  Target: LAMA2; (-) strand; PAM type: NRG; PAM sequence: CAG
taggtagatagatcgaaaga

SEQ ID NO: 82878 - DNA, 20 bp, Artificial Sequence
  Description of Artificial Sequence: Synthetic oligonucleotide
  Target: LAMA2; (-) strand; PAM type: NRG; PAM sequence: AAG
taggtaggtagatagatcga

SEQ ID NO: 82879 - DNA, 20 bp, Artificial Sequence
  Description of Artificial Sequence: Synthetic oligonucleotide
  Target: LAMA2; (-) strand; PAM type: NRG; PAM sequence: TAG
taggtaggtaggtaggtaga

SEQ ID NO: 82880 - DNA, 20 bp, Artificial Sequence
  Description of Artificial Sequence: Synthetic oligonucleotide
  Target: LAMA2; (-) strand; PAM type: NRG; PAM sequence: TAG
taggtaggtaggtaggtagg

SEQ ID NO: 82881 - DNA, 20 bp, Artificial Sequence
  Description of Artificial Sequence: Synthetic oligonucleotide
  Target: LAMA2; (-) strand; PAM type: NRG; PAM sequence: AGG
aggtaggtaggtaggtaggt

SEQ ID NO: 82882 - DNA, 20 bp, Artificial Sequence
  Description of Artificial Sequence: Synthetic oligonucleotide
  Target: LAMA2; (-) strand; PAM type: NRG; PAM sequence: TAG
taggtaggtaggtaggtagg

SEQ ID NO: 82883 - DNA, 20 bp, Artificial Sequence
  Description of Artificial Sequence: Synthetic oligonucleotide
  Target: LAMA2; (-) strand; PAM type: NRG; PAM sequence: AGG
agataggtaggtaggtaggt

SEQ ID NO: 82884 - DNA, 20 bp, Artificial Sequence
  Description of Artificial Sequence: Synthetic oligonucleotide
  Target: LAMA2; (-) strand; PAM type: NRG; PAM sequence: TAG
tagataggtaggtaggtagg

SEQ ID NO: 82885 - DNA, 20 bp, Artificial Sequence
  Description of Artificial Sequence: Synthetic oligonucleotide
  Target: LAMA2; (-) strand; PAM type: NRG; PAM sequence: AGG
aaatagataggtaggtaggt

SEQ ID NO: 82886 - DNA, 20 bp, Artificial Sequence
  Description of Artificial Sequence: Synthetic oligonucleotide
  Target: LAMA2; (-) strand; PAM type: NRG; PAM sequence: TAG
aaaatagataggtaggtagg

SEQ ID NO: 82887 - DNA, 20 bp, Artificial Sequence
  Description of Artificial Sequence: Synthetic oligonucleotide
  Target: LAMA2; (-) strand; PAM type: NRG; PAM sequence: AGG
agaaaaatagataggtaggt

SEQ ID NO: 82888 - DNA, 20 bp, Artificial Sequence
  Description of Artificial Sequence: Synthetic oligonucleotide
  Target: LAMA2; (-) strand; PAM type: NRG; PAM sequence: TAG
tagaaaaatagataggtagg

SEQ ID NO: 82889 - DNA, 20 bp, Artificial Sequence
  Description of Artificial Sequence: Synthetic oligonucleotide
  Target: LAMA2; (-) strand; PAM type: NRG; PAM sequence: AGG
acgtagaaaaatagataggt

SEQ ID NO: 82890 - DNA, 20 bp, Artificial Sequence
  Description of Artificial Sequence: Synthetic oligonucleotide
  Target: LAMA2; (-) strand; PAM type: NRG; PAM sequence: TAG
aacgtagaaaaatagatagg

SEQ ID NO: 82891 - DNA, 20 bp, Artificial Sequence
  Description of Artificial Sequence: Synthetic oligonucleotide
  Target: LAMA2; (-) strand; PAM type: NRG; PAM sequence: AGG
ttaaacgtagaaaaatagat

SEQ ID NO: 82892 - DNA, 20 bp, Artificial Sequence
  Description of Artificial Sequence: Synthetic oligonucleotide
  Target: LAMA2; (-) strand; PAM type: NRG; PAM sequence: TAG
attaaacgtagaaaaataga

SEQ ID NO: 82893 - DNA, 20 bp, Artificial Sequence
  Description of Artificial Sequence: Synthetic oligonucleotide
  Target: LAMA2; (-) strand; PAM type: NRG; PAM sequence: TAG
taaaattaaacgtagaaaaa

SEQ ID NO: 82894 - DNA, 20 bp, Artificial Sequence
  Description of Artificial Sequence: Synthetic oligonucleotide
  Target: LAMA2; (-) strand; PAM type: NRG; PAM sequence: TAG
atacagaataaaattaaacg

SEQ ID NO: 82895 - DNA, 20 bp, Artificial Sequence
  Description of Artificial Sequence: Synthetic oligonucleotide
  Target: LAMA2; (-) strand; PAM type: NRG; PAM sequence: CAG
gttcagaacagttgaagata

SEQ ID NO: 82896 - DNA, 20 bp, Artificial Sequence
  Description of Artificial Sequence: Synthetic oligonucleotide
  Target: LAMA2; (-) strand; PAM type: NRG; PAM sequence: AAG
cctcctgttcagaacagttg

SEQ ID NO: 82897 - DNA, 20 bp, Artificial Sequence
  Description of Artificial Sequence: Synthetic oligonucleotide
  Target: LAMA2; (-) strand; PAM type: NRG; PAM sequence: CAG
aaaacccctcctgttcagaa

SEQ ID NO: 82898 - DNA, 20 bp, Artificial Sequence
  Description of Artificial Sequence: Synthetic oligonucleotide
  Target: LAMA2; (-) strand; PAM type: NRG; PAM sequence: CAG
tccaaaaaacccctcctgtt

SEQ ID NO: 82899 - DNA, 20 bp, Artificial Sequence
  Description of Artificial Sequence: Synthetic oligonucleotide
  Target: LAMA2; (-) strand; PAM type: NRG; PAM sequence: TAG
tttctggaagtattgtagac

SEQ ID NO: 82900 - DNA, 20 bp, Artificial Sequence
  Description of Artificial Sequence: Synthetic oligonucleotide
  Target: LAMA2; (-) strand; PAM type: NRG; PAM sequence: TAG
ttttatttctggaagtattg

SEQ ID NO: 82901 - DNA, 20 bp, Artificial Sequence
  Description of Artificial Sequence: Synthetic oligonucleotide
  Target: LAMA2; (-) strand; PAM type: NRG; PAM sequence: AAG
atcttaacttttatttctgg

SEQ ID NO: 82902 - DNA, 20 bp, Artificial Sequence
  Description of Artificial Sequence: Synthetic oligonucleotide
  Target: LAMA2; (-) strand; PAM type: NRG; PAM sequence: TGG
tctatcttaacttttatttc

SEQ ID NO: 82903 - DNA, 20 bp, Artificial Sequence
  Description of Artificial Sequence: Synthetic oligonucleotide
  Target: LAMA2; (-) strand; PAM type: NRG; PAM sequence: AAG
gaaattgaggctaaatgtag

SEQ ID NO: 82904 - DNA, 20 bp, Artificial Sequence
  Description of Artificial Sequence: Synthetic oligonucleotide
  Target: LAMA2; (-) strand; PAM type: NRG; PAM sequence: TAG
ccagaaattgaggctaaatg

SEQ ID NO: 82905 - DNA, 20 bp, Artificial Sequence
  Description of Artificial Sequence: Synthetic oligonucleotide
  Target: LAMA2; (-) strand; PAM type: NRG; PAM sequence: AGG
gttaaaatttccagaaattg

SEQ ID NO: 82906 - DNA, 20 bp, Artificial Sequence
  Description of Artificial Sequence: Synthetic oligonucleotide
  Target: LAMA2; (-) strand; PAM type: NRG; PAM sequence: GAG
tgttaaaatttccagaaatt

SEQ ID NO: 82907 - DNA, 20 bp, Artificial Sequence
  Description of Artificial Sequence: Synthetic oligonucleotide
  Target: LAMA2; (-) strand; PAM type: NRG; PAM sequence: CAG
atttctgatgttaaaatttc

SEQ ID NO: 82908 - DNA, 20 bp, Artificial Sequence
  Description of Artificial Sequence: Synthetic oligonucleotide
  Target: LAMA2; (-) strand; PAM type: NRG; PAM sequence: TAG
aagtttgcaaaggcattaaa

SEQ ID NO: 82909 - DNA, 20 bp, Artificial Sequence
  Description of Artificial Sequence: Synthetic oligonucleotide
  Target: LAMA2; (-) strand; PAM type: NRG; PAM sequence: AGG
aattttaataaagtttgcaa

SEQ ID NO: 82910 - DNA, 20 bp, Artificial Sequence
  Description of Artificial Sequence: Synthetic oligonucleotide
  Target: LAMA2; (-) strand; PAM type: NRG; PAM sequence: AAG
taattttaataaagtttgca

SEQ ID NO: 82911 - DNA, 20 bp, Artificial Sequence
  Description of Artificial Sequence: Synthetic oligonucleotide
  Target: LAMA2; (-) strand; PAM type: NRG; PAM sequence: AAG
taaatctgataattttaata

SEQ ID NO: 82912 - DNA, 20 bp, Artificial Sequence
  Description of Artificial Sequence: Synthetic oligonucleotide
  Target: LAMA2; (-) strand; PAM type: NRG; PAM sequence: GGG
gattacccaatagaccaaat

SEQ ID NO: 82913 - DNA, 20 bp, Artificial Sequence
  Description of Artificial Sequence: Synthetic oligonucleotide
  Target: LAMA2; (-) strand; PAM type: NRG; PAM sequence: TGG
agattacccaatagaccaaa

SEQ ID NO: 82914 - DNA, 20 bp, Artificial Sequence
  Description of Artificial Sequence: Synthetic oligonucleotide
  Target: LAMA2; (-) strand; PAM type: NRG; PAM sequence: TAG
gtttctaatagattacccaa

SEQ ID NO: 82915 - DNA, 20 bp, Artificial Sequence
  Description of Artificial Sequence: Synthetic oligonucleotide
  Target: LAMA2; (-) strand; PAM type: NRG; PAM sequence: TAG
attagtaagttcgtttctaa

SEQ ID NO: 82916 - DNA, 20 bp, Artificial Sequence
  Description of Artificial Sequence: Synthetic oligonucleotide
  Target: LAMA2; (-) strand; PAM type: NRG; PAM sequence: AAG
aaatattgtttgatattagt

SEQ ID NO: 82917 - DNA, 20 bp, Artificial Sequence
  Description of Artificial Sequence: Synthetic oligonucleotide
  Target: LAMA2; (-) strand; PAM type: NRG; PAM sequence: TAG
aaataaatattgtttgatat

SEQ ID NO: 82918 - DNA, 20 bp, Artificial Sequence
  Description of Artificial Sequence: Synthetic oligonucleotide
  Target: LAMA2; (-) strand; PAM type: NRG; PAM sequence: TGG
tgtccaagtagaacatactc

SEQ ID NO: 82919 - DNA, 20 bp, Artificial Sequence
  Description of Artificial Sequence: Synthetic oligonucleotide
  Target: LAMA2; (-) strand; PAM type: NRG; PAM sequence: TAG
gatcctctatgatgtccaag

SEQ ID NO: 82920 - DNA, 20 bp, Artificial Sequence
  Description of Artificial Sequence: Synthetic oligonucleotide
  Target: LAMA2; (-) strand; PAM type: NRG; PAM sequence: AAG
aaggatcctctatgatgtcc

SEQ ID NO: 82921 - DNA, 20 bp, Artificial Sequence
  Description of Artificial Sequence: Synthetic oligonucleotide
  Target: LAMA2; (-) strand; PAM type: NRG; PAM sequence: AGG
gaatcctaaagtacattaaa

SEQ ID NO: 82922 - DNA, 20 bp, Artificial Sequence
  Description of Artificial Sequence: Synthetic oligonucleotide
  Target: LAMA2; (-) strand; PAM type: NRG; PAM sequence: AAG
tgaatcctaaagtacattaa

SEQ ID NO: 82923 - DNA, 20 bp, Artificial Sequence
  Description of Artificial Sequence: Synthetic oligonucleotide
  Target: LAMA2; (-) strand; PAM type: NRG; PAM sequence: AAG
aaacaccaaactgaatccta

SEQ ID NO: 82924 - DNA, 20 bp, Artificial Sequence
  Description of Artificial Sequence: Synthetic oligonucleotide
  Target: LAMA2; (-) strand; PAM type: NRG; PAM sequence: GAG
attaacttatgaatccagat

SEQ ID NO: 82925 - DNA, 20 bp, Artificial Sequence
  Description of Artificial Sequence: Synthetic oligonucleotide
  Target: LAMA2; (-) strand; PAM type: NRG; PAM sequence: CAG
aggcaattaacttatgaatc

SEQ ID NO: 82926 - DNA, 20 bp, Artificial Sequence
  Description of Artificial Sequence: Synthetic oligonucleotide
  Target: LAMA2; (-) strand; PAM type: NRG; PAM sequence: AGG
ctggtgggtgtctgagtcac

SEQ ID NO: 82927 - DNA, 20 bp, Artificial Sequence
  Description of Artificial Sequence: Synthetic oligonucleotide
  Target: LAMA2; (-) strand; PAM type: NRG; PAM sequence: CAG
actggtgggtgtctgagtca

SEQ ID NO: 82928 - DNA, 20 bp, Artificial Sequence
  Description of Artificial Sequence: Synthetic oligonucleotide
  Target: LAMA2; (-) strand; PAM type: NRG; PAM sequence: GAG
agcacaactggtgggtgtct

SEQ ID NO: 82929 - DNA, 20 bp, Artificial Sequence
  Description of Artificial Sequence: Synthetic oligonucleotide
  Target: LAMA2; (-) strand; PAM type: NRG; PAM sequence: GGG
gccaaaggagcacaactggt

SEQ ID NO: 82930 - DNA, 20 bp, Artificial Sequence
  Description of Artificial Sequence: Synthetic oligonucleotide
  Target: LAMA2; (-) strand; PAM type: NRG; PAM sequence: TGG
tgccaaaggagcacaactgg

SEQ ID NO: 82931 - DNA, 20 bp, Artificial Sequence
  Description of Artificial Sequence: Synthetic oligonucleotide
  Target: LAMA2; (-) strand; PAM type: NRG; PAM sequence: TGG
atttgccaaaggagcacaac

SEQ ID NO: 82932 - DNA, 20 bp, Artificial Sequence
  Description of Artificial Sequence: Synthetic oligonucleotide
  Target: LAMA2; (-) strand; PAM type: NRG; PAM sequence: GAG
aattaagtgatttgccaaag

SEQ ID NO: 82933 - DNA, 20 bp, Artificial Sequence
  Description of Artificial Sequence: Synthetic oligonucleotide
  Target: LAMA2; (-) strand; PAM type: NRG; PAM sequence: AGG
gaaattaagtgatttgccaa

SEQ ID NO: 82934 - DNA, 20 bp, Artificial Sequence
  Description of Artificial Sequence: Synthetic oligonucleotide
  Target: LAMA2; (-) strand; PAM type: NRG; PAM sequence: AAG
agaaattaagtgatttgcca

SEQ ID NO: 82935 - DNA, 20 bp, Artificial Sequence
  Description of Artificial Sequence: Synthetic oligonucleotide
  Target: LAMA2; (-) strand; PAM type: NRG; PAM sequence: AAG
aactaaggcatggagaaatt

SEQ ID NO: 82936 - DNA, 20 bp, Artificial Sequence
  Description of Artificial Sequence: Synthetic oligonucleotide
  Target: LAMA2; (-) strand; PAM type: NRG; PAM sequence: GAG
gatgaggtaactaaggcatg

SEQ ID NO: 82937 - DNA, 20 bp, Artificial Sequence
  Description of Artificial Sequence: Synthetic oligonucleotide
  Target: LAMA2; (-) strand; PAM type: NRG; PAM sequence: TGG
cagatgaggtaactaaggca

SEQ ID NO: 82938 - DNA, 20 bp, Artificial Sequence
  Description of Artificial Sequence: Synthetic oligonucleotide
  Target: LAMA2; (-) strand; PAM type: NRG; PAM sequence: AGG
tttcacagatgaggtaacta

SEQ ID NO: 82939 - DNA, 20 bp, Artificial Sequence
  Description of Artificial Sequence: Synthetic oligonucleotide
  Target: LAMA2; (-) strand; PAM type: NRG; PAM sequence: AAG
gtttcacagatgaggtaact

SEQ ID NO: 82940 - DNA, 20 bp, Artificial Sequence
  Description of Artificial Sequence: Synthetic oligonucleotide
  Target: LAMA2; (-) strand; PAM type: NRG; PAM sequence: AGG
tttttcctgtttcacagatg

SEQ ID NO: 82941 - DNA, 20 bp, Artificial Sequence
  Description of Artificial Sequence: Synthetic oligonucleotide
  Target: LAMA2; (-) strand; PAM type: NRG; PAM sequence: GAG
atttttcctgtttcacagat

SEQ ID NO: 82942 - DNA, 20 bp, Artificial Sequence
  Description of Artificial Sequence: Synthetic oligonucleotide
  Target: LAMA2; (-) strand; PAM type: NRG; PAM sequence: CAG
ctattatttttcctgtttca

SEQ ID NO: 82943 - DNA, 20 bp, Artificial Sequence
  Description of Artificial Sequence: Synthetic oligonucleotide
  Target: LAMA2; (-) strand; PAM type: NRG; PAM sequence: TAG
ctcaaaacatctatatgaga

SEQ ID NO: 82944 - DNA, 20 bp, Artificial Sequence
  Description of Artificial Sequence: Synthetic oligonucleotide
  Target: LAMA2; (-) strand; PAM type: NRG; PAM sequence: GAG
agtactcaaaacatctatat

SEQ ID NO: 82945 - DNA, 20 bp, Artificial Sequence
  Description of Artificial Sequence: Synthetic oligonucleotide
  Target: LAMA2; (-) strand; PAM type: NRG; PAM sequence: TAG
aacacaggggttaattcagt

SEQ ID NO: 82946 - DNA, 20 bp, Artificial Sequence
  Description of Artificial Sequence: Synthetic oligonucleotide
  Target: LAMA2; (-) strand; PAM type: NRG; PAM sequence: CAG
acaaaacacaggggttaatt

SEQ ID NO: 82947 - DNA, 20 bp, Artificial Sequence
  Description of Artificial Sequence: Synthetic oligonucleotide
  Target: LAMA2; (-) strand; PAM type: NRG; PAM sequence: GGG
tagcattacacaaaacacag

SEQ ID NO: 82948 - DNA, 20 bp, Artificial Sequence
  Description of Artificial Sequence: Synthetic oligonucleotide
  Target: LAMA2; (-) strand; PAM type: NRG; PAM sequence: GGG
ttagcattacacaaaacaca

SEQ ID NO: 82949 - DNA, 20 bp, Artificial Sequence
  Description of Artificial Sequence: Synthetic oligonucleotide
  Target: LAMA2; (-) strand; PAM type: NRG; PAM sequence: AGG
cttagcattacacaaaacac

SEQ ID NO: 82950 - DNA, 20 bp, Artificial Sequence
  Description of Artificial Sequence: Synthetic oligonucleotide
  Target: LAMA2; (-) strand; PAM type: NRG; PAM sequence: CAG
acttagcattacacaaaaca

SEQ ID NO: 82951 - DNA, 20 bp, Artificial Sequence
  Description of Artificial Sequence: Synthetic oligonucleotide
  Target: LAMA2; (-) strand; PAM type: NRG; PAM sequence: TAG
cttatggtagtcattatact

SEQ ID NO: 82952 - DNA, 20 bp, Artificial Sequence
  Description of Artificial Sequence: Synthetic oligonucleotide
  Target: LAMA2; (-) strand; PAM type: NRG; PAM sequence: TAG
aaatagcacttatcttatgg

SEQ ID NO: 82953 - DNA, 20 bp, Artificial Sequence
  Description of Artificial Sequence: Synthetic oligonucleotide
  Target: LAMA2; (-) strand; PAM type: NRG; PAM sequence: TGG
ctcaaatagcacttatctta

SEQ ID NO: 82954 - DNA, 20 bp, Artificial Sequence
  Description of Artificial Sequence: Synthetic oligonucleotide
  Target: LAMA2; (-) strand; PAM type: NRG; PAM sequence: TAG
caaaacttctaagactcaaa

SEQ ID NO: 82955 - DNA, 20 bp, Artificial Sequence
  Description of Artificial Sequence: Synthetic oligonucleotide
  Target: LAMA2; (-) strand; PAM type: NRG; PAM sequence: AAG
cccaaataaacaaaacttct

SEQ ID NO: 82956 - DNA, 20 bp, Artificial Sequence
  Description of Artificial Sequence: Synthetic oligonucleotide
  Target: LAMA2; (-) strand; PAM type: NRG; PAM sequence: AAG
gctatgtaattcaatttatg

SEQ ID NO: 82957 - DNA, 20 bp, Artificial Sequence
  Description of Artificial Sequence: Synthetic oligonucleotide
  Target: LAMA2; (-) strand; PAM type: NRG; PAM sequence: GAG
tatggtcatataaaaatgga

SEQ ID NO: 82958 - DNA, 20 bp, Artificial Sequence
  Description of Artificial Sequence: Synthetic oligonucleotide
  Target: LAMA2; (-) strand; PAM type: NRG; PAM sequence: GAG
cttatggtcatataaaaatg

SEQ ID NO: 82959 - DNA, 20 bp, Artificial Sequence
  Description of Artificial Sequence: Synthetic oligonucleotide
  Target: LAMA2; (-) strand; PAM type: NRG; PAM sequence: TGG
ctcttatggtcatataaaaa

SEQ ID NO: 82960 - DNA, 20 bp, Artificial Sequence
  Description of Artificial Sequence: Synthetic oligonucleotide
  Target: LAMA2; (-) strand; PAM type: NRG; PAM sequence: TGG
ttcaaaacttgaaactctta

SEQ ID NO: 82961 - DNA, 20 bp, Artificial Sequence
  Description of Artificial Sequence: Synthetic oligonucleotide
  Target: LAMA2; (-) strand; PAM type: NRG; PAM sequence: CAG
gtaatgctagttaattttta

SEQ ID NO: 82962 - DNA, 20 bp, Artificial Sequence
  Description of Artificial Sequence: Synthetic oligonucleotide
  Target: LAMA2; (-) strand; PAM type: NRG; PAM sequence: TAG
tgtttggttttctgtaatgc

SEQ ID NO: 82963 - DNA, 20 bp, Artificial Sequence
  Description of Artificial Sequence: Synthetic oligonucleotide
  Target: LAMA2; (-) strand; PAM type: NRG; PAM sequence: TGG
gagtaagaacatgcggtgtt

SEQ ID NO: 82964 - DNA, 20 bp, Artificial Sequence
  Description of Artificial Sequence: Synthetic oligonucleotide
  Target: LAMA2; (-) strand; PAM type: NRG; PAM sequence: CGG
cacttacgagtaagaacatg

SEQ ID NO: 82965 - DNA, 20 bp, Artificial Sequence
  Description of Artificial Sequence: Synthetic oligonucleotide
  Target: LAMA2; (-) strand; PAM type: NRG; PAM sequence: AAG
ttcaactcccacttacgagt

SEQ ID NO: 82966 - DNA, 20 bp, Artificial Sequence
  Description of Artificial Sequence: Synthetic oligonucleotide
  Target: LAMA2; (-) strand; PAM type: NRG; PAM sequence: GAG
attgttcaactcccacttac

SEQ ID NO: 82967 - DNA, 20 bp, Artificial Sequence
  Description of Artificial Sequence: Synthetic oligonucleotide
  Target: LAMA2; (-) strand; PAM type: NRG; PAM sequence: TGG
ccccacccactgacaggccc

SEQ ID NO: 82968 - DNA, 20 bp, Artificial Sequence
  Description of Artificial Sequence: Synthetic oligonucleotide
  Target: LAMA2; (-) strand; PAM type: NRG; PAM sequence: AGG
ctagacccccacccactgac

SEQ ID NO: 82969 - DNA, 20 bp, Artificial Sequence
  Description of Artificial Sequence: Synthetic oligonucleotide
  Target: LAMA2; (-) strand; PAM type: NRG; PAM sequence: CAG
cctagacccccacccactga

SEQ ID NO: 82970 - DNA, 20 bp, Artificial Sequence
  Description of Artificial Sequence: Synthetic oligonucleotide
  Target: LAMA2; (-) strand; PAM type: NRG; PAM sequence: TAG
tcctaatgctgttcctcccc

SEQ ID NO: 82971 - DNA, 20 bp, Artificial Sequence
  Description of Artificial Sequence: Synthetic oligonucleotide
  Target: LAMA2; (-) strand; PAM type: NRG; PAM sequence: AGG
atcgacctgtcatctacatt

SEQ ID NO: 82972 - DNA, 20 bp, Artificial Sequence
  Description of Artificial Sequence: Synthetic oligonucleotide
  Target: LAMA2; (-) strand; PAM type: NRG; PAM sequence: TAG
catcgacctgtcatctacat

SEQ ID NO: 82973 - DNA, 20 bp, Artificial Sequence
  Description of Artificial Sequence: Synthetic oligonucleotide
  Target: LAMA2; (-) strand; PAM type: NRG; PAM sequence: CAG
cgtgccatggtggtttgctg

SEQ ID NO: 82974 - DNA, 20 bp, Artificial Sequence
  Description of Artificial Sequence: Synthetic oligonucleotide
  Target: LAMA2; (-) strand; PAM type: NRG; PAM sequence: TGG
taggtatgcacgtgccatgg

SEQ ID NO: 82975 - DNA, 20 bp, Artificial Sequence
  Description of Artificial Sequence: Synthetic oligonucleotide
  Target: LAMA2; (-) strand; PAM type: NRG; PAM sequence: TGG
acataggtatgcacgtgcca

SEQ ID NO: 82976 - DNA, 20 bp, Artificial Sequence
  Description of Artificial Sequence: Synthetic oligonucleotide
  Target: LAMA2; (-) strand; PAM type: NRG; PAM sequence: AGG
aacatccaggtttgtcacat

SEQ ID NO: 82977 - DNA, 20 bp, Artificial Sequence
  Description of Artificial Sequence: Synthetic oligonucleotide
  Target: LAMA2; (-) strand; PAM type: NRG; PAM sequence: TAG
gaacatccaggtttgtcaca

SEQ ID NO: 82978 - DNA, 20 bp, Artificial Sequence
  Description of Artificial Sequence: Synthetic oligonucleotide
  Target: LAMA2; (-) strand; PAM type: NRG; PAM sequence: AGG
aatacatgtgcagaacatcc

SEQ ID NO: 82979 - DNA, 20 bp, Artificial Sequence
  Description of Artificial Sequence: Synthetic oligonucleotide
  Target: LAMA2; (-) strand; PAM type: NRG; PAM sequence: CAG
gaatacatgtgcagaacatc

SEQ ID NO: 82980 - DNA, 20 bp, Artificial Sequence
  Description of Artificial Sequence: Synthetic oligonucleotide
  Target: LAMA2; (-) strand; PAM type: NRG; PAM sequence: CAG
taagttctggaatacatgtg

SEQ ID NO: 82981 - DNA, 20 bp, Artificial Sequence
  Description of Artificial Sequence: Synthetic oligonucleotide
  Target: LAMA2; (-) strand; PAM type: NRG; PAM sequence: TGG
tattattatactttaagttc

SEQ ID NO: 82982 - DNA, 20 bp, Artificial Sequence
  Description of Artificial Sequence: Synthetic oligonucleotide
  Target: LAMA2; (-) strand; PAM type: NRG; PAM sequence: AAG
tttttttattattatacttt

SEQ ID NO: 82983 - DNA, 20 bp, Artificial Sequence
  Description of Artificial Sequence: Synthetic oligonucleotide
  Target: LAMA2; (-) strand; PAM type: NRG; PAM sequence: TAG
ccacaaacatgttttaatga

SEQ ID NO: 82984 - DNA, 20 bp, Artificial Sequence
  Description of Artificial Sequence: Synthetic oligonucleotide
  Target: LAMA2; (-) strand; PAM type: NRG; PAM sequence: AAG
caaaagaggacaaattatca

SEQ ID NO: 82985 - DNA, 20 bp, Artificial Sequence
  Description of Artificial Sequence: Synthetic oligonucleotide
  Target: LAMA2; (-) strand; PAM type: NRG; PAM sequence: AGG
ctaatcaagggtatcaaaag

SEQ ID NO: 82986 - DNA, 20 bp, Artificial Sequence
  Description of Artificial Sequence: Synthetic oligonucleotide
  Target: LAMA2; (-) strand; PAM type: NRG; PAM sequence: GAG
gctaatcaagggtatcaaaa

SEQ ID NO: 82987 - DNA, 20 bp, Artificial Sequence
  Description of Artificial Sequence: Synthetic oligonucleotide
  Target: LAMA2; (-) strand; PAM type: NRG; PAM sequence: AAG
aagctaatcaagggtatcaa

SEQ ID NO: 82988 - DNA, 20 bp, Artificial Sequence
  Description of Artificial Sequence: Synthetic oligonucleotide
  Target: LAMA2; (-) strand; PAM type: NRG; PAM sequence: GGG
cggtaaacaaagctaatcaa

SEQ ID NO: 82989 - DNA, 20 bp, Artificial Sequence
  Description of Artificial Sequence: Synthetic oligonucleotide
  Target: LAMA2; (-) strand; PAM type: NRG; PAM sequence: AGG
acggtaaacaaagctaatca

SEQ ID NO: 82990 - DNA, 20 bp, Artificial Sequence
  Description of Artificial Sequence: Synthetic oligonucleotide
  Target: LAMA2; (-) strand; PAM type: NRG; PAM sequence: AAG
aacggtaaacaaagctaatc

SEQ ID NO: 82991 - DNA, 20 bp, Artificial Sequence
  Description of Artificial Sequence: Synthetic oligonucleotide
  Target: LAMA2; (-) strand; PAM type: NRG; PAM sequence: AAG
gcaaaaggaaacggtaaaca

SEQ ID NO: 82992 - DNA, 20 bp, Artificial Sequence
  Description of Artificial Sequence: Synthetic oligonucleotide
  Target: LAMA2; (-) strand; PAM type: NRG; PAM sequence: CGG
gaaaagcaagcaaaaggaaa

SEQ ID NO: 82993 - DNA, 20 bp, Artificial Sequence
  Description of Artificial Sequence: Synthetic oligonucleotide
  Target: LAMA2; (-) strand; PAM type: NRG; PAM sequence: AGG
aaaaaagaaaagcaagcaaa

SEQ ID NO: 82994 - DNA, 20 bp, Artificial Sequence
  Description of Artificial Sequence: Synthetic oligonucleotide
  Target: LAMA2; (-) strand; PAM type: NRG; PAM sequence: AAG
aaaaaaagaaaagcaagcaa

SEQ ID NO: 82995 - DNA, 20 bp, Artificial Sequence
  Description of Artificial Sequence: Synthetic oligonucleotide
  Target: LAMA2; (-) strand; PAM type: NRG; PAM sequence: AAG
gatttgaaaaaaagaaaagc

SEQ ID NO: 82996 - DNA, 20 bp, Artificial Sequence
  Description of Artificial Sequence: Synthetic oligonucleotide
  Target: LAMA2; (-) strand; PAM type: NRG; PAM sequence: AAG
aagagatttgaaaaaaagaa

SEQ ID NO: 82997 - DNA, 20 bp, Artificial Sequence
  Description of Artificial Sequence: Synthetic oligonucleotide
  Target: LAMA2; (-) strand; PAM type: NRG; PAM sequence: AAG
aagtaaagagatttgaaaaa

SEQ ID NO: 82998 - DNA, 20 bp, Artificial Sequence
  Description of Artificial Sequence: Synthetic oligonucleotide
  Target: LAMA2; (-) strand; PAM type: NRG; PAM sequence: GAG
taaacaccacaggaagtaaa

SEQ ID NO: 82999 - DNA, 20 bp, Artificial Sequence
  Description of Artificial Sequence: Synthetic oligonucleotide
  Target: LAMA2; (-) strand; PAM type: NRG; PAM sequence: AAG
tataaacaccacaggaagta

SEQ ID NO: 83000 - DNA, 20 bp, Artificial Sequence
  Description of Artificial Sequence: Synthetic oligonucleotide
  Target: LAMA2; (-) strand; PAM type: NRG; PAM sequence: AAG
gaaaatataaacaccacagg

SEQ ID NO: 83001 - DNA, 20 bp, Artificial Sequence
  Description of Artificial Sequence: Synthetic oligonucleotide
  Target: LAMA2; (-) strand; PAM type: NRG; PAM sequence: AGG
agagaaaatataaacaccac

SEQ ID NO: 83002 - DNA, 20 bp, Artificial Sequence
  Description of Artificial Sequence: Synthetic oligonucleotide
  Target: LAMA2; (-) strand; PAM type: NRG; PAM sequence: CAG
aagagaaaatataaacacca

SEQ ID NO: 83003 - DNA, 20 bp, Artificial Sequence
  Description of Artificial Sequence: Synthetic oligonucleotide
  Target: LAMA2; (-) strand; PAM type: NRG; PAM sequence: GAG
attcatttaagtataaaaaa

SEQ ID NO: 83004 - DNA, 20 bp, Artificial Sequence
  Description of Artificial Sequence: Synthetic oligonucleotide
  Target: LAMA2; (-) strand; PAM type: NRG; PAM sequence: AAG
taattcatttaagtataaaa

SEQ ID NO: 83005 - DNA, 20 bp, Artificial Sequence
  Description of Artificial Sequence: Synthetic oligonucleotide
  Target: LAMA2; (-) strand; PAM type: NRG; PAM sequence: AAG
aattaaaatttaattcattt

SEQ ID NO: 83006 - DNA, 20 bp, Artificial Sequence
  Description of Artificial Sequence: Synthetic oligonucleotide
  Target: LAMA2; (-) strand; PAM type: NRG; PAM sequence: TAG
atagtccattattttaaaaa

SEQ ID NO: 83007 - DNA, 20 bp, Artificial Sequence
  Description of Artificial Sequence: Synthetic oligonucleotide
  Target: LAMA2; (-) strand; PAM type: NRG; PAM sequence: TAG
agtaaacttataggcttaaa

SEQ ID NO: 83008 - DNA, 20 bp, Artificial Sequence
  Description of Artificial Sequence: Synthetic oligonucleotide
  Target: LAMA2; (-) strand; PAM type: NRG; PAM sequence: AGG
gtacccaaaagtaaacttat

SEQ ID NO: 83009 - DNA, 20 bp, Artificial Sequence
  Description of Artificial Sequence: Synthetic oligonucleotide
  Target: LAMA2; (-) strand; PAM type: NRG; PAM sequence: TAG
tgtacccaaaagtaaactta

SEQ ID NO: 83010 - DNA, 20 bp, Artificial Sequence
  Description of Artificial Sequence: Synthetic oligonucleotide
  Target: LAMA2; (-) strand; PAM type: NRG; PAM sequence: AAG
tatggaaaaactgtacccaa

SEQ ID NO: 83011 - DNA, 20 bp, Artificial Sequence
  Description of Artificial Sequence: Synthetic oligonucleotide
  Target: LAMA2; (-) strand; PAM type: NRG; PAM sequence: TGG
aacttaatttttgttgagta

SEQ ID NO: 83012 - DNA, 20 bp, Artificial Sequence
  Description of Artificial Sequence: Synthetic oligonucleotide
  Target: LAMA2; (-) strand; PAM type: NRG; PAM sequence: GAG
aaaggaacttaatttttgtt

SEQ ID NO: 83013 - DNA, 20 bp, Artificial Sequence
  Description of Artificial Sequence: Synthetic oligonucleotide
  Target: LAMA2; (-) strand; PAM type: NRG; PAM sequence: AGG
gaatataatagcagtaaaaa

SEQ ID NO: 83014 - DNA, 20 bp, Artificial Sequence
  Description of Artificial Sequence: Synthetic oligonucleotide
  Target: LAMA2; (-) strand; PAM type: NRG; PAM sequence: AAG
agaatataatagcagtaaaa

SEQ ID NO: 83015 - DNA, 20 bp, Artificial Sequence
  Description of Artificial Sequence: Synthetic oligonucleotide
  Target: LAMA2; (-) strand; PAM type: NRG; PAM sequence: CAG
atctaggtagaatataatag

SEQ ID NO: 83016 - DNA, 20 bp, Artificial Sequence
  Description of Artificial Sequence: Synthetic oligonucleotide
  Target: LAMA2; (-) strand; PAM type: NRG; PAM sequence: TAG
gctatctaggtagaatataa

SEQ ID NO: 83017 - DNA, 20 bp, Artificial Sequence
  Description of Artificial Sequence: Synthetic oligonucleotide
  Target: LAMA2; (-) strand; PAM type: NRG; PAM sequence: TAG
aaaataaatagctatctagg

SEQ ID NO: 83018 - DNA, 20 bp, Artificial Sequence
  Description of Artificial Sequence: Synthetic oligonucleotide
  Target: LAMA2; (-) strand; PAM type: NRG; PAM sequence: AGG
ttaaaaataaatagctatct

SEQ ID NO: 83019 - DNA, 20 bp, Artificial Sequence
  Description of Artificial Sequence: Synthetic oligonucleotide
  Target: LAMA2; (-) strand; PAM type: NRG; PAM sequence: TAG
attaaaaataaatagctatc

SEQ ID NO: 83020 - DNA, 20 bp, Artificial Sequence
  Description of Artificial Sequence: Synthetic oligonucleotide
  Target: LAMA2; (-) strand; PAM type: NRG; PAM sequence: TAG
agacttcaattaaaaataaa

SEQ ID NO: 83021 - DNA, 20 bp, Artificial Sequence
  Description of Artificial Sequence: Synthetic oligonucleotide
  Target: LAMA2; (-) strand; PAM type: NRG; PAM sequence: AAG
cttgggttaaagagaaaatc

SEQ ID NO: 83022 - DNA, 20 bp, Artificial Sequence
  Description of Artificial Sequence: Synthetic oligonucleotide
  Target: LAMA2; (-) strand; PAM type: NRG; PAM sequence: GAG
ttaataactcttgggttaaa

SEQ ID NO: 83023 - DNA, 20 bp, Artificial Sequence
  Description of Artificial Sequence: Synthetic oligonucleotide
  Target: LAMA2; (-) strand; PAM type: NRG; PAM sequence: AAG
ctttaataactcttgggtta

SEQ ID NO: 83024 - DNA, 20 bp, Artificial Sequence
  Description of Artificial Sequence: Synthetic oligonucleotide
  Target: LAMA2; (-) strand; PAM type: NRG; PAM sequence: GGG
atttctctttaataactctt

SEQ ID NO: 83025 - DNA, 20 bp, Artificial Sequence
  Description of Artificial Sequence: Synthetic oligonucleotide
  Target: LAMA2; (-) strand; PAM type: NRG; PAM sequence: TGG
tatttctctttaataactct

SEQ ID NO: 83026 - DNA, 20 bp, Artificial Sequence
  Description of Artificial Sequence: Synthetic oligonucleotide
  Target: LAMA2; (-) strand; PAM type: NRG; PAM sequence: GAG
ctgaatatcaaacatgatga

SEQ ID NO: 83027 - DNA, 20 bp, Artificial Sequence
  Description of Artificial Sequence: Synthetic oligonucleotide
  Target: LAMA2; (-) strand; PAM type: NRG; PAM sequence: GAG
ttctgaatatcaaacatgat

SEQ ID NO: 83028 - DNA, 20 bp, Artificial Sequence
  Description of Artificial Sequence: Synthetic oligonucleotide
  Target: LAMA2; (-) strand; PAM type: NRG; PAM sequence: TAG
cacaaaaattaagattaaat

SEQ ID NO: 83029 - DNA, 20 bp, Artificial Sequence
  Description of Artificial Sequence: Synthetic oligonucleotide
  Target: LAMA2; (-) strand; PAM type: NRG; PAM sequence: AAG
tatcaaatgccacaaaaatt

SEQ ID NO: 83030 - DNA, 20 bp, Artificial Sequence
  Description of Artificial Sequence: Synthetic oligonucleotide
  Target: LAMA2; (-) strand; PAM type: NRG; PAM sequence: TAG
ttaacataaattactacttt

SEQ ID NO: 83031 - DNA, 20 bp, Artificial Sequence
  Description of Artificial Sequence: Synthetic oligonucleotide
  Target: LAMA2; (-) strand; PAM type: NRG; PAM sequence: AGG
atcaaagcagaaattatcta

SEQ ID NO: 83032 - DNA, 20 bp, Artificial Sequence
  Description of Artificial Sequence: Synthetic oligonucleotide
  Target: LAMA2; (-) strand; PAM type: NRG; PAM sequence: AAG
tatcaaagcagaaattatct

SEQ ID NO: 83033 - DNA, 20 bp, Artificial Sequence
  Description of Artificial Sequence: Synthetic oligonucleotide
  Target: LAMA2; (-) strand; PAM type: NRG; PAM sequence: CAG
aaaatactcaattatcaaag

SEQ ID NO: 83034 - DNA, 20 bp, Artificial Sequence
  Description of Artificial Sequence: Synthetic oligonucleotide
  Target: LAMA2; (-) strand; PAM type: NRG; PAM sequence: AAG
taaaaaatactcaattatca

SEQ ID NO: 83035 - DNA, 20 bp, Artificial Sequence
  Description of Artificial Sequence: Synthetic oligonucleotide
  Target: LAMA2; (-) strand; PAM type: NRG; PAM sequence: TAG
atataactaaatatttacca

SEQ ID NO: 83036 - DNA, 20 bp, Artificial Sequence
  Description of Artificial Sequence: Synthetic oligonucleotide
  Target: LAMA2; (-) strand; PAM type: NRG; PAM sequence: TGG
atatcaaattacatattatg

SEQ ID NO: 83037 - DNA, 20 bp, Artificial Sequence
  Description of Artificial Sequence: Synthetic oligonucleotide
  Target: LAMA2; (-) strand; PAM type: NRG; PAM sequence: CAG
acagatgaagtaagaaaaaa

SEQ ID NO: 83038 - DNA, 20 bp, Artificial Sequence
  Description of Artificial Sequence: Synthetic oligonucleotide
  Target: LAMA2; (-) strand; PAM type: NRG; PAM sequence: AAG
taagtatttacagatgaagt

SEQ ID NO: 83039 - DNA, 20 bp, Artificial Sequence
  Description of Artificial Sequence: Synthetic oligonucleotide
  Target: LAMA2; (-) strand; PAM type: NRG; PAM sequence: AAG
atcttaagtatttacagatg

SEQ ID NO: 83040 - DNA, 20 bp, Artificial Sequence
  Description of Artificial Sequence: Synthetic oligonucleotide
  Target: LAMA2; (-) strand; PAM type: NRG; PAM sequence: CAG
ttactcatcttaagtattta

SEQ ID NO: 83041 - DNA, 20 bp, Artificial Sequence
  Description of Artificial Sequence: Synthetic oligonucleotide
  Target: LAMA2; (-) strand; PAM type: NRG; PAM sequence: AAG
gatgctaacttactcatctt

SEQ ID NO: 83042 - DNA, 20 bp, Artificial Sequence
  Description of Artificial Sequence: Synthetic oligonucleotide
  Target: LAMA2; (-) strand; PAM type: NRG; PAM sequence: TGG
ataaaaactttaaaagtcaa

SEQ ID NO: 83043 - DNA, 20 bp, Artificial Sequence
  Description of Artificial Sequence: Synthetic oligonucleotide
  Target: LAMA2; (-) strand; PAM type: NRG; PAM sequence: AAG
attggaaataaaaactttaa

SEQ ID NO: 83044 - DNA, 20 bp, Artificial Sequence
  Description of Artificial Sequence: Synthetic oligonucleotide
  Target: LAMA2; (-) strand; PAM type: NRG; PAM sequence: TGG
atgtggacaacaaaatatat

SEQ ID NO: 83045 - DNA, 20 bp, Artificial Sequence
  Description of Artificial Sequence: Synthetic oligonucleotide
  Target: LAMA2; (-) strand; PAM type: NRG; PAM sequence: TGG
attatcagtacaaaaatatg

SEQ ID NO: 83046 - DNA, 20 bp, Artificial Sequence
  Description of Artificial Sequence: Synthetic oligonucleotide
  Target: LAMA2; (-) strand; PAM type: NRG; PAM sequence: CAG
ttcaaataagcactaattat

SEQ ID NO: 83047 - DNA, 20 bp, Artificial Sequence
  Description of Artificial Sequence: Synthetic oligonucleotide
  Target: LAMA2; (-) strand; PAM type: NRG; PAM sequence: AAG
attatgtttatgcttcaaat

SEQ ID NO: 83048 - DNA, 20 bp, Artificial Sequence
  Description of Artificial Sequence: Synthetic oligonucleotide
  Target: LAMA2; (-) strand; PAM type: NRG; PAM sequence: AAG
taaactaggttcagtaaggc

SEQ ID NO: 83049 - DNA, 20 bp, Artificial Sequence
  Description of Artificial Sequence: Synthetic oligonucleotide
  Target: LAMA2; (-) strand; PAM type: NRG; PAM sequence: AGG
caaataaactaggttcagta

SEQ ID NO: 83050 - DNA, 20 bp, Artificial Sequence
  Description of Artificial Sequence: Synthetic oligonucleotide
  Target: LAMA2; (-) strand; PAM type: NRG; PAM sequence: AAG
tcaaataaactaggttcagt

SEQ ID NO: 83051 - DNA, 20 bp, Artificial Sequence
  Description of Artificial Sequence: Synthetic oligonucleotide
  Target: LAMA2; (-) strand; PAM type: NRG; PAM sequence: CAG
gaactcaaataaactaggtt

SEQ ID NO: 83052 - DNA, 20 bp, Artificial Sequence
  Description of Artificial Sequence: Synthetic oligonucleotide
  Target: LAMA2; (-) strand; PAM type: NRG; PAM sequence: AGG
aagtagaactcaaataaact

SEQ ID NO: 83053 - DNA, 20 bp, Artificial Sequence
  Description of Artificial Sequence: Synthetic oligonucleotide
  Target: LAMA2; (-) strand; PAM type: NRG; PAM sequence: TAG
aaagtagaactcaaataaac

SEQ ID NO: 83054 - DNA, 20 bp, Artificial Sequence
  Description of Artificial Sequence: Synthetic oligonucleotide
  Target: LAMA2; (-) strand; PAM type: NRG; PAM sequence: TAG
aatattaaatagggccaaag

SEQ ID NO: 83055 - DNA, 20 bp, Artificial Sequence
  Description of Artificial Sequence: Synthetic oligonucleotide
  Target: LAMA2; (-) strand; PAM type: NRG; PAM sequence: AAG
tgaaatattaaatagggcca

SEQ ID NO: 83056 - DNA, 20 bp, Artificial Sequence
  Description of Artificial Sequence: Synthetic oligonucleotide
  Target: LAMA2; (-) strand; PAM type: NRG; PAM sequence: GGG
aagttgtgaaatattaaata

SEQ ID NO: 83057 - DNA, 20 bp, Artificial Sequence
  Description of Artificial Sequence: Synthetic oligonucleotide
  Target: LAMA2; (-) strand; PAM type: NRG; PAM sequence: AGG
aaagttgtgaaatattaaat

SEQ ID NO: 83058 - DNA, 20 bp, Artificial Sequence
  Description of Artificial Sequence: Synthetic oligonucleotide
  Target: LAMA2; (-) strand; PAM type: NRG; PAM sequence: TAG
aaaagttgtgaaatattaaa

SEQ ID NO: 83059 - DNA, 20 bp, Artificial Sequence
  Description of Artificial Sequence: Synthetic oligonucleotide
  Target: LAMA2; (-) strand; PAM type: NRG; PAM sequence: AAG
agcgtatggaaaagaaaaaa

SEQ ID NO: 83060 - DNA, 20 bp, Artificial Sequence
  Description of Artificial Sequence: Synthetic oligonucleotide
  Target: LAMA2; (-) strand; PAM type: NRG; PAM sequence: AAG
tgtcaagaaagcgtatggaa

SEQ ID NO: 83061 - DNA, 20 bp, Artificial Sequence
  Description of Artificial Sequence: Synthetic oligonucleotide
  Target: LAMA2; (-) strand; PAM type: NRG; PAM sequence: TGG
atgtgtgtcaagaaagcgta

SEQ ID NO: 83062 - DNA, 20 bp, Artificial Sequence
  Description of Artificial Sequence: Synthetic oligonucleotide
  Target: LAMA2; (-) strand; PAM type: NRG; PAM sequence: AAG
aaaatgaatgtgtgtcaaga

SEQ ID NO: 83063 - DNA, 20 bp, Artificial Sequence
  Description of Artificial Sequence: Synthetic oligonucleotide
  Target: LAMA2; (-) strand; PAM type: NRG; PAM sequence: AAG
aaagaaaatgaatgtgtgtc

SEQ ID NO: 83064 - DNA, 20 bp, Artificial Sequence
  Description of Artificial Sequence: Synthetic oligonucleotide
  Target: LAMA2; (-) strand; PAM type: NRG; PAM sequence: AAG
aaataaaatattacaagtaa

SEQ ID NO: 83065 - DNA, 20 bp, Artificial Sequence
  Description of Artificial Sequence: Synthetic oligonucleotide
  Target: LAMA2; (-) strand; PAM type: NRG; PAM sequence: AAG
tattgcaaataaaatattac

SEQ ID NO: 83066 - DNA, 20 bp, Artificial Sequence
  Description of Artificial Sequence: Synthetic oligonucleotide
  Target: LAMA2; (-) strand; PAM type: NRG; PAM sequence: AGG
aagagataaacaaaatgaac

SEQ ID NO: 83067 - DNA, 20 bp, Artificial Sequence
  Description of Artificial Sequence: Synthetic oligonucleotide
  Target: LAMA2; (-) strand; PAM type: NRG; PAM sequence: CAG
caagagataaacaaaatgaa

SEQ ID NO: 83068 - DNA, 20 bp, Artificial Sequence
  Description of Artificial Sequence: Synthetic oligonucleotide
  Target: LAMA2; (-) strand; PAM type: NRG; PAM sequence: GAG
taaacatgtaatgtgcacaa

SEQ ID NO: 83069 - DNA, 20 bp, Artificial Sequence
  Description of Artificial Sequence: Synthetic oligonucleotide
  Target: LAMA2; (-) strand; PAM type: NRG; PAM sequence: AAG
cataaacatgtaatgtgcac

SEQ ID NO: 83070 - DNA, 20 bp, Artificial Sequence
  Description of Artificial Sequence: Synthetic oligonucleotide
  Target: LAMA2; (-) strand; PAM type: NRG; PAM sequence: CAG
atacatactaatgagttaag

SEQ ID NO: 83071 - DNA, 20 bp, Artificial Sequence
  Description of Artificial Sequence: Synthetic oligonucleotide
  Target: LAMA2; (-) strand; PAM type: NRG; PAM sequence: AAG
taaatacatactaatgagtt

SEQ ID NO: 83072 - DNA, 20 bp, Artificial Sequence
  Description of Artificial Sequence: Synthetic oligonucleotide
  Target: LAMA2; (-) strand; PAM type: NRG; PAM sequence: GAG
catactaaatacatactaat

SEQ ID NO: 83073 - DNA, 20 bp, Artificial Sequence
  Description of Artificial Sequence: Synthetic oligonucleotide
  Target: LAMA2; (-) strand; PAM type: NRG; PAM sequence: CAG
cagaatgacagaattagtgt

SEQ ID NO: 83074 - DNA, 20 bp, Artificial Sequence
  Description of Artificial Sequence: Synthetic oligonucleotide
  Target: LAMA2; (-) strand; PAM type: NRG; PAM sequence: TAG
aaaaagcagaatgacagaat

SEQ ID NO: 83075 - DNA, 20 bp, Artificial Sequence
  Description of Artificial Sequence: Synthetic oligonucleotide
  Target: LAMA2; (-) strand; PAM type: NRG; PAM sequence: CAG
gaaagcaaaaagcagaatga

SEQ ID NO: 83076 - DNA, 20 bp, Artificial Sequence
  Description of Artificial Sequence: Synthetic oligonucleotide
  Target: LAMA2; (-) strand; PAM type: NRG; PAM sequence: CAG
tagggagagaaagcaaaaag

SEQ ID NO: 83077 - DNA, 20 bp, Artificial Sequence
  Description of Artificial Sequence: Synthetic oligonucleotide
  Target: LAMA2; (-) strand; PAM type: NRG; PAM sequence: AAG
cattagggagagaaagcaaa

SEQ ID NO: 83078 - DNA, 20 bp, Artificial Sequence
  Description of Artificial Sequence: Synthetic oligonucleotide
  Target: LAMA2; (-) strand; PAM type: NRG; PAM sequence: AAG
aaggaaacattagggagaga

SEQ ID NO: 83079 - DNA, 20 bp, Artificial Sequence
  Description of Artificial Sequence: Synthetic oligonucleotide
  Target: LAMA2; (-) strand; PAM type: NRG; PAM sequence: GAG
aggcaaggaaacattaggga

SEQ ID NO: 83080 - DNA, 20 bp, Artificial Sequence
  Description of Artificial Sequence: Synthetic oligonucleotide
  Target: LAMA2; (-) strand; PAM type: NRG; PAM sequence: GAG
aaaggcaaggaaacattagg

SEQ ID NO: 83081 - DNA, 20 bp, Artificial Sequence
  Description of Artificial Sequence: Synthetic oligonucleotide
  Target: LAMA2; (-) strand; PAM type: NRG; PAM sequence: GGG
aaaaaggcaaggaaacatta

SEQ ID NO: 83082 - DNA, 20 bp, Artificial Sequence
  Description of Artificial Sequence: Synthetic oligonucleotide
  Target: LAMA2; (-) strand; PAM type: NRG; PAM sequence: AGG
aaaaaaggcaaggaaacatt

SEQ ID NO: 83083 - DNA, 20 bp, Artificial Sequence
  Description of Artificial Sequence: Synthetic oligonucleotide
  Target: LAMA2; (-) strand; PAM type: NRG; PAM sequence: TAG
aaaaaaaggcaaggaaacat

SEQ ID NO: 83084 - DNA, 20 bp, Artificial Sequence
  Description of Artificial Sequence: Synthetic oligonucleotide
  Target: LAMA2; (-) strand; PAM type: NRG; PAM sequence: AGG
ggaggagggaaaaaaaggca

SEQ ID NO: 83085 - DNA, 20 bp, Artificial Sequence
  Description of Artificial Sequence: Synthetic oligonucleotide
  Target: LAMA2; (-) strand; PAM type: NRG; PAM sequence: AAG
aggaggagggaaaaaaaggc

SEQ ID NO: 83086 - DNA, 20 bp, Artificial Sequence
  Description of Artificial Sequence: Synthetic oligonucleotide
  Target: LAMA2; (-) strand; PAM type: NRG; PAM sequence: AGG
agaaaggaggagggaaaaaa

SEQ ID NO: 83087 - DNA, 20 bp, Artificial Sequence
  Description of Artificial Sequence: Synthetic oligonucleotide
  Target: LAMA2; (-) strand; PAM type: NRG; PAM sequence: AAG
aagaaaggaggagggaaaaa

SEQ ID NO: 83088 - DNA, 20 bp, Artificial Sequence
  Description of Artificial Sequence: Synthetic oligonucleotide
  Target: LAMA2; (-) strand; PAM type: NRG; PAM sequence: GGG
tcagaaagaagaaaggagga

SEQ ID NO: 83089 - DNA, 20 bp, Artificial Sequence
  Description of Artificial Sequence: Synthetic oligonucleotide
  Target: LAMA2; (-) strand; PAM type: NRG; PAM sequence: AGG
atcagaaagaagaaaggagg

SEQ ID NO: 83090 - DNA, 20 bp, Artificial Sequence
  Description of Artificial Sequence: Synthetic oligonucleotide
  Target: LAMA2; (-) strand; PAM type: NRG; PAM sequence: GAG
catcagaaagaagaaaggag

SEQ ID NO: 83091 - DNA, 20 bp, Artificial Sequence
  Description of Artificial Sequence: Synthetic oligonucleotide
  Target: LAMA2; (-) strand; PAM type: NRG; PAM sequence: AGG
tccatcagaaagaagaaagg

SEQ ID NO: 83092 - DNA, 20 bp, Artificial Sequence
  Description of Artificial Sequence: Synthetic oligonucleotide
  Target: LAMA2; (-) strand; PAM type: NRG; PAM sequence: GAG
gtccatcagaaagaagaaag

SEQ ID NO: 83093 - DNA, 20 bp, Artificial Sequence
  Description of Artificial Sequence: Synthetic oligonucleotide
  Target: LAMA2; (-) strand; PAM type: NRG; PAM sequence: AGG
tagtccatcagaaagaagaa

SEQ ID NO: 83094 - DNA, 20 bp, Artificial Sequence
  Description of Artificial Sequence: Synthetic oligonucleotide
  Target: LAMA2; (-) strand; PAM type: NRG; PAM sequence: AAG
atagtccatcagaaagaaga

SEQ ID NO: 83095 - DNA, 20 bp, Artificial Sequence
  Description of Artificial Sequence: Synthetic oligonucleotide
  Target: LAMA2; (-) strand; PAM type: NRG; PAM sequence: AAG
atatatagtccatcagaaag

SEQ ID NO: 83096 - DNA, 20 bp, Artificial Sequence
  Description of Artificial Sequence: Synthetic oligonucleotide
  Target: LAMA2; (-) strand; PAM type: NRG; PAM sequence: AAG
aatatatatagtccatcaga

SEQ ID NO: 83097 - DNA, 20 bp, Artificial Sequence
  Description of Artificial Sequence: Synthetic oligonucleotide
  Target: LAMA2; (-) strand; PAM type: NRG; PAM sequence: CAG
cagtaatatatatagtccat

SEQ ID NO: 83098 - DNA, 20 bp, Artificial Sequence
  Description of Artificial Sequence: Synthetic oligonucleotide
  Target: LAMA2; (-) strand; PAM type: NRG; PAM sequence: TAG
aagcaaatcagtaatatata

SEQ ID NO: 83099 - DNA, 20 bp, Artificial Sequence
  Description of Artificial Sequence: Synthetic oligonucleotide
  Target: LAMA2; (-) strand; PAM type: NRG; PAM sequence: CAG
ggagaaagataaaagcaaat

SEQ ID NO: 83100 - DNA, 20 bp, Artificial Sequence
  Description of Artificial Sequence: Synthetic oligonucleotide
  Target: LAMA2; (-) strand; PAM type: NRG; PAM sequence: AAG
caaaatctggagaaagataa

SEQ ID NO: 83101 - DNA, 20 bp, Artificial Sequence
  Description of Artificial Sequence: Synthetic oligonucleotide
  Target: LAMA2; (-) strand; PAM type: NRG; PAM sequence: AAG
agaccttcaaaatctggaga

SEQ ID NO: 83102 - DNA, 20 bp, Artificial Sequence
  Description of Artificial Sequence: Synthetic oligonucleotide
  Target: LAMA2; (-) strand; PAM type: NRG; PAM sequence: GAG
taacagaccttcaaaatctg

SEQ ID NO: 83103 - DNA, 20 bp, Artificial Sequence
  Description of Artificial Sequence: Synthetic oligonucleotide
  Target: LAMA2; (-) strand; PAM type: NRG; PAM sequence: TGG
actaacagaccttcaaaatc

SEQ ID NO: 83104 - DNA, 20 bp, Artificial Sequence
  Description of Artificial Sequence: Synthetic oligonucleotide
  Target: LAMA2; (-) strand; PAM type: NRG; PAM sequence: CAG
ggatgaatgaatacaactaa

SEQ ID NO: 83105 - DNA, 20 bp, Artificial Sequence
  Description of Artificial Sequence: Synthetic oligonucleotide
  Target: LAMA2; (-) strand; PAM type: NRG; PAM sequence: AGG
ttaaaaaatagaaataatac

SEQ ID NO: 83106 - DNA, 20 bp, Artificial Sequence
  Description of Artificial Sequence: Synthetic oligonucleotide
  Target: LAMA2; (-) strand; PAM type: NRG; PAM sequence: CAG
attaaaaaatagaaataata

SEQ ID NO: 83107 - DNA, 20 bp, Artificial Sequence
  Description of Artificial Sequence: Synthetic oligonucleotide
  Target: LAMA2; (-) strand; PAM type: NRG; PAM sequence: TAG
tcatgtctttgattaaaaaa

SEQ ID NO: 83108 - DNA, 20 bp, Artificial Sequence
  Description of Artificial Sequence: Synthetic oligonucleotide
  Target: LAMA2; (-) strand; PAM type: NRG; PAM sequence: CAG
aaatttacttttttaacata

SEQ ID NO: 83109 - DNA, 20 bp, Artificial Sequence
  Description of Artificial Sequence: Synthetic oligonucleotide
  Target: LAMA2; (-) strand; PAM type: NRG; PAM sequence: AAG
caatagatgaggggaatgaa

SEQ ID NO: 83110 - DNA, 20 bp, Artificial Sequence
  Description of Artificial Sequence: Synthetic oligonucleotide
  Target: LAMA2; (-) strand; PAM type: NRG; PAM sequence: GGG
gataagaagcaatagatgag

SEQ ID NO: 83111 - DNA, 20 bp, Artificial Sequence
  Description of Artificial Sequence: Synthetic oligonucleotide
  Target: LAMA2; (-) strand; PAM type: NRG; PAM sequence: GGG
ggataagaagcaatagatga

SEQ ID NO: 83112 - DNA, 20 bp, Artificial Sequence
  Description of Artificial Sequence: Synthetic oligonucleotide
  Target: LAMA2; (-) strand; PAM type: NRG; PAM sequence: AGG
gggataagaagcaatagatg

SEQ ID NO: 83113 - DNA, 20 bp, Artificial Sequence
  Description of Artificial Sequence: Synthetic oligonucleotide
  Target: LAMA2; (-) strand; PAM type: NRG; PAM sequence: GAG
ggggataagaagcaatagat

SEQ ID NO: 83114 - DNA, 20 bp, Artificial Sequence
  Description of Artificial Sequence: Synthetic oligonucleotide
  Target: LAMA2; (-) strand; PAM type: NRG; PAM sequence: TAG
attttggggataagaagcaa

SEQ ID NO: 83115 - DNA, 20 bp, Artificial Sequence
  Description of Artificial Sequence: Synthetic oligonucleotide
  Target: LAMA2; (-) strand; PAM type: NRG; PAM sequence: AAG
attgatattttggggataag

SEQ ID NO: 83116 - DNA, 20 bp, Artificial Sequence
  Description of Artificial Sequence: Synthetic oligonucleotide
  Target: LAMA2; (-) strand; PAM type: NRG; PAM sequence: AAG
ggaattgatattttggggat

SEQ ID NO: 83117 - DNA, 20 bp, Artificial Sequence
  Description of Artificial Sequence: Synthetic oligonucleotide
  Target: LAMA2; (-) strand; PAM type: NRG; PAM sequence: GGG
tcattggaattgatattttg

SEQ ID NO: 83118 - DNA, 20 bp, Artificial Sequence
  Description of Artificial Sequence: Synthetic oligonucleotide
  Target: LAMA2; (-) strand; PAM type: NRG; PAM sequence: GGG
ttcattggaattgatatttt

SEQ ID NO: 83119 - DNA, 20 bp, Artificial Sequence
  Description of Artificial Sequence: Synthetic oligonucleotide
  Target: LAMA2; (-) strand; PAM type: NRG; PAM sequence: TGG
gttcattggaattgatattt

SEQ ID NO: 83120 - DNA, 20 bp, Artificial Sequence
  Description of Artificial Sequence: Synthetic oligonucleotide
  Target: LAMA2; (-) strand; PAM type: NRG; PAM sequence: TGG
aagaaaataaaggtgttcat

SEQ ID NO: 83121 - DNA, 20 bp, Artificial Sequence
  Description of Artificial Sequence: Synthetic oligonucleotide
  Target: LAMA2; (-) strand; PAM type: NRG; PAM sequence: AGG
agtattactaaagaaaataa

SEQ ID NO: 83122 - DNA, 20 bp, Artificial Sequence
  Description of Artificial Sequence: Synthetic oligonucleotide
  Target: LAMA2; (-) strand; PAM type: NRG; PAM sequence: AAG
cagtattactaaagaaaata

SEQ ID NO: 83123 - DNA, 20 bp, Artificial Sequence
  Description of Artificial Sequence: Synthetic oligonucleotide
  Target: LAMA2; (-) strand; PAM type: NRG; PAM sequence: AAG
tgccactggcagtattacta

SEQ ID NO: 83124 - DNA, 20 bp, Artificial Sequence
  Description of Artificial Sequence: Synthetic oligonucleotide
  Target: LAMA2; (-) strand; PAM type: NRG; PAM sequence: CAG
ctctaagaacatgccactgg

SEQ ID NO: 83125 - DNA, 20 bp, Artificial Sequence
  Description of Artificial Sequence: Synthetic oligonucleotide
  Target: LAMA2; (-) strand; PAM type: NRG; PAM sequence: TGG
atactctaagaacatgccac

SEQ ID NO: 83126 - DNA, 20 bp, Artificial Sequence
  Description of Artificial Sequence: Synthetic oligonucleotide
  Target: LAMA2; (-) strand; PAM type: NRG; PAM sequence: AAG
cagtttaacaatgatactct

SEQ ID NO: 83127 - DNA, 20 bp, Artificial Sequence
  Description of Artificial Sequence: Synthetic oligonucleotide
  Target: LAMA2; (-) strand; PAM type: NRG; PAM sequence: CAG
agacatattacttaaaataa

SEQ ID NO: 83128 - DNA, 20 bp, Artificial Sequence
  Description of Artificial Sequence: Synthetic oligonucleotide
  Target: LAMA2; (-) strand; PAM type: NRG; PAM sequence: AAG
gcaaagtagccttgggaata

SEQ ID NO: 83129 - DNA, 20 bp, Artificial Sequence
  Description of Artificial Sequence: Synthetic oligonucleotide
  Target: LAMA2; (-) strand; PAM type: NRG; PAM sequence: GGG
tacaggtgcaaagtagcctt

SEQ ID NO: 83130 - DNA, 20 bp, Artificial Sequence
  Description of Artificial Sequence: Synthetic oligonucleotide
  Target: LAMA2; (-) strand; PAM type: NRG; PAM sequence: TGG
ttacaggtgcaaagtagcct

SEQ ID NO: 83131 - DNA, 20 bp, Artificial Sequence
  Description of Artificial Sequence: Synthetic oligonucleotide
  Target: LAMA2; (-) strand; PAM type: NRG; PAM sequence: TAG
agactattacaggtgcaaag

SEQ ID NO: 83132 - DNA, 20 bp, Artificial Sequence
  Description of Artificial Sequence: Synthetic oligonucleotide
  Target: LAMA2; (-) strand; PAM type: NRG; PAM sequence: AAG
accagactattacaggtgca

SEQ ID NO: 83133 - DNA, 20 bp, Artificial Sequence
  Description of Artificial Sequence: Synthetic oligonucleotide
  Target: LAMA2; (-) strand; PAM type: NRG; PAM sequence: AGG
ctgctccaccagactattac

SEQ ID NO: 83134 - DNA, 20 bp, Artificial Sequence
  Description of Artificial Sequence: Synthetic oligonucleotide
  Target: LAMA2; (-) strand; PAM type: NRG; PAM sequence: CAG
cctgctccaccagactatta

SEQ ID NO: 83135 - DNA, 20 bp, Artificial Sequence
  Description of Artificial Sequence: Synthetic oligonucleotide
  Target: LAMA2; (-) strand; PAM type: NRG; PAM sequence: CAG
acggaacaagcctgctccac

SEQ ID NO: 83136 - DNA, 20 bp, Artificial Sequence
  Description of Artificial Sequence: Synthetic oligonucleotide
  Target: LAMA2; (-) strand; PAM type: NRG; PAM sequence: AAG
aaactagtggctcacggaac

SEQ ID NO: 83137 - DNA, 20 bp, Artificial Sequence
  Description of Artificial Sequence: Synthetic oligonucleotide
  Target: LAMA2; (-) strand; PAM type: NRG; PAM sequence: CGG
aatgcaaaactagtggctca

SEQ ID NO: 83138 - DNA, 20 bp, Artificial Sequence
  Description of Artificial Sequence: Synthetic oligonucleotide
  Target: LAMA2; (-) strand; PAM type: NRG; PAM sequence: TGG
agtaacaaatgcaaaactag

SEQ ID NO: 83139 - DNA, 20 bp, Artificial Sequence
  Description of Artificial Sequence: Synthetic oligonucleotide
  Target: LAMA2; (-) strand; PAM type: NRG; PAM sequence: TAG
agcagtaacaaatgcaaaac

SEQ ID NO: 83140 - DNA, 20 bp, Artificial Sequence
  Description of Artificial Sequence: Synthetic oligonucleotide
  Target: LAMA2; (-) strand; PAM type: NRG; PAM sequence: CAG
gctacattgagaagaataag

SEQ ID NO: 83141 - DNA, 20 bp, Artificial Sequence
  Description of Artificial Sequence: Synthetic oligonucleotide
  Target: LAMA2; (-) strand; PAM type: NRG; PAM sequence: AAG
gatgctacattgagaagaat

SEQ ID NO: 83142 - DNA, 20 bp, Artificial Sequence
  Description of Artificial Sequence: Synthetic oligonucleotide
  Target: LAMA2; (-) strand; PAM type: NRG; PAM sequence: AAG
gctgatgatgctacattgag

SEQ ID NO: 83143 - DNA, 20 bp, Artificial Sequence
  Description of Artificial Sequence: Synthetic oligonucleotide
  Target: LAMA2; (-) strand; PAM type: NRG; PAM sequence: GAG
aatgctgatgatgctacatt

SEQ ID NO: 83144 - DNA, 20 bp, Artificial Sequence
  Description of Artificial Sequence: Synthetic oligonucleotide
  Target: LAMA2; (-) strand; PAM type: NRG; PAM sequence: GAG
tatagaaaacaatgaccaag

SEQ ID NO: 83145 - DNA, 20 bp, Artificial Sequence
  Description of Artificial Sequence: Synthetic oligonucleotide
  Target: LAMA2; (-) strand; PAM type: NRG; PAM sequence: AGG
gctatagaaaacaatgacca

SEQ ID NO: 83146 - DNA, 20 bp, Artificial Sequence
  Description of Artificial Sequence: Synthetic oligonucleotide
  Target: LAMA2; (-) strand; PAM type: NRG; PAM sequence: AAG
ggctatagaaaacaatgacc

SEQ ID NO: 83147 - DNA, 20 bp, Artificial Sequence
  Description of Artificial Sequence: Synthetic oligonucleotide
  Target: LAMA2; (-) strand; PAM type: NRG; PAM sequence: TAG
catctaccaaactatggcta

SEQ ID NO: 83148 - DNA, 20 bp, Artificial Sequence
  Description of Artificial Sequence: Synthetic oligonucleotide
  Target: LAMA2; (-) strand; PAM type: NRG; PAM sequence: TGG
tcaaagcatctaccaaacta

SEQ ID NO: 83149 - DNA, 20 bp, Artificial Sequence
  Description of Artificial Sequence: Synthetic oligonucleotide
  Target: LAMA2; (-) strand; PAM type: NRG; PAM sequence: AAG
acaagaaagatgaaatctca

SEQ ID NO: 83150 - DNA, 20 bp, Artificial Sequence
  Description of Artificial Sequence: Synthetic oligonucleotide
  Target: LAMA2; (-) strand; PAM type: NRG; PAM sequence: AAG
tattaaaaatgtaaacaaga

SEQ ID NO: 83151 - DNA, 20 bp, Artificial Sequence
  Description of Artificial Sequence: Synthetic oligonucleotide
  Target: LAMA2; (-) strand; PAM type: NRG; PAM sequence: AAG
gaaatattaaaaatgtaaac

SEQ ID NO: 83152 - DNA, 20 bp, Artificial Sequence
  Description of Artificial Sequence: Synthetic oligonucleotide
  Target: LAMA2; (-) strand; PAM type: NRG; PAM sequence: TAG
tagcatcttctaagtgtcaa

SEQ ID NO: 83153 - DNA, 20 bp, Artificial Sequence
  Description of Artificial Sequence: Synthetic oligonucleotide
  Target: LAMA2; (-) strand; PAM type: NRG; PAM sequence: AAG
acgtgaacatagcatcttct

SEQ ID NO: 83154 - DNA, 20 bp, Artificial Sequence
  Description of Artificial Sequence: Synthetic oligonucleotide
  Target: LAMA2; (-) strand; PAM type: NRG; PAM sequence: TAG
tttctatgattacgtgaaca

SEQ ID NO: 83155 - DNA, 20 bp, Artificial Sequence
  Description of Artificial Sequence: Synthetic oligonucleotide
  Target: LAMA2; (-) strand; PAM type: NRG; PAM sequence: AAG
agagtagagggtttaattaa

SEQ ID NO: 83156 - DNA, 20 bp, Artificial Sequence
  Description of Artificial Sequence: Synthetic oligonucleotide
  Target: LAMA2; (-) strand; PAM type: NRG; PAM sequence: GGG
agttaaaaccaaagagtaga

SEQ ID NO: 83157 - DNA, 20 bp, Artificial Sequence
  Description of Artificial Sequence: Synthetic oligonucleotide
  Target: LAMA2; (-) strand; PAM type: NRG; PAM sequence: AGG
aagttaaaaccaaagagtag

SEQ ID NO: 83158 - DNA, 20 bp, Artificial Sequence
  Description of Artificial Sequence: Synthetic oligonucleotide
  Target: LAMA2; (-) strand; PAM type: NRG; PAM sequence: GAG
aaagttaaaaccaaagagta

SEQ ID NO: 83159 - DNA, 20 bp, Artificial Sequence
  Description of Artificial Sequence: Synthetic oligonucleotide
  Target: LAMA2; (-) strand; PAM type: NRG; PAM sequence: TAG
gaaaagttaaaaccaaagag

SEQ ID NO: 83160 - DNA, 20 bp, Artificial Sequence
  Description of Artificial Sequence: Synthetic oligonucleotide
  Target: LAMA2; (-) strand; PAM type: NRG; PAM sequence: GAG
aaagaaaagttaaaaccaaa

SEQ ID NO: 83161 - DNA, 20 bp, Artificial Sequence
  Description of Artificial Sequence: Synthetic oligonucleotide
  Target: LAMA2; (-) strand; PAM type: NRG; PAM sequence: AAG
ataaagaaaagttaaaacca

SEQ ID NO: 83162 - DNA, 20 bp, Artificial Sequence
  Description of Artificial Sequence: Synthetic oligonucleotide
  Target: LAMA2; (-) strand; PAM type: NRG; PAM sequence: AAG
ttatatatatcaataaagaa

SEQ ID NO: 83163 - DNA, 20 bp, Artificial Sequence
  Description of Artificial Sequence: Synthetic oligonucleotide
  Target: LAMA2; (-) strand; PAM type: NRG; PAM sequence: AAG
attttttatatatatcaata

SEQ ID NO: 83164 - DNA, 20 bp, Artificial Sequence
  Description of Artificial Sequence: Synthetic oligonucleotide
  Target: LAMA2; (-) strand; PAM type: NRG; PAM sequence: TAG
atgctattttgacacaaaaa

SEQ ID NO: 83165 - DNA, 20 bp, Artificial Sequence
  Description of Artificial Sequence: Synthetic oligonucleotide
  Target: LAMA2; (-) strand; PAM type: NRG; PAM sequence: CAG
agttgttaaagttttaatga

SEQ ID NO: 83166 - DNA, 20 bp, Artificial Sequence
  Description of Artificial Sequence: Synthetic oligonucleotide
  Target: LAMA2; (-) strand; PAM type: NRG; PAM sequence: AAG
agtacataatttagttgtta

SEQ ID NO: 83167 - DNA, 20 bp, Artificial Sequence
  Description of Artificial Sequence: Synthetic oligonucleotide
  Target: LAMA2; (-) strand; PAM type: NRG; PAM sequence: TAG
tctaaaacaagtacataatt

SEQ ID NO: 83168 - DNA, 20 bp, Artificial Sequence
  Description of Artificial Sequence: Synthetic oligonucleotide
  Target: LAMA2; (-) strand; PAM type: NRG; PAM sequence: AAG
catatcaacatttctaaaac

SEQ ID NO: 83169 - DNA, 20 bp, Artificial Sequence
  Description of Artificial Sequence: Synthetic oligonucleotide
  Target: LAMA2; (-) strand; PAM type: NRG; PAM sequence: GAG
tgccaaacctaaagaaagat

SEQ ID NO: 83170 - DNA, 20 bp, Artificial Sequence
  Description of Artificial Sequence: Synthetic oligonucleotide
  Target: LAMA2; (-) strand; PAM type: NRG; PAM sequence: AAG
ccaggtgccaaacctaaaga

SEQ ID NO: 83171 - DNA, 20 bp, Artificial Sequence
  Description of Artificial Sequence: Synthetic oligonucleotide
  Target: LAMA2; (-) strand; PAM type: NRG; PAM sequence: AAG
ggatccaggtgccaaaccta

SEQ ID NO: 83172 - DNA, 20 bp, Artificial Sequence
  Description of Artificial Sequence: Synthetic oligonucleotide
  Target: LAMA2; (-) strand; PAM type: NRG; PAM sequence: AGG
gttttgcaatgacaggatcc

SEQ ID NO: 83173 - DNA, 20 bp, Artificial Sequence
  Description of Artificial Sequence: Synthetic oligonucleotide
  Target: LAMA2; (-) strand; PAM type: NRG; PAM sequence: CAG
agttttgcaatgacaggatc

SEQ ID NO: 83174 - DNA, 20 bp, Artificial Sequence
  Description of Artificial Sequence: Synthetic oligonucleotide
  Target: LAMA2; (-) strand; PAM type: NRG; PAM sequence: AGG
aaaaccagttttgcaatgac

SEQ ID NO: 83175 - DNA, 20 bp, Artificial Sequence
  Description of Artificial Sequence: Synthetic oligonucleotide
  Target: LAMA2; (-) strand; PAM type: NRG; PAM sequence: CAG
caaaaccagttttgcaatga

SEQ ID NO: 83176 - DNA, 20 bp, Artificial Sequence
  Description of Artificial Sequence: Synthetic oligonucleotide
  Target: LAMA2; (-) strand; PAM type: NRG; PAM sequence: CAG
acagctcacacctccaaaac

SEQ ID NO: 83177 - DNA, 20 bp, Artificial Sequence
  Description of Artificial Sequence: Synthetic oligonucleotide
  Target: LAMA2; (-) strand; PAM type: NRG; PAM sequence: CAG
agcccctggcacaccgatca

SEQ ID NO: 83178 - DNA, 20 bp, Artificial Sequence
  Description of Artificial Sequence: Synthetic oligonucleotide
  Target: LAMA2; (-) strand; PAM type: NRG; PAM sequence: TGG
cgggtagccagtgtagcccc

SEQ ID NO: 83179 - DNA, 20 bp, Artificial Sequence
  Description of Artificial Sequence: Synthetic oligonucleotide
  Target: LAMA2; (-) strand; PAM type: NRG; PAM sequence: TAG
tgcagtccgggtagccagtg

SEQ ID NO: 83180 - DNA, 20 bp, Artificial Sequence
  Description of Artificial Sequence: Synthetic oligonucleotide
  Target: LAMA2; (-) strand; PAM type: NRG; PAM sequence: CAG
ggctttgcagtccgggtagc

SEQ ID NO: 83181 - DNA, 20 bp, Artificial Sequence
  Description of Artificial Sequence: Synthetic oligonucleotide
  Target: LAMA2; (-) strand; PAM type: NRG; PAM sequence: TAG
tacaggctttgcagtccggg

SEQ ID NO: 83182 - DNA, 20 bp, Artificial Sequence
  Description of Artificial Sequence: Synthetic oligonucleotide
  Target: LAMA2; (-) strand; PAM type: NRG; PAM sequence: GGG
agttacaggctttgcagtcc

SEQ ID NO: 83183 - DNA, 20 bp, Artificial Sequence
  Description of Artificial Sequence: Synthetic oligonucleotide
  Target: LAMA2; (-) strand; PAM type: NRG; PAM sequence: CGG
cagttacaggctttgcagtc

SEQ ID NO: 83184 - DNA, 20 bp, Artificial Sequence
  Description of Artificial Sequence: Synthetic oligonucleotide
  Target: LAMA2; (-) strand; PAM type: NRG; PAM sequence: CAG
cactgcagttacaggctttg

SEQ ID NO: 83185 - DNA, 20 bp, Artificial Sequence
  Description of Artificial Sequence: Synthetic oligonucleotide
  Target: LAMA2; (-) strand; PAM type: NRG; PAM sequence: AGG
ccctaacccactgcagttac

SEQ ID NO: 83186 - DNA, 20 bp, Artificial Sequence
  Description of Artificial Sequence: Synthetic oligonucleotide
  Target: LAMA2; (-) strand; PAM type: NRG; PAM sequence: CAG
tccctaacccactgcagtta

SEQ ID NO: 83187 - DNA, 20 bp, Artificial Sequence
  Description of Artificial Sequence: Synthetic oligonucleotide
  Target: LAMA2; (-) strand; PAM type: NRG; PAM sequence: CAG
ttttgctccctaacccactg

SEQ ID NO: 83188 - DNA, 20 bp, Artificial Sequence
  Description of Artificial Sequence: Synthetic oligonucleotide
  Target: LAMA2; (-) strand; PAM type: NRG; PAM sequence: AGG
cagatacaggggccaaaaca

SEQ ID NO: 83189 - DNA, 20 bp, Artificial Sequence
  Description of Artificial Sequence: Synthetic oligonucleotide
  Target: LAMA2; (-) strand; PAM type: NRG; PAM sequence: AAG
gcagatacaggggccaaaac

SEQ ID NO: 83190 - DNA, 20 bp, Artificial Sequence
  Description of Artificial Sequence: Synthetic oligonucleotide
  Target: LAMA2; (-) strand; PAM type: NRG; PAM sequence: GGG
aatgtaccttgcagatacag

SEQ ID NO: 83191 - DNA, 20 bp, Artificial Sequence
  Description of Artificial Sequence: Synthetic oligonucleotide
  Target: LAMA2; (-) strand; PAM type: NRG; PAM sequence: GGG
caatgtaccttgcagataca

SEQ ID NO: 83192 - DNA, 20 bp, Artificial Sequence
  Description of Artificial Sequence: Synthetic oligonucleotide
  Target: LAMA2; (-) strand; PAM type: NRG; PAM sequence: AGG
acaatgtaccttgcagatac

SEQ ID NO: 83193 - DNA, 20 bp, Artificial Sequence
  Description of Artificial Sequence: Synthetic oligonucleotide
  Target: LAMA2; (-) strand; PAM type: NRG; PAM sequence: CAG
aacaatgtaccttgcagata

SEQ ID NO: 83194 - DNA, 20 bp, Artificial Sequence
  Description of Artificial Sequence: Synthetic oligonucleotide
  Target: LAMA2; (-) strand; PAM type: NRG; PAM sequence: CAG
ggaataaacaatgtaccttg

SEQ ID NO: 83195 - DNA, 20 bp, Artificial Sequence
  Description of Artificial Sequence: Synthetic oligonucleotide
  Target: LAMA2; (-) strand; PAM type: NRG; PAM sequence: TGG
tcttgacagtgggacattac

SEQ ID NO: 83196 - DNA, 20 bp, Artificial Sequence
  Description of Artificial Sequence: Synthetic oligonucleotide
  Target: LAMA2; (-) strand; PAM type: NRG; PAM sequence: GGG
taaccttctgtcttgacagt

SEQ ID NO: 83197 - DNA, 20 bp, Artificial Sequence
  Description of Artificial Sequence: Synthetic oligonucleotide
  Target: LAMA2; (-) strand; PAM type: NRG; PAM sequence: TGG
ataaccttctgtcttgacag

SEQ ID NO: 83198 - DNA, 20 bp, Artificial Sequence
  Description of Artificial Sequence: Synthetic oligonucleotide
  Target: LAMA2; (-) strand; PAM type: NRG; PAM sequence: CAG
aaaataaccttctgtcttga

SEQ ID NO: 83199 - DNA, 20 bp, Artificial Sequence
  Description of Artificial Sequence: Synthetic oligonucleotide
  Target: LAMA2; (-) strand; PAM type: NRG; PAM sequence: AAG
aggaaatcaacagagaagcc

SEQ ID NO: 83200 - DNA, 20 bp, Artificial Sequence
  Description of Artificial Sequence: Synthetic oligonucleotide
  Target: LAMA2; (-) strand; PAM type: NRG; PAM sequence: AAG
tgccaaggaaatcaacagag

SEQ ID NO: 83201 - DNA, 20 bp, Artificial Sequence
  Description of Artificial Sequence: Synthetic oligonucleotide
  Target: LAMA2; (-) strand; PAM type: NRG; PAM sequence: GAG
taatgccaaggaaatcaaca

SEQ ID NO: 83202 - DNA, 20 bp, Artificial Sequence
  Description of Artificial Sequence: Synthetic oligonucleotide
  Target: LAMA2; (-) strand; PAM type: NRG; PAM sequence: CAG
cttaatgccaaggaaatcaa

SEQ ID NO: 83203 - DNA, 20 bp, Artificial Sequence
  Description of Artificial Sequence: Synthetic oligonucleotide
  Target: LAMA2; (-) strand; PAM type: NRG; PAM sequence: AGG
attaaaattgcttaatgcca

SEQ ID NO: 83204 - DNA, 20 bp, Artificial Sequence
  Description of Artificial Sequence: Synthetic oligonucleotide
  Target: LAMA2; (-) strand; PAM type: NRG; PAM sequence: AAG
cattaaaattgcttaatgcc

SEQ ID NO: 83205 - DNA, 20 bp, Artificial Sequence
  Description of Artificial Sequence: Synthetic oligonucleotide
  Target: LAMA2; (-) strand; PAM type: NRG; PAM sequence: AAG
tagattatggatacttccag

SEQ ID NO: 83206 - DNA, 20 bp, Artificial Sequence
  Description of Artificial Sequence: Synthetic oligonucleotide
  Target: LAMA2; (-) strand; PAM type: NRG; PAM sequence: CAG
gaatagattatggatacttc

SEQ ID NO: 83207 - DNA, 20 bp, Artificial Sequence
  Description of Artificial Sequence: Synthetic oligonucleotide
  Target: LAMA2; (-) strand; PAM type: NRG; PAM sequence: TGG
accacacgtagaatagatta

SEQ ID NO: 83208 - DNA, 20 bp, Artificial Sequence
  Description of Artificial Sequence: Synthetic oligonucleotide
  Target: LAMA2; (-) strand; PAM type: NRG; PAM sequence: TAG
gtgggtcaccacacgtagaa

SEQ ID NO: 83209 - DNA, 20 bp, Artificial Sequence
  Description of Artificial Sequence: Synthetic oligonucleotide
  Target: LAMA2; (-) strand; PAM type: NRG; PAM sequence: TAG
acctggtgggtcaccacacg

SEQ ID NO: 83210 - DNA, 20 bp, Artificial Sequence
  Description of Artificial Sequence: Synthetic oligonucleotide
  Target: LAMA2; (-) strand; PAM type: NRG; PAM sequence: GGG
cctgctacagtgaacctggt

SEQ ID NO: 83211 - DNA, 20 bp, Artificial Sequence
  Description of Artificial Sequence: Synthetic oligonucleotide
  Target: LAMA2; (-) strand; PAM type: NRG; PAM sequence: TGG
tcctgctacagtgaacctgg

SEQ ID NO: 83212 - DNA, 20 bp, Artificial Sequence
  Description of Artificial Sequence: Synthetic oligonucleotide
  Target: LAMA2; (-) strand; PAM type: NRG; PAM sequence: TGG
acatcctgctacagtgaacc

SEQ ID NO: 83213 - DNA, 20 bp, Artificial Sequence
  Description of Artificial Sequence: Synthetic oligonucleotide
  Target: LAMA2; (-) strand; PAM type: NRG; PAM sequence: CAG
gccttataaacatcctgcta

SEQ ID NO: 83214 - DNA, 20 bp, Artificial Sequence
  Description of Artificial Sequence: Synthetic oligonucleotide
  Target: LAMA2; (-) strand; PAM type: NRG; PAM sequence: AAG
gcatttgtaggcttttagat

SEQ ID NO: 83215 - DNA, 20 bp, Artificial Sequence
  Description of Artificial Sequence: Synthetic oligonucleotide
  Target: LAMA2; (-) strand; PAM type: NRG; PAM sequence: TAG
tccgtgcatttgtaggcttt

SEQ ID NO: 83216 - DNA, 20 bp, Artificial Sequence
  Description of Artificial Sequence: Synthetic oligonucleotide
  Target: LAMA2; (-) strand; PAM type: NRG; PAM sequence: AGG
tttatcctccgtgcatttgt

SEQ ID NO: 83217 - DNA, 20 bp, Artificial Sequence
  Description of Artificial Sequence: Synthetic oligonucleotide
  Target: LAMA2; (-) strand; PAM type: NRG; PAM sequence: TAG
gtttatcctccgtgcatttg

SEQ ID NO: 83218 - DNA, 20 bp, Artificial Sequence
  Description of Artificial Sequence: Synthetic oligonucleotide
  Target: LAMA2; (-) strand; PAM type: NRG; PAM sequence: TGG
aaataacaagcctttaaacg

SEQ ID NO: 83219 - DNA, 20 bp, Artificial Sequence
  Description of Artificial Sequence: Synthetic oligonucleotide
  Target: LAMA2; (-) strand; PAM type: NRG; PAM sequence: AAG
tgtttttgttataaaataac

SEQ ID NO: 83220 - DNA, 20 bp, Artificial Sequence
  Description of Artificial Sequence: Synthetic oligonucleotide
  Target: LAMA2; (-) strand; PAM type: NRG; PAM sequence: AAG
ctagttgggcaatggggtga

SEQ ID NO: 83221 - DNA, 20 bp, Artificial Sequence
  Description of Artificial Sequence: Synthetic oligonucleotide
  Target: LAMA2; (-) strand; PAM type: NRG; PAM sequence: GGG
aacacactagttgggcaatg

SEQ ID NO: 83222 - DNA, 20 bp, Artificial Sequence
  Description of Artificial Sequence: Synthetic oligonucleotide
  Target: LAMA2; (-) strand; PAM type: NRG; PAM sequence: GGG
taacacactagttgggcaat

SEQ ID NO: 83223 - DNA, 20 bp, Artificial Sequence
  Description of Artificial Sequence: Synthetic oligonucleotide
  Target: LAMA2; (-) strand; PAM type: NRG; PAM sequence: TGG
ttaacacactagttgggcaa

SEQ ID NO: 83224 - DNA, 20 bp, Artificial Sequence
  Description of Artificial Sequence: Synthetic oligonucleotide
  Target: LAMA2; (-) strand; PAM type: NRG; PAM sequence: GGG
tttaaattaacacactagtt

SEQ ID NO: 83225 - DNA, 20 bp, Artificial Sequence
  Description of Artificial Sequence: Synthetic oligonucleotide
  Target: LAMA2; (-) strand; PAM type: NRG; PAM sequence: TGG
ttttaaattaacacactagt

SEQ ID NO: 83226 - DNA, 20 bp, Artificial Sequence
  Description of Artificial Sequence: Synthetic oligonucleotide
  Target: LAMA2; (-) strand; PAM type: NRG; PAM sequence: TAG
atatttttaaattaacacac

SEQ ID NO: 83227 - DNA, 20 bp, Artificial Sequence
  Description of Artificial Sequence: Synthetic oligonucleotide
  Target: LAMA2; (-) strand; PAM type: NRG; PAM sequence: TAG
ttttaaagggttgctatttc

SEQ ID NO: 83228 - DNA, 20 bp, Artificial Sequence
  Description of Artificial Sequence: Synthetic oligonucleotide
  Target: LAMA2; (-) strand; PAM type: NRG; PAM sequence: GGG
gaatgcactttagttttaaa

SEQ ID NO: 83229 - DNA, 20 bp, Artificial Sequence
  Description of Artificial Sequence: Synthetic oligonucleotide
  Target: LAMA2; (-) strand; PAM type: NRG; PAM sequence: AGG
tgaatgcactttagttttaa

SEQ ID NO: 83230 - DNA, 20 bp, Artificial Sequence
  Description of Artificial Sequence: Synthetic oligonucleotide
  Target: LAMA2; (-) strand; PAM type: NRG; PAM sequence: AAG
ttgaatgcactttagtttta

SEQ ID NO: 83231 - DNA, 20 bp, Artificial Sequence
  Description of Artificial Sequence: Synthetic oligonucleotide
  Target: LAMA2; (-) strand; PAM type: NRG; PAM sequence: TAG
aggtagatttgaatgcactt

SEQ ID NO: 83232 - DNA, 20 bp, Artificial Sequence
  Description of Artificial Sequence: Synthetic oligonucleotide
  Target: LAMA2; (-) strand; PAM type: NRG; PAM sequence: TAG
tactgaattagatgcaaagg

SEQ ID NO: 83233 - DNA, 20 bp, Artificial Sequence
  Description of Artificial Sequence: Synthetic oligonucleotide
  Target: LAMA2; (-) strand; PAM type: NRG; PAM sequence: AGG
cattactgaattagatgcaa

SEQ ID NO: 83234 - DNA, 20 bp, Artificial Sequence
  Description of Artificial Sequence: Synthetic oligonucleotide
  Target: LAMA2; (-) strand; PAM type: NRG; PAM sequence: AAG
tcattactgaattagatgca

SEQ ID NO: 83235 - DNA, 20 bp, Artificial Sequence
  Description of Artificial Sequence: Synthetic oligonucleotide
  Target: LAMA2; (-) strand; PAM type: NRG; PAM sequence: TAG
gacagaattcattactgaat

SEQ ID NO: 83236 - DNA, 20 bp, Artificial Sequence
  Description of Artificial Sequence: Synthetic oligonucleotide
  Target: LAMA2; (-) strand; PAM type: NRG; PAM sequence: CAG
attcagaataaaacccttga

SEQ ID NO: 83237 - DNA, 20 bp, Artificial Sequence
  Description of Artificial Sequence: Synthetic oligonucleotide
  Target: LAMA2; (-) strand; PAM type: NRG; PAM sequence: CAG
tagaagattatttaaaaatt

SEQ ID NO: 83238 - DNA, 20 bp, Artificial Sequence
  Description of Artificial Sequence: Synthetic oligonucleotide
  Target: LAMA2; (-) strand; PAM type: NRG; PAM sequence: AAG
tatctgggttcaaactttag

SEQ ID NO: 83239 - DNA, 20 bp, Artificial Sequence
  Description of Artificial Sequence: Synthetic oligonucleotide
  Target: LAMA2; (-) strand; PAM type: NRG; PAM sequence: TAG
gcttatctgggttcaaactt

SEQ ID NO: 83240 - DNA, 20 bp, Artificial Sequence
  Description of Artificial Sequence: Synthetic oligonucleotide
  Target: LAMA2; (-) strand; PAM type: NRG; PAM sequence: GGG
gagtattttaaggcttatct

SEQ ID NO: 83241 - DNA, 20 bp, Artificial Sequence
  Description of Artificial Sequence: Synthetic oligonucleotide
  Target: LAMA2; (-) strand; PAM type: NRG; PAM sequence: TGG
tgagtattttaaggcttatc

SEQ ID NO: 83242 - DNA, 20 bp, Artificial Sequence
  Description of Artificial Sequence: Synthetic oligonucleotide
  Target: LAMA2; (-) strand; PAM type: NRG; PAM sequence: AGG
tgaatataatgagtatttta

SEQ ID NO: 83243 - DNA, 20 bp, Artificial Sequence
  Description of Artificial Sequence: Synthetic oligonucleotide
  Target: LAMA2; (-) strand; PAM type: NRG; PAM sequence: AAG
ttgaatataatgagtatttt

SEQ ID NO: 83244 - DNA, 20 bp, Artificial Sequence
  Description of Artificial Sequence: Synthetic oligonucleotide
  Target: LAMA2; (-) strand; PAM type: NRG; PAM sequence: GAG
cagaaaaatttgaatataat

SEQ ID NO: 83245 - DNA, 20 bp, Artificial Sequence
  Description of Artificial Sequence: Synthetic oligonucleotide
  Target: LAMA2; (-) strand; PAM type: NRG; PAM sequence: CAG
tgtacttttttataattgaa

SEQ ID NO: 83246 - DNA, 20 bp, Artificial Sequence
  Description of Artificial Sequence: Synthetic oligonucleotide
  Target: LAMA2; (-) strand; PAM type: NRG; PAM sequence: GGG
gcctttaattaattccatta

SEQ ID NO: 83247 - DNA, 20 bp, Artificial Sequence
  Description of Artificial Sequence: Synthetic oligonucleotide
  Target: LAMA2; (-) strand; PAM type: NRG; PAM sequence: AGG
agcctttaattaattccatt

SEQ ID NO: 83248 - DNA, 20 bp, Artificial Sequence
  Description of Artificial Sequence: Synthetic oligonucleotide
  Target: LAMA2; (-) strand; PAM type: NRG; PAM sequence: TAG
gagcctttaattaattccat

SEQ ID NO: 83249 - DNA, 20 bp, Artificial Sequence
  Description of Artificial Sequence: Synthetic oligonucleotide
  Target: LAMA2; (-) strand; PAM type: NRG; PAM sequence: GAG
taatcttggaagaaaatatt

SEQ ID NO: 83250 - DNA, 20 bp, Artificial Sequence
  Description of Artificial Sequence: Synthetic oligonucleotide
  Target: LAMA2; (-) strand; PAM type: NRG; PAM sequence: AAG
atttctaaaagtaatcttgg

SEQ ID NO: 83251 - DNA, 20 bp, Artificial Sequence
  Description of Artificial Sequence: Synthetic oligonucleotide
  Target: LAMA2; (-) strand; PAM type: NRG; PAM sequence: TGG
tgcatttctaaaagtaatct

SEQ ID NO: 83252 - DNA, 20 bp, Artificial Sequence
  Description of Artificial Sequence: Synthetic oligonucleotide
  Target: LAMA2; (-) strand; PAM type: NRG; PAM sequence: AAG
aaataaagttgcatttctaa

SEQ ID NO: 83253 - DNA, 20 bp, Artificial Sequence
  Description of Artificial Sequence: Synthetic oligonucleotide
  Target: LAMA2; (-) strand; PAM type: NRG; PAM sequence: AAG
gtgagcatgtacaacaaata

SEQ ID NO: 83254 - DNA, 20 bp, Artificial Sequence
  Description of Artificial Sequence: Synthetic oligonucleotide
  Target: LAMA2; (-) strand; PAM type: NRG; PAM sequence: GAG
aacatgatttgttattaggt

SEQ ID NO: 83255 - DNA, 20 bp, Artificial Sequence
  Description of Artificial Sequence: Synthetic oligonucleotide
  Target: LAMA2; (-) strand; PAM type: NRG; PAM sequence: AGG
tgttaacatgatttgttatt

SEQ ID NO: 83256 - DNA, 20 bp, Artificial Sequence
  Description of Artificial Sequence: Synthetic oligonucleotide
  Target: LAMA2; (-) strand; PAM type: NRG; PAM sequence: TAG
gtgttaacatgatttgttat

SEQ ID NO: 83257 - DNA, 20 bp, Artificial Sequence
  Description of Artificial Sequence: Synthetic oligonucleotide
  Target: LAMA2; (-) strand; PAM type: NRG; PAM sequence: TGG
tgcagaggtaatgcatccct

SEQ ID NO: 83258 - DNA, 20 bp, Artificial Sequence
  Description of Artificial Sequence: Synthetic oligonucleotide
  Target: LAMA2; (-) strand; PAM type: NRG; PAM sequence: AGG
ataatgtttataagctgcag

SEQ ID NO: 83259 - DNA, 20 bp, Artificial Sequence
  Description of Artificial Sequence: Synthetic oligonucleotide
  Target: LAMA2; (-) strand; PAM type: NRG; PAM sequence: GAG
cataatgtttataagctgca

SEQ ID NO: 83260 - DNA, 20 bp, Artificial Sequence
  Description of Artificial Sequence: Synthetic oligonucleotide
  Target: LAMA2; (-) strand; PAM type: NRG; PAM sequence: CAG
ttcataatgtttataagctg

SEQ ID NO: 83261 - DNA, 20 bp, Artificial Sequence
  Description of Artificial Sequence: Synthetic oligonucleotide
  Target: LAMA2; (-) strand; PAM type: NRG; PAM sequence: AAG
gtatgcttcataatgtttat

SEQ ID NO: 83262 - DNA, 20 bp, Artificial Sequence
  Description of Artificial Sequence: Synthetic oligonucleotide
  Target: LAMA2; (-) strand; PAM type: NRG; PAM sequence: CAG
ttactataggtaaagtaaat

SEQ ID NO: 83263 - DNA, 20 bp, Artificial Sequence
  Description of Artificial Sequence: Synthetic oligonucleotide
  Target: LAMA2; (-) strand; PAM type: NRG; PAM sequence: AAG
agaactcattactataggta

SEQ ID NO: 83264 - DNA, 20 bp, Artificial Sequence
  Description of Artificial Sequence: Synthetic oligonucleotide
  Target: LAMA2; (-) strand; PAM type: NRG; PAM sequence: AGG
gttatagaactcattactat

SEQ ID NO: 83265 - DNA, 20 bp, Artificial Sequence
  Description of Artificial Sequence: Synthetic oligonucleotide
  Target: LAMA2; (-) strand; PAM type: NRG; PAM sequence: TAG
tgttatagaactcattacta

SEQ ID NO: 83266 - DNA, 20 bp, Artificial Sequence
  Description of Artificial Sequence: Synthetic oligonucleotide
  Target: LAMA2; (-) strand; PAM type: NRG; PAM sequence: TAG
accgtctggtcagaatgtta

SEQ ID NO: 83267 - DNA, 20 bp, Artificial Sequence
  Description of Artificial Sequence: Synthetic oligonucleotide
  Target: LAMA2; (-) strand; PAM type: NRG; PAM sequence: CAG
gtagttatacaccgtctggt

SEQ ID NO: 83268 - DNA, 20 bp, Artificial Sequence
  Description of Artificial Sequence: Synthetic oligonucleotide
  Target: LAMA2; (-) strand; PAM type: NRG; PAM sequence: TGG
taatgtagttatacaccgtc

SEQ ID NO: 83269 - DNA, 20 bp, Artificial Sequence
  Description of Artificial Sequence: Synthetic oligonucleotide
  Target: LAMA2; (-) strand; PAM type: NRG; PAM sequence: TAG
gttcattctctcagctaatg

SEQ ID NO: 83270 - DNA, 20 bp, Artificial Sequence
  Description of Artificial Sequence: Synthetic oligonucleotide
  Target: LAMA2; (-) strand; PAM type: NRG; PAM sequence: CAG
caaagaatggttcattctct

SEQ ID NO: 83271 - DNA, 20 bp, Artificial Sequence
  Description of Artificial Sequence: Synthetic oligonucleotide
  Target: LAMA2; (-) strand; PAM type: NRG; PAM sequence: TGG
atgctaactttttcaaagaa

SEQ ID NO: 83272 - DNA, 20 bp, Artificial Sequence
  Description of Artificial Sequence: Synthetic oligonucleotide
  Target: LAMA2; (-) strand; PAM type: NRG; PAM sequence: AAG
atggtatgctaactttttca

SEQ ID NO: 83273 - DNA, 20 bp, Artificial Sequence
  Description of Artificial Sequence: Synthetic oligonucleotide
  Target: LAMA2; (-) strand; PAM type: NRG; PAM sequence: TGG
ctttcatttttacataagta

SEQ ID NO: 83274 - DNA, 20 bp, Artificial Sequence
  Description of Artificial Sequence: Synthetic oligonucleotide
  Target: LAMA2; (-) strand; PAM type: NRG; PAM sequence: AAG
agtaactttcatttttacat

SEQ ID NO: 83275 - DNA, 20 bp, Artificial Sequence
  Description of Artificial Sequence: Synthetic oligonucleotide
  Target: LAMA2; (-) strand; PAM type: NRG; PAM sequence: TAG
attgaaaataaagaaaaaag

SEQ ID NO: 83276 - DNA, 20 bp, Artificial Sequence
  Description of Artificial Sequence: Synthetic oligonucleotide
  Target: LAMA2; (-) strand; PAM type: NRG; PAM sequence: AAG
ttaattgaaaataaagaaaa

SEQ ID NO: 83277 - DNA, 20 bp, Artificial Sequence
  Description of Artificial Sequence: Synthetic oligonucleotide
  Target: LAMA2; (-) strand; PAM type: NRG; PAM sequence: AAG
tccctctttaattgaaaata

SEQ ID NO: 83278 - DNA, 20 bp, Artificial Sequence
  Description of Artificial Sequence: Synthetic oligonucleotide
  Target: LAMA2; (-) strand; PAM type: NRG; PAM sequence: GGG
aataaaaatatttttaataa

SEQ ID NO: 83279 - DNA, 20 bp, Artificial Sequence
  Description of Artificial Sequence: Synthetic oligonucleotide
  Target: LAMA2; (-) strand; PAM type: NRG; PAM sequence: AGG
taataaaaatatttttaata

SEQ ID NO: 83280 - DNA, 20 bp, Artificial Sequence
  Description of Artificial Sequence: Synthetic oligonucleotide
  Target: LAMA2; (-) strand; PAM type: NRG; PAM sequence: AAG
ttaataaaaatatttttaat

SEQ ID NO: 83281 - DNA, 20 bp, Artificial Sequence
  Description of Artificial Sequence: Synthetic oligonucleotide
  Target: LAMA2; (-) strand; PAM type: NRG; PAM sequence: AGG
gctgccaagataagactaac

SEQ ID NO: 83282 - DNA, 20 bp, Artificial Sequence
  Description of Artificial Sequence: Synthetic oligonucleotide
  Target: LAMA2; (-) strand; PAM type: NRG; PAM sequence: CAG
agctgccaagataagactaa

SEQ ID NO: 83283 - DNA, 20 bp, Artificial Sequence
  Description of Artificial Sequence: Synthetic oligonucleotide
  Target: LAMA2; (-) strand; PAM type: NRG; PAM sequence: AAG
tattttatagctgccaagat

SEQ ID NO: 83284 - DNA, 20 bp, Artificial Sequence
  Description of Artificial Sequence: Synthetic oligonucleotide
  Target: LAMA2; (-) strand; PAM type: NRG; PAM sequence: AAG
tataatattttatagctgcc

SEQ ID NO: 83285 - DNA, 20 bp, Artificial Sequence
  Description of Artificial Sequence: Synthetic oligonucleotide
  Target: LAMA2; (-) strand; PAM type: NRG; PAM sequence: TAG
tataactatataatatttta

SEQ ID NO: 83286 - DNA, 20 bp, Artificial Sequence
  Description of Artificial Sequence: Synthetic oligonucleotide
  Target: LAMA2; (-) strand; PAM type: NRG; PAM sequence: TGG
ctacttatattatggcttaa

SEQ ID NO: 83287 - DNA, 20 bp, Artificial Sequence
  Description of Artificial Sequence: Synthetic oligonucleotide
  Target: LAMA2; (-) strand; PAM type: NRG; PAM sequence: TGG
aatatttactacttatatta

SEQ ID NO: 83288 - DNA, 20 bp, Artificial Sequence
  Description of Artificial Sequence: Synthetic oligonucleotide
  Target: LAMA2; (-) strand; PAM type: NRG; PAM sequence: CAG
tatatttagcttgatatttc

SEQ ID NO: 83289 - DNA, 20 bp, Artificial Sequence
  Description of Artificial Sequence: Synthetic oligonucleotide
  Target: LAMA2; (-) strand; PAM type: NRG; PAM sequence: TAG
gtaactattattattatatt

SEQ ID NO: 83290 - DNA, 20 bp, Artificial Sequence
  Description of Artificial Sequence: Synthetic oligonucleotide
  Target: LAMA2; (-) strand; PAM type: NRG; PAM sequence: AGG
ttatttcagtagttcaaaat

SEQ ID NO: 83291 - DNA, 20 bp, Artificial Sequence
  Description of Artificial Sequence: Synthetic oligonucleotide
  Target: LAMA2; (-) strand; PAM type: NRG; PAM sequence: TAG
attatttcagtagttcaaaa

SEQ ID NO: 83292 - DNA, 20 bp, Artificial Sequence
  Description of Artificial Sequence: Synthetic oligonucleotide
  Target: LAMA2; (-) strand; PAM type: NRG; PAM sequence: TAG
caggagttttattatttcag

SEQ ID NO: 83293 - DNA, 20 bp, Artificial Sequence
  Description of Artificial Sequence: Synthetic oligonucleotide
  Target: LAMA2; (-) strand; PAM type: NRG; PAM sequence: CAG
ccacaggagttttattattt

SEQ ID NO: 83294 - DNA, 20 bp, Artificial Sequence
  Description of Artificial Sequence: Synthetic oligonucleotide
  Target: LAMA2; (-) strand; PAM type: NRG; PAM sequence: GAG
tctgcttactgtgtccacag

SEQ ID NO: 83295 - DNA, 20 bp, Artificial Sequence
  Description of Artificial Sequence: Synthetic oligonucleotide
  Target: LAMA2; (-) strand; PAM type: NRG; PAM sequence: AGG
tttctgcttactgtgtccac

SEQ ID NO: 83296 - DNA, 20 bp, Artificial Sequence
  Description of Artificial Sequence: Synthetic oligonucleotide
  Target: LAMA2; (-) strand; PAM type: NRG; PAM sequence: CAG
ttttctgcttactgtgtcca

SEQ ID NO: 83297 - DNA, 20 bp, Artificial Sequence
  Description of Artificial Sequence: Synthetic oligonucleotide
  Target: LAMA2; (-) strand; PAM type: NRG; PAM sequence: TGG
aactttttactatgggcttg

SEQ ID NO: 83298 - DNA, 20 bp, Artificial Sequence
  Description of Artificial Sequence: Synthetic oligonucleotide
  Target: LAMA2; (-) strand; PAM type: NRG; PAM sequence: GGG
acatggcaactttttactat

SEQ ID NO: 83299 - DNA, 20 bp, Artificial Sequence
  Description of Artificial Sequence: Synthetic oligonucleotide
  Target: LAMA2; (-) strand; PAM type: NRG; PAM sequence: TGG
gacatggcaactttttacta

SEQ ID NO: 83300 - DNA, 20 bp, Artificial Sequence
  Description of Artificial Sequence: Synthetic oligonucleotide
  Target: LAMA2; (-) strand; PAM type: NRG; PAM sequence: TGG
atttactacattccaggaca

SEQ ID NO: 83301 - DNA, 20 bp, Artificial Sequence
  Description of Artificial Sequence: Synthetic oligonucleotide
  Target: LAMA2; (-) strand; PAM type: NRG; PAM sequence: AGG
tagaaaatttactacattcc

SEQ ID NO: 83302 - DNA, 20 bp, Artificial Sequence
  Description of Artificial Sequence: Synthetic oligonucleotide
  Target: LAMA2; (-) strand; PAM type: NRG; PAM sequence: CAG
ttagaaaatttactacattc

SEQ ID NO: 83303 - DNA, 20 bp, Artificial Sequence
  Description of Artificial Sequence: Synthetic oligonucleotide
  Target: LAMA2; (-) strand; PAM type: NRG; PAM sequence: TAG
tggaatgaaatgtaatagat

SEQ ID NO: 83304 - DNA, 20 bp, Artificial Sequence
  Description of Artificial Sequence: Synthetic oligonucleotide
  Target: LAMA2; (-) strand; PAM type: NRG; PAM sequence: TAG
aatattggaatgaaatgtaa

SEQ ID NO: 83305 - DNA, 20 bp, Artificial Sequence
  Description of Artificial Sequence: Synthetic oligonucleotide
  Target: LAMA2; (-) strand; PAM type: NRG; PAM sequence: TGG
tttttcatttcagataatat

SEQ ID NO: 83306 - DNA, 20 bp, Artificial Sequence
  Description of Artificial Sequence: Synthetic oligonucleotide
  Target: LAMA2; (-) strand; PAM type: NRG; PAM sequence: CAG
actcaagcaatttttcattt

SEQ ID NO: 83307 - DNA, 20 bp, Artificial Sequence
  Description of Artificial Sequence: Synthetic oligonucleotide
  Target: LAMA2; (-) strand; PAM type: NRG; PAM sequence: AAG
tacacaatcttggtcaactc

SEQ ID NO: 83308 - DNA, 20 bp, Artificial Sequence
  Description of Artificial Sequence: Synthetic oligonucleotide
  Target: LAMA2; (-) strand; PAM type: NRG; PAM sequence: TGG
cacacactgctacacaatct

SEQ ID NO: 83309 - DNA, 20 bp, Artificial Sequence
  Description of Artificial Sequence: Synthetic oligonucleotide
  Target: LAMA2; (-) strand; PAM type: NRG; PAM sequence: AAG
gaggggaggtgtccttaagc

SEQ ID NO: 83310 - DNA, 20 bp, Artificial Sequence
  Description of Artificial Sequence: Synthetic oligonucleotide
  Target: LAMA2; (-) strand; PAM type: NRG; PAM sequence: AAG
tggagaggggaggtgtcctt

SEQ ID NO: 83311 - DNA, 20 bp, Artificial Sequence
  Description of Artificial Sequence: Synthetic oligonucleotide
  Target: LAMA2; (-) strand; PAM type: NRG; PAM sequence: AGG
acatacaagatggagagggg

SEQ ID NO: 83312 - DNA, 20 bp, Artificial Sequence
  Description of Artificial Sequence: Synthetic oligonucleotide
  Target: LAMA2; (-) strand; PAM type: NRG; PAM sequence: GAG
gacatacaagatggagaggg

SEQ ID NO: 83313 - DNA, 20 bp, Artificial Sequence
  Description of Artificial Sequence: Synthetic oligonucleotide
  Target: LAMA2; (-) strand; PAM type: NRG; PAM sequence: GGG
gagacatacaagatggagag

SEQ ID NO: 83314 - DNA, 20 bp, Artificial Sequence
  Description of Artificial Sequence: Synthetic oligonucleotide
  Target: LAMA2; (-) strand; PAM type: NRG; PAM sequence: GGG
agagacatacaagatggaga

SEQ ID NO: 83315 - DNA, 20 bp, Artificial Sequence
  Description of Artificial Sequence: Synthetic oligonucleotide
  Target: LAMA2; (-) strand; PAM type: NRG; PAM sequence: AGG
cagagacatacaagatggag

SEQ ID NO: 83316 - DNA, 20 bp, Artificial Sequence
  Description of Artificial Sequence: Synthetic oligonucleotide
  Target: LAMA2; (-) strand; PAM type: NRG; PAM sequence: GAG
acagagacatacaagatgga

SEQ ID NO: 83317 - DNA, 20 bp, Artificial Sequence
  Description of Artificial Sequence: Synthetic oligonucleotide
  Target: LAMA2; (-) strand; PAM type: NRG; PAM sequence: GAG
ccacagagacatacaagatg

SEQ ID NO: 83318 - DNA, 20 bp, Artificial Sequence
  Description of Artificial Sequence: Synthetic oligonucleotide
  Target: LAMA2; (-) strand; PAM type: NRG; PAM sequence: TGG
gcccacagagacatacaaga

SEQ ID NO: 83319 - DNA, 20 bp, Artificial Sequence
  Description of Artificial Sequence: Synthetic oligonucleotide
  Target: LAMA2; (-) strand; PAM type: NRG; PAM sequence: AAG
gattgcccacagagacatac

SEQ ID NO: 83320 - DNA, 20 bp, Artificial Sequence
  Description of Artificial Sequence: Synthetic oligonucleotide
  Target: LAMA2; (-) strand; PAM type: NRG; PAM sequence: GAG
agcctgcaggattgcccaca

SEQ ID NO: 83321 - DNA, 20 bp, Artificial Sequence
  Description of Artificial Sequence: Synthetic oligonucleotide
  Target: LAMA2; (-) strand; PAM type: NRG; PAM sequence: CAG
agagcctgcaggattgccca

SEQ ID NO: 83322 - DNA, 20 bp, Artificial Sequence
  Description of Artificial Sequence: Synthetic oligonucleotide
  Target: LAMA2; (-) strand; PAM type: NRG; PAM sequence: AGG
aagatgcactaagagcctgc

SEQ ID NO: 83323 - DNA, 20 bp, Artificial Sequence
  Description of Artificial Sequence: Synthetic oligonucleotide
  Target: LAMA2; (-) strand; PAM type: NRG; PAM sequence: CAG
gaagatgcactaagagcctg

SEQ ID NO: 83324 - DNA, 20 bp, Artificial Sequence
  Description of Artificial Sequence: Synthetic oligonucleotide
  Target: LAMA2; (-) strand; PAM type: NRG; PAM sequence: GAG
tactagagaagatgcactaa

SEQ ID NO: 83325 - DNA, 20 bp, Artificial Sequence
  Description of Artificial Sequence: Synthetic oligonucleotide
  Target: LAMA2; (-) strand; PAM type: NRG; PAM sequence: AAG
aatactagagaagatgcact

SEQ ID NO: 83326 - DNA, 20 bp, Artificial Sequence
  Description of Artificial Sequence: Synthetic oligonucleotide
  Target: LAMA2; (-) strand; PAM type: NRG; PAM sequence: AAG
tgttttgataaatactagag

SEQ ID NO: 83327 - DNA, 20 bp, Artificial Sequence
  Description of Artificial Sequence: Synthetic oligonucleotide
  Target: LAMA2; (-) strand; PAM type: NRG; PAM sequence: GAG
acatgttttgataaatacta

SEQ ID NO: 83328 - DNA, 20 bp, Artificial Sequence
  Description of Artificial Sequence: Synthetic oligonucleotide
  Target: LAMA2; (-) strand; PAM type: NRG; PAM sequence: TAG
agacatgttttgataaatac

SEQ ID NO: 83329 - DNA, 20 bp, Artificial Sequence
  Description of Artificial Sequence: Synthetic oligonucleotide
  Target: LAMA2; (-) strand; PAM type: NRG; PAM sequence: AAG
aaagagaataaagcacacac

SEQ ID NO: 83330 - DNA, 20 bp, Artificial Sequence
  Description of Artificial Sequence: Synthetic oligonucleotide
  Target: LAMA2; (-) strand; PAM type: NRG; PAM sequence: AAG
ggagttttgaaaagagaata

SEQ ID NO: 83331 - DNA, 20 bp, Artificial Sequence
  Description of Artificial Sequence: Synthetic oligonucleotide
  Target: LAMA2; (-) strand; PAM type: NRG; PAM sequence: GAG
tttctgtggagttttgaaaa

SEQ ID NO: 83332 - DNA, 20 bp, Artificial Sequence
  Description of Artificial Sequence: Synthetic oligonucleotide
  Target: LAMA2; (-) strand; PAM type: NRG; PAM sequence: AAG
gatttctgtggagttttgaa

SEQ ID NO: 83333 - DNA, 20 bp, Artificial Sequence
  Description of Artificial Sequence: Synthetic oligonucleotide
  Target: LAMA2; (-) strand; PAM type: NRG; PAM sequence: GAG
aaaggttagagatttctgtg

SEQ ID NO: 83334 - DNA, 20 bp, Artificial Sequence
  Description of Artificial Sequence: Synthetic oligonucleotide
  Target: LAMA2; (-) strand; PAM type: NRG; PAM sequence: TGG
gtaaaggttagagatttctg

SEQ ID NO: 83335 - DNA, 20 bp, Artificial Sequence
  Description of Artificial Sequence: Synthetic oligonucleotide
  Target: LAMA2; (-) strand; PAM type: NRG; PAM sequence: GAG
tgagcaagtggtaaaggtta

SEQ ID NO: 83336 - DNA, 20 bp, Artificial Sequence
  Description of Artificial Sequence: Synthetic oligonucleotide
  Target: LAMA2; (-) strand; PAM type: NRG; PAM sequence: TAG
tttgagcaagtggtaaaggt

SEQ ID NO: 83337 - DNA, 20 bp, Artificial Sequence
  Description of Artificial Sequence: Synthetic oligonucleotide
  Target: LAMA2; (-) strand; PAM type: NRG; PAM sequence: AGG
tttatttgagcaagtggtaa

SEQ ID NO: 83338 - DNA, 20 bp, Artificial Sequence
  Description of Artificial Sequence: Synthetic oligonucleotide
  Target: LAMA2; (-) strand; PAM type: NRG; PAM sequence: AAG
ctttatttgagcaagtggta

SEQ ID NO: 83339 - DNA, 20 bp, Artificial Sequence
  Description of Artificial Sequence: Synthetic oligonucleotide
  Target: LAMA2; (-) strand; PAM type: NRG; PAM sequence: TGG
ctgtcctttatttgagcaag

SEQ ID NO: 83340 - DNA, 20 bp, Artificial Sequence
  Description of Artificial Sequence: Synthetic oligonucleotide
  Target: LAMA2; (-) strand; PAM type: NRG; PAM sequence: AAG
tgactgtcctttatttgagc

SEQ ID NO: 83341 - DNA, 20 bp, Artificial Sequence
  Description of Artificial Sequence: Synthetic oligonucleotide
  Target: LAMA2; (-) strand; PAM type: NRG; PAM sequence: GAG
gttttgactgtcctttattt

SEQ ID NO: 83342 - DNA, 20 bp, Artificial Sequence
  Description of Artificial Sequence: Synthetic oligonucleotide
  Target: LAMA2; (-) strand; PAM type: NRG; PAM sequence: TAG
tttcttttccattttaagct

SEQ ID NO: 83343 - DNA, 20 bp, Artificial Sequence
  Description of Artificial Sequence: Synthetic oligonucleotide
  Target: LAMA2; (-) strand; PAM type: NRG; PAM sequence: AAG
ggaggtttcttttccatttt

SEQ ID NO: 83344 - DNA, 20 bp, Artificial Sequence
  Description of Artificial Sequence: Synthetic oligonucleotide
  Target: LAMA2; (-) strand; PAM type: NRG; PAM sequence: AGG
atatattctagaaactcagg

SEQ ID NO: 83345 - DNA, 20 bp, Artificial Sequence
  Description of Artificial Sequence: Synthetic oligonucleotide
  Target: LAMA2; (-) strand; PAM type: NRG; PAM sequence: GAG
tatatattctagaaactcag

SEQ ID NO: 83346 - DNA, 20 bp, Artificial Sequence
  Description of Artificial Sequence: Synthetic oligonucleotide
  Target: LAMA2; (-) strand; PAM type: NRG; PAM sequence: AGG
tttatatattctagaaactc

SEQ ID NO: 83347 - DNA, 20 bp, Artificial Sequence
  Description of Artificial Sequence: Synthetic oligonucleotide
  Target: LAMA2; (-) strand; PAM type: NRG; PAM sequence: CAG
ttttatatattctagaaact

SEQ ID NO: 83348 - DNA, 20 bp, Artificial Sequence
  Description of Artificial Sequence: Synthetic oligonucleotide
  Target: LAMA2; (-) strand; PAM type: NRG; PAM sequence: TAG
ctgtttgattttatatattc

SEQ ID NO: 83349 - DNA, 20 bp, Artificial Sequence
  Description of Artificial Sequence: Synthetic oligonucleotide
  Target: LAMA2; (-) strand; PAM type: NRG; PAM sequence: AAG
tatgagtggtaggtgtagaa

SEQ ID NO: 83350 - DNA, 20 bp, Artificial Sequence
  Description of Artificial Sequence: Synthetic oligonucleotide
  Target: LAMA2; (-) strand; PAM type: NRG; PAM sequence: TAG
cactgtatgagtggtaggtg

SEQ ID NO: 83351 - DNA, 20 bp, Artificial Sequence
  Description of Artificial Sequence: Synthetic oligonucleotide
  Target: LAMA2; (-) strand; PAM type: NRG; PAM sequence: AGG
atcaccactgtatgagtggt

SEQ ID NO: 83352 - DNA, 20 bp, Artificial Sequence
  Description of Artificial Sequence: Synthetic oligonucleotide
  Target: LAMA2; (-) strand; PAM type: NRG; PAM sequence: TAG
catcaccactgtatgagtgg

SEQ ID NO: 83353 - DNA, 20 bp, Artificial Sequence
  Description of Artificial Sequence: Synthetic oligonucleotide
  Target: LAMA2; (-) strand; PAM type: NRG; PAM sequence: TGG
agacatcaccactgtatgag

SEQ ID NO: 83354 - DNA, 20 bp, Artificial Sequence
  Description of Artificial Sequence: Synthetic oligonucleotide
  Target: LAMA2; (-) strand; PAM type: NRG; PAM sequence: GAG
accagacatcaccactgtat

SEQ ID NO: 83355 - DNA, 20 bp, Artificial Sequence
  Description of Artificial Sequence: Synthetic oligonucleotide
  Target: LAMA2; (-) strand; PAM type: NRG; PAM sequence: CAG
ctccctttccttgcaaatac

SEQ ID NO: 83356 - DNA, 20 bp, Artificial Sequence
  Description of Artificial Sequence: Synthetic oligonucleotide
  Target: LAMA2; (-) strand; PAM type: NRG; PAM sequence: AAG
ctttctcgctatatttacca

SEQ ID NO: 83357 - DNA, 20 bp, Artificial Sequence
  Description of Artificial Sequence: Synthetic oligonucleotide
  Target: LAMA2; (-) strand; PAM type: NRG; PAM sequence: CAG
tcactacagctctcttgctc

SEQ ID NO: 83358 - DNA, 20 bp, Artificial Sequence
  Description of Artificial Sequence: Synthetic oligonucleotide
  Target: LAMA2; (-) strand; PAM type: NRG; PAM sequence: CAG
tggagccctgctaatcacta

SEQ ID NO: 83359 - DNA, 20 bp, Artificial Sequence
  Description of Artificial Sequence: Synthetic oligonucleotide
  Target: LAMA2; (-) strand; PAM type: NRG; PAM sequence: GAG
gctcaaggggctttcccttg

SEQ ID NO: 83360 - DNA, 20 bp, Artificial Sequence
  Description of Artificial Sequence: Synthetic oligonucleotide
  Target: LAMA2; (-) strand; PAM type: NRG; PAM sequence: TGG
tagctcaaggggctttccct

SEQ ID NO: 83361 - DNA, 20 bp, Artificial Sequence
  Description of Artificial Sequence: Synthetic oligonucleotide
  Target: LAMA2; (-) strand; PAM type: NRG; PAM sequence: GGG
caggcagtaagtagctcaag

SEQ ID NO: 83362 - DNA, 20 bp, Artificial Sequence
  Description of Artificial Sequence: Synthetic oligonucleotide
  Target: LAMA2; (-) strand; PAM type: NRG; PAM sequence: GGG
gcaggcagtaagtagctcaa

SEQ ID NO: 83363 - DNA, 20 bp, Artificial Sequence
  Description of Artificial Sequence: Synthetic oligonucleotide
  Target: LAMA2; (-) strand; PAM type: NRG; PAM sequence: AGG
agcaggcagtaagtagctca

SEQ ID NO: 83364 - DNA, 20 bp, Artificial Sequence
  Description of Artificial Sequence: Synthetic oligonucleotide
  Target: LAMA2; (-) strand; PAM type: NRG; PAM sequence: AAG
gagcaggcagtaagtagctc

SEQ ID NO: 83365 - DNA, 20 bp, Artificial Sequence
  Description of Artificial Sequence: Synthetic oligonucleotide
  Target: LAMA2; (-) strand; PAM type: NRG; PAM sequence: TAG
ggctgagagcaggcagtaag

SEQ ID NO: 83366 - DNA, 20 bp, Artificial Sequence
  Description of Artificial Sequence: Synthetic oligonucleotide
  Target: LAMA2; (-) strand; PAM type: NRG; PAM sequence: AAG
ttcggctgagagcaggcagt

SEQ ID NO: 83367 - DNA, 20 bp, Artificial Sequence
  Description of Artificial Sequence: Synthetic oligonucleotide
  Target: LAMA2; (-) strand; PAM type: NRG; PAM sequence: CAG
tgagttcggctgagagcagg

SEQ ID NO: 83368 - DNA, 20 bp, Artificial Sequence
  Description of Artificial Sequence: Synthetic oligonucleotide
  Target: LAMA2; (-) strand; PAM type: NRG; PAM sequence: AGG
tattgagttcggctgagagc

SEQ ID NO: 83369 - DNA, 20 bp, Artificial Sequence
  Description of Artificial Sequence: Synthetic oligonucleotide
  Target: LAMA2; (-) strand; PAM type: NRG; PAM sequence: CAG
atattgagttcggctgagag

SEQ ID NO: 83370 - DNA, 20 bp, Artificial Sequence
  Description of Artificial Sequence: Synthetic oligonucleotide
  Target: LAMA2; (-) strand; PAM type: NRG; PAM sequence: GAG
acaatattgagttcggctga

SEQ ID NO: 83371 - DNA, 20 bp, Artificial Sequence
  Description of Artificial Sequence: Synthetic oligonucleotide
  Target: LAMA2; (-) strand; PAM type: NRG; PAM sequence: GAG
gtacaatattgagttcggct

SEQ ID NO: 83372 - DNA, 20 bp, Artificial Sequence
  Description of Artificial Sequence: Synthetic oligonucleotide
  Target: LAMA2; (-) strand; PAM type: NRG; PAM sequence: CGG
tctcagtacaatattgagtt

SEQ ID NO: 83373 - DNA, 20 bp, Artificial Sequence
  Description of Artificial Sequence: Synthetic oligonucleotide
  Target: LAMA2; (-) strand; PAM type: NRG; PAM sequence: GAG
ataattctcagtacaatatt

SEQ ID NO: 83374 - DNA, 20 bp, Artificial Sequence
  Description of Artificial Sequence: Synthetic oligonucleotide
  Target: LAMA2; (-) strand; PAM type: NRG; PAM sequence: CAG
attaggattataataattct

SEQ ID NO: 83375 - DNA, 20 bp, Artificial Sequence
  Description of Artificial Sequence: Synthetic oligonucleotide
  Target: LAMA2; (-) strand; PAM type: NRG; PAM sequence: AGG
caggaggcatctttcttatt

SEQ ID NO: 83376 - DNA, 20 bp, Artificial Sequence
  Description of Artificial Sequence: Synthetic oligonucleotide
  Target: LAMA2; (-) strand; PAM type: NRG; PAM sequence: TAG
acaggaggcatctttcttat

SEQ ID NO: 83377 - DNA, 20 bp, Artificial Sequence
  Description of Artificial Sequence: Synthetic oligonucleotide
  Target: LAMA2; (-) strand; PAM type: NRG; PAM sequence: AGG
gcttcaagtgtctacacagg

SEQ ID NO: 83378 - DNA, 20 bp, Artificial Sequence
  Description of Artificial Sequence: Synthetic oligonucleotide
  Target: LAMA2; (-) strand; PAM type: NRG; PAM sequence: GAG
agcttcaagtgtctacacag

SEQ ID NO: 83379 - DNA, 20 bp, Artificial Sequence
  Description of Artificial Sequence: Synthetic oligonucleotide
  Target: LAMA2; (-) strand; PAM type: NRG; PAM sequence: AGG
agagcttcaagtgtctacac

SEQ ID NO: 83380 - DNA, 20 bp, Artificial Sequence
  Description of Artificial Sequence: Synthetic oligonucleotide
  Target: LAMA2; (-) strand; PAM type: NRG; PAM sequence: CAG
tagagcttcaagtgtctaca

SEQ ID NO: 83381 - DNA, 20 bp, Artificial Sequence
  Description of Artificial Sequence: Synthetic oligonucleotide
  Target: LAMA2; (-) strand; PAM type: NRG; PAM sequence: AAG
aattgtctgtgtagagcttc

SEQ ID NO: 83382 - DNA, 20 bp, Artificial Sequence
  Description of Artificial Sequence: Synthetic oligonucleotide
  Target: LAMA2; (-) strand; PAM type: NRG; PAM sequence: GAG
gcattttaattgtctgtgta

SEQ ID NO: 83383 - DNA, 20 bp, Artificial Sequence
  Description of Artificial Sequence: Synthetic oligonucleotide
  Target: LAMA2; (-) strand; PAM type: NRG; PAM sequence: TAG
ttgcattttaattgtctgtg

SEQ ID NO: 83384 - DNA, 20 bp, Artificial Sequence
  Description of Artificial Sequence: Synthetic oligonucleotide
  Target: LAMA2; (-) strand; PAM type: NRG; PAM sequence: AGG
taagatatcacatggtagaa

SEQ ID NO: 83385 - DNA, 20 bp, Artificial Sequence
  Description of Artificial Sequence: Synthetic oligonucleotide
  Target: LAMA2; (-) strand; PAM type: NRG; PAM sequence: AAG
ttaagatatcacatggtaga

SEQ ID NO: 83386 - DNA, 20 bp, Artificial Sequence
  Description of Artificial Sequence: Synthetic oligonucleotide
  Target: LAMA2; (-) strand; PAM type: NRG; PAM sequence: TAG
ctatttaagatatcacatgg

SEQ ID NO: 83387 - DNA, 20 bp, Artificial Sequence
  Description of Artificial Sequence: Synthetic oligonucleotide
  Target: LAMA2; (-) strand; PAM type: NRG; PAM sequence: TGG
tttctatttaagatatcaca

SEQ ID NO: 83388 - DNA, 20 bp, Artificial Sequence
  Description of Artificial Sequence: Synthetic oligonucleotide
  Target: LAMA2; (-) strand; PAM type: NRG; PAM sequence: AAG
gaacttacagttttctattt

SEQ ID NO: 83389 - DNA, 20 bp, Artificial Sequence
  Description of Artificial Sequence: Synthetic oligonucleotide
  Target: LAMA2; (-) strand; PAM type: NRG; PAM sequence: CAG
atttagtttataagaactta

SEQ ID NO: 83390 - DNA, 20 bp, Artificial Sequence
  Description of Artificial Sequence: Synthetic oligonucleotide
  Target: LAMA2; (-) strand; PAM type: NRG; PAM sequence: AAG
cctgaaacaatttagtttat

SEQ ID NO: 83391 - DNA, 20 bp, Artificial Sequence
  Description of Artificial Sequence: Synthetic oligonucleotide
  Target: LAMA2; (-) strand; PAM type: NRG; PAM sequence: TAG
tttttaatcctgaaacaatt

SEQ ID NO: 83392 - DNA, 20 bp, Artificial Sequence
  Description of Artificial Sequence: Synthetic oligonucleotide
  Target: LAMA2; (-) strand; PAM type: NRG; PAM sequence: AAG
ttatgaaacttgctttctgc

SEQ ID NO: 83393 - DNA, 20 bp, Artificial Sequence
  Description of Artificial Sequence: Synthetic oligonucleotide
  Target: LAMA2; (-) strand; PAM type: NRG; PAM sequence: TAG
ttgtgatttttataattatg

SEQ ID NO: 83394 - DNA, 20 bp, Artificial Sequence
  Description of Artificial Sequence: Synthetic oligonucleotide
  Target: LAMA2; (-) strand; PAM type: NRG; PAM sequence: TGG
cattttgatataactcatcg

SEQ ID NO: 83395 - DNA, 20 bp, Artificial Sequence
  Description of Artificial Sequence: Synthetic oligonucleotide
  Target: LAMA2; (-) strand; PAM type: NRG; PAM sequence: TAG
agactgtaggcacttaattg

SEQ ID NO: 83396 - DNA, 20 bp, Artificial Sequence
  Description of Artificial Sequence: Synthetic oligonucleotide
  Target: LAMA2; (-) strand; PAM type: NRG; PAM sequence: AGG
ttttttaaacaagagactgt

SEQ ID NO: 83397 - DNA, 20 bp, Artificial Sequence
  Description of Artificial Sequence: Synthetic oligonucleotide
  Target: LAMA2; (-) strand; PAM type: NRG; PAM sequence: TAG
attttttaaacaagagactg

SEQ ID NO: 83398 - DNA, 20 bp, Artificial Sequence
  Description of Artificial Sequence: Synthetic oligonucleotide
  Target: LAMA2; (-) strand; PAM type: NRG; PAM sequence: GAG
attaattattttttaaacaa

SEQ ID NO: 83399 - DNA, 20 bp, Artificial Sequence
  Description of Artificial Sequence: Synthetic oligonucleotide
  Target: LAMA2; (-) strand; PAM type: NRG; PAM sequence: AAG
ttattaattattttttaaac

SEQ ID NO: 83400 - DNA, 20 bp, Artificial Sequence
  Description of Artificial Sequence: Synthetic oligonucleotide
  Target: LAMA2; (-) strand; PAM type: NRG; PAM sequence: AGG
gcatattttgttgaaatgct

SEQ ID NO: 83401 - DNA, 20 bp, Artificial Sequence
  Description of Artificial Sequence: Synthetic oligonucleotide
  Target: LAMA2; (-) strand; PAM type: NRG; PAM sequence: TAG
tgcatattttgttgaaatgc

SEQ ID NO: 83402 - DNA, 20 bp, Artificial Sequence
  Description of Artificial Sequence: Synthetic oligonucleotide
  Target: LAMA2; (-) strand; PAM type: NRG; PAM sequence: CAG
cactacactaagtgtctttt

SEQ ID NO: 83403 - DNA, 20 bp, Artificial Sequence
  Description of Artificial Sequence: Synthetic oligonucleotide
  Target: LAMA2; (-) strand; PAM type: NRG; PAM sequence: AAG
gtatttaaatacactacact

SEQ ID NO: 83404 - DNA, 20 bp, Artificial Sequence
  Description of Artificial Sequence: Synthetic oligonucleotide
  Target: LAMA2; (-) strand; PAM type: NRG; PAM sequence: CAG
cactacactaagtgtctttt

SEQ ID NO: 83405 - DNA, 20 bp, Artificial Sequence
  Description of Artificial Sequence: Synthetic oligonucleotide
  Target: LAMA2; (-) strand; PAM type: NRG; PAM sequence: AAG
gtatttaaatacactacact

SEQ ID NO: 83406 - DNA, 20 bp, Artificial Sequence
  Description of Artificial Sequence: Synthetic oligonucleotide
  Target: LAMA2; (-) strand; PAM type: NRG; PAM sequence: CAG
tgttacattaagtgtctttt

SEQ ID NO: 83407 - DNA, 20 bp, Artificial Sequence
  Description of Artificial Sequence: Synthetic oligonucleotide
  Target: LAMA2; (-) strand; PAM type: NRG; PAM sequence: AAG
acagtatgaactgttacatt

SEQ ID NO: 83408 - DNA, 20 bp, Artificial Sequence
  Description of Artificial Sequence: Synthetic oligonucleotide
  Target: LAMA2; (-) strand; PAM type: NRG; PAM sequence: CAG
caaatcatgtttttgtgaaa

SEQ ID NO: 83409 - DNA, 20 bp, Artificial Sequence
  Description of Artificial Sequence: Synthetic oligonucleotide
  Target: LAMA2; (-) strand; PAM type: NRG; PAM sequence: CAG
atccatgctgtttttacaat

SEQ ID NO: 83410 - DNA, 20 bp, Artificial Sequence
  Description of Artificial Sequence: Synthetic oligonucleotide
  Target: LAMA2; (-) strand; PAM type: NRG; PAM sequence: CAG
ataaaattttgcttcttaag

SEQ ID NO: 83411 - DNA, 20 bp, Artificial Sequence
  Description of Artificial Sequence: Synthetic oligonucleotide
  Target: LAMA2; (-) strand; PAM type: NRG; PAM sequence: AAG
tcaataaaattttgcttctt

SEQ ID NO: 83412 - DNA, 20 bp, Artificial Sequence
  Description of Artificial Sequence: Synthetic oligonucleotide
  Target: LAMA2; (-) strand; PAM type: NRG; PAM sequence: TAG
aatttatatctccaatattt

SEQ ID NO: 83413 - DNA, 20 bp, Artificial Sequence
  Description of Artificial Sequence: Synthetic oligonucleotide
  Target: LAMA2; (-) strand; PAM type: NRG; PAM sequence: TGG
ctaacttggatagaaatata

SEQ ID NO: 83414 - DNA, 20 bp, Artificial Sequence
  Description of Artificial Sequence: Synthetic oligonucleotide
  Target: LAMA2; (-) strand; PAM type: NRG; PAM sequence: TAG
tttaaagttactaacttgga

SEQ ID NO: 83415 - DNA, 20 bp, Artificial Sequence
  Description of Artificial Sequence: Synthetic oligonucleotide
  Target: LAMA2; (-) strand; PAM type: NRG; PAM sequence: TGG
cttatttaaagttactaact

SEQ ID NO: 83416 - DNA, 20 bp, Artificial Sequence
  Description of Artificial Sequence: Synthetic oligonucleotide
  Target: LAMA2; (-) strand; PAM type: NRG; PAM sequence: AAG
tacagataaatacttattta

SEQ ID NO: 83417 - DNA, 20 bp, Artificial Sequence
  Description of Artificial Sequence: Synthetic oligonucleotide
  Target: LAMA2; (-) strand; PAM type: NRG; PAM sequence: CAG
atttatattatttctattta

SEQ ID NO: 83418 - DNA, 20 bp, Artificial Sequence
  Description of Artificial Sequence: Synthetic oligonucleotide
  Target: LAMA2; (-) strand; PAM type: NRG; PAM sequence: GAG
taaggttaataagcattttg

SEQ ID NO: 83419 - DNA, 20 bp, Artificial Sequence
  Description of Artificial Sequence: Synthetic oligonucleotide
  Target: LAMA2; (-) strand; PAM type: NRG; PAM sequence: TGG
tttaaggttaataagcattt

SEQ ID NO: 83420 - DNA, 20 bp, Artificial Sequence
  Description of Artificial Sequence: Synthetic oligonucleotide
  Target: LAMA2; (-) strand; PAM type: NRG; PAM sequence: AAG
tacaaatgtttaaggttaat

SEQ ID NO: 83421 - DNA, 20 bp, Artificial Sequence
  Description of Artificial Sequence: Synthetic oligonucleotide
  Target: LAMA2; (-) strand; PAM type: NRG; PAM sequence: AGG
aataaaggtacaaatgttta

SEQ ID NO: 83422 - DNA, 20 bp, Artificial Sequence
  Description of Artificial Sequence: Synthetic oligonucleotide
  Target: LAMA2; (-) strand; PAM type: NRG; PAM sequence: AAG
gaataaaggtacaaatgttt

SEQ ID NO: 83423 - DNA, 20 bp, Artificial Sequence
  Description of Artificial Sequence: Synthetic oligonucleotide
  Target: LAMA2; (-) strand; PAM type: NRG; PAM sequence: AGG
gttatagtataagagaataa

SEQ ID NO: 83424 - DNA, 20 bp, Artificial Sequence
  Description of Artificial Sequence: Synthetic oligonucleotide
  Target: LAMA2; (-) strand; PAM type: NRG; PAM sequence: AAG
tgttatagtataagagaata

SEQ ID NO: 83425 - DNA, 20 bp, Artificial Sequence
  Description of Artificial Sequence: Synthetic oligonucleotide
  Target: LAMA2; (-) strand; PAM type: NRG; PAM sequence: GAG
actcatatgttatagtataa

SEQ ID NO: 83426 - DNA, 20 bp, Artificial Sequence
  Description of Artificial Sequence: Synthetic oligonucleotide
  Target: LAMA2; (-) strand; PAM type: NRG; PAM sequence: AAG
aaactcatatgttatagtat

SEQ ID NO: 83427 - DNA, 20 bp, Artificial Sequence
  Description of Artificial Sequence: Synthetic oligonucleotide
  Target: LAMA2; (-) strand; PAM type: NRG; PAM sequence: TAG
atttaaaaactcatatgtta

SEQ ID NO: 83428 - DNA, 20 bp, Artificial Sequence
  Description of Artificial Sequence: Synthetic oligonucleotide
  Target: LAMA2; (-) strand; PAM type: NRG; PAM sequence: AAG
aaatgtcttcacacttcagt

SEQ ID NO: 83429 - DNA, 20 bp, Artificial Sequence
  Description of Artificial Sequence: Synthetic oligonucleotide
  Target: LAMA2; (-) strand; PAM type: NRG; PAM sequence: CAG
ttaaaaatgtcttcacactt

SEQ ID NO: 83430 - DNA, 20 bp, Artificial Sequence
  Description of Artificial Sequence: Synthetic oligonucleotide
  Target: LAMA2; (-) strand; PAM type: NRG; PAM sequence: AAG
aggcccaagacttcctaatg

SEQ ID NO: 83431 - DNA, 20 bp, Artificial Sequence
  Description of Artificial Sequence: Synthetic oligonucleotide
  Target: LAMA2; (-) strand; PAM type: NRG; PAM sequence: AAG
aacaaaaaacaattaggccc

SEQ ID NO: 83432 - DNA, 20 bp, Artificial Sequence
  Description of Artificial Sequence: Synthetic oligonucleotide
  Target: LAMA2; (-) strand; PAM type: NRG; PAM sequence: AGG
ttataaaacaaaaaacaatt

SEQ ID NO: 83433 - DNA, 20 bp, Artificial Sequence
  Description of Artificial Sequence: Synthetic oligonucleotide
  Target: LAMA2; (-) strand; PAM type: NRG; PAM sequence: TAG
tttataaaacaaaaaacaat

SEQ ID NO: 83434 - DNA, 20 bp, Artificial Sequence
  Description of Artificial Sequence: Synthetic oligonucleotide
  Target: LAMA2; (-) strand; PAM type: NRG; PAM sequence: CAG
gaaatgggctcatcacagag

SEQ ID NO: 83435 - DNA, 20 bp, Artificial Sequence
  Description of Artificial Sequence: Synthetic oligonucleotide
  Target: LAMA2; (-) strand; PAM type: NRG; PAM sequence: GAG
actgaaatgggctcatcaca

SEQ ID NO: 83436 - DNA, 20 bp, Artificial Sequence
  Description of Artificial Sequence: Synthetic oligonucleotide
  Target: LAMA2; (-) strand; PAM type: NRG; PAM sequence: CAG
caactgaaatgggctcatca

SEQ ID NO: 83437 - DNA, 20 bp, Artificial Sequence
  Description of Artificial Sequence: Synthetic oligonucleotide
  Target: LAMA2; (-) strand; PAM type: NRG; PAM sequence: GGG
aatacagcctcaactgaaat

SEQ ID NO: 83438 - DNA, 20 bp, Artificial Sequence
  Description of Artificial Sequence: Synthetic oligonucleotide
  Target: LAMA2; (-) strand; PAM type: NRG; PAM sequence: TGG
taatacagcctcaactgaaa

SEQ ID NO: 83439 - DNA, 20 bp, Artificial Sequence
  Description of Artificial Sequence: Synthetic oligonucleotide
  Target: LAMA2; (-) strand; PAM type: NRG; PAM sequence: CAG
tacccacaggaaaaataata

SEQ ID NO: 83440 - DNA, 20 bp, Artificial Sequence
  Description of Artificial Sequence: Synthetic oligonucleotide
  Target: LAMA2; (-) strand; PAM type: NRG; PAM sequence: AGG
cagtatgtcattttacccac
